United States Patent Application Publication US 2014/0259212 A1 - sequence listing, part 2

SEQ ID NO: 422 - protein, 289 aa, Oryza sativa (japonica cultivar-group)
MAGLDLGTSYLHHHQSLHLRHDDGGAGSDDGGHDDLSPGSGGGGGPSSTAGGAGIGGGEVVARRPRGRPPGSKNKPKPPVIITRESANALRAHILEVAAGCDVFEALTAYARRRQRGVCVLSAAGTVANVTLRQPQSAQPGPASPAVATLHGRFEILSLAGSFLPPPAPPGATSLAAFLAGGQGQVVGGSVAGALIAAGPVVVVAASFSNVAYERLPLEDGDEVVPPAPAGSDQGGGGSGGMPPLGVDPSGGAATGGLPFFNMPFGMPPMPVDGHAGWPGAGVGRPPFS

SEQ ID NO: 423 - DNA, 708 bp, Oryza sativa (japonica cultivar-group)
  CDS (1)..(708)
atggcgtccaaggagccaagcggcgaccacgaccacgagatgaacgggaccagcgccgggggcggcgagcccaaggacggcgcggtggtgaccggccgcaaccggcgcccccgcggacggccgccgggctccaagaacaagcccaagccgcccatcttcgtgacgcgggacagcccgaacgcgctgcgcagccacgtcatggaggtggccggcggcgccgatgtcgccgagtccatcgcgcacttcgcgcggcggcggcagcgcggcgtctgcgtgctcagcggggccggcaccgtgaccgacgtggccctgcgccagccggccgcgccgagcgccgtggtggcgctccgtgggcggttcgagatcctgtccctgacggggacgttcctgccggggccggcgccgccgggctccaccgggctgaccgtgtacctcgccggcgggcaggggcaggtggtgggcggcagcgtggtggggacgctcaccgcggcggggccggtcatggtgatcgcctccaccttcgccaacgccacctacgagaggctgccgctggatcaggaggaggaggaagcagcggcaggcggcatgatggcgccgccgccactcatggccggcgccgccgatccactacttttcggcgggggaatgcacgacgccgggcttgctgcatggcaccatgcccgccctccgccgccgccgccctactag

SEQ ID NO: 424 - protein, 235 aa, Oryza sativa (japonica cultivar-group)
MASKEPSGDHDHEMNGTSAGGGEPKDGAVVTGRNRRPRGRPPGSKNKPKPPIFVTRDSPNALRSHVMEVAGGADVAESIAHFARRRQRGVCVLSGAGTVTDVALRQPAAPSAVVALRGRFEILSLTGTFLPGPAPPGSTGLTVYLAGGQGQVVGGSVVGTLTAAGPVMVIASTFANATYERLPLDQEEEEAAAGGMMAPPPLMAGAADPLLFGGGMHDAGLAAWHHARPPPPPPY

SEQ ID NO: 425 - DNA, 1101 bp, Oryza sativa (japonica cultivar-group)
  CDS (1)..(1101)
atgcacatggagggaggggagggcattgctgtagcaggtgcaggtggtggccatgaagccggcttcggtttgttcagagcggccgatgtgaccatgacagaggcgcaagaagcagccaaggagtaccagtcttctccctcctcgccgtcgacgtctcctactccttccccgccgccggttgctgcctccggccatggaggggaggccgctgcaacgccgaccatgtggagtttgggcggcgagaagatgccgagtgaggctgcaggggacaacggcatgcagatgtcaggccacagtgagcatgctagcttgagctccggacggcgtaggggccggccaaaagggtccgggagacgccagatcctagccactctaggggaatggtatgcgctatcagctggagggagcttcacccctcatgtcatcatcgtaggcacaggggaggatgtggcggggcgcataatgtccttctctcagaagggtccacgctcgatttgcatcctctctgccaatgggaccatctccaatgtggcattgagccagcctggctcgtccggtagcaccttcacctacgagggtcggtttgagattctgcaactgactggctcctttacaatggcggaagaaggtggtcggaggagaactggtgggctcagtgtatcgcttgccggtcctgatggccgtgtcgttggtggtgtagtagctgggatgctgcgtgccgcaagccctattcaggtgattgtggggagcttcctgcccaacagcctaaagcagcatcagaggaggatgggcctacaacagcaaccatctgctgccccggcactaccaccgcctatggctccacctcctgtgctcacagctgcaatgcctatctctcaggcagctcctggaactaatggttgccatgcgccgcaggtctcatctatgcatccgcaagcccacaccggtgtaatggagcacagtgcaacagccagtggcgccatgaaccttaacagctcaagctccacaggtttcaccatggttgggtggccagtcagctcacagtccatggggcacaggccttcacctgacatcaatgtctgcttaactcctcaggagtag

SEQ ID NO: 426 - protein, 366 aa, Oryza sativa (japonica cultivar-group)
MHMEGGEGIAVAGAGGGHEAGFGLFRAADVTMTEAQEAAKEYQSSPSSPSTSPTPSPPPVAASGHGGEAAATPTMWSLGGEKMPSEAAGDNGMQMSGHSEHASLSSGRRRGRPKGSGRRQILATLGEWYALSAGGSFTPHVIIVGTGEDVAGRIMSFSQKGPRSICILSANGTISNVALSQPGSSGSTFTYEGRFEILQLTGSFTMAEEGGRRRTGGLSVSLAGPDGRVVGGVVAGMLRAASPIQVIVGSFLPNSLKQHQRRMGLQQQPSAAPALPPPMAPPPVLTAAMPISQAAPGTNGCHAPQVSSMHPQAHTGVMEHSATASGAMNLNSSSSTGFTMVGWPVSSQSMGHRPSPDINVCLTPQE

SEQ ID NO: 427 - DNA, 1137 bp, Arabidopsis thaliana
  CDS (1)..(1137)
atggatgggagagaagctatggcatttccaggctcgcattctcagttctatcttcagagaggagtttttaccaatcttacaccttcccaggtcgcgagtggtcttcacgcgccgccgccacctccgggaatgaggccaatgtcaaaccctaacattcaccaccctcaggctagcaatccaggacctcctttctccatggctgagcacaggcattctgatttcggacacagcattcacatggggatggcttctcctgctgcggtgcagcctactctgcagctgccgcctccaccgtcggagcaaccgatggttaagaagaaacgtggaaggccaagaaagtatgttcctgatggacaagtttcattggggctttctccaatgccttgtgttagtaaaaagtctaaggactcttcttcaatgtctgatcctaatgcacctaaaagagccagaggtcgacctcccggaactggaaggaagcaacgcttggctaatcttggtgagtggatgaatacatcagctggacttgcttttgcacctcatgtgatcagtgttggatcaggagaagatattgtttcgaaagttttgtctttttcacaaaaaagacctcgggctctttgtataatgtcaggcactggaacggtttcttcagtcactctgcgtgaacccgcttcaacaacgccttccttaacatttgagggacgttttgagattctaagtttaggtggatcttatctggtgaatgaagaaggtggatccaaaagtcgaacaggcggtttgagtgtctctctttctggtcctgaaggtcatgttatcggcggtggaattggaatgcttatcgcagccagcctcgttcaggtggtggcttgtagtttcgtgtacggagcaagtgcaaagtctaataataacaataacaagaccatcaaacaagaaataaaacctaagcaagagccgaccaatagcgaaatggagaccacacctggtagtgcaccagaagctgcagcatcgacgggtcagcatacgccacagaacttcccagctcagggaatgagcggatggcccgtttcaggctcaggctcaggcagatcacttgactctagcagaaacccactcactgatattgacttgactcgcgggtga

SEQ ID NO: 428 - protein, 378 aa, Arabidopsis thaliana
MDGREAMAFPGSHSQFYLQRGVFTNLTPSQVASGLHAPPPPPGMRPMSNPNIHHPQASNPGPPFSMAEHRHSDFGHSIHMGMASPAAVQPTLQLPPPPSEQPMVKKKRGRPRKYVPDGQVSLGLSPMPCVSKKSKDSSSMSDPNAPKRARGRPPGTGRKQRLANLGEWMNTSAGLAFAPHVISVGSGEDIVSKVLSFSQKRPRALCIMSGTGTVSSVTLREPASTTPSLTFEGRFEILSLGGSYLVNEEGGSKSRTGGLSVSLSGPEGHVIGGGIGMLIAASLVQVVACSFVYGASAKSNNNNNKTIKQEIKPKQEPTNSEMETTPGSAPEAAASTGQHTPQNFPAQGMSGWPVSGSGSGRSLDSSRNPLTDIDLTRG

SEQ ID NO: 429 - DNA, 909 bp, Arabidopsis thaliana
  CDS (1)..(909)
atggacggtggttacgatcaatccggaggagcttctagatactttcacaacctcttcaggcctgagcttcatcaccagcttcaacctcagcctcaacttcaccctttgcctcagcctcagcctcaacctcagcctcagcagcagaattcagatgatgaatctgactccaacaaggatccgggttccgacccagttacctctggttcaaccgggaaacgtccacgtggacgtcctccgggatccaagaacaagccgaagccaccggtgatagtgactagagatagccccaacgtgcttagatctcatgttcttgaagtctcatctggagccgacatagtcgagagcgttaccacttacgctcgcaggagaggaagaggagtctccattctcagtggtaacggcacggtggctaacgtcagtctccggcagccggcaacgacagcggctcatggggcaaatggtggaaccggaggtgttgtggctctacatggaaggtttgagatactttccctcacaggtacggtgttgccgccccctgcgccgccaggatccggtggtctttctatctttctttccggcgttcaaggtcaggtgattggaggaaacgtggtggctccgcttgtggcttcgggtccagtgatactaatggctgcatcgttctctaatgcaactttcgaaaggcttccccttgaagatgaaggaggagaaggtggagagggaggagaagttggagagggaggaggaggagaaggtggtccaccgccggccacgtcatcatcaccaccatctggagccggtcaaggacagttaagaggtaacatgagtggttatgatcagtttgccggtgatcctcatttgcttggttggggagccgcagccgcagccgcaccaccaagaccagccttttag

SEQ ID NO: 430 - protein, 302 aa, Arabidopsis thaliana
MDGGYDQSGGASRYFHNLFRPELHHQLQPQPQLHPLPQPQPQPQPQQQNSDDESDSNKDPGSDPVTSGSTGKRPRGRPPGSKNKPKPPVIVTRDSPNVLRSHVLEVSSGADIVESVTTYARRRGRGVSILSGNGTVANVSLRQPATTAAHGANGGTGGVVALHGRFEILSLTGTVLPPPAPPGSGGLSIFLSGVQGQVIGGNVVAPLVASGPVILMAASFSNATFERLPLEDEGGEGGEGGEVGEGGGGEGGPPPATSSSPPSGAGQGQLRGNMSGYDQFAGDPHLLGWGAAAAAAPPRPAF

SEQ ID NO: 431 - DNA, 858 bp, Arabidopsis thaliana
  CDS (1)..(858)
atggctggtctcgatctaggcacaacttctcgctacgtccacaacgtcgatggtggcggcggcggacagttcaccaccgacaaccaccacgaagatgacggtggcgctggaggaaaccaccatcatcaccatcataatcataatcaccatcaaggtttagatttaatagcttctaatgataactctggactaggcggcggtggaggaggagggagcggtgacctcgtcatgcgtcggccacgtggccgtccagctggatcgaagaacaaaccgaagccgccggtgattgtcacgcgcgagagcgcaaacactcttagggctcacattcttgaagttggaagtggctgcgacgttttcgaatgtatctccacttacgctcgtcggagacagcgcgggatttgcgttttatccgggacgggaaccgtcactaacgtcagcatccgtcagcctacggcggccggagctgttgtgactctgcggggtacttttgagattctttccctctccggatcttttcttccgccacctgctcctccaggggcgactagcttgacgatattcctcgctggagctcaaggacaggtcgtcggaggtaacgtagttggtgagttaatggcggcggggccggtaatggtcatggcagcgtcttttacaaacgtggcttacgaaaggttgcctttggacgagcatgaggagcacttgcaaagtggcggcggcggaggtggagggaatatgtactcggaagccactggcggtggcggagggttgcctttctttaatttgccgatgagtatgcctcagattggagttgaaagttggcaggggaatcacgccggcgccggtagggctccgttttag

SEQ ID NO: 432 - protein, 285 aa, Arabidopsis thaliana
MAGLDLGTTSRYVHNVDGGGGGQFTTDNHHEDDGGAGGNHHHHHHNHNHHQGLDLIASNDNSGLGGGGGGGSGDLVMRRPRGRPAGSKNKPKPPVIVTRESANTLRAHILEVGSGCDVFECISTYARRRQRGICVLSGTGTVTNVSIRQPTAAGAVVTLRGTFEILSLSGSFLPPPAPPGATSLTIFLAGAQGQVVGGNVVGELMAAGPVMVMAASFTNVAYERLPLDEHEEHLQSGGGGGGGNMYSEATGGGGGLPFFNLPMSMPQIGVESWQGNHAGAGRAPF

SEQ ID NO: 433 - DNA, 774 bp, Arabidopsis thaliana
  CDS (1)..(774)
atggctggaggtacagctctaactccaacctctgtaggatccaagtctgttccaatgaggaaccatgaagcaacagagagaggcaacaccaacaacaacctgagagcattacccaaagccgtccaaccggtttcatcaatcgaaggagagatggctaagaggccacgtggcagacccgctggctccaagaacaaacccaaaccaccaatcattgtgactcacgacagtccaaattccctcagagctaacgccgttgagatcagctcaggttgtgacatctgtgagactttatcggattttgcaagaaggaaacagagaggtctctgcattctcagtgccaatggttgtgtcaccaatgtgacattaaggcaaccagcttcatcaggagcaattgtcacattacacggacgttacgagatcctctcattgcttggatcaatcttgcctccaccagcaccacttggaataactggtctgaccatttacttagccggacctcaaggacaggttgttggtggaggagtggttggtgggctaatcgcatctggtcctgttgttctcatggctgcatctttcatgaatgctgtttttgatcgtcttcctatggatgatgatgaagctgcctctatgcagaaccagcagtactaccagaatggaagatcccgtcctttagatgacattcatggactgcctcaaaatctgctcactaatggaaactcggcttctgatatctactcttgggggcctgcgcagcgtgtcatgtcgaaaccttaa

SEQ ID NO: 434 - protein, 257 aa, Arabidopsis thaliana
MAGGTALTPTSVGSKSVPMRNHEATERGNTNNNLRALPKAVQPVSSIEGEMAKRPRGRPAGSKNKPKPPIIVTHDSPNSLRANAVEISSGCDICETLSDFARRKQRGLCILSANGCVTNVTLRQPASSGAIVTLHGRYEILSLLGSILPPPAPLGITGLTIYLAGPQGQVVGGGVVGGLIASGPVVLMAASFMNAVFDRLPMDDDEAASMQNQQYYQNGRSRPLDDIHGLPQNLLTNGNSASDIYSWGPAQRVMSKP

SEQ ID NO: 435 - DNA, 954 bp, Arabidopsis thaliana
  CDS (1)..(954)
atggatcaggtctctcgctctcttcctccaccttttctctcaagagatctccatcttcacccacaccatcaattccagcatcagcagcagcagcagcaacagaatcacggccacgatatagaccagcaccgaatcggtgggctaaaacgtgaccgagatgctgatatcgatcccaacgagcactcttcagccggaaaagatcaaagtactcctggctccggtggagaaagcggcggcggaggaggaggagataatcacatcacgagaaggccacgtggcagaccagcgggatctaagaacaaaccaaaaccgccaatcatcatcactcgagacagcgcaaacgctctcaaatctcatgtcatggaagtagcaaacggatgtgacgtcatggaaagtgtcaccgtcttcgctcgccgtcgccaacgtggcatctgcgttttgagcggaaacggcgccgttaccaacgttaccataagacaaccagcttcagtacctggtggtggctcatctgtcgttaacttacacggacgtttcgagattctttctctctcgggatcattccttcctcctccggctccaccagctgcgtcaggtctaacgatttacttagccggtggtcagggacaggttgttggaggaagcgtggttggtccactcatggcttcaggacctgtagtgattatggcagcttcgtttggaaacgctgcgtatgagagactgccgttggaggaagacgatcaagaagagcaaacagctggagcggttgctaataatatcgatggaaacgcaacaatgggtggtggaacgcaaacgcaaactcagacgcagcagcaacagcaacaacagttgatgcaagatccgacgtcgtttatacaagggttgcctccgaatcttatgaattctgttcaattgccagctgaagcttattggggaactccgagaccatctttctaa

SEQ ID NO: 436 - protein, 317 aa, Arabidopsis thaliana
MDQVSRSLPPPFLSRDLHLHPHHQFQHQQQQQQQNHGHDIDQHRIGGLKRDRDADIDPNEHSSAGKDQSTPGSGGESGGGGGGDNHITRRPRGRPAGSKNKPKPPIIITRDSANALKSHVMEVANGCDVMESVTVFARRRQRGICVLSGNGAVTNVTIRQPASVPGGGSSVVNLHGRFEILSLSGSFLPPPAPPAASGLTIYLAGGQGQVVGGSVVGPLMASGPVVIMAASFGNAAYERLPLEEDDQEEQTAGAVANNIDGNATMGGGTQTQTQTQQQQQQQLMQDPTSFIQGLPPNLMNSVQLPAEAYWGTPRPSF

SEQ ID NO: 437 - DNA, 1047 bp, Arabidopsis thaliana
  CDS (1)..(1047)
atggatcgaagagatgcaatgggattatccgggtcaggttcttactatatccatagaggattatccgggtcgggtcctccaacgtttcatggatcaccacagcaacagcaaggtcttcgtcacttacctaatcaaaactctccattcgggtcaggctccactggtttcggatctccttctttacacggtgatccttctctggcaacagcagccggaggagccggagctcttcctcatcatatcggcgttaatatgattgctcctcctccacctcccagtgaaactccgatgaaacgaaagagaggacggcctagaaaatacggtcaagacggctctgtttctttggctctgtcgtcttcctctgtttcgaccattactcccaacaactctaacaaacgcggccgtggtcgacctccgggctccggcaagaaacagagaatggcttccgttggtgaactgatgccttcatcttctggaatgagcttcacgccacatgttatcgcggtttcaataggagaagatattgcatcaaaggttatagctttctctcaacaaggtccgagagccatttgcgttttatctgcaagtggtgcagtctctactgcaacacttattcaaccatcagcatctcccggagccattaaatacgagggccggtttgaaatcctagcgttatcaacatcttatatagtggcaactgatggaagcttccgtaaccgaactggaaacttatcggtttcgcttgctagccccgatgggcgtgtgattggcggtgccattggtgggcctttaatagctgcaagtcctgttcaggttattgtagggagctttatatgggcagctccaaagatcaagagcaagaaacgagaagaagaagcttctgaagttgttcaagaaactgatgatcaccacgttctggacaataataacaacacgatttcgcctgtccctcagcagcagccaaaccaaaacctgatttggtcaacaggttcaaggcaaatggatatgcgtcatgctcatgctgatattgatttaatgcgcggttga

SEQ ID NO: 438 - protein, 348 aa, Arabidopsis thaliana
MDRRDAMGLSGSGSYYIHRGLSGSGPPTFHGSPQQQQGLRHLPNQNSPFGSGSTGFGSPSLHGDPSLATAAGGAGALPHHIGVNMIAPPPPPSETPMKRKRGRPRKYGQDGSVSLALSSSSVSTITPNNSNKRGRGRPPGSGKKQRMASVGELMPSSSGMSFTPHVIAVSIGEDIASKVIAFSQQGPRAICVLSASGAVSTATLIQPSASPGAIKYEGRFEILALSTSYIVATDGSFRNRTGNLSVSLASPDGRVIGGAIGGPLIAASPVQVIVGSFIWAAPKIKSKKREEEASEVVQETDDHHVLDNNNNTISPVPQQQPNQNLIWSTGSRQMDMRHAHADIDLMRG

SEQ ID NO: 439 - DNA, 933 bp, Arabidopsis thaliana
  CDS (1)..(933)
atggcgaatccttggtgggtagggaatgttgcgatcggtggagttgagagtccagtgacgtcatcagctccttctttgcaccacagaaacagtaacaacaacaacccaccgactatgactcgttcggatccaagattggaccatgacttcaccaccaacaacagtggaagccctaatacccagactcagagccaagaagaacagaacagcagagacgagcaaccagctgttgaacccggatccggatccgggtctacgggtcgtcgtcctagaggtagacctcctggttccaagaacaaaccaaagagtccagttgttgttaccaaagaaagccctaactctctccagagccatgttcttgagattgctacgggagctgacgtggcggaaagcttaaacgcctttgctcgtagacgcggccggggcgtttcggtgctgagcggtagtggtttggttactaatgttactctgcgtcagcctgctgcatccggtggagttgttagtttacgtggtcagtttgagatcttgtctatgtgtggggcttttcttcctacgtctggctctcctgctgcagccgctggtttaaccatttacttagctggagctcaaggtcaagttgtgggaggtggagttgctggcccgcttattgcctctggacccgttattgtgatagctgctacgttttgcaatgccacttatgagaggttaccgattgaggaagaacaacagcaagagcagccgcttcaactagaagatgggaagaagcagaaagaagagaatgatgataacgagagtgggaataacggaaacgaaggatcgatgcagccgccgatgtataatatgcctcctaattttatcccaaatggtcatcaaatggctcaacacgacgtgtattggggtggtcctccgcctcgtgctcctccttcgtattga

SEQ ID NO: 440 - protein, 310 aa, Arabidopsis thaliana
MANPWWVGNVAIGGVESPVTSSAPSLHHRNSNNNNPPTMTRSDPRLDHDFTTNNSGSPNTQTQSQEEQNSRDEQPAVEPGSGSGSTGRRPRGRPPGSKNKPKSPVVVTKESPNSLQSHVLEIATGADVAESLNAFARRRGRGVSVLSGSGLVTNVTLRQPAASGGVVSLRGQFEILSMCGAFLPTSGSPAAAAGLTIYLAGAQGQVVGGGVAGPLIASGPVIVIAATFCNATYERLPIEEEQQQEQPLQLEDGKKQKEENDDNESGNNGNEGSMQPPMYNMPPNFIPNGHQMAQHDVYWGGPPPRAPPSY

SEQ ID NO: 441 - DNA, 798 bp, Arabidopsis thaliana
  CDS (1)..(798)
atggatgaggtatctcgttctcatacaccgcaatttctatcaagtgatcatcagcactatcaccatcaaaacgctggacgacaaaaacgcggcagagaagaagaaggagttgaacccaacaatataggggaagacctagccacctttccttccggagaagagaatatcaagaagagaaggccacgtggcagacctgctggttccaagaacaaacccaaagcaccaatcatagtcactcgcgactccgcgaacgccttcagatgtcacgtcatggagataaccaacgcctgcgatgtaatggaaagcctagccgtcttcgctagacgccgtcagcgtggcgtttgcgtcttgaccggaaacggggccgttacaaacgtcaccgttagacaacctggcggaggcgtcgtcagtttacacggacggtttgagattctttctctctcgggttcgtttcttcctccaccggcaccaccagctgcgtctggtttaaaggtttacttagccggtggtcaaggtcaagtgatcggaggcagtgtggtgggaccgcttacggcatcaagtccggtggtcgttatggcagcttcatttggaaacgcatcttacgagaggctgccactagaggaggaggaggaaactgaaagagaaatagatggaaacgcggctagggcgattggaacgcaaacgcagaaacagttaatgcaagatgcgacatcgtttattgggtcgccgtcgaatttaattaactctgtttcgttgccaggtgaagcttattggggaacgcaacgaccgtctttctaa

SEQ ID NO: 442 - protein, 265 aa, Arabidopsis thaliana
MDEVSRSHTPQFLSSDHQHYHHQNAGRQKRGREEEGVEPNNIGEDLATFPSGEENIKKRRPRGRPAGSKNKPKAPIIVTRDSANAFRCHVMEITNACDVMESLAVFARRRQRGVCVLTGNGAVTNVTVRQPGGGVVSLHGRFEILSLSGSFLPPPAPPAASGLKVYLAGGQGQVIGGSVVGPLTASSPVVVMAASFGNASYERLPLEEEEETEREIDGNAARAIGTQTQKQLMQDATSFIGSPSNLINSVSLPGEAYWGTQRPSF

SEQ ID NO: 443 - DNA, 1065 bp, Arabidopsis thaliana
  CDS (1)..(1065)
atggatcgaagagacgcaatggcgttatccgggtcgggttcttactatatccaaagaggaatccccggttctggtcctcctcctcctcaaactcaaccaacgtttcacggatcacaaggatttcatcatttcaccaattccatctctccttttgggtcaaacccaaacccaaatccaaaccctggaggtgtctctactggattcgtgtctcctcctttacccgttgactcttctccggctgattcgtcagcggcggcggcgggagctttggttgctcctccttcaggtgacacgtctgtgaagcggaagagaggacggcctagaaaatatggacaagatggtggttctgtttcgttggcattgtctccttctatctccaacgtttccccgaactctaacaaacgtggccgtggaagacctcctggctccggcaagaagcaacggctatcttccattggtgaaatgatgccttcatcaactgggatgagcttcacaccgcatgtaatcgtagtttccattggtgaagacattgcttcaaaggttatatcgttctcgcatcaaggtccacgagcgatatgtgtcttatccgcaagtggtgctgtctctactgcaactcttcttcagccagcaccttctcatggaactattatatacgagggtctattcgagctcatatctctctcaacttcttatctgaacacaactgacaatgactacccaaaccgcactggaagtctagcggtctcacttgctagccccgatggtcgtgtcattggtggtggaattggaggtcctctaatagcagcaagccaagtccaggtcattgttggcagcttcatttgggcaattccgaaagggaagattaaaaaacgtgaagaaacttctgaagatgtccaagatactgatgctttggaaaacaacaacgataacacagcagcaacgtcacctcctgttcctcagcaaagtcagaacattgttcagactcctgtaggcatttggtcaactggttcaaggtcaatggatatgcatcacccccatatggacattgatctaatgcgtggatga

SEQ ID NO: 444 - protein, 354 aa, Arabidopsis thaliana
MDRRDAMALSGSGSYYIQRGIPGSGPPPPQTQPTFHGSQGFHHFTNSISPFGSNPNPNPNPGGVSTGFVSPPLPVDSSPADSSAAAAGALVAPPSGDTSVKRKRGRPRKYGQDGGSVSLALSPSISNVSPNSNKRGRGRPPGSGKKQRLSSIGEMMPSSTGMSFTPHVIVVSIGEDIASKVISFSHQGPRAICVLSASGAVSTATLLQPAPSHGTIIYEGLFELISLSTSYLNTTDNDYPNRTGSLAVSLASPDGRVIGGGIGGPLIAASQVQVIVGSFIWAIPKGKIKKREETSEDVQDTDALENNNDNTAATSPPVPQQSQNIVQTPVGIWSTGSRSMDMHHPHMDIDLMRG

SEQ ID NO: 445 - DNA, 1020 bp, Arabidopsis thaliana
  CDS (1)..(1020)
atggatccagttcaatctcatggatcacaaagctctcttcctcctcctttccatgctagagatttccaattacatcttcaacaacaacaacaacatcaacaacaacatcaacaacaacaacaacaacagttctttctccaccatcatcagcaaccacaaagaaaccttgatcaagatcacgagcagcaaggagggtcaatattgaatagatctatcaagatggatcgcgaagagacaagcgataacatggacaacatcgctaataccaacagcggtagcgaaggtaaagagatgagtttacacggaggagaaggaggaagcggtggtggaggaagtggagaacagatgacaagaaggccaagaggaagaccagcaggatccaagaacaaacctaaagctccaataatcataacaagagacagcgcaaacgcgcttcgaactcacgtcatggagataggagacggatgtgacatagttgactgtatggctacgttcgctagacgccgccaaagaggcgtttgcgttatgagcggtacaggaagcgttactaacgtcactatacgtcagcctggatcgccacctggctcggtggttagccttcacggccggtttgaaatcctctctctttcgggatctttcttgcctccgcctgcgccgcctgcagccaccggactaagcgtttacctagccggaggacaagggcaggtcgttggaggtagtgtggtgggacctttgttgtgttcgggtcctgtggtggttatggcggcttcttttagcaatgcggcgtacgaaaggctgcctttggaagaagatgagatgcagacgccagttcaaggaggcggtggaggaggaggaggtggtggtggaatgggatctcccccgatgatgggacagcaacaagctatggcagctatggcggcggctcaaggactaccaccgaatcttcttggttcggttcagttgccaccgccacaacagaatgatcagcagtattggtctacgggtcggccaccgtattga

SEQ ID NO: 446 - protein, 339 aa, Arabidopsis thaliana
MDPVQSHGSQSSLPPPFHARDFQLHLQQQQQHQQQHQQQQQQQFFLHHHQQPQRNLDQDHEQQGGSILNRSIKMDREETSDNMDNIANTNSGSEGKEMSLHGGEGGSGGGGSGEQMTRRPRGRPAGSKNKPKAPIIITRDSANALRTHVMEIGDGCDIVDCMATFARRRQRGVCVMSGTGSVTNVTIRQPGSPPGSVVSLHGRFEILSLSGSFLPPPAPPAATGLSVYLAGGQGQVVGGSVVGPLLCSGPVVVMAASFSNAAYERLPLEEDEMQTPVQGGGGGGGGGGGMGSPPMMGQQQAMAAMAAAQGLPPNLLGSVQLPPPQQNDQQYWSTGRPPY

SEQ ID NO: 447 - DNA, 879 bp, Arabidopsis thaliana
  CDS (1)..(879)
atggctggtcttgatctaggcacagcttttcgttacgttaatcaccagctccatcgtcccgatctccaccttcaccacaattcctcctccgatgacgtcactcccggagccgggatgggtcatttcaccgtcgacgacgaagacaacaacaacaaccatcaaggtcttgacttagcctctggtggaggatcaggaagctctggaggaggaggaggtcacggcgggggaggagacgtcgttggtcgtcgtccacgtggcagaccaccgggatccaagaacaaaccgaaacctccggtaattatcacgcgcgagagcgcaaacactctaagagctcacattcttgaagtaacaaacggctgcgatgttttcgactgcgttgcgacttatgctcgtcggagacagcgagggatctgcgttctgagcggtagcggaacggtcacgaacgtcagcatacgtcagccatctgcggctggagcggttgtgacgctacaaggaacgttcgagattctttctctctccggatcgtttcttcctcctccggcacctcccggagcaacgagtttgacaattttcttagccggaggacaaggtcaggtggttggaggaagcgttgtgggtgagcttacggcggctggaccggtgattgtgattgcagcttcgtttactaatgttgcttatgagagacttcctttagaagaagatgagcagcagcaacagcttggaggaggatctaacggcggaggtaatttgtttccggaggtggcagctggaggaggaggaggacttccgttctttaatttaccgatgaatatgcaaccaaatgtgcaacttccggtggaaggttggccggggaattccggtggaagaggtcctttctga

SEQ ID NO: 448 - protein, 292 aa, Arabidopsis thaliana
MAGLDLGTAFRYVNHQLHRPDLHLHHNSSSDDVTPGAGMGHFTVDDEDNNNNHQGLDLASGGGSGSSGGGGGHGGGGDVVGRRPRGRPPGSKNKPKPPVIITRESANTLRAHILEVTNGCDVFDCVATYARRRQRGICVLSGSGTVTNVSIRQPSAAGAVVTLQGTFEILSLSGSFLPPPAPPGATSLTIFLAGGQGQVVGGSVVGELTAAGPVIVIAASFTNVAYERLPLEEDEQQQQLGGGSNGGGNLFPEVAAGGGGGLPFFNLPMNMQPNVQLPVEGWPGNSGGRGPF

SEQ ID NO: 449 - DNA, 975 bp, Arabidopsis thaliana
  CDS (1)..(975)
atggatccagtacaatctcatggatcacaaagctctctacctcctcctttccacgcaagagactttcaattacatcttcaacaacagcaacaagagttcttcctccaccatcaccagcaacaaagaaaccaaaccgatggtgaccaacaaggaggatcaggaggaaaccgacaaatcaagatggatcgtgaagagacaagcgacaacatagacaacatagctaacaacagcggtagtgaaggtaaagacatagatatacacggtggttcaggagaaggaggtggtggctccggaggagatcatcagatgacaagaagaccaagaggaagaccagcgggatccaagaacaaaccaaaaccaccgattatcatcacacgggacagcgcaaacgcgcttagaacccacgtgatggagatcggagatggctgcgacttagtcgaaagcgttgccacttttgcacgaagacgccaacgcggcgtttgcgttatgagcggtactggaaatgttactaacgtcactatacgtcagcctggatctcatccttctcctggctcggtagttagtcttcacggaaggttcgagattctatctctctcaggatcttttctccctcctccggctcctcctacagccaccggattgagtgtttacctcgctggaggacaaggacaggtggttggaggaagcgtagttggtccgttgttatgtgctggtcctgtcgttgtcatggctgcgtcttttagcaatgcggcgtacgaaaggttgcctttagaggaagatgagatgcagacgccggttcatggcggaggaggaggaggatcattggagtcgccgccaatgatgggacaacaactgcaacatcagcaacaagctatgtcaggtcatcaagggttaccacctaatcttcttggttcggttcagttgcagcagcaacatgatcagtcttattggtcaacgggacgaccaccgtattga

SEQ ID NO: 450 - protein, 324 aa, Arabidopsis thaliana
MDPVQSHGSQSSLPPPFHARDFQLHLQQQQQEFFLHHHQQQRNQTDGDQQGGSGGNRQIKMDREETSDNIDNIANNSGSEGKDIDIHGGSGEGGGGSGGDHQMTRRPRGRPAGSKNKPKPPIIITRDSANALRTHVMEIGDGCDLVESVATFARRRQRGVCVMSGTGNVTNVTIRQPGSHPSPGSVVSLHGRFEILSLSGSFLPPPAPPTATGLSVYLAGGQGQVVGGSVVGPLLCAGPVVVMAASFSNAAYERLPLEEDEMQTPVHGGGGGGSLESPPMMGQQLQHQQQAMSGHQGLPPNLLGSVQLQQQHDQSYWSTGRPPY

SEQ ID NO: 451 - DNA, 900 bp, Arabidopsis thaliana
  CDS (1)..(900)
atgtctagttatatgcaccctcttctagggcaagaactgcatctacagagacctgaagattccagaaccccacctgatcaaaataacatggaacttaacagatctgaagcagacgaagcaaaggccgagaccactcccaccggtggagccaccagctcagccacagcctctggctcttcctccggacgtcgtccacgtggtcgtcctgcaggttccaaaaacaaacccaaacctccgacgattataactagagatagtcctaacgtccttagatcacacgttcttgaagtcacctccggttcggacatatccgaggcagtctccacctacgccactcgtcgcggctgcggcgtttgcattataagcggcacgggtgcggtcactaacgtcacgatacggcaacctgcggctccggctggtggaggtgtgattaccctgcatggtcggtttgacattttgtctttgaccggtactgcgcttccaccgcctgcaccaccgggagcaggaggtttgacggtgtatctagccggaggtcaaggacaagttgtaggagggaatgtggctggttcgttaattgcttcgggaccggtagtgttgatggctgcttcttttgcaaacgcagtttatgataggttaccgattgaagaggaagaaaccccaccgccgagaaccaccggggtgcagcagcagcagccggaggcgtctcagtcgtcggaggttacggggagtggggcccaggcgtgtgagtcaaacctccaaggtggaaatggtggaggaggtgttgctttctacaatcttggaatgaatatgaacaattttcaattctccgggggagatatttacggtatgagcggcggtagcggaggaggtggtggcggtgcgactagacccgcgttttag

SEQ ID NO: 452 - protein, 299 aa, Arabidopsis thaliana
MSSYMHPLLGQELHLQRPEDSRTPPDQNNMELNRSEADEAKAETTPTGGATSSATASGSSSGRRPRGRPAGSKNKPKPPTIITRDSPNVLRSHVLEVTSGSDISEAVSTYATRRGCGVCIISGTGAVTNVTIRQPAAPAGGGVITLHGRFDILSLTGTALPPPAPPGAGGLTVYLAGGQGQVVGGNVAGSLIASGPVVLMAASFANAVYDRLPIEEEETPPPRTTGVQQQQPEASQSSEVTGSGAQACESNLQGGNGGGGVAFYNLGMNMNNFQFSGGDIYGMSGGSGGGGGGATRPAF

SEQ ID NO: 453 - DNA, 1161 bp, Arabidopsis thaliana
  CDS (1)..(1161)
atggattccagagacatcccaccgtcacataaccagcttcaaccaccaccgggaatgttaatgtctcattaccgtaaccctaacgccgccgcttcaccattaatggttcccacttccacatctcaaccgattcaacaccctcgtcttccttttggcaatcaacaacaatctcaaacgtttcatcagcagcaacaacaacaaatggatcagaagactcttgaatctcttggatttggtgatggatcaccttcttctcaaccgatgcgattcgggatcgatgatcagaatcagcaactgcaagtgaagaagaagcgaggaaggccgagaaagtatactcctgatggtagcattgctttaggtttagctcctacgtctcctcttctctctgcagcttctaattcttacggtgagggtggtgttggagatagtggtggaaatggaaactctgttgatccacctgttaaacgtaacagaggaaggcctcctggttctagtaagaaacagcttgatgctttaggaggaacttcaggagttgggtttacacctcatgtcattgaagtgaacacaggagaggacatagcgtcaaaggtgatggctttttcggatcaagggtcaagaacaatttgtattctctctgcaagtggtgcagtttctagagtgatgcttcgtcaagcttctcattctagtggaatcgttacttatgagggacgatttgagatcattactctctcaggctcagtcttgaattatgaggtaaatggttccaccaacagaagtggtaacttgagtgtggctttggctggacctgatggcggcatcgtaggtggcagtgtagttggtaatctagtagctgcaacacaagtccaggtgatagtgggaagctttgttgcagaagcaaagaaaccgaaacaaagtagtgttaacattgctcgggggcagaatcctgaaccggcttcagcgccggctaacatgttgaactttggatcagtctctcaaggaccatcgagcgagtcatcagaagagaatgagagcggttctcctgcaatgcaccgtgacaataataatgggatatatggagctcaacaacaacaacaacaacaacctcttcatcctcatcagatgcaaatgtaccaacatctttggtctaatcatggtcaataa

SEQ ID NO: 454 - protein, 386 aa, Arabidopsis thaliana
MDSRDIPPSHNQLQPPPGMLMSHYRNPNAAASPLMVPTSTSQPIQHPRLPFGNQQQSQTFHQQQQQQMDQKTLESLGFGDGSPSSQPMRFGIDDQNQQLQVKKKRGRPRKYTPDGSIALGLAPTSPLLSAASNSYGEGGVGDSGGNGNSVDPPVKRNRGRPPGSSKKQLDALGGTSGVGFTPHVIEVNTGEDIASKVMAFSDQGSRTICILSASGAVSRVMLRQASHSSGIVTYEGRFEIITLSGSVLNYEVNGSTNRSGNLSVALAGPDGGIVGGSVVGNLVAATQVQVIVGSFVAEAKKPKQSSVNIARGQNPEPASAPANMLNFGSVSQGPSSESSEENESGSPAMHRDNNNGIYGAQQQQQQQPLHPHQMQMYQHLWSNHGQ

SEQ ID NO: 455 - DNA, 831 bp, Arabidopsis thaliana
  CDS (1)..(831)
atgaaaggtgaatacagagagcaaaagagtaacgaaatgttttccaagcttcctcatcatcaacaacaacagcaacaacaacaacaacaacactctcttacctctcacttccacctctcctccaccgtaacccccaccgtcgatgactcctccatcgaagtggtccgacgtccacgtggcagaccaccaggttccaaaaacaaacctaaaccacccgtcttcgtcacacgtgacaccgaccctcctatgagtccttacatcctcgaagttccttcaggaaacgacgtcgtcgaagccatcaaccgtttctgccgccgtaaatccatcggagtctgcgtccttagtggctctggctctgtagctaacgtcactttacgtcagccatcaccggcagctcttggctctaccataactttccatggaaagtttgatctcctctccgtctccgcaacgtttctccctcctccgcctcgtacttccttgtctcctcccgtttctaacttcttcaccgtctctctcgctggacctcaaggacaaatcatcggagggttcgtcgctggtccacttatttcggcaggaacagtttacgtcatcgccgcaagtttcaacaacccttcttatcaccggttaccggcggaagaagagcaaaaacactcggcggggacaggggaaagagagggacaatctccgccggtctctggtggcggtgaagagtcaggacagatggcgggaagtggaggagagtcgtgtggggtatcaatgtacagttgccacatgggtggctctgatgttatttgggcccctacagccagagctccaccgccatactaa

SEQ ID NO: 456 - protein, 276 aa, Arabidopsis thaliana
MKGEYREQKSNEMFSKLPHHQQQQQQQQQQHSLTSHFHLSSTVTPTVDDSSIEVVRRPRGRPPGSKNKPKPPVFVTRDTDPPMSPYILEVPSGNDVVEAINRFCRRKSIGVCVLSGSGSVANVTLRQPSPAALGSTITFHGKFDLLSVSATFLPPPPRTSLSPPVSNFFTVSLAGPQGQIIGGFVAGPLISAGTVYVIAASFNNPSYHRLPAEEEQKHSAGTGEREGQSPPVSGGGEESGQMAGSGGESCGVSMYSCHMGGSDVIWAPTARAPPPY

SEQ ID NO: 457 - DNA, 948 bp, Arabidopsis thaliana
  CDS (1)..(948)
atggcgaatccatggtggacaggacaagtgaacctatccggcctcgaaacgacgccgcctggttcctctcagttaaagaaaccagatctccacatctccatgaacatggccatggactcaggtcacaataatcatcaccatcaccaagaagtcgataacaacaacaacgacgacgatagagacaacttgagtggagacgaccacgagccacgtgaaggagccgtagaagcccccacgcgccgtccacgtggacgtcctgctggttccaagaacaaaccaaagccaccgatcttcgtcactcgcgattctccaaatgctctcaagagccatgtcatggagatcgctagtgggactgacgtcatcgaaaccctagctacttttgctaggcggcgtcaacgtggcatctgcatcttgagcggaaatggcacagtggctaacgtcaccctccgtcaaccctcgaccgctgccgttgcggcggctcctggtggtgcggctgttttggctttacaagggaggtttgagattctttctttaaccggttctttcttgccaggaccggctccacctggttccaccggtttaacgatttacttagccggtggtcaaggtcaggttgttggaggaagcgtggtgggcccattgatggcagcaggtccggtgatgctgatcgccgccacgttctctaacgcgacttacgagagattgccattggaggaggaagaggcagcagagagaggcggtggtggaggcagcggaggagtggttccggggcagctcggaggcggaggttcgccactaagcagcggtgctggtggaggcgacggtaaccaaggacttccggtgtataatatgccgggaaatcttgtttctaatggtggcagtggtggaggaggacagatgagcggccaagaagcttatggttgggctcaagctaggtcaggattttaa

SEQ ID NO: 458 - protein, 315 aa, Arabidopsis thaliana
MANPWWTGQVNLSGLETTPPGSSQLKKPDLHISMNMAMDSGHNNHHHHQEVDNNNNDDDRDNLSGDDHEPREGAVEAPTRRPRGRPAGSKNKPKPPIFVTRDSPNALKSHVMEIASGTDVIETLATFARRRQRGICILSGNGTVANVTLRQPSTAAVAAAPGGAAVLALQGRFEILSLTGSFLPGPAPPGSTGLTIYLAGGQGQVVGGSVVGPLMAAGPVMLIAATFSNATYERLPLEEEEAAERGGGGGSGGVVPGQLGGGGSPLSSGAGGGDGNQGLPVYNMPGNLVSNGGSGGGGQMSGQEAYGWAQARSGF

SEQ ID NO: 459 - DNA, 846 bp, Arabidopsis thaliana
  CDS (1)..(846)
atggcaaacccttggtggacgaaccagagtggtttagcgggcatggtggaccattcggtctcctcaggccatcaccaaaaccatcaccaccaaagtcttcttaccaaaggagatcttggaatagccatgaatcagagccaagacaacgaccaagacgaagaagatgatcctagagaaggagccgttgaggtggtcaaccgtagaccaagaggtagaccaccaggatccaaaaacaaacccaaagctccaatctttgtgacaagagacagccccaacgcactccgtagccatgtcttggagatctccgacggcagtgacgtcgccgacacaatcgctcacttctcaagacgcaggcaacgcggcgtttgcgttctcagcgggacaggctcagtcgctaacgtcaccctccgccaagccgccgcaccaggaggtgtggtctctctccaaggcaggtttgaaatcttatctttaaccggtgctttcctccctggaccttccccacccgggtcaaccggtttaacggtttacttagccggggtccagggtcaggtcgttggaggtagcgttgtaggcccactcttagccatagggtcggtcatggtgattgctgctactttctctaacgctacttatgagagattgcccatggaagaagaggaagacggtggcggctcaagacagattcacggaggcggtgactcaccgcccagaatcggtagtaacctgcctgatctatcagggatggccgggccaggctacaatatgccgccgcatctgattccaaatggggctggtcagctagggcacgaaccatatacatgggtccacgcaagaccaccttactga

SEQ ID NO: 460 - protein, 281 aa, Arabidopsis thaliana
MANPWWTNQSGLAGMVDHSVSSGHHQNHHHQSLLTKGDLGIAMNQSQDNDQDEEDDPREGAVEVVNRRPRGRPPGSKNKPKAPIFVTRDSPNALRSHVLEISDGSDVADTIAHFSRRRQRGVCVLSGTGSVANVTLRQAAAPGGVVSLQGRFEILSLTGAFLPGPSPPGSTGLTVYLAGVQGQVVGGSVVGPLLAIGSVMVIAATFSNATYERLPMEEEEDGGGSRQIHGGGDSPPRIGSNLPDLSGMAGPGYNMPPHLIPNGAGQLGHEPYTWVHARPPY

SEQ ID NO: 461 - DNA, 1056 bp, Arabidopsis thaliana
  CDS (1)..(1056)
atgtcaggatctgagacgggtttaatggcggcgaccagagaatcaatgcaatttacaatggctctccaccagcagcagcaacacagtcaagctcaacctcagcagtctcagaacaggccattgtcattcggtggagacgacggaactgctctttacaagcagccgatgagatcagtatcaccaccgcagcagtaccaacccaactcagctggtgagaattctgtcttgaacatgaacttgcccggaggtgagtctggaggcatgactggaactggaagtgagccagtgaaaaagaggagaggtagaccgaggaaatatgggcctgatagtggtgaaatgtcacttggtttgaatcctggagctccttctttcactgtcagccaacctagtagcggcggcgatggaggagagaagaagagaggaagacctcctggttcttctagcaaaaggctcaagcttcaagctttaggctcgactggaatcggatttacgcctcatgtacttaccgtgctggctggagaggatgtatcatccaagataatggcgttaactcataatggaccccgtgctgtgtgtgtcttgtctgcaaatggagccatctccaatgtgactctccgccagtctgccacatccggtggaactgttacatatgaggggagatttgagattctgtctttatcgggatctttccatttgctggagaacaatggtcaaagaagcaggacgggaggtctaagcgtgtcattatcaagtccggatggtaatgtcctcggtggcagtgtagctggtcttcttatagcagcatcacctgttcagattgttgttgggagtttcttaccagacggagaaaaagaaccaaaacagcatgtgggacaaatgggactgtcgtcacccgtattaccgcgtgtggccccaacgcaggtgctgatgactccaagtagcccacaatctcgaggcacaatgagtgagtcatcttgtggaggaggacatggaagccctattcatcagagcactggaggaccttacaataacaccattaacatgccctggaagtag

SEQ ID NO: 462 - protein, 351 aa, Arabidopsis thaliana
MSGSETGLMAATRESMQFTMALHQQQQHSQAQPQQSQNRPLSFGGDDGTALYKQPMRSVSPPQQYQPNSAGENSVLNMNLPGGESGGMTGTGSEPVKKRRGRPRKYGPDSGEMSLGLNPGAPSFTVSQPSSGGDGGEKKRGRPPGSSSKRLKLQALGSTGIGFTPHVLTVLAGEDVSSKIMALTHNGPRAVCVLSANGAISNVTLRQSATSGGTVTYEGRFEILSLSGSFHLLENNGQRSRTGGLSVSLSSPDGNVLGGSVAGLLIAASPVQIVVGSFLPDGEKEPKQHVGQMGLSSPVLPRVAPTQVLMTPSSPQSRGTMSESSCGGGHGSPIHQSTGGPYNNTINMPWK

SEQ ID NO: 463 - DNA, 1080 bp, Oryza sativa subsp
  CDS (1)..(1080)
atgatggaggtgactcaggtgagggcgtcgtcggagatggcgggaggaagggagccgttcgtgctgcccaagagcccgccggcggcggcgcctgcgccgccgccgccgtcgtccggcggcatgcagagcgtgcgcatggcgtacacggcggacggcacgcccatcttcgctccggtgaactccgccccggccccggccccggcggcgacgtacccgcccgcaggaggcaatggcgcggcggctctcgacgccggcgagccggtggtcaagaagaagcgtggccggccaaggaagtacggccccgacggctccatgtcgctggcattggtgcccgtgtccaccgcggcggtggcggcctccgggcctttctcgccggcggctgccgcgaagtcgccggacgccgtgtcgtcggcgccgccgccgggggcgaagaagagggggcggccaaagggctccacgaacaagaagcacgtgccctctttcggaattggagatatcgggtcagcaggagctggattcacacctcatgttatttttgttaaagctggagaggatgtatctgcaaagatcatgtcattctcccagcatggaactcgtggagtatgcgttctgtcagcaaacggcgccatatcaaatgtgacacttcggcaagctgctacttccggtggaacagtaacatacgagggacgatttgagatactgtcgctgtccggttcattccttctatcagagaatggaggccatcgtagtcgaactggtgggctcagtgtttctctagcaggccctgatggtcgcgtcttgggtggtggagttgctggacttctgacagctgcttcaccagtgcagattgtggtgggaagcttcaacaccgaagggaaaaaggggccaaagctgcatgctccttcagacccaatgtctgcaccgctaaagatggtgccgatgagcgggacggggccaagcagcccgccatcaaggggcacattgagtgaatcatcgggcggcccggggagcccgctgaaccaaggtgtcacggccagcaaccatggccagccagggctacccagcttatcctggaagtga

SEQ ID NO: 464 - protein, 359 aa, Oryza sativa subsp
MMEVTQVRASSEMAGGREPFVLPKSPPAAAPAPPPPSSGGMQSVRMAYTADGTPIFAPVNSAPAPAPAATYPPAGGNGAAALDAGEPVVKKKRGRPRKYGPDGSMSLALVPVSTAAVAASGPFSPAAAAKSPDAVSSAPPPGAKKRGRPKGSTNKKHVPSFGIGDIGSAGAGFTPHVIFVKAGEDVSAKIMSFSQHGTRGVCVLSANGAISNVTLRQAATSGGTVTYEGRFEILSLSGSFLLSENGGHRSRTGGLSVSLAGPDGRVLGGGVAGLLTAASPVQIVVGSFNTEGKKGPKLHAPSDPMSAPLKMVPMSGTGPSSPPSRGTLSESSGGPGSPLNQGVTASNHGQPGLPSLSWK

SEQ ID NO: 465 - DNA, 1352 bp, Catharanthus roseus
  CDS (107)..(988)
ctctctctctctatctctagaatctagagagagaaaactagattaatttcttcttcttcttcttctctttcatttcattcagctcagctcctcaatctctacaaaaatggatcattcactaccacctccgtttaatacaagagatttcaatctacagcatcaatttcaccaccaaaatcacaattccgaagacgaacagagcggaactagcggattaaaacgagatcgcgacgaaaaaaacgacagcggcgacggaaaagacggaggaggagatccaggatcaggtgaaatgacgagaagacccagaggtagaccggctggatccaaaaacaaacctaaaccgccaattataattactcgcgacagcgccaacgcgctacgaactcacgtaatggaaatcgctgacggttgcgatataatggaaagcgtagcgactttcgctagaaggcgtcaacgaggtgtttgtattatgagcggaagcggtacggtaacaaacgtcactttacgacaaccggcatctcccggtgcggttgttacattacatggtagatttgagattttgtctttagctggatctttcttaccgccaccggctccgcctgctgcgacgtcgttgactatatatttagccggtggacaaggacaggttgtaggcggtagtgtggtgggagcacttttagcttcgggacctgttgtgattatggcggcgtcgtttagtaatgctgcttatgaaagacttcctttagatgaagaagaaaattcaattccgttacagagtggcggttcgctaggatctcctggtggcggaggaggtggaaacggtggcgttccgggtcaacaacaacaacagggaggacaacagcagcagcagttattaggtggtggtggagatcctagtgctttatttcatggaatgccgccaaatttgctaaattcaattcaattgcctaatgaagcttattgggctactggtcgtcctcccttctaatcaaactaacaaaaacccagcttagctcaaacaattgtttaaggcgctgctgcagagttgattaccaagaaaacaaaagggtaattatttctgatttacttttgcttagttatgataattaccttgttagatttttatttatctttttttttaattagatagaaaaacttttcatcaggttgttgctgttgttgttgttgttgttgttgttgaggggattgagcattttcatctaagttttagtttcattttatcttgttgagtttattttccaaattataattctagttagggatctttttgttttggagtttgatgatgatcataaaatgatgtgcttttgtaaaaaaaaaaaaaaaaaaaa

SEQ ID NO: 466 - protein, 293 aa, Catharanthus roseus
MDHSLPPPFNTRDFNLQHQFHHQNHNSEDEQSGTSGLKRDRDEKNDSGDGKDGGGDPGSGEMTRRPRGRPAGSKNKPKPPIIITRDSANALRTHVMEIADGCDIMESVATFARRRQRGVCIMSGSGTVTNVTLRQPASPGAVVTLHGRFEILSLAGSFLPPPAPPAATSLTIYLAGGQGQVVGGSVVGALLASGPVVIMAASFSNAAYERLPLDEEENSIPLQSGGSLGSPGGGGGGNGGVPGQQQQQGGQQQQQLLGGGGDPSALFHGMPPNLLNSIQLPNEAYWATGRPPF

SEQ ID NO: 467 - DNA, 1180 bp, Catharanthus roseus
  CDS (14)..(1021)
  misc_feature (1039)..(1039): n is a, g, c or t
aaaaaaaaaaattatgaagggagaatatgttaaagatgaaaaggataatcactccagtatgtttgcaaagcttcatcaaactcagaaattccaccaccacccatctccgccgcatccctccgcccttcaccatcacaacaaccaccaccataactcttttcaagttccccgggaatgtcaaaactcagaagaagtagacagccacggccaccatagcccaacaaccaaaagggacctgtcaattcagcctgttattctatcagctccgctgtcttccggcgggaatgatggagcttcaatagaagtcgtccgccgccctcgcggacgtccgcctggctccaaaaataaaccgaagcctccggttatcattactcgtgacgccgagccttccatgagcccttacgttctggaacttcctggcggaattgatatcgtggaatctatcacgagtttttgtagaaagaggaacatgggattgtgtattctcaacggttctggtactgtaacgaacgtgactctacgtcagccttcaacgactccaggagcaagcgtgacatttcatggacgttttgatattttatcgctttcagctactgtcattccgtcgaacacattgagtgcaatagctttaagcaatggaatcgctaatggttttacaatttctctggcgggacctcaaggacaagttgttggtggagctgtagttggctcattgttttcagctggaactgtttatttgattgcggcttcgtttaataatcctcaatatcatagattgcctttagaagacgatcagaggaattctggttctgctggcggtactggccaagagggtcatcaccaatctccgtcagctacttctggcggtgacgatggacgttctcccgcggctccggttggtggttcttcggcaggtatggattcttgtggagtgtcattattcagctgtcatttgccttctgacgtgatatgggcacccaccgctagacaaccgcctcaacatcatccaccgccttactgattatgagttttggtcggntaattttctggttttagtccttctctgttttgatcgttctaatggtactgtgaaaacgttttacttttgttctttgtttttttggtagcttaattctactgtattttgtatcttcttgaaaaaaaaaaaaaaaaaaaaaaa

SEQ ID NO: 468 - protein, 335 aa, Catharanthus roseus
MKGEYVKDEKDNHSSMFAKLHQTQKFHHHPSPPHPSALHHHNNHHHNSFQVPRECQNSEEVDSHGHHSPTTKRDLSIQPVILSAPLSSGGNDGASIEVVRRPRGRPPGSKNKPKPPVIITRDAEPSMSPYVLELPGGIDIVESITSFCRKRNMGLCILNGSGTVTNVTLRQPSTTPGASVTFHGRFDILSLSATVIPSNTLSAIALSNGIANGFTISLAGPQGQVVGGAVVGSLFSAGTVYLIAASFNNPQYHRLPLEDDQRNSGSAGGTGQEGHHQSPSATSGGDDGRSPAAPVGGSSAGMDSCGVSLFSCHLPSDVIWAPTARQPPQHHPPPY

SEQ ID NO: 469 - DNA, 1327 bp, Catharanthus roseus
  CDS (1)..(909)
atgaaccgaatgacgtcaccttcaactccaccgccatctcttcatcttagaacaacagaacaagacttcttggataacaccaccgctaccaacagcagcggaagcaacaccaataatcatcatcatcatcatcgaaaccctaacaatacaagccaaaatcctgaagaagaggaagaaaatccgcacgagcgcgacctccagctggcggaacacaaccaaactccagaggcagccgggggtagtggaggtagttccggtaggcgacctagaggtagaccgcccggttcaaaaaacaagccaaaaccacccattataataacaaaagaaagtccaaatgctcttcggagccacgtgttggaaattagcaacggcagtgatgttgtggaatgtatttcaactttcgctcttcgccgccaccgtggcgtttctgttcttagcggaagtggtattgtaaataatgtcagtttacggcaaccggctgcacccggaggcgttgtaactcttcacggaagatttgaaatattatctttatcgggttcgtttttgcctgctccttcgcctcccggagctaccggtttaacggtttatttagccggtgggcaaggtcaagttgttggaggaactgtggttggttctttagttgcttctggtcctgttatggttattgctgctacttttactaatgctacttacgagaggttacctttagaggaggaggccacggcgacggctacagacgccgccgctgaaggaggtggtggcggtacttcgggggcggcatcgcaatctcatggtatggctgatgatcctgtatctcctaatttttatagtttgccacctaatttagtaccaaacggtcaagaagttttttggactcctccaccacgtccaccgccaccttcatattaacatctatctatctcctccaagtgactgttgatactagcggacgcaagggaaaaagatatatatatatatatctcattaatttccagtcaaaagactaacgaggaggctttgtggcttattgctatagaattcggcaaaacttgtttattggtaatggatggatggatgttctggttttgctttcagtaaaattttacttttccggtttcacttctttgcttttttattctatgatgtcgtctctaagagatgaatatacagtaaacttttttcatcctgctataagataaaaatgagtaattgagcagtacaagtctgagttgtaaatagttgtttttatgaatctaaatgggtgtaaaaaaaaaaaaaaaaaaaaaaaaaaaaaaaaaaaaaaaaaaaaaaaaaaaaaaaaaaaaaa

SEQ ID NO: 470 - protein, 302 aa, Catharanthus roseus
MNRMTSPSTPPPSLHLRTTEQDFLDNTTATNSSGSNTNNHHHHHRNPNNTSQNPEEEEENPHERDLQLAEHNQTPEAAGGSGGSSGRRPRGRPPGSKNKPKPPIIITKESPNALRSHVLEISNGSDVVECISTFALRRHRGVSVLSGSGIVNNVSLRQPAAPGGVVTLHGRFEILSLSGSFLPAPSPPGATGLTVYLAGGQGQVVGGTVVGSLVASGPVMVIAATFTNATYERLPLEEEATATATDAAAEGGGGGTSGAASQSHGMADDPVSPNFYSLPPNLVPNGQEVFWTPPPRPPPPSY

SEQ ID NO: 471 - DNA, 1280 bp, Thlaspi caerulescens
  CDS (164)..(1102)
aaaaacttgtaaaagtgttttaaaatcaagatctgaaaatcttatctcctcttccaggatttaagttcttctcataatcttcttgatctaaaaaagaactaattgttcttagggtttcacttctttgaaatatataatcagaaattaacatcttaagggtttaatggcgaatccatggtggacaggacaagtgaatctctccggccttgaaacgacgccgcctggttcctctcagttaaagaaatcagatctccacatctccatgaacatggccatggactcaggtcataacaaccatcatcatcaccaagaagtcgacaacaataacaacaacgatgacgacagagataacttgagcggcgatgaacacgagccacgtgaaggagccgtagaagcccccacgcgccgtccacgtggacgtcctgctggttccaagaacaaaccaaagccaccgatctttgtcacgcgcgattctccaaacgctctcaagagccatgtcatggagatcgctagtgggactgacgtcatcgaaaccctagctactttcgctaggcggcgccaacgtggcatctgcatcttgagcggcaacggcacggtggctaacgtcactctccgccaaccatcatctgccgcagttgctgcggctcccgggggtgcggcggttttggctttacaagggaggtttgagattctctctttaacaggatcgttcttgcctggacctgctccacctggatccaccggtttaaccatctacttagccggtggtcaaggtcaggtcgttggaggaagtgtggtggggccattgatggcggctggtccggttatgttaatcgcggccacgttttctaatgcgacttacgagagattgcctttggaggaggaagaggcggctgagagaggcggtggaggaggcagcgtcccaggacaactcggagggggaggctcgccgctgagtagcggtggtggtggaggggatggcaatcaaggacttccggtgtacaatatgcccggaaatcttgtttctaatggtggcggaggcggaggacagatgagtggccaagaagcttatggttgggctcaagctaggtcaggattttaacgtacgttcaaatggcttttaaatttacagaagttaacaataagaactataacgatgtttattatgatgatgatgatgataactagtgatcagttgttactatctacttgctactagtgagctatatagtgtgtgcgtccattatattatgttctcccttgtctatgattatatttcc

SEQ ID NO: 472 - protein, 312 aa, Thlaspi caerulescens
MANPWWTGQVNLSGLETTPPGSSQLKKSDLHISMNMAMDSGHNNHHHHQEVDNNNNNDDDRDNLSGDEHEPREGAVEAPTRRPRGRPAGSKNKPKPPIFVTRDSPNALKSHVMEIASGTDVIETLATFARRRQRGICILSGNGTVANVTLRQPSSAAVAAAPGGAAVLALQGRFEILSLTGSFLPGPAPPGSTGLTIYLAGGQGQVVGGSVVGPLMAAGPVMLIAATFSNATYERLPLEEEEAAERGGGGGSVPGQLGGGGSPLSSGGGGGDGNQGLPVYNMPGNLVSNGGGGGGQMSGQEAYGWAQARSGF

SEQ ID NO: 473 - DNA, 1167 bp, Oryza sativa subsp
  CDS (1)..(1167)
atggagcccgcgacggagaccacggcgacttcgccggctgcggctgccgctgcgcagccggaggcggaggcggaggcggaggcggagtcggcggcgacgccggtggcagtggcggcggcggcggcggcaacctatcagccgccagcgccggtggttccagtcgccgtggcaggtgcggcggcggggagagggaacgggaagaggaagagggggaggccgaggaagtacgggccggacgggagcctgctccggccgctgaaggcgaccccgatctcggcgtcggtgccggacgactccggcggggggcagtacacgccggcggcggcggtgggggccgtcatgaagcgcggcaggggccgccccgtcgggttcgtcagccgcgcgtcgccggtgtccgtggccgtgacggccgccacgtccaccgccgcggtggtcgtctcgtctccggccacccacacccagacgccgctcgggccgctaggtgaattggtagcatgtgcttctggtgcaaacttcacacctcatatcattaacgttgctgctggcgaggatgttaatatgaaggtcatatctttctcccaacaaggtccaagggcaatttgcattctgtctgctaatggggtgatttcaaatgttacattgcgtcagcaagatactttaggtggtacagtgacttatgagggccggtttgagctgctctccttatccggatcattcacgccaactgatagcggtggaacgagaagccgctccggtggaatgagcgtctcgttggcggccacggatggccgtgtcatcggaggcggagttgccggcctccttgtggctgcaagccctgttcaggttgtggtaggaagcttcctgccgagctaccagctggaccagaacgccaccaagaagcccgtcatcgagatcacgacggtgccgccgccgccgccggccatcggcttcaccatctccagcggcgaccctatggaggactcctacagcggcagccatggccagcaccgctccggcgccgccgcggcgacgacgacgacggcgaaggccaactcgacgtcggcgttcaggttggagaactggacgccaccggcgccgccggcggcggaggcggcgaggacgaagacgccgtcgtcggaggccaaagtcccagtccccggagcctga

SEQ ID NO: 474 - protein, 388 aa, Oryza sativa subsp
MEPATETTATSPAAAAAAQPEAEAEAEAESAATPVAVAAAAAATYQPPAPVVPVAVAGAAAGRGNGKRKRGRPRKYGPDGSLLRPLKATPISASVPDDSGGGQYTPAAAVGAVMKRGRGRPVGFVSRASPVSVAVTAATSTAAVVVSSPATHTQTPLGPLGELVACASGANFTPHIINVAAGEDVNMKVISFSQQGPRAICILSANGVISNVTLRQQDTLGGTVTYEGRFELLSLSGSFTPTDSGGTRSRSGGMSVSLAATDGRVIGGGVAGLLVAASPVQVVVGSFLPSYQLDQNATKKPVIEITTVPPPPPAIGFTISSGDPMEDSYSGSHGQHRSGAAAATTTTAKANSTSAFRLENWTPPAPPAAEAARTKTPSSEAKVPVPGA

SEQ ID NO: 475 - DNA, 1140 bp, Oryza sativa subsp
  CDS (1)..(1140)
atggatggccgggagcagcagcagcagccgcgcgtgagctcgccgccgccggccggcggcggcgtgatgatgcctcagcacccctacggcaccgcgccggcgatgccgccggggtcggcgaatgttatgcacggggtgccgctctcgttcaaccccatggcgtcgccgaccgcctcgtcgcctatgaagcccgcggatatgtcggggaccatgtaccgcaccgatcccgtcgtgcagggcatgcagcagcagcccggttctggcggtggcggcacagcggtcggcggcggggagctcgtgaagaagaagagggggaggccgaggaagtatggtcctgacgggaacatcgggttgggactgaagcccgcggctgcagcagggacggaggccggcggaccttcaggtggtgcaggatcgaactcgaaccctgacgggaagcgcagagggcgacccccaggatccgggaaaaaaaaacagctagatgctttgggatcttccgggacatcttttactccccacataataacagtgaagcctaatgaggatgttgcttcaaaaataatggcattttcacaacaaggccctcgcactacatgcataatttcagcaaatggcgctctttgcacagcaacactacgtcaaccagcaacttctggtggtatagtaacatatgagggccactttgatattctctctctgtcgggctcatttctgctcgcagaggatggcgacactcgtagcagaacaggtggtttgagtgtggcacttgctggaagcgatggacgtatagttggaggttgtgttgctggaatgctgatggcagcaacgcccgtgcaggttgtagtggggagtttcattgctgaaggtaaaaaaggcaaggaagaacatctgaaacgtgagccaacatctgccccgacgccgaaccacgcagctggctttggcgcagccacggctgccagtcctccgtctgatggatcatcaagcgaccactccgatgacccagggagtcccatgggacctaatggcagcacattcaataattcaggtcatcccatgcattcttcgtatgctcctgttagctggtcgctatctgggaatcaaggccgttacgatcccgacctgaagatgatgaccgactag

SEQ ID NO: 476 - protein, 379 aa, Oryza sativa subsp
MDGREQQQQPRVSSPPPAGGGVMMPQHPYGTAPAMPPGSANVMHGVPLSFNPMASPTASSPMKPADMSGTMYRTDPVVQGMQQQPGSGGGGTAVGGGELVKKKRGRPRKYGPDGNIGLGLKPAAAAGTEAGGPSGGAGSNSNPDGKRRGRPPGSGKKKQLDALGSSGTSFTPHIITVKPNEDVASKIMAFSQQGPRTTCIISANGALCTATLRQPATSGGIVTYEGHFDILSLSGSFLLAEDGDTRSRTGGLSVALAGSDGRIVGGCVAGMLMAATPVQVVVGSFIAEGKKGKEEHLKREPTSAPTPNHAAGFGAATAASPPSDGSSSDHSDDPGSPMGPNGSTFNNSGHPMHSSYAPVSWSLSGNQGRYDPDLKMMTD

SEQ ID NO: 477 - DNA, 1122 bp, Oryza sativa subsp
  CDS (1)..(1122)
atgtcggcggcggcgacggcgacggcgagcgaggcggcggcgtacggcggcgtgggcatgagcaagagcggggccctgcagcctcagccgccgcacggcgccgccgccgcggtgcgcctcgcctacacccacgacggcatcgcggtgtacaagcacacgccgccgccgccggtgtaccagacgccggccgccgtcgccgccccgtcgccgcccgtccgcggcaatggcggtgcgcccgcgtccgccgagcagcacaagcgcaagcgcggccgaccgcgcaagtacgccgtcacggacgtgccgctcgccgtcgtgccaccctcgccgccaaaggctgcggccgccgccggcgccggcgccgcccagtctccggcgacgcccacgctgccgccgggcttctcgtcgggcctggccgcgtacggaggcgccgcggcgagccagccggcgccacgtcaggctccgccggcatccgggcgcgtgctacctcacaagaagaggggccggccgccgggctccggcaacaaacagcagcagcggcctcagcacaagaaggcagcagctccaggatctagtgtgattggattgaagcctagcgtcatcacagtgcaagttggagaggatgtagtgtccagggtgatgtcctttactaagaatggatgggctgtttgtgttctctcagctaatggtgctgtatccaacatgacactgcgtcaagcgggttcttctggtgcaacaacagtaaattatgagggccattttgagattctttctttgtctggctcatatctgctgtcagaaagtgttggcctgagcagtcgagctgggggacttagtgtttcacttgctggtcctgacggacgtgttttaggtggcggagtagcaggacctctgaatgcagctacacctgttcaggtggtcattggaagctttctggctgatgtgaagaaggggcacaaacaggccatgccgagtggggctccgtatccaggtgtgagcactccaacatccagagggactcccagtggatcctcaggtgggcctggtagccccctaaaccaaagtgcaagtggctcatttaacaccagcaaccaacaagccttggctgacttcccatggagatga

SEQ ID NO: 478 - protein, 373 aa, Oryza sativa subsp
MSAAATATASEAAAYGGVGMSKSGALQPQPPHGAAAAVRLAYTHDGIAVYKHTPPPPVYQTPAAVAAPSPPVRGNGGAPASAEQHKRKRGRPRKYAVTDVPLAVVPPSPPKAAAAAGAGAAQSPATPTLPPGFSSGLAAYGGAAASQPAPRQAPPASGRVLPHKKRGRPPGSGNKQQQRPQHKKAAAPGSSVIGLKPSVITVQVGEDVVSRVMSFTKNGWAVCVLSANGAVSNMTLRQAGSSGATTVNYEGHFEILSLSGSYLLSESVGLSSRAGGLSVSLAGPDGRVLGGGVAGPLNAATPVQVVIGSFLADVKKGHKQAMPSGAPYPGVSTPTSRGTPSGSSGGPGSPLNQSASGSFNTSNQQALADFPWR

SEQ ID NO: 479 - DNA, 975 bp, Oryza sativa subsp
  CDS (1)..(975)
atggccgggatggatcccaccggcggcggtggcggcggcggcgtggcggcgcactacctacacatgctccgcgcgcagcagcaccagccactgtccccggcaggtgacgtcaaggcggagcggtccatgctgtcgccggatgagagccccggcgcggacgccgacctaggatcggaccacccgacgtcgtcggccatggtggcggcggaggacagcggcggcggcggcggcagcggttcgggtggcccgatgcggcgcccccgcgggaggccgctgggctccaagaacaagcccaagccgcccatcatcgtgacgcgggacagccccaacgcgttccactcccacgtcctcgaggtcgccgcgggaaccgacatcgtcgagtgcgtctgcgagttcgcgcgccgccgcggccgcggcgtctccgtgctcagcggtggcggcgccgtcgccaacgtcgcgctccgccagccaggcgcgtcgcccccgggcagcctggtcgccaccatgcgcggccagttcgagatcctgtccctcacgggcaccgtcctcccgccgcccgcgccgcccagcgccagcggcctcaccgtcttcctctccggcgggcagggccaggtggtcggcgggagcgtggccggccagctcatcgccgcggggccagtcttcctcatggccgcctcgttcgccaatgccgtctacgagcgtctgccactcgatggggaggatccggaggcagaggctgccgccgccacccctcccggcgatgcggcgcagccaaccggcccaccaccaccgcagcagcagcccacagcctcgcagtcctctgaggtgaccgccggtgacggcggcggcggcggcggtctcggcatgtatcttggaggccatgtgggatcctaccagcagcagcagcagcaacttcccggaccaggagacaacttcggtagctggagcggcagcatcaggccgccgccattctga

SEQ ID NO: 480 - protein, 324 aa, Oryza sativa subsp
MAGMDPTGGGGGGGVAAHYLHMLRAQQHQPLSPAGDVKAERSMLSPDESPGADADLGSDHPTSSAMVAAEDSGGGGGSGSGGPMRRPRGRPLGSKNKPKPPIIVTRDSPNAFHSHVLEVAAGTDIVECVCEFARRRGRGVSVLSGGGAVANVALRQPGASPPGSLVATMRGQFEILSLTGTVLPPPAPPSASGLTVFLSGGQGQVVGGSVAGQLIAAGPVFLMAASFANAVYERLPLDGEDPEAEAAAATPPGDAAQPTGPPPPQQQPTASQSSEVTAGDGGGGGGLGMYLGGHVGSYQQQQQQLPGPGDNFGSWSGSIRPPPF

SEQ ID NO: 481 - DNA, 894 bp, Oryza sativa subsp
  CDS (1)..(894)
atggagacgacgtcgtttcgtttacaggttggcgccgagccgacgggacgccatcgccttcgagatctgaccggcgacgccagagcagcgagagcgcgagaagctgatcgatacgtgcatggccgccagcaacaacaagtggtggcaagcgcgcctcgacttcccgcctccgcgccgccggtgaacgttccggcggcggctccggcgggggccgcgtcgccggagagcaagcagcaggcggcggcgggggccatcgtgccgctgcggcggccgagggggaggccgctggggtcgaagaacaagccgaagccgccggtgatcatcacgcgggacagccccgacgcgctccactcccacatcatcgaggtggcgccgggggccgacgtggcggcgtgcgtcgcggagtacgcgcggcggcgcgggcgcggggtgtgcctgatgggcgcgtcgggcgccgtcgcggacgtcgccgtgcgcggcgcggcggcgccgctcccgggaaggttcgagctcctctccgtaacgggcaccgtgctcccgccccccgcgccgcccggcgcgtccggcctctccgtgctgctctccgccggccagggccaggtcgtcggcggctgcgtcgtggggcccctcgtcgccgccggccccgtcaccctcttcgccgccaccttcgccaacgccgtctacgagcgcctcccgctcgccgacgccgccgacgtcgccgacgtcaagcccgacctctcctccgccgccgccgccgccacgtccacctcggcgccgcaagaagtgcaacagcagcagctgccattgccgccatcctcgcaccaccctcaagccatgcccgcgacctaccccgaccaccgctcgccgccatacgcctgggcaggcggcgtatga

SEQ ID NO: 482 - protein, 297 aa, Oryza sativa subsp
METTSFRLQVGAEPTGRHRLRDLTGDARAARAREADRYVHGRQQQQVVASAPRLPASAPPVNVPAAAPAGAASPESKQQAAAGAIVPLRRPRGRPLGSKNKPKPPVIITRDSPDALHSHIIEVAPGADVAACVAEYARRRGRGVCLMGASGAVADVAVRGAAAPLPGRFELLSVTGTVLPPPAPPGASGLSVLLSAGQGQVVGGCVVGPLVAAGPVTLFAATFANAVYERLPLADAADVADVKPDLSSAAAAATSTSAPQEVQQQQLPLPPSSHHPQAMPATYPDHRSPPYAWAGGV

SEQ ID NO: 483 - DNA, 1119 bp, Oryza sativa subsp
  CDS (1)..(1119)
atggaggccaagtcgggggaagcgagcgttgcgccggtggccgtggcgaccgaggcaacggcggcgacggtgagcttccagccgcaggcggcggtggccgagcagggtagctcgagcggtggtgtgctggtgccgccgccgcctatggcggcgggaggaggaggagttgtggtggcggcggcgccggtggcgggggtggtgaaggtggggaagaagagggggaggccgaggaagtatgggccggacgggagcctgatccggccgctgaacgcgacgccgatctcggcgtcggtacccatggcggcctccgcggtggggccctacacgccggcgtcggcggtgggcgccgccatgaagcgcgggaggggtcgccccctcgacttcgcctccacggccaagctccatcaccaccaccaacaccagcaccatcaccagcagcagcagttcggcttccacttcgactccattggtgaaatggtggcttgttctgctggtgcgaattttactcctcacatcatcactgttgctcctggagaggatgtgactatgaaggtcatatcattttctcaacaaggaccacgagctatctgtattctatctgctaatggtgtgatatcaaacgttacactgcgtcaacctgattcctcgggtggcacattaacttacgagggacgttttgagttgctatctttgtctggatcgtttatgcctactgaaaacagcggaacacggagtcggtcaggtgggatgagcgtttctcttgccagcccagatggccgtgttgtcggtggtggagttgctggccttctggtggcagcaagtcctgttcagattgttgtcggaagcttcctaccaagctatcaaatagaacagaagaataagaagcctagggtggaagcggcacccgcccttgcacagactcctcctgctgttccaatctctagtaccgatacgcacagcagcgagcaagggcagcacagctccgtcgccccaagaacaacaaacatcgtaacctcagcatacaacccagaccagagctgggcatctcctgctcagtcgatacctgacagcgcgagaacaccatcgggcgatgtgaaggtcaccgcctctggagcctga

SEQ ID NO: 484 - protein, 372 aa, Oryza sativa subsp
MEAKSGEASVAPVAVATEATAATVSFQPQAAVAEQGSSSGGVLVPPPPMAAGGGGVVVAAAPVAGVVKVGKKRGRPRKYGPDGSLIRPLNATPISASVPMAASAVGPYTPASAVGAAMKRGRGRPLDFASTAKLHHHHQHQHHHQQQQFGFHFDSIGEMVACSAGANFTPHIITVAPGEDVTMKVISFSQQGPRAICILSANGVISNVTLRQPDSSGGTLTYEGRFELLSLSGSFMPTENSGTRSRSGGMSVSLASPDGRVVGGGVAGLLVAASPVQIVVGSFLPSYQIEQKNKKPRVEAAPALAQTPPAVPISSTDTHSSEQGQHSSVAPRTTNIVTSAYNPDQSWASPAQSIPDSARTPSGDVKVTASGA

SEQ ID NO: 485 - DNA, 870 bp, Oryza sativa subsp
  CDS (1)..(870)
atggcaggccttgatttgggcaccagctacctccaccaccaccaatcactgcatctccgccacgacgatggcggcgccggctccgacgacggcggccacgacgacctctcgccggggagcggcggtggcggcgggcccagcagcacggccggtggcgccgggatcggcggcggcgaggtcgtcgctcgccgcccccgcggccgcccgccgggctccaagaacaagcccaagccgccggtgatcatcaccagggagagcgccaacgcgctcagggcgcatatcctcgaggtagccgccggttgcgatgtgttcgaggcgctgacggcgtacgcgcgccgccggcagcgcggggtgtgcgtgctctcggcggcggggacagtggcgaacgtcacgctccggcagccgcagtcggcgcagcccgggccggcctcgccggcggtggcgacgctgcacggcaggttcgagatactctccctcgcgggctccttcctgcccccgcccgcgccgccgggcgccaccagcctcgccgcgttcctcgccggcgggcaggggcaggtcgtcggtggcagcatcgccggcgcgctcatcgcggcggggcccgtcgtcgtcgtcgccgcgtcgttcagcaacgtggcgtacgagaggctgccgctcgaggacggcgacgaggtggtccccccggcgccggcagggagcgaccagggcggcggcggcagcggcggcatgccaccattaggcgttgatccgtcgggcggcgccgccgccggtgggctcccgttcttcaacatgccgttcgggatgccgccaatgccggtggacggccacgccggctggcctggcgccggcgtcgggaggccaccgttctcatga

SEQ ID NO: 486 - protein, 289 aa, Oryza sativa subsp
MAGLDLGTSYLHHHQSLHLRHDDGGAGSDDGGHDDLSPGSGGGGGPSSTAGGAGIGGGEVVARRPRGRPPGSKNKPKPPVIITRESANALRAHILEVAAGCDVFEALTAYARRRQRGVCVLSAAGTVANVTLRQPQSAQPGPASPAVATLHGRFEILSLAGSFLPPPAPPGATSLAAFLAGGQGQVVGGSIAGALIAAGPVVVVAASFSNVAYERLPLEDGDEVVPPAPAGSDQGGGGSGGMPPLGVDPSGGAAAGGLPFFNMPFGMPPMPVDGHAGWPGAGVGRPPFS

SEQ ID NO: 487 - DNA, 711 bp, Oryza sativa subsp
  CDS (1)..(711)
atggcgtccaaggagcccagcggcgaccacgaccacgaccacgagctgaacgggaccagcggcgggggcggcgagcccaaggacggcgcggtggtgaccggccgcaaccggcgcccccgcgggcggccgccgggctccaagaacaagcccaagccgcccatcttcgtgacgcgggacagccccaacgcgctgcgcagccacgtcatggaggtggccggcggcgccgacgtcgccgagtccatcgcgcacttcgcgcggcggcggcagcgcggcgtctgcgtgctcagcggggccggcaccgtgaccgacgtggccctgcgccagccggccgcgccgagcgccgtggtggcgctccgtgggcggttcgagatcctgtccctgacggggacgttcctgccaggaccggcgccgccgggctccaccgggctgaccgtgtacctcgccggcgggcaggggcaggtggtgggcggcagcgtggtggggacgctcaccgcggcggggccggtcatggtgatcgcctccaccttcgccaacgccacctacgagaggctgccgctggatcaggaggatcaggaggaagcagcggcaggcggcatgatggcgccgccgccactcatggccggcgccgccgatccactacttttcagcgggggaatgcacgacgccgggcttgctgcatggcaccatgcccgccctccgccgccctactag

SEQ ID NO: 488 - protein, 236 aa, Oryza sativa subsp
MASKEPSGDHDHDHELNGTSGGGGEPKDGAVVTGRNRRPRGRPPGSKNKPKPPIFVTRDSPNALRSHVMEVAGGADVAESIAHFARRRQRGVCVLSGAGTVTDVALRQPAAPSAVVALRGRFEILSLTGTFLPGPAPPGSTGLTVYLAGGQGQVVGGSVVGTLTAAGPVMVIASTFANATYERLPLDQEDQEEAAAGGMMAPPPLMAGAADPLLFSGGMHDAGLAAWHHARPPPPY

SEQ ID NO: 489 - DNA, 891 bp, Oryza sativa subsp
  CDS (1)..(891)
atggactggtcggcggcgagaaagggcgacgccgacctcggcaaggaccaggacggctccggtgccgtacagagctcgcccagctccggctctagtggcggggacggggagtcgtctccggagaggttgtcagtgtcaccggtgaagctgacgacgaggtccaagaaaaaggggaagcgccattcctccccgccgtcgtccgatccggccaagttgtcatcaccggagaagctgacgatgaggtccaagaaaaagctgaagagcgtcacggagctggaagaccccgacgcgctgcgatcgcatgtgctggagatcgccggcggcgaggacatcatcgaggccgtggctgctttcgcgcgccgttgtcagcgcaaggtgtgcgtgctgtccggaagcggcgtcgtcgccaaccccacgctgcggcagcccggagagccgcggtctatcgtcgccctccacggccgattcgagatcctgtccctctctggcgcctttgtaccggcgtcgagcccgatggacgacagcacgtggctcacgatcttcctcgccggcgggcagggccaggtcgtcggaggtggagccgtcggcgcgctccgggcttcaggacccgtcatggtcatcgcggccatcttgtccaccgcctcagccggcgagcccatcgcgatcggtgatgacgaacctggcgagggttcagctgcgatgcggcaagcggacacgccggactttaagaccatgtacgaaaactatgagattgcgtgccagatgagatcgcccgtgggaattacaggaaggcatcccgtgcagatgcgcgggcacccccaaccatattatttttgggttaaaaaatttacccgaagcgagaatgatagtaaaaatatgtcgcaacaatag

SEQ ID NO: 490 - protein, 296 aa, Oryza sativa subsp
MDWSAARKGDADLGKDQDGSGAVQSSPSSGSSGGDGESSPERLSVSPVKLTTRSKKKGKRHSSPPSSDPAKLSSPEKLTMRSKKKLKSVTELEDPDALRSHVLEIAGGEDIIEAVAAFARRCQRKVCVLSGSGVVANPTLRQPGEPRSIVALHGRFEILSLSGAFVPASSPMDDSTWLTIFLAGGQGQVVGGGAVGALRASGPVMVIAAILSTASAGEPIAIGDDEPGEGSAAMRQADTPDFKTMYENYEIACQMRSPVGITGRHPVQMRGHPQPYYFWVKKFTRSENDSKNMSQQ

SEQ ID NO: 491 - DNA, 1005 bp, Oryza sativa subsp
  CDS (1)..(1005)
atgtcgttctgcgagagggacatgaacaaggagagcatgtaccaagaacgggacgacatggcggggatacggttcgcgacgccgccgccgcctcagcagcagcagcagcagcagctggtggagtgcttctccgacgaggtggacagccgcgggagtggcggcgagatgaaggatgccgtggggagcgggagtgggcagctggtcgttgttggtggcggggatggggcgagcatcgaggtggcgaagaagaggagggggaggccgccggggtccaagaacaagccgaagccgcccgtggtgatcacgcgggaggcggagccggcggcggcgatgcggccgcacgtgatcgagatccccggcgggcgggacgtcgcggaggcgctcgcgcggttctcgagccgtcggaacctcgggatctgcgtgctcgccggcaccggcgcggtcgccaacgtgtcgctccgccacccgtcacccggggtcccgggctcagctccggcggcgatcgtgttccacggccggtacgagatcctctccctgtcggccacgttcctgcctccggccatgtcctccgtggcgccccaggccgcggtcgccgccgcgggcctctccatctcgctcgccggcccgcacggccagatcgtcggcggggccgtggcaggcccgctctacgccgcgaccaccgtcgtggtcgtcgccgccgccttcaccaaccccaccttccaccgcctccccgccgacgacgacgcgtcggtgtccgtctcggtgtcactctccggcagcggcgacgcggacgaacaccggggccaccagcacaaacctgagccgcaagaaccgcgccaacttcgacggccgccaccgcacctgtcagcagccgccgccgtctcagcagcacagccggtggagccatgcggcgcgcccatgtacgcctgccaccctcagccacaggaggtgatgtggccgccgccggctcgtacgccgcacccgccgccgccgccgccgtactaa

SEQ ID NO: 492 - protein, 334 aa, Oryza sativa subsp
MSFCERDMNKESMYQERDDMAGIRFATPPPPQQQQQQQLVECFSDEVDSRGSGGEMKDAVGSGSGQLVVVGGGDGASIEVAKKRRGRPPGSKNKPKPPVVITREAEPAAAMRPHVIEIPGGRDVAEALARFSSRRNLGICVLAGTGAVANVSLRHPSPGVPGSAPAAIVFHGRYEILSLSATFLPPAMSSVAPQAAVAAAGLSISLAGPHGQIVGGAVAGPLYAATTVVVVAAAFTNPTFHRLPADDDASVSVSVSLSGSGDADEHRGHQHKPEPQEPRQLRRPPPHLSAAAAVSAAQPVEPCGAPMYACHPQPQEVMWPPPARTPHPPPPPPY

SEQ ID NO: 493 - DNA, 1722 bp, Oryza sativa subsp
  CDS (1)..(1722)
atggaggtgactcaggtgagggcgtcgtcggagatggcgggaggaagggagccgttcgtgctgcccaagagcccgccggcggcggcgcctgcgccgccgccgccgtcgtccggtggcatgcagagcgtgcgcatggcgtacacggcggacggcacgcccatcttcgctccggtgaactccgccccggccccggccccggcggcgacgtacccgcccgcaggaggcaatggcgcggcggctctcgacgccggcgagccggtggtcaagaagaagcgtggccggccaaggaagtacggccccgacggctccatgtcgctggcattggtgcccgtgtccaccgcggcggtggcggcctccgggcctttctcgccggcggctgccgcgaagtcgccggacgccgtgttgtcggcgccgccgccgggggcgaagaagagggggcggccaaagggctccacgaacaagaagcacgtgccctctttcggaattggagatatcgaggataaaaagttactgtcaggagtacttaactctgcacttgctcaggttttgctggctgtttttactagatctgagatgatttactggtcagcaggagctggattcacacctcatgttatttttgttaaagctggagaggatgtatctgcaaagatcatgtcattctcccagcatggaactcgtggagtatgcgttctgtcagcaaacggcgccatatcaaatgtgacacttcggcaagctgctacttccggtggaacagtaacatacgagggacgatttgagatactgtcgctgtccggttcattccttctatcagagaatggaggccatcgtagtcgaactggtgggctcagtgtttctctagcaggccctgatggtcgcgtcttgggtggtggagttgctggacttctgacagctgcttcaccagtgcagattgtggtgggaagcttcaacaccgaagggaaaaaggggccaaagctgcatgctccttcagacccaatgtctgcaccgctaaagatggtgccgatgagcgggacggggccaagcagcccgccatcgaggggcacattgagtgaatcatcgggcggcccggggagcccgctgaaccaagtgaccagaccttggtcccgtctgaccgccgtagaacttgcgaaaggaaatgtcgtggcggtggtactcgaggtactccgtcgaaagcgtacggagtacggacccaggagagttgctgactcagcagaggctgggctctctcccacgacgaaacgagcggcccacgaaaatttcgccgcgccgcggccgcatcggagccctagcccagccaccggagtccggcgccagcggcggcgaggcggcgaagtgcgggggagggagatgtcggtgcggatcaaggcggtggtggacaggttcgtgaaggagctgcaggaggcgctggacgcggacatccaggatcgcgtcatgaaggagcgggagatgcagagctacatccaggagcgggagcgcgaggtcgccgagcgggaggccgcctggaaggccgagctctcccgccgcgaggctgagattgcgcggcaagaggcaaggctgaagatggaaaaggagaacttagagaaggaaaagagcgtgctcatgggcactgcttcgaatcaggacaaccaagacggtgccctcgagatcactgttagcggtgaaaagtacaggtgccttcgtttctctaaggcaaagaaatga

SEQ ID NO: 494 - protein, 573 aa, Oryza sativa subsp
MEVTQVRASSEMAGGREPFVLPKSPPAAAPAPPPPSSGGMQSVRMAYTADGTPIFAPVNSAPAPAPAATYPPAGGNGAAALDAGEPVVKKKRGRPRKYGPDGSMSLALVPVSTAAVAASGPFSPAAAAKSPDAVLSAPPPGAKKRGRPKGSTNKKHVPSFGIGDIEDKKLLSGVLNSALAQVLLAVFTRSEMIYWSAGAGFTPHVIFVKAGEDVSAKIMSFSQHGTRGVCVLSANGAISNVTLRQAATSGGTVTYEGRFEILSLSGSFLLSENGGHRSRTGGLSVSLAGPDGRVLGGGVAGLLTAASPVQIVVGSFNTEGKKGPKLHAPSDPMSAPLKMVPMSGTGPSSPPSRGTLSESSGGPGSPLNQVTRPWSRLTAVELAKGNVVAVVLEVLRRKRTEYGPRRVADSAEAGLSPTTKRAAHENFAAPRPHRSPSPATGVRRQRRRGGEVRGREMSVRIKAVVDRFVKELQEALDADIQDRVMKEREMQSYIQEREREVAEREAAWKAELSRREAEIARQEARLKMEKENLEKEKSVLMGTASNQDNQDGALEITVSGEKYRCLRFSKAKK

SEQ ID NO: 495 - DNA, 1218 bp, Oryza sativa subsp
  CDS (1)..(1218)
atggaggccaaggacgtctcgccgctcgtcaccgtcccgcccgcgcccgccgccgccgcgccgccacctgcggcagcgcccgcgccgccgccgtcccagccgccgccgccgccgctgccgttcgcgcagcaggcgccgccgccggccgccaaccccgcggcggcgcccatgcggctgtcgttcgaccagatggcagggaaggcgcccgggggggagcagcagcaccaccaccacccggggcccatgctgtacgcggcggcgcccgcgggcggcgccgcgccgccgccgcagggcggcaatgtgatgggcatgggcgagctgatgcgcaagaagcgcggccgcccgcgcaagtacgcgcccgacgggagcatggcgctcgcgctcgcccccatctcctccgcctccggcggcgccgcgccgccgcctccgccgccagggcaccagccgcacggcttctccatcagcagcccggcgtcggatccgaacgccaagcgccgcggccggccacccggctccggcaagaagaagcagttcgaagccctaggctcatggggcatcgccttcactcctcacatcctcaccgtcaaggccggcgaggatgttgcttcaaaaattatggccttctcacagcaaggccctcgcacggtttgcattctctcagcgaatggtgcaataagcaatgtaacacttcggcagccagctacatctggtggacttgtgacttatgagggccgatttgagatcatctctctatcaggttctttcctgcttgcagaggatggcgacactcgcagcaggactggtggcctgagtgtcgcacttgcaggatctgatggccgagttcttggtggatgtgtagctggaatgctgatggccgcaacccctgtccaggttgtcgtggctagcttcatcgcggaaggtaagaaatcgaagccagtcgagacaaggaaggtcgaaccgatgtcagcgcctccacagatggcaacctacgtgccagctccggtggcgagcccgccatcggagggcacatccagtggatcttccgatgactcgggcagcccgatcaaccacagcgggatgccgtacaaccactccgggcagcagcagcaacaccagcagcaccagcacatgccccctgcttacgcatccggtggctggtcgctctcagctcatcatcagaacaggcacgactctgacatgaagatgatgtcgaactaa

SEQ ID NO: 496 - protein, 405 aa, Oryza sativa subsp
MEAKDVSPLVTVPPAPAAAAPPPAAAPAPPPSQPPPPPLPFAQQAPPPAANPAAAPMRLSFDQMAGKAPGGEQQHHHHPGPMLYAAAPAGGAAPPPQGGNVMGMGELMRKKRGRPRKYAPDGSMALALAPISSASGGAAPPPPPPGHQPHGFSISSPASDPNAKRRGRPPGSGKKKQFEALGSWGIAFTPHILTVKAGEDVASKIMAFSQQGPRTVCILSANGAISNVTLRQPATSGGLVTYEGRFEIISLSGSFLLAEDGDTRSRTGGLSVALAGSDGRVLGGCVAGMLMAATPVQVVVASFIAEGKKSKPVETRKVEPMSAPPQMATYVPAPVASPPSEGTSSGSSDDSGSPINHSGMPYNHSGQQQQHQQHQHMPPAYASGGWSLSAHHQNRHDSDMKMMSN

SEQ ID NO: 497 - DNA, 960 bp, Oryza sativa subsp
  CDS (1)..(960)
atggagcccgcgacggagaccacggcgacttcgccggctgcggctgccgctgcgcagccggaggcggaggcggaggcggaggcggagtcggcggcgacgccggtggcagtggcggcggcggcggcggcaacctatcagccgccagcgccggtggttccagtcgccgtggcaggtgcggcggcggggagagggaacgggaagaggaagagggggaggccgaggaagtacgggccggacgggagcctgctccggccgctgaaggcgaccccgatctcggcgtcggtgccggacgactccggcggggggcagtacacgccggcggcggcggtgggggccgtcatgaagcgcggcaggggccgccccgtcgggttcgtcagccgcgcgtcgccggtgtccgtggccgtgacggccgccacgtccaccgccgcggtggtcgtctcgtctccggccacccacacccagacgccgctcgggccgctaggtgaattggtagcatgtgcttctggtgcaaacttcacacctcatatcattaacgttgctgctggcgaggatgttaatatgaaggtcatatctttctcccaacaaggtccaagggcaatttgcattctgtctgctaatggggtgatttcaaatgttacattgcgtcagcaagatactttaggtggtacagtgacttatgagggccggtttgagctgctctccttatccggatcattcacgccaactgatagcggtggaacgagaagccgctccggtggaatgagcgtctcgttggcggccacggatggccgtgtcatcggaggcggagttgccggcctccttgtggctgcaagccctgttcaggttgtggtaggaagcttcctgccgagctaccagctggaccagaacgccaccaagaagcccgtcatcgagatcacgacggtgctgggcagcggctctactcctacctgtgatgcttaa

SEQ ID NO: 498 - protein, 319 aa, Oryza sativa subsp
MEPATETTATSPAAAAAAQPEAEAEAEAESAATPVAVAAAAAATYQPPAPVVPVAVAGAAAGRGNGKRKRGRPRKYGPDGSLLRPLKATPISASVPDDSGGGQYTPAAAVGAVMKRGRGRPVGFVSRASPVSVAVTAATSTAAVVVSSPATHTQTPLGPLGELVACASGANFTPHIINVAAGEDVNMKVISFSQQGPRAICILSANGVISNVTLRQQDTLGGTVTYEGRFELLSLSGSFTPTDSGGTRSRSGGMSVSLAATDGRVIGGGVAGLLVAASPVQVVVGSFLPSYQLDQNATKKPVIEITTVLGSGSTPTCDA

SEQ ID NO: 499 - DNA, 720 bp, Oryza sativa subsp
  CDS (1)..(720)
atgggcttgccggagcagccgtccggctcgtcgggccccaaggcggagctcccggtggccaaggagccggaggcgagcccgacggggggcgcggcggcggaccacgccgacgagaacaacgaatccggcggcggcgagccgcgggagggcgccgtgccccaacgcgctgccgcagccacgtcatggaggtggccggcagccccgaagtcgccgacgccatcgcgcagttctcgcgccgccgccaccgcggcgtctgcgtcctcagcggcgccggggacggtcgccaacgtcgcgctgcgccagccgtcggcgcccgggcgcccgtcatccccctccacgggccgcttcgagatcctctccctcacgggcaacttcctccccggcccggcgcctccgggctccacggggctcaccgtctacctcgccggcggccagggccaggttgtcggcggcagcgtcgtggggtcgctcatcgccgcgggcccggtcatggtgatcgcgtccacgttcgccaacgccacctacgagcgcctgccattggaggaagaagaggagggctcaggcccgcccatgcccggcggcgccgagcccctcatggccggcggccacggcatcgccgacccttcggcgctgccaatgttcaacctgccgccgagcaacgggctcggcggcggcggcgacggtttcccatgggcggcgcacccccgcccaccgtactga

SEQ ID NO: 500 - protein, 239 aa, Oryza sativa subsp
MGLPEQPSGSSGPKAELPVAKEPEASPTGGAAADHADENNESGGGEPREGAVPQRAAAATSWRWPAAPKSPTPSRSSRAAATAASASSAAPGTVANVALRQPSAPGRPSSPSTGRFEILSLTGNFLPGPAPPGSTGLTVYLAGGQGQVVGGSVVGSLIAAGPVMVIASTFANATYERLPLEEEEEGSGPPMPGGAEPLMAGGHGIADPSALPMFNLPPSNGLGGGGDGFPWAAHPRPPY

SEQ ID NO: 501 - DNA, 780 bp, Oryza sativa subsp
  CDS (1)..(780)
atggggagcatcgacggccactcgctgcagcagcatcaggggtactcccacggcggcggcgcgggagggagcaacgaggaggaggaggcgtcgccgccgcccggcggtggctcggctacggggtcggcgggccgccggccgagggggaggccgccgggctccaagaacaagccgaagccgcccgtcgtggtgacgcgggagagccccaacgcgatgcgttcccacgtgctggagatcgccagcggcgcccgacatcgtcgaggccatcgcgggcttctcccgccgcaggcagcgccggcgtctccgtgctcagcgggaagcggcgccgtcaccaacgtcacgctccggcagcccgcggggactggggccgccgccgtcgcgctgcgggggaggttcgagatattgtccatgtctggcgccttcctcccggcgccggcgccgccaggggccacggggctcgccgtgtacctcgccggcgggcaggggcaggtggtgggtgggagcgtcatgggggagctgatcgcgtcgggccccgtcatggtgatcgcggccacgttcggcaacgccacgtacgagaggctgccgctggaccaggaaggcgaggagggcgccgtgctgtccgggtcggagggcgccgccgcgcagatggagcagcagagcagcggaggcgccgtcgtgcccccgccgatgtacgccgccgtccagcagacgccgccgcacgacatgttcgggcagtgggggcatgcagcggtggctcggccgccgccgacatcgttctag

SEQ ID NO: 502 - protein, 259 aa, Oryza sativa subsp
MGSIDGHSLQQHQGYSHGGGAGGSNEEEEASPPPGGGSATGSAGRRPRGRPPGSKNKPKPPVVVTRESPNAMRSHVLEIASGARHRRGHRGLLPPQAAPASPCSAGSGAVTNVTLRQPAGTGAAAVALRGRFEILSMSGAFLPAPAPPGATGLAVYLAGGQGQVVGGSVMGELIASGPVMVIAATFGNATYERLPLDQEGEEGAVLSGSEGAAAQMEQQSSGGAVVPPPMYAAVQQTPPHDMFGQWGHAAVARPPPTSF

SEQ ID NO: 503 - DNA, 1140 bp, Oryza sativa subsp
  CDS (1)..(1140)
atggatggccgggagcagcagcagcagccgcgcgtgagctcgccgccgccggccggcggcggcttgatgatgcctcagcacccctacggcgccgcgccggcgatgccgccggggtcggcgaatgttatgcacggggtgccgctctcgttcaaccccatggcgtcgccgaccgcctcgtcgcctatgaagcccgcggatatgtcggggaccatgtaccgcaccgatcccgtcgtgcagggcatgcagcagcagcccggttccggcggtggcggcacggcggtcggcggaggggagctcgtgaagaagaagagggggaggccgaggaagtatggtcctgacgggaacatcgggttgggactgaagcccgcggctgcagcagggacggaggccggcggaccttcaggtggtgcaggatcgaactcgaaccctgacgggaagcgcagagggcgacccccaggatccgggaaaaaaaaacagctagatgctttgggatcttccgggacatcttttactccccacataataacagtgaagcctaatgaggatgttgcttcaaaaataatggcattttcacaacaaggccctcgcactacatgcataatttcagcaaatggcgctctttgcacagcaacactacgtcaaccagcaacttctggtggtatagtaacatatgagggccactttgatattctctctctgtcgggctcatttctgctcgcagaggatggcgacactcgtagcagaacaggtggtttgagtgtggcacttgctggaagcgatggacgtatagttggaggttgtgttgctggaatgctgatggcagcaacgcccgtgcaggttgtagtggggagtttcattgctgaaggtaaaaaaggcaaggaagaacatctgaaacgtgagccaacatctgccccgacgccgaaccacgcagctggctttggcgcagccacggctgccagtcctccgtctgatggatcatcaagcgaccactccgatgacccagggagtcccatgggacctaatggcagcacattcaataattcaggtcatcccatgcattcttcgtatgctcctgttagctggtcgctatctgggaatcaaggccgttacgatcccgacctgaagatgatgaccgactag

SEQ ID NO: 504 - protein, 379 aa, Oryza sativa subsp
MDGREQQQQPRVSSPPPAGGGLMMPQHPYGAAPAMPPGSANVMHGVPLSFNPMASPTASSPMKPADMSGTMYRTDPVVQGMQQQPGSGGGGTAVGGGELVKKKRGRPRKYGPDGNIGLGLKPAAAAGTEAGGPSGGAGSNSNPDGKRRGRPPGSGKKKQLDALGSSGTSFTPHIITVKPNEDVASKIMAFSQQGPRTTCIISANGALCTATLRQPATSGGIVTYEGHFDILSLSGSFLLAEDGDTRSRTGGLSVALAGSDGRIVGGCVAGMLMAATPVQVVVGSFIAEGKKGKEEHLKREPTSAPTPNHAAGFGAATAASPPSDGSSSDHSDDPGSPMGPNGSTFNNSGHPMHSSYAPVSWSLSGNQGRYDPDLKMMTD

SEQ ID NO: 505 - DNA, 882 bp, Oryza sativa subsp
  CDS (1)..(882)
atggccgggatggatcccaccggcggcggtggcggcggcggcgtggcggcgcactacctacacatgctccgcgcgcagcagcaccagccactgtccccggcaggtgacgtcaaggcggagcggtccatgctgtcgccggatgagagccccggcgcggacgccgacctaggatcggaccacccgacgtcgtcggccatggtggcggcggaggacagcggcggcggcagcgccccaacgcgttccactcccacgtcctcgaggtcgccgcgggaaccgacatcgtcgagtgcgtctgcgagttcggggcgccgccgcggccgcggcgtctccgtgctcagcggtggcggcgccgtcgccaacgtcgcgctccgccagccaggcgcgtcgcccccgggcagcctggtcgccaccatgcgcggccagttcgagatcctgtccctcacgggcaccgtcctcccgccgcccgcgccgcccagcgccagcggcctcaccgtcttcctctccggcgggcagggccaggtggtcggcgggagcgtggccggccagctcatcgccgcggggccagtcttcctcatggccgcctcgttcgccaatgccgtctacgagcgtctgccactcgatggggaggatccggaggcagaggctgccgccgccacccctcccggcgatgcggcgcagccaaccggcccaccaccaccgcagcagcagcccacagcctcgcagtcctctgaggtgaccgccggtgacggcggcggcggcggcggtctcggcatgtatcttggaggccatgtgggatcctaccagcagcagcagcagcaacttcccggaccaggagacaacttcggtagctggagcggcagcatcaggccgccgccattctga

SEQ ID NO: 506 - protein, 293 aa, Oryza sativa subsp
MAGMDPTGGGGGGGVAAHYLHMLRAQQHQPLSPAGDVKAERSMLSPDESPGADADLGSDHPTSSAMVAAEDSGGGSAPTRSTPTSSRSPREPTSSSASASSGRRRGRGVSVLSGGGAVANVALRQPGASPPGSLVATMRGQFEILSLTGTVLPPPAPPSASGLTVFLSGGQGQVVGGSVAGQLIAAGPVFLMAASFANAVYERLPLDGEDPEAEAAAATPPGDAAQPTGPPPPQQQPTASQSSEVTAGDGGGGGGLGMYLGGHVGSYQQQQQQLPGPGDNFGSWSGSIRPPPF

SEQ ID NO: 507 - DNA, 729 bp, Oryza sativa subsp
  CDS (1)..(729)
atggaggtgaggtcggagcaagggctaatggcggggagggatctgttcggcatgccgaagagcccgccggcggcggccgcggcgccgccgaaaagcgtgcgcatggcgtacacctcggacggcaccccggtgttcgcccccggatcggcgggagttggatttacaccacacgttattacagttctagctggagaggatgtgtctgcaaagattatgtcgtttgctcagcatggaaatcgtgcggtttgtgttctttcagcaaatggtgccatatcaaatgtaacacttcgccaaactgctacttcaggtggaacagtaacatatgagggccgattcgagatactatcgctgtctggctctttccttctaaccgaccatggaggccagcgtagtcgaactgggggactcagtgtttcactggctggtcctgatggtcgtctgttgggaggcggtgttgccggacttctcatagcagctactccagtccagattgtggttggaagcttcaattctgaagggaaaaaggagccaaagcagcatgctcattcagaacccgcatccgcgccatcgaaagccgtgccgacggccgggatgggacccaacagcccaccttcaagaggcacattgagtgaatcctcaggtggagctggaagcccattgcatccaggcattgctcctcccagcagcaacagccagccgccattcttgtctagcatgccatggaaatga

SEQ ID NO: 508 - protein, 242 aa, Oryza sativa subsp
MEVRSEQGLMAGRDLFGMPKSPPAAAAAPPKSVRMAYTSDGTPVFAPGSAGVGFTPHVITVLAGEDVSAKIMSFAQHGNRAVCVLSANGAISNVTLRQTATSGGTVTYEGRFEILSLSGSFLLTDHGGQRSRTGGLSVSLAGPDGRLLGGGVAGLLIAATPVQIVVGSFNSEGKKEPKQHAHSEPASAPSKAVPTAGMGPNSPPSRGTLSESSGGAGSPLHPGIAPPSSNSQPPFLSSMPWK

SEQ ID NO: 509 - DNA, 732 bp, Oryza sativa subsp
  CDS (1)..(732)
atggcggcgccggctccgacgacggcggccacgacgacctctcgccggggagcggcggtggcggcgggcccagcagcacggccggtggcgccgggatcggcggcggcgagggagagcgccaacgcgctcagggcgcatatcctcgaggtagccgccggttgcgatgtgttcgaggcgctgacggcgtacgcgcgccgccggcagcgcggggtgtgcgtgctctcggcggcggggacagtggcgaacgtcacgctccggcagccgcagtcggcgcagccccgggccggcctcgccggcggttgcgacgctgcacggcaggttcgagatactctccctcgcggggctccttcctggccccggtccgggccgccgggcgccaccagccctcgccgcgttctcgccggcgggcaggggcaggtcgtcggtggcagcgtcgccggcgcgctcatcgcggcggggcccgtcgtcgtcgtcgccgcgtcgttcagcaacgtggcgtacgagaggctgccgctcgaggacggcgacgaggtggtccccccggcgccggcagggagcgaccagggcggcggcggcagcggcggcatgccaccattaggcgttgatccgtcgggcggcgccgccaccggtgggctcccgttcttcaacatgccgttcgggatgccgccaatgccggtggacggccacgccggctggcctggcgccggcgtcgggaggccaccgttctcatga

SEQ ID NO: 510 - protein, 243 aa, Oryza sativa subsp
MAAPAPTTAATTTSRRGAAVAAGPAARPVAPGSAAARESANALRAHILEVAAGCDVFEALTAYARRRQRGVCVLSAAGTVANVTLRQPQSAQPRAGLAGGCDAARQVRDTLPRGAPSWPRSGPPGATSPRRVLAGGQGQVVGGSVAGALIAAGPVVVVAASFSNVAYERLPLEDGDEVVPPAPAGSDQGGGGSGGMPPLGVDPSGGAATGGLPFFNMPFGMPPMPVDGHAGWPGAGVGRPPFS

SEQ ID NO: 511 - DNA, 3783 bp, Oryza sativa subsp
  CDS (1)..(3783)
atggccatgggagatggtgccccgacaatgggtgctacagttgcttgcttgctgtcgtcaattccgtcccctttcttccttgtcccctgcccaatctacaccaatgaggctagccctagtcaaccatccccttgctggaacgggattgacggatcgccggagagcaagggcgacgcggacctcggcgaggtccagcagcactccggtgctgtcgacgacatcctcgcctgggccttgcgggacggggagtcgtttccgatgtggtcgcgtgggaggaggatgccgaggagatcgaaggaaaaaccggagccgcccgtcatcgtcgcgcgggaaagcaccaacacgatgcggtcgcatatgatggagattgcggacggcgaggatgtcgccgaagccgtggctgatttcgcgcgccgccggcagagctgggtcgcctcgctgcgccagcccggcgagcctggctccgtcatcgagctctccggcccattggagatcctgtccctctccggagcatttatgccgccgccgagcctggccaacgccacggggctcaaggccctcctcgccggcgggcagggccaggtcatcggcggcaacgtcgtcggcgccctccgcgctagaggacatgtcacgatcctcgcggccgtcgtctccaacgttacctacgaatgcctctcgcccgaacacgatgttgttgacgaccctggcaaggtgccagccgccgttacagagagccatagtagaatggagccactcagctgcaccacaccggaaatgaaaatggaaaccgatgctgtacagctcaaatgtgattggcccatgcagcagtctgatgataccaatttacgtctccacagagacaaacagtgggcggtgcaggacaaacggcaggtgcttcagaggactctcactgaaatgcacacttttatcaaacatgctgaatggtggttccacaaggacgtctttgcccaggtcctgcaggatgctaaagatgcagtaaactgtgcagaggacctgttggatgagatcaattaccatgaactccagaataaagtcgagggtcatgcaattctatttcatgtccaagattatcatgaaacaaaaattgataaaatccaaggaaagctcgaacatctcgtaagacaaatggaacagctgggcttgtatgatgaacggcagcagtttattattgagtcaatcaaccgagaagacgatcttttcggagaggagcaaacaatctttgggcgtcagaaagagatgtcggaattgattgagttgattgttttgcaagagaacagtccaactgataagcaagtcactgaggtacatgcagtatctgactccaagagagcgaaattggaaaacgtttctgttttgccaatagtaggaagtggtggtgtggggaagacaacactagcaattcttgttttcaatgagaggagagtccgggatcattttgaccttctgatttggatatgtgtctcggatggctttgatgagaagaagctgatgaagaggctggcatggtctgttgccgaaaatgagatgaaaacggatgatttaggttgtctccagagaattctaactaatggcatcattcatcacacaaggagagtcctgcttgtacttgatgatgtgcagacggatgcatgccgagaagattgccatggatggaaaaatttccttgccccactaaaatatgctagatcaggaagcatggttttggtcacgacaagatatcatagggttgctgagcgtgttggcacgctgaagcacatgtttttggagggcttacctgaagaaactatctgggaattctttaggatgcttacatttggttctcgtaattccaacagcaatgcagtgctagagcctattggcagaagcatagttgcaaggttagatggttcttctctgggtattaaaattatcggacggctattaagtctgaaactggatgctaaatactggaaaatcatattggaaagtgaattgtggggatggcctcaccaggaggaagccagcattttcacagcccttcagttgagctaccaatatctgcccttccatttgaagcgttgcttctccttctgttctctgtaccccaggggttatgagtttgacgcagagacacttgtggatagctgggtggcagtgggcttcgtgatgccttctaggagcattcttgcagtagatattggacatgtgtacttcaaccaacttgtgagtcgatctttctttcagagatctccaacatcttccagatatgtcatacatgatttattacatgatatggcacagtatgttgcaaggaatgattgcttcatgatcaagtctagatgcggcatgtcgagaattcctcctaaagtgcgtcatgtgtcaattctcggcaacggtgaactcagcagcactgatatcgagtgcctgaacacatacaagacgctgcggtcaattgtgtgcatcggcgttggctgcgatattattactaattctgtacttgaaacatggttcgatcatctcactcgcattcgaatgctgagattcatatcgtgccggctgaaggagctcccttgcaatgttggcaaactaatacatcttcgctatcttgacatttctgcttgcgactttgacaagctgccgactgatttgttttgccgtctttacaagctggaaatcttagatgctcagaactgcacacttcatgctgtccccaaggatatcatcaagttagtaaacttgcagaggcttagactgaaggatgatcttatcagccaacttggacgtgtgcccgaagtaggtaagctcactctccttcaaaacatgccttactacgctgttgatgacaagcccggaaggggaattcaggagctgaagaacatgaaccaccttcatggaggattggagatcgacggccttcgcaacgtgacgagccgggaggaagttgctggagctgagctagccaagaagatttacctcgacacattggttctgaaatggcacgagtcaattaggcctcagaagcataacagcaccaaggagatggaagtgcttgaagctctacggcctagctcaaatatcaagcatctagaagtgaagttttacatgggagatggattgagtccaatgtggcttcgccatgatgagctgagcagcttggcatcactctctatcaactcctgccctaacactacaacactgttcttgatcgaaccctccgaaacgggcagcagcagaagcagctcagttagtttccaatcacttaccaagctatccattacctggtgcagaagtctaacgagccttgataatttcctacaaccagaatgtctgccaatgatcaaggtaatacagatctcaaattgcgaggaattagcgtcactgccaaccaacaaccttgtgcattttgttcatctggaagatctggagatctgccattgttggaatctcaattgggagccaggcttggccttgccaccctctttgaaatcgctcaagctggaagcatgtggggagttctccgattcgacgctcagctgcctgcacaacctcaccgctcttaccattctgaatttgcggttttgtccgagcatcgagtccatttctgcacaaatctggagtggcctctggtcaatagagaacttgaagatcgtctgttgccagggactggttacagttggaggatcagagtcgattgcagggataaagaatgtggacatcaggcactgctcgaagctgcaagacctggagcagccgtttcgtagtggtcaggctgacagtcagtag

SEQ ID NO: 512 - protein, 1260 aa, Oryza sativa subsp
MAMGDGAPTMGATVACLLSSIPSPFFLVPCPIYTNEASPSQPSPCWNGIDGSPESKGDADLGEVQQHSGAVDDILAWALRDGESFPMWSRGRRMPRRSKEKPEPPVIVARESTNTMRSHMMEIADGEDVAEAVADFARRRQSWVASLRQPGEPGSVIELSGPLEILSLSGAFMPPPSLANATGLKALLAGGQGQVIGGNVVGALRARGHVTILAAVVSNVTYECLSPEHDVVDDPGKVPAAVTESHSRMEPLSCTTPEMKMETDAVQLKCDWPMQQSDDTNLRLHRDKQWAVQDKRQVLQRTLTEMHTFIKHAEWWFHKDVFAQVLQDAKDAVNCAEDLLDEINYHELQNKVEGHAILFHVQDYHETKIDKIQGKLEHLVRQMEQLGLYDERQQFIIESINREDDLFGEEQTIFGRQKEMSELIELIVLQENSPTDKQVTEVHAVSDSKRAKLENVSVLPIVGSGGVGKTTLAILVFNERRVRDHFDLLIWICVSDGFDEKKLMKRLAWSVAENEMKTDDLGCLQRILTNGIIHHTRRVLLVLDDVQTDACREDCHGWKNFLAPLKYARSGSMVLVTTRYHRVAERVGTLKHMFLEGLPEETIWEFFRMLTFGSRNSNSNAVLEPIGRSIVARLDGSSLGIKIIGRLLSLKLDAKYWKIILESELWGWPHQEEASIFTALQLSYQYLPFHLKRCFSFCSLYPRGYEFDAETLVDSWVAVGFVMPSRSILAVDIGHVYFNQLVSRSFFQRSPTSSRYVIHDLLHDMAQYVARNDCFMIKSRCGMSRIPPKVRHVSILGNGELSSTDIECLNTYKTLRSIVCIGVGCDIITNSVLETWFDHLTRIRMLRFISCRLKELPCNVGKLIHLRYLDISACDFDKLPTDLFCRLYKLEILDAQNCTLHAVPKDIIKLVNLQRLRLKDDLISQLGRVPEVGKLTLLQNMPYYAVDDKPGRGIQELKNMNHLHGGLEIDGLRNVTSREEVAGAELAKKIYLDTLVLKWHESIRPQKHNSTKEMEVLEALRPSSNIKHLEVKFYMGDGLSPMWLRHDELSSLASLSINSCPNTTTLFLIEPSETGSSRSSSVSFQSLTKLSITWCRSLTSLDNFLQPECLPMIKVIQISNCEELASLPTNNLVHFVHLEDLEICHCWNLNWEPGLALPPSLKSLKLEACGEFSDSTLSCLHNLTALTILNLRFCPSIESISAQIWSGLWSIENLKIVCCQGLVTVGGSESIAGIKNVDIRHCSKLQDLEQPFRSGQADSQ

SEQ ID NO: 513 - DNA, 1005 bp, Oryza sativa subsp
  CDS (1)..(1005)
atgtcgttctgcgagagggacatgaacaaggagagcatgtaccaagaacgggacgacatggcggggatacggttcgcgacgccgccgctgcctcagcagcagcagcagcagcagctggtggagtgcttctccgacgaggtggacagccgcgggagtggcggcgagatgaaggatgccgtggggagcgggagtgggcagctggtcgttgttggtggcggggatggggcgagcatcgaggtggcgaagaagaggagggggaggccgccggggtccaagaacaagccgaagccgcccgtggtgatcacgcgggaggcggagccggcggcggcgatgcggccgcacgtgatcgagatccccggcgggcgggacgtcgcggaggcgctcgcgcggttctcgagccgtcggaacctcgggatctgcgtgctcgccggcaccggcgcggtcgccaacgtgtcgctccgccacccgtcacccggggtcccgggctcagctccggctgcgatcgtgttccacggccggtacgagatcctctccctgtcggccacgttcctgcctccggccatgtcctccgtggcgccccaggccgcggtcgccgccgcgggcctctccatctcgctcgccggcccgcacggccagatcgtcggcggggccgtggcaggcccgctctacgccgcgaccaccgtcgtggtcgtcgccgccgccttcaccaaccccaccttccaccgcctccccgccgacgacgacgcgtcggtgtccgtctcggtgtcactctccggcagcggcgacgcggacgaacaccggggccaccagcacaaacctgagccgcaagaaccgcgccaacttcgacggccgccaccgcacctgtcagcagccgccgccgtctcagcagcacagccggtggagccatgcggcgcgcccatgtacgcctgccaccctcagccacaggaggtgatgtggccgccgccggctcgtacgccgcacccgccgccgccgccgccgtactaa

SEQ ID NO: 514 - protein, 334 aa, Oryza sativa subsp
MSFCERDMNKESMYQERDDMAGIRFATPPLPQQQQQQQLVECFSDEVDSRGSGGEMKDAVGSGSGQLVVVGGGDGASIEVAKKRRGRPPGSKNKPKPPVVITREAEPAAAMRPHVIEIPGGRDVAEALARFSSRRNLGICVLAGTGAVANVSLRHPSPGVPGSAPAAIVFHGRYEILSLSATFLPPAMSSVAPQAAVAAAGLSISLAGPHGQIVGGAVAGPLYAATTVVVVAAAFTNPTFHRLPADDDASVSVSVSLSGSGDADEHRGHQHKPEPQEPRQLRRPPPHLSAAAAVSAAQPVEPCGAPMYACHPQPQEVMWPPPARTPHPPPPPPY

SEQ ID NO: 515 - DNA, 1437 bp, Oryza sativa subsp
  CDS (1)..(1437)
atgtcgctggcattggtgcccgtgtccaccgcggcggtggcggcctccgggcctttctcgccggcggctgccgcgaagtcgccggacgccgtgtcgtcggcgccgccgccgggggcgaagaagagggggcggccaaagggctccacgaacaagaagcacgtgccctctttcggaattggagatatcgaggataaaaagttactgtcaggagtacttaactctgcacttgctcaggttttgctggctgtttttactagatctgagatgatttactggtcagcaggagctggattcacacctcatgttatttttgttaaagctggagaggatgtatctgcaaagatcatgtcattctcccagcatggaactcgtggagtatgcgttctgtcagcaaacggcgccatatcaaatgtgacacttcggcaagctgctacttccggtggaacagtaacatacgagggacgatttgagatactgtcgctgtccggttcattccttctatcagagaatggaggccatcgtagtcgaactggtgggctcagtgtttctctagcaggccctgatggtcgcgtcttgggtggtggagttgctggacttctgacagctgcttcaccagtgcagattgtggtgggaagcttcaacaccgaagggaaaaaggggccaaagctgcatgctccttcagacccaatgtctgcaccgctaaagatggtgccgatgagcgggacggggccaagcagcccgccatcaaggggcacattgagtgaatcatcgggcggcccggggagcccgctgaaccaagcttgtggctcagttcttttaccttctggtatgctctctctgtgtgaagctgaaaaatgttctgcacatttttcatttttctctgttgctgatgctaacccatttgtcacttcgaaagcgtacggacccaggagagttgctgactcagcagaggctgggctctctcccacgacgaaacgagcggcccacgaaaatttcgccgcgccgcggccgcatcggagccctagcccagccgccggagtccggcgccagcggcggcgaggcggcgaagtgcgggggagggagatgtcggtgcggatcaaggcggtggtggacaggttcgtgaaggagctgcaggaggcgctggacgcggacatccaggatcgcgtcatgaaggagcgggagatgcagagctacatccaggagcgggagcgcgaggtcgccgagcgggaggccgcctggaaggccgagctctcccgccgcgaggctgagattgcgcggcaagaggcaaggctgaagatggaaaaggagaacttagagaaggaaaagagcgtgctcatgggcactgcttcgaatcaggacaaccaagacggtgccctcgagatcactgttagcggtgaaaagtacaggtgccttcgtttctctaaggcaaagaaatga

SEQ ID NO: 516 - protein, 478 aa, Oryza sativa subsp
MSLALVPVSTAAVAASGPFSPAAAAKSPDAVSSAPPPGAKKRGRPKGSTNKKHVPSFGIGDIEDKKLLSGVLNSALAQVLLAVFTRSEMIYWSAGAGFTPHVIFVKAGEDVSAKIMSFSQHGTRGVCVLSANGAISNVTLRQAATSGGTVTYEGRFEILSLSGSFLLSENGGHRSRTGGLSVSLAGPDGRVLGGGVAGLLTAASPVQIVVGSFNTEGKKGPKLHAPSDPMSAPLKMVPMSGTGPSSPPSRGTLSESSGGPGSPLNQACGSVLLPSGMLSLCEAEKCSAHFSFFSVADANPFVTSKAYGPRRVADSAEAGLSPTTKRAAHENFAAPRPHRSPSPAAGVRRQRRRGGEVRGREMSVRIKAVVDRFVKELQEALDADIQDRVMKEREMQSYIQEREREVAEREAAWKAELSRREAEIARQEARLKMEKENLEKEKSVLMGTASNQDNQDGALEITVSGEKYRCLRFSKAKK

SEQ ID NO: 517 - DNA, 825 bp, Oryza sativa subsp
  CDS (1)..(825)
atgagatggtcacgtgatgggcctggaatcctggcccggggccccaccaccagcctcaccacctctgactcacctccgtgttcacacccgctcccggctgcgtcgctgccatgtgggccccacactggccgcctgccgaatagcctcgctggctcatggggcatcgccttcactcctcacatcctcaccgtcaaggccggcgaggatgttgcttcaaaaattatggccttctcacagcaaggccctcgcacagtttgcattctctcagcgaatggtgcaataagcaatgtaacacttcggcagccagctacatctggtggacttgtgacttatgagggccgatttgagatcatctctctatcaggttctttcctgcttgcagaggatggcgacactcgcagcaggactggtggcctgagtgtcgcacttgcaggatctgatggccgagttcttggtggatgtgtagctggaatgctgatggccgcaacccctgtccaggttgtcgtggctagcttcatcgcggaaggtaagaaatcgaagccagtcgagacaaggaaggtcgaaccgatgtcagcgcctccacagatggcaacctacgtgccagctccggtggcgagcccgccatcggagggcacatccagtggatcgtccgatgactcgggcagcccgatcaaccacagcgggatgccgtacaaccactccgggcagcagcagcaacaccagcagcaccagcacatgccccctgcttacgcatccggtggctggtcgctctcagctcatcatcagaacaggcacgactctgacatgaagatgatgtcgaactaa

SEQ ID NO: 518 - protein, 274 aa, Oryza sativa subsp
MRWSRDGPGILARGPTTSLTTSDSPPCSHPLPAASLPCGPHTGRLPNSLAGSWGIAFTPHILTVKAGEDVASKIMAFSQQGPRTVCILSANGAISNVTLRQPATSGGLVTYEGRFEIISLSGSFLLAEDGDTRSRTGGLSVALAGSDGRVLGGCVAGMLMAATPVQVVVASFIAEGKKSKPVETRKVEPMSAPPQMATYVPAPVASPPSEGTSSGSSDDSGSPINHSGMPYNHSGQQQQHQQHQHMPPAYASGGWSLSAHHQNRHDSDMKMMSN

SEQ ID NO: 519 - DNA, 1056 bp, Arabidopsis thaliana
  CDS (1)..(1056)
atgtcaggatctgagacgggtttaatggcggcgaccagagaatcaatgcaatttacaatggctctccaccagcagcagcaacacagtcaagctcaacctcagcagtctcagaacaggccattgtcattcggtggagacgacggaactgctctttacaagcagccgatgagatcagtatcaccaccgcagcagtaccaacccaactcagctggtgagaattctgtcttgaacatgaacttgcccggaggtgagtctggaggcatgactggaactggaagtgagccagtgaaaaagaggagaggtagaccgaggaaatatgggcctgatagtggtgaaatgtcacttggtttgaatcctggagctccttctttcactgtcagccaacctagtagcggcggcgatggaggagagaagaagagaggaagacctcctggttcttctagcaaaaggctcaagcttgaagctttaggctcgactggaatcggatttacgcctcatgtacttaccgtgctggctggagaggatgtttcatccaagataatggcgttaactcataatggaccccgtgctgtgtgtgtcttgtctgcaaatggagccatctccaatgtgactctccgccagtctgccacatccggtggaactgttacatatgaggggagatttgagattctgtctttatcgggatctttccatttgctggagaacaatggtcaaagaagcaggacgggaggtctaagcgtgtcattatcaagtccggatggtaatgtcctcggtggcagtgtagctggtcttcttatagcagcatcacctgttcagattgttgttgggagtttcttaccagacggagaaaaagaaccaaaacagcatgtgggacaaatgggactgtcgtcacccgtattaccgcgtgtggccccaacgcaggtgctgatgactccaagtagcccacaatctcgaggcacaatgagtgagtcatcttgtggaggaggacatggaagccctattcatcagagcactggaggaccttacaataacaccattaacatgccctggaagtag

SEQ ID NO: 520 - protein, 351 aa, Arabidopsis thaliana
MSGSETGLMAATRESMQFTMALHQQQQHSQAQPQQSQNRPLSFGGDDGTALYKQPMRSVSPPQQYQPNSAGENSVLNMNLPGGESGGMTGTGSEPVKKRRGRPRKYGPDSGEMSLGLNPGAPSFTVSQPSSGGDGGEKKRGRPPGSSSKRLKLEALGSTGIGFTPHVLTVLAGEDVSSKIMALTHNGPRAVCVLSANGAISNVTLRQSATSGGTVTYEGRFEILSLSGSFHLLENNGQRSRTGGLSVSLSSPDGNVLGGSVAGLLIAASPVQIVVGSFLPDGEKEPKQHVGQMGLSSPVLPRVAPTQVLMTPSSPQSRGTMSESSCGGGHGSPIHQSTGGPYNNTINMPWK

SEQ ID NO: 521 - DNA, 813 bp, Arabidopsis thaliana
  CDS (1)..(813)
atggaacttaacagatctgaagcagacgaagcaaaggccgagaccactcccaccggtggagccaccagctcagccacagcctctggctcttcctccggacgtcgtccacgtggtcgtcctgcaggttccaaaaacaaacccaaacctccgacgattataactagagatagtcctaacgtccttagatcacacgttcttgaagtcacctccggttcggacatatccgaggcagtctccacctacgccactcgtcgcggctgcggcgtttgcattataagcggcacgggtgcggtcactaacgtcacgatacggcaacctgcggctccggctggtggaggtgtgattaccctgcatggtcggtttgacattttgtctttgaccggtactgcgcttccaccgcctgcaccaccgggagcaggaggtttgacggtgtatctagccggaggtcaaggacaagttgtaggagggaatgtggctggttcgttaattgcttcgggaccggtagtgttgatggctgcttcttttgcaaacgcagtttatgataggttaccgattgaagaggaagaaaccccaccgccgagaaccaccggggtgcagcagcagcagccggaggcgtctcagtcgtcggaggttacggggagtggggcccaggcgtgtgagtcaaacctccaaggtggaaatggtggaggaggtgttgctttctacaatcttggaatgaatatgaacaattttcaattctccgggggagatatttacggtatgagcggcggtagcggaggaggtggtggcggtgcgactagacccgcgttttag

SEQ ID NO: 522 - protein, 270 aa, Arabidopsis thaliana
MELNRSEADEAKAETTPTGGATSSATASGSSSGRRPRGRPAGSKNKPKPPTIITRDSPNVLRSHVLEVTSGSDISEAVSTYATRRGCGVCIISGTGAVTNVTIRQPAAPAGGGVITLHGRFDILSLTGTALPPPAPPGAGGLTVYLAGGQGQVVGGNVAGSLIASGPVVLMAASFANAVYDRLPIEEEETPPPRTTGVQQQQPEASQSSEVTGSGAQACESNLQGGNGGGGVAFYNLGMNMNNFQFSGGDIYGMSGGSGGGGGGATRPAF

SEQ ID NO: 523 - DNA, 975 bp, Arabidopsis thaliana
  CDS (1)..(975)
atggatccagtacaatctcatggatcacaaagctctctacctcctcctttccacgcaagagactttcaattacatcttcaacaacagcaacaagagttcttcctccaccatcaccagcaacaaagaaaccaaaccgatggtgaccaacaaggaggatcaggaggaaaccgacaaatcaagatggatcgtgaagagacaagcgacaacatagacaacatagctaacaacagcggtagtgaaggtaaaggcatagatatacacggtggttcaggagaaggaggtggtggctccggaggagatcatcagatgacaagaagaccaagaggaagaccagcgggatccaagaacaaaccaaaaccaccgattatcatcacacgggacagcgcaaacgcgcttagaacccacgtgatggagatcggagatggctgcgacttagtcgaaagcgttgccacttttgcacgaagacgccaacgcggcgtttgcgttatgagcggtactggaaatgttactaacgtcactatacgtcagcctggatctcatccttctcctggctcggtagttagtcttcacggaaggttcgagattctatctctctcaggatcttttctccctcctccggctcctcctacagccaccggattgagtgtttacctcgctggaggacaaggacaggtggttggaggaagcgtagttggtccgttgttatgtgctggtcctgtcgttgtcatggctgcgtcttttagcaatgcggcgtacgaaaggttgcctttagaggaaggtgagatgcagacgccggttcatggcggaggaggaggaggatcattggagtcgccgccaatgatgggacaacaactgcaacatcagcaacaagctatgtcaggtcatcaagggttaccacctaatcttcttggttcggttcagttgcagcagcaacatgatcagtcttattggtcaacgggacgaccaccgtattga

SEQ ID NO: 524 - protein, 324 aa, Arabidopsis thaliana
MDPVQSHGSQSSLPPPFHARDFQLHLQQQQQEFFLHHHQQQRNQTDGDQQGGSGGNRQIKMDREETSDNIDNIANNSGSEGKGIDIHGGSGEGGGGSGGDHQMTRRPRGRPAGSKNKPKPPIIITRDSANALRTHVMEIGDGCDLVESVATFARRRQRGVCVMSGTGNVTNVTIRQPGSHPSPGSVVSLHGRFEILSLSGSFLPPPAPPTATGLSVYLAGGQGQVVGGSVVGPLLCAGPVVVMAASFSNAAYERLPLEEGEMQTPVHGGGGGGSLESPPMMGQQLQHQQQAMSGHQGLPPNLLGSVQLQQQHDQSYWSTGRPPY

SEQ ID NO: 525 - DNA, 687 bp, Oryza sativa subsp
  CDS (1)..(687)
atgggcgtggtcaccgcgaacgacgcggcggcggccgcgccgggcaagctccggcggccgagcagggcggcggcggcggcgctgtgcccctgcaagggccgcggggcgccgaagccgccgccggtggccgtgatcgcgcacgagtgccccagcgcgatgcgcgccctcgtcgtggaggtccccgcggggcgagacgtggtgtcgtgcgtcgccgcagtggcgcgccgcgcgcggcgcggcgcgctggtgctgggcgcgtccgggcgcgtcgcggacgtggtgctccgggagcccgcggcggtggtgctccgcggcaccatggagatactgggcctggcggggtgcttcttcccgtccccaccgccgcatgcggcggcagagggcgcccccggaggcggaggcgcttccgcggcggtgttcctggccgggccgcgcggcggcgtgctcggcggcggcgtcgcgccgggagggctcgtcgccgccgggccggtggtggtggtgctggccacgttcgtcgcggcggcgttcgaccggctgccgctcctgaagggggaagagaccgcgaattcggaagggtgcgacgtgcatggcgtcaccagacgccggcggtgcggtgctcagccgccgcagcagcagcagcagcggtgcgggtgggcgctgtgccggaagctgggcgcgaagagctaa

SEQ ID NO: 526 - protein, 228 aa, Oryza sativa subsp
MGVVTANDAAAAAPGKLRRPSRAAAAALCPCKGRGAPKPPPVAVIAHECPSAMRALVVEVPAGRDVVSCVAAVARRARRGALVLGASGRVADVVLREPAAVVLRGTMEILGLAGCFFPSPPPHAAAEGAPGGGGASAAVFLAGPRGGVLGGGVAPGGLVAAGPVVVVLATFVAAAFDRLPLLKGEETANSEGCDVHGVTRRRRCGAQPPQQQQQRCGWALCRKLGAKS

SEQ ID NO: 527 - DNA, 1035 bp, Medicago truncatula
  CDS (1)..(1035)
atggattctcatgaaccacaacaaccacaccctcaccctcacccagaccaccttcaattggaaaatgttgtactagtggatcctaatccattcacaaacactgttttgaccaccatgatggaaccgatcactgctcgattccctcaactccacatgaacactaaccaaccccctcattccgagcctctcaacaacaacattccttctaccttgaaaccatgtgtgactgcttcctctggatctggttcaatccataaaaaaaagggtcgaccgaggaagtattttcctgatggaaacattgctttggtctcaagcccagccctggatgctaccattacttctcattcttcttccattgccaataagagtactaggggaagaggaaggccccgtggatcattgaacaagaagaagaaagttgaagtgtctggagttagtggaactggtttctctcaacatgtgatcactgtgaaccctggagaggacattgttatgaaacttaagactttttgtcaaggaggacctaatacagatatgtgcattctttctgctcatggtttagttggtactgtagctcttcatcagtcaggaaccattgttcttcgtgagggtcgatttgagattttatctctatcaggaatgttagaagaatttgacaacaaaaatggctttaagacaatgggttactttaaggtgtctttagtggatcctaatttaaacgttttgggaggtgtagttgctgataagcttattgcggcatccttcgtaaaggttatagtgggtagttttactttggatggcaaaaattgtagctcaagtaacctgaaattggggtcttcttcaatgacgatatctcaatttgctgctcctaggactccaactagtgctgctgcctctcaagggccttcatctatgtcctatggcaacaatgagaatattcccttcgatcaagtgcttggaatctacaataatgatagtgaacccattcctacattatcgatgtaccaacaaattgactcaccaaactcgaagtga

SEQ ID NO: 528 - protein, 344 aa, Medicago truncatula
MDSHEPQQPHPHPHPDHLQLENVVLVDPNPFTNTVLTTMMEPITARFPQLHMNTNQPPHSEPLNNNIPSTLKPCVTASSGSGSIHKKKGRPRKYFPDGNIALVSSPALDATITSHSSSIANKSTRGRGRPRGSLNKKKKVEVSGVSGTGFSQHVITVNPGEDIVMKLKTFCQGGPNTDMCILSAHGLVGTVALHQSGTIVLREGRFEILSLSGMLEEFDNKNGFKTMGYFKVSLVDPNLNVLGGVVADKLIAASFVKVIVGSFTLDGKNCSSSNLKLGSSSMTISQFAAPRTPTSAAASQGPSSMSYGNNENIPFDQVLGIYNNDSEPIPTLSMYQQIDSPNSK

SEQ ID NO: 529 - DNA, 1056 bp, Medicago truncatula
  CDS (1)..(1056)
atggatgggagagaggctatggcattttctggtggccctggttcatattacatgcatagaggaggggctggtgttgcagggtctggttctggagggttccaattaccccctcctggattcagacctttgccaaacactggcattatagctcagccaaatgctaggggtcagggtggtgacactagttccatgttttcattggagactcagtctcataactctcatgccaattttaatcatggcattaacattggtgcatcttctggggcaccttctagtgaccctgtgaaaaagaaaagagggagaccccggaaatatggtccggatggatcggtttctttgaaactttctccaacgtctgcccctgcaaaatccactcaggaggattcaactacaccttctgagaaacggggtagaggtcgccctcgtggatctggaaggaagcaacagctagctgcattaggtgactggatgaccagttcagcagggttggctttttcgcctcatgttatcaccattggggttggtgaggacattgcagcaaagctattgtctttatcacagcagagaccaagggctctgtgcatcttgtcgggcaatgggatagttacttcagttactctgcgacaacctgcctctaccaacattggtgtaacttatgagggaaaattccaaatattaagcttgtctggttcttacttggttgctgaagacagtggaccatccaatagaacaggaggcataagtgtttctctttctagtcgtgatggtcatgttattggtggcagtgttgctaagcttattgctggaagtctaatacaggtggttgtatgcagttttgtatatggtggtggctcgaaggttaagactaagcaagagaccgctgccaatggtgaaagttctgaacctcataacgatgataagctagcttctccagccagtgctccacctggtcaaaactacgtctcttctcttacaggcatgtggcccggatcacagccatctgacgtgaaaagcgtgcacgcacatactggctttgacttgacaagaggatga

SEQ ID NO: 530 - protein, 351 aa, Medicago truncatula
MDGREAMAFSGGPGSYYMHRGGAGVAGSGSGGFQLPPPGFRPLPNTGIIAQPNARGQGGDTSSMFSLETQSHNSHANFNHGINIGASSGAPSSDPVKKKRGRPRKYGPDGSVSLKLSPTSAPAKSTQEDSTTPSEKRGRGRPRGSGRKQQLAALGDWMTSSAGLAFSPHVITIGVGEDIAAKLLSLSQQRPRALCILSGNGIVTSVTLRQPASTNIGVTYEGKFQILSLSGSYLVAEDSGPSNRTGGISVSLSSRDGHVIGGSVAKLIAGSLIQVVVCSFVYGGGSKVKTKQETAANGESSEPHNDDKLASPASAPPGQNYVSSLTGMWPGSQPSDVKSVHAHTGFDLTRG

SEQ ID NO: 531 - DNA, 1041 bp, Medicago truncatula
  CDS (1)..(1041)
atggatcacggggaccatatggcgttatccaattctgcatcttactatatgcagcagagagtactacctggttctggagcacaacccgagttacatgtttcgccgagttttaatcaactgtctaatcccaatctgccatttcaatccaacattggtggtggtggtagtaacattggaaccacactaccgctagaatcttcggcaatttcatctcaaggtgtcaatatgagtggtcatactggagtaccgtctggggaaactgtgaaaaggaagagaggaaggccgaggaaatatggcgcagatagagttgtgtcattggcactgagtccaagtccaacaccatctagtaatcctggaactatgacgcaaggcgggccgaaacgagggagagggcgtccgcctgggagtgggaagaaacaacaactggcttcttttggagagttgatgtctggttcagctgggacgggattcattcctcatgtcatcgaaattgcaagtggagaagacattgcagcaaaaatcttgacattttctcaggtgcgagctagagctctttgtgttttgtcatcttctggcagtgtctcatccgtcattattcgtgagccttcaatttcaggcggcactctcaaatatgagggacattttcacataatgagcatgtcaggctgttacgtgcctactgaaaatggctcctcacggaaccgagatggtggactaagtatttcccttcttggtcctgatggccgcctctttggtggagcagttggtggaccgcttgttgctgccagtcctgtccaggtgatgattgggagctttctttggggtagattgaaggcaaagaacaagaaaaaggaaagctcagaagatgcagaaggtactgttgaatcagatcatcaaggagctcataatccagctgcactgaatagcatttcaccaaatcaaaatctgactccaacctcatccttaagcccttggtcagcagcatcgcgtcagatggatatgggtaactcccatgctgacattgatttaatgcgtggttga

SEQ ID NO: 532 - protein, 346 aa, Medicago truncatula
MDHGDHMALSNSASYYMQQRVLPGSGAQPELHVSPSFNQLSNPNLPFQSNIGGGGSNIGTTLPLESSAISSQGVNMSGHTGVPSGETVKRKRGRPRKYGADRVVSLALSPSPTPSSNPGTMTQGGPKRGRGRPPGSGKKQQLASFGELMSGSAGTGFIPHVIEIASGEDIAAKILTFSQVRARALCVLSSSGSVSSVIIREPSISGGTLKYEGHFHIMSMSGCYVPTENGSSRNRDGGLSISLLGPDGRLFGGAVGGPLVAASPVQVMIGSFLWGRLKAKNKKKESSEDAEGTVESDHQGAHNPAALNSISPNQNLTPTSSLSPWSAASRQMDMGNSHADIDLMRG

SEQ ID NO: 533 - DNA, 987 bp, Medicago truncatula
  CDS (1)..(987)
atgtcgaatcgatggtggagtggaagacaaacggaggcgaacccggtcgaaggagagaaccgaaacggtccaacccggatcattttacgaagagagtcacgaagggcaagtaacggtagcgttaacggcaacgttaccggcggtaacgttactccaacgaggagtaacaccagcaataccggcaccggcaacagcaacggccatgttaacgacgaacttgagaacagcaatggccgttccggcgaccagaccgccagaagtggacgccggccacgtggacgtccgccggggtcgaagaacaagccaaaaccaccgctgatgatcacaaaagaaactccaaacgctcttagcagcgttatcttggaagtcgccaacggagccgacatcgcccatagcatttcatcctatgctaaccgtcgccaccgtggtgtttcagttctcagcggcactggttatgttaccaacgtgacactccggcaagataatgctccgggaggaatgatatctcttcaagggaggtgtcacattctgtcactcagcggtgcttttttgcctccgccttcgccgcctgatgctactggactgactgtttatcttgctggaggtcaggggcaggttgttggaggattggttatcgggtcgttgattgcgtcggggccggtgatggttgttgctgcaacttttgctaatgctacttatgaaaggttgcctttggaagatgaagatgaaggagatgaagagaattttcaagaggttgataacattaatcttgttgttaacaatggtaatcatgttgctaatggtgatggtggttctggttctctttctgggtcagcaagtggaagtggtggtggcggtggtggtggtgcaacttctcatggattaggtgaatacagttttaatccaagtatgattcaaaatggaaatgatagtggacatggacacggacacgatgtgttctggcgtccacatccacctccatattga

SEQ ID NO: 534 - protein, 328 aa, Medicago truncatula
MSNRWWSGRQTEANPVEGENRNGPTRIILRRESRRASNGSVNGNVTGGNVTPTRSNTSNTGTGNSNGHVNDELENSNGRSGDQTARSGRRPRGRPPGSKNKPKPPLMITKETPNALSSVILEVANGADIAHSISSYANRRHRGVSVLSGTGYVTNVTLRQDNAPGGMISLQGRCHILSLSGAFLPPPSPPDATGLTVYLAGGQGQVVGGLVIGSLIASGPVMVVAATFANATYERLPLEDEDEGDEENFQEVDNINLVVNNGNHVANGDGGSGSLSGSASGSGGGGGGGATSHGLGEYSFNPSMIQNGNDSGHGHGHDVFWRPHPPPY

SEQ ID NO: 535 - DNA, 879 bp, Brassica oleracea
  CDS (1)..(879)
atggctggtcttgatctaggcacagcttttggttacgttaatcaccagctccatcgtcccgatctccatctccaccacagttccgcatcagatgacgtcactccaggcgccggacttggtcacttcaccgccgacgacgacgacaacaaccatcaaggtcttgacttagcctctggtggaggatcaggaagctctggaggtggaggaggtgacggaggcggaggaggtaacgtcgttggccgtcgtccacgtggaagaccacctggatccaaaaacaaaccgaaacctccggtgataatcacgcgcgagagcgcaaacactctgagagctcatattcttgaagtaacaagcggctgcgacgtttttgactgtgttgcgacttacgctcgtcgaaggcagcgagggatctgcgttctgagcggtagtggaacggtgaccaacgtcactatacgtcagccatctgcggctggagcggtcgtgacgctacaaggaacgttcgagattctttctctctccggatcgtttcttcctcctccggctcctcctggagctacgagtttgacaatatttgtggccggaggacaaggacaagtcgtcggaggaagcgttgtcggtgagcttacggcagctggaccggtgattgtaatcgcttcttcgtttactaatgttgcttacgagagacttccattagaagaagatgagcagcaacatctaggaggagggggaggatctaacggcggaggtaatttgtttccggaggtttccgccggaggaggaggaggacttcccttctttaatttaccgatgaatatgcaatcgaatgtgcaactgccggtggaaggttggccggggaattcaggtggaagaggtcctttctga

SEQ ID NO: 536 - protein, 292 aa, Brassica oleracea
MAGLDLGTAFGYVNHQLHRPDLHLHHSSASDDVTPGAGLGHFTADDDDNNHQGLDLASGGGSGSSGGGGGDGGGGGNVVGRRPRGRPPGSKNKPKPPVIITRESANTLRAHILEVTSGCDVFDCVATYARRRQRGICVLSGSGTVTNVTIRQPSAAGAVVTLQGTFEILSLSGSFLPPPAPPGATSLTIFVAGGQGQVVGGSVVGELTAAGPVIVIASSFTNVAYERLPLEEDEQQHLGGGGGSNGGGNLFPEVSAGGGGGLPFFNLPMNMQSNVQLPVEGWPGNSGGRGPF

SEQ ID NO: 537 - DNA, 882 bp, Brassica oleracea
  CDS (1)..(882)
atggctggtcttgatctaggcacatcttttcgttacgttaatcaccagctccttcgtcccgatctccaccttcaccacaactcctcttccggtgacgtcactcctggcgtcggaataggtcatttcaccgccgacgacgaagacaacaaccaccaaggtcttgacttagcctcaggtggaggaggatcaggaagctccggaggaggaggtcatggcggaggaggaggaggagacggtgttggccgtcgtccacgtggcagaccaccgggatccaaaaacaaaccgaaacctccggtaataatcacgcgcgagagcgcaaacactcttagagctcacattcttgaagtaacaaacggctgcgacgttttcgactgcgttgcgacttacgctcgtcgaaggcagcgagggatctgcgttttgagcggtagcggaacggtgacaaacgtcagcatacgtcagccatccgcggctggagcggttgtgacgctacaaggaacgttcgagattctttctctctccggatcgtttcttcctcctccggctcctcccggagcaacgagtttgactatattcgtggccggaggacaaggacaggtcattggaggaagcgtcgttggtgagcttacggcggctggaccggtgattgtaatcgctgcttcgtttactaatgttgcttatgagagacttcctttggaagaagatgagcagcaacatctcggaggaggaggaggagctaacggcggaggtaatttgtttccggaggttgctggcggaggaggaggtggacttccgttctttaatttaccgatgaatatgcaaccaaatgtgcaacttccggtggaaggttggccggggaattcaggtggaagaggtcctttctga

SEQ ID NO: 538 - protein, 293 aa, Brassica oleracea
MAGLDLGTSFRYVNHQLLRPDLHLHHNSSSGDVTPGVGIGHFTADDEDNNHQGLDLASGGGGSGSSGGGGHGGGGGGDGVGRRPRGRPPGSKNKPKPPVIITRESANTLRAHILEVTNGCDVFDCVATYARRRQRGICVLSGSGTVTNVSIRQPSAAGAVVTLQGTFEILSLSGSFLPPPAPPGATSLTIFVAGGQGQVIGGSVVGELTAAGPVIVIAASFTNVAYERLPLEEDEQQHLGGGGGANGGGNLFPEVAGGGGGGLPFFNLPMNMQPNVQLPVEGWPGNSGGRGPF

SEQ ID NO: 539 - DNA, 1092 bp, Oryza sativa subsp
  CDS (1)..(1092)
atgtcgttctgcgagagggacatgaacaaggagagcatgtaccaagaacgggacgacatggcggggatacggttcgcgacgccgccgctgcctcagcagcagcagcagcagcagctggtggagtgcttctccgacgaggtggacagccgcgggagtggcggcgagatgaaggatgccgtggggagcgggagtgggcagctggtcgttgttggtggcggggatggggcgagcatcgaggtggcgaagaagaggagggggaggccgccggggtccaagaacaagccgaagccgcccgtggtgatcacgcgggaggcggagccggcggcggcgatgcggccgcacgtgatcgagatccccggcgggcgggacgtcgcggaggcgctcgcgcggttctcgagccgtcggaacctcgggatctgcgtgctcgccggcaccggcgcggtcgccaacgtgtcgctccgccacccgtcacccggggtcccgggctcagctccggctgcgatcgtgttccacggccggtacgagatcctctccctgtcggccacgttcctgcctccggccatgtcctccgtggcgccccaggccgcggtcgccgccgcgggcctctccatctcgctcgccggcccgcacggccagatcgtcggcggggccgtggcaggcccgctctacgccgcgaccaccgtcgtggtcgtcgccgccgccttcaccaaccccaccttccaccgcctccccgccgacgacgacgcgtcggtgtccgtctcggtgtcactctccggcagcggcgacgcggacgaacaccggggccaccagcacaaacctgagccgcaagaaccgcgccaacttcgacggccgccaccgcacctgtcagcagccgccgccgtctcagcagcacagccggtggagccatgcggcgcgcccatgtacgcctgccaccctcagccacaggaggtgatgtggccgccgccggctcgtacgccgcacccgccgccgccgccgccgtggggagagcaggagaagggaggggaaggagatgagcgcggaagagatggtgtggtagaaggcagggtagcggccgccggcgacgtggagtag

SEQ ID NO: 540 - protein, 363 aa, Oryza sativa subsp
MSFCERDMNKESMYQERDDMAGIRFATPPLPQQQQQQQLVECFSDEVDSRGSGGEMKDAVGSGSGQLVVVGGGDGASIEVAKKRRGRPPGSKNKPKPPVVITREAEPAAAMRPHVIEIPGGRDVAEALARFSSRRNLGICVLAGTGAVANVSLRHPSPGVPGSAPAAIVFHGRYEILSLSATFLPPAMSSVAPQAAVAAAGLSISLAGPHGQIVGGAVAGPLYAATTVVVVAAAFTNPTFHRLPADDDASVSVSVSLSGSGDADEHRGHQHKPEPQEPRQLRRPPPHLSAAAAVSAAQPVEPCGAPMYACHPQPQEVMWPPPARTPHPPPPPPWGEQEKGGEGDERGRDGVVEGRVAAAGDVE

SEQ ID NO: 541 - DNA, 969 bp, Oryza sativa subsp
  CDS (1)..(969)
atggccgggatggatcccaccggcggcggtggcggcggcggcgtggcggcgcactacctacacatgctccgcgcgcagcagcaccagccactgtccccggcaggtgacgtcaaggcggagcggtccatgctgtcgccggatgagagccccggcgcggacgccgacctaggatcggaccacccgacgtcgtcggccatggtggcggcggaggacagcggcggcggcagcggttcgggtggcccgatgcggcgcccccgcgggaggccgctgggctccaagaacaagcccaagccgcccatcatcgtgacgcgggacagccccaacgcgttccactcccacgtcctcgaggtcgccgcgggaaccgacatcgtcgagtgcgtctgcgagttcgcgcgccgccgcggccgcggcgtctccgtgctcagcggtggcggcgccgtcgccaacgtcgcgctccgccagccaggcgcgtcgcccccgggcagcctggtcgccaccatgcgcggccagttcgagatcctgtccctcacgggcaccgtcctcccgccgcccgcgccgcccagcgccagcggcctcaccgtcttcctctccggcgggcagggccaggtggtcggcgggagcgtggccggccagctcatcgccgcggggccagtcttcctcatggccgcctcgttcgccaatgccgtctacgagcgtctgccactcgatggggaggatccggaggcagaggctgccgccgccacccctcccggcgatgcggcgcagccaaccggcccaccaccaccgcagcagcagcccacagcctcgcagtcctctgaggtgaccgccggtgacggcggcggcggcggcggtctcggcatgtatcttggaggccatgtgggatcctaccagcagcagcagcagcaacttcccggaccaggagacaacttcggtagctggagcggcagcatcaggccgccgccattctga

SEQ ID NO: 542 - protein, 322 aa, Oryza sativa subsp
MAGMDPTGGGGGGGVAAHYLHMLRAQQHQPLSPAGDVKAERSMLSPDESPGADADLGSDHPTSSAMVAAEDSGGGSGSGGPMRRPRGRPLGSKNKPKPPIIVTRDSPNAFHSHVLEVAAGTDIVECVCEFARRRGRGVSVLSGGGAVANVALRQPGASPPGSLVATMRGQFEILSLTGTVLPPPAPPSASGLTVFLSGGQGQVVGGSVAGQLIAAGPVFLMAASFANAVYERLPLDGEDPEAEAAAATPPGDAAQPTGPPPPQQQPTASQSSEVTAGDGGGGGGLGMYLGGHVGSYQQQQQQLPGPGDNFGSWSGSIRPPPF

SEQ ID NO: 543 - DNA, 1044 bp, Oryza sativa subsp
  CDS (1)..(1044)
atgcccagccatcaccgagccagcgaagccagcaaaggccttccccctcctttctccctccttaccccctctcctccctctcaagacagcggtgtgccatatcgtatggaacttagacacctcagcgccacgtcaactggtgctgaatgccgtgccaccgcggatgggaggttgagtcggcgtgccaacgtgcatttagcgccatgctatttggctctgaggaacaggaaagctagtagtactacagtttttcatcgatcggatgcagctacagttgcttgcttgctgtcgtcaattccgtcccctttcttccttgtcccctgcccaatctacaccaatgaggctagccctagtcaaccatccccttgctggaacgggattgacggatcgccggagagcaagggcgacgcggacctcggcgaggtccagcagcactccggtgctgtcgacgacatcctcgcctgggccttgcgggacggggagtcgtttccgatgtggtcgcgtgggaggaggatgccgaggagatcgaaggaaaaaccggagccgcccgtcatcgtcgcgcgggaaagcaccaacacgatgcggtcgcatatgatggagattgcggacggcgaggatgtcgccgaagccgtggctgatttcgcgcgccgccggcagagctgggtcgcctcgctgcgccagcccggcgagcctggctccgtcatcgagctctccggcccattggagatcctgtccctctccggagcatttatgccgccgccgagcctggccaacgccacggggctcaaggccctcctcgccggcgggcagggccaggtcatcggcggcaacgtcgtcggcgccctccgcgctagaggacatgtcacgatcctcgcggccgtcgtctccaacgttacctacgaatgcctctcgcccgaacacgatgttgttgacgaccctggcaaggtgccagccgccgttacagtggtcaatggcatagagaacaataatgagtcggctgctacaagcatacaactacaagagcgcttgagaacgaaattttag

SEQ ID NO: 544 - protein, 347 aa, Oryza sativa subsp
MPSHHRASEASKGLPPPFSLLTPSPPSQDSGVPYRMELRHLSATSTGAECRATADGRLSRRANVHLAPCYLALRNRKASSTTVFHRSDAATVACLLSSIPSPFFLVPCPIYTNEASPSQPSPCWNGIDGSPESKGDADLGEVQQHSGAVDDILAWALRDGESFPMWSRGRRMPRRSKEKPEPPVIVARESTNTMRSHMMEIADGEDVAEAVADFARRRQSWVASLRQPGEPGSVIELSGPLEILSLSGAFMPPPSLANATGLKALLAGGQGQVIGGNVVGALRARGHVTILAAVVSNVTYECLSPEHDVVDDPGKVPAAVTVVNGIENNNESAATSIQLQERLRTKF

SEQ ID NO: 545 - DNA, 777 bp, Oryza sativa subsp
  CDS (1)..(777)
atggccgccagcaacaacaagtggtggcaagcggccctcgacttcccgcctccgccgccgccggtgaacgttccggcggcggctccggcgggggccgcgtcgccggagagcaagcagcaggcggcggcgggggccatcgtgccgctgcggcggccgagggggaggccgctggggtcgaagaacaagccgaagccgccggtgatcatcacgcgggacagccccgacgcgctccactcccacatcatcgaggtggcgccgggggccgacgtggcggcgtgcgtcgcggagtacgcgcggcggcgcgggcgcggggtgtgcctgatgggcgcgtcgggcgccgtcgcggacgtcgccgtgcgcggcgcggcggcgccgctcccgggaaggttcgagctcctctccgtaacgggcaccgtgctcccgccccccgcgccgcccggcgcgtccggcctctccgtgctgctctccgccggccagggccaggtcgtcggcggctgcgtcgtggggcccctcgtcgccgccggccccgtcaccctcttcgccgccaccttcgccaacgccgtctacgagcgcctcccgctcgccgacgccgccgacgtcgccgacgtcaagcccgacctctcctccgccgccgccgccgccacgtccacctcggcgccgcaagaagtgcaacagcagcagctgccattgccgccatcctcgcaccaccctcaagccatgcccgcgacctaccccgaccaccgctcgccgccatacgcctgggcaggcggcgtatga

SEQ ID NO: 546 - protein, 258 aa, Oryza sativa subsp
MAASNNKWWQAALDFPPPPPPVNVPAAAPAGAASPESKQQAAAGAIVPLRRPRGRPLGSKNKPKPPVIITRDSPDALHSHIIEVAPGADVAACVAEYARRRGRGVCLMGASGAVADVAVRGAAAPLPGRFELLSVTGTVLPPPAPPGASGLSVLLSAGQGQVVGGCVVGPLVAAGPVTLFAATFANAVYERLPLADAADVADVKPDLSSAAAAATSTSAPQEVQQQQLPLPPSSHHPQAMPATYPDHRSPPYAWAGGV

SEQ ID NO: 547 - DNA, 777 bp, Oryza sativa subsp
  CDS (1)..(777)
atgtcgctggggttggtgacctcgccgacggccgccgcgtcgacgccggtggcgcagggcgtcccagggccgttctcgccgacgcagccgaagccgccggcgagcttcttgtcgtcggggtggccggacggggtgaagaagcgtggccggcccaagggttctaccaacaagccgcgcatcgacgccgtcggatcggcgggagttggatttacaccacacgttattacagttctagctggagaggatgtgtctgcaaagattatgtcgtttgctcagcatggaaatcgtgcggtttgtgttctttcagcaaatggtgccatatcaaatgtaacacttcgccaaactgctacttcaggtggaacagtaacatatgagggccgattcgagatactatcgctgtctggctctttccttctaaccgaccatggaggccagcgtagtcgaactgggggactcagtgtttcactggctggtcctgatggtcgtctgttgggaggcggtgttgccggacttctcatagcagctactccagtccagattgtggttggaagcttcaattctgaagggaaaaaggagccaaagcagcatgctcattcagaacccgcatccgcgccatcgaaagccgtgccgacggccgggatgggacccaacagcccaccttcaagaggcacattgagtgaatcctcaggtggagctggaagcccattgcatccaggcattgctcctcccagcagcaacagccagccgccattcttgtctagcatgccatggaaatga

SEQ ID NO: 548 - protein, 258 aa, Oryza sativa subsp
MSLGLVTSPTAAASTPVAQGVPGPFSPTQPKPPASFLSSGWPDGVKKRGRPKGSTNKPRIDAVGSAGVGFTPHVITVLAGEDVSAKIMSFAQHGNRAVCVLSANGAISNVTLRQTATSGGTVTYEGRFEILSLSGSFLLTDHGGQRSRTGGLSVSLAGPDGRLLGGGVAGLLIAATPVQIVVGSFNSEGKKEPKQHAHSEPASAPSKAVPTAGMGPNSPPSRGTLSESSGGAGSPLHPGIAPPSSNSQPPFLSSMPWK

SEQ ID NO: 549 - DNA, 1065 bp, Oryza sativa subsp
  CDS (1)..(1065)
atggaggtgaggtcggagcaagggctaatggcggggagggatctgttcggcatgccgaagagcccgccggcggcggccgcggcgccgccgcagagcgtgcgcatggcgtacacctcggacggcaccccggtgttcgccccggtgagcgccgcggtctcggcgccgccgggttaccagccgggtggcgccgccggtggcaatggcgcggcggcgctggcggactccggcggggagcccgtggccaagaagaagcgcgggcggccgaggaagtacggccccgacgggtccatgtcgctggggttggtgacctcgccgacggccgccgcgtcgacgccggtggcgcagggcgtcccagggccgttctcgccgacgcagccgaagccgccggcgagcttcttgtcgtcggggtggccggacggggtgaagaagcgtggccggcccaagggttctaccaacaagccgcgcatcgacgccgtcggatcggcgggagttggatttacaccacacgttattacagttctagctggagaggatgtgtctgcaaagattatgtcgtttgctcagcatggaaatcgtgcggtttgtgttctttcagcaaatggtgccatatcaaatgtaacacttcgccaaactgctacttcaggtggaacagtaacatatgagggccgattcgagatactatcgctgtctggctctttccttctaaccgaccatggaggccagcgtagtcgaactgggggactcagtgtttcactggctggtcctgatggtcgtctgttgggaggcggtgttgccggacttctcatagcagctactccagtccagattgtggttggaagcttcaattctgaagggaaaaaggagccaaagcagcatgctcattcagaacccgcatccgcgccatcgaaagccgtgccgacggccgggatgggacccaacagcccaccttcaagaggcacattgagtgaatcctcaggtggagctggaagcccattgcatccaggcattgctcctcccagcagcaacagccagccgccattcttgtctagcatgccatggaaatga

SEQ ID NO: 550 - protein, 354 aa, Oryza sativa subsp
MEVRSEQGLMAGRDLFGMPKSPPAAAAAPPQSVRMAYTSDGTPVFAPVSAAVSAPPGYQPGGAAGGNGAAALADSGGEPVAKKKRGRPRKYGPDGSMSLGLVTSPTAAASTPVAQGVPGPFSPTQPKPPASFLSSGWPDGVKKRGRPKGSTNKPRIDAVGSAGVGFTPHVITVLAGEDVSAKIMSFAQHGNRAVCVLSANGAISNVTLRQTATSGGTVTYEGRFEILSLSGSFLLTDHGGQRSRTGGLSVSLAGPDGRLLGGGVAGLLIAATPVQIVVGSFNSEGKKEPKQHAHSEPASAPSKAVPTAGMGPNSPPSRGTLSESSGGAGSPLHPGIAPPSSNSQPPFLSSMPWK

SEQ ID NO: 551 - DNA, 975 bp, Oryza sativa subsp
  CDS (1)..(975)
atggagaggaggagtcagctgggaggaggagaaggcgatggcaagctcgtcgtcggcggcggcgccatgggcgagaagaagcagcagctggagtgcttctctgacgaggtggacagccgtgatggtggtggtggcgcggcggaggagacgacggcgggcggcggcggcgagggtgttgctgcggtggtggtggtgggtaagaggaggagggggcggccgccggggtccaagaacaagccgaagccgccggtggtcgtcacgcgtgaggcggcggcggccgagccggcggcggcggcggcgatgcggtcgcacgtgctggagatcccgggcggcggggacgtcgccggcgcgctcgcggggtacgcgcgccgccgtggcctcgggatctgcgtgctcgccgggacgggcgccgtcgccaacgtctcgctccgccacccgttgccttccggcgccgcggcggagatcggcggcggcgccgccgccgccgtggtcgtgttccacggccggtacgagatcctctccatatcggcgacgttcctcccgcccgccatggccgcggcggcgccacgcgccgcgctcggcggcctctcgatatctctcgcggggccacacggccagatcttcggaggcgccgtggcgggcccgctcgtcgccgccaccaccgtcgtcgtcgtcgccgccgcgttcgccagccccacgttccaccgcctccccgcggaatacgacgacgcgccggcgcccgtctccggcagcggcgccgacgctgacgaacaccgcgggcggcgccgaacggagccaccggagcaccatcacttgacaccgctgcatccgcgcggcatagctctggcgacggcgacgacgacgacgacgactcaacctgtgtacgcgtcagcgtgccagcatgaagaggtatggccgccggcggcggcggcggcggcggcgagcgcaccacggccacggccgccgtaccaatag

SEQ ID NO: 552 - protein, 324 aa, Oryza sativa subsp
MERRSQLGGGEGDGKLVVGGGAMGEKKQQLECFSDEVDSRDGGGGAAEETTAGGGGEGVAAVVVVGKRRRGRPPGSKNKPKPPVVVTREAAAAEPAAAAAMRSHVLEIPGGGDVAGALAGYARRRGLGICVLAGTGAVANVSLRHPLPSGAAAEIGGGAAAAVVVFHGRYEILSISATFLPPAMAAAAPRAALGGLSISLAGPHGQIFGGAVAGPLVAATTVVVVAAAFASPTFHRLPAEYDDAPAPVSGSGADADEHRGRRRTEPPEHHHLTPLHPRGIALATATTTTTTQPVYASACQHEEVWPPAAAAAAASAPRPRPPYQ

SEQ ID NO: 553 - DNA, 621 bp, Oryza sativa subsp
  CDS (1)..(621)
atgcagggaggtgtgttgggcgtggagaaagctaccgtcaccgccgtcgctgctggtggtggaggcatgggtgtaaaggaggaaatcgtgaaactgtttgaggtggccatcgtcgacgagatcactgacatgaaggacaaggcctctcgagcgcacttcgcgcggcggcagcggcgcggcatctgcgtgctcagtagggccgacgccgtgaccgacgtggccctgcgccagccggccgcgcctggcgccgtggtggcactccgtgggcggttcgagatcctgtccctgacggggacgttcctgccggggccggggccgcccggctccaccagactgaccgtgtacctcgctggcgggcaggggcaggtggtggggacgctcaccgcagctgggccggtcatggttatcgcgtccaccttcgccaacgccacctacgagaggctgccgctcgatcaggaggaggaggaagctgcggcaggcggcggaggacacatgatggcgccgccgccactcatggccggcgccgccgatcctgtactgttcggtgggggaatgcacgacgccgggcttgctacacctgcatggcaccatgcccgccctccgccgccgccgccctactag

SEQ ID NO: 554 - protein, 206 aa, Oryza sativa subsp
MQGGVLGVEKATVTAVAAGGGGMGVKEEIVKLFEVAIVDEITDMKDKASRAHFARRQRRGICVLSRADAVTDVALRQPAAPGAVVALRGRFEILSLTGTFLPGPGPPGSTRLTVYLAGGQGQVVGTLTAAGPVMVIASTFANATYERLPLDQEEEEAAAGGGGHMMAPPPLMAGAADPVLFGGGMHDAGLATPAWHHARPPPPPPY

SEQ ID NO: 555 - DNA, 846 bp, Arabidopsis thaliana
  CDS (1)..(846)
  misc_feature (404)..(404): y is t or c
atggcaaacccttggtggacgaaccagagtggtttagcgggcatggtggaccattcggtctcctcaggccatcaccaaaaccatcaccaccaaagtcttcttaccaaaggagatcttggaatagccatgaatcagagccaagacaacgaccaagacgaagaagatgatcctagagaaggagccgttgaggtggtcaaccgtagaccaagaggtagaccaccaggatccaaaaacaaacccaaagctccaatctttgtgacaagagacagccccaacgcactccgtagccatgtcttggagatctccgacggcagtgacgtcgccgacacaatcgctcacttctcaagacgcaggcaacgcggcgtttgcgttctcagcgggacaggctcagtcgctaacgtcaycctccgccaagccgccgcaccaggaggtgtggtctctctccaaggcaggtttgaaatcttatctttaaccggtgctttcctccctggaccttccccacccgggtcaaccggtttaacggtttacttagccggggtccagggtcaggtcgttggaggtagcgttgtaggcccactcttagccatagggtcggtcatggtgattgctgctactttctctaacgctacttatgagagattgcccatggaagaagaggaagacggtggcggctcaagacagattcacggaggcggtgactcaccgcccagaatcggtagtaacctgcctgatctatcagggatggccgggccaggctacaatatgccgccgcatctgattccaaatggggctggtcagctagggcacgaaccatatacatgggtccacgcaagaccaccttactga

SEQ ID NO: 556 - protein, 281 aa, Arabidopsis thaliana
  misc_feature (135)..(135): The Xaa at location 135 stands for Ile, or Thr.
MANPWWTNQSGLAGMVDHSVSSGHHQNHHHQSLLTKGDLGIAMNQSQDNDQDEEDDPREGAVEVVNRRPRGRPPGSKNKPKAPIFVTRDSPNALRSHVLEISDGSDVADTIAHFSRRRQRGVCVLSGTGSVANVXLRQAAAPGGVVSLQGRFEILSLTGAFLPGPSPPGSTGLTVYLAGVQGQVVGGSVVGPLLAIGSVMVIAATFSNATYERLPMEEEEDGGGSRQIHGGGDSPPRIGSNLPDLSGMAGPGYNMPPHLIPNGAGQLGHEPYTWVHARPPY

SEQ ID NO: 557 - DNA, 798 bp, Oryza sativa subsp
  CDS (1)..(798)
atggccgacgaggggtcgtcgcgcgccgagctgatcgaggcttcgccggcgccggcgctggaccttccgtcgccgccgcggaagccgcggggccggccgctggggtccaagaacaagcccaagccgccggtggtcgtgacgcgggagagcgaggcggcgatgcggcccgtcgtgctggagctcggcgccggctgcgaggtggccgccgcggtggccgcgttcgcgcggcgccgacgcgtcggcgtgtccgtgctctgcggccgcggcaccgtcgccgccgtcacgctccggctcccgacctcgccgcccgccgcggtgaagctgcacgggcggttcgaggtgctgtccctgtccgggacggtgctgccgtccgcggccggagagggggccgcgccgccgccgccgttctcggtgtctctagctggggcgggcgggcaggtgatcggcggcacgctcgccggggagatgacgacggcggacgggttggtggtggtggccgccacgttcgggagcgccgaggtgcaccggttgcccgctgatgaggacgacgaggccaccggcagccgcggcggtgaggagcggaggcatccacagcagcagccgccgcagacggtggcggccacgagcgccgtcgacgtggggctgcttgggtacggcggcggtgtgggggttgccggcggtgcgagtggcgggcaggtgggccgccaccagcagcagcagcagcaggccgagatggtcttgtgggcccagtcgccaggctcagtcggcccggcccatcctgccacgagtcgttactag

SEQ ID NO: 558 - protein, 265 aa, Oryza sativa subsp
MADEGSSRAELIEASPAPALDLPSPPRKPRGRPLGSKNKPKPPVVVTRESEAAMRPVVLELGAGCEVAAAVAAFARRRRVGVSVLCGRGTVAAVTLRLPTSPPAAVKLHGRFEVLSLSGTVLPSAAGEGAAPPPPFSVSLAGAGGQVIGGTLAGEMTTADGLVVVAATFGSAEVHRLPADEDDEATGSRGGEERRHPQQQPPQTVAATSAVDVGLLGYGGGVGVAGGASGGQVGRHQQQQQQAEMVLWAQSPGSVGPAHPATSRY

SEQ ID NO: 559 - DNA, 1056 bp, Arabidopsis thaliana
  CDS (1)..(1056)
atgtcaggatctgagacgggtttaatggcggcgaccagagaatcaatgcaatttacaatggctctccaccagcagcagcaacacagtcaagctcaacctcagcagtctcagaacaggccattgtcattcggtggagacgacggaactgctctttacaagcagccgatgagatcagtatcaccaccgcagcagtaccaacccaactcagctggtgagaattctgtcttgaacatgaacttgcccggaggtgagtctggaggcatgactggaactggaagtgagccagtgaaaaagaggagaggtagaccgaggaaatatgggcctgatagtggtgaaatgtcacttggtttgaatcctggagctccttctttcactgtcagccaacctagtagcggcggcgatggaggagagaagaagagaggaagacctcctggttcttctagcaaaaggctcaagcttcaagctttaggctcgactggaatcggatttacgcctcatgtacttaccgtgctggctggagaggatgtatcatccaagataatggcgttaactcataatggaccccgtgctgtgtgtgtcttgtctgcaaatggagccatctccaatgtgactctccgccagcctgccacatccggtggaactgttacatatgaggggagatttgagattctgtctttatcgggatctttccatttgctggagaacaatggtcaaagaagcaggacgggaggtctaagcgtgtcattatcaagtccggatggtaatgtcctcggtggcagtgtagctggtcttcttatagcagcatcacctgttcagattgttgttgggagtttcttaccagacggagaaaaagaaccaaaacagcatgtgggacaaatgggactgtcgtcacccgtattaccgcgtgtggccccaacgcaggtgctgatgactccaagtagcccacaatctcgaggcacaatgagtgagtcatcttgtggaggaggacatggaagccctattcatcagagcactggaggaccttacaataacaccattaacatgccctggaagtag

SEQ ID NO: 560 - protein, 351 aa, Arabidopsis thaliana
MSGSETGLMAATRESMQFTMALHQQQQHSQAQPQQSQNRPLSFGGDDGTALYKQPMRSVSPPQQYQPNSAGENSVLNMNLPGGESGGMTGTGSEPVKKRRGRPRKYGPDSGEMSLGLNPGAPSFTVSQPSSGGDGGEKKRGRPPGSSSKRLKLQALGSTGIGFTPHVLTVLAGEDVSSKIMALTHNGPRAVCVLSANGAISNVTLRQPATSGGTVTYEGRFEILSLSGSFHLLENNGQRSRTGGLSVSLSSPDGNVLGGSVAGLLIAASPVQIVVGSFLPDGEKEPKQHVGQMGLSSPVLPRVAPTQVLMTPSSPQSRGTMSESSCGGGHGSPIHQSTGGPYNNTINMPWK

SEQ ID NO: 561 - DNA, 1047 bp, Arabidopsis thaliana
  CDS (1)..(1047)
atggcgttatccgggtcgggttcttactatatccaaagaggaatccccggttctggtcctcctcctcctcaaactcaaccaacgtttcacggatcacaaggatttcatcatttcaccaattccatctctccttttgggtcaaacccaaacccaaatccaaaccctggaggtgtctctactggattcgtgtctcctcctttacccgttgactcttctccggctgattcgtcagcggcggcggcgggagctttggttgctcctccttcaggtgacacgtctgtgaagcggaagagaggacggcctagaaaatatggacaagatggtggttctgtttcgttggcattgtctccttctatctccaacgtttccccgaactctaacaaacgtggccgtggaagacctcctggctccggcaagaagcaacggctatcttccattggtgaaatgatgccttcatcaactgggatgagcttcacaccgcatgtaatcgtagtttccattggtgaagacattgcttcaaaggttatatcgttctcgcatcaaggtccacgagcgatatgtgtcttatccgcaagtggtgctgtctctactgcaactcttcttcagccagcaccttctcatggaactattatatacgagggtctattcgagctcatatctctctcaacttcttatctgaacacaactgacaatgactacccaaaccgcactggaagtctagcggtctcacttgctagccccgatggtcgtgtcattggtggtggaattggaggtcctctaatagcagcaagccaagtccaggtcattgttggcagcttcatttgggcaattccgaaagggaagattaaaaaacgtgaagaaacttctgaagatgtccaagatactgatgctttggaaaacaacaacgataacacagcagcaacgtcacctcctgttcctcagcaaagtcagaacattgttcagactcctgtaggcatttggtcaactggttcaaggtcaatggatatgcatcacccccatatggacattgatctaatgcgtggatga

SEQ ID NO: 562 - protein, 348 aa, Arabidopsis thaliana
MALSGSGSYYIQRGIPGSGPPPPQTQPTFHGSQGFHHFTNSISPFGSNPNPNPNPGGVSTGFVSPPLPVDSSPADSSAAAAGALVAPPSGDTSVKRKRGRPRKYGQDGGSVSLALSPSISNVSPNSNKRGRGRPPGSGKKQRLSSIGEMMPSSTGMSFTPHVIVVSIGEDIASKVISFSHQGPRAICVLSASGAVSTATLLQPAPSHGTIIYEGLFELISLSTSYLNTTDNDYPNRTGSLAVSLASPDGRVIGGGIGGPLIAASQVQVIVGSFIWAIPKGKIKKREETSEDVQDTDALENNNDNTAATSPPVPQQSQNIVQTPVGIWSTGSRSMDMHHPHMDIDLMRG

SEQ ID NO: 563 - DNA, 2481 bp, Arabidopsis thaliana
  CDS (1)..(2481)
atggacggaagagaagcaatggcatttccaggctcgcattctcagtactatcttcaaagaggagcctttactaatctcgcaccttcccaagtcgcgagtgggcttcacgcgccgccgccacatacgggattgaggccaatgtctaaccctaacattcatcaccctcaggctaacaatccaggacctcctttctcggattttggacacaccattcacatgggagtggtctcctctgcttctgatgctgatgtgcaaccgccaccgccaccgccaccaccagaggaaccgatggttaagaggaaacgtggacggccaagaaagtatggagaaccgatggttagtaataagtctagggactcttctccaatgtctgatcctaatgaacctaaacgggccagaggtcgacctcctggaactggaaggaagcaacgcttggctaatcttggtgagtggatgaatacttcagctggacttgcttttgcacctcatgtgatcagcattggagcaggagaagacattgctgcgaaagttttgtcattttcacaacaaagacctcgggctctttgtataatgtcaggcactggaaccatttcttcagtcactctgtgcaaacccggttcaaccgatcgtcacttaacatacgagggaccttttgagattataagttttggtggatcttatttggtgaatgaagaaggtggatccagaagtcgaacaggcggattgagtgtctctctttctcgtcccgatggtagtattattgccggtggagttgacatgcttatcgcagccaaccttgttcaggtggtggcatgtagttttgtatacggagcaagggcaaagactcataataacaataacaagaccatcagacaagaaaaggaaccaaatgaagaggacaacaatagtgaaatggagaccacaccgggtagtgcagctgaaccagcagcatctgcggctgaaaataacccgactttgattactgggtatataaaagccgccattgttgttcttttcactctttgggttattagggtttacgatttctgggtgggttttaaatgcatggatgggagagaagctatggcatttccaggctcgcattctcagttctatcttcagagaggagtttttaccaatcttacaccttcccaggtcgcgagtggtcttcacgcgccgccgccacctccgggaatgaggccaatgtcaaaccctaacattcaccaccctcaggctagcaatccaggacctcctttctccatggctgagcacaggcattctgatttcggacacagcattcacatggggatggcttctcctgctgcggtgcagcctactctgcagctgccgcctccaccgtcggagcaaccgatggttaagaagaaacgtggaaggccaagaaagtatgttcctgatggacaagtttcattggggctttctccaatgccttgtgttagtaaaaagtctaaggactcttcttcaatgtctgatcctaatgcacctaaaagagccagaggtcgacctcccggaactggaaggaagcaacgcttggctaatcttggtgagatctcaagtgagtggatgaatacatcagctggacttgcttttgcacctcatgtgatcagtgttggatcaggagaagatattgtttcgaaagttttgtctttttcacaaaaaagacctcgggctctttgtataatgtcaggcactggaacggtttcttcagtcactctgcgtgaacccgcttcaacaacgccttccttaacatttgagggacgttttgagattctaagtttaggtggatcttatctggtgaatgaagaaggtggatccaaaagtcgaacaggcggtttgagtgtctctctttctggtcctgaaggtcatgttatcggcggtggaattggaatgcttatcgcagccagcctcgttcaggtggtggcttgtagtttcgtgtacggagcaagtgcaaagtctaataataacaataacaagaccatcaaacaagaaataaaacctaagcaagagccgaccaatagcgaaatggagaccacacctggtagtgcaccagaagctgcagcatcgacgggtcagcatacgccacagaacttcccagctcagggaatgagcggatggcccgtttcaggctcaggctcaggcagatcacttgactctagcagaaacccactcactgatattgacttgactcgcggcagcagcagcatacattatgtgagtgctgtacatatctttgttgttgtagatttctctctgggaatgttaaaaccagacatttcaggattgagaccagaactctcagttccttattgtaacattctcaatgtaacagaaccaccccactttcaggctactcaacgagattgtaactcttttatatcactcattaaagcttcctttggtttcttcaatatctgtgttcaattcggttttggttttgagtgtttggttttagaaatgaagtaa

SEQ ID NO: 564 - protein, 826 aa, Arabidopsis thaliana
MDGREAMAFPGSHSQYYLQRGAFTNLAPSQVASGLHAPPPHTGLRPMSNPNIHHPQANNPGPPFSDFGHTIHMGVVSSASDADVQPPPPPPPPEEPMVKRKRGRPRKYGEPMVSNKSRDSSPMSDPNEPKRARGRPPGTGRKQRLANLGEWMNTSAGLAFAPHVISIGAGEDIAAKVLSFSQQRPRALCIMSGTGTISSVTLCKPGSTDRHLTYEGPFEIISFGGSYLVNEEGGSRSRTGGLSVSLSRPDGSIIAGGVDMLIAANLVQVVACSFVYGARAKTHNNNNKTIRQEKEPNEEDNNSEMETTPGSAAEPAASAAENNPTLITGYIKAAIVVLFTLWVIRVYDFWVGFKCMDGREAMAFPGSHSQFYLQRGVFTNLTPSQVASGLHAPPPPPGMRPMSNPNIHHPQASNPGPPFSMAEHRHSDFGHSIHMGMASPAAVQPTLQLPPPPSEQPMVKKKRGRPRKYVPDGQVSLGLSPMPCVSKKSKDSSSMSDPNAPKRARGRPPGTGRKQRLANLGEISSEWMNTSAGLAFAPHVISVGSGEDIVSKVLSFSQKRPRALCIMSGTGTVSSVTLREPASTTPSLTFEGRFEILSLGGSYLVNEEGGSKSRTGGLSVSLSGPEGHVIGGGIGMLIAASLVQVVACSFVYGASAKSNNNNNKTIKQEIKPKQEPTNSEMETTPGSAPEAAASTGQHTPQNFPAQGMSGWPVSGSGSGRSLDSSRNPLTDIDLTRGSSSIHYVSAVHIFVVVDFSLGMLKPDISGLRPELSVPYCNILNVTEPPHFQATQRDCNSFISLIKASFGFFNICVQFGFGFECLVLEMK

SEQ ID NO: 565 - DNA, 2316 bp, Oryza sativa subsp
  CDS (1)..(2316)
atgggcgtggtcaccgcgaacgacgcggcggcggccgcgccgggcaagctccggcggccgagcagggcggcggcggcggcgctgtgcccctgcaagggccgcggggcgccgaagccgccgccggtggccgtgatcgcgcacgagtgccccagcgcgatgcgcgccctcgtcgtggaggtccccgcggggcgagacgtggtgtcgtgcgtcgccgcagtggcgcgccgcgcgcggcgcggcgcgctggtgctgggcgcgtccgggcgcgtcgcggacgtggtgctccgggagcccgcggcggtggtgctccgcggcaccatggagatactgggcctggcggggtgcttcttcccgtccccaccgccgcatgcggcggcagagggcgcccccggaggcggaggcgcttccgcggcggtgttcctggccgggccgcgcggcggcgtgctcggcggcggcgtcgcgccgggagggctcgtcgccgccgggccggtggtggtggtgctggccacgttcgtcgcggcggcgttcgaccggctgccgctcctgaagggggaagagaccgcgaattcggaagggtgcgacgtgcatggcgtcaccagacgccggcggtgcggtgctcagccgccgcagcagcagcagcagcgctggggtaatgagaacacacgaggaaacctattcattttccctgtaggtgttcacaagagtattctagcaaatgagccatcacattcgacacatgataaacatgagaaaaaactaacggtgaagaaatccgtctccttggatatctacaaccattataccaactggagaatgcagcagagaatccaatccaacccaagaaaaaagaagaatccaatccaatccaccacacacgcgcaccaaccgaaggcgaaatccccaaatcgaaatcgacccagccagccagccggcacgccgatccgatccgtcccacccacccacgcatccggccgccaccgctgcgctgcgccccgccctcttccactctcccactccatccccatcccaaaccccgcgccgcctcttaccgcttcgcgtcagcttcgatttgattcggttcggttcgcgcgcgccccgatctatcccgcgcgaagtcgattcccacgccacccgcgctgttatgtgcgcggctcccatggcttccactgcccagccgcagcagcagccgcagcagcagcaggagcagcagccggtggcggcggcggcggtgccgactccggctcctccggcttccgaggcgcagccgcagaagccgacgaggatgtgggcgagatccgtcgcctggctcgatttgagggccgcgcagcagctgaacgaacttttgggtgtttgcaccagcgttttgaagaggatttgccgcagccacggcatcgtcaggtggccgtatcgaaagcagttggtggctttaacaatttacaagctgctaacagaactgctgctaagaaacaaaaggccatcatcagaagcttcaatcacagcacctgtggcttttgggatgcacttgcttgttcaatggctattcgaatgcccatacttgtatctgggaagtctggtgatgacacaaaaaacgctgaaagagagaaagccaagggacttcttgagatatctaaagttgcaaaacagaaggctctaagcgcatctggtctatcaacagtttctctgcatcaagcaccatatgatgatctattgtcactattgaagcggtttgcagcatttgttctgacacttaaatctggacatattgatagatcaccaggcgctttccaaggagtggcaaaatctcaacagggaagttcgaaggcaggacaagtctcacccccaggaaaacaaaatgtgttgggtggatcagcaatcttgtcctatggtacccaaaccaaaggcatcccaacctacatggacgacttcaagtacggatttccatcatctggcttgtctttgcaaactatgaaatggtgggggactgacagccacacggagaccacacctgcgaaagacgataacggtgaagcccctgaatcagcaaatgaggcttcgaagggtatgaccgacgatgagttggactggggagcagatgaagctgaagccgaagccgatgccgatagtgcgatcacaaccgaaccatctgcacagctgtgctccctgagaaggaaagctgtagacgatgggcgcaagctgctgactggcaagtcctgcgggggactggagctgtgcaggctgaataagaggcagaagatggccctcgcccaggtgttcggagcctcactgccggagcagttgaggagcaagctcgggtga

SEQ ID NO: 566 - protein, 771 aa, Oryza sativa subsp
MGVVTANDAAAAAPGKLRRPSRAAAAALCPCKGRGAPKPPPVAVIAHECPSAMRALVVEVPAGRDVVSCVAAVARRARRGALVLGASGRVADVVLREPAAVVLRGTMEILGLAGCFFPSPPPHAAAEGAPGGGGASAAVFLAGPRGGVLGGGVAPGGLVAAGPVVVVLATFVAAAFDRLPLLKGEETANSEGCDVHGVTRRRRCGAQPPQQQQQRWGNENTRGNLFIFPVGVHKSILANEPSHSTHDKHEKKLTVKKSVSLDIYNHYTNWRMQQRIQSNPRKKKNPIQSTTHAHQPKAKSPNRNRPSQPAGTPIRSVPPTHASGRHRCAAPRPLPLSHSIPIPNPAPPLTASRQLRFDSVRFARAPIYPARSRFPRHPRCYVRGSHGFHCPAAAAAAAAAGAAAGGGGGGADSGSSGFRGAAAEADEDVGEIRRLARFEGRAAAERTFGCLHQRFEEDLPQPRHRQVAVSKAVGGFNNLQAANRTAAKKQKAIIRSFNHSTCGFWDALACSMAIRMPILVSGKSGDDTKNAEREKAKGLLEISKVAKQKALSASGLSTVSLHQAPYDDLLSLLKRFAAFVLTLKSGHIDRSPGAFQGVAKSQQGSSKAGQVSPPGKQNVLGGSAILSYGTQTKGIPTYMDDFKYGFPSSGLSLQTMKWWGTDSHTETTPAKDDNGEAPESANEASKGMTDDELDWGADEAEAEADADSAITTEPSAQLCSLRRKAVDDGRKLLTGKSCGGLELCRLNKRQKMALAQVFGASLPEQLRSKLG

SEQ ID NO: 567 - DNA, 936 bp, Arabidopsis thaliana
  CDS (1)..(936)
atggaaggcggttacgagcaaggcggtggagcttctagatacttccataacctctttagaccggagattcaccaccaacagcttcaaccgcagggcgggatcaatcttatcgaccagcatcatcatcagcaccagcaacatcaacaacaacaacaaccgtcggatgattcaagagaatctgaccattcaaacaaagatcatcatcaacagggtcgacccgattcagacccgaatacatcaagctcagcaccgggaaaacgtccacgtggacgtccaccaggatctaagaacaaagccaagccaccgatcatagtaactcgtgatagccccaacgcgcttagatctcacgttcttgaagtatctcctggagctgacatagttgagagtgtttccacgtacgctaggaggagagggagaggcgtctccgttttaggaggaaacggcaccgtatctaacgtcactctccgtcagccagtcactcctggaaatggcggtggtgtgtccggaggaggaggagttgtgactttacatggaaggtttgagattctttcgctaacggggactgttttgccacctcctgcaccgcctggtgccggtggtttgtctatatttttagccggagggcaaggtcaggtggtcggaggaagcgttgtggctccccttattgcatcagctccggttatactaatggcggcttcgttctcaaatgcggttttcgagagactaccgattgaggaggaggaagaagaaggtggtggtggcggaggaggaggaggaggagggccaccgcagatgcaacaagctccatcagcatctccgccgtctggagtgaccggtcagggacagttaggaggtaatgtgggtggttatgggttttctggtgatcctcatttgcttggatggggagctggaacaccttcaagaccacctttttaa

SEQ ID NO: 568 - protein, 311 aa, Arabidopsis thaliana
MEGGYEQGGGASRYFHNLFRPEIHHQQLQPQGGINLIDQHHHQHQQHQQQQQPSDDSRESDHSNKDHHQQGRPDSDPNTSSSAPGKRPRGRPPGSKNKAKPPIIVTRDSPNALRSHVLEVSPGADIVESVSTYARRRGRGVSVLGGNGTVSNVTLRQPVTPGNGGGVSGGGGVVTLHGRFEILSLTGTVLPPPAPPGAGGLSIFLAGGQGQVVGGSVVAPLIASAPVILMAASFSNAVFERLPIEEEEEEGGGGGGGGGGGPPQMQQAPSASPPSGVTGQGQLGGNVGGYGFSGDPHLLGWGAGTPSRPPF

SEQ ID NO: 569 - DNA, 879 bp, Brassica napus
  CDS (1)..(879)
atggctggtcttgatctaggcacagcttttggttacgttaatcaccagctccatcgtcccgatctccatctccaccacagttccgcatcagatgacgtcactccaggcgccggacttggtcacttcaccgccgacgacgacgacaacaaccatcaaggtcttgacttagcctctggtggaggatcaggaagctctggaggtggaggaggtgacggaggcggaggaggtaacgtcgttggccgtcgtccacgtggaagaccacctggatccaaaaacaaaccgaaacctccggtgataatcacgcgcgagagcgcaaacactctgagagctcatattcttgaagtaacaagcggctgcgacgtttttgactgtgttgcgacttacgctcgtcgaaggcagcgagggatctgcgttctgagcggtagtggaacggtgaccaacgtcaccatacgtcagccatctgcggctggagcggtcgtgacgctacaaggaacgttcgagattctttctctctccggatcgtttcttcctcctccggctcctcctggagctacgagtttgacaatatttgtggccggaggacaaggacaagtcgtcggaggaagcgttgtcggtgagcttacggcagctggaccggtgattgtaatcgcttcttcgtttactaatgttgcttacgagagacttccattagaagaagatgagcagcaacatctaggaggagggggaggatctaacggcggaggtaatttgttttcggaggtttccgccggaggaggaggaggacttcccttctttaatttaccgatgaatatgcaatcgaatgtgcaactgccggtggaaggttggccggggaattcaggtggaagaggtcctttctga

SEQ ID NO: 570 - protein, 292 aa, Brassica napus
MAGLDLGTAFGYVNHQLHRPDLHLHHSSASDDVTPGAGLGHFTADDDDNNHQGLDLASGGGSGSSGGGGGDGGGGGNVVGRRPRGRPPGSKNKPKPPVIITRESANTLRAHILEVTSGCDVFDCVATYARRRQRGICVLSGSGTVTNVTIRQPSAAGAVVTLQGTFEILSLSGSFLPPPAPPGATSLTIFVAGGQGQVVGGSVVGELTAAGPVIVIASSFTNVAYERLPLEEDEQQHLGGGGGSNGGGNLFSEVSAGGGGGLPFFNLPMNMQSNVQLPVEGWPGNSGGRGPF

SEQ ID NO: 571 - DNA, 843 bp, Brassica napus
  CDS (1)..(843)
atggctggtctcgatctaggcacaacttctcgctacgttcacaacgtcgaaggcggcggtgttggccagttctccaccgacaaccaccacggagatgacgctggaggaaaccaccatcataaccataaccatcatcaaggtttggatttgatagcttctaatgacaactctggactaggcgatggcggcggaggagggagcggtgagctcgttatgcggcggccacgtggccgtccagctggatcgaagaacaaaccaaaacctccaatgatagtcacgcgcgagagcgcaaacactcttagggctcacattctcgaaatcggaagtggctgcgacgtcttcgagtgcatctccacttacgcgcggcggagacagcgagggatttgcgttctgtccggaacaggaaccgtcactaacgtcagcatccgtcagccaacggcggccggagctgttgtgactttgcgaggcactttcgagattctttccctctctggatcttttctcccgccgcctgctcctccaggagcgacgaacttgacgatattcctcgccggagctcagggacaagtcgtcggaggtaacgtcgttggagaattgatggcggcggggccggtgatggtcatggcggcttcttttacgaacgtggcgtatgaaaggttgcctttggacgagcacgaggagcagttacaagtccaaagcggcggaggaaatatgtacacggaagccaccaacggaggtggaggcggaagcttgccgttcttcaatttaccaataagtttgcctcatatgggagttgaaaactggccggggaactcgtccggcgcctgtagggctccgttttag

SEQ ID NO: 572 - protein, 280 aa, Brassica napus
MAGLDLGTTSRYVHNVEGGGVGQFSTDNHHGDDAGGNHHHNHNHHQGLDLIASNDNSGLGDGGGGGSGELVMRRPRGRPAGSKNKPKPPMIVTRESANTLRAHILEIGSGCDVFECISTYARRRQRGICVLSGTGTVTNVSIRQPTAAGAVVTLRGTFEILSLSGSFLPPPAPPGATNLTIFLAGAQGQVVGGNVVGELMAAGPVMVMAASFTNVAYERLPLDEHEEQLQVQSGGGNMYTEATNGGGGGSLPFFNLPISLPHMGVENWPGNSSGACRAPF

SEQ ID NO: 573 - DNA, 870 bp, Brassica napus
  CDS (1)..(870)
atggacggtggttatgatcaatccggtcactctagatacttccataatctctttaggcctgagcttcaccaccagcttcagccacagcctcagcctcaacctcagcttcagccccagcctcaacctcagcttgagtctgatgatgaatctgactccaacaacaaattcccgggtcgacttgattccgacccggttacgtcgggatcaactcccgggaagcgtccacgtggacgtcctccgggatctaagaacaagccgaagccaccggtgattgtgacaagagatagccctaacgtccttagatctcatgttcttgaagtctcatctggagccgacatagttgagagcgtcaacacttacgctcgccggagagggagaggtgtctccgtgctcagtggtaacggcacggtggctaacgtcgtactccgtcagccggtgacgattcatgggaataatggtggaactggagccggagttggaggggttgtgactttacatggaaagtttgacattctttccatcactggtacggtgcttccgccgcctgcgccaccgggatcaggtgggctgtcaatctttcttgctggtgaacaaggtcggatgatcggaggaagagtggtggctccgcttgtggcttctggtcccgtgatactgatggctgcatcgttctccaacgcaacttttgaaaggcttccgcttgaagatgaaggaggtgaaggtgggggagacgtcggaggaggagttccaccgccagccacttcagaaacaccgccgtctggagtcgctcaaggagagctaagagttaatatgagtggttatgatcagttttccggctggggagacggagccgctgcaagaccatcattttag

SEQ ID NO: 574 - protein, 289 aa, Brassica napus
MDGGYDQSGHSRYFHNLFRPELHHQLQPQPQPQPQLQPQPQPQLESDDESDSNNKFPGRLDSDPVTSGSTPGKRPRGRPPGSKNKPKPPVIVTRDSPNVLRSHVLEVSSGADIVESVNTYARRRGRGVSVLSGNGTVANVVLRQPVTIHGNNGGTGAGVGGVVTLHGKFDILSITGTVLPPPAPPGSGGLSIFLAGEQGRMIGGRVVAPLVASGPVILMAASFSNATFERLPLEDEGGEGGGDVGGGVPPPATSETPPSGVAQGELRVNMSGYDQFSGWGDGAAARPSF

SEQ ID NO: 575 - DNA, 927 bp, Brassica napus
  CDS (1)..(927)
atggatcaggtctctcgctctcttcctccacctttcctctcaagagatctccatcttcacccacaccatcagtttcagcatcagcagcaacataaccacggccacgatatcgaccagcacaggatcggtggactaaaacgcgaccgagactctgagatcgatccaaacgagcactcttcagctggaaaagatcaaaacacccccggctccggcggagaaagcggcggcggaggcggaggaggagataaccacatcacgagaaggccacgtggcagaccagcgggatccaagaacaaaccaaaaccaccagtcatcatcacgagagacagcgcaaacgctcttaagtcccatgtgatggaagtagctaacggatgtgacgtcatggagagcgtcaccgtcttcgctcgccgtcgccaacgtggtatctgcgttttgagcggtaacggcgccgttactaacgttaccattagacaaccagcttcggttcccggtggtggctcgtccgtcgttaacttacacggacgtttcgagattctttctctctcgggatctttcctccctcctcctgctccaccggctgcttccggtctaacgatttacctagccggtggtcaaggacaggtcgttggagggagcgtggtgggtccactcatggcttcaggacctgtggtgattatggctgcttcgtttgggaacgctgcgtatgagaggttgcccttagaggaagatgatcaggacgagcagcaaacggctggagcggttgctaataatatggatggtaacgcgacgatgggtggtggaacgcagactcagccgcaacagttgatgcaagatccgacgtcgtttatacaagggttgcctccaagtcttatgaattctcaactgccagcagaagcttattggggaactccgagaccatctttctaa

SEQ ID NO: 576 - protein, 308 aa, Brassica napus
MDQVSRSLPPPFLSRDLHLHPHHQFQHQQQHNHGHDIDQHRIGGLKRDRDSEIDPNEHSSAGKDQNTPGSGGESGGGGGGGDNHITRRPRGRPAGSKNKPKPPVIITRDSANALKSHVMEVANGCDVMESVTVFARRRQRGICVLSGNGAVTNVTIRQPASVPGGGSSVVNLHGRFEILSLSGSFLPPPAPPAASGLTIYLAGGQGQVVGGSVVGPLMASGPVVIMAASFGNAAYERLPLEEDDQDEQQTAGAVANNMDGNATMGGGTQTQPQQLMQDPTSFIQGLPPSLMNSQLPAEAYWGTPRPSF

SEQ ID NO: 577 - DNA, 813 bp, Glycine max
  CDS (1)..(813)
atggccggcatagacttgggttcagcatcacattttgttcatcatcgccttgaacgccctgaccttgaagacgatgagaaccaacaagaccaagacaacaaccttaacaatcacgaagggcttgacctagttacaccaaattcaggtcctggtgatgttgttggtcgcaggccaagaggaagacctccaggttcaaagaacaagccaaaaccaccagttatcatcacaagagagagtgcaaacacccttagggctcacatccttgaagttagtactggttgtgacgtctttgaatcggtcgctacctatgcaaggaagcggcaaagagggatatgtgtcctcagtgggagtggcaccgtgaccaacgtgacattgaggcagccggccgcggctggtgccgtcgtcacgctgcacggaaggtttgagatcctctctttgtcaggatcattcctcccacctccagctccaccaggtgctacaagtttgactgtgttccttggtggaggacagggtcaagtggtgggaggaaatgttgttggtcctttggtggcttctgggcctgttattgttattgcttcatcttttactaatgtagcatatgagaggttgcctttggatgaagatgaatctatgcagatgcaacaagggcaatcatcagctggtgatggtagcggtgaccatggtggtggagttagtaataactcttttccggatccgtcttccgggcttccattcttcaatttgccactaaacatgcctcagttacctgttgatggttgggctggcaactctggtggaaggcaatcttactga

SEQ ID NO: 578 - protein, 270 aa, Glycine max
MAGIDLGSASHFVHHRLERPDLEDDENQQDQDNNLNNHEGLDLVTPNSGPGDVVGRRPRGRPPGSKNKPKPPVIITRESANTLRAHILEVSTGCDVFESVATYARKRQRGICVLSGSGTVTNVTLRQPAAAGAVVTLHGRFEILSLSGSFLPPPAPPGATSLTVFLGGGQGQVVGGNVVGPLVASGPVIVIASSFTNVAYERLPLDEDESMQMQQGQSSAGDGSGDHGGGVSNNSFPDPSSGLPFFNLPLNMPQLPVDGWAGNSGGRQSY

SEQ ID NO: 579 - DNA, 1200 bp, Zea mays
  CDS (1)..(1200)
atggacgggagggagtccacggtggcgtcggggcccaacttctcgtccttcttcgcgcagcaccggggcatcggggcgccgggtgtccccggccactcgcaggggcttcacgccccgccgcccggtgggtaccggcagcatcttgatgctgtctctgcggggtatgcattccagaccccgcatgttgggggtcccagcattgggcaggggtacgaggcctcacctcatgcggcacagcacagcgccggtggcggctctggctccggtggttgtggtggtatggacattggcatgggttcggctgtgtgcaccaatgttaagggggagctggggagcgggcctgcccaagatgagcaggtgaagaagaagcggggtaggccaaggaagtataagcctgatggggcggtgactctcgggttatcaccctcttcatcattaacacctcactcggccagcttggggatgggaaccatggttaatgctccaggttctggatttgggtcggggggatcaggggcttcaggcttgggtgcgccatcagagaagcgtggcagggggcggccacctggctctggaaagatgcaacagttggcttcgcttggaaagtggtttcttggctctgttggaactggttttactcctcatgtgattattattcagccaggagaggacgttgctgccagaataatggccttctcacaacaaggcccaagggcagtgtgcatcatttcagcaactggagctgtttctgcagcaacccttcaccaggattcagaatctggcagtgtggttacatatgagggtcggtttgagatcctgtgcctttctgggtcatacttggtggtagatgaaggtggcggcgcacggacccgaagtggagggctttgcatagctttgtgtggtcctgacaacagggttattggtgggagtgtaggtggagtcctgatggcagctggagcggttcaggtgatagtggggagcttcatgtacggaggaggttcaaagaagaacaaggtgaaagccgagttggacgcggagcctgaggaggcgaacgccggcgaccaagaggtggcacttgcggagcacagcagcatggcccctcatcctgccatgagtggtggtggcgggtgggcatctggcatgatgaggcagatggagtcgagaactcccaacatcgatatcaactccatccgcgagtag

SEQ ID NO: 580 - protein, 399 aa, Zea mays
MDGRESTVASGPNFSSFFAQHRGIGAPGVPGHSQGLHAPPPGGYRQHLDAVSAGYAFQTPHVGGPSIGQGYEASPHAAQHSAGGGSGSGGCGGMDIGMGSAVCTNVKGELGSGPAQDEQVKKKRGRPRKYKPDGAVTLGLSPSSSLTPHSASLGMGTMVNAPGSGFGSGGSGASGLGAPSEKRGRGRPPGSGKMQQLASLGKWFLGSVGTGFTPHVIIIQPGEDVAARIMAFSQQGPRAVCIISATGAVSAATLHQDSESGSVVTYEGRFEILCLSGSYLVVDEGGGARTRSGGLCIALCGPDNRVIGGSVGGVLMAAGAVQVIVGSFMYGGGSKKNKVKAELDAEPEEANAGDQEVALAEHSSMAPHPAMSGGGGWASGMMRQMESRTPNIDINSIRE

SEQ ID NO: 581 - DNA, 1026 bp, Glycine max
  CDS (1)..(1026)
atggatcgtggggaccaaatggcgttatccgggtcttactatatgcagcaaagaggaatacctggatctggagcacaacctgagttacatatttcacctaatatgcgtccaatctctaatccaaatctaccatttcaatccagcattggtggtggtaccattggatccacattgccattggaatcttcagcaatttcagctcatggtgtcaatgtgggagctcctactggggcacctccaggggaacctgttaagaggaagagaggaaggcctaggaaatatggaaccgacggaagtgtgtcattggcattgactccaactccaacatcatctagccatcctggagccttgacacaaagccagaaacggggcagagggcgccccccggggactgggaaaaaacagcaattggcttctcttggtgaattgatgtctggttcagctgggatgggattcactcctcatatcatcaacattgcaagtggagaagacattgcaacaaaaatcatggcattttctcagcagggacctagagttgtatgcattttgtcagccaatggtgctgtctctactgtcacacttcgtcagccatcaacttcaggtggcactgtcacatacgaggggcgctttgagatagtgtgtctgtcaggctcttacttggtcaccgataatggtggctcacgcaatcgaactggtggattgagtgtgtcccttgctagtcctgatggtcgtgtcattggtggtggagttggtggagtgcttattgcatcaagtcctgttcaggtggtagttgggagctttctatggggaggatcaaagacaaagaacaagaaaaaggaatcctcagaaggtgcagaagttgctgtggagtcagatcatcagggagttcataatccagtttcactgaatagcatctcacaaaatcaaaaccttcctccaactcccccatctctaagtccttggtcaacatcacgtccgttggacatgcgtaattcccatgtggacattgatttaatgcgtgggtga

SEQ ID NO: 582 - protein, 341 aa, Glycine max
MDRGDQMALSGSYYMQQRGIPGSGAQPELHISPNMRPISNPNLPFQSSIGGGTIGSTLPLESSAISAHGVNVGAPTGAPPGEPVKRKRGRPRKYGTDGSVSLALTPTPTSSSHPGALTQSQKRGRGRPPGTGKKQQLASLGELMSGSAGMGFTPHIINIASGEDIATKIMAFSQQGPRVVCILSANGAVSTVTLRQPSTSGGTVTYEGRFEIVCLSGSYLVTDNGGSRNRTGGLSVSLASPDGRVIGGGVGGVLIASSPVQVVVGSFLWGGSKTKNKKKESSEGAEVAVESDHQGVHNPVSLNSISQNQNLPPTPPSLSPWSTSRPLDMRNSHVDIDLMRG

SEQ ID NO: 583 - DNA, 888 bp, Glycine max
  CDS (1)..(888)
atggctggtttggatttaggaagcgcctcacgctttgttcaaaaccttcacagaccagacttgcacttgcaacaaaatttccagcagcaccaggaccagcagcaccagcgtgatttggaggagcagaaaactcctccgaatcacagaatgggggcgccgttcgacgatgatagcgatgatagaagcccgggcctggagctcacttcaggtcctggcgacatcgtcggacggcgcccgcgtggcaggcctcctgggtcgaagaacaagcctaagccgcccgtcataatcacccgggagagcgccaacacgctgagggcgcacatcctcgaggtcggaagcggctccgacgtcttcgactgtgtcaccgcgtatgcccggcggcgccagcgtgggatctgcgtcctcagtggcagcggcaccgtcaccaatgtcagtctccggcagcctgcagctgccggtgccgtcgtcacgctgcacggcaggttcgagattctctccctctctggctcgttcctcccgccgccggctccgccgggagccaccagcctcacaatctacctggccggcgggcaggggcaggttgtcggaggaaacgtcatcggagaattaaccgcagcagggccagtaatcgtcatcgcagcgtcgttcaccaacgtggcttacgagaggttacccttagaagaagatgaacaacagcagcaacaacagcagcttcagattcagccacctgcaacgacgtcgtctcaaggaaacaacaacaacaataaccctttccccgacccttcttcaggacttcccttcttcaatttaccactcaatatgcagaatgttcagttaccagttgagggttgggctgtaaaccctgcttcacgtccacaacctttttga

SEQ ID NO: 584 - protein, 295 aa, Glycine max
MAGLDLGSASRFVQNLHRPDLHLQQNFQQHQDQQHQRDLEEQKTPPNHRMGAPFDDDSDDRSPGLELTSGPGDIVGRRPRGRPPGSKNKPKPPVIITRESANTLRAHILEVGSGSDVFDCVTAYARRRQRGICVLSGSGTVTNVSLRQPAAAGAVVTLHGRFEILSLSGSFLPPPAPPGATSLTIYLAGGQGQVVGGNVIGELTAAGPVIVIAASFTNVAYERLPLEEDEQQQQQQQLQIQPPATTSSQGNNNNNNPFPDPSSGLPFFNLPLNMQNVQLPVEGWAVNPASRPQPF

SEQ ID NO: 585 - DNA, 909 bp, Glycine max
  CDS (1)..(909)
atggcgaatagatggtgggctgggaatgtgggaatgataagagagcaagagttgatggaaaacagcaacaacaacaacaacaacaacaacgctactactactacaccgacgaatagcagcaacagcaacactaacgcgaacaccaacaccaacacgaccgaggaagaggtgagcagggataacggagaggaccagaaccaaaacctcggcagccacgaagggtcggagcccggaagcagcggtcggaggccacgtggcaggccagcggggtccaagaacaagcccaagccgcccatagtcataactaaggaaagccccaacgcgctccgaagccacgtcctggaaatcgcctccggcagcgatgtcgccgagagcatcgccgccttcgccaaccgccgccaccgtggcgtgtcggtcctcagcgggagtggcattgtagccaacgtcactctccgccagcccgccgcccccgccggcgtcataaccctccacgggaggttcgagatactctccctctcgggtgcctttttgccgtccccctcgccgtccggcgccaccggactgaccgtctacctagccggcgggcaggggcaggttgtcggcggcaacgtggcgggctctctcgtcgcctccggaccggtgatggtgatcgccgccactttcgctaatgccacttatgagaggttgcctctggaggatgatcaaggtgaggaggaaatgcaagtgcagcagcagcagcagcagcagcaacagcagcagcagcagcagcagcaacaacaatctcaaggtttgggggaacaggtttcaatgcctatgtataatttgcctcctaatttgctacacaatggtcagaacatgcctcatgatgtgttctggggagctccacctcgccctcctccttccttctga

SEQ ID NO: 586 - protein, 302 aa, Glycine max
MANRWWAGNVGMIREQELMENSNNNNNNNNATTTTPTNSSNSNTNANTNTNTTEEEVSRDNGEDQNQNLGSHEGSEPGSSGRRPRGRPAGSKNKPKPPIVITKESPNALRSHVLEIASGSDVAESIAAFANRRHRGVSVLSGSGIVANVTLRQPAAPAGVITLHGRFEILSLSGAFLPSPSPSGATGLTVYLAGGQGQVVGGNVAGSLVASGPVMVIAATFANATYERLPLEDDQGEEEMQVQQQQQQQQQQQQQQQQQQSQGLGEQVSMPMYNLPPNLLHNGQNMPHDVFWGAPPRPPPSF

SEQ ID NO: 587 - DNA, 816 bp, Glycine max
  CDS (1)..(816)
atgttctcaaagcttcagccacaacaccagcaacagcatcaaccttttcaattctctcgtgaatgtcaaacgtccgaggacgatgacagccgaagcagcggtggccctaacaccgccgtcgcccaaaaatcagttttaggcggcggaggatgcagcgatggggccacaattgaagtggtgcggcggcccaggggccgcccgcccgggtccaagaacaggcccaagccgcctctcataataacgcgcgagcccgagcccgccatgagcccgttcattctagaaatcccgggcggaagcgacgtcgtcgaagccctagcccggttcagccgcagaaaaaacactggcctgtgcgtgttaaccggttcgggaaccgtcgccaacgtcactctccgtcaaccttctttctctcccgccggcgccaccgtcgccaccgtcactttccacggccgcttcgatatcctctccatgtccgccaccttcctccaccacgcctccccggcggcgatcccgaacgccttcgccgtgtccctttccggaccgcaggggcagatcgtcggcggattcgtcgccggcaggctcctcgcggccggcacggtgttcgtgattgccgcgtcgttcaacaatccgtcgtatcaccggctttcgtcggaggaggaggcgcagaacaactctggcggcggcgcaggagacgcgcagtctccgccggtttccggtggcggcttggagagcggacacgttccggctgagtcgtttatgtacagctgtcaccttccttcggatgtgatttgggctccaacccctagaccacctttctga

SEQ ID NO: 588 - protein, 271 aa, Glycine max
MFSKLQPQHQQQHQPFQFSRECQTSEDDDSRSSGGPNTAVAQKSVLGGGGCSDGATIEVVRRPRGRPPGSKNRPKPPLIITREPEPAMSPFILEIPGGSDVVEALARFSRRKNTGLCVLTGSGTVANVTLRQPSFSPAGATVATVTFHGRFDILSMSATFLHHASPAAIPNAFAVSLSGPQGQIVGGFVAGRLLAAGTVFVIAASFNNPSYHRLSSEEEAQNNSGGGAGDAQSPPVSGGGLESGHVPAESFMYSCHLPSDVIWAPTPRPPF

SEQ ID NO: 589 - DNA, 924 bp, Glycine max
  CDS (1)..(924)
atggatcctgttgcagcacaaggacgtcctctccctccaccttttctaactagagatcttcacttacaccctcaccaccaattccagccccaccacaacaaccaaaacaccgaggatgaagccggcaatggccgcggccagaagcgagatcgcgacgagaacgccggcggcggaggcggggccaccacgcccccccagggcggcggggaaggcaaggaatccgggtcaggagatggaggagggagtgacatggggagaagaccaagaggaagacccgcagggtccaaaaacaagcccaaaccacccattatcatcacaagagacagtgccaacgctctccgatcccatgtcatggaaatcgccaacggctgcgacatcatggagagcatcaccgcctttgcaaggcggcgacagcgcggtgtctgcgtgctcagcggcagcggcactgtcaccaacgtcacgctccggcagccggcctcgccgggagcagttgtgacccttcatggaagatttgagattttgtccctgtccggttcttttctgccgccgccggccccacctgcggcgtcaggactagccatatatctggctggcggacagggacaggtagtaggtggaagtgtggtgggaccccttgtggcctcaggtcccgttgtcatcatggctgcttcatttggtaatgctgcttatgagagactgcccttagaggaagaggaaactccggtggcagttgctggcaacggaggattaggatccccaggaatcccaggaacccagcaacaaccgcaacagcaacagcaacaacaacttgtgggagatcctaatagttcttctcttttccatggaatgcctcagaatcttctcaattcagttcaattaccggctgagggttattggggtggaagtgctcgccctcccttttaa

SEQ ID NO: 590 - protein, 307 aa, Glycine max
MDPVAAQGRPLPPPFLTRDLHLHPHHQFQPHHNNQNTEDEAGNGRGQKRDRDENAGGGGGATTPPQGGGEGKESGSGDGGGSDMGRRPRGRPAGSKNKPKPPIIITRDSANALRSHVMEIANGCDIMESITAFARRRQRGVCVLSGSGTVTNVTLRQPASPGAVVTLHGRFEILSLSGSFLPPPAPPAASGLAIYLAGGQGQVVGGSVVGPLVASGPVVIMAASFGNAAYERLPLEEEETPVAVAGNGGLGSPGIPGTQQQPQQQQQQQLVGDPNSSSLFHGMPQNLLNSVQLPAEGYWGGSARPPF

SEQ ID NO: 591 - DNA, 1068 bp, Glycine max
  CDS (1)..(1068)
atgtccggatctgacatggcagggagggagcaattcacggttgggatgcacaaaccccaacaacaacaacaacaacaacaacaacctcagcttcatcaaaacatgcgtatggactatgctgctgacggcactgctgttttcgcccctccgaccgttaccgttaacattaacggcggagattcctctccagcggtgcctccgggcctgggcctgccccagccccagcccatgatggttaactcccccgaaccaattaagagaaagaggggaaggcccaggaaatatgggcctgacggtggcatgaccttgggggctttgaagaccaccactcctcccggcggcggcgtgccggttgggcagtccggtggggcatttccagcggggcctctttcggattcggcctcagctggtaccgtgaagcgcaggggcagacctcgtggttctgtcaacaaaaataagaagaatgatagctctaactcctctaagtattctgggccaggatcttggtttactccgcatgtcattacggtgaacgctggagaggatttgtcagcaagaattatgacaatttcccagagtagttcaagaaatatttgcatcttaacagcaaatggagccatatctaatgtgacacttcgacaacctgcctcatctggtggaactgtgacttatgaggggcgatttgagatcctatcacttggaggttctttttttcttgctggaactgaaagagctggggggctgagtgtgtccttgtcagggccagatggccgtgtgttgggcggcggagttgcaggtcttctgatagctgcttcccctgttcagattgttttggcgagctttgtttctgatgttcgcaagcacttgaagcgtgcaaagaagacggagaatgaaaaggtttcgacagcaggaggccaaagcagctcaccatcaagaggcactctcagcgagtcctcaggtggggttgggagtgggagcccactaaaccaaagcacaggagcatgcaacaacaccatcgaaaacagtaccaccccaacacaaagctttcaaggcatgccctggaagtag

SEQ ID NO: 592 - protein, 355 aa, Glycine max
MSGSDMAGREQFTVGMHKPQQQQQQQQQPQLHQNMRMDYAADGTAVFAPPTVTVNINGGDSSPAVPPGLGLPQPQPMMVNSPEPIKRKRGRPRKYGPDGGMTLGALKTTTPPGGGVPVGQSGGAFPAGPLSDSASAGTVKRRGRPRGSVNKNKKNDSSNSSKYSGPGSWFTPHVITVNAGEDLSARIMTISQSSSRNICILTANGAISNVTLRQPASSGGTVTYEGRFEILSLGGSFFLAGTERAGGLSVSLSGPDGRVLGGGVAGLLIAASPVQIVLASFVSDVRKHLKRAKKTENEKVSTAGGQSSSPSRGTLSESSGGVGSGSPLNQSTGACNNTIENSTTPTQSFQGMPWK

SEQ ID NO: 593 - DNA, 924 bp, Glycine max
  CDS (1)..(924)
atggatcctgttgcagcacaaggacgtcctctccctccaccttttctaactagagatcttcacttacaccctcaccaccaattccagccccaccacaaccaccaaaacaccgaggatgaagccggcaatggccgcggccagaagcgagatcgcgacgagaacgccggcggcggaggcggggccaccacgcccccccagggcggcggggaaggcaaggaatccgggtcaggagatggaggagggagtgacatggggagaagaccaagaggaagacccgcagggtccaaaaacaagcccaaaccacccattatcatcacaagagacagtgccaacgctctccgatcccatgtcatggaaatcgccaacggctgcgacatcatggagagcatcaccgcctttgcaaggcggcgacagcgcggtgtctgcgtgctcagcggcagcggcactgtcaccaacgtcacgctccggcagccggcctcgccgggagcagttgtgacccttcatggaagatttgagattttgtccctgtccggttcttttctgccgccgccggccccacctgcggcgtcaggactagccatatatctggctggcggacagggacaggtagtaggtggaagtgtggtgggaccccttgtggcctcaggtcccgttgtcatcatggctgcttcatttggtaatgctgcttatgagagactgcccttagaggaagaggaaactccggtggcagttgctggcaacggaggattaggatccccaggaatcccaggaacccagcaacaaccgcaacagcaacagcaacaacaacttgtgggagatcctaatagttcttctcttttccatggaatgcctcagaatcttctcaattcagttcaattaccggctgagggttattggggtggaagtgctcgccctcccttttaa

SEQ ID NO: 594 - protein, 307 aa, Glycine max
MDPVAAQGRPLPPPFLTRDLHLHPHHQFQPHHNHQNTEDEAGNGRGQKRDRDENAGGGGGATTPPQGGGEGKESGSGDGGGSDMGRRPRGRPAGSKNKPKPPIIITRDSANALRSHVMEIANGCDIMESITAFARRRQRGVCVLSGSGTVTNVTLRQPASPGAVVTLHGRFEILSLSGSFLPPPAPPAASGLAIYLAGGQGQVVGGSVVGPLVASGPVVIMAASFGNAAYERLPLEEEETPVAVAGNGGLGSPGIPGTQQQPQQQQQQQLVGDPNSSSLFHGMPQNLLNSVQLPAEGYWGGSARPPF

SEQ ID NO: 595 - DNA, 837 bp, Glycine max
  CDS (1)..(837)
atggccaaccggtggtggaccgggtcggtgggtctagagaactctggccactcgatgaaaaaaccggatctggggttttccatgaacgagagtacggtgacggggaaccatataggagaagaagatgaggacagagaaaacagcgacgagccaagagagggagctattgacgtcgccaccacgcgccgccctaggggacgtccaccgggctccagaaacaagccgaaaccgccgatattcgtcacccgagacagccctaacgcgctgcggagccacgtcatggagattgccgtcggagccgacatcgccgactgcgtggcgcagttcgctcggaggcgccagcgcggggtttccattctcagcggcagcgggaccgtcgtcaacgtcaatctccggcaacccacggcgcccggcgccgtcatggcgctccacggccggtttgatatcctctccctcacaggctcctttctccccggaccgtcccctcccggcgccaccgggctcaccatctacctcgccggaggccaggggcatgtcgtcggcggcggggtggtgggcccgctcttggcggcgggtccagttttgttaatggcggctacgttttccaatgctacgtacgaaagattgcctctagaggatgatgatcaggaacacggcggcggcggaggctctccgccgggaattaccggcggtcccggcgaggcctcgtcgtcgatttcggtttataacaataatgttcctcctaatttaggtctttcgaatgggcaacatctgaaccatgaagcttattcttcttctccttgggttcattctcctcatgccagacctcctttctaa

SEQ ID NO: 596 - protein, 278 aa, Glycine max
MANRWWTGSVGLENSGHSMKKPDLGFSMNESTVTGNHIGEEDEDRENSDEPREGAIDVATTRRPRGRPPGSRNKPKPPIFVTRDSPNALRSHVMEIAVGADIADCVAQFARRRQRGVSILSGSGTVVNVNLRQPTAPGAVMALHGRFDILSLTGSFLPGPSPPGATGLTIYLAGGQGHVVGGGVVGPLLAAGPVLLMAATFSNATYERLPLEDDDQEHGGGGGSPPGITGGPGEASSSISVYNNNVPPNLGLSNGQHLNHEAYSSSPWVHSPHARPPF

SEQ ID NO: 597 - DNA, 888 bp, Glycine max
  CDS (1)..(888)
atggcgaatagatggtgggctgggaatgtgggaatgataagagagcaagagttgatggaaaacagcaacaacaacaacaacaacaacaacgctactactactacaccgacgaatagcagcaacagcaacactaacgcgaacaccaacaccaacacgaccgaggaagaggtgagcagggataacggagaggaccagaaccaaaacctcggcagccacgaagggtcggagcccggaagcagcggtcggaggccacgtggcaggccagcggggtccaagaacaagcccaagccgcccatagtcataactaaggaaagccccaacgcgctccgaagccacgtcctggaaatcgcctccggcagcgatgtcgccgagagcatcgccgccttcgccaaccgccgccaccgtggcgtgtcggtgctcagcgggagtggcattgttgccaacgtcactctccgccagcctgccgccccggccggcgtcataacgctccatgggaggttcgagatactgtccctctcgggagcctttttgccgtccccctcgccgccgggagccacgggactaactgtctatttggctggcgggcaggggcaggttgtcggtggcactgtcgccggctcgctcgttgcctccgggcccgtgatggtgatcgccgccacttttgctaatgccacctatgagaggttgccactggaggatgaacaaggtgaggagggaatgcaagtgcaacagcagcagcagcagcagcagcagcaacaatcccaagggttgggtgaacaggtttcaatgcctatgtataatttgcctcctaatttgctacacaatggtcagaacatgcctcatgatgtgctttggggagctccacctcgccctcctccttccttctaa

SEQ ID NO: 598 - protein, 295 aa, Glycine max
MANRWWAGNVGMIREQELMENSNNNNNNNNATTTTPTNSSNSNTNANTNTNTTEEEVSRDNGEDQNQNLGSHEGSEPGSSGRRPRGRPAGSKNKPKPPIVITKESPNALRSHVLEIASGSDVAESIAAFANRRHRGVSVLSGSGIVANVTLRQPAAPAGVITLHGRFEILSLSGAFLPSPSPPGATGLTVYLAGGQGQVVGGTVAGSLVASGPVMVIAATFANATYERLPLEDEQGEEGMQVQQQQQQQQQQQSQGLGEQVSMPMYNLPPNLLHNGQNMPHDVLWGAPPRPPPSF

SEQ ID NO: 599 - DNA, 1209 bp, Zea mays
  CDS (1)..(1209)
atggacgtccgggacctgcaccagcagccgcagcagcagcaggctccgccgcgcgtgggatccccgccgcaggccggcgccggcggtgtcatgatgcagcatgccgccgcgttcggcgcggcgccgccgccgtccgggttgccgcaggcctcggcggccaacgttatgcacgggatgtcccttgcctttaaccctatggcttcgccggacgcctcgtcacccataagcagcatgaagattgtggacatgccgctggggtctatgtaccgccctgattccggcgcgacgggcttgcagcagcagcagcccggctccggtggcgttggtgccagcggtggtgctatcgtcgccgtcagcggcggggaccttgtgaagaagaagagggggaggccgaggaagtacggcccagatgggagcatcggcttgggactcaagaccgccgcggcgggggtcactgaagcgacgggtgcccagtccggtggaggcgggtctacccctaaccccgacggcaagcgtagagggcgtcctcctgggtcaggcaaaaagaaacagctggatgctttgggatcttcggggacgtcgtttactccccacataataactgtgaagcccaatgaggatgttgcgtccaaaataatggctttttcccaacaaggcccgcgcactacatgcataatttcggcaaatggtgctctgtgcacggcaacactgcggcaaccagcaacctctggtgggatagtgacatatgagggccacttcgatatactctctctttcgggctcattcttgcttgcagaggatggtgacactcgcagcagaacaggtggtttgagcgtggcactggctggaagtgatggacgcatagttggaggttgtgttgctggaatgctgatggcagcgacacctgtgcaggttgtagttggcagtttcattgctgaagctaaaaagccaaaagaagagcaacccaaacgtgagccaacatcggtgccaccgcacacagctgtctttggggcggcctcgactgccagccccccatcggatggcacatcaagtgagcactccgatgatcccgggagccccatgggaccaaacggcagtgcattcaccagcgcggggcttcccctgcactccacatatgctgcagttggttggtcactatcagaggaccaaagccgttatgatccagatctaaagatgatgaccgactga

SEQ ID NO: 600 - protein, 402 aa, Zea mays
MDVRDLHQQPQQQQAPPRVGSPPQAGAGGVMMQHAAAFGAAPPPSGLPQASAANVMHGMSLAFNPMASPDASSPISSMKIVDMPLGSMYRPDSGATGLQQQQPGSGGVGASGGAIVAVSGGDLVKKKRGRPRKYGPDGSIGLGLKTAAAGVTEATGAQSGGGGSTPNPDGKRRGRPPGSGKKKQLDALGSSGTSFTPHIITVKPNEDVASKIMAFSQQGPRTTCIISANGALCTATLRQPATSGGIVTYEGHFDILSLSGSFLLAEDGDTRSRTGGLSVALAGSDGRIVGGCVAGMLMAATPVQVVVGSFIAEAKKPKEEQPKREPTSVPPHTAVFGAASTASPPSDGTSSEHSDDPGSPMGPNGSAFTSAGLPLHSTYAAVGWSLSEDQSRYDPDLKMMTD

SEQ ID NO: 601 - DNA, 1131 bp, Zea mays
  CDS (1)..(1131)
atggaggtgaggtccgagcaagggctgatggcggggagggatctattcggtatgccaaagagcccgccggcgccggtttccgggccgccggcgtccgccgccatgcagagcgtgcgcatggcgtacacctcggacggcaccgctgtgttcgctccgatgagatcctcggccgcgacgccgtcttaccagccgcagggtgcagcccacggcgctagcatgtccgcggcgacaatcattggaggcaatggcgcggcagctgcgccgagcatgggggagccggtgcccaagaagaagcgcgggcgaccaaggaagtatgggcccgacgggtccatggcgctggcattggtgcctgtgtcggcggctacggggtcgccgacgacagggcagggttcttctgggccgttctcaccggctgggtcaaatctgacgaactctctgttggtagcctcgccggacgggttcaagaagcggggccggcctaagggttctaccaacaagccgcgcatggatgctgctggatcgtcaggagctggatttacacctcatgttatcacagttcaagctggggaggacgtgtcatcaaagatcatgtcgttttctcagcacggaccgcgtgcagtctgtgttctctcagcaaacggtgccatatcaaatgtgacgcttcgtcagactgctacatcaggcggaactgtaacatatgagggtcggttcgagatactgtcactgtcggggtcattcctcttggtggaggatggtggtcaacgcagtcgaactggagggctcagtgtgtcgttggctggtcccgacggtcgtgtgctgggcggtggagttgcagggctcctcgtagcagcttcgccagttcagatagtactgggaagtttcaattctggaggcaaaaaagaggcaaaaaagcatgctccttcaggacccacaccagcgccactgaaggtcgctcctccgacaacaaccaggatgggacccaacagcagcagccctccttcaagaggaggtacattgagcgagtcatccggtggcgccggaagcccaccaccgccgctgcatcaaggcatggctgctagcagtagcaacgaccagccgccgttcctgtccagcatcatgccatggaaatga

SEQ ID NO: 602 - protein, 376 aa, Zea mays
MEVRSEQGLMAGRDLFGMPKSPPAPVSGPPASAAMQSVRMAYTSDGTAVFAPMRSSAATPSYQPQGAAHGASMSAATIIGGNGAAAAPSMGEPVPKKKRGRPRKYGPDGSMALALVPVSAATGSPTTGQGSSGPFSPAGSNLTNSLLVASPDGFKKRGRPKGSTNKPRMDAAGSSGAGFTPHVITVQAGEDVSSKIMSFSQHGPRAVCVLSANGAISNVTLRQTATSGGTVTYEGRFEILSLSGSFLLVEDGGQRSRTGGLSVSLAGPDGRVLGGGVAGLLVAASPVQIVLGSFNSGGKKEAKKHAPSGPTPAPLKVAPPTTTRMGPNSSSPPSRGGTLSESSGGAGSPPPPLHQGMAASSSNDQPPFLSSIMPWK

SEQ ID NO: 603 - DNA, 1260 bp, Zea mays
  CDS (1)..(1260)
atggagaccaaggacgtgtcgccgctcgccgccgccaccaccaccaccgcggcgcccgtgcctgcaccgacctctcaaccgcctccgccgccgccggccccttcttctatggcgccgccgcagcaccagcaccagcaccatccgccgccgccgttcgcgcagcaggcggccccggttccgtcgcctgccgcgtccatgcccggcggcatgcggctctcgttcgaccagatgtccgggaaggcgcccggggagcagcaccaccactccgcgcccatgctgtacacggtgccaccaccgcagtccgccgcgggcgcgggcgcaccgggggccaatgtgctgggcatgggcgagctgatgcgcaagaagcgcggccggccgcgcaagtacgcgcccgacgggagcatggctctggcgctggcccccatctcctccgcctcagccggcggcgccgcagcccccggacagcagcagcacggcggcgggttctccatcagcagccccccgtccgaccccaacgccaagcgccgcggccggccccccggctctggcaagaagaagcagttcgaagccttgggctcctggggcatcgccttcacccctcacatcctcaccgtcaaggccggcgaggatgttgcttcaaaaataatgacattctcacagcaaggccctcgcacagtctgcatcctttccgcgaatggtgcaattagtaatgttacacttcggcagccagccacatctggtggactagttacttatgaggggcgctttgagataatctcgctatctggttctttcctgcttgcggaggatggtgatactcgcagcaggactggtggcttgagtgtcgcacttgcaggatctgatggccgagttcttggagggtgtgttgctggaatgcttatggctgcaactcctgttcaggttgtggtggctagctttatcgcagagggaaagaaatcaaagccagcggaagcacggaaggttgaaccgatggctgctcctccaccgcagatggctacctttgttccacctccgctggccaccagccctccatcggagggaacatccagcgcatcatctgatgactctggcagcccaatccaccacagtgcgatgccgttcagcaactccagccagcatcaacaccctcaccagcaccagcaccagcacatgccgcctgcctacgcatccgggggttggtccctctcagtgcaccagcagaataggcatgattctgacatgaagatgatgtcgaactaa

SEQ ID NO: 604 - protein, 419 aa, Zea mays
METKDVSPLAAATTTTAAPVPAPTSQPPPPPPAPSSMAPPQHQHQHHPPPPFAQQAAPVPSPAASMPGGMRLSFDQMSGKAPGEQHHHSAPMLYTVPPPQSAAGAGAPGANVLGMGELMRKKRGRPRKYAPDGSMALALAPISSASAGGAAAPGQQQHGGGFSISSPPSDPNAKRRGRPPGSGKKKQFEALGSWGIAFTPHILTVKAGEDVASKIMTFSQQGPRTVCILSANGAISNVTLRQPATSGGLVTYEGRFEIISLSGSFLLAEDGDTRSRTGGLSVALAGSDGRVLGGCVAGMLMAATPVQVVVASFIAEGKKSKPAEARKVEPMAAPPPQMATFVPPPLATSPPSEGTSSASSDDSGSPIHHSAMPFSNSSQHQHPHQHQHQHMPPAYASGGWSLSVHQQNRHDSDMKMMSN

SEQ ID NO: 605 - DNA, 1110 bp, Zea mays
  CDS (1)..(1110)
atggaggtgaggtccgagcaagggctgatggcggggagggatctattcggcatgacgaagagcccgccggcgcccgcgccgccgtcgtccgccgccatgcagagcgtgcgcatggcgtacaccgcggacggcaccgccgtgttcgctccggtgagctcttcgcctgcgacgccgtcttaccagccgcagggcgcagcccacggcgctagcatgtccgcggcgacggtcgttggaggcaatggcgctccagctgcgccgagcatgggtgagccgctggccaagaagaagcgcggacgaccaaggaagtacgggcccgacgggtccatggcgctggcaatggtgcctgcttcggcggcttcagggtcgccggcgacagggcagggtttttctgggccgttctcaccgcctgcgttaaatccggcgagctctctggtggtggcgtcgccagacggattcaagaagcggggccggcctaagggttctaccaacaagccacgcatggacgctgctggatcatcaggagctggatttacacctcatgttatcacagttcaagctggggaggacgtggcatcaaagatcatgtcattttcccagcacggaacacacgcagtctgtgttctctcagcaaacggcgccatatcaaatgtaacgcttcgtcagactgctacatcaggcagaactgtaacatacgagggtcaattcgagatactgtcgctgtcggggtcattcttcctggctgaggatggtgtccagcgcagccgaaacggaggcctcagcgtgtcgctggctggtcctgatggccgtctgttgggtggtggggtcgcaggacttctagtagcggcttcaccggttcagatagtactgggaagcttcaattctggaggcggaaaggagccacaaaagcaggctccttcagaacccacatcggctccaccgagggttgctccgacagccgggatgggaggacccagcagcccttcttcaagaggcacattgagcgagtcatccggtggcgctggaagcccaccgccactgcatcgagccatggctgctagtgctagcaatagtaaccagccaccgttcttgtccagcatgccttggagatga

SEQ ID NO: 606 - protein, 369 aa, Zea mays
MEVRSEQGLMAGRDLFGMTKSPPAPAPPSSAAMQSVRMAYTADGTAVFAPVSSSPATPSYQPQGAAHGASMSAATVVGGNGAPAAPSMGEPLAKKKRGRPRKYGPDGSMALAMVPASAASGSPATGQGFSGPFSPPALNPASSLVVASPDGFKKRGRPKGSTNKPRMDAAGSSGAGFTPHVITVQAGEDVASKIMSFSQHGTHAVCVLSANGAISNVTLRQTATSGRTVTYEGQFEILSLSGSFFLAEDGVQRSRNGGLSVSLAGPDGRLLGGGVAGLLVAASPVQIVLGSFNSGGGKEPQKQAPSEPTSAPPRVAPTAGMGGPSSPSSRGTLSESSGGAGSPPPLHRAMAASASNSNQPPFLSSMPWR

SEQ ID NO: 607 - DNA, 930 bp, Zea mays
  CDS (1)..(930)
atggccggcctcgacctcggcaccgctgcgacgcgctacgttcatcagctccaccacctccaccctgaccttcagctacagcacaactacgccaagcagccggaaccctccgaggatgaccctaatggcagcggcggcggcaacagcaacaacggcgggccgtatggtgatcacgacggcgggtcgtcctcatccggcccagccggagatgcccacggtggcagcggcggtaacggggagatggtagcccgccggccccgcgggcgcccaccgggctcgaagaataagccgaagcccccggtgatcatcacgcgggagagcgccaacacgctgcgcgcccacatcctggaggtggcgagcggctgcgacgtgttcgagagtgtctccacgtacgcgcgccggcggcagcgcggcgtctgcgtgctgagcggcagcggcgtcgtcaccaacgtgacgctacggcagccgtcggcgcccgcgggcgccgtggtgacgctgcacgggaggttcgagatcctgtcgctctcgggatctttcctcccgccgccggctccccccggcgccaccagcctcaccatcttcctcgcggggggccaggggcaggtggtcggtgggaacgtcgtcggtgcgctctacgccgcaggccccgtcatcgtcatcgccgcgtccttcgccaacgtcgcctacgagcgcctccccctggaggaggaagaggctcaggcagcgccaccgggcctccagatgcagccacccggcggtggtgtcgatggcgctggaggcatgggcggtgggccgttccctcccgatccgtcggcggctgccgggctgccgttcttcaacctgccgctcaacaacatgtccggtggcgggtcgccgctcccgcccggtgctgacggccatggttgggccggtgcacggccgccgttctga

SEQ ID NO: 608 - protein, 309 aa, Zea mays
MAGLDLGTAATRYVHQLHHLHPDLQLQHNYAKQPEPSEDDPNGSGGGNSNNGGPYGDHDGGSSSSGPAGDAHGGSGGNGEMVARRPRGRPPGSKNKPKPPVIITRESANTLRAHILEVASGCDVFESVSTYARRRQRGVCVLSGSGVVTNVTLRQPSAPAGAVVTLHGRFEILSLSGSFLPPPAPPGATSLTIFLAGGQGQVVGGNVVGALYAAGPVIVIAASFANVAYERLPLEEEEAQAAPPGLQMQPPGGGVDGAGGMGGGPFPPDPSAAAGLPFFNLPLNNMSGGGSPLPPGADGHGWAGARPPF

SEQ ID NO: 609 - DNA, 1203 bp, Zea mays
  CDS (1)..(1203)
atggacgggagggagtccacggtggcgtcggggcccaacttctcgtcgttctacacgcagcaccggggcatcggggcgccgggtgtccccggccactcggcggtgctccatgacccgccgcccgccgggtaccggcagcatcttgatgctgtctctgctgggtacgcattccagaccccgcaggttgggggttcccacattggacaggggtaccaccatgtcgaggcctcaccccatgtggcgcaatacagctccggtggcggcaccagctccggcggtgatatggacattggcatgggttcggctgtgtgcaccaatgttaagggggagctggggagcgggcctgcccaagatgagcaggtgaagaagaagcggggtaggccaaggaagtataagcctgatggggcggtgactctcgggttatcaccctcttcatcattaacacctcactcggccagcttggggatgggaaccatgattagtgctccaggttctggatttgggtcggagggatcaggggcttcaggcttgggtgcgccatcagagaagcgtggcagggggcggccacctggctctggaaagatgcaacagttggcttcgcttggaaagtggtttcttggctctgttggaactggttttactcctcatgtgattattattcagccaggagaggacgttgctgccagaataatggccttctcacaacaaggcccaagggcagtgtgcatcatttcagcaactggagctgtttctgcagcaacccttcaccaggattcagaatctggcagtgtggttacatatgagggtcggtttgagatcctgtgcctttctgggtcatacttggtggtagatgaaggtggcggcgcacggacccgaagtggagggctttgcatagctttgtgtggtcctgacaacagggttattggtgggagtgtaggtggagtcctgatggcagctggagcggttcaggtgatagtggggagcttcatgtacggaggaggttcaaagaagaacaaggtgaaagccgagttggatgcggagcctgaggaggcgaatgccggcgaccaagaggtggcacttgcggagcacagcagcatggcccctcatcctgccatgagtggtggtggcgggtgggcatctggcatgatgaggcagatggagtcgagaactcccaacatcgatatcaactccatccgcgagtag

SEQ ID NO: 610 - protein, 400 aa, Zea mays
MDGRESTVASGPNFSSFYTQHRGIGAPGVPGHSAVLHDPPPAGYRQHLDAVSAGYAFQTPQVGGSHIGQGYHHVEASPHVAQYSSGGGTSSGGDMDIGMGSAVCTNVKGELGSGPAQDEQVKKKRGRPRKYKPDGAVTLGLSPSSSLTPHSASLGMGTMISAPGSGFGSEGSGASGLGAPSEKRGRGRPPGSGKMQQLASLGKWFLGSVGTGFTPHVIIIQPGEDVAARIMAFSQQGPRAVCIISATGAVSAATLHQDSESGSVVTYEGRFEILCLSGSYLVVDEGGGARTRSGGLCIALCGPDNRVIGGSVGGVLMAAGAVQVIVGSFMYGGGSKKNKVKAELDAEPEEANAGDQEVALAEHSSMAPHPAMSGGGGWASGMMRQMESRTPNIDINSIRE

SEQ ID NO: 611 - DNA, 1131 bp, Zea mays
  CDS (1)..(1131)
atggaggtgaggtccgagcaagggctgatggcggggagggatctattcggtatgccaaagagcccgccggcgccggtttccgggccgccggcgtccgccgccatgcagagcgtgcgcatggcgtacacctcggacggcaccgctgtgttcgctccgatgagctcctcggccgcgacgccgtcttaccagccgcagggtgcagcccacggcgctagcatgtctgcggcgacaatcgttggaggcaatggcgcggcagctgcgccgagcatgggggagccggtgcccaagaagaagcgcgggcgaccaaggaagtatgggcccgacgggtccatggcgctggcattggtgcctgtgtcggcggctacggggtcgccgacgacagggcagggttcttctgggccgttctcaccggctgggtcaaatctgacgaactctctgttggtggcctcgccggacgggttcaagaagcggggccggcctaagggttctaccaacaagccgcgcatggatgctgctggatcgtcaggagctggatttacacctcatgttatcacagttcaagctggggaggacgtgtcatcaaagatcatgtcgttttctcagcacggaccgcgtgcagtctgtgttctctcagcaaacggtgccatatcaaatgtgacgcttcgtcagactgctacatcaggcggaactgtaacatatgagggtcggttcgagatactgtcactgtcggggtcattcctcttggtggaggatggtggtcaacgcagtcgaactggagggctcagtgtgtcgttggctggtcccgacggtcgtgtgctgggcggtggagttgcagggctcctcgtagcagcttcgccagttcagatagtactgggaagtttcaattctggaggcaaaaaagaggcaaaaaagcatgctccttcaggacccacaccagcgccactgaaggtcgctcctccgacaacaaccaggatgggacccaacagcagcagccctccttcaagaggaggtacattgagcgagtcatccggtggcgccggaagcccaccaccgccgctgcatcaaggcatggctgctagcagtagcaacgaccagccgccgttcctgtccagcatcatgccatggaaatga

SEQ ID NO: 612 - protein, 376 aa, Zea mays
MEVRSEQGLMAGRDLFGMPKSPPAPVSGPPASAAMQSVRMAYTSDGTAVFAPMSSSAATPSYQPQGAAHGASMSAATIVGGNGAAAAPSMGEPVPKKKRGRPRKYGPDGSMALALVPVSAATGSPTTGQGSSGPFSPAGSNLTNSLLVASPDGFKKRGRPKGSTNKPRMDAAGSSGAGFTPHVITVQAGEDVSSKIMSFSQHGPRAVCVLSANGAISNVTLRQTATSGGTVTYEGRFEILSLSGSFLLVEDGGQRSRTGGLSVSLAGPDGRVLGGGVAGLLVAASPVQIVLGSFNSGGKKEAKKHAPSGPTPAPLKVAPPTTTRMGPNSSSPPSRGGTLSESSGGAGSPPPPLHQGMAASSSNDQPPFLSSIMPWK

SEQ ID NO: 613 - DNA, 1167 bp, Zea mays
  CDS (1)..(1167)
atggacgggagggagtccacggtggcgtcggggcccaacttctcgtccttcttcgcgcagcaccggggcatcggggcgccgggtgtccccggccactcgcaggggcttcacgccccgccgcccggtgggtaccggcagcatcttgatgctgtctctgcggggtatgcattccagaccccgcatgttgggggtcccagcattgggcaggggtacgaggcctcacctcatgcggcacagcacagcgccggtggcggctctggctccggtggttgtggtggtatggacattggcatgggtgcggccgtgagtgccgatgttaagggggatcaggggagtgggcctggccaggatgagcaggtgaagaagaagcggggcaggccaagaaaatataagcctgatgggtctgtgactcttgggttatcacccacttcatcatcgacgcctcactcgtccagctcggggatgggaaccatggttaacactccaggctctggatttgggtctggaggatcagggggttcaggttctggtgcaccatcagagaaacgtggcagggggcggccacctggctctggaaagatgcaacagctggcttcgcttggaaagtggtttcttggctctgttggaacaggttttactccgcatgtgattattattcaaccaggagaggacgttgctgcgagaataatggccttctcacagcaaggcccaagggcagtgtgcatcatttcagcaactggagctatttctacagcaacccttcaccaggattcagactccggtggtgtggttacatatgagggccgatttgagatcctgtgcctttctgggtcatacttggtggtagaggatggtggcacacggacccgaagcggaggtctttgcatagctttgtgtggtcctgaccacagggttattggtgggagtgtaggcggagtcctgacagcagctggaacagttcaggtgatagtggggagcttcatgtacggaggttcgaagaagaacaaggtgaaagcggaggtggacatggagcccgaggaggtggcacccgcggagcacagtggcatggtccctcctgcgatgagtggcggcgggtgggaagcgggcatgatgaggcagatggactcgagaactcctgccattgatatcaactcgatccgcgggtag

SEQ ID NO: 614 - protein, 388 aa, Zea mays
MDGRESTVASGPNFSSFFAQHRGIGAPGVPGHSQGLHAPPPGGYRQHLDAVSAGYAFQTPHVGGPSIGQGYEASPHAAQHSAGGGSGSGGCGGMDIGMGAAVSADVKGDQGSGPGQDEQVKKKRGRPRKYKPDGSVTLGLSPTSSSTPHSSSSGMGTMVNTPGSGFGSGGSGGSGSGAPSEKRGRGRPPGSGKMQQLASLGKWFLGSVGTGFTPHVIIIQPGEDVAARIMAFSQQGPRAVCIISATGAISTATLHQDSDSGGVVTYEGRFEILCLSGSYLVVEDGGTRTRSGGLCIALCGPDHRVIGGSVGGVLTAAGTVQVIVGSFMYGGSKKNKVKAEVDMEPEEVAPAEHSGMVPPAMSGGGWEAGMMRQMDSRTPAIDINSIRG

SEQ ID NO: 615 - DNA, 1254 bp, Zea mays
  CDS (1)..(1254)
atggagaccaaggacgtgtcgccgctcgccgccgccaccaccaccaccgcggcgcccgtgcctgcaccgacctctcaaccgcctccgccggccccttcttctatggcgccgccgcagcaccagcaccagcaccatccgccgccgccgttcgcgcagcaggcggccccggttccgtcgcctgccgcgtccatgcccggcggcatgcggctctcgttcgaccagatgtccgggaaggcgcccggggagcagcaccaccactccgcgcccatgctgtacacggtgccaccaccgcagtccgccgcgggcgcgggcgcaccgggggccaatgtgctgggcatgggcgagctgatgcgcaagaagcgcggccggccgcgcaagtacgcgcccgacgggagcatggctctggcgctggcccccatctcctccgcctcagccggcggcgccgcagcccccggacagcagcagcacggcggcgggttctccatcagcagccccccgtccgaccccaacgccaagcgccgcggccggcctcccggctctggcaagaagaagcagttcgaagccttgggctcctggggcatcgccttcacccctcacatcctcaccgtcaaggccggcgaggatgttgcttcaaaaataatgacattctcacagcaaggccctcgcacagtctgcatcctttccgcgaatggtgcaattagtaatgttacacttcggcagccagccacatctggtggactagttacttatgaggggcgctttgagataatctcgctatctggttctttcctgcttgcggaggatggtgatactcgcagcaggactggtggcttgagtgtcgcacttgcaggatctgatggccgagttcttggagggtgtgttgctggaatgcttatggctgcaactcctgttcaggttgtggtggctagctttatcgcagagggaaagaaatcaaagccagcggaagcacggaaggttgaaccgatggctgctcctccaccgcagatggctacctttgttccacctccgctggccaccagccctccatcggagggaacatccagcgcatcatctgatgactctggcagcccaatccaccacagtgcgatgccgttcagcaactccagccagcatcaacaccctcaccagcaccagcaccagcacatgccgcctgcctacgcatccgggggttggtccctctcagtgcaccagcagaataggcatgattctgacatgaagatgatgtcgaactaa

SEQ ID NO: 616 - protein, 417 aa, Zea mays
METKDVSPLAAATTTTAAPVPAPTSQPPPPAPSSMAPPQHQHQHHPPPPFAQQAAPVPSPAASMPGGMRLSFDQMSGKAPGEQHHHSAPMLYTVPPPQSAAGAGAPGANVLGMGELMRKKRGRPRKYAPDGSMALALAPISSASAGGAAAPGQQQHGGGFSISSPPSDPNAKRRGRPPGSGKKKQFEALGSWGIAFTPHILTVKAGEDVASKIMTFSQQGPRTVCILSANGAISNVTLRQPATSGGLVTYEGRFEIISLSGSFLLAEDGDTRSRTGGLSVALAGSDGRVLGGCVAGMLMAATPVQVVVASFIAEGKKSKPAEARKVEPMAAPPPQMATFVPPPLATSPPSEGTSSASSDDSGSPIHHSAMPFSNSSQHQHPHQHQHQHMPPAYASGGWSLSVHQQNRHDSDMKMMSN

SEQ ID NO: 617 - DNA, 1110 bp, Zea mays
  CDS (1)..(1110)
atggaggtgaggtccgagcaagggctgatggcggggagggatctattcggcttgacgaagagcccgccggcgcccgcgccgccgtcgtccgccgccatgcagagcgtgcgcatggcgtacaccgcggacggcaccgccgtgttcgctccggtgagctcttcgcctgcgacgccgtcttaccagccgcagggcgcagcccacggcgctagcatgtccgcggcgacggtcgttggaggcaatggcgctccagctgcgccgagcatgggtgagccgctggccaagaagaagcgcggacgaccaaggaagtacgggcccgacgggtccatggcgctggcaatggtgcctgcttcggcggcttcagggtcgccggcgacagggcagggtttttctgggccgttctcaccgcctgcgttaaatccggcgagctctctggtggtggcgtcgccagacggattcaagaagcggggccggcctaagggttctaccaacaagccacgcgtggacgctgctgggtcatcaggagctggatttacacctcatgttatcacagttcaagctggggaggacgtggcatcaaagattatgtcattttcccagcatggaacacacggagtttgtgttctttcagcaaatggctccatatcaaatgtaacgcttcgtcagactgctacatcaggcagaactgtaacatacgagggtcaattcgagatactgtcgctgtcggggtcattcttcctggctgaggatggtgtccagcgcagccgaaacggaagcctcagcgtgtcgctggctggtcctgatggccgtctgttgggtggtggggtcgcaggacttctagtagcggcttcaccggttcagatagtactgggaagcttcaattctggaggcggaaaggagccacaaaagcaggctccttcagaacccacatcggctccaccgagggttgctccgacagccgggatgggaggacccagcagcccttcttcaagaggcacattgagcgagtcatccggtggcgctggaagcccaccgccactgcatcgagccatggctgctagtgctagcaatagtaaccagccaccgttcttgtccagcatgccttggagatga

SEQ ID NO: 618 - protein, 369 aa, Zea mays
MEVRSEQGLMAGRDLFGLTKSPPAPAPPSSAAMQSVRMAYTADGTAVFAPVSSSPATPSYQPQGAAHGASMSAATVVGGNGAPAAPSMGEPLAKKKRGRPRKYGPDGSMALAMVPASAASGSPATGQGFSGPFSPPALNPASSLVVASPDGFKKRGRPKGSTNKPRVDAAGSSGAGFTPHVITVQAGEDVASKIMSFSQHGTHGVCVLSANGSISNVTLRQTATSGRTVTYEGQFEILSLSGSFFLAEDGVQRSRNGSLSVSLAGPDGRLLGGGVAGLLVAASPVQIVLGSFNSGGGKEPQKQAPSEPTSAPPRVAPTAGMGGPSSPSSRGTLSESSGGAGSPPPLHRAMAASASNSNQPPFLSSMPWR

SEQ ID NO: 619 - DNA, 1134 bp, Zea mays
  CDS (1)..(1134)
atggaggtgaggtccgagcaagggctgatggcggggagggatctattcggtatgccaaagagcccgccggcgccggtttccgggccgccggcgtccgccgccatgcagagcgtgcgcatggcgtacacctcggacggcaccgctgtgttcgctccgatgagatcctcggccgcgacgccgtcttaccagccgcagggtgcagcccacggcgctagcatgtccgcggcgacaatcattggaggcaatggcgcggcagctgcgccgagcatgggggagccggtgcccaagaagaagcgcgggcgaccaaggaagtatgggcccgacgggtccatggcgctggcattggtgcctgtgtcggcggctacggggtcgccgacgacagggcagggttcttctgggccgttctcaccggctgggtcaaatctgacgaactctctgttggtagcctcgccggacgggttcaagaagcggggccggcctaagggttctaccaacaagccgcgcatggatgctgctggatcgtcaggagctggatttacacctcatgttatcacagttcaagctggggaggacgtgtcatcaaagatcatgtcgttttctcagcacggaccgcgtgcagtctgtgttctctcagcaaacggtgccatatcaaatgtgacgcttcgtcagactgctacatcaggcggaactgtaacatatgagggtcggttcgagatactgtcactgtcggggtcattcctcttggtggaggatggtggtcaacgcagtcgaactggagggctcagtgtgtcgttggctggtcccgacggtcgtgtgctgggcggtggagttgcagggctcctcgtagcagcttcgccagttcagatagtactgggaagtttcaattctggaggcaaaaaagaggcaaaaaagcatgctccttcagcacccacaccagcgccactgaaggtcgctcctccgacaacaaccaggatgggacccaacagcagcagccctccttcaagaggaggtacattgagcgagtcatccggtggcgccggaagcccgccgccgccgccgctgcatcaaggcatggctgctagcagtagcaacgaccagccgccgttcctgtccagcatcatgccatggaaatga

SEQ ID NO: 620 - protein, 377 aa, Zea mays
MEVRSEQGLMAGRDLFGMPKSPPAPVSGPPASAAMQSVRMAYTSDGTAVFAPMRSSAATPSYQPQGAAHGASMSAATIIGGNGAAAAPSMGEPVPKKKRGRPRKYGPDGSMALALVPVSAATGSPTTGQGSSGPFSPAGSNLTNSLLVASPDGFKKRGRPKGSTNKPRMDAAGSSGAGFTPHVITVQAGEDVSSKIMSFSQHGPRAVCVLSANGAISNVTLRQTATSGGTVTYEGRFEILSLSGSFLLVEDGGQRSRTGGLSVSLAGPDGRVLGGGVAGLLVAASPVQIVLGSFNSGGKKEAKKHAPSAPTPAPLKVAPPTTTRMGPNSSSPPSRGGTLSESSGGAGSPPPPPLHQGMAASSSNDQPPFLSSIMPWK

SEQ ID NO: 621 - DNA, 1419 bp, Zea mays
  CDS (1)..(1419)
atgcgattgtgtccctatgacttgcccaccggccccccccgacacctatacgaccactataaggaagctggtacgcctgcaggtaccggtccggaattcccgggtcgacccacgcgtccgcccacgcgtccggacgaggcgcgctgcggcacgggtgaggggagctgcgccggagcaccagccctagggttttcaccgccctgccgcgagatggacgtccgggacctgcaccagcagccgcagcagcagcaggctccgccgcgcgtgggatccccgccgcaggccggcgccggcggtgtcatgatgcagcatgccgccgcgttcggcgcggcgccgccgccgtccgggttgccgcaggcctcggcggccaacgttatgcacgggatgtcccttgcctttaaccctatggcttcgccggacgcctcgtcacccataagcagcatgaagattgtggacatgccgctggggtctatgtaccgccctgattccggcgcgacgggcttgcagcagcagcagcccggctccggtggcgttggtgccagcggtggtgctatcgtcgccgtcagcggcggggaccttgtgaagaagaagagggggaggccgaggaagtacggcccagatgggagcatcggcttgggactcaagaccgccgcggcgggggtcactgaagcgacgggtgcccagtccggtggaggcgggtctacccctaaccccgacggcaagcgtagagggcgtcctcctgggtcaggcaaaaagaaacagctggatgctttgggatcttcggggacgtcgtttactccccacataataactgtgaagcccaatgaggatgttgcgtccaaaataatggctttttcccaacaaggcccgcgcactacatgcataatttcggcaaatggtgctctgtgcacggcaacactgcggcaaccagcaacctctggtgggatagtgacatatgagggccacttcgatatactctctctttcgggctcattcttgcttgcagaggatggtgacactcgcagcagaacaggtggtttgagcgtggcactggctggaagtgatggacgcatagttggaggttgtgttgctggaatgctgatggcagcgacacctgtgcaggttgtagttggcagtttcattgctgaagctaaaaagccaaaagaagagcaacccaaacgtgagccaacatcggtgccaccgcacacagctgtctttggggcggcctcgactgccagccccccatcggatggcacatcaagtgagcactccgatgatcccgggagccccatgggaccaaacggcagtgcattcaccagcgcggggcttcccctgcactccacatatgctgcagttggttggtcactatcagaggaccaaagccgttatgatccagatctaaagatgatgaccgactga

SEQ ID NO: 622 - protein, 472 aa, Zea mays
MRLCPYDLPTGPPRHLYDHYKEAGTPAGTGPEFPGRPTRPPTRPDEARCGTGEGSCAGAPALGFSPPCREMDVRDLHQQPQQQQAPPRVGSPPQAGAGGVMMQHAAAFGAAPPPSGLPQASAANVMHGMSLAFNPMASPDASSPISSMKIVDMPLGSMYRPDSGATGLQQQQPGSGGVGASGGAIVAVSGGDLVKKKRGRPRKYGPDGSIGLGLKTAAAGVTEATGAQSGGGGSTPNPDGKRRGRPPGSGKKKQLDALGSSGTSFTPHIITVKPNEDVASKIMAFSQQGPRTTCIISANGALCTATLRQPATSGGIVTYEGHFDILSLSGSFLLAEDGDTRSRTGGLSVALAGSDGRIVGGCVAGMLMAATPVQVVVGSFIAEAKKPKEEQPKREPTSVPPHTAVFGAASTASPPSDGTSSEHSDDPGSPMGPNGSAFTSAGLPLHSTYAAVGWSLSEDQSRYDPDLKMMTD

SEQ ID NO: 623 - DNA, 20 bp, Artificial sequence
  primer
atggaaaccgtcgggcgtcc

SEQ ID NO: 624 - DNA, 22 bp, Artificial sequence
  primer
tcagtacggcgatggagctttg

SEQ ID NO: 625 - protein, 191 aa, Artificial sequence
  consensus sequence
  Variant (5)..(5): Xaa in position 5 is any amino acid
  Variant (8)..(9): Xaa in position 8 to 9 is any amino acid
  Variant (11)..(17): Xaa in position 11 to 17 is any amino acid
  Variant (18)..(59): Xaa in position 18 to 59 is any or no amino acid
  Variant (61)..(62): Xaa in position 61 to 62 is any amino acid
  Variant (63)..(66): Xaa in position 63 to 66 is any or no amino acid
  Variant (68)..(68): Xaa in position 68 is any amino acid
  Variant (70)..(74): Xaa in position 70 to 74 is any amino acid
  Variant (75)..(82): Xaa in position 75 to 82 is any or no amino acid
  Variant (84)..(85): Xaa in position 84 to 85 is any amino acid
  Variant (87)..(87): Xaa in position 87 is any amino acid
  Variant (88)..(88): Xaa in position 88 is any or no amino acid
  Variant (91)..(92): Xaa in position 91 to 92 is any amino acid
  Variant (94)..(96): Xaa in position 94 to 96 is any amino acid
  Variant (97)..(97): Xaa in position 97 is any or no amino acid
  Variant (99)..(99): Xaa in position 99 is any amino acid
  Variant (103)..(108): Xaa in position 103 to 108 is any amino acid
  Variant (109)..(124): Xaa in position 109 to 124 is any or no amino acid
  Variant (126)..(126): Xaa in position 126 is any amino acid
  Variant (133)..(133): Xaa in position 133 is any amino acid
  Variant (135)..(135): Xaa in position 135 is any amino acid
  Variant (136)..(136): Xaa in position 136 is any or no amino acid
  Variant (138)..(150): Xaa in position 138 to 150 is any amino acid
  Variant (151)..(160): Xaa in position 151 to 160 is any or no amino acid
  Variant (164)..(165): Xaa in position 164 to 165 is any amino acid
  Variant (167)..(167): Xaa in position 167 is any amino acid
  Variant (169)..(169): Xaa in position 169 is any amino acid
  Variant (172)..(172): Xaa in position 172 is any amino acid
  Variant (173)..(173): Xaa in position 173 is any or no amino acid
  Variant (175)..(175): Xaa in position 175 is any amino acid
  Variant (177)..(177): Xaa in position 177 is any amino acid
  Variant (179)..(179): Xaa in position 179 is any amino acid
  Variant (181)..(183): Xaa in position 181 to 183 is any amino acid
  Variant (185)..(190): Xaa in position 185 to 190 is any amino acid
RGRPXGSXXKXXXXXXXXXXXXXXXXXXXXXXXXXXXXXXXXXXXXXXXXXXXXXXXXXHXXXXXXGXDXXXXXXXXXXXXXRXXCXXLSXXGXXXXVXLRQXXXXXXXXXXXXXXXXXXXXXXGXFEILSLXGXXLXXXXXXXXXXXXXXXXXXXXXXXLAGXXGXVXGGXXVXGXLXAXXXVXXXXXXF

SEQ ID NO: 626 - protein, 17 aa, Artificial sequence
  protein pattern
  Variant (2)..(2): Xaa in position 2 is Ala, Cys, Gly or Ser
  Variant (3)..(3): Xaa in position 3 is Ala, Gly or Ser
  Variant (4)..(7): Xaa in position 4 to 7 is any amino acid
  Variant (8)..(8): Xaa in position 8 is Ile, Leu or Val
  Variant (9)..(9): Xaa in position 9 is Phe, Ile, Leu or Val
  Variant (12)..(12): Xaa in position 12 is any amino acid
  Variant (14)..(14): Xaa in position 14 is any amino acid
  Variant (16)..(16): Xaa in position 16 is any amino acid
LXXXXXXXXGGXVXGXL

SEQ ID NO: 627 - DNA, 2736 bp, Arabidopsis thaliana
  CDS (1)..(2736)
atgccggtggtttctctggctaaggttgttacttctccggcggtggccggagatttagcggttcgtgttccgttcatttatgggaaacgactagtgtcgaatcgtgtttctttcgggaaattgaggcgccggagttgtataggtcaatgcgtaagaagcgaattgcaaagtcctcgtgtcttaggttccgtcacagatttagcgttggataattctgtggagaatggtcatcttcccaaaggagattcatgggctgtacacaaatttggaggaacttgtgtgggaaattctgagaggataaaggatgttgctgctgttgttgttaaggatgactctgagaggaagttggtggttgtgtcagcaatgtcgaaagtcactgatatgatgtatgatctcattcacagagcagagtctcgtgatgattcatatctgtctgctttgagtggtgttcttgaaaagcaccgagcaactgctgttgacttgcttgatggagatgaactctcaagtttcttggctcggttaaatgatgatataaataatctcaaagcaatgcttcgtgccatttacatagctggtcatgcaaccgaatctttctcagacttcgttgttggccacggagagttgtggtctgctcagatgttagctgctgttgtgagaaagagcggattggactgcacttggatggatgcaagggatgtgcttgttgttattccaacgagctctaatcaagttgaccctgactttgtggaatcagaaaaaagactggaaaaatggtttactcagaactcggcaaagattattatagcaactggtttcatagccagtacaccacagaacattccaacgactcttaaaagggatgggagtgacttctctgcagctataatgagtgctctgtttagatctcaccaactcacaatctggacagatgttgatggtgtgtacagtgcagatcccaggaaagttagtgaagctgttgtgctgaagactctttcttatcaagaggcttgggaaatgtcttactttggggcaaacgttttacatcctcggaccattattccagtgatgaaatatgacattccaattgtaataaggaatattttcaacctctctgcccctggaacaatgatatgccggcagattgatgatgaagatggattcaaattagacgctcctgtgaaaggatttgcgacgattgacaatttggctcttgtcaatgtagaaggaactggaatggctggtgttcctggtactgccagtgccattttttctgctgtcaaggaagttggagccaatgtgattatgatatcgcaggctagtagcgagcattctgtgtgctttgctgtacctgagaaggaagtgaaagctgtttctgaagcattgaactcaagatttcgtcaagctttggctggtggccgcctttcccagattgaaatcatccctaattgtagcatattagcagcagttggccagaaaatggcgagcactcctggtgtttctgccactttttttaatgcattagcaaaggccaatatcaacatccgtgctatagcccaaggttgctccgagttcaatattacagtagtcgtcaagcgtgaagactgcatcagggcattaagagctgtgcactcaagattttacctttcgagaaccactttggcagtgggaatcataggaccgggattaattggtggaaccttacttgatcagattagagatcaggcggcagtgctcaaagaagaatttaaaattgacttgcgtgttatagggatcacgggctcaagtaaaatgttgatgagtgaatcggggattgacttatcaagatggagagagcttatgaaagaagagggagaaaaagctgacatggagaagttcacccaatatgtgaagggaaatcatttcatcccaaactctgttatggttgattgtacagccgatgctgacatcgctagctgttactacgactggttgctacgaggaattcatgtggtcactccgaacaaaaaggctaactctggaccacttgatcagtatctaaagatcagagatcttcaacgaaaatcgtacacacattacttttatgaagccaccgttggagctggtcttccaattattagcaccttacgtggtctcctcgaaacaggggataaaatactgcgaattgagggaattttcagtggtactttaagttacctcttcaacaactttgtcggcaccagaagcttcagtgaagttgtagcagaagcaaagcaagcaggtttcacagaaccagatccacgagatgatctatctggaacagatgttgccagaaaagtaacaatccttgccagagaatcaggcttaaaattggatcttgagggccttccagtccagaatcttgtgccaaagccgttacaagcttgtgcatcagcagaagagttcatggagaagcttcctcagtttgatgaagaattatccaaacaaagagaagaggctgaagcagcaggagaagtcttgagatacgtaggagttgtagatgcagtagagaaaaagggaacagtcgagttgaaacggtacaaaaaagatcatccgtttgctcagctatcgggtgctgataacatcatcgctttcacaaccaaacggtacaaagaacagcctctgattgttcgtggacctggtgctggtgctcaagtcacagccggtggaatcttcagtgacattcttcgccttgctttctatctcggggctccgtcttaa

SEQ ID NO: 628 - protein, 911 aa, Arabidopsis thaliana
MPVVSLAKVVTSPAVAGDLAVRVPFIYGKRLVSNRVSFGKLRRRSCIGQCVRSELQSPRVLGSVTDLALDNSVENGHLPKGDSWAVHKFGGTCVGNSERIKDVAAVVVKDDSERKLVVVSAMSKVTDMMYDLIHRAESRDDSYLSALSGVLEKHRATAVDLLDGDELSSFLARLNDDINNLKAMLRAIYIAGHATESFSDFVVGHGELWSAQMLAAVVRKSGLDCTWMDARDVLVVIPTSSNQVDPDFVESEKRLEKWFTQNSAKIIIATGFIASTPQNIPTTLKRDGSDFSAAIMSALFRSHQLTIWTDVDGVYSADPRKVSEAVVLKTLSYQEAWEMSYFGANVLHPRTIIPVMKYDIPIVIRNIFNLSAPGTMICRQIDDEDGFKLDAPVKGFATIDNLALVNVEGTGMAGVPGTASAIFSAVKEVGANVIMISQASSEHSVCFAVPEKEVKAVSEALNSRFRQALAGGRLSQIEIIPNCSILAAVGQKMASTPGVSATFFNALAKANINIRAIAQGCSEFNITVVVKREDCIRALRAVHSRFYLSRTTLAVGIIGPGLIGGTLLDQIRDQAAVLKEEFKIDLRVIGITGSSKMLMSESGIDLSRWRELMKEEGEKADMEKFTQYVKGNHFIPNSVMVDCTADADIASCYYDWLLRGIHVVTPNKKANSGPLDQYLKIRDLQRKSYTHYFYEATVGAGLPIISTLRGLLETGDKILRIEGIFSGTLSYLFNNFVGTRSFSEVVAEAKQAGFTEPDPRDDLSGTDVARKVTILARESGLKLDLEGLPVQNLVPKPLQACASAEEFMEKLPQFDEELSKQREEAEAAGEVLRYVGVVDAVEKKGTVELKRYKKDHPFAQLSGADNIIAFTTKRYKEQPLIVRGPGAGAQVTAGGIFSDILRLAFYLGAPS

SEQ ID NO: 629 - DNA, 3048 bp, Zea mays
  CDS (44)..(2800)
cctcgggtctcggctctcgccgtcgccactcgccgcgagcgagatgcagggcctagccgtatcatgccagcttcctcctgctgcggccgcagctcggtggcggccgcgcgcttcttcctctaatagggaagcagttttacaatgttggaagtatgaattaagtcaagaccactatttgggaggccccctaaggataggtcagtctcaaggaagtttgcacagacatcgctctacaaattttctcagaccagctgctgcagctatttcagttgaacaagatgaagtcaatacttatcttccaaaaggtgatatgtggtctgtgcacaagttcggtggaacctgtatgggaactcccaaaagaatccagtgtgttgcaaatatagttcttggtgattcttctgagaggaagctgatcattgtttccgcaatgtccaaagtaactgacatgatgtacaaccttgtacaaaaggctcagtcacgggatgattcatatgcaatagcactggcagaagtttttgagaagcatatgactgcagcaaaggatcttcttgacggagaagatcttgcaagattcttgtctcagttgcattcagacgtcagcaacttgcgagccatgctccgtgctatttatatagctgggcatgcgacagaatctttctctgactttgttgttgggcatggagagttgtggtctgcgcagatgctgtcgtatgcaataaagaagtctggggcaccctgcagttggatggatacaagagaagttctagttgtaacacccagtggttgtaatcaagtagaccctgattacttggaatgtgagaagcgacttcagaaatggttttctcgacaaccagctgagataatagttgctacaggatttattgcaagtacagctggaaacattccaacaactctaaaaagggatggaagtgatttctcagcagccatagttggttctcttgtcagggcacgccaggtcactatttggactgatgttgacggggtatttagcgcagatcctagaaaagttagtgaggctgtgatcttaagcactctgtcttaccaggaggcctgggaaatgtcatattttggggcaaatgttttgcatccgcgcaccattatacctgtgatgaaagacaacattcccattgttattaggaacatgttcaacctctctgcccctggaaccatgatttgcaagcagcctgccaatgaaaatggtgatttagacgcatgtgtcaaatcatttgctactgtcgataatttagcacttgttaatgttgaaggaactggaatggctggcgttccaggtacagcaagtgctatatttagtgctgttaaggatgttggagctaatgttatcatgatatctcaggctagcagcgaacattcagtatgctttgctgttccagaaaaggaagttgctgtagtttctgctgagttacatgataggtttcgtgaggcattagctgcagggaggctgtctaaggttgaagttattaatggttgcagcattcttgctgctgttggtctgaggatggccagcactccaggagtcagtgcaatactttttgatgcattagcaaaggcaaacattaatgttcgagcaatagctcaaggttgcagtgaatacaatattactgttgtattgaagcaacaagattgtgtaagggctctgagagctgctcactcaaggttcttcctctccaaaaccacacttgctgttgggatcattggacctggtttaattggtggagcactccttaaccagttgaagaatcagactgctgttctcaaggaaaatatgaacattgatctgcgtgtcattggaataactggctcaagtacaatgcttctgagcgacacgggaatagacttaacccagtggaaacagcttctacaaaaggaagcagaaccagctgatattggtagttttgttcatcatttatctgataatcatgtatttccgaacaaagttttggtggactgcacagcggatacaagtgtggcatcccactattacgattggttaaagaagggtattcatgtcatcacgccaaataagaaagcaaattctgggccacttgatcagtacctgaaattacggactatgcagcgtgcctcatacactcattacttttatgaagcaactgttggtgctggcctcccaatcatcagcaccttgcgaggtcttctggagacgggtgacaagatactgcgtattgagggcattttcagtggaactttgagttatatatttaacaatttcgaaggaacaagggcgtttagtgatgttgttgccgaagcaagagaggcgggatacactgaacctgacccaagggatgacctatctggaactgacgttgcccgaaaggtcgttgtcctcgcgagggaatctggtctgaggcttgaactttctgacattcctgtgaagagccttgtgccagaaacactcgcagagtcatgctcgtcagcagatgaattcatgcagaagctaccgtccttcgacgaggactgggccaggcaacgcagtgatgctgaggctgcaggcgaagtcctgcgttacgttggagcgttggatgcggtgaacaggagcggacaggtggagctacgcaggtacaggagggaccacccgttcgcgcagctctccggctccgacaacatcatcgccttcaccacgtccaggtacaaggagcagccgctgatcgtgcggggtccgggtgccggcgcggaggtgacagccggtggcgtcttctgcgacattctgcggctggcgtcttacctcggtgctccttcttgagcttcgagctacaggtgccagtttcaggaagcagtcggagacacactgccatgcatgatgcctcccctccgtgtttgggctatgctcacatgttgtaatgttgttctgaataagtgccaggaaataatgcctctagcgtatgtcgagagagagaggtggttcggctttggaatagccgattaggtgttgtttttgctgcatgatgcaaatgaattatcgtaccaatgaagggatgtttgcttgtgcct

SEQ ID NO: 630 - protein, 918 aa, Zea mays
MQGLAVSCQLPPAAAAARWRPRASSSNREAVLQCWKYELSQDHYLGGPLRIGQSQGSLHRHRSTNFLRPAAAAISVEQDEVNTYLPKGDMWSVHKFGGTCMGTPKRIQCVANIVLGDSSERKLIIVSAMSKVTDMMYNLVQKAQSRDDSYAIALAEVFEKHMTAAKDLLDGEDLARFLSQLHSDVSNLRAMLRAIYIAGHATESFSDFVVGHGELWSAQMLSYAIKKSGAPCSWMDTREVLVVTPSGCNQVDPDYLECEKRLQKWFSRQPAEIIVATGFIASTAGNIPTTLKRDGSDFSAAIVGSLVRARQVTIWTDVDGVFSADPRKVSEAVILSTLSYQEAWEMSYFGANVLHPRTIIPVMKDNIPIVIRNMFNLSAPGTMICKQPANENGDLDACVKSFATVDNLALVNVEGTGMAGVPGTASAIFSAVKDVGANVIMISQASSEHSVCFAVPEKEVAVVSAELHDRFREALAAGRLSKVEVINGCSILAAVGLRMASTPGVSAILFDALAKANINVRAIAQGCSEYNITVVLKQQDCVRALRAAHSRFFLSKTTLAVGIIGPGLIGGALLNQLKNQTAVLKENMNIDLRVIGITGSSTMLLSDTGIDLTQWKQLLQKEAEPADIGSFVHHLSDNHVFPNKVLVDCTADTSVASHYYDWLKKGIHVITPNKKANSGPLDQYLKLRTMQRASYTHYFYEATVGAGLPIISTLRGLLETGDKILRIEGIFSGTLSYIFNNFEGTRAFSDVVAEAREAGYTEPDPRDDLSGTDVARKVVVLARESGLRLELSDIPVKSLVPETLAESCSSADEFMQKLPSFDEDWARQRSDAEAAGEVLRYVGALDAVNRSGQVELRRYRRDHPFAQLSGSDNIIAFTTSRYKEQPLIVRGPGAGAEVTAGGVFCDILRLASYLGAPS

SEQ ID NO: 631 - DNA, 2811 bp, Dunaliella salina
  CDS (1)..(2811)
atgcttctgcgggccaattgtgctgcagggctgggatgcaaagcgtcttccggaaagacgcctgcagctgctcccgcaaatgtcgctggtttcaccgcgcagcactctgcctgcttcggaaaggcgtccagctccacccgtaatcatcatcatgtcatcaccccgctcctcccctcgtgcccagctcccctcatgccccaagcagcccacagcagcgccatctgccgagcagtagttgcccctgtggagacggaggcagggggtgccccctttcagcgcggttccggctgggcgctgcacaagtttggcggcacttgcatggccgctgctgagcgcattgccggggcaagcaagctgatgattgacatcaaccctgatgcagagggaaaggtggccgttgtgagcgcgatgggctcacacccgacttcgcccctgaaggtgacagacgtgatcctccagatgatcgccaaggctgagcgccaggaccagcgcttcctgctagacctggccgcaccgcaagataagcacgttgactccgccaaggagctgctgggcgagagcaaggagctgacctactttgtgggccgcttgctagaggacatcaacaacctgaaggcgatgctgaacgccatgagcatcgccggtatgaccacagaggcattctcggactatgtggtgggccacggcgagctgtggagcgcgcagctcatggcattgtactgccagcagctgggcgcagactgtgtcttcatggacgcgcgcgatgtgctggttgtgtcccccactagcgatggcaccagcgtggatttggtggaggatgcgtccaacgcgcgcttggacgcatggttccggaagcacggctcccacaaacttatcatcgccacaggattcattgcaaagaatgtggaggggaagatcacgaccctgaagcgcaacggcagcgacctcagcgctactaccttgggcgcactgtttcgctgcggccacatcagcatctggacggacgtggatggcgtgtacagtgcggacccacgcaaggtccccgaggctgtgtgcctgccctccatgacctaccacgaggcctgggagatgagctactttggcgccaacgtgctgcacccacgcaccaccttgccagccatgaagtacaacatccccatcacgatccgcaactttttccgcctggaagcaccaggcacccgggtgagcgatgtggtctctgactctcaggcatacggcggccacgacccaaccgtgaagggctttgccaccatcgacaatgtgtccctcatcagcattgagggcactggcatggtgggtgtgcctggtatcgccagcaccatcttctttaccgtgcgcgatgccaacatcaacgtcatcatgatcagccaggcctccagcgagcagtccatctgctttgccgtcaagcaagcagacggtccggcagctgtgcgggcgctgagccgccgctttgcggagtccatcaatgcagggcgcgtcagcaaggtggaggccatcgagggctgctgcgtgctggcagccgtgggccagggcatggtgaacaccaagggcgtgagcgcaaccatgatgggtgccctggccaaggccaacgtaaacatcaaggccatcgcacagggctcctctgagtacaacatcactgtgcttgtggaccagaaagacagcgagcgtgcactgcgtgcagtgcactcccgcttctacttgtcagccactcccctgggcattggcctcattgggccaggcctgattgggggggccttgctggggcagatcagggaccaggctgagacgctgcgaaaggactttgccatcgacctgcgagtacttggcattgcctctagtaaaacaatgttgctccaggagaagggagttgatttggaaaactggagagaggaatttcaacagcgcgggaggcctgtggacttgaaggccttcagctccgccctcgccacctcctacatccccaactgcgtgatcatcgactgcacagcctccgatgcaccccctgcgagctatttggaatggatgaagcaaggcatccatgtagtcacccccaataaaaagctgggctcaggaccacttgcacaatatcaagacatcaagcaagttggccgaaactcctacacccacttcttctatgagggcactgtaggcgctggcttgcccgtaataggcacccttaaacatcttgtagagactggagataaagtagagaaagtggaaggtattttcagcggtaccttgtcatacattttcaacacctttggaagcgagcgtcccttcagcgaagttgtggcggatgccaaggtcaacggctacactgagcccgacccccgtgatgacctgaacggcactgatgttgcccgcaaggttaccatcctaacgcgagagtgcggcctacaactggagctgtctgacattcccattgagtctttggtgcctgaggcattgcgaggcttgaactcaagtgaggaatacatggcacggctcccagaatttgatgcagagatggggcggcttgctgcagaggcagaggcaagcggggaagtccttcgatacgtgggcactgttgatgtgcagaacaaaactggcagcgtgggattaaaacagtaccccagaaaccatgcattcgcacagctagaaggatctgacaacatcatttcctttcagacctctcgttacaagaggcaaccgctcttcatccgagggcctggtgccggagctgatgtgacggctggtggcgtgttctctgacctcttgaagctggctgcttacctgggtgcaccctcttga

SEQ ID NO: 632 - protein, 936 aa, Dunaliella salina
MLLRANCAAGLGCKASSGKTPAAAPANVAGFTAQHSACFGKASSSTRNHHHVITPLLPSCPAPLMPQAAHSSAICRAVVAPVETEAGGAPFQRGSGWALHKFGGTCMAAAERIAGASKLMIDINPDAEGKVAVVSAMGSHPTSPLKVTDVILQMIAKAERQDQRFLLDLAAPQDKHVDSAKELLGESKELTYFVGRLLEDINNLKAMLNAMSIAGMTTEAFSDYVVGHGELWSAQLMALYCQQLGADCVFMDARDVLVVSPTSDGTSVDLVEDASNARLDAWFRKHGSHKLIIATGFIAKNVEGKITTLKRNGSDLSATTLGALFRCGHISIWTDVDGVYSADPRKVPEAVCLPSMTYHEAWEMSYFGANVLHPRTTLPAMKYNIPITIRNFFRLEAPGTRVSDVVSDSQAYGGHDPTVKGFATIDNVSLISIEGTGMVGVPGIASTIFFTVRDANINVIMISQASSEQSICFAVKQADGPAAVRALSRRFAESINAGRVSKVEAIEGCCVLAAVGQGMVNTKGVSATMMGALAKANVNIKAIAQGSSEYNITVLVDQKDSERALRAVHSRFYLSATPLGIGLIGPGLIGGALLGQIRDQAETLRKDFAIDLRVLGIASSKTMLLQEKGVDLENWREEFQQRGRPVDLKAFSSALATSYIPNCVIIDCTASDAPPASYLEWMKQGIHVVTPNKKLGSGPLAQYQDIKQVGRNSYTHFFYEGTVGAGLPVIGTLKHLVETGDKVEKVEGIFSGTLSYIFNTFGSERPFSEVVADAKVNGYTEPDPRDDLNGTDVARKVTILTRECGLQLELSDIPIESLVPEALRGLNSSEEYMARLPEFDAEMGRLAAEAEASGEVLRYVGTVDVQNKTGSVGLKQYPRNHAFAQLEGSDNIISFQTSRYKRQPLFIRGPGAGADVTAGGVFSDLLKLAAYLGAPS

SEQ ID NO: 633 - DNA, 3045 bp, Zea mays subsp. mays
  CDS (311)..(2797)
cctcgggtctcggctctcgccgtcgccactcgccgcgagcgagatgcagggcctagccgtatcatgccagcttcctcctgctgcggccgcagctcggtggcggccgcgcgcttcttcctctaatagggaagcagttttacaatgttggaagtatgaattaagtcaagaccactatttgggaggccccctaaggataggtcagtctcaaggaagtttgcacagacatcgctctacaaattttctcagaccagctgctgcagctatttcagttgaacaagatgaagtcaatacttatcttccaaaaggtgatatgtggtctgtgcacaagttcggtggaacctgtatgggaactcccaaaagaatccagtgtgttgcaaatatagttcttggtgattcttctgagaggaagctgatcattgtttccgcaatgtccaaagtaactgacatgatgtacaaccttgtacaaaaggctcagtcacgggatgattcatatgcaatagcactggcagaagtttttgagaagcatatgactgcagcaaaggatcttcttgacggagaagatcttgcaagattcttgtctcagttgcattcagacgtcagcaacttgcgagccatgctccgtgctatttatatagctgggcatgcgacagaatctttctctgactttgttgttgggcatggagagttgtggtctgcgcagatgctgtcgtatgcaataaagaagtctggggcaccctgcagttggatggatacaagagaagttctagttgtaacacccagtggttgtaatcaagtagaccctgattacttggaatgtgagaagcgacttcagaaatggttttctcgacaaccagctgagataatagttgctacaggatttattgcaagtacagctggaaacattccaacaactctaaaaagggatggaagtgatttctcagcagccatagttggttctcttgtcagggcacgccaggtcactatttggactgatgttgacggggtatttagcgcagatcctagaaaagttagtgaggctgtgatcttaagcactctgtcttaccaggaggcctgggaaatgtcatattttggggcaaatgttttgcatccgcgcaccattatacctgtgatgaaagacaacattcccattgttattaggaacatgttcaacctctctgcccctggaaccatgatttgcaagcagcctgccaatgaaaatggtgatttagacgcatgtgtcaaatcatttgctactgtcgataatttagcacttgttaatgttgaaggaactggaatggctggcgttccaggtacagcaagtgctatatttagtgctgttaaggatgttggagctaatgttatcatgatatctcaggctagcagcgaacattcagtatgctttgctgttccagaaaaggaagttgctgtagtttctgctgagttacatgataggtttcgtgaggcattagctgcagggaggctgtctaaggttgaagttattaatggttgcagcattcttgctgctgttggtctgaggatggccagcactccaggagtcagtgcaatactttttgatgcattagcaaaggcaaacattaatgttcgagcaatagctcaaggttgcagtgaatacaatattactgttgtattgaagcaacaagattgtgtaagggctctgagagctgctcactcaaggttcttcctctccaaaaccacacttgctgttgggatcattggacctggtttaattggtggagcactccttaaccagttgaagaatcagactgctgttctcaaggaaaatatgaacattgatctgcgtgtcattggaataactggctcaagtacaatgcttctgagcgacacgggaatagacttaacccagtggaaacagcttctacaaaaggaagcagaaccagctgatattggtagttttgttcatcatttatctgataatcatgtatttccgaacaaagttttggtggactgcacagcggatacaagtgtggcatcccactattacgattggttaaagaagggtattcatgtcatcacgccaaataagaaagcaaattctgggccacttgatcagtacctgaaattacggactatgcagcgtgcctcatacactcattacttttatgaagcaactgttggtgctggcctcccaatcatcagcaccttgcgaggtcttctggagacgggtgacaagatactgcgtattgagggcattttcagtggaactttgagttatatatttaacaatttcgaaggaacaagggcgtttagtgatgttgttgccgaagcaagagaggcgggatacactgaacctgacccaagggatgatctatctggaactgacgttgcccgaaaggtcgttgtcctcgcgagggaatctggtctgaggcttgaactttctgacattcctgtgaagagccttgtgccagaaacacttgcatcatgctcgtcagcagatgaattcatgcagaagctaccgtccttcgacgaggactgggccaggcaacgcagtgatgctgaggctgcaggcgaagtcctgcgttacgttggagcgttggatgcggtgaacaggagcggacaggtggagctacgcaggtacaggagggaccacccgttcgcgcagctctccggctccgacaacatcatcgccttcaccacgtccaggtacaaggagcagccgctgatcgtgcggggtccgggtgccggcgcggaggtgacagccggtggcgtcttctgcgacattctgcggctggcgtcttacctcggtgctccttcttgagcttcgagctacaggtgccagtttcaggaagcagtcggagacacactgccatgcatgatgcctcccctccgtgtttgggctatgctcacatgttgtaatgttgttctgaataagtgccaggaaataatgcctctagcgtatgtcgagagagagaggtggttcggctttggaatagccgattaggtgttgtttttgctgcatgatgcaaatgaattatcgtaccactgaagggatgtttgcttgtgcct

SEQ ID NO: 634 - protein, 828 aa, Zea mays subsp. mays
MWSVHKFGGTCMGTPKRIQCVANIVLGDSSERKLIIVSAMSKVTDMMYNLVQKAQSRDDSYAIALAEVFEKHMTAAKDLLDGEDLARFLSQLHSDVSNLRAMLRAIYIAGHATESFSDFVVGHGELWSAQMLSYAIKKSGAPCSWMDTREVLVVTPSGCNQVDPDYLECEKRLQKWFSRQPAEIIVATGFIASTAGNIPTTLKRDGSDFSAAIVGSLVRARQVTIWTDVDGVFSADPRKVSEAVILSTLSYQEAWEMSYFGANVLHPRTIIPVMKDNIPIVIRNMFNLSAPGTMICKQPANENGDLDACVKSFATVDNLALVNVEGTGMAGVPGTASAIFSAVKDVGANVIMISQASSEHSVCFAVPEKEVAVVSAELHDRFREALAAGRLSKVEVINGCSILAAVGLRMASTPGVSAILFDALAKANINVRAIAQGCSEYNITVVLKQQDCVRALRAAHSRFFLSKTTLAVGIIGPGLIGGALLNQLKNQTAVLKENMNIDLRVIGITGSSTMLLSDTGIDLTQWKQLLQKEAEPADIGSFVHHLSDNHVFPNKVLVDCTADTSVASHYYDWLKKGIHVITPNKKANSGPLDQYLKLRTMQRASYTHYFYEATVGAGLPIISTLRGLLETGDKILRIEGIFSGTLSYIFNNFEGTRAFSDVVAEAREAGYTEPDPRDDLSGTDVARKVVVLARESGLRLELSDIPVKSLVPETLASCSSADEFMQKLPSFDEDWARQRSDAEAAGEVLRYVGALDAVNRSGQVELRRYRRDHPFAQLSGSDNIIAFTTSRYKEQPLIVRGPGAGAEVTAGGVFCDILRLASYLGAPS

SEQ ID NO: 635 - DNA, 3141 bp, Glycine max
  CDS (1)..(2817)
atggcgtcgttttccgccgccgtcgctcagttctcccgcgtttcaccttctcacacttcgctccactctcactctcacggcacgctcttccaatctcaatgccgccctttcttcctctcgcgcacttcccattcactccggaagggtcttactttaccacggggaagagaggcaccgagtacatctgtacgtgcttcatttacagatgtttcaccgaatgtgtccttggaggaaaaacaactacccaaaggagaaacttggtctgttcacaaatttggtggaacctgtgtgggaacctctcagagaataaaaaatgttgcggacataattcttaaggatgattcggagaggaaattggtggttgtttctgcaatgtcaaaggtgacagatatgatgtatgaccttatccacaaggctcaatcacgcgatgagtcttatacagctgcattaaatgctgttttggagaagcacagtgcaactgcacatgacatacttgatggagataatcttgctactttcttgtctaaattgcatcatgatattagtaaccttaaggcgatgcttcgtgcaatatacatagctggtcatgcaacagagtcctttacagattttgttgtgggacatggagaattatggtctgctcagatgttgtctctagttattaggaagaatgggactgattgcaaatggatggatacaagggatgtccttatcgtaaatcctactggttctaatcaagttgatcctgactatttggaatctgagcaaagacttgaaaaatggtactctttgaatccatgtaaggtaatcattgccactggattcattgcaagcacacctcaaaacattcctaccacactgaagagagatggaagtgacttctcggcagcaattatgggtgctctatttaaggctcgtcaggtcacaatttggacagatgttgatggtgtgtatagtgcagatcctagaaaagttagtgaggctgtgattttgaagacactgtcttatcaagaggcttgggaaatgtcttattttggtgccaatgtcttgcatccccgcacaattattcctgtgatgcgatatggcatacccattatgataaggaacattttcaacctttctgctcctggaacaaagatctgccatccttctgttaatgatcatgaagatagccagaacctgcaaaattttgtcaaaggatttgcaaccatagacaacttggcacttgtaaacgtcgagggaactggaatggctggtgttccaggtactgccagtgctatttttggtgcagtaaaagatgttggagctaatgttatcatgatatctcaggctagtagtgagcattctgtatgctttgctgtgcccgagaaagaagtaaaagctgttgctgaggcattgcaatctagatttcgtcaagctttggataatgggcgtctttctcaggttgcagtcattccaaattgtagcattctggctgcagttggccagaaaatggcaagcactcctggtgttagtgcctcccttttcaatgcattggctaaggccaatataaatgtccgtgctatagcccaaggttgttctgagtacaatattactgttgttgttaagcgagaggattgtataaaggctttacgagctgtccattccagattttatctctcaagaaccaccatagcaatgggcattattggacctggattaattgggagcacactacttgagcagctaagggatcaggcagctgaagtttctattgtaagcttgcaggacaaggcctcaaccctaaaagaagaattcaacatcgatttgcgtgtaatgggcatacttggttcaaagtcaatgcttcttagtgatgtgggcattgacttagctagatggagagaacttcgagaggaaagaggagaagtggctaatatggaaaaatttgttcaacatgtacatggaaatcattttataccaaacacggcattagtggactgcacagctgactctgtcattgctggctattactatgattggttgcgcaaaggaatacatgtagttactcctaacaagaaggcaaattcaggaccacttgatcagctttttcccatctatgctctctatatccagtatttgaagttaagagctcttcaaaggcaatcctatacacattacttctatgaagcaactgtcggagctggtcttccaattgttagcactttacgtggcctccttgaaactggagacaaaatattacaaatcgaaggcatctttagtgggactttgagttacatatttaataactttaaagatggccgggcttttagtgaggtagtttctgaagcaaaggaagcaggttatactgagccagatccaagagatgatctgtctggaacagatgttgccagaaaggttataattcttgctagggagtcgggtttaaagctagaactgtctaatattccagttgaaagccttgtgccagaaccactacgagcttgtgcatcagctcaggagtttatgcaagagctaccaaaatttgatcaggagttcacaaagaaacaagaagatgctgagaatgctggggaagtcttgagatacgttggagtggtggacgtgactaataaaaaaggagtggtagagctgcgaagatacaagaaggatcatccgtttgcgcaattgtctgggtcagataacattattgcatttacaacacgaaggtataaggatcagcctctgatagttcgtgggccaggagctggtgctcaagtcacagctggtggaatatttagtgatattttacgacttgcctcatatcttggtgctccatcataacgcataattttctgcatgtttggtttcacatccaccgctccgtaacacattatctgaagttgcttttatgtccaaaacgtgaattttgatcgaaacgtatgatgtccatggatatccaaaaacatgcaaatttgtatcatcaatttatttatcttgattttcttcttaggttatttgcaaaaaaaaacgttgtaatgtaagcttgtttctcttatcttttgtctggaagaataataagggaatggaacagaactccatttaccttttttgagttatattgtaaaggaacggaagtaaatagaattattataattttcaacttcc

SEQ ID NO: 636 - protein, 938 aa, Glycine max
MASFSAAVAQFSRVSPSHTSLHSHSHGTLFQSQCRPFFLSRTSHSLRKGLTLPRGREAPSTSVRASFTDVSPNVSLEEKQLPKGETWSVHKFGGTCVGTSQRIKNVADIILKDDSERKLVVVSAMSKVTDMMYDLIHKAQSRDESYTAALNAVLEKHSATAHDILDGDNLATFLSKLHHDISNLKAMLRAIYIAGHATESFTDFVVGHGELWSAQMLSLVIRKNGTDCKWMDTRDVLIVNPTGSNQVDPDYLESEQRLEKWYSLNPCKVIIATGFIASTPQNIPTTLKRDGSDFSAAIMGALFKARQVTIWTDVDGVYSADPRKVSEAVILKTLSYQEAWEMSYFGANVLHPRTIIPVMRYGIPIMIRNIFNLSAPGTKICHPSVNDHEDSQNLQNFVKGFATIDNLALVNVEGTGMAGVPGTASAIFGAVKDVGANVIMISQASSEHSVCFAVPEKEVKAVAEALQSRFRQALDNGRLSQVAVIPNCSILAAVGQKMASTPGVSASLFNALAKANINVRAIAQGCSEYNITVVVKREDCIKALRAVHSRFYLSRTTIAMGIIGPGLIGSTLLEQLRDQAAEVSIVSLQDKASTLKEEFNIDLRVMGILGSKSMLLSDVGIDLARWRELREERGEVANMEKFVQHVHGNHFIPNTALVDCTADSVIAGYYYDWLRKGIHVVTPNKKANSGPLDQLFPIYALYIQYLKLRALQRQSYTHYFYEATVGAGLPIVSTLRGLLETGDKILQIEGIFSGTLSYIFNNFKDGRAFSEVVSEAKEAGYTEPDPRDDLSGTDVARKVIILARESGLKLELSNIPVESLVPEPLRACASAQEFMQELPKFDQEFTKKQEDAENAGEVLRYVGVVDVTNKKGVVELRRYKKDHPFAQLSGSDNIIAFTTRRYKDQPLIVRGPGAGAQVTAGGIFSDILRLASYLGAPS

SEQ ID NO: 637 - DNA, 2565 bp, Physcomitrella patens subsp. patens
  CDS (1)..(2565)
atgtcatacggtgttgatttgccgtcaacagagaaaagcacggaacaggttttacctcgtggggcgtcatggactgttcataaattcggtggcacttgtgtcggcaatgccgagcgcattcaaaacgtggcaaagatcattgttgaggattcttcagtacgcaaggttgcagttgtgtcagccatgtccaaggttaccgacatgatgtatgatctgcttcagaaagcccaggctcgtgatgattcttacagtgccactctagatacactttataagaaccataaggaaaccgccattactcttcttgaggatgggcaggatctcaataagtttcttggtgtcttggaagcagacattaataacctgcgggctatgcttcgggctatttttattgctggtcacgctacagaacctttcgaggattgggtggtcggccacggagagttgtggtctgcacagttgcttgctgcaacagttcgaaagatgggcctgccgtgtgtctggatggatgctagagatgtgatagtggtcacgcctacgggaaagcagcaagtggaccctgacttcgaagcctcggaagagaaacttgacaagtggtactcacgatttccatctgatacagtcatcgttactggatttatcgctagcactccggacaacattcctacaacgttgaaacgagatggcagtgacttatcagcagcgataatgggggcactcttgaaggcctctaaagtcactatctggactgatgtggatggcgtctatagtgctgacccaaggaaagttagcgaagcagtgatccttaaatccttgtcttatcaagaggcctgggagatgtcatactttggagctaacgtgcttcacccgcggacaacaatacctgtaatgaagcacaatattcctgtgacgattcgcaacgtttttaatgttgctgctccagggactgaaattcgaggggtttcagaatcgaaacctcttgaatctatcgctacaatggacttcgtcaagggatttacaactgtggacaatattgctctggtgaacgtggagggaacaggcatggcgggagttccaggaacagcaagtgacatttttgacactgtgaaaggtgtgggggcgaatgtggtcatgatctcgcaggctagtagtgaacactcggtgtgctttgcggtccctgaaaaagaagtggatactgttcgtctagcattgttgacgaggttccgcagagaccttgacgccggacgcatatcaaaggtggaggtggtaaaaaactgttgtatactcgcggcagtcgggcagcgaatggctagcactcctggagttagtgcaactctttttactgcacttgctaaagcaaacatcaatgtaagggcaatcgctcaaggatgctccgagtacaacattacagtggtagtggatcagaacgattctatcagggctctcaaggctgtccattcaagattttatctttcaaggactcctttagctgttgggcttgttggccctggtctcatcggaaagacccttcttgaccaattcaaggatcaggctgcgtctttgaaggaggaatttcacattgacctgcgtgtgatgggtatcacagactcaaataccatgtacttagatgacactggtatcgatttggcaaactggagggagttgattgaaaccaagggagttccagcggacatgtccaaattcacagcacatctgcaaagtcactccttgccgaatactgtcatcatagactgcactgctagtgcgaaagttgctgaaaactattatcaatggatggagaaaggcatgcacattataaccccaaataaaaaagccaattcgggtccatatgatcagtatgctaaattgaaggagctccaacgccaatcatacacacattatttctacgaagctactgttggagcggggctcccaattgtcagcactctacgtggactcgtggaaactggcgacaagattgtgaaagtggagggcattttcagcggaacattgagctacatattcaatagcttcaacggaacgaaaacgtttagtgaaatcgtgaaagaggcaaaagcttcgggttacacggaacctgatcctagggatgatctctctggcatggacgttgcccgcaaggtcattatcctggcgcgggagtgtggcttgcagttggaattgggtgatattgaaatagacaagctgcttccagaatccctttcggcaatagattctgttgaagagttcttggagaaacttccaagctttgacgcagatatcgaagctcggaggaaagaggccgatgcggcaggggaggtcttgcgatttataggcatagtggacgtaacagccaacaagggagcagtaaagttggttaggcgctcaaagtctgatccatttgctcaactctctggaactgataacattattgcctttacatcggcgagatattccaagcttcaacgcctcattgtgcgaggtccaggagctggtgctgaagtcactgcggctggcgtgttcagcgatttgttgcgcctcgcttcttacttgggcgccccttcatag

SEQ ID NO: 638 - protein, 854 aa, Physcomitrella patens subsp. patens
MSYGVDLPSTEKSTEQVLPRGASWTVHKFGGTCVGNAERIQNVAKIIVEDSSVRKVAVVSAMSKVTDMMYDLLQKAQARDDSYSATLDTLYKNHKETAITLLEDGQDLNKFLGVLEADINNLRAMLRAIFIAGHATEPFEDWVVGHGELWSAQLLAATVRKMGLPCVWMDARDVIVVTPTGKQQVDPDFEASEEKLDKWYSRFPSDTVIVTGFIASTPDNIPTTLKRDGSDLSAAIMGALLKASKVTIWTDVDGVYSADPRKVSEAVILKSLSYQEAWEMSYFGANVLHPRTTIPVMKHNIPVTIRNVFNVAAPGTEIRGVSESKPLESIATMDFVKGFTTVDNIALVNVEGTGMAGVPGTASDIFDTVKGVGANVVMISQASSEHSVCFAVPEKEVDTVRLALLTRFRRDLDAGRISKVEVVKNCCILAAVGQRMASTPGVSATLFTALAKANINVRAIAQGCSEYNITVVVDQNDSIRALKAVHSRFYLSRTPLAVGLVGPGLIGKTLLDQFKDQAASLKEEFHIDLRVMGITDSNTMYLDDTGIDLANWRELIETKGVPADMSKFTAHLQSHSLPNTVIIDCTASAKVAENYYQWMEKGMHIITPNKKANSGPYDQYAKLKELQRQSYTHYFYEATVGAGLPIVSTLRGLVETGDKIVKVEGIFSGTLSYIFNSFNGTKTFSEIVKEAKASGYTEPDPRDDLSGMDVARKVIILARECGLQLELGDIEIDKLLPESLSAIDSVEEFLEKLPSFDADIEARRKEADAAGEVLRFIGIVDVTANKGAVKLVRRSKSDPFAQLSGTDNIIAFTSARYSKLQRLIVRGPGAGAEVTAAGVFSDLLRLASYLGAPS

SEQ ID NO: 639 - DNA, 2562 bp, Physcomitrella patens subsp. patens
  CDS (1)..(2562)
atgtttccaggtgttgatttactcacagtaggtcaaaaacaggaacaggttttaccccgtgggccctcatgggctgttcacaaatttggtgggacttgtgttggcaacgttgagcgcatacaaaatgtggcaaaaataattattgacgatccttcagaacgcaaggttgcagtcgtgtcggccatgtccaaggtgaccgacatgatgtatgatctgatccgtaaagctcaggcgcgtgatgattcttacaattctgatttggatgtggttcatgcgacgcacaaggaaactgccgtggctcttcttgaggatggacatgatctcaccaagttccttggtattttggaatcagacattaacaaccttcgagcaatgcttcgagctatttatattgctggtcttgccaccgagacttttgaagattgggttgtcggacacggagagttgtggtctgcacagttgcttgctgccactgtccgaaagggaggcctgccatgtgtttggatggatgctagggacgtgatagtggtcacgcctactggaaagttgcaagtcgaccctgtttatgaggcttctgcagagaaacttgacaagtggtattcacgatacccgtctgacactgttatcgtgactgggttcattgccagtaccacggacgacattccaactacattaaaacgagatggcagtgatttgtcagcagcgatcatgggttcactctttcaagcttcaagggtgaccatttggacagatgtggatggcgtttttagtgctgatccaaggaaagttagcgaagcagtgatcctcaaatctttgtcttatcaagaggcttgggagatgtcatactttggagctaacgtgcttcatccccggacaacaatacctgtaatgaagtccaacattcctgtaaccatacgcaatattttcaacgtttcggctatagggaccgaaatccgagggttctcagattctgaaactcttcaatatgcagcaaaggattttgtcaagggatttacaactgtcgacaatatcgctcttgtgaacgtggagggaacaggcatggcaggagttcctggaacagcaagtgatattttcgacgctgtgaaaggtgtgggtgcgaacgtggtcatgatctcccaggccagtagtgaacactcggtgtgctttgcggtacccatgaaagaggtggatactgttagtcgagcattggagaccaagtttagaagggatcttgattctggacgcctatcaaaggtggaagtggtaaaaaactgttgtctacttgcagcagttgggcaacgaatggccagcactcccggtgttagtgcgactctctttactgcgcttgccaaggccaacatcaatgtgagagcaattgcacaaggatgctcagaatacaatatcacagtggtggtggatcaggctgactccatcaaggctctcaaggcggtgcattcaaggttttatctttcaaaaattcctatagctgttgggctcgttggtcctggtcttatcggaaagactcttcttgaccaatttagagatcaggcggcgtcattaaaggaggattttcacattgatttgcgtgtaatgggtattattgactcgaacaccatgtacttatgtgatacaggtgtcgacttggcgaactggagggagttgattgaaacccaaggatgtccagcagacatgtccaaattcacagcgcatatgcagaatcactccctaccaaacactgtgatcatagactgcactgcaagtgtcaaagtcgccgagaagtattatgactggatgcagaaacgcatgcacattattactccaaataaaaaagccaattcaggtccgtatgaacagtacgctaatttgaaggagcttcaacgtcaatcatacacgcattatttctatgaagccactgttggagcagggctgccaattgtcagcactcttcgaggacttctggaaactggtgacaagattgtgaaggtggagggtattttcagtggcacattgagctacatattcaacagctttgacggaacgaaatgtttcagtcagattgttaaagaggcaaaagctgctggctacacggaacctgatcctagggatgatctctctggcatggatgttgcccgtaaggtcattatcctagctcgggaatgtggattgcagttgcagctggatgatataaaaatcgacaaactgcttccagaatctctttcggcgcttgattccgtagacgagttcttggagaaacttccaagttttgacgcagagattgaagctcaaagaaaggatgccgattcatcgggaatggtcttgcgttttgtagggatagtagatgtgaaagctaaccagggagccgtaaaactggtgagactcccgaaatcggatccgtttgcccaactttctggaactgacaacatcatcgccttcacctccaaaaggtattccaaggatcaacgtctcatagtgaggggtccaggagctggtgctgaagtcactgccgctggtgtgttcagtgatttgttgcggcttgcttcttatttgggtgctccttcatag

SEQ ID NO: 640 - protein, 853 aa, Physcomitrella patens subsp. patens
MFPGVDLLTVGQKQEQVLPRGPSWAVHKFGGTCVGNVERIQNVAKIIIDDPSERKVAVVSAMSKVTDMMYDLIRKAQARDDSYNSDLDVVHATHKETAVALLEDGHDLTKFLGILESDINNLRAMLRAIYIAGLATETFEDWVVGHGELWSAQLLAATVRKGGLPCVWMDARDVIVVTPTGKLQVDPVYEASAEKLDKWYSRYPSDTVIVTGFIASTTDDIPTTLKRDGSDLSAAIMGSLFQASRVTIWTDVDGVFSADPRKVSEAVILKSLSYQEAWEMSYFGANVLHPRTTIPVMKSNIPVTIRNIFNVSAIGTEIRGFSDSETLQYAAKDFVKGFTTVDNIALVNVEGTGMAGVPGTASDIFDAVKGVGANVVMISQASSEHSVCFAVPMKEVDTVSRALETKFRRDLDSGRLSKVEVVKNCCLLAAVGQRMASTPGVSATLFTALAKANINVRAIAQGCSEYNITVVVDQADSIKALKAVHSRFYLSKIPIAVGLVGPGLIGKTLLDQFRDQAASLKEDFHIDLRVMGIIDSNTMYLCDTGVDLANWRELIETQGCPADMSKFTAHMQNHSLPNTVIIDCTASVKVAEKYYDWMQKRMHIITPNKKANSGPYEQYANLKELQRQSYTHYFYEATVGAGLPIVSTLRGLLETGDKIVKVEGIFSGTLSYIFNSFDGTKCFSQIVKEAKAAGYTEPDPRDDLSGMDVARKVIILARECGLQLQLDDIKIDKLLPESLSALDSVDEFLEKLPSFDAEIEAQRKDADSSGMVLRFVGIVDVKANQGAVKLVRLPKSDPFAQLSGTDNIIAFTSKRYSKDQRLIVRGPGAGAEVTAAGVFSDLLRLASYLGAPS

SEQ ID NO: 641 - DNA, 2478 bp, Vibrio cholerae O1 biovar eltor str. N16961
  CDS (1)..(2478): transl_table=11
atgcatttggaggaagggatgcgagtattaaagtttggaggttcatcgctggcggatccggagcgttttctacgcgctgccgatatcatcgcgaataacgcacagcaggaagaggtggccgttgtcctctctgctccgggaaaaaccaccaataaattggtggcagtgattgaaagtgctttacgtcagggagaggtggaagcgcaaatcgtagagctagagagctcattctatgccttgcttgatggcattaaagcgcagctcccgaatttggatgacagtgcttatcaacagcaagtgcactcttccatgactcagttacgccagtttgtgcatggcattacgttgctcggtatgtgtccagacaatgtgaatgcacgcattatcagtaaaggtgaacgcgtttccattcaattgatgaaagcggtgatggaagccaaaggtctgccagcgaatttggttgaccccgttaaatacctgcttgccaaaggggatcatcttgaagctatggtcgatgtggaaatctcgactcagcgtttcagacaagcaccattgccacaacagcacgtcaatatcatgccgggctttactgcgggtaatgcacagggtgagttggtctgtttagggcgtaacggttcggattactcagccgcagtactggctgcctgtttacgtgcggattgttgtgaaatctggacggatgtggatggagtttataactgcgatccgcgtttggtcgatgatgcgcgtcttttgaaatcccttagctatcaagaggcgatggagctttcttacttcggagcatctgtgttgcatccgaagaccattgcaccgattgctcaatttcaaatcccttgcctgatcaaaaacagcttcaatccacaaggtgcgggcaccttgattggccaagacactggcgaagataaactcgcgatcaaaggcattaccactctgagcaatctgaccatggtcaacgtttctggtccaggaatgaaaggcatggtggggatggcgagccgcgtgtttggcgcgatgtcagcggcagatgtgtcgatcgtgctcattactcaatcttcttcggaatacagcatcagtttctgtatcgaagcacaacataaagctttggcacagcaagcgctggcggatgcatttgaactggaactcaaagatggcctgcttgagccggttgagtttgtcgataacgtcgccatcatcacgctggttggtgatggtatgcgtacctctcgcggtgtcgcgtcgcaatttttctcatctctggccgaagtacacgtcaacgtgattgcgattgcccaaggctcttctgagcgtgcgatttcagcggtgatccccgatgataagatttcagaagcgatcaaggcctgtcacgaaaacctcttcaactctaaacactttttagatgtgtttgtggtcggtgttggtggcgtgggcggtgagttggtggatcaaattcagcgtcaacaagccaagcttgcggaaaaaggcatcatgatgcgcgtttgtggcctcgctaacagtaaaggcatgctgcttgatagccaaggcttgccgttagagcagtggcgcgatcgtatgatcaatgcggatcaagcgttcagtttagagaatctggtggctttggtgcagcgtaatcacatcattaacccagtattggtggattgcacgtccagtgatgagattgctaaccagtatgcggatttcctcgccgcgggtttccatgtggtgaccccgaacaagaaagccaataccgctagcatgagttattaccatcagctacgtaatgtggctcgtcattcgcgtcgcaaactgatgtatgaaactacagttggcgcgggtctacccgttatcgaaaacttgcaaaacctaattgcagcaggggatgagctggaaaaattcagcggtattctctcaggttctctctcctttatcttcggtaaattggatgaaggcatgaccttgagccaagcaacgcagcttgctaaagagaaaggctttacagagccagatccgcgcgatgatctctctggtatggatgtggcgcgcaagttactgattttggcgcgtgaagcagggtacgaattggagctgagcgatgtggatgttgaacaagcactgcccgctggctttgatgcttcaggcagtgttgaggagttcatggctcgtttagcgcaagccgatgccgcgtttgccgagcgagtggcgcaagccaaagccgaaggcaaagtgcttcgctatgtggcgcaaatcgtcgatggccagtgccaagtgcggattgtcgcggttgatgaaaacgatcctatgttcaaagtcaaagaaggtgaaaacgcgctggctttctacagccgttactatcagccaatcccattggtattacgtggttacggcgcgggttctgaagtgactgctgcaggcgtgttctcagatgtgatgcgtacactcggttggaaattaggggtttaa

SEQ ID NO: 642 - protein, 825 aa, Vibrio cholerae O1 biovar eltor str. N16961
MHLEEGMRVLKFGGSSLADPERFLRAADIIANNAQQEEVAVVLSAPGKTTNKLVAVIESALRQGEVEAQIVELESSFYALLDGIKAQLPNLDDSAYQQQVHSSMTQLRQFVHGITLLGMCPDNVNARIISKGERVSIQLMKAVMEAKGLPANLVDPVKYLLAKGDHLEAMVDVEISTQRFRQAPLPQQHVNIMPGFTAGNAQGELVCLGRNGSDYSAAVLAACLRADCCEIWTDVDGVYNCDPRLVDDARLLKSLSYQEAMELSYFGASVLHPKTIAPIAQFQIPCLIKNSFNPQGAGTLIGQDTGEDKLAIKGITTLSNLTMVNVSGPGMKGMVGMASRVFGAMSAADVSIVLITQSSSEYSISFCIEAQHKALAQQALADAFELELKDGLLEPVEFVDNVAIITLVGDGMRTSRGVASQFFSSLAEVHVNVIAIAQGSSERAISAVIPDDKISEAIKACHENLFNSKHFLDVFVVGVGGVGGELVDQIQRQQAKLAEKGIMMRVCGLANSKGMLLDSQGLPLEQWRDRMINADQAFSLENLVALVQRNHIINPVLVDCTSSDEIANQYADFLAAGFHVVTPNKKANTASMSYYHQLRNVARHSRRKLMYETTVGAGLPVIENLQNLIAAGDELEKFSGILSGSLSFIFGKLDEGMTLSQATQLAKEKGFTEPDPRDDLSGMDVARKLLILAREAGYELELSDVDVEQALPAGFDASGSVEEFMARLAQADAAFAERVAQAKAEGKVLRYVAQIVDGQCQVRIVAVDENDPMFKVKEGENALAFYSRYYQPIPLVLRGYGAGSEVTAAGVFSDVMRTLGWKLGV

SEQ ID NO: 643 - DNA, 2448 bp, Pasteurella multocida subsp. multocida str. Pm70
  CDS (1)..(2448): transl_table=11
atgcgtgtactaaaattcggggggacgtctttagccaatccagagcgtttttcgcaggcggcacagcttatcgaaaaagcccattttgaagaacaagccgctggcgtgttatcagcccctgcaaaaattaccaaccatcttgtcgccctttctgaaaaagccagtttaaatcaacctaccgatgccaatttcaatgaagctattgagattttttatcacattattcatggtttacacgcagaaaataatcgttttgatctagaagggacaaaagctttaattgataccgagtttgcacaaatcagccagttgttggaagaaattcgtcaacaaggttttgtgtcggatgcggttaaagccacgattgattgtcgtggtgaaaaactgtctattgcgatgatgaaggcatggtttgaagctcgcggttatgacgtgactgtgattgatccagtcgaaaaattattagcacacgggagctatttagagtcttcagtggatattgaagaatcgacaaaacgcgtagatgccaagtcaattccaaccaaaaatgtagtgttaatggcaggctttaccgcaggtaatgaaaaaggtgagctcgttttactcgggcgtaatggttccgattattctgctgcttgtttagccgcttgtttgggcgcaagtgcttgtgaaatttggaccgatgtagatggggtctttacctgtgatccgcgtttggtaccagatgctcgcttattgccaagcttgtcttatcgcgaagcgatggaattgtcttatttcggtgcaaaagtgattcatccacgcacgattggaccattagtacaaactaatattccttgcttaattaaaaatacgggcaatccttctgcaccgggttcgattattgatggcaacattcaatctgaacagttgcaagtaaaagggattactaatttagataatgtggcgatgtttaacgtgtctggtcctgggatgcaggggatggtgggcatggcgtcacgtgttttctctgccatgtcaaatgcaggcgtttcggtgattttaattacgcaatcttcctcggaatacagtatcagtttctgtgtaccagccaaatcagttgaggtagcaaaacaggcgttagagaaagaatttgagcaagaattaaaagctaatgatcttgaaccaattgatgtaattcgtgacttatccattatttcggtagtgggtgatggcatgaaacaagccaaagggattgccgcacgtttcttctcagcccttgcccaagcgaacatcagtattgttgctattgcacagggttcctctgagcgttcaatttctgccgtggttgcactgaataaagcaattgaagccgtgaaagccacacaccaagctctctttaataataaaaaggtcgttgatgtttttttagttggggtagggggtgtcggtggcgagttgattgagcaaattaaacatcagaaaagttatctagccaagaaagatattgaaattcgggtgtgtgcgattgccaattcaaacaaaatgttattaaaagcagatggcttaaatttagaaaattggcaagcagatttggaaaccgcgactcaaccttctgattttgatgtgttactgtcctttattaaattgcaccatgtcgtgaatccggtatttgtggattgtacgtcagcggattctgtagctggtttatatgtgcgtgcactgggagaagggttccatgttgtgacaccaaataaaaaagccaatacgcgtgaactggcgtattataatgcactgcgtgaaagtgcccgtaataaccaacgtaaattcttgtatgatacaaacgttggcgcagggttacccgtcattgaaaacttgcagaatttattggctgcgggtgatgaagtcgtcaagtttagtggcgtactctcggggtcgttgtcctttatctttggcgagttagaaaacggactcacgttatctgaagcgactgctcttgcgcgtgaaaaagggtttactgaacctgatccaagagatgatctttctggacaagatgttgccaggaaactgttgattttagcgcgtgaaaccggtgcacaattggaattaacagatattgaggtagaaagtgtgctcccagcgggatttgctgaagggaagaccacacaggaatttatggcgatgttaccacaattagacgcagaatttagccaacgtgttgctaacgcgaaagcagaagggaaagtattgcgttatgtgggacaaattgaaaacaacagttgtaaagtctctgtgttggaagtcgatgcagatgatccattatataaagtaaaaaatggtgaaaatgcgttagccttctatactcgttattatcaaccgattccgttacttttacgtggttatggcgcgggaaattccgtaactgcagcggggatttttgccgatatattgagaacgctacaacattaa

SEQ ID NO: 644 - protein, 815 aa, Pasteurella multocida subsp. multocida str. Pm70
MRVLKFGGTSLANPERFSQAAQLIEKAHFEEQAAGVLSAPAKITNHLVALSEKASLNQPTDANFNEAIEIFYHIIHGLHAENNRFDLEGTKALIDTEFAQISQLLEEIRQQGFVSDAVKATIDCRGEKLSIAMMKAWFEARGYDVTVIDPVEKLLAHGSYLESSVDIEESTKRVDAKSIPTKNVVLMAGFTAGNEKGELVLLGRNGSDYSAACLAACLGASACEIWTDVDGVFTCDPRLVPDARLLPSLSYREAMELSYFGAKVIHPRTIGPLVQTNIPCLIKNTGNPSAPGSIIDGNIQSEQLQVKGITNLDNVAMFNVSGPGMQGMVGMASRVFSAMSNAGVSVILITQSSSEYSISFCVPAKSVEVAKQALEKEFEQELKANDLEPIDVIRDLSIISVVGDGMKQAKGIAARFFSALAQANISIVAIAQGSSERSISAVVALNKAIEAVKATHQALFNNKKVVDVFLVGVGGVGGELIEQIKHQKSYLAKKDIEIRVCAIANSNKMLLKADGLNLENWQADLETATQPSDFDVLLSFIKLHHVVNPVFVDCTSADSVAGLYVRALGEGFHVVTPNKKANTRELAYYNALRESARNNQRKFLYDTNVGAGLPVIENLQNLLAAGDEVVKFSGVLSGSLSFIFGELENGLTLSEATALAREKGFTEPDPRDDLSGQDVARKLLILARETGAQLELTDIEVESVLPAGFAEGKTTQEFMAMLPQLDAEFSQRVANAKAEGKVLRYVGQIENNSCKVSVLEVDADDPLYKVKNGENALAFYTRYYQPIPLLLRGYGAGNSVTAAGIFADILRTLQH

SEQ ID NO: 645 - DNA, 2487 bp, Xylella fastidiosa 9a5c
  CDS (1)..(2487): transl_table=11
ttgtccaccgttgaaactcctgtttacgtcccgcctactgtcgttcacaaattcggggggacttcggttgccgatgcggattgctatcgccatgtggcgcgtctcctattagcacgtgaagagactgtgcaggtcaccatcgtttctgcgatgaaaggggtgacggatacgttgatcgcactggccgaacaggcagccaatcattctcccgactggcaggcgttgtggcagcaaacccgcacgcgtcattgcgacgccgctcaggccttgcttggagagcatgccggtacgctgcaaaactggttgaacacccgttttaatgaactgcatgaaatgctggttgccttgtccgtcatcaggatgctgccatctgaagtgctggaccgcttacaaggcttgggcgaggtgtactccgcacagttgcttgggcagtatttgcaagcccagggtgaggattgtgtcgttttggatgcccgccaagtgcttgtcgtgagtcctggtgagtttggtgccgaagtcgattgggcaacgagtgcacagcacttggcccattggcgtatgcagcatccacagcggcgtgtggtggtcaccggtttcgttgcctctgatcgtactggacgcgccatcaccctgggtcgcaacggcagtgattattccggtgccatcttcgcggcgttgtttgaggccgatgagcttcacatctggacggatgtggatggagtcatgtccgcagacccccgggtcgtcccggatgcggtgcaactggatgccttgagttacgacgaagcatgtgaattggcctatttcggcgccaaggtagtgcatccacaaaccatgtcgccggtgatgaaacgcggcgtgccgatcatcattcgaaacaccttccagcccggacatccggggactcggatcaccgctgatagcgtggtgagtgggtctgtcaaaggcctgaccctgagtccaggactggccgtgctgaacctggaaggcacgggtctgatcggtgtccctggtaccgctgaacgcgtgtttgccgccctgcgcaatgcgcgtttgtctgtcgtgatgatctcacagggatcttcggagcattccatttgctgcgtcgtgcaccaaaccgaggccgagcgtgcacgtgatgcgttgttgtatgccttcgcccatgaattggcgatagggcatgtccagcgcgtgcaactgaccaacaatatcagcgtattggcggcggttggcgacggcatggctggtcacctgggtgtagcggcgcgcttgtttgaatccttaaggcgcgcccatgtcaacatcctggccattgcccaggggtcttcagagcgcaatatttcggtggcaatcgacagtcagcaggcgacgaaggccctacgcgctgcacacgctgctttctggttatcaccccagacattttcgattggtgtgattggtccgggtcacgtgggtgaggccctattggaccagctatgtgctgcacagcagcaattactgtccaaggcaaatctggatctgcgtttgcgggcgatcgtttcacggcggcgtatgttattggatgagcgtggcctggggagtgactggcgccacgccttcgccgccgtaccagaggcggtcgatctggatgcctttaccgcacacttacaggccgcccatctgcctcatgcagtgatcattgactgtagcggcagtgctgaggtggctgatcgctatgccgactggctggcagccggtatccatgtcgtgaccccgaataaacaggctggctccggccccttgcatcgctaccacgcgattcgtgcagcagcagatgccagcggcgcacgctttcgctatgaagccacagtgggcgcaggcttgccggtgattacgacattgcgtgacttgatggataccggtgatagcgtcacctcgatcgaagggatcttttccggaaccctggcgtggctgttcaataaatatgatggtagcgtccccttctcccaattgatcacccaggcgcgagcgatgggatataccgagccggatccgcgcgatgacctgtctggggttgacgtggcgcgtaagctggtgattctggcgcgcgatgcggggcgtgatatcagcctagaggatgttgcggtagaaagcctggtgccggagacattgtgtcaactcagcgttgccgatttcatggcacgactcaatgaagttgatgccacctttgcagagcgtttggctgcggccaaacagcgcggttgcgtattgcgttacgtcgcacaactgtcccctggacacgtccctagtgtcagcttgattgaattgccttctgaccatgccttcgtcaatcttcgtttgaccgataacgtagtgcaatttacaacccgccgttattccgaaaaccccttggtcgtccaggggccgggcgccggtccagaggtcaccgcagccggtgtttttgcggatttgctgcgagttgcagcgggtgagggcgcacgcttgtga

SEQ ID NO: 646 - protein, 828 aa, Xylella fastidiosa 9a5c
MSTVETPVYVPPTVVHKFGGTSVADADCYRHVARLLLAREETVQVTIVSAMKGVTDTLIALAEQAANHSPDWQALWQQTRTRHCDAAQALLGEHAGTLQNWLNTRFNELHEMLVALSVIRMLPSEVLDRLQGLGEVYSAQLLGQYLQAQGEDCVVLDARQVLVVSPGEFGAEVDWATSAQHLAHWRMQHPQRRVVVTGFVASDRTGRAITLGRNGSDYSGAIFAALFEADELHIWTDVDGVMSADPRVVPDAVQLDALSYDEACELAYFGAKVVHPQTMSPVMKRGVPIIIRNTFQPGHPGTRITADSVVSGSVKGLTLSPGLAVLNLEGTGLIGVPGTAERVFAALRNARLSVVMISQGSSEHSICCVVHQTEAERARDALLYAFAHELAIGHVQRVQLTNNISVLAAVGDGMAGHLGVAARLFESLRRAHVNILAIAQGSSERNISVAIDSQQATKALRAAHAAFWLSPQTFSIGVIGPGHVGEALLDQLCAAQQQLLSKANLDLRLRAIVSRRRMLLDERGLGSDWRHAFAAVPEAVDLDAFTAHLQAAHLPHAVIIDCSGSAEVADRYADWLAAGIHVVTPNKQAGSGPLHRYHAIRAAADASGARFRYEATVGAGLPVITTLRDLMDTGDSVTSIEGIFSGTLAWLFNKYDGSVPFSQLITQARAMGYTEPDPRDDLSGVDVARKLVILARDAGRDISLEDVAVESLVPETLCQLSVADFMARLNEVDATFAERLAAAKQRGCVLRYVAQLSPGHVPSVSLIELPSDHAFVNLRLTDNVVQFTTRRYSENPLVVQGPGAGPEVTAAGVFADLLRVAAGEGARL

SEQ ID NO: 647 - DNA, 2460 bp, Yersinia pestis CO92
  CDS (1)..(2460): transl_table=11
atgcgagtgctgaaatttggcgggacatcagtggcaaatgccgagcgctttatgcgtgttgccgatatcatcgaaagtaatgcgcgtcagggacaagtggctacggtgttatccgctcccgcgaagataacgaaccatctcgttgccatgatcgataaaatggtcgcagggcaagatatctccccgaacatcagcgatgctgagcggatttttgctgagttattgcgtggattagctgatactcagccaggctttgattatgatcgcctaaaagccttggtcggccatgagtttgcgcaactcaaacacctgctacacggtatttcgttgttggggcagtgcccagacagcattaatgcctcaattatctgccgtggcgaaaaactctccatcgccattatggaggcgttatttcaggctaagggttatcacgttacggtgattaatccagtcgaaaaattgttggcgcagggccattatctcgaatccactgttgatatcacggagtctacccgccgtatcggtgccagcggtattccatctgatcacatcatcctgatggctggttttactgcgggtaatgataaaggtgaattggtggtgttggggcgtaatggctctgattattccgctgccgtgctggctgcttgcttacgggcagattgttgtgagatttggaccgatgtcgacggggtctatacttgtgacccgcgtaccgttccagatgccagattactgaaatcgatgtcataccaagaggcaatggagctttcctattttggtgctaaagttcttcaccctcgcactatcgctcctattgcccgcttccaaattccttgtctgataaaaaacacctctaacccgcaagcccccggtaccttgattggtggtgaaagcattgatgaggattctccggtcaaaggcattaccaacctgaataatatggcgatgattaatgtttcagggccaggaatgaaagggatggtcggtatggctgcccgcgtctttgcggtgatgtcgcgcagcggtatttcagtggtgctaatcactcagtcctcttctgaatacagcatcagtttttgtgtgccgcaaggtgagttattgcgcgcccgccgagcgctggaagatgagttttatctggagttgaaagacggtgtcttggatcctctggatgtgatggaacatctggcaattatctctgtggtcggtgacggtatgcgcaccctgcgcggtatttctgcccgtttcttctcggctctggcgcgcgccaacatcaatattattgctatcgctcaaggctcgtctgagcgctctatttctgtggttgtcaataatgatgcggtcactaccggggtgcgagtttgccaccagatgctgtttaacacggatcaagtcattgaggtgtttgtcattggcgtgggtggtgtggggggcgcattaatcgaacaaatctatcgccagcaaccgtggttgaaacagcgtcatattgatttacgtgtttgtggtatcgcgaattccaaagccatgttgaccaacgtgcatggcattgcattagataactggcgtcaggaactggctgaagttcaggagccgtttaacctgagccgcttgatccgtctggttaaagagtatcacttactgaacccggtcattgttgactgtacctcaagccaggcggttgctgatcaatatgctgatttcctgaccgatggcttccatgtggtgacgccaaacaagaaagccaacacttcatcaatgaattattaccgccaaatgcgtgccgctgcgacgaaatcgtgccgtaaattcttgtatgacacaaacgttggggcggggctaccggtgatcgagaacttacagaacctgctcaatgcgggtgatgaactgatgcgcttcaccggtattctgtccggttcactttccttcatcttcggtaagctagatgaggggatgtcattgtcagaggcaacacggcaagctaaggcgttggggtataccgaacccgatccacgtgatgatctctctgggatggatgttgcccgtaaattgttgattttggcccgtgaagcagggtacaaacttgagttggctgatatcgaggttgagtccgtcttaccagcaagctttgatgcttcaggtgatgtggatactttcctggcgcgcctgccatcattggatgctgaatttacccgcttggtagcgaatgctgcggagcagggcaaagtgctacgttatgtcggagtgattgaagacgggcgttgtaaagtgcggatggaggcagttgacggtaacgacccgttgtataaagttaagaatggcgagaatgcgttggctttctatacccgctattatcagccaattccgttggtgctacgcggttatggcgcaggcaatgatgtgactgccgctggggtgtttgccgatcttttacgcacattatcatggaagttgggagtttaa

SEQ ID NO: 648 - protein, 819 aa, Yersinia pestis CO92
MRVLKFGGTSVANAERFMRVADIIESNARQGQVATVLSAPAKITNHLVAMIDKMVAGQDISPNISDAERIFAELLRGLADTQPGFDYDRLKALVGHEFAQLKHLLHGISLLGQCPDSINASIICRGEKLSIAIMEALFQAKGYHVTVINPVEKLLAQGHYLESTVDITESTRRIGASGIPSDHIILMAGFTAGNDKGELVVLGRNGSDYSAAVLAACLRADCCEIWTDVDGVYTCDPRTVPDARLLKSMSYQEAMELSYFGAKVLHPRTIAPIARFQIPCLIKNTSNPQAPGTLIGGESIDEDSPVKGITNLNNMAMINVSGPGMKGMVGMAARVFAVMSRSGISVVLITQSSSEYSISFCVPQGELLRARRALEDEFYLELKDGVLDPLDVMEHLAIISVVGDGMRTLRGISARFFSALARANINIIAIAQGSSERSISVVVNNDAVTTGVRVCHQMLFNTDQVIEVFVIGVGGVGGALIEQIYRQQPWLKQRHIDLRVCGIANSKAMLTNVHGIALDNWRQELAEVQEPFNLSRLIRLVKEYHLLNPVIVDCTSSQAVADQYADFLTDGFHVVTPNKKANTSSMNYYRQMRAAATKSCRKFLYDTNVGAGLPVIENLQNLLNAGDELMRFTGILSGSLSFIFGKLDEGMSLSEATRQAKALGYTEPDPRDDLSGMDVARKLLILAREAGYKLELADIEVESVLPASFDASGDVDTFLARLPSLDAEFTRLVANAAEQGKVLRYVGVIEDGRCKVRMEAVDGNDPLYKVKNGENALAFYTRYYQPIPLVLRGYGAGNDVTAAGVFADLLRTLSWKLGV

SEQ ID NO: 649 - DNA, 2463 bp, Salmonella enterica subsp. enterica serovar Typhi str. CT18
  CDS (1)..(2463): transl_table=11
atgcgagtgttgaagttcggcggtacatcagtggcaaatgcagaacgttttctgcgtgttgccgatattctggaaagcaattccaggcaagggcaggtagcgaccgtactttccgcccccgcgaaaattaccaaccatctggtggcgatgattgaaaaaactatcggcggccaggatgctttgccgaatatcagcgatgccgaacgtattttttctgacctgctcgcaggacttgccagcgcgcagccgggattcccgcttgcacggttgaaaatggttgtcgaacaagaattcgctcagatcaaacatgttttgcatggtatcagcctgctgggtcagtgcccggatagcatcaacgccgcgctgatttgccgtggcgaaaaaatgtcgatcgcgattatggcgggactcctggaggcgcgtggacatcgcgtcacggtgatcgatccggtagaaaaactgctggcggtgggccattaccttgaatctaccgtcgatatcgcggaatcgactcgccgtatcgccgccagccagatcccggccgatcacatgatcctgatggcgggctttactgccggtaatgaaaagggtgaactggtggtgctgggccgtaatggttccgactattccgccgccgtgctggccgcctgtttacgcgctgactgctgtgaaatctggactgacgtcgatggcgtgtatacctgtgacccgcgccaggtgccggacgccaggctgttgaaatcgatgtcctaccaggaagcgatggagctctcttacttcggcgctaaagtccttcaccctcgcaccataacgcctatcgcccagttccagatcccctgtctgattaaaaataccggcaatccgcaggcgccaggaacgctgatcggcgcgtccagcgacgatgataatctgccggttaaagggatctctaaccttaacaacatggcgatgtttagcgtctccggcccgggaatgaaagggatgattgggatggcggcgcgtgttttcgccgccatgtctcgcgccgggatctcggtggtgctcattacccagtcctcctctgagtacagcatcagcttctgtgtgccgcagagtgactgcgcgcgtgcccgccgtgcgatgcaggatgagttctatctggagctgaaagaggggctgctggagccgctggcggttacggagcggttggcgattatctctgttgtcggcgacggtatgcgcacgctacgcggcatttcagcgaaattcttcgccgcgctggcgcgggctaatatcaatatcgtggcgatcgctcagggatcttctgagcgttccatttctgtggtggtgaataacgacgatgccaccaccggcgtgcgggtaacgcaccagatgctgttcaataccgatcaggtgattgaagtgtttgtcattggcgtcggcggcgtcggcggcgcgctactggaacagcttaaacgtcagcaaacctggctgaagaacaagcacatcgatctacgcgtgtgcggcgtggcgaactcaaaggcgttgctaaccaatgtgcatggcctgaatctggacaactggcaggcggaactggcgcaagcgaacgcgccgttcaatctgggacgtttaattcgcctggtgaaagaatatcatctactcaatccggtgattgttgattgtacctccagtcaggcggtggccgaccagtatgccgacttcctgcgcgaagggttccatgtggtgacgccgaacaagaaagcgaacacctcgtcgatggactactaccatcagctacgtttcgccgccgcgcaatcacggcgcaaattcttgtatgacaccaacgtcggcgccggtttgccggtaatcgaaaacctgcaaaacctgctgaatgcgggtgatgaactgcaaaaattttccggcattctttccgggtcgctctcttttattttcggtaaactggaagaggggatgagtctctcacaggcgaccgctctggcgcgcgagatgggctataccgaacccgatccgcgcgacgatctttccggtatggatgtggcgcgtaaactgttgatcctcgcccgcgagacgggccgcgagctggagctttccgatatcgtgattgaaccggtgttgccggacgagtttgacgcctccggcgatgtgaccgcctttatggcgcatctgccgcagcttgacgacgcgtttgccgcccgtgtggcgaaagctcgtgatgaaggtaaggtattgcgctatgtgggcaatatcgaagaggatggcgtgtgccgcgtgaagattgccgaagttgatggtaacgatccgctcttcaaagtgaaaaacggtgaaaacgcgctggcgttctacagccattattatcagcccttgccgttggtgctgcgcggctacggcgcaggcaatgatgtgacggcggcgggcgtgtttgccgatctgttacggaccctctcatggaagttaggagtttaa

SEQ ID NO: 650 - protein, 820 aa, Salmonella enterica subsp. enterica serovar Typhi str. CT18
MRVLKFGGTSVANAERFLRVADILESNSRQGQVATVLSAPAKITNHLVAMIEKTIGGQDALPNISDAERIFSDLLAGLASAQPGFPLARLKMVVEQEFAQIKHVLHGISLLGQCPDSINAALICRGEKMSIAIMAGLLEARGHRVTVIDPVEKLLAVGHYLESTVDIAESTRRIAASQIPADHMILMAGFTAGNEKGELVVLGRNGSDYSAAVLAACLRADCCEIWTDVDGVYTCDPRQVPDARLLKSMSYQEAMELSYFGAKVLHPRTITPIAQFQIPCLIKNTGNPQAPGTLIGASSDDDNLPVKGISNLNNMAMFSVSGPGMKGMIGMAARVFAAMSRAGISVVLITQSSSEYSISFCVPQSDCARARRAMQDEFYLELKEGLLEPLAVTERLAIISVVGDGMRTLRGISAKFFAALARANINIVAIAQGSSERSISVVVNNDDATTGVRVTHQMLFNTDQVIEVFVIGVGGVGGALLEQLKRQQTWLKNKHIDLRVCGVANSKALLTNVHGLNLDNWQAELAQANAPFNLGRLIRLVKEYHLLNPVIVDCTSSQAVADQYADFLREGFHVVTPNKKANTSSMDYYHQLRFAAAQSRRKFLYDTNVGAGLPVIENLQNLLNAGDELQKFSGILSGSLSFIFGKLEEGMSLSQATALAREMGYTEPDPRDDLSGMDVARKLLILARETGRELELSDIVIEPVLPDEFDASGDVTAFMAHLPQLDDAFAARVAKARDEGKVLRYVGNIEEDGVCRVKIAEVDGNDPLFKVKNGENALAFYSHYYQPLPLVLRGYGAGNDVTAAGVFADLLRTLSWKLGV

SEQ ID NO: 651 - DNA, 2463 bp, Salmonella typhimurium LT2
  CDS (1)..(2463): transl_table=11
atgcgagtgttgaagttcggcggtacatcagtggcaaatgcagaacgttttctgcgtgttgccgatattctggaaagcaatgccaggcaagggcaggtagcgaccgtactttccgcccccgcgaaaattaccaaccatctggtggcaatgattgaaaaaactatcggcggccaggatgctttgccgaatatcagcgatgcagaacgtattttttctgacctgctcgcaggacttgccagcgcgcagccgggattcccgcttgcacggttgaaaatggttgtcgaacaagaattcgctcagatcaaacatgttctgcatggtatcagcctgctgggtcagtgcccggatagcatcaacgccgcgctgatttgccgtggcgaaaaaatgtcgatcgcgattatggcgggacttctggaggcgcgtgggcatcgcgtcacggtgatcgatccggtagaaaaattgctggcggtgggccattaccttgaatctaccgttgatatcgcggaatcgactcgccgtatcgccgccagccagatcccggccgatcacatgatcctgatggcgggctttaccgccggtaatgaaaagggtgaactggtggtgctgggccgtaatggttccgactattccgccgccgtgctggccgcctgtttacgcgctgactgctgtgaaatctggactgacgtcgatggcgtgtatacctgtgacccgcgccaggtgccggacgccaggctgctgaaatcgatgtcctaccaggaagcgatggaactctcttacttcggcgccaaagtccttcaccctcgcaccattacgcccatcgcccagttccagatcccctgtctgattaaaaataccggtaatccgcaggcgccaggaacgctgatcggcgcgtccagcgacgatgataacctgccggttaaagggatctctaaccttaacaacatggcgatgtttagcgtctccggcccgggaatgaaagggatgattgggatggcggcgcgtgttttcgccgccatgtctcgcgccgggatctcggtggtgctcattacccagtcctcctctgagtacagcatcagtttctgtgtgccgcagagtgactgcgcgcgtgcccgccgtgcgatgcaggatgagttctatctggagctgaaagaggggctgctggagccgctggcggttacggagcggttggcgattatctctgttgtcggcgacggtatgcgcacgctacgcggcatttcagcgaaattcttcgccgcgctggcgcgggctaatatcaatatcgtggcgatcgctcagggatcttctgagcgttctatttctgtggtggtgaataacgacgatgccaccaccggcgtgcgggtaacgcaccagatgctgttcaataccgatcaggtgattgaagtgtttgtcattggcgtcggcggcgtcggcggcgcgctactggaacagcttaaacgtcagcaaacctggctgaagaacaagcacatcgatctacgcgtgtgcggcgtggcgaactcaaaggcgttgctaaccaatgtgcatggcctgaatctggacaactggcaggcggaactggcgcaagcgaacgcgccgttcaatctgggacgcttaattcgcctggtgaaagaatatcatctactcaatccggtgattgttgattgtacctccagtcaggcggtggccgaccagtatgccgacttcctgcgtgaagggttccatgtggtgacgccaaacaagaaagcgaacacctcgtcaatggactactaccatcagctacgtttcgccgccgcgcaatcacggcgcaaattcttgtatgacaccaacgtcggcgccggtttgccggtaatcgaaaacctgcaaaacctgctgaatgccggtgatgaactgcaaaaattttccggcattctttccgggtcgctctcttttattttcggtaaactggaagaggggatgagtctctcacaggcgaccgccctggcgcgcgagatgggctataccgaacccgatccgcgcgacgatctttccggtatggatgtggcgcgtaaactgttgatcctcgcccgcgagacgggccgcgagctggagctttccgatattgtgattgaaccggtgttgccgaacgagtttgacgcctccggcgatgtgaccgcctttatggcacatctgccgcagcttgacgacgcgtttgccgcccgtgtggcgaaagctcgtgatgaaggtaaggtattgcgctatgtgggcaatatcgaagaggatggcgtgtgccgcgtgaaaattgccgaagttgatggtaacgatccgctcttcaaagtgaaaaacggtgaaaacgcgctggcgttctacagccactattatcagcccttgccgttggtgctgcgcggctacggcgcaggcaatgatgtgacggcggcgggcgtgtttgccgatctgttacggaccctctcatggaagttaggagtttaa

SEQ ID NO: 652 - protein, 820 aa, Salmonella typhimurium LT2
MRVLKFGGTSVANAERFLRVADILESNARQGQVATVLSAPAKITNHLVAMIEKTIGGQDALPNISDAERIFSDLLAGLASAQPGFPLARLKMVVEQEFAQIKHVLHGISLLGQCPDSINAALICRGEKMSIAIMAGLLEARGHRVTVIDPVEKLLAVGHYLESTVDIAESTRRIAASQIPADHMILMAGFTAGNEKGELVVLGRNGSDYSAAVLAACLRADCCEIWTDVDGVYTCDPRQVPDARLLKSMSYQEAMELSYFGAKVLHPRTITPIAQFQIPCLIKNTGNPQAPGTLIGASSDDDNLPVKGISNLNNMAMFSVSGPGMKGMIGMAARVFAAMSRAGISVVLITQSSSEYSISFCVPQSDCARARRAMQDEFYLELKEGLLEPLAVTERLAIISVVGDGMRTLRGISAKFFAALARANINIVAIAQGSSERSISVVVNNDDATTGVRVTHQMLFNTDQVIEVFVIGVGGVGGALLEQLKRQQTWLKNKHIDLRVCGVANSKALLTNVHGLNLDNWQAELAQANAPFNLGRLIRLVKEYHLLNPVIVDCTSSQAVADQYADFLREGFHVVTPNKKANTSSMDYYHQLRFAAAQSRRKFLYDTNVGAGLPVIENLQNLLNAGDELQKFSGILSGSLSFIFGKLEEGMSLSQATALAREMGYTEPDPRDDLSGMDVARKLLILARETGRELELSDIVIEPVLPNEFDASGDVTAFMAHLPQLDDAFAARVAKARDEGKVLRYVGNIEEDGVCRVKIAEVDGNDPLFKVKNGENALAFYSHYYQPLPLVLRGYGAGNDVTAAGVFADLLRTLSWKLGV

SEQ ID NO: 653 - DNA, 2433 bp, Salmonella typhimurium LT2
  CDS (1)..(2433): transl_table=11
atgagtgtgattgcgcaggcaggggcgaaaggtcgtcaactgcataaatttggcggcagtagtctggcggatgtgaagtgttacctgcgtgtcgcaggcattatggcggagtattcgcagcctgacgatatgatggtagtgtccgccgcaggcagtaccaccaaccagttgattagctggctcaagttaagccagaccgatcgcctttctgcgcatcaggtattacagacgttacgccgctaccagtgcgatctgattagcgggctgcttcccgccgacgcggcagatgatttaaccagcgcttttattagcgatctggaacgtcttgccgccttgctcgacggcggcgtaacggatgccgtctatgctgagatcgtcggacacggcgaaatttggtcggcgagattgatgtccgccgtcctgaatcagcaggggctggatgccgcctggctggacgcgcgcgcatttttacgcgccgaacgcgccgcacagccgcaggttgatgaagggctatcttatcctttattgcagcagctactggcgcagcatccgggcaaacgtctggtcgtgaccggctttatcagccgcaatcatgacggcgaaacagtcctgttaggccggaacggttccgactattccgccacgcaaatcggcgcgctggcgggcgtttcccgcgtgaccatctggagcgatgtcgcgggcgtttatagcgccgacccgcgcaaagtgaaagatgcctgcctgctgccgttgctgcgtctggacgaagccagcgagctggcgcgtctggcggcgcctgttctgcacgcccgcacgctacagccagtgtccggcagcgatatcgatttgcagttgcgctgtagctacacgccggatcaagggtcaacccgaattgaacgagtgctggcttccgggacgggcgcgcgtatcgtgaccagtcacgatgatatctgtctgattgagtttcaggtgccagccagccaggatttcaggctggcgcataaagagctcgaccacattttaaaacgggcgcaggtgcgtccgctggcggtgggcgtgcatcgcgatcgccagctattgcagttctgctataccgccgaggtagcggatagcgtactgaaactcctcgacgatgtcgggctgccgggcgaattgcgcctgcgacaggggctggcgctggtggcgatggtcggtgcgggcgtcactcgcaatccgctacactgccatcgcttctggcagcagttgaaaggtcagccagtggagtttacctggcagtcggaggagggcatcagtctggtggcggtgctgcgtaccggcccaactgagagcctgattcaggggctgcatcagtctgttttccgcgccgaaaaacgcattggcctgatgctgttcggtaaggggaacatcggctcccgttggctggaactgtttgcccgtgaacaaagcacgctttccgcgcgtactggttttgaatttgtgctggcgggcgtggtggatagccgccgtagcctgttgaattatgaagggctggacgccagccgcgcgttggcattctttgatgatgaagccgttgagcaggacgaagagtcgctattcctgtggatgcgtgcgcatccgtatgatgatttagtggtgctggatgtaaccgccagtgcacagttagccgatcagtaccttgatttcgccagccacggttttcatgtgattagcgccaataaactggcgggcgcaagcgccagcgataagtatcgccagattcatgacgcgtttgaaaaaaccgggcgttactggctgtataacgccaccgtgggcgcgggattgccgatcaaccacacggtgcgggatctgattgacagcggcgatacgattctctcgatcagcgggatcttctccgggacgctatcctggctgttcctgcaatttgacggtacggtgccgttcaccgatctggtggatcaggcctggcagcaggggctgaccgaacccgatccgcgcgtcgatctttccggaaaagatgtcatgcgtaagctggtgattctggcgcgcgaggcgggatacgacatcgagccggatcaggtgcgtgtagaatcgttggtgccggcgcattgtgaagaaggatctatcgatcactttttcgaaaacggcgacgcgctgaatgaacagatggtgcagcgtctggaggcagcccgcgaactggggctggtgttgcgttacgtggcgcgtttcgacgccaatggcaaagcgcgcgtcggcgttgaagcggtgcgtccggaacatccgctggcggcgctgctgccgtgcgataatgtctttgctattgaaagccgctggtatcgcgataacccgctggtgatccgtgggccgggcgcgggtcgcgatgtgaccgccggggcgattcagtcggatatcaaccgtctggcgcagttgctgtaa

SEQ ID NO: 654 - protein, 810 aa, Salmonella typhimurium LT2
MSVIAQAGAKGRQLHKFGGSSLADVKCYLRVAGIMAEYSQPDDMMVVSAAGSTTNQLISWLKLSQTDRLSAHQVLQTLRRYQCDLISGLLPADAADDLTSAFISDLERLAALLDGGVTDAVYAEIVGHGEIWSARLMSAVLNQQGLDAAWLDARAFLRAERAAQPQVDEGLSYPLLQQLLAQHPGKRLVVTGFISRNHDGETVLLGRNGSDYSATQIGALAGVSRVTIWSDVAGVYSADPRKVKDACLLPLLRLDEASELARLAAPVLHARTLQPVSGSDIDLQLRCSYTPDQGSTRIERVLASGTGARIVTSHDDICLIEFQVPASQDFRLAHKELDHILKRAQVRPLAVGVHRDRQLLQFCYTAEVADSVLKLLDDVGLPGELRLRQGLALVAMVGAGVTRNPLHCHRFWQQLKGQPVEFTWQSEEGISLVAVLRTGPTESLIQGLHQSVFRAEKRIGLMLFGKGNIGSRWLELFAREQSTLSARTGFEFVLAGVVDSRRSLLNYEGLDASRALAFFDDEAVEQDEESLFLWMRAHPYDDLVVLDVTASAQLADQYLDFASHGFHVISANKLAGASASDKYRQIHDAFEKTGRYWLYNATVGAGLPINHTVRDLIDSGDTILSISGIFSGTLSWLFLQFDGTVPFTDLVDQAWQQGLTEPDPRVDLSGKDVMRKLVILAREAGYDIEPDQVRVESLVPAHCEEGSIDHFFENGDALNEQMVQRLEAARELGLVLRYVARFDANGKARVGVEAVRPEHPLAALLPCDNVFAIESRWYRDNPLVIRGPGAGRDVTAGAIQSDINRLAQLL

SEQ ID NO: 655 - DNA, 2508 bp, Xanthomonas campestris pv. campestris str. ATCC 33913
  CDS (1)..(2508): transl_table=11
atgtcatcgcctgtcgtttcttttgaacccgccgctgtcccaacgccttccgcccgcaccgtggtgcataaattcggtggcacctcggttgccgatgccgagcgttaccggcatgtggcgcagctgttgctggcacgcgatgagaccgtgcaggtgacggttgtctcggcgatgaaaggcgtgactgatgcgttgatcgagctggccgaactggccgcgcagaatcgtccagagtggcgcgagcgctggcatgaaacgcgtgcgcgccatcgcggtgcggcggtggcgttgctgggcgagcattccgggcccaccgtggagtggctggacgagcgcttcgagcatctgtcacagatccttgcggcgcttgcagtcatcggcgagctgccgcgcgaagtgcttgatcgcgtgcaggggctgggtgaggtgtattccgcgcagctgctcggcgaccacttccgtgcactgggcgaagactgcgcagtgctggatgcacgcgatgtgctggtggtcaatcgtggcgagctgggcgtggatgtggactgggcggtgagcgcgcagcggctggacacctggcggcaggcgcatccgcagacgcgggtggtggtcaccgggtttgtcgcgcgcgatcgcggcgaccgcatcaccacgctggggcgtaacggcagcgattattcgggcgcgatcttcgcggccttgttcgatgctcacgagctgcacatctggaccgacgtggatggggtgctctcggccgatccgcgcgtggtgcccgaggcggtgcagctggaaaccctgagttacgacgaagcctgcgagctagcctatttcggcgcgaaggtcgtgcatccgcagaccatgtcgccggcgatcgagcgcggtttgccgatcatcatccgcaatacgttccaacccgaacatccgggcacgcgcatcaccgccagcagtgcggtgagcgggccgatcaaggggctgacgctcagcccggatctggcggtactgaatctggaaggcaccggcctgatcggtgtgccggggacggccgagcgtgtgttcgcggcgctgcgcacggcgcaggtgtcggtggtgatgatctcgcaaggctcgtcggaacattcgatctgctgcgtggtcaagcagcatgaatccgagcgtgcgcgcaatgcgctgctgcaggcatttgcgcacgagatcacggttggccaggtgcagcgcgtgcagttgaccaccggcatcagcgtgctggcggcggtgggcgatggcatggccgggcaacccggtgtggcggcgcggctgttcgagtcgctgggccgcgcgcaggtcaatatcctggcgattgcgcagggctcttcggagcgcaacatctcggtggcgatcgatgcggcgcatgccaccaaggccttgcgcgcggcgcatgccggcttctggttgtcgccacagacgttctcggtgggtgtcatcgggccgggcaatgtgggtgcggcgttgctggatcagctgcgtaccgcgcagccgcaactgctcggcaaggccaacctggatctgcgcctgcgtggcgtggtgtcgcgcgggcgcatgttgctggaagagcgcagcgtgaccggcgattggcgcgatgcatttgcagcggcgtctacgcccaccgatctggagcgcttcaccgcgcatctgctctccgcgcacctgccgcatacggtgatcatcgattgcagcggcagtgcggaagtggccgaccgctatgcgggctggctggcagccggcatccatgtggtgacgccgaacaaacaggccggctccgggccgttggcgcgctatgaggcgatccgtgccgccgccgatgccagcggtgcgcgcttccgctacgaggccacggtcggcgccggcctgccggtgatcaccacgctgcgcgacctggtcgataccggcgatgcagtgacctcgatcgaaggcattttctccggcacgctggcgtggctgttcaataaatacgacggcagcgtgccgttctccgagctggtgacgcaggcgcgcggcatgggctacaccgagccagacccgcgcgatgacctgtccggcgtggatgtggcgcgcaagttggtgatcctggcgcgcgaggcggggcgggcgatcagcctggacgatgtcagcgtggaaagcctggtgcccgaggcgttgcgccaggccagcgtggatgacttcatggcacagctgcagacagtggacgccggctttgcgcagcggctggccgacgcgcatgcgcgcggcaacgtgctgcgctatgtcgcgcaactgccgccagatcgcgcgcccagcgtgggcctggtggaattgcctgcgcaccatgcgttcgccaatcttcgcctgaccgataacgtggtgcagttcaccacgcgccgctactgcgagaacccattggtggtgcaaggcccgggcgcagggccggaagtgaccgcggccggcgtgtttgccgatctgctgcgcgtggcggcaggcgagggggcgcgcttgtga

SEQ ID NO: 656 - protein, 835 aa, Xanthomonas campestris pv. campestris str. ATCC 33913
MSSPVVSFEPAAVPTPSARTVVHKFGGTSVADAERYRHVAQLLLARDETVQVTVVSAMKGVTDALIELAELAAQNRPEWRERWHETRARHRGAAVALLGEHSGPTVEWLDERFEHLSQILAALAVIGELPREVLDRVQGLGEVYSAQLLGDHFRALGEDCAVLDARDVLVVNRGELGVDVDWAVSAQRLDTWRQAHPQTRVVVTGFVARDRGDRITTLGRNGSDYSGAIFAALFDAHELHIWTDVDGVLSADPRVVPEAVQLETLSYDEACELAYFGAKVVHPQTMSPAIERGLPIIIRNTFQPEHPGTRITASSAVSGPIKGLTLSPDLAVLNLEGTGLIGVPGTAERVFAALRTAQVSVVMISQGSSEHSICCVVKQHESERARNALLQAFAHEITVGQVQRVQLTTGISVLAAVGDGMAGQPGVAARLFESLGRAQVNILAIAQGSSERNISVAIDAAHATKALRAAHAGFWLSPQTFSVGVIGPGNVGAALLDQLRTAQPQLLGKANLDLRLRGVVSRGRMLLEERSVTGDWRDAFAAASTPTDLERFTAHLLSAHLPHTVIIDCSGSAEVADRYAGWLAAGIHVVTPNKQAGSGPLARYEAIRAAADASGARFRYEATVGAGLPVITTLRDLVDTGDAVTSIEGIFSGTLAWLFNKYDGSVPFSELVTQARGMGYTEPDPRDDLSGVDVARKLVILAREAGRAISLDDVSVESLVPEALRQASVDDFMAQLQTVDAGFAQRLADAHARGNVLRYVAQLPPDRAPSVGLVELPAHHAFANLRLTDNVVQFTTRRYCENPLVVQGPGAGPEVTAAGVFADLLRVAAGEGARL

SEQ ID NO: 657 - DNA, 2508 bp, Xanthomonas axonopodis pv. citri str. 306
  CDS (1)..(2508): transl_table=11
atgtcatcgcatgctgtttcgttcgaacccgctgctgttcttgcgtcctctgcgcgcactgtcgtgcacaaattcggcggcacctcggtggcagatgccgagcgttatcggcatgtggcgcagctgctgcttgcacgcgacgagacggtgcaggtcaccgtggtctcggcgatgaagggcgtcaccgatgccttgatcgaactggccgaactggcggcgaagaatcgccccgaatggcgcgagcggtggcacgaaacgcgcgcacgccatcgcggtgcggcggtcgccttgctcggcgagcattccgggccaacggtggagtggctggacgaacgcttcgcgcatctgtcgcagatcctcggcgcgctggcggtcatcggggaattgccgcgcgaagtgctcgaccgcgtgcaaggactgggcgaggtgtattcggcgcagttgctgggcgatcactttcgcgcgatcggcgaagactgcgcagtgctggacgcgcgcgatgtgctggtggtcaatcgcggcgaactcggtgtggatgtggactgggaggcgagtgcgcagcgcctcgcaacctggcggcaagcgcatccgcagacgcgcgtggtggtgaccggattcgtggcgcgcgaccgtgccgaccgcgtcaccacgctgggccgcaacggcagcgattattcgggtgccatcttcgctgcattgttcgatgcagacgaactgcatatctggaccgatgtggatggcgtgctgtcggccgacccgcgcgtggtgcccgaagcggtgcaactggaaacactgagctacgacgaggcctgcgagctggcatatttcggtgcgaaggtggtgcacccgcaaacgatgtcgccggcgatcgagcgcggcctgccgatcatcatccgcaacaccttccagcccgagcatcccggcacgcgcattactgccagtagcgcggtgagcgggccgatcaagggtctgacgttgagcccggatctggcggtgctgaatctggaaggcaccggtctgatcggtgtgccgggcacggccgagcgcgtgttcgccgcgctgcgcaccgcgcaggtgtcggtggtgatgatctcgcagggttcgtcggaacattcgatctgctgcgtggtcaagcagcacgagtccgagcgtgcacgcaacgcattgttgcaagcgttcgcgcatgaactcacggtcgggcaggtgcagcgcgtgcagctgaccaccggcatcagcgtgctcgcagcagtaggcgatggtatggccggtcagccgggtgtggcggcgcgcttgttcgaatcgttggggcgagcccaggtcaatatcctggcaattgcgcagggctcctccgaacgcaatatctcggtagcgatcgatgcggcgcacgccaccaaggcgttgcgcgcggcgcatgccggtttctggttgtcgccgcagacgttttctgtaggcgtgatcggtccgggcaatgtgggcgcggcattgctggaccaactgcgcaacgcgcaaccgcagttgttaggcaaggccaatcttgatctgcgcctgcgcgcggtggtctcacgcggtcgcatgctgctggacgaacgcggcctggtcggcgactggcgcgatgcgtttgcatcgtccgcaacgcccaccgatctggaacgcttcaccacgcatctgctgtctgcgcatctgccgcatacggtgatcatcgattgcagcggcagcgccgaagtcgcagaccgttatgcgggctggctggcagccggcatccacgtggtgacgccgaacaagcaggcggggtccggcccgctggcgcgctatgaggcgattcgcgcagcggccgacgccagtggtgcgcgcttccgttatgaagccaccgtgggcgccggtttgccggtgatcaccacactgcgcgacctggtggacaccggcgatgcagtcacgtccatcgaaggcatcttctccggcacgttggcatggttgttcaacaagtacgaaggcagcgtgcccttcgccgaactggtgacgcaggcgcgcggcatgggctataccgaaccggatccgcgcgacgatctgtccggcgtggacgtggcgcgcaagttggtgatcctggcgcgcgaagcagggcgctccatcagcctggaagatgtgcaggttgaaagcctggtgcctgaagcgctgcgccaggccagcgtggacgatttcatggcgcgcttaccggaagtggatgcgtccttcgcgcaacgtctggcccaagcgcatgcgcgtggcaatgtgctgcgctatgtcgcgcagctgccgccggaccgcgcgcccagcgtgggcctggtcgagctgccggccgatcacgcgttcgccaatctgcgtctgaccgataacgtggtgcagttcaccacgcggcgctactgcgagaacccgttggtggtgcagggcccgggtgccggtccggaagtgaccgcggcaggcgtgttcgccgatctgctgcgcgtggcggcaggcgagggcgcgcggctgtga

SEQ ID NO: 658 - protein, 835 aa, Xanthomonas axonopodis pv. citri str. 306
MSSHAVSFEPAAVLASSARTVVHKFGGTSVADAERYRHVAQLLLARDETVQVTVVSAMKGVTDALIELAELAAKNRPEWRERWHETRARHRGAAVALLGEHSGPTVEWLDERFAHLSQILGALAVIGELPREVLDRVQGLGEVYSAQLLGDHFRAIGEDCAVLDARDVLVVNRGELGVDVDWEASAQRLATWRQAHPQTRVVVTGFVARDRADRVTTLGRNGSDYSGAIFAALFDADELHIWTDVDGVLSADPRVVPEAVQLETLSYDEACELAYFGAKVVHPQTMSPAIERGLPIIIRNTFQPEHPGTRITASSAVSGPIKGLTLSPDLAVLNLEGTGLIGVPGTAERVFAALRTAQVSVVMISQGSSEHSICCVVKQHESERARNALLQAFAHELTVGQVQRVQLTTGISVLAAVGDGMAGQPGVAARLFESLGRAQVNILAIAQGSSERNISVAIDAAHATKALRAAHAGFWLSPQTFSVGVIGPGNVGAALLDQLRNAQPQLLGKANLDLRLRAVVSRGRMLLDERGLVGDWRDAFASSATPTDLERFTTHLLSAHLPHTVIIDCSGSAEVADRYAGWLAAGIHVVTPNKQAGSGPLARYEAIRAAADASGARFRYEATVGAGLPVITTLRDLVDTGDAVTSIEGIFSGTLAWLFNKYEGSVPFAELVTQARGMGYTEPDPRDDLSGVDVARKLVILAREAGRSISLEDVQVESLVPEALRQASVDDFMARLPEVDASFAQRLAQAHARGNVLRYVAQLPPDRAPSVGLVELPADHAFANLRLTDNVVQFTTRRYCENPLVVQGPGAGPEVTAAGVFADLLRVAAGEGARL

SEQ ID NO: 659 - DNA, 2457 bp, Chlorobium tepidum TLS
  CDS (1)..(2457): transl_table=11
atgagggtattcaagttcggaggttcgtcgatcgcttcggcggcaaagatcagcaatgtggctggcattatcaggcgtgagttgaaaagcactccgctggtggttgtggtgtcagcgattggcaaggtgaccgacatgcttgccgagactgcggcgctggcggggaatggtgatgcggcataccgcgataaactcgaaggaatcgcctcgctgcatggcgggatcatccgtgaactgttcggtacggaggcgtcagcagaagagacctggttgggtgagatgatggctgaactgaacgatgtgctgcatggcgtttttctgctcagggagctttcagacaagagtctcgcccttgtgctgagttacggcgaacggctgtcgtgccggatcgtgagccgctatatgcacgtatcgggtaccccagctgaatgcgtcgatgcacgcagtgtgatcgtgaccgacgacaaccattgctttgccaaggtggatcgtctggcgacaggaaagctgattcacgaacgcttccggagtttcgacgttctgccggtggtcaccggattcatcgcctccgcgccggatggcagtgtgaccaaccttgggcgcggcggttccgatttcacggcgacgattctcggcgcggcgcttcatgccgaagaggtgtggatctggaccgatgtcgatggcttctacagcgccgatcccaagcgcgtgcccgacgcgcgggtcattccggagatcagctacgccgaggcgatggagctgtcgcacgccggcgcgaaggtgctgcatccactggccgtgcagccggtcatgaaggcgggtattccgttgcgcataaagaactctttcaatcccgaaaaacctggcacgaggatcggtatcgaggctgcgggtgcagaggcgcttccgggtacggtgaccggactgacctcgatcaaccatgtggtgctgctcagtctttccggcagcggcatggcgggcgtgccgggaacggcgtctcggctgtttacctgcctcgctcgccacagcatcaacattatcttcatctcgcaggcctcgtcggagcagtcgatcagcctggccatagcgcccggacaggcgtcgatggccaagaaggtgctcgaagaggagtttgcccgcgaaatcgaggagcgccggatcgatccggtcagcgtccgccgcaatcttgcgatggtggccgtggtgggcaataagatgttgggccaccccggcgtgtcggcacagctcttcgagacgctcggcaagaacggcgtcaacgtgatcgccgtcgcgcagggggccaacgaaatgaacatttcgctggtcatcgacagcgcggatgagaacaaggcgctcaactgcgtccacgaatccttcttcctttcgatgcgcaaggtgcacgttttcatcgtgggtaccggcaccatcgccaaaagtctcatcagccagatccggcggcatcgcgccaccctgcagaaagaattgggccttgacgttgtggttgcgggtctggccaacacccgctcgatgtgcatcgagcctgccggaatcgatctcgaacactggcacgattcgctgaagccgcgcgagtcgcacgaggggatcgggcagtatatccgtctgattcaggaacggaacctgcacaacaccatcgttgtggactgtacggcgagcaggcaggtggccgagtgctaccccgcgctgctccgggcgaatatctctgttgccacggccaacaaacttggcatggctgggccgtgggatctgtatcgcaagatcatggatgcgttacgctccagtaatgcgaagttcctctacgaaaccaatgttggggcgggtttgccggtgatcaacacgcttaacgacctgaagaacagcggagacaagatcgtctgcatcgagggcgttttgtcgggtacactaagcttcattttcaacgagctgcgcaagggcgggcgtttcagcgagatcgttcgcaaagccaaggagtctggctacaccgagcccgatccgcgcgatgatctctccggagccgatttcgcccggaagctgcttattctcggtagggagcttggctatcagctcgagtacgcggacgtggagtgccagagcctcgtcccggagccgctgcgaggcgaaatgtcgcccgccgagtttctcgaccagctctcttcaatcgacgactggtacgtcgatgagatggcgagtgccgcgagcgaggggatgaccatcgcctacaccggcgagcttcgggacggcaaggcgaaggtggggctgaagcgcgtgccgctcgaaagcccggtggccgggctgaacggctcggagaacctcgtggttttcacgaccgagcgctacctcaagaccccgctggtggtcaaggggcctggcgctggcggcgaggtgacagcaggcggcgtcttcgccgacattctccgcatcgcaagctatttggtctga

SEQ ID NO: 660 - protein, 818 aa, Chlorobium tepidum TLS
MRVFKFGGSSIASAAKISNVAGIIRRELKSTPLVVVVSAIGKVTDMLAETAALAGNGDAAYRDKLEGIASLHGGIIRELFGTEASAEETWLGEMMAELNDVLHGVFLLRELSDKSLALVLSYGERLSCRIVSRYMHVSGTPAECVDARSVIVTDDNHCFAKVDRLATGKLIHERFRSFDVLPVVTGFIASAPDGSVTNLGRGGSDFTATILGAALHAEEVWIWTDVDGFYSADPKRVPDARVIPEISYAEAMELSHAGAKVLHPLAVQPVMKAGIPLRIKNSFNPEKPGTRIGIEAAGAEALPGTVTGLTSINHVVLLSLSGSGMAGVPGTASRLFTCLARHSINIIFISQASSEQSISLAIAPGQASMAKKVLEEEFAREIEERRIDPVSVRRNLAMVAVVGNKMLGHPGVSAQLFETLGKNGVNVIAVAQGANEMNISLVIDSADENKALNCVHESFFLSMRKVHVFIVGTGTIAKSLISQIRRHRATLQKELGLDVVVAGLANTRSMCIEPAGIDLEHWHDSLKPRESHEGIGQYIRLIQERNLHNTIVVDCTASRQVAECYPALLRANISVATANKLGMAGPWDLYRKIMDALRSSNAKFLYETNVGAGLPVINTLNDLKNSGDKIVCIEGVLSGTLSFIFNELRKGGRFSEIVRKAKESGYTEPDPRDDLSGADFARKLLILGRELGYQLEYADVECQSLVPEPLRGEMSPAEFLDQLSSIDDWYVDEMASAASEGMTIAYTGELRDGKAKVGLKRVPLESPVAGLNGSENLVVFTTERYLKTPLVVKGPGAGGEVTAGGVFADILRIASYLV

SEQ ID NO: 661 - DNA, 2436 bp, Yersinia pestis KIM
  CDS (1)..(2436): transl_table=11
atgaatgcaacagcggtagcagcggcggcaacgggccgtcaactgcataaatttggtggcagtagccttgcggatgtgaagtgttatctacgggtggctaatattatggccaactacagtcaccccggcgatctcatggtggtgtctgctgccgggagcacgacaaaccagttgatcagttggttgaaactcagtcaaaacgaccgtctttctgctcatcaggtacagcaaagtctgcgtcgttatcaacacgatctgatcaatggcttattgcctccagaaatggcagagccattaatcagtgagtttattcatgatttagagcgcctggcgggcttgctggataataaaattgatgatgtgatttatgctgaagtggttggtcatggtgaaatttggtcagcccgcttgatgtctgcgctactgaataagttggatatggatgccgtctggcttgacgcccgccgtttcctacgtgcagagcgtgcagcgcaaccacaaattgatgaaagccgctcttatccgttactgcaacaattaatggcccaacaccctcaccagcgtttggtggtgactggttttatctcgcgcaatgaggcgggtgaaacggtcttgcttggccgtaatggcagtgactattcggcgacgcaggtcggggcattggccggggccgagcgtgtcaccatctggagtgatgttgccggggtgtacagtgccgatccacgtaaagtgaaggacgcttgcctgctaccattattgcggttggatgaagccagtgaactggcccgcctggcagcaccggtgttacatacccgcacattacaaccggtttctggtagtgacatcgatttgcaattacgttgcagttatcagccggagcaggggtcaacccgtattgaacgtgtgctggcttcgggattgggtgccaagatagtgaccagccacgatgatgtttgcctgattgaattgcagattgccagtcaccatgatttctcgttggcgcagaaagagatcgatctactgctcaaacgtgcgcaaatcaaaccactggcgaccggtattcacccagatcgtaacctgctgcaactttgctatacctcagaagtggttaacagcgccttacgggtgttggaagatgccgctctgccggggaaactctctctgcgcgaagggctggcattggtcgcactggtgggggcgggggtgagcaagaacccacttcacagtcaccgtttctaccaacaactgaaagatcagccagttgagtttgtctggcaggccgaagacggtatcagtatggtggccgtcctgcgtcttgggccgactgagcacctgattcaagggttgcaccagtcgttgttccgggcggaaaaacgtattggtctgatgctgtttggcaaaggcaacattggtgctcgctggttggagctgtttgcccgtgagcagaaaagtctttcggcccgcagtggttttgaatttgtgctagccggggtggtcgatagccgccgtagtctgctgagttacgatggtttggatgccagccggacgctggcattttacaacgatgaagccaaagaacaggatgaagaatccctgttcttgtggatgcgtgcccacccgtttgacgacctggtggtgttggatgtgaccgccagcccgtcacttgcagaacaatatctggattttgccagttatggtttccacgttatcagcgcgaacaaattagcgggggcttcaagcagcaataattaccgccaaatccgcgatgcgtttgcgaaaactggccgccactggttgtataacgccacggtaggcgcggggttaccggttaaccatacggtgcgcgatctgcgtgacagtggcgacagtattttagcgatcagcggtattttctctggcacgctgtcttggttattcctgcaatttgatggctcagtaccttttaccgagctggtagaccaagcctggcagcaaggtttgaccgagcctgatccaagggttgatctctctggtcaggatgtaatgcgtaagttggtgattttagcccgtgaagcgggttacgacatcgaaccgaatcaggtgcgggtggagtcgttggtgcctgctggcgcagagagtgggtcggttgatcaattctttgaaaacggcgaggcattaaatcagcaaatgattcagcgtttagaagccgcgaaggagatgggcttggtattacgctacgtggcacgctttgatgctaatggtaaagcgcgggtgggcgttgaagcggtacgtaccgatcatccgttggcttctttgctaccgtgcgataatgtttttgctattgagagccgctggtatcgcgataatccgttggtgattcgcggcccaggcgctggccgtgatgtgaccgctggggcgattcaatctgatttaaaccgcctatcacaactgttgtaa

SEQ ID NO: 662 - protein, 811 aa, Yersinia pestis KIM
MNATAVAAAATGRQLHKFGGSSLADVKCYLRVANIMANYSHPGDLMVVSAAGSTTNQLISWLKLSQNDRLSAHQVQQSLRRYQHDLINGLLPPEMAEPLISEFIHDLERLAGLLDNKIDDVIYAEVVGHGEIWSARLMSALLNKLDMDAVWLDARRFLRAERAAQPQIDESRSYPLLQQLMAQHPHQRLVVTGFISRNEAGETVLLGRNGSDYSATQVGALAGAERVTIWSDVAGVYSADPRKVKDACLLPLLRLDEASELARLAAPVLHTRTLQPVSGSDIDLQLRCSYQPEQGSTRIERVLASGLGAKIVTSHDDVCLIELQIASHHDFSLAQKEIDLLLKRAQIKPLATGIHPDRNLLQLCYTSEVVNSALRVLEDAALPGKLSLREGLALVALVGAGVSKNPLHSHRFYQQLKDQPVEFVWQAEDGISMVAVLRLGPTEHLIQGLHQSLFRAEKRIGLMLFGKGNIGARWLELFAREQKSLSARSGFEFVLAGVVDSRRSLLSYDGLDASRTLAFYNDEAKEQDEESLFLWMRAHPFDDLVVLDVTASPSLAEQYLDFASYGFHVISANKLAGASSSNNYRQIRDAFAKTGRHWLYNATVGAGLPVNHTVRDLRDSGDSILAISGIFSGTLSWLFLQFDGSVPFTELVDQAWQQGLTEPDPRVDLSGQDVMRKLVILAREAGYDIEPNQVRVESLVPAGAESGSVDQFFENGEALNQQMIQRLEAAKEMGLVLRYVARFDANGKARVGVEAVRTDHPLASLLPCDNVFAIESRWYRDNPLVIRGPGAGRDVTAGAIQSDLNRLSQLL

SEQ ID NO: 663 - DNA, 2538 bp, Yersinia pestis KIM
  CDS (1)..(2538): transl_table=11
gtgcgggctttttttttcaatcaaatctttgcaaaaaaagtttgcgataaaaagcgcgaaagcgggagagaatcagaaatgcgagtgctgaaatttggcgggacatcagtggcaaatgccgagcgctttatgcgtgttgccgatatcatcgaaagtaatgcgcgtcagggacaagtggctacggtgttatccgctcccgcgaagataacgaaccatctcgttgccatgatcgataaaatggtcgcagggcaagatatctccccgaacatcagcgatgctgagcggatttttgctgagttattgcgtggattagctgatactcagccaggctttgattatgatcgcctaaaagccttggtcggccatgagtttgcgcaactcaaacacctgctacacggtatttcgttgttggggcagtgcccagacagcattaatgcctcaattatctgccgtggcgaaaaactctccatcgccattatggaggcgttatttcaggctaagggttatcacgttacggtgattaatccagtcgaaaaattgttggcgcagggccattatctcgaatccactgttgatatcacggagtctacccgccgtatcggtgccagcggtattccatctgatcacatcatcctgatggctggttttactgcgggtaatgataaaggtgaattggtggtgttggggcgtaatggctctgattattccgctgccgtgctggctgcttgcttacgggcagattgttgtgagatttggaccgatgtcgacggggtctatacttgtgacccgcgtaccgttccagatgccagattactgaaatcgatgtcataccaagaggcaatggagctttcctattttggtgctaaagttcttcaccctcgcactatcgctcctattgcccgcttccaaattccttgtctgataaaaaacacctctaacccgcaagcccccggtaccttgattggtggtgaaagcattgatgaggattctccggtcaaaggcattaccaacctgaataatatggcgatgattaatgtttcagggccaggaatgaaagggatggtcggtatggctgcccgcgtctttgcggtgatgtcgcgcagcggtatttcagtggtgctaatcactcagtcctcttctgaatacagcatcagtttttgtgtgccgcaaggtgagttattgcgcgcccgccgagcgctggaagatgagttttatctggagttgaaagacggtgtcttggatcctctggatgtgatggaacatctggcaattatctctgtggtcggtgacggtatgcgcaccctgcgcggtatttctgcccgtttcttctcggctctggcgcgcgccaacatcaatattattgctatcgctcaaggctcgtctgagcgctctatttctgtggttgtcaataatgatgcggtcactaccggggtgcgagtttgccaccagatgctgtttaacacggatcaagtcattgaggtgtttgtcattggcgtgggtggtgtggggggcgcattaatcgaacaaatctatcgccagcaaccgtggttgaaacagcgtcatattgatttacgtgtttgtggtatcgcgaattccaaagccatgttgaccaacgtgcatggcattgcattagataactggcgtcaggaactggctgaagttcaggagccgtttaacctgagccgcttgatccgtctggttaaagagtatcacttactgaacccggtcattgttgactgtacctcaagccaggcggttgctgatcaatatgctgatttcctgaccgatggcttccatgtggtgacgccaaacaagaaagccaacacttcatcaatgaattattaccgccaaatgcgtgccgctgcgacgaaatcgtgccgtaaattcttgtatgacacaaacgttggggcggggctaccggtgatcgagaacttacagaacctgctcaatgcgggtgatgaactgatgcgcttcaccggtattctgtccggttcactttccttcatcttcggtaagctagatgaggggatgtcattgtcagaggcaacacggcaagctaaggcgttggggtataccgaacccgatccacgtgatgatctctctgggatggatgttgcccgtaaattgttgattttggcccgtgaagcagggtacaaacttgagttggctgatatcgaggttgagtccgtcttaccagcaagctttgatgcttcaggtgatgtggatactttcctggcgcgcctgccatcattggatgctgaatttacccgcttggtagcgaatgctgcggagcagggcaaagtgctacgttatgtcggagtgattgaagacgggcgttgtaaagtgcggatggaggcagttgacggtaacgacccgttgtataaagttaagaatggcgagaatgcgttggctttctatacccgctattatcagccaattccgttggtgctacgcggttatggcgcaggcaatgatgtgactgccgctggggtgtttgccgatcttttacgcacattatcatggaagttgggagtttaa

SEQ ID NO: 664 - protein, 845 aa, Yersinia pestis KIM
MRAFFFNQIFAKKVCDKKRESGRESEMRVLKFGGTSVANAERFMRVADIIESNARQGQVATVLSAPAKITNHLVAMIDKMVAGQDISPNISDAERIFAELLRGLADTQPGFDYDRLKALVGHEFAQLKHLLHGISLLGQCPDSINASIICRGEKLSIAIMEALFQAKGYHVTVINPVEKLLAQGHYLESTVDITESTRRIGASGIPSDHIILMAGFTAGNDKGELVVLGRNGSDYSAAVLAACLRADCCEIWTDVDGVYTCDPRTVPDARLLKSMSYQEAMELSYFGAKVLHPRTIAPIARFQIPCLIKNTSNPQAPGTLIGGESIDEDSPVKGITNLNNMAMINVSGPGMKGMVGMAARVFAVMSRSGISVVLITQSSSEYSISFCVPQGELLRARRALEDEFYLELKDGVLDPLDVMEHLAIISVVGDGMRTLRGISARFFSALARANINIIAIAQGSSERSISVVVNNDAVTTGVRVCHQMLFNTDQVIEVFVIGVGGVGGALIEQIYRQQPWLKQRHIDLRVCGIANSKAMLTNVHGIALDNWRQELAEVQEPFNLSRLIRLVKEYHLLNPVIVDCTSSQAVADQYADFLTDGFHVVTPNKKANTSSMNYYRQMRAAATKSCRKFLYDTNVGAGLPVIENLQNLLNAGDELMRFTGILSGSLSFIFGKLDEGMSLSEATRQAKALGYTEPDPRDDLSGMDVARKLLILAREAGYKLELADIEVESVLPASFDASGDVDTFLARLPSLDAEFTRLVANAAEQGKVLRYVGVIEDGRCKVRMEAVDGNDPLYKVKNGENALAFYTRYYQPIPLVLRGYGAGNDVTAAGVFADLLRTLSWKLGV

SEQ ID NO: 665 - DNA, 2463 bp, Shigella flexneri 2a str. 301
  CDS (1)..(2463): transl_table=11
atgcgagtgttgaagttcggcggtacatcagtggcaaatgcagaacgttttctgcgtgttgccgatattctggaaagcaatgccaggcaggggcaggtggccaccgtcctctctgcccccgccaaaatcaccaaccacctggtggcgatgattgaaaaaaccattagcggccaggatgctttacccaatatcagcgatgccgaacgtatttttgccgaacttttgacgggactcgccgccgcccagccggggttcccgctggcgcaattgaaaactttcgtcgatcaggaatttgcccaaataaaacatgtcctgcatggcattagtttgttggggcagtgcccggatagcatcaacgctgcgctgatttgccgtggcgagaaaatgtcgatcgccattatggccggcgtgttagaagcgcgtggtcacaacgttaccgttatcgatccggtcgaaaaactgctggcagtggggcattacctcgaatctaccgtcgatattgctgagtccacccgccgtattgcggcaagccgcattccggctgatcacatggtgttgatggcaggtttcaccgccggtaatgaaaaaggcgaactggtggtgcttggacgtaacggttccgactactccgcggcggtgctggctgcctgtttacgcgccgattgttgcgagatttggacggacgttgacggggtctatacctgcgacccgcgtcaggtgcccgatgcgaggttgttgaagtcgatgtcctaccaggaagcgatggagctttcctacttcggcgctaaagttcttcacccccgcaccattacccccatcgcccagttccagatcccttgcctgattaaaaataccggaaatcctcaagcaccaggtacgctcattggtgccagccgtgatgaagacgaattaccggtcaagggcatttccaatctgaataacatggcaatgttcagcgtttccggcccggggatgaaagggatggttggcatggcggcgcgcgtctttgctgcaatgtcacgcgcccgtatttccgtggtgctgattacgcaatcatcttccgaatacagtatcagtttctgcgttccacaaagcgactgtgtgcgagctgaacgggcaatgcaggaagagttctacctggaactgaaagaaggcttactggagccgctggcggtgacggaacggctggccattatctcggtggtaggtgatggtatgcgcaccttgcgtgggatctcggcgaaattctttgccgcgctggcccgcgccaatatcaacattgtcgccattgctcagggatcttctgaacgctcaatctctgtcgtggtaaataacgatgatgcgaccactggcgtgcgcgttactcatcagatgctgttcaataccgatcaggttatcgaagtgtttgtgattggcgtcggtggcgttggcggtgcgctgctggagcaactgaagcgtcagcaaagctggctgaagaataaacatatcgacttacgtgtctgcggcgttgccaactcgaaggctctgctcactagtgtgcatggccttaatctggaaaactggcaggaagaacttgcacaagccaaagagccgtttaatctcgggcgcttaattcgcctcgtgaaagaatatcatctgctgaacccggtcattgttgactgcacctccagccaggcagtggcggatcaatatgccgacttcctgcgcgaaggtttccacgttgtcacgccgaacaaaaaggccaacacctcgtcgatggattactatcatcagttgcgttatgcggcggaaaaatcgcggcgtaaattcctctatgacaccaacgttggggctggattaccggttattgagaacctgcaaaatctgctcaatgcaggtgatgaattggtgaagttctccggcattctttcaggttcgctttcttatatcttcggcaagttagacgaaggcatgagtttctccgaggcgaccacgctggcgcgggaaatgggttataccgaaccggacccgcgagatgatctttctggtatggatgtggcgcgtaaactattgattctcgctcgtgaaacgggacgtgaactggagctggcggatattgaaattgaacctgtgctgcccgcagagtttaacgccgagggtgatgttgccgcttttatggcgaatctgtcacagctcgacgatctctttgccgcgcgcgtggcgaaggcccgtgatgaaggaaaagttttgcgctatgttggcaatattgatgaagatggtgtctgccgcgtgaagattgccgaagtggatgggaatgatccgctgttcaaagtgaaaaatggcgaaaacgccctggccttttatagccactattatcagccgctgccgttggtgctgcgcggatatggtgcgggcaatgacgttaccgctgccggtgtctttgccgatctgctacgtaccctctcatggaagttaggagtctga

SEQ ID NO: 666 - protein, 820 aa, Shigella flexneri 2a str. 301
MRVLKFGGTSVANAERFLRVADILESNARQGQVATVLSAPAKITNHLVAMIEKTISGQDALPNISDAERIFAELLTGLAAAQPGFPLAQLKTFVDQEFAQIKHVLHGISLLGQCPDSINAALICRGEKMSIAIMAGVLEARGHNVTVIDPVEKLLAVGHYLESTVDIAESTRRIAASRIPADHMVLMAGFTAGNEKGELVVLGRNGSDYSAAVLAACLRADCCEIWTDVDGVYTCDPRQVPDARLLKSMSYQEAMELSYFGAKVLHPRTITPIAQFQIPCLIKNTGNPQAPGTLIGASRDEDELPVKGISNLNNMAMFSVSGPGMKGMVGMAARVFAAMSRARISVVLITQSSSEYSISFCVPQSDCVRAERAMQEEFYLELKEGLLEPLAVTERLAIISVVGDGMRTLRGISAKFFAALARANINIVAIAQGSSERSISVVVNNDDATTGVRVTHQMLFNTDQVIEVFVIGVGGVGGALLEQLKRQQSWLKNKHIDLRVCGVANSKALLTSVHGLNLENWQEELAQAKEPFNLGRLIRLVKEYHLLNPVIVDCTSSQAVADQYADFLREGFHVVTPNKKANTSSMDYYHQLRYAAEKSRRKFLYDTNVGAGLPVIENLQNLLNAGDELVKFSGILSGSLSYIFGKLDEGMSFSEATTLAREMGYTEPDPRDDLSGMDVARKLLILARETGRELELADIEIEPVLPAEFNAEGDVAAFMANLSQLDDLFAARVAKARDEGKVLRYVGNIDEDGVCRVKIAEVDGNDPLFKVKNGENALAFYSHYYQPLPLVLRGYGAGNDVTAAGVFADLLRTLSWKLGV

SEQ ID NO: 667 - DNA, 2433 bp, Shigella flexneri 2a str. 301
  CDS (1)..(2433): transl_table=11
atgagtgtgattgcgcaggcaggggcgaaaggtcgtcagctgcataaatttggtggcagtagtctggctgatgtgaagtgttatttgcgtgtcgcgggcattatggcggagttctctcagcctgacgatatgatggtggtttccgccgccggtagcaccactaaccagttgattaactggttgaaactaagccagaccgatcgtctctctgcgcatcaggttcaacaaacgctgcgtcgctatcagtgcgatctgattagcggtctgctacccgctgaagaagccgatagcctcattagcgcttttgtcagcgatcttgagcgcctggcggcgttgctcgacagtggtattaacgatgcggtgtatgcggaagtggtgggccacggtgaagtgtggtcggcgcgcctgatgtctgcggtacttaatcaacaagggctgccagcggcctggcttgatgcccgtgagtttttacgcgctgaacgcgctgcgcaaccgcaggttgatgaagggctttcttacccgttgctgcaacagctactggtacaacatccgagcaaacgtctggtggtgaccgggtttatcagccgtaacaacgccggtgaaacggtgttgctggggcgtaacggttccgactattccgcgacacaaatcggtgcgctggcgggtgtttctcgtgtaaccatctggagcgacgtcgccggggtatacagtgccgacccgcgtaaagtgaaagatgcctgcctgctgccgttgctgcgtctggatgaggccagcgaactggcgcgtctggcggctcccgttcttcacgcccgtactttacagccagtttctggcagcgaaatcgacctgcagctgcgctgtagctacacgccggatcaaggttccacgcgcattgaacgcgtgctggcctccggtactggtgcgcgtattgtcaccagccacgatgatgtctgtttgattgagtttcaggtgcccgccagtcaggatttcaaactggcgcataaagagatcgaccagatcctgaaacgtgcccaggtgcgtccactggcggttggcgtgcataacgatcgccagttgttgcaattttgctacacctcagaagtggccgacagtgcgctgaaaatcctcgacgaagcgggattacctggagaactgcgcctgcgtcaggggctggcgctggtggcgatggtcggggcgggtgtcacccgtaacccgctgcattgccaccgcttctggcagcaactgaaaggccagccggtcgagtttacgtggcagtccgatgacggcatcagtctggtggcagtactgcgcaccggcccgaccgaaagcctgattcaggggctgcatcagtccgtcttccgcgcagaaaaacgcatcggcctggtattgttcggcaaaggcaatatcggctctcgctggctggaactgttcgcccgcgagcagagcacgctttcggcgcgtaccggctttgaatttgtgctggcaggcgtggtggacagccgccgcagtctgttgagttatgacgggctggacgccagccgcgcgttagccttcttcaacgatgaagcggtcgagcaggatgaagagtcgcttttcctgtggatgcgcgcccatccgtatgatgatttagtggtgttggacgttaccgccagccagcagcttgctgatcagtatctcgatttcgccagccacggtttccacgtcatcagtgccaacaaactggcgggagcaagcgacagcaataaatatcgccagatccacgacgccttcgaaaaaaccgggcgtcactggctatacaacgccaccgttggtgcgggcttgccgatcaaccataccgtgcgcgatctgatcgacagcggcgataccattttgtcgatcagtgggatcttctccggcacgctctcctggctgttcctgcaattcgacggtagcgtgccgtttaccgagctggtggatcaggcgtggcagcagggcttaaccgagcctgatccgcgtgacgacctctccggcaaagacgtaatgcgcaagctggtgattctggcgcgtgaagcgggttacaacattgaaccggaccaggtacgtgtggaatcgctggtgcctgctcattgcgaaggcggcagcatcgaccatttctttgaaaatggcgatgaacttaacgagcagatggtgcaacggctggaagcggcccgcgaaatggggctggtgctgcgctacgtggcgcgtttcgatgccaacggcaaagcgcgtgtgggcgtggaggcggtgcgtgaagactatccgctggcatcactgctgccatgcgataacgtctttgccatcgaaagccgctggtaccgcgataatccgctggtgatccgtgggcctggcgctgggcgcgacgtcaccgccggggcgattcagtcggatatcaaccggctggcacagttgttgtaa

SEQ ID NO: 668 - protein, 810 aa, Shigella flexneri 2a str. 301
MSVIAQAGAKGRQLHKFGGSSLADVKCYLRVAGIMAEFSQPDDMMVVSAAGSTTNQLINWLKLSQTDRLSAHQVQQTLRRYQCDLISGLLPAEEADSLISAFVSDLERLAALLDSGINDAVYAEVVGHGEVWSARLMSAVLNQQGLPAAWLDAREFLRAERAAQPQVDEGLSYPLLQQLLVQHPSKRLVVTGFISRNNAGETVLLGRNGSDYSATQIGALAGVSRVTIWSDVAGVYSADPRKVKDACLLPLLRLDEASELARLAAPVLHARTLQPVSGSEIDLQLRCSYTPDQGSTRIERVLASGTGARIVTSHDDVCLIEFQVPASQDFKLAHKEIDQILKRAQVRPLAVGVHNDRQLLQFCYTSEVADSALKILDEAGLPGELRLRQGLALVAMVGAGVTRNPLHCHRFWQQLKGQPVEFTWQSDDGISLVAVLRTGPTESLIQGLHQSVFRAEKRIGLVLFGKGNIGSRWLELFAREQSTLSARTGFEFVLAGVVDSRRSLLSYDGLDASRALAFFNDEAVEQDEESLFLWMRAHPYDDLVVLDVTASQQLADQYLDFASHGFHVISANKLAGASDSNKYRQIHDAFEKTGRHWLYNATVGAGLPINHTVRDLIDSGDTILSISGIFSGTLSWLFLQFDGSVPFTELVDQAWQQGLTEPDPRDDLSGKDVMRKLVILAREAGYNIEPDQVRVESLVPAHCEGGSIDHFFENGDELNEQMVQRLEAAREMGLVLRYVARFDANGKARVGVEAVREDYPLASLLPCDNVFAIESRWYRDNPLVIRGPGAGRDVTAGAIQSDINRLAQLL

SEQ ID NO: 669 - DNA, 2469 bp, Shewanella oneidensis MR-1
  CDS (1)..(2469): transl_table=11
atgaaagtaatgaaatttggtggtacctcgctggcaaattggcagcgattttcaatggcggcggatatcgtcgctaaagcggcaacaatggagcctgttgcaactgtgctctctgcgcctgcaaccgtgactaatgccctgctagaaatggtgaatttagcggtaaaaggcgaagattattcgcctgttattcagcatgttgagcgggtttttacctctctgtatcaagatgcggtgagttcaggtttatcgagtactcaaagtgagctgctttttgcaggtcttggcgcgcagcttgctcgttggcaagatagattacacggtatcacgttgctgcaagaatgtcctgacggtatatgtgccgaaatcgtggtggcgggtgagcgattatcggcggccctaatggaacaagttatgctggccaaaggtattacctcggcgcagcttgatccacgtaagctgtttttaggccgtggtcgtccgctcgagtcagtggtggatattgctgtcagtaagccgcgatttaagaatctgttgctcgatgaaaagcgtgtttgggtgatgcctggctttaccgcagccgatgaagatggcaaggtcgtgacgttagggcgtaatggttctgactactctgctgcggtgctggctgcttgtttagatgcctcaagctgtgagatttggacggatgtcgatggggtttacaataccgatcctcgcgtcgtagcagatgctaagttgttatcgcagttaagttatcaggaggcgatggaactatcgtattttggtgctaaggtactgcaccctaaaaccattgcaccgattgcccagtttcatattccttgttacatcaaaaacagctttaaccccgatgcgcctgggactttggtctcaaaccttgccgacgcaagtgggttacaagttaaagccatttcaaacctcgataatcaaacaatgtttgatgtttcaggccctggtatgaagggcatggtcggcatggcgagtcgcacactggcggcgatttcccgtagtggcgtttctgtgtctcttattacgcaaagttcttgcgaatacagcatcagtttctgtgtggcgaccagtgagtccgccaaggtgaaattggcgctggagcaagagtttgagttagaaatcaaaagtgatttactcgaaccgattgaaatgcgccatgacttagccattgtctcgttaattggcgatggtatgcgcacccataaaggtgtcgctgcgcgctttttccaagcgttagcgcaggcgagtgtgaatattattgcgattgcccaaggctcttctgaacgttctatttcaacagttatcgaacagcgtaagaccaaacatgcggtagccgcctgtcatcagggctttttcgatgtgcagcagtatttggatgtgtttttagtgggttgcggcaatgtgggcgcaggcttactcgagcagatcaaacaacaggcgatcgtgttaaaagagcagcatattagtatccgtgtctgcggtatcgtgaattcaagcaaaatgttactcgatagtgcgggaatcgatttaaacaattggcaaaacctgcttgccgacagtcagcagtcaagtgatcttcctgcattactggcgtgggtaaaagagcaacaattgttaaaccctgtgctggtggattgcacctcgagcgaacaagtatcgaaccagtatttagaggtaatgaacgccggcatgcatgtcgtcacgcccaataaaaaggctaacactcgcgattacgcctattaccaagctctgcgtcagaccgcgttgacacagcgccgtcagttcctgtacgagaccaacgtgggcgcgggattacccgttatcgataacttgaaaaaactgttattcgctggtgataaattacacaagtttaatggcattttgtcaggctctttatcctttatctttggcaagcttgatgaggggatgtcactttctgaggcgactaaactggcgcgggagaaatgctttactgagcccgatccccgtgatgatttaagtggcatggatgtggcgcgtaaggtactgattttggcccgtgaagtggggttgaaacttgagttaagtgatattgttgtcgactcagtcttgcctgaaagttttgatgattctggcgatgtggaaagttttatggcgcgtttacccgaggctgatgcggcgattgcggcgcgagtcgctgaggcgaaagcgcagggtaaagtgctgcgctatgtggggcagattgaagaaggcgcgtgccatgtgcgcatagccgaagtcgacgccaccgatccactttatagcgtaaaaggcggggaaaacgccctagcattctacagccgttattatcagcccattccctttgtgctgcgtggatatggtgcgggcacagaagtgacagcagctggtgcctttgctgatgtattaagaactttaaattggactcgtgaggtgagtgtatga

SEQ ID NO: 670 - protein, 822 aa, Shewanella oneidensis MR-1
MKVMKFGGTSLANWQRFSMAADIVAKAATMEPVATVLSAPATVTNALLEMVNLAVKGEDYSPVIQHVERVFTSLYQDAVSSGLSSTQSELLFAGLGAQLARWQDRLHGITLLQECPDGICAEIVVAGERLSAALMEQVMLAKGITSAQLDPRKLFLGRGRPLESVVDIAVSKPRFKNLLLDEKRVWVMPGFTAADEDGKVVTLGRNGSDYSAAVLAACLDASSCEIWTDVDGVYNTDPRVVADAKLLSQLSYQEAMELSYFGAKVLHPKTIAPIAQFHIPCYIKNSFNPDAPGTLVSNLADASGLQVKAISNLDNQTMFDVSGPGMKGMVGMASRTLAAISRSGVSVSLITQSSCEYSISFCVATSESAKVKLALEQEFELEIKSDLLEPIEMRHDLAIVSLIGDGMRTHKGVAARFFQALAQASVNIIAIAQGSSERSISTVIEQRKTKHAVAACHQGFFDVQQYLDVFLVGCGNVGAGLLEQIKQQAIVLKEQHISIRVCGIVNSSKMLLDSAGIDLNNWQNLLADSQQSSDLPALLAWVKEQQLLNPVLVDCTSSEQVSNQYLEVMNAGMHVVTPNKKANTRDYAYYQALRQTALTQRRQFLYETNVGAGLPVIDNLKKLLFAGDKLHKFNGILSGSLSFIFGKLDEGMSLSEATKLAREKCFTEPDPRDDLSGMDVARKVLILAREVGLKLELSDIVVDSVLPESFDDSGDVESFMARLPEADAAIAARVAEAKAQGKVLRYVGQIEEGACHVRIAEVDATDPLYSVKGGENALAFYSRYYQPIPFVLRGYGAGTEVTAAGAFADVLRTLNWTREVSV

SEQ ID NO: 671 - DNA, 2394 bp, Shewanella oneidensis MR-1
  CDS (1)..(2394): transl_table=11
atggcacgttgtcacttacataaatttggtggttccagcttagccgatgccgattgttaccgccgagtcgcccatattctgttaacccatggccacagtgatgatctggtggtggtgtctgccgcgggtaaaaccactaactttttatataagttgttgtcactgcgcgacagcaaccaattatggcaagaagaattacaagtccttatcagctatcagcaaggcttgattgagcagctgttatctaacgaacaagcgcgggatttacgtgagcgtttaaccacggataaagcccagttaatcagtctgttatctttagatgtacgtaatgattatcaaattagccatgtggtgagttttggtgagcgttggtcagcacggctgatggcagcgctgctgcgcgaatcgggtgtggccgcaagccatgtggatgcctgctcgattcttgtggccgacgaggccgccgtgccgcaaatccgtgtgcaagaatcccgcgccaaagtgcaagccttactggcggcccaccctaacgagcgcttagtgatcaccggttttatttgtgctaacgagcgcggcgataccttgctgcttggccgcaatggctctgactttagtgccagcttaattgctagccttgccgacattgagcgtgtgaccatttggaccgacgttgaaggggtatttaacgctgacccgaataagatcaacgatgcgaaattactcaagagcatgtccctcgccgaagccgaccgcttggcgcgtttaggctcacccgtgttgcattcacgcactttgcagccgctgtttaacactgaggtgagcttggctgtgcgctcaagctacgcctcccacaccgactttaccctgattgcgccgcacagttcctcagcgagtgcgcccgtggtgaccaatctaaatgccgtggtgttatttggctttaagattgcgggcgatgtggccagtttgcttgatcaattggtggaggcgggattaacgccactggcacattgggtatcggcgcatcaacgactcgaacttgcctataccgctgaaaaccaaaaacaagtacaaaagttattggatgcgcaggccgaagccctcggcattagagatctgcaaattaataccgaactcggtttagtggcgcttgtgagtgccgatgccgagcattatcgccgcagttttgcccgcttattgagccgcgatgctaagcccttgttcagtggtgatttaagtcttgtgaccttagtgccacagtcgcaggttaatctgctgacccaaaaagtgcatcgccgctgcgctggcccgcgcaaacgtattggggtattgctgctgggtgtgggcaatattggcgaggcgtgggtgaagctgtttaagtcagtttctccctcgttaaatcaagagcttgaagcgcaagtcgagttagtcggtctggtcacttccagtaaagccctgattaagtctaagggggtggatctacaaagctggcagcaagaattcgataacgaagcaacaccttggcagtatgagcatctatttgaacagttagaacaacttaactgtgatgaactgattgcattagatatcagcgccagcgccagtttaactctgcaatacccagagtttttcgagcgtggcatccatatggtcagcgcgaacaaactggcgggttcaggcccactgccgttctaccgcgagctgaaggaacaactcggttatcgccgtttattctggcgctataacgccagttgcggcgcgggcttacctattcagcacgccttaaacgatctgcgtaacagtggcgatagtgttgaagctgttggcgggattttctctggcactctttgctggttgtttgagaaatacgataccagcaaacccttctcggaattagtgattgaagcgcgtggtttagggattaccgaacccgatcctcgcgacgatctttctggccgcgatatgcagcgcaagttgctgattttagcccgtgaaatcggcctagaaatcgagcttgaggatattgagctgcgctccttagtgcctgctcatttagcggatattccgctggagcaattccttgcccgtatcggtgagctggatgatgaattattgcagcaatatggcgcagcggcggaacaaaacaaggtgctgagatatgtcgcttccttggataatagcggcgcagtcctcaaagccgaggtgggattacagtggattgatgcgagccacccctacgccaacctcacgcccggagacaatgtgtttgtgatccgctcagccttctatcaaggtaatcctttgatcattcgtgggccgggtgcgggccgtgaagtgacggcagcagcggtacaatcggatctaacacagatctgccgcgatcttctgcaagaatag

SEQ ID NO: 672 - protein, 797 aa, Shewanella oneidensis MR-1
MARCHLHKFGGSSLADADCYRRVAHILLTHGHSDDLVVVSAAGKTTNFLYKLLSLRDSNQLWQEELQVLISYQQGLIEQLLSNEQARDLRERLTTDKAQLISLLSLDVRNDYQISHVVSFGERWSARLMAALLRESGVAASHVDACSILVADEAAVPQIRVQESRAKVQALLAAHPNERLVITGFICANERGDTLLLGRNGSDFSASLIASLADIERVTIWTDVEGVFNADPNKINDAKLLKSMSLAEADRLARLGSPVLHSRTLQPLFNTEVSLAVRSSYASHTDFTLIAPHSSSASAPVVTNLNAVVLFGFKIAGDVASLLDQLVEAGLTPLAHWVSAHQRLELAYTAENQKQVQKLLDAQAEALGIRDLQINTELGLVALVSADAEHYRRSFARLLSRDAKPLFSGDLSLVTLVPQSQVNLLTQKVHRRCAGPRKRIGVLLLGVGNIGEAWVKLFKSVSPSLNQELEAQVELVGLVTSSKALIKSKGVDLQSWQQEFDNEATPWQYEHLFEQLEQLNCDELIALDISASASLTLQYPEFFERGIHMVSANKLAGSGPLPFYRELKEQLGYRRLFWRYNASCGAGLPIQHALNDLRNSGDSVEAVGGIFSGTLCWLFEKYDTSKPFSELVIEARGLGITEPDPRDDLSGRDMQRKLLILAREIGLEIELEDIELRSLVPAHLADIPLEQFLARIGELDDELLQQYGAAAEQNKVLRYVASLDNSGAVLKAEVGLQWIDASHPYANLTPGDNVFVIRSAFYQGNPLIIRGPGAGREVTAAAVQSDLTQICRDLLQE

SEQ ID NO: 673 - DNA, 2526 bp, Escherichia coli CFT073
  CDS (1)..(2526): transl_table=11
ttgaaaaacctccggctatgccggaggatatttatttcgaccaaaggtaacgaggtaacaaccatgcgagtgttgaagttcggcggtacatcagtggcaaatgcagaacgttttctgcgggttgccgatattctggaaagcaatgccaggcaggggcaggtggccaccgtcctctctgcccccgccaaaatcaccaaccatctggtagcgatgattgaaaaaaccattagcggccaggatgctttacccaatatcagcgatgccgaacgtatttttgccgaacttctgacgggactcgccgccgcccagccgggatttccgctggcacaattgaaaactttcgtcgaccaggaatttgcccaaataaaacatgtcctgcatggcatcagtttgttggggcagtgcccggatagcatcaacgctgcgctgatttgccgtggcgagaaaatgtcgatcgccattatggccggcgtgttagaagcgcgtggtcacaacgttaccgttatcgatccggtcgaaaaactgctggcagtgggtcattacctcgaatctaccgttgatattgctgaatccacccgccgtattgcggcaagccgcattccggctgaccacatggtgctgatggctggtttcactgccggtaatgaaaaaggcgagctggtggttctgggacgcaacggttccgactactccgctgcggtgctggcggcctgtttacgcgccgattgttgcgagatctggacggatgttgacggtgtttatacctgcgatccgcgtcaggtgcccgatgcgaggttgttgaagtcgatgtcctatcaggaagcgatggagctttcttacttcggcgctaaagttcttcacccccgcaccatcacccccatcgcccagtttcagatcccttgcctgattaaaaataccggaaatcctcaagcaccaggtacgctcattggtgccagccgtgatgaagacgaattaccggtcaagggcatttccaatctgaataacatggcaatgttcagcgtttccggcccggggatgaaagggatggttggcatggcggcgcgcgtctttgcagcgatgtcacgcgcccgtatttccgtggtgctgattacgcaatcatcttccgaatacagtatcagtttctgcgttccgcaaagcgactgtgtgcgagctgaacgggcaatgcaggaagagttctacctggaactgaaagaaggtttactggagccgttggcggtgacggaacggctggccattatctcggtggtaggtgatggtatgcgcaccttacgtgggatctcggcgaaattctttgccgcgctggcccgcgccaatatcaacattgtcgccattgctcagggatcttctgaacgctcaatctctgtcgtggtcaataacgatgatgcgaccactggcgtgcgcgttactcatcagatgctgttcaataccgatcaggttatcgaagtgtttgtgattggcgtcggtggcgttggcggtgcgctgctggagcaactgaagcgtcagcaaagctggttgaagaataaacatatcgacttacgtgtctgcggtgttgctaactcgaaggcactcctcaccaatgtacatggccttaatctggaaaactggcaggaagaactggcgcaagccaaagagccgtttaatctcgggcgcttaattcgcctcgtgaaagaatatcatctgctgaacccggtcattgttgactgtacttccagccaggcagtggcggatcaatatgccgacttcctgcgcgaaggtttccacgttgttacgccgaacaaaaaggccaacacctcgtcgatggattactaccatcagttgcgttatgcggcggaaaaatcgcggcgtaaattcctctatgacaccaacgttggggctggattaccggttatcgagaacctgcaaaatctgctcaatgctggtgatgaattgatgaagttctccggcattctttcaggttcgctttcttatatcttcggcaagttagacgaaggcatgagtttctccgaggcgaccacactggcgcgggaaatgggttataccgaaccggacccgcgagatgatctttctggtatggatgtggcgcgtaagctattgattctcgctcgtgaaacgggacgtgaactggagctggcggatattgaaattgaacctgtgctgcccgcagagtttaacgccgagggtgatgtcgccgcttttatggcgaatctgtcacagctcgacaatctctttgccgcgcgtgtggcgaaggcccgtgatgaaggaaaagttttgcgctatgttggcaatattgatgaagatggcgtctgccgcgtgaagattgccgaagtggatagtaatgatccgctgttcaaagtgaaaaatggcgaaaacgccctggccttctatagccactattatcagccgctgccgttggtactgcgcggatatggtgcgggcaatgacgttacagctgccggtgtctttgctgatctgctacgtaccctctcatggaagttaggagtctga

SEQ ID NO: 674 - protein, 841 aa, Escherichia coli CFT073
MKNLRLCRRIFISTKGNEVTTMRVLKFGGTSVANAERFLRVADILESNARQGQVATVLSAPAKITNHLVAMIEKTISGQDALPNISDAERIFAELLTGLAAAQPGFPLAQLKTFVDQEFAQIKHVLHGISLLGQCPDSINAALICRGEKMSIAIMAGVLEARGHNVTVIDPVEKLLAVGHYLESTVDIAESTRRIAASRIPADHMVLMAGFTAGNEKGELVVLGRNGSDYSAAVLAACLRADCCEIWTDVDGVYTCDPRQVPDARLLKSMSYQEAMELSYFGAKVLHPRTITPIAQFQIPCLIKNTGNPQAPGTLIGASRDEDELPVKGISNLNNMAMFSVSGPGMKGMVGMAARVFAAMSRARISVVLITQSSSEYSISFCVPQSDCVRAERAMQEEFYLELKEGLLEPLAVTERLAIISVVGDGMRTLRGISAKFFAALARANINIVAIAQGSSERSISVVVNNDDATTGVRVTHQMLFNTDQVIEVFVIGVGGVGGALLEQLKRQQSWLKNKHIDLRVCGVANSKALLTNVHGLNLENWQEELAQAKEPFNLGRLIRLVKEYHLLNPVIVDCTSSQAVADQYADFLREGFHVVTPNKKANTSSMDYYHQLRYAAEKSRRKFLYDTNVGAGLPVIENLQNLLNAGDELMKFSGILSGSLSYIFGKLDEGMSFSEATTLAREMGYTEPDPRDDLSGMDVARKLLILARETGRELELADIEIEPVLPAEFNAEGDVAAFMANLSQLDNLFAARVAKARDEGKVLRYVGNIDEDGVCRVKIAEVDSNDPLFKVKNGENALAFYSHYYQPLPLVLRGYGAGNDVTAAGVFADLLRTLSWKLGV

SEQ ID NO: 675 - DNA, 2460 bp, Vibrio vulnificus CMCP6
  CDS (1)..(2460): transl_table=11
atgcgagtattaaagtttggtggctcatcgttagccgatgcagaccgctttttaagagcggcggacattgttgctaacaatgccaagcaggaagaagtttctgtagtgttgtcggcgccagggaaaacaaccaataaattggtcgcggtcattgagtctgcactgaaaaatggcgaagcagaacgacaagtcgacgagctagacagtgcgttcaaacaactactgagtgatattaaacagcagcttcctagccttaacggtgacgcgtatttaaagcaagtcgcggattcactttcgcaactgcgtcaatttgttcatggtatcggcttgttggggatgtgtcctgacaacgtcaatgctcgcatcatcagtaaaggtgagcgtgtttccatccagttgatgaaggcggtgttggaagcaaaaggtcatctcgttaatcttattgacccggttgactacttgcttgcccatggtgatcacctcgaagggatggtggatgtcgatgtatctacgcaaaacttccgttcaaatcctcttcctcaggggcacgttcatatcatgccaggctttaccgcgggcaataagcatggtgagttggttactctaggtcgtaatggttccgattactcagcagccgtgttagcggcatgtctgcgcgcggattgttgtgagatctggacggatgtggatggggtgtacaactgtgacccgcgtttagtcgaagatgctcgcttattgaagtccttaagctatcaagaggccatggagctttcatactttggcgcatccgttttgcatcccaaaaccattgcgccaattgctcaatttcatattccatgtttgattaagaacagcttcaatcctcaaggtgctggtacgctgattggccaagatacaggcgaagataatctagcgatcaaaggcatcactacgctcaataacctgacgatggtcaacgtgtccggaccgggaatgaaaggcatggttggtatggcgagccgagtatttggtgcgatgtcggcctctggcgtgtcaatcgttctgattactcagtcttcttctgagtacagtatcagcttctgtattgaagctgccgacagacctttagccgagcaggcactctcagatgcttttgagttggaactgaaagatggtctattggagcccgtcgagttcctgactaatgtctctatcatcacgctggtgggtgatggtatgcgcacttccaaaggtgtcgcatcacaattctttgcttctcttgcggaagtgagtgtcaatgtcatcgctattgctcaaggttcgtcagaacgcgctatttcagcggtgatcccagaggataagatctctcaagcgatcaaagcgtgtcatgaaaatctcttcaactcgaaacattaccttgatgtgtttgttgttggtgtcggtggtgttggtggtgagttggtggatcagatccagcgtcagcaagccaaactggcagacaaaggcattgtcatccgagtgtgtggtttggccaatagcaaagggctgttgttagacagtaatggcttaccactggaacattggcgtgaccgcatggccaatgcatctgaagcgtttagccttgccagtttgattgccactgtgcagcgtaaccatatcatcaaccctgtgctcgtcgattgtacttctagcgacgtgattgctaaccaatacgcagagtttttagccgctggtttccatgttgtgacgccaaataagaaagcaaataccgcgagtatggcgtattaccatcagctacgcgatgtggcacgcagctctcgtcgtaagttgatgtatgaaaccacggttggtgcaggcttgcctgtgatcgagaacttgcaaaatctgatttctgccggagatgagttggagcgattcagcggcattctctctggttcactttcctttatcttcggtaagttggatgaaggcatgacgttgagtgaggcgaccaatatcgccaaacaaaatggctttacagagccggatcctcgtgatgatctgtccggaatggatgtggcgcgtaaactgttgatcttggcgcgtgaagcgggcatggcattagagctggaagatgtcgaagtggatcaagccttgccaccaagttttgatgattcaggcagtgtcgatgaatttatggctcgactaccggaagctgatgcgtacttcaagcaactttctgcgcaagcggccgaagaaggcaaggtactgcgttatgtcggtgaaatcatcgatggtaagtgcaaagtctcgatcgctgcggtagatgaaaatgatccgatgttcaaaattaaagatggtgaaaatgcgttagcattctacagccgttactatcagccgatcccgttagtattgagaggttacggtgccggtactcaagtgactgcggcaggcgtgttctcagatgtgatgcgtactttaggctggaaattaggggtttaa

SEQ ID NO: 676 - protein, 819 aa, Vibrio vulnificus CMCP6
MRVLKFGGSSLADADRFLRAADIVANNAKQEEVSVVLSAPGKTTNKLVAVIESALKNGEAERQVDELDSAFKQLLSDIKQQLPSLNGDAYLKQVADSLSQLRQFVHGIGLLGMCPDNVNARIISKGERVSIQLMKAVLEAKGHLVNLIDPVDYLLAHGDHLEGMVDVDVSTQNFRSNPLPQGHVHIMPGFTAGNKHGELVTLGRNGSDYSAAVLAACLRADCCEIWTDVDGVYNCDPRLVEDARLLKSLSYQEAMELSYFGASVLHPKTIAPIAQFHIPCLIKNSFNPQGAGTLIGQDTGEDNLAIKGITTLNNLTMVNVSGPGMKGMVGMASRVFGAMSASGVSIVLITQSSSEYSISFCIEAADRPLAEQALSDAFELELKDGLLEPVEFLTNVSIITLVGDGMRTSKGVASQFFASLAEVSVNVIAIAQGSSERAISAVIPEDKISQAIKACHENLFNSKHYLDVFVVGVGGVGGELVDQIQRQQAKLADKGIVIRVCGLANSKGLLLDSNGLPLEHWRDRMANASEAFSLASLIATVQRNHIINPVLVDCTSSDVIANQYAEFLAAGFHVVTPNKKANTASMAYYHQLRDVARSSRRKLMYETTVGAGLPVIENLQNLISAGDELERFSGILSGSLSFIFGKLDEGMTLSEATNIAKQNGFTEPDPRDDLSGMDVARKLLILAREAGMALELEDVEVDQALPPSFDDSGSVDEFMARLPEADAYFKQLSAQAAEEGKVLRYVGEIIDGKCKVSIAAVDENDPMFKIKDGENALAFYSRYYQPIPLVLRGYGAGTQVTAAGVFSDVMRTLGWKLGV

SEQ ID NO: 677 - DNA, 2487 bp, Xylella fastidiosa Temecula1
  CDS (1)..(2487): transl_table=11
ttgtccaccgttgaaactcctgtctacgttccgcgtaccgtcgttcacaaattcggtgggacttcggttgccgatgcggattgctatcgccatgtcacgcgtctcctattagcacgcgaagagactgtgcaggtcaccatcgtttctgcgatgaaaggggtgactgatacgttgattgcactggccgaacaggcagccaatcattctcccgactggcaggtgttgtggcagcaaacccgcacgcgtcattgcgacgccgctcaggcattgcttggagagcatgccgctacgctgcaagattggttgaatacccgttttaatgaactgcatgaaatgctggtggccttgtccgtcatcgggatgcttccatctgaagtgctggaccgcttacaaggcttgggcgaggtctactccgcacagttgcttgggcattatttgcaatcccagggtgaggattgtgtcgttctggatgcccgccaagtccttgtggtgagtcctggtgagtttggcgccgaagtcgattgggcaaccagtgcccagcacttggcccattggcgtatgcagcatccacagcggcgtgtggtggtcaccggtttcgttgcctctgatcgtactggacgcgccatcaccctgggtcgcaacggcagtgattattccggtgccatcttcgcggcgttgtttgaggccgatgagcttcacatctggacagatgttgatggagtcatgtccgccgacccccgggtcgtcccggatgcggtgcaactggatgccttgagttacgacgaagcatgtgaattggcctatttcggcgccaaggtagtgcatccacaaaccatgtcgccggtgatgaaacgcggagtgccgatcatcattcgaaacaccttccaacccggacatccagggactcggatcaccgctgatagcgtggtgagtggatctgttaaaggcctgaccctgagtccaggactggccgtgctgaacctggaaggcacggggctgatcggagtccctggtaccgctgaacgcgtgtttgccgccctgcgtaatgcacgtttgtctgtcgtgatgatctcacagggatcttcggagcattccatttgctgcctcgtgcaccaaaccgaggccgagcgtgcacgtgatgcgttgttgtatgcctttgcccatgaattggccatagggcatgtccagcgcgtacaactgaccaacaatatcagcgtattggcggcggttggcgacggcatggctggtcacctgggtgtagcggcgcgcttgtttgaatccttaaggcgcgcccatgtcaacatcctggccattgcccaggggtcttcagagcgcaatatttcggtggcaatcgacagtcagcaggcgacgaaggcactgcgcgctgcacacgctgctttctggttatcaccccagacattttcgattggtgtgattggtccgggtcacgttggtgaggccctgttggaccagctatgtgctgcacagcagcaattactgtccaaggcaaatctggatctgcgtttgcgtgcgatcgtttcacggcggcgtatgttattggatgagcgtggcctggggagtgactggcgccacgccttcgccgccgcaccagaggcggtcgatctggatgcctttaccgcacacttacaggccgcccatctgcctcatgcagtcatcattgactgtagcggcagtgctgaggtggctgatcgctatgccgactggctggcagccggtatccatgtcgtgacaccgaataaacaggctggctccggccccctgcatcgctaccacgcgattcgtgcagcagcagatgccagcggcgcacgctttcgctatgaagccacagtgggcgcaggcttaccggtgattacgacattgcgtgacttgatggataccggtgatagcgtcacctcaatcgaagggatcttttccggaactctggcgtggctattcaataaatatgatggcagcgtcccattctcccaattaatcgcccaggcgcgagcgatgggatataccgagccggatccacgcgatgacctgtctggggttgacgtggcgcgtaagctggtgattctggcgcgcgatgcggggcgtgatatcagcctagaagatgttgcggtagaaagcctggtgccggagacattgtgtcaactcagcgttgccgatttcatggaacgactcaatgaaattgatgccacctttgcagagcgtttggctgcggccaaacagcgcggttgcgtattgcgttacgtcgcacaactgtcccctggacacgtccctagtgtcagcttgattgaattgccttctgaccatgccttcgtcaatcttcgtttgaccgataacgtagtgcaatttacaactcgtcgttattccgaaaaccccttgatcgtacagggccctggcgccggtccagaggtcaccgcagccggtgtttttgcggatttactgcgagttgcagcgggcgagggcgcacgcttgtga

SEQ ID NO: 678 - protein, 828 aa, Xylella fastidiosa Temecula1
MSTVETPVYVPRTVVHKFGGTSVADADCYRHVTRLLLAREETVQVTIVSAMKGVTDTLIALAEQAANHSPDWQVLWQQTRTRHCDAAQALLGEHAATLQDWLNTRFNELHEMLVALSVIGMLPSEVLDRLQGLGEVYSAQLLGHYLQSQGEDCVVLDARQVLVVSPGEFGAEVDWATSAQHLAHWRMQHPQRRVVVTGFVASDRTGRAITLGRNGSDYSGAIFAALFEADELHIWTDVDGVMSADPRVVPDAVQLDALSYDEACELAYFGAKVVHPQTMSPVMKRGVPIIIRNTFQPGHPGTRITADSVVSGSVKGLTLSPGLAVLNLEGTGLIGVPGTAERVFAALRNARLSVVMISQGSSEHSICCLVHQTEAERARDALLYAFAHELAIGHVQRVQLTNNISVLAAVGDGMAGHLGVAARLFESLRRAHVNILAIAQGSSERNISVAIDSQQATKALRAAHAAFWLSPQTFSIGVIGPGHVGEALLDQLCAAQQQLLSKANLDLRLRAIVSRRRMLLDERGLGSDWRHAFAAAPEAVDLDAFTAHLQAAHLPHAVIIDCSGSAEVADRYADWLAAGIHVVTPNKQAGSGPLHRYHAIRAAADASGARFRYEATVGAGLPVITTLRDLMDTGDSVTSIEGIFSGTLAWLFNKYDGSVPFSQLIAQARAMGYTEPDPRDDLSGVDVARKLVILARDAGRDISLEDVAVESLVPETLCQLSVADFMERLNEIDATFAERLAAAKQRGCVLRYVAQLSPGHVPSVSLIELPSDHAFVNLRLTDNVVQFTTRRYSENPLIVQGPGAGPEVTAAGVFADLLRVAAGEGARL

SEQ ID NO: 679 - DNA, 2409 bp, Vibrio parahaemolyticus RIMD 2210633
  CDS (1)..(2409): transl_table=11
atgagtgtacaacgtcagttacataaatttggtggcagcagcttagcaaaccctgaatgttacttacgtgtggccgatattctcaaagaatactctgccgagaatgatctggtggtggtatccgccgcagggaagaccactaatcgcttgatcgagtttctggaaggtttagacaaagatggccgtattgcgcatgaagcactacaaggcttaagacaattccagtcggagctaattgaatctctattagaaggcgaggtgcagacgcaattgctcgcttctttgcacgatgagttcagtaccttagccgagctgactgcgccactgacggatgcgcaaaaagcggcagtgttgggtcacggtgaagtgtggtcttcacgtttattggctgccttgctttcacaacaaaatgttcctgcggtcgcacaagatgcacgtgcatttttacgtgcagaagccggtactcaaccggaagttgaccgtgcgcgttcttatcccctgattaaggaggcgttggcgcaacacagccacaaacgcgtcatcattactggatttatggcgcaaaatgaggcaggagaaaccgtgctgttggggcggaatggctcggattattccgcaaccgtaatcggagctttggcggaagtgacaaccgtaaccatttggagtgatgttgctggcgtttacagtgcggatcctcgtttggtgtcggacgcatgtctgttgcctttactgcgcttagacgaagcgagtgaactggcccgccttgcagcgccggttttgcatagccgtacgttacaacctgtcgcgcaaagcacgatggacttaagcctcaagtgcagttatcaacctgaatcaggttcaacacgtattgagcgtgtacttgcttctgggcgtggagcaaaaatcatcacttctttggatgaggtattgttgattcaattgtcctttagacatggtcatgacttcaacaaaacccaaagtgatgttttaaagtctcttcaacgtgcgcaactcgagccactctcttacgaagtccaagccgatcagcaaaaattacgcttagcgtacaccgcagagattgcgacaggtgcgctgaagtatctacaagatcttgcggttgaagctgaaatcaaactcaaagaaggctattcacttgtggccgctgtcggagcgggcgtaacgaagaatgccaaccattgttttggtttttaccaaaaattgaagcacgcaccagttgaatttgtttctgaaactgaatcaggtttaagcctagttgcggtactacgtcgcaccgataccgaagcattagtgcagttgattcacagccagttattccaagcgcaaaagcgcgtagcggtaacgttatgtggcaaaggcaatatcggttctagctggttaaatctatttgcgattcagaaaacagaactcgaaaaacgccacggtatgagctttgacttagtcgccgttgtcgatagccagacatattggtttgatgaaaagggtattgatgcggcggcggttgccgacaagtttgatgatgaaagtattgagaacgatgggacgtggctgagtcggttaggcgatttacaaggttatgatgaagccgtggtattggacgtgaccgcgagcaaagagttggcgcaacgttatgttgatatcgctcagcaaggcattcatttaatttctgctaacaaagttgcaggctctgccgacagtcagtactaccatcaagtgcaagatgcattcgcgaaaatcggtcgttactggctctacaacgcgacggttggggctgggttacctatcaaccataccgtgcgagatctgcgtgaaagtggtgacgagattgtggcgctatccggaatcttctcgggaacactttcttggctgttccagcagtttgatggctcggtgccgtttaatgagttggtcgatttagcgtggcaacaaggattaacagaaccggatccgcgtgctgatttagatggttcggatgtcatgcgtaaactggttatcttagcgcgtgagtctggtctggatattgaaccggatagcgtaaaagtggaatcactggtgcctgaagagctgcgctctctgagtttggatgagttctttgataatggcgcactgctcagtgagattcttcaagagcgtctaaccaaagcacaaagagatgagcaggtgcttcgatatgtggcgcgcttagagaaaaatggcaaagcgacggtgggcgtagaagcattaccgcgcgaacatgctctggctaacttgctgccatgcgacaacatttttgcgattgaaagtaaatggtacaaggacaaccctttggtgattcgtggcccaggtgcaggacgcgaggtgaccgctggtgcaatccaatcggatctcaaccgcttagctggattattctaa

SEQ ID NO: 680 - protein, 802 aa, Vibrio parahaemolyticus RIMD 2210633
MSVQRQLHKFGGSSLANPECYLRVADILKEYSAENDLVVVSAAGKTTNRLIEFLEGLDKDGRIAHEALQGLRQFQSELIESLLEGEVQTQLLASLHDEFSTLAELTAPLTDAQKAAVLGHGEVWSSRLLAALLSQQNVPAVAQDARAFLRAEAGTQPEVDRARSYPLIKEALAQHSHKRVIITGFMAQNEAGETVLLGRNGSDYSATVIGALAEVTTVTIWSDVAGVYSADPRLVSDACLLPLLRLDEASELARLAAPVLHSRTLQPVAQSTMDLSLKCSYQPESGSTRIERVLASGRGAKIITSLDEVLLIQLSFRHGHDFNKTQSDVLKSLQRAQLEPLSYEVQADQQKLRLAYTAEIATGALKYLQDLAVEAEIKLKEGYSLVAAVGAGVTKNANHCFGFYQKLKHAPVEFVSETESGLSLVAVLRRTDTEALVQLIHSQLFQAQKRVAVTLCGKGNIGSSWLNLFAIQKTELEKRHGMSFDLVAVVDSQTYWFDEKGIDAAAVADKFDDESIENDGTWLSRLGDLQGYDEAVVLDVTASKELAQRYVDIAQQGIHLISANKVAGSADSQYYHQVQDAFAKIGRYWLYNATVGAGLPINHTVRDLRESGDEIVALSGIFSGTLSWLFQQFDGSVPFNELVDLAWQQGLTEPDPRADLDGSDVMRKLVILARESGLDIEPDSVKVESLVPEELRSLSLDEFFDNGALLSEILQERLTKAQRDEQVLRYVARLEKNGKATVGVEALPREHALANLLPCDNIFAIESKWYKDNPLVIRGPGAGREVTAGAIQSDLNRLAGLF

SEQ ID NO: 681 - DNA, 2436 bp, Bacteroides thetaiotaomicron VPI-5482
  CDS (1)..(2436): transl_table=11
atgaaagtaatgaaattcggcggaacgtccgtaggttccgtgaacagcattttaagtgtaaagagaattgtagagtcggccggcgagccggtaattgtagttgtttccgcgttagggggcatcactgacaaattgattaatacatcgaagatggcggcagccggagattcggcctacgaaggagagttccgcgaaatcgtctatcgtcatgtggagatgattaaagaagtgatacctgccggagcagggcaagtggcattgcaacgtcagattggcgaattgctgaatgagttgaaagacattttccagggtatctatctgatcagagacctttccccgaaaacatcggataccattgtcagctatggcgaacgtctttcgtccatcatcgttgccgaactgatcgatgaggcaaaatggtttgattcacgtacttttatcaagactgaaaagaagcataataaacatacgattgatgccgatctgactaatcagttggtaaaagaggctttccattccattccgaaagtgtcgttggttcccggatttatttcttcggataaggtgtcgggagacgtaacgaatctcggtcgtggtggttcggattatacggctgccattattgccgcagcgctcgatgccagcagtctggagatatggaccgatgtagacggctttatgactgccgatccgcgtgtgatctcaacagcttatactatttccgaactgagctatgtagaagcaaccgaactctgtaacttcggtgcgaaagttgtttatccgccgacgatctatccggtatgtcataagaatattcctattataataaagaatacgttcaatcctgacggagtgggaacagttatcaagcaagagacttccaatccgcagagtaaggccattaaaggtatttcctctatcaatgatacgagtctgatcactgttcaggggctgggtatggtaggtgtgatcggtgtaaactaccgtatcttcaaggctttggcaaagaatggaatcagtgtattccttgtttcgcaggcttcatcagagaacagtacctctatcggtgttcggaacgctgatgccgatctggcttgtgaagtgctgaatgaagaatttgcgaaagagatcgagatgggagagatttctccgatccttgcagagagaaatctggctacggtggcaatcgttggcgagaatatgaagcatacaccgggtatagcagggaagctcttcggtacactgggacgtaatggtatcaatgtaatcgcttgtgcgcagggagcttcggaaaccaacatttcttttgttgtcgattccaagtcattgcgtaaatctctgaacgttatccatgactctttcttcctgtccgaatatcaggtattgaatctctttatctgtggtatcggtacggttggcggcagtctggtagaacagattcgttgccagcaacagaaactgatgatggagaacggattgaagttgcacgtcgtaggtatcatcgatgctgcgaaagccatgttcagtcgtgagggatttgaccttgccaatttccgtgaggagttgcagaagaaaggcaaggatagtaacttgcagacgatccgtgacgaaatagtcggaatgaatatcttcaactccgtattcgtggattgtacggcaagccccgacattgcatcactttacaaagaccttttacagcacaacgtttccgtagtggcagccaataagatcgctgcgtcttcggcttacgagaactatcgcgaactgaaaacgattgcccgtcaacggggtgtgaagtacttgtttgaaacaaacgtaggtgcgggactgccgattatcaataccatcaacgacctgattcacagtggtgataagatactgaagattgaagctgtactttcgggtacattgaactatatctttaataagatcagcgctgacattcctttcagccgcacgatcaagatggcacaggaagaacgctattccgaaccggacccgcgtatcgacctgagcggaaaagacgtgatccgcaaactggtgattctggcacgtgaagccggatatcacatcgagcaggaagacgtagaaaagaatctctttgtcccgaacgacttcttcgaaggttcgctggatgacttctggaaacgagtgccgagcctcgacgcagacttcgaagcccgtcgtcaggtattggagaaagaacataaacattggcgctttgttgccaaactggaagacggaaaagcctctgtcggcctgcaggaagtgggtgccaaccatccgttctacggactggaaggcagcaacaacatcatcttgctgactacggaacgctataaagaatatccgatgatgattcaaggatacggtgccggtgccggagtaacggctgcgggagtattcgctgatatcatgagtatcgcaaacgtttaa

SEQ ID NO: 682 - protein, 811 aa, Bacteroides thetaiotaomicron VPI-5482
MKVMKFGGTSVGSVNSILSVKRIVESAGEPVIVVVSALGGITDKLINTSKMAAAGDSAYEGEFREIVYRHVEMIKEVIPAGAGQVALQRQIGELLNELKDIFQGIYLIRDLSPKTSDTIVSYGERLSSIIVAELIDEAKWFDSRTFIKTEKKHNKHTIDADLTNQLVKEAFHSIPKVSLVPGFISSDKVSGDVTNLGRGGSDYTAAIIAAALDASSLEIWTDVDGFMTADPRVISTAYTISELSYVEATELCNFGAKVVYPPTIYPVCHKNIPIIIKNTFNPDGVGTVIKQETSNPQSKAIKGISSINDTSLITVQGLGMVGVIGVNYRIFKALAKNGISVFLVSQASSENSTSIGVRNADADLACEVLNEEFAKEIEMGEISPILAERNLATVAIVGENMKHTPGIAGKLFGTLGRNGINVIACAQGASETNISFVVDSKSLRKSLNVIHDSFFLSEYQVLNLFICGIGTVGGSLVEQIRCQQQKLMMENGLKLHVVGIIDAAKAMFSREGFDLANFREELQKKGKDSNLQTIRDEIVGMNIFNSVFVDCTASPDIASLYKDLLQHNVSVVAANKIAASSAYENYRELKTIARQRGVKYLFETNVGAGLPIINTINDLIHSGDKILKIEAVLSGTLNYIFNKISADIPFSRTIKMAQEERYSEPDPRIDLSGKDVIRKLVILAREAGYHIEQEDVEKNLFVPNDFFEGSLDDFWKRVPSLDADFEARRQVLEKEHKHWRFVAKLEDGKASVGLQEVGANHPFYGLEGSNNIILLTTERYKEYPMMIQGYGAGAGVTAAGVFADIMSIANV

SEQ ID NO: 683 - DNA, 2457 bp, Candidatus Blochmannia floridanus
  CDS (1)..(2457): transl_table=11
atgcgagtattaaaatttggaggaacttcattatctaatgcaagccaatttatacatgttgctaatattcttgaaaaaaatgctcagaaagaacaaatagcagtagtattgtcagcccctgcacgcgttaccaattatttagttgaagctattaataatacattacgtggtaataatatattagagagtgttttaaatatagaaaatatttttaatactttactgaaggatattgctcaatttcagtctaaatttaattatgtagtttttcataacactttaaaacaggaatttaatagtttaaaacaattattacaaggtatttcgttacttaatttttgccctgacagtgtaaatgctcatattatttgtttaggagaaaaatggtctgtaattttaatgcaagggattttaattgcaaaagatcttaaaataataaatttagatccagttaaatctattttaactcagggtgatgggtattctacatctgtagtaaatatcgaggaatcgacttgtcgtattcataatgtgcttttatctcattatgcagatattattttgatggctggatttatggctggaaataaaaaaggagaattagttacgttaggacgtaatggctctgattattcagcggctattttggcagcttgtttgcaggctaggcgctgtgaaatttggacagatgtagatggaatttatacttgtgatcctcgtcaagtgcctgatgcaaggttattacatgaattatcttatcaagaagctatggagctttcttattttggagctaaaattttacatccacgtactattgtgccaatcgctcaatttcatataccatgtttaataaaaaatacttcaaaacctgatttttctggaacgttaattagcgcaaagaataaagatataaatattatagctaaaggtattacgtatttaaaagatatggttatgataaatgtttccggtccaggtatgaaaggtatgattggaatggctgcgcgagtatttgcagcaatgtctagagcaacatgctcagttgtattaattactcaatcatcttcagagtacagtattagtttttgtgttccatatcaagaatatgcaaaagcatgtgatgcattagatgaagaatttaatttggaattaaaaaatggattattagaacctataggagttatatgtgatttagcgattatttcagttgtaggtgatggtatgcgtactcaattaggattatctggaaaattatttggagctttagctcgagcaagtataaatattattgcaatttcacaaggttcatcagaacgttctatttctgtagttgtaaaaaataatgttactactataggtgtgaaagctgtacaccaaacattgtttaatactgatcaaattattgaagtatttattattggagttggaggagttggtagtgctttgatagaacaaattaaaaaacagtatagttggttaaaaaataaacatattgatttacgagtatgcggaattgttaattctcaggttatgttaactgattcagatggtataaatttaaataattggaaatcattattaatacagtcttgcaagtctagtgatttagagaaattaattattactattaagcaatatcatttgttaaatcctgtaattgtagattgtacgagtagtgaaaaggtagcaaattattatgtaaattttttatcaggtggatgtcatgtgattgctcctaataaaaaagctaatactggacctataggatattatcgtaaactcagggaaacgatggttatagctcgtagaaaatttttatatgatacaaatgtaggagctggtttaccagtaatagaaaatttacaaaatttattgaatgctggagatgaattaataaaattttcaggaattttgtctggatctttatcttatatttttgggaaattagatgaaggtttatcattgtctgaagctactattttagctaaaaagaatggttacactgaacctgatccaagagatgacttatctggtatggatgtggctagaaaattattaattcttgctagagaggtaggatatgtgctagaaatgaaagatattaaaattgaaccagtaatacctgataattttataaagaatgatgttatttctgtagataatttttttgagaaattattatcattagataatatgtttactcttaaagtaaaaaaagcacgggaatctggttgtgtattgcgttatattggtaatatacaagaaggtaagtgttgtgttaaaatggaatctgtaaatgatgagcatcctttatttcaagtgaaagatggagagaatgctctagcatttttgacaaagtattatcaaccattgccattgatattaaggggttatggagctggaaataacgttacagcagctggtgtttttgctgatttgttacgaactgtatattag

SEQ ID NO: 684 - protein, 818 aa, Candidatus Blochmannia floridanus
MRVLKFGGTSLSNASQFIHVANILEKNAQKEQIAVVLSAPARVTNYLVEAINNTLRGNNILESVLNIENIFNTLLKDIAQFQSKFNYVVFHNTLKQEFNSLKQLLQGISLLNFCPDSVNAHIICLGEKWSVILMQGILIAKDLKIINLDPVKSILTQGDGYSTSVVNIEESTCRIHNVLLSHYADIILMAGFMAGNKKGELVTLGRNGSDYSAAILAACLQARRCEIWTDVDGIYTCDPRQVPDARLLHELSYQEAMELSYFGAKILHPRTIVPIAQFHIPCLIKNTSKPDFSGTLISAKNKDINIIAKGITYLKDMVMINVSGPGMKGMIGMAARVFAAMSRATCSVVLITQSSSEYSISFCVPYQEYAKACDALDEEFNLELKNGLLEPIGVICDLAIISVVGDGMRTQLGLSGKLFGALARASINIIAISQGSSERSISVVVKNNVTTIGVKAVHQTLFNTDQIIEVFIIGVGGVGSALIEQIKKQYSWLKNKHIDLRVCGIVNSQVMLTDSDGINLNNWKSLLIQSCKSSDLEKLIITIKQYHLLNPVIVDCTSSEKVANYYVNFLSGGCHVIAPNKKANTGPIGYYRKLRETMVIARRKFLYDTNVGAGLPVIENLQNLLNAGDELIKFSGILSGSLSYIFGKLDEGLSLSEATILAKKNGYTEPDPRDDLSGMDVARKLLILAREVGYVLEMKDIKIEPVIPDNFIKNDVISVDNFFEKLLSLDNMFTLKVKKARESGCVLRYIGNIQEGKCCVKMESVNDEHPLFQVKDGENALAFLTKYYQPLPLILRGYGAGNNVTAAGVFADLLRTVY

SEQ ID NO: 685 - DNA, 2460 bp, Photorhabdus luminescens subsp. laumondii TTO1
  CDS (1)..(2460): transl_table=11
atgcgagtacttaaatttggaggaacttcggtcgctaattaccagcgggtgttgagcgttgccgacattgcagagaaaaaattttctcaaggcggggtcgcgttggtgctttctgctccggcaaaaattaccaatcatttagtggctatgattgaaaaaacggtcgccgggcaagagatcattacccatatgcacgatgctgagcagatctttgttgatttattacaggggatggcacgggcgcaacccggttttgcttatgaacggttaaaaatgatggttgagcaagaatttgctcaattgaaacaggttctgcatggtatttcgttactgggccaatgcccggacagcattaacgcttccctgatttgtcgtggggaaaaactctctatcgctatcatggagtctgtattgcaggcacgtggtcacaaggtcacggtgattgatccggtagaaaatttgttggcacaaggtcattaccttgaatctacggtagatatcaacgagtctactaagcgcattgcttctctgaatattccagatgaccatattgtcctgatggctggatttacggctggaaatgataaaggggagctcgttgtcttggggcgtaatggttctgactattctgctgcggttttggcggcttgcttgcgggcgacatgttgtgaaatctggactgatgtggatggtgtttatacttgtgatcccagagttgtgccggatgcacggttattaaaaggcatgtcctatcaggaagcgatggagctctcttattttggtgccaaggtattgcatccacggaccattgcgccaattgctcaatttcagatcccttgcttgattaaaaataccgccaatccagatgcgccgggaacactgatcggcgatgggcaaaaagatgaaagtacgccggtaaaagggataaccaacctgagcaatatggcaatgattaacgtatcaggtccaggtatgaaagggatggtggggatggcggcaagggtatttgctgtcatgtcccgcaaagggatctctgttgtgctgattactcagtcatcttcagaatacagtatcagcttctgtgtccctcaacgtgaattggaacgcgcgcgtcaggcgctgagtgaagaattctatcttgagctgaaagagggggtgcttgatcctttggatgtgatggaaaatctttccattatctcggttgttggcgatggtatgcgtaccctgcgtggcatctctgcccgtttcttctctgcattggcgcgcggtaatatcaatattgttgccatcgcacagggatcttctgaacgttctatctctgcggttatcgataatgaagtggcaacaacagccgttcgtttgtgccatcagatgttatttaataccgatcaagtgatcgaagtttttgttgtcggcgttggtggcgtaggcagtgttttgattgagcagatccgtcgtcaacaaacatggttgaagcaaaagcacattgatttacgggtatgtggtattgctaattcacgggccatgttgacggacatgagaggtatttgccttgataattggccgcagtgtttatcagaggccaaagaaccttttagtttgagccgcctgatccgtttggagaaagagtaccatttgctgaacccggtgatagtggattgtacctctaatcagcaaattgctgatcaatacgctagtttcctgagagatggtttcaatgtggttacgccgaataaaaaagccaatacttcgtcgatggcttattatcatcagatccgtaaggcggcagagaaatctaaacgtaaatttctgtatgacactaacgtaggcgctggtctgcctgttattgagaacttacaaaacttgctaaatgcgggtgatgaattggttcagttcaatggcattctttccggttctctctcctttattttcggtatgctggatgaaggaatgtcactatctcaggcgacgttactggcaaaagagaagggttataccgaacccgatccgcgtgatgatctatctggtgtggatgttgctcgtaagctgttgatcctcgcccgagaatcaggttatgaacttgaattggatgatattgatgtggagcctgtactgccagcttcctttgataaccgaggggatgtggatgctttccttgaacgtttacccgctcttgatcaggttttcagccagcgtgtggcagaagcgaaagaacaagagaaagtgttgcgctatattggcgtgattgaagatggctgttgtagagtgaaaatcgcggcagtagacagcaatgatccgctttataaagtcaaaaatggcgaaaatgcattggcattctacacgcgttactatcagccgataccgctggtactgcggggatacggagcaggtaatgatgtcactgccgcaggtgttttcgccgatatgctgcgtactttgtcctggaaacagggagtttaa

SEQ ID NO: 686 - protein, 819 aa, Photorhabdus luminescens subsp. laumondii TTO1
MRVLKFGGTSVANYQRVLSVADIAEKKFSQGGVALVLSAPAKITNHLVAMIEKTVAGQEIITHMHDAEQIFVDLLQGMARAQPGFAYERLKMMVEQEFAQLKQVLHGISLLGQCPDSINASLICRGEKLSIAIMESVLQARGHKVTVIDPVENLLAQGHYLESTVDINESTKRIASLNIPDDHIVLMAGFTAGNDKGELVVLGRNGSDYSAAVLAACLRATCCEIWTDVDGVYTCDPRVVPDARLLKGMSYQEAMELSYFGAKVLHPRTIAPIAQFQIPCLIKNTANPDAPGTLIGDGQKDESTPVKGITNLSNMAMINVSGPGMKGMVGMAARVFAVMSRKGISVVLITQSSSEYSISFCVPQRELERARQALSEEFYLELKEGVLDPLDVMENLSIISVVGDGMRTLRGISARFFSALARGNINIVAIAQGSSERSISAVIDNEVATTAVRLCHQMLFNTDQVIEVFVVGVGGVGSVLIEQIRRQQTWLKQKHIDLRVCGIANSRAMLTDMRGICLDNWPQCLSEAKEPFSLSRLIRLEKEYHLLNPVIVDCTSNQQIADQYASFLRDGFNVVTPNKKANTSSMAYYHQIRKAAEKSKRKFLYDTNVGAGLPVIENLQNLLNAGDELVQFNGILSGSLSFIFGMLDEGMSLSQATLLAKEKGYTEPDPRDDLSGVDVARKLLILARESGYELELDDIDVEPVLPASFDNRGDVDAFLERLPALDQVFSQRVAEAKEQEKVLRYIGVIEDGCCRVKIAAVDSNDPLYKVKNGENALAFYTRYYQPIPLVLRGYGAGNDVTAAGVFADMLRTLSWKQGV

SEQ ID NO: 687 - DNA, 2436 bp, Photorhabdus luminescens subsp. laumondii TTO1
  CDS (1)..(2436): transl_table=11
atgggtgcactggtagttgcaacggcggaaaatgaccgccaattacataagtttggtggaagtagtctcgcggatgtgaaatgttatcaacgggtagccaagattatggctaattacagccaacccggtgatttaatggtggtatccgcggcaggcagcacgactaaccagttaattaattggcttaaacttagccagagcgaccgtatttctgctcatcaggtacagcaggttctgcgccgttatcagcaggatctgattagaggtttgctacctgagactgttgctgaagagttggtgaagcgttttattgccgatcttgaaaagctaagtgcattactggataaaccagttagtgatgtgacttatgcagaagtggtggggcacggagagatctggtctgcgcgtttgatgtcggctgtgcttgaagctcagggtattcctagcgcttgggtggatgcccgccagtttttacgcgcggaacgggcggctcagccgcaaattgatgttaccctttcccaaccattgctaaatcagttgctaacacaaaatctaaataaacgactggtggtgaccggttttatctccagtaatcatgatggagaaacagtgttattggggcgaaatggcagtgactactctgcaactcaggttggggctttggcaggggcgaggcgggtaaccatctggagtgatgttgctggtgtttacagtgctgatccgagaaaagtcaaagatgcctgtttgttaccactattacgtttggatgaagccagcgagcttgctcgtcttgccgcacccgtgttgcatgctcgtaccttacagcctgtttcctttagtgatattgatttgctattacgttgcagttaccagccggagcaaggatcaacgcgtattgaaagagttttggcttctggaactggcgcaaaaattgttactagtcacgatgatgtttgcctgattgagttgcatgtggccgctcatcataattttaaacagacatacaaagatattgatctgttgttaaagcgagaacaaattcgcccattggcgacaggcatccatctagactgtaatttgattcagctctgttacacctccgaagtggtgaatagtgcactgagtgtgctggaagatgctacgcttccggggaaactttcccttagagaaggtttggcgctggtggcactggttggcgctggtgtatgcaagaacccattacattgccaccgtttttatcagcaacttaaagatcagccggtagaatttatctggcatgcggaggatggcatcagccttgtcgctgtgttgcggactaatcagactgaacatgtgattcagggattgcatcagagtttgttccgtgctgaaaagcggattggtctgattttgtttggtaaaggaaatattggctctcgttggttggagttattcgctcgtgagcagaaaaacatttcggctcgcagtgattttgaatttgttctggccggtgtggcggatagtcgccggagtttactcgactatcaagggattgatgctagtcgagcgttagctttttttgatgacgaagcgacagaatatgatgttgatgaattatttctctggatgcgagcacatccttatgacgatttggtgattctggatgtgacggcaagtgaagaactcgctcgatgttacagcgattttgccagctatggtttccatgttatcagtgccaataaaattgcgggtgcttccagtagccgcgattatcgttttattcgtgatgcatttgccaaaacaggtcgccattggttttacaatgcaacagttggcgctggcttacctatcaatcataccgtgagggacttacgggagagtggtgataccattttgtccattagtggcattttctccggcacattatcttggctgtttctgcaatttgatggttcagtaccatttagtgatttagtcgaacaggcgtggcaacagggattgacagaacctgatccgcgtattgatttgtctggtcaggatgtgatgcgtaaattgattatccttgcccgtgaagcagggtatgagattgagccagagcaagtgcgtgttgagtcactggtgccgaaagaagcagaatcaggctctattgaacaattctttgataatagcggtgctatcaatgagcagatggtacagcgattagccgcggcgcaggaaatgggcatggtgctgcgttatgttgcccgttttaatgcgaacggtaaggcaaaggtgggtgttgaggcggtacgtcctgatcatccattggcgtctttgctaccgtgcgacaacgtgtttgcgattgagagccgttggtatcgtgataatccgttagtgatccgtgggccgggggcaggccgtgacgtgacagccggagcgattcagtctgatcttaaccgtttgtcacaactgctttaa

SEQ ID NO: 688 - protein, 811 aa, Photorhabdus luminescens subsp. laumondii TTO1
MGALVVATAENDRQLHKFGGSSLADVKCYQRVAKIMANYSQPGDLMVVSAAGSTTNQLINWLKLSQSDRISAHQVQQVLRRYQQDLIRGLLPETVAEELVKRFIADLEKLSALLDKPVSDVTYAEVVGHGEIWSARLMSAVLEAQGIPSAWVDARQFLRAERAAQPQIDVTLSQPLLNQLLTQNLNKRLVVTGFISSNHDGETVLLGRNGSDYSATQVGALAGARRVTIWSDVAGVYSADPRKVKDACLLPLLRLDEASELARLAAPVLHARTLQPVSFSDIDLLLRCSYQPEQGSTRIERVLASGTGAKIVTSHDDVCLIELHVAAHHNFKQTYKDIDLLLKREQIRPLATGIHLDCNLIQLCYTSEVVNSALSVLEDATLPGKLSLREGLALVALVGAGVCKNPLHCHRFYQQLKDQPVEFIWHAEDGISLVAVLRTNQTEHVIQGLHQSLFRAEKRIGLILFGKGNIGSRWLELFAREQKNISARSDFEFVLAGVADSRRSLLDYQGIDASRALAFFDDEATEYDVDELFLWMRAHPYDDLVILDVTASEELARCYSDFASYGFHVISANKIAGASSSRDYRFIRDAFAKTGRHWFYNATVGAGLPINHTVRDLRESGDTILSISGIFSGTLSWLFLQFDGSVPFSDLVEQAWQQGLTEPDPRIDLSGQDVMRKLIILAREAGYEIEPEQVRVESLVPKEAESGSIEQFFDNSGAINEQMVQRLAAAQEMGMVLRYVARFNANGKAKVGVEAVRPDHPLASLLPCDNVFAIESRWYRDNPLVIRGPGAGRDVTAGAIQSDLNRLSQLL

SEQ ID NO: 689 - DNA, 2568 bp, Vibrio vulnificus YJ016
  CDS (1)..(2568): transl_table=11
atgttggggcaggctgctgagcgaaagaacaaatttcaaaaaaaggcctgtatccaacaagatacaggcctttttttatacagattaaaaataatccgggaggaagggatgcgagtattaaagtttggtggctcatcgttagccgatgcagaccgctttttaagagcggcggacattgttgctaacaatgccaagcaggaagaagtttctgtagtgttgtcggcgccagggaaaacaaccaataaattggtcgcggtcattgagtctgcactgaaaaatggcgaagcagaacgacaagtcgacgagctagacactgcgttcaaacaactgctgagtgatattaaacagcagcttcctagccttaacggtgacgcgtatttaaagcaagtcgcggattcactttcgcaactgcgtcaatttgttcatggtatcggcttgttggggatgtgtcctgacaacgtcaatgctcgcatcatcagtaaaggtgagcgtgtttccatccagttgatgaaggcggtgttggaagcaaaaggtcatctcgttaatcttattgacccggttgactacttgcttgcccatggtgatcacttagaagggatggtggatgtcgatgtatctacgcaaaacttccgttcaaatcctcttcctcaggggcacgttcatatcatgcctggctttaccgcgggcaataagcatggtgagctggtcactctaggtcgtaatggttccgattactcagcagccgtgttggctgcatgtctgcgcgcggattgttgtgagatctggacggatgtggatggggtgtacaactgtgaccctcgtttagtcgaagatgctcgcttattgaagtcattaagctatcaagaggccatggagctttcatactttggtgcatccgttttgcatcccaaaaccattgcgccaattgctcaatttcatatcccatgtttgattaagaacagcttcaatcctcaaggtgctggtacgctgattggtcaagatacaggcgaagataatctagcgatcaaaggcatcactacgctcaataacctgacgatggtcaacgtgtctggaccgggaatgaaaggcatggttggtatggcgagccgagtatttggtgcgatgtcggcctctggcgtgtcaatcgttctgattactcagtcttcttctgagtacagtatcagcttctgtattgaagctgccgacagacctttagccgaacaggcactctcagatgcttttgagttagaactgaaagatggtctattggagcccgtcgagttcctgactaatgtctctatcatcacgctggtgggtgatggtatgcgcacttccaaaggtgtcgcatcacaattctttgcttctcttgcggaagtgagtgtcaatgttatcgctattgctcaaggttcgtcagagcgcgctatttcagcggtgatcccagaggataagatctcccaagcgatcaaagcgtgtcatgaaaatctcttcaactcgaaacattaccttgatgtgtttgttgttggtgtcggtggtgttggtggtgagttggtggatcagatccagcgtcagcaagccaaactggcagacaaaggcattgtcatccgagtgtgtggtttggctaatagcaaagggctgttgttagacagtaacggcttaccactggaacattggcgtgaccgcatggccaatgcatctgaagcgtttagccttgccagtttgattgccactgtgcagcgtaaccatatcatcaaccctgtgctcgtcgattgtacttctagcgacgtgattgctaaccaatacgcagagtttttagccgctggtttccatgttgtgacgccaaataagaaagcaaataccgcgagtatggcgtattaccatcagctacgcgatgtggcacgcagctctcgtcgtaagttgatgtatgaaaccacggttggtgcaggcttgcctgtgatcgagaacttgcaaaatctgatttctgccggagatgagttggagcgattcagcggcattctctctggttcactttcctttatcttcggtaagttggatgaaggcatgacgttgagtgaggcgaccaatatcgccaaacaaaatggctttacagagccggatcctcgtgatgatctgtccggaatggatgtggcgcgtaaactgttgatcttggcgcgtgaagcgggcatggcattagagctggaagatgtcgaagtggatcaagccttgccaccaagttttgatgattcaggcagtgtcgatgaatttatggctcgactaccggaagctgatgcgtacttcaagcaactttctgcgcaagcggccgaagaaggcaaagtactgcgttatgtcggtgaaatcatcgatggtaagtgcaaagtctcgatcgctgcggtagatgaaaatgatccgatgttcaaaattaaagatggtgaaaatgcgttagcattttacagccgttactatcagccgatcccgttagtattgagaggttacggtgccggtactcaagtgactgcggcaggcgtgttctcagatgtgatgcgtactttaggctggaaattaggggtttaa

SEQ ID NO: 690 - protein, 855 aa, Vibrio vulnificus YJ016
MLGQAAERKNKFQKKACIQQDTGLFLYRLKIIREEGMRVLKFGGSSLADADRFLRAADIVANNAKQEEVSVVLSAPGKTTNKLVAVIESALKNGEAERQVDELDTAFKQLLSDIKQQLPSLNGDAYLKQVADSLSQLRQFVHGIGLLGMCPDNVNARIISKGERVSIQLMKAVLEAKGHLVNLIDPVDYLLAHGDHLEGMVDVDVSTQNFRSNPLPQGHVHIMPGFTAGNKHGELVTLGRNGSDYSAAVLAACLRADCCEIWTDVDGVYNCDPRLVEDARLLKSLSYQEAMELSYFGASVLHPKTIAPIAQFHIPCLIKNSFNPQGAGTLIGQDTGEDNLAIKGITTLNNLTMVNVSGPGMKGMVGMASRVFGAMSASGVSIVLITQSSSEYSISFCIEAADRPLAEQALSDAFELELKDGLLEPVEFLTNVSIITLVGDGMRTSKGVASQFFASLAEVSVNVIAIAQGSSERAISAVIPEDKISQAIKACHENLFNSKHYLDVFVVGVGGVGGELVDQIQRQQAKLADKGIVIRVCGLANSKGLLLDSNGLPLEHWRDRMANASEAFSLASLIATVQRNHIINPVLVDCTSSDVIANQYAEFLAAGFHVVTPNKKANTASMAYYHQLRDVARSSRRKLMYETTVGAGLPVIENLQNLISAGDELERFSGILSGSLSFIFGKLDEGMTLSEATNIAKQNGFTEPDPRDDLSGMDVARKLLILAREAGMALELEDVEVDQALPPSFDDSGSVDEFMARLPEADAYFKQLSAQAAEEGKVLRYVGEIIDGKCKVSIAAVDENDPMFKIKDGENALAFYSRYYQPIPLVLRGYGAGTQVTAAGVFSDVMRTLGWKLGV

SEQ ID NO: 691 - DNA, 2412 bp, Vibrio vulnificus YJ016
  CDS (1)..(2412): transl_table=11
atgagtcaagttcgacaactgcacaaatttggtggaagcagccttgcggatcctgattgctatcgtcgtgtggtgaacatcctcaaagagtactcgggtgacaacgatttagtggtggtgtcggcagcgggcaaaaccaccaaccgcttaattgaatttagtgaggcgctggagaaggacggccgtttggcgcacgaagcattgcaagctttgcgtcaatatcaaaccggattggtggaagcactgatcgcgtcgaaccagcgtagcgagctgcttgatcaacttgctgatgagtttagtacgttggccgagctctccgcaccactcacaaccgcgcaaaaagcggcgatcttaggccatggtgaagtgtggtcgtcgcgtctactggctgcgcttttgaaccaacatgatctggccgcggtggctcaggatgcgcgtgcgtttttacgggcagaaacgggcacccaaccagaagtggaccgagcacgttcttatcctctgattaaagaagtgttggcgcagcactcacatcgccgtgtggtgatcaccggttttatggcgcaaaaccaagcaggcgaaacggttttattggggcgcaatggctctgactattctgctaccgtgattggtgcgctggcggaagtggctaaagtgacgatttggagtgatgttgcaggggtgtacagcgccgaccctcgcttggtcagtgacgcttgtttactgccgttactgcgcttggatgaagccagtgaacttgcgcgcttagctgctccagtcctgcatagccgaacattacagccagtggcacaaagtgccaccgagcttaatctgcgctgcagctacacccctgagtcgggttctacccgtattgaacgcgtattggcgtctgggcgtggtgccaaaatcatcacctcgcttgacgatgttatgttagttcaattgaacttctctgctggtcatgactttgatcgccagcagcaagaggtattgagtgcactcaaacgcgcgcagttggaaccattggcgtttgaagcacaaaaagatcaatttacgctgcgcttagcgtataccactgaaattgctggtggcgctttggcacatctgcaagagttgggtttggccgccgagatcaagctgaaagagggcttttcgctggtcgccgctgtcggggctggagtgacgaacaatgccagccattgttttggtttctatcagcaactgaaacactctcctgtggaattcatttctgaagctgaatcaggattgagtttggttgcggtgatgcgccgagtcgatattccggtactggtgaaagcgatccatacccaactgtttcaagcccagaagcgcgtggcattggccctgtgtggtaaaggtaatatcggatccagttggttatctctgtttgcgcagcagaaaagtgagttggaaaaacgccatggtatgaactttgagttagtggccgtggtggatagccaaacttatctgttcaatgaacaaggtttagatgccgcagcggtacacgcgcattttgatgatgactcggtaccgaatgatggggccaattggctacaacgattgagttcaatccaagactatgacgaagtggtggtattggatgtcacggccagccgcgagttggcagcgcaatatttggatattgcccatcaaggtatgcacctcatttccgcgaataaaattgcgggctcagcgagcagcgattactactaccaagtgcaagatgccttcagcaaaattggccgtcattggttgtataacgcaaccgtgggtgcaggtttgccgattaatcacacggtgagagatttacgcgaaagtggtgatgaaatcgtggcactttctggcatcttctctggcacgctctcttggctgttccagcagtttgatggttcagtaccgtttgcagagctggttgatttagcttggcagcaaggcctcactgaaccggatcctcgcagcgatttagatggatcagatgtgatgcgtaagctggtgatcttggctcgcgaatcaggcttagacattgagccagaaaacgtcaaagtggaatccttggtgcctgaagagcttaaagaactttctcttgatgatttctttgaccaagcccacttattgagtgagcgtttacaagaacgtttaactaaggcgcagcgtcaagatcaggtgctacgctatgttgctcgtctagaaaaaaatggtaaagctcgtgtcagtgttgaagcgttacaaagagagcatgctttggcgaacttgttgccgtgtgacaatatttttgccattgagagtaaatggtatcgtgataatcctttagtgattcgtggtccgggggctgggcgtgaagtgactgctggcgcaattcagtctgatctcaatcgcttagctggcttgttctag

SEQ ID NO: 692 - protein, 803 aa, Vibrio vulnificus YJ016
MSQVRQLHKFGGSSLADPDCYRRVVNILKEYSGDNDLVVVSAAGKTTNRLIEFSEALEKDGRLAHEALQALRQYQTGLVEALIASNQRSELLDQLADEFSTLAELSAPLTTAQKAAILGHGEVWSSRLLAALLNQHDLAAVAQDARAFLRAETGTQPEVDRARSYPLIKEVLAQHSHRRVVITGFMAQNQAGETVLLGRNGSDYSATVIGALAEVAKVTIWSDVAGVYSADPRLVSDACLLPLLRLDEASELARLAAPVLHSRTLQPVAQSATELNLRCSYTPESGSTRIERVLASGRGAKIITSLDDVMLVQLNFSAGHDFDRQQQEVLSALKRAQLEPLAFEAQKDQFTLRLAYTTEIAGGALAHLQELGLAAEIKLKEGFSLVAAVGAGVTNNASHCFGFYQQLKHSPVEFISEAESGLSLVAVMRRVDIPVLVKAIHTQLFQAQKRVALALCGKGNIGSSWLSLFAQQKSELEKRHGMNFELVAVVDSQTYLFNEQGLDAAAVHAHFDDDSVPNDGANWLQRLSSIQDYDEVVVLDVTASRELAAQYLDIAHQGMHLISANKIAGSASSDYYYQVQDAFSKIGRHWLYNATVGAGLPINHTVRDLRESGDEIVALSGIFSGTLSWLFQQFDGSVPFAELVDLAWQQGLTEPDPRSDLDGSDVMRKLVILARESGLDIEPENVKVESLVPEELKELSLDDFFDQAHLLSERLQERLTKAQRQDQVLRYVARLEKNGKARVSVEALQREHALANLLPCDNIFAIESKWYRDNPLVIRGPGAGREVTAGAIQSDLNRLAGLF

SEQ ID NO: 693 - DNA, 2454 bp, Yersinia pestis biovar Microtus str. 91001
  CDS (1)..(2454): transl_table=11
gtgctgaaatttggcgggacatcagtggcaaatgccgagcgctttatgcgtgttgccgatatcatcgaaagtaatgcgcgtcagggacaagtggctacggtgttatccgctcccgcgaagataacgaaccatctcgttgccatgatcgataaaatggtcgcagggcaagatatctccccgaacatcagcgatgctgagcggatttttgctgagttattgcgtggattagctgatactcagccaggctttgattatgatcgcctaaaagccttggtcggccatgagtttgcgcaactcaaacacctgctacacggtatttcgttgttggggcagtgcccagacagcattaatgcctcaattatctgccgtggcgaaaaactctccatcgccattatggaggcgttatttcaggctaagggttatcacgttacggtgattaatccagtcgaaaaattgttggcgcagggccattatctcgaatccactgttgatatcacggagtctacccgccgtatcggtgccagcggtattccatctgatcacatcatcctgatggctggttttactgcgggtaatgataaaggtgaattggtggtgttggggcgtaatggctctgattattccgctgccgtgctggctgcttgcttacgggcagattgttgtgagatttggaccgatgtcgacggggtctatacttgtgacccgcgtaccgttccagatgccagattactgaaatcgatgtcataccaagaggcaatggagctttcctattttggtgctaaagttcttcaccctcgcactatcgctcctattgcccgcttccaaattccttgtctgataaaaaacacctctaacccgcaagcccccggtaccttgattggtggtgaaagcattgatgaggattctccggtcaaaggcattaccaacctgaataatatggcgatgattaatgtttcagggccaggaatgaaagggatggtcggtatggctgcccgcgtctttgcggtgatgtcgcgcagcggtatttcagtggtgctaatcactcagtcctcttctgaatacagcatcagtttttgtgtgccgcaaggtgagttattgcgcgcccgccgagcgctggaagatgagttttatctggagttgaaagacggtgtcttggatcctctggatgtgatggaacatctggcaattatctctgtggtcggtgacggtatgcgcaccctgcgcggtatttctgcccgtttcttctcggctctggcgcgcgccaacatcaatattattgctatcgctcaaggctcgtctgagcgctctatttctgtggttgtcaataatgatgcggtcactaccggggtgcgagtttgccaccagatgctgtttaacacggatcaagtcattgaggtgtttgtcattggcgtgggtggtgtggggggcgcattaatcgaacaaatctatcgccagcaaccgtggttgaaacagcgtcatattgatttacgtgtttgtggtatcgcgaattccaaagccatgttgaccaacgtgcatggcattgcattagataactggcgtcaggaactggctgaagttcaggagccgtttaacctgagccgcttgatccgtctggttaaagagtatcacttactgaacccggtcattgttgactgtacctcaagccaggcggttgctgatcaatatgctgatttcctgaccgatggcttccatgtggtgacgccaaacaagaaagccaacacttcatcaatgaattattaccgccaaatgcgtgccgctgcgacgaaatcgtgccgtaaattcttgtatgacacaaacgttggggcggggctaccggtgatcgagaacttacagaacctgctcaatgcgggtgatgaactgatgcgcttcaccggtattctgtccggttcactttccttcatcttcggtaagctagatgaggggatgtcattgtcagaggcaacacggcaagctaaggcgttggggtataccgaacccgatccacgtgatgatctctctgggatggatgttgcccgtaaattgttgattttggcccgtgaagcagggtacaaacttgagttggctgatatcgaggttgagtccgtcttaccagcaagctttgatgcttcaggtgatgtggatactttcctggcgcgcctgccatcattggatgctgaatttacccgcttggtagcgaatgctgcggagcagggcaaagtgctacgttatgtcggagtgattgaagacgggcgttgtaaagtgcggatggaggcagttgacggtaacgacccgttgtataaagttaagaatggcgagaatgcgttggctttctatacccgctattatcagccaattccgttggtgctacgcggttatggcgcaggcaatgatgtgactgccgctggggtgtttgccgatcttttacgcacattatcatggaagttgggagtttaa

SEQ ID NO: 694 - protein, 817 aa, Yersinia pestis biovar Microtus str. 91001
MLKFGGTSVANAERFMRVADIIESNARQGQVATVLSAPAKITNHLVAMIDKMVAGQDISPNISDAERIFAELLRGLADTQPGFDYDRLKALVGHEFAQLKHLLHGISLLGQCPDSINASIICRGEKLSIAIMEALFQAKGYHVTVINPVEKLLAQGHYLESTVDITESTRRIGASGIPSDHIILMAGFTAGNDKGELVVLGRNGSDYSAAVLAACLRADCCEIWTDVDGVYTCDPRTVPDARLLKSMSYQEAMELSYFGAKVLHPRTIAPIARFQIPCLIKNTSNPQAPGTLIGGESIDEDSPVKGITNLNNMAMINVSGPGMKGMVGMAARVFAVMSRSGISVVLITQSSSEYSISFCVPQGELLRARRALEDEFYLELKDGVLDPLDVMEHLAIISVVGDGMRTLRGISARFFSALARANINIIAIAQGSSERSISVVVNNDAVTTGVRVCHQMLFNTDQVIEVFVIGVGGVGGALIEQIYRQQPWLKQRHIDLRVCGIANSKAMLTNVHGIALDNWRQELAEVQEPFNLSRLIRLVKEYHLLNPVIVDCTSSQAVADQYADFLTDGFHVVTPNKKANTSSMNYYRQMRAAATKSCRKFLYDTNVGAGLPVIENLQNLLNAGDELMRFTGILSGSLSFIFGKLDEGMSLSEATRQAKALGYTEPDPRDDLSGMDVARKLLILAREAGYKLELADIEVESVLPASFDASGDVDTFLARLPSLDAEFTRLVANAAEQGKVLRYVGVIEDGRCKVRMEAVDGNDPLYKVKNGENALAFYTRYYQPIPLVLRGYGAGNDVTAAGVFADLLRTLSWKLGV

SEQ ID NO: 695 - DNA, 2463 bp, Klebsiella pneumoniae subsp. pneumoniae MGH 78578
  CDS (1)..(2463): transl_table=11
atgcgagtgttgaagttcggcggtacatcagtggcaaatgcggaacggtttctgcgggttgccgatattctggagagtaatgccaggcaggggcaggtagcgacggtcctgtctgccccggcgaagatcactaaccacctggtagcgatgattgaaaagaccattggcggccaggatgccctccccaatattgccgacgccgaacgcatttttgccgaacttcttcagggccttgccgacgcccagcccgctttcccgcttgcccagttaaaagccttcgtggagcaggaatttgctcagattaagcatgttctgcacggcatcagcctgctgggtcagtgcccggacagcgtcaatgccgcgctgatctgccgcggcgaaaagctctccatcgccatcatggcgggtctgctggaagcccgtggacataaagtcagtgtcattaacccggtcgaaaaactgctcgccgtgggccactatctggaatccaccgtcgatatcgccgaatccacccgccgcattgccgccagccagatcccggcagaccatatgatcctgatggccgggtttaccgccggcaatgagaaaggcgagctggtggtgctggggcgtaacggctccgactactcggctgcggtactggccgcctgcctgcgcgctgactgctgcgaaatctggaccgatgtcgacggagtgtacacctgcgatccgcgtcaggtgccggatgcgcgcctgctgaaatcgatgtcttatcaggaggcgatggagctctcctactttggcgcgaaagtgctgcacccgcgcaccatcgcccctatcgcccagttccaaatcccatgcctgattaaaaataccggcaacccacaggcgccgggaacgcttatcggcgccagccgcgacgaggacgatttgccggtgaaaggcatctctaacctcaacaacatggcgatgttcaacgtctccgggccggggatgaaagggatggtcggcatggcggcccgcgtcttcgccaccatgtcccgcgccggcatctcggtggtgttgatcactcaatcttcttcggagtacagcatcagtttctgcgtgccgcagagcgactgcgcacgtgccaaacgggcgatggaagatgagttttatctggagctgaaagaggggctgctggagccgctggcgattatggagcgtctggcgatcatctccgtggtgggcgacggaatgcgtaccctgcgcggtatctcggcgaaattctttgcggcactggcccgtgccaatatcaatatcgtggcgattgcccagggctcttccgagcgctcaatttcggtagtggtcagcaatgacgacgccaccaccggcgtgcgcgtgacccatcagatgctgttcaacaccgatcaggtgattgaagtgtttgtcatcggcgtcggcggcgtcggcggcgcgctgctagagcagatcaagcgccagcaggggtggctgaagaacaaacatatcgatctgcgcgtctgcggtgtagccaattctcaggcgctgctgaccagcgtgcatggcctgaatctggaaaactggagtgcggaactggcggaggcgaaagagccgtttaatcttggccgcctgatccgcctggtgaaagagtaccacctgctcaatccggtgatcgtcgactgtacctccagccaggcggtcgccgatcagtatgccgacttcctgcgcgaaggtttccatgtggtgacgccgaacaaaaaggccaataccttttcgctggattactatcaccagctgcgccatgcggccagcagctcgcggcgtaagttcctctatgacactaacgttggcgcgggcctgccggtgattgagaacctgcagaacctgctcaacgccggcgatgagctgcgccatttctccgggatcctgtccggctccctgtcgtttatcttcggcaagctggacgagggggtgagtttctccgcggcgacggcgatggcccgtgagatggggtataccgagccggatccgcgcgacgatttatccggggtggatgtggcgcgtaaactgctgattctggcccgcgagaccgggcgtgaactggagctggcggacattatcgtcgagtcggcgctgccgccggacttcgacgccagcggcgatgtcgagacctttatggcccgcctgccgtcgctggacgatggttttgcctcgcgggttgctaaggcgcgcgatgaaggtaaagtcttgcgctacgtcggtaacatcgaagaggatggtacctgccgggtaaaaatagccgcggttgacggcaacgatccgctgttcaaagttaagaatggtgagaacgcgctggctttttatagccattattatcagccattgccgctggtgctgcgcggctatggcgccgggaacgacgtcacggcggccggcgtattcgccgacctgctgcgcaccctgtcctggaagttaggagtttaa

SEQ ID NO: 696 - protein, 820 aa, Klebsiella pneumoniae subsp. pneumoniae MGH 78578
MRVLKFGGTSVANAERFLRVADILESNARQGQVATVLSAPAKITNHLVAMIEKTIGGQDALPNIADAERIFAELLQGLADAQPAFPLAQLKAFVEQEFAQIKHVLHGISLLGQCPDSVNAALICRGEKLSIAIMAGLLEARGHKVSVINPVEKLLAVGHYLESTVDIAESTRRIAASQIPADHMILMAGFTAGNEKGELVVLGRNGSDYSAAVLAACLRADCCEIWTDVDGVYTCDPRQVPDARLLKSMSYQEAMELSYFGAKVLHPRTIAPIAQFQIPCLIKNTGNPQAPGTLIGASRDEDDLPVKGISNLNNMAMFNVSGPGMKGMVGMAARVFATMSRAGISVVLITQSSSEYSISFCVPQSDCARAKRAMEDEFYLELKEGLLEPLAIMERLAIISVVGDGMRTLRGISAKFFAALARANINIVAIAQGSSERSISVVVSNDDATTGVRVTHQMLFNTDQVIEVFVIGVGGVGGALLEQIKRQQGWLKNKHIDLRVCGVANSQALLTSVHGLNLENWSAELAEAKEPFNLGRLIRLVKEYHLLNPVIVDCTSSQAVADQYADFLREGFHVVTPNKKANTFSLDYYHQLRHAASSSRRKFLYDTNVGAGLPVIENLQNLLNAGDELRHFSGILSGSLSFIFGKLDEGVSFSAATAMAREMGYTEPDPRDDLSGVDVARKLLILARETGRELELADIIVESALPPDFDASGDVETFMARLPSLDDGFASRVAKARDEGKVLRYVGNIEEDGTCRVKIAAVDGNDPLFKVKNGENALAFYSHYYQPLPLVLRGYGAGNDVTAAGVFADLLRTLSWKLGV

SEQ ID NO: 697 - DNA, 2433 bp, Klebsiella pneumoniae subsp. pneumoniae MGH 78578
  CDS (1)..(2433): transl_table=11
atgagtgtgattgcgcaggcaggggcgaagggtcgtcagctgcacaaatttggtgggagtagtttagcggatgcgaaatgttacctgcgcgtcgcggggatcatgaaggagtattcgcaggcgggggatatgatggtcgtctccgccgctggcagcaccaccaaccagctgatcagctggcttaagcttagccagagcgatcgccttgctgcgcatcaggttcagcagtcgcttcgccgctatcacaccgagctgattggcggtctgctggagcctgcggcggcggatacgttgatagccgcctttatccacgaccttgagcgtctggctggtctgctggacggcggggtttccgaagcggtctatgcggaagtggtcggccatggggaagtgtggtccgcgcgcctgatggcggcggttctcaaccagctgggtatggaagccgcctggctggacgcgcgcgcgttcctgcgcgcggaacgcgccgcgcagccgcaggtggatgagggattatcttacccactgctgcagcagctgatggcgcagcatcctaacaaacgtctggtggtgaccggctttatctcccgcaaccaggccggcgaaaccgtcctgctgggccgtaacgggtctgactactctgccacccagatcggcgcgctggcgggcgcctcccgggtcactatctggagcgacgttgccggggtgtacagcgcggatccgcgcaaggtgaaagacgcctgcctgctgccgctgctgcgtctggacgaagccagcgagctggcgcgcctggccgcgccggtgctccatgcccgcacgctacagccggtttccgccagtgatatcgatctgcagttacgctgcagctacacgccggaacagggttccacgcgcattgagcgcgtgctggcctccggtaccggcgcacggattgtcaccagccatgacgacgtctgcctggtggagttccaggtgccggccggtcacgatttcaaactggcgcataaagagctggacgctctgctcaaacgcgcccagctgcgcccgttagccgttggcgtccatgccgaccgtaagctgctgcagttctgctatacctccgaggtggccgacagcgcgctgaaattgctcgatgaagccggtctgccgggcgagctgcgtctgcgtcagaagctggcgctggtggcgatggtgggcgcgggagtcacccgtaacccgctgcactgccaccgtttctggcagcagctcaaagggcagccggtggagttcacctggcagtctgaagaggggatcagcctggtggcggtgctacgcgccgggccgacggaaagcctgatccaggggctgcatcagtccttgtttcgcgccgaaaagcgtattggcctgatgctgttcggcaaagggaatattggttcccgctggctggagcttttcgcccgtgaacaaactacgctctcggcgcgtaccggtttcgagtttattctcgccggcgtagtcgacagtaaacgcagcctgctgaattacgacgggctggatgccagccgggcgctggctttcttcaacgatgaagcggtggagcaggatgaagagtcgctgttcctgtggatgcgcgcgcacccgtatgatgatttagtggtgctggacgtcaccgccagcgaacagctggccgaccagtatcttgatttcgccagccatggcttccacgtcattagcgccaacaagctggcgggcgccagcagcagtgataaatatcgtcagatccacgacgcgtttgagaagacggggcgccactggttgtataacgccaccgtgggcgccggcttgccggtgaaccatacggtgcgcgacctgatcgacagcggcgatactattctcggcctgagcggtatcttctcgggaacgctctcctggctgttcctgcagtttgatggcaccgtgccgttcaccgacctggtggatcaggcgtggcagcaggggctgaccgagccggatccgcgcgtcgatctgtccggtaaggatgtgatgcgtaagctggtgatcctcgcgcgggaagcgggctatgacatcgaaccggatcaggtgcgtgtggaatcactggtgccggcgcactgtgaagaggggtcggtcgatcacttctttgagaatggcgaagagctgaacgagcagatgctgcagcgtctggaagcggcccgcgagatggggctggtgctccgctacgtggcgcgctttgatgccaacggcaaagcacgcgtcggtgtggaagcggtacgcgaagagcacccgctggcggcgctgctgccgtgcgataacgtgtttgccatcgaaagccgctggtatcgcgataacccgctggtgatccgcgggcccggcgccgggcgcgatgtgaccgccggggcgatccagtcggatattaaccgcctggcgcagctgctgtaa

SEQ ID NO: 698 - protein, 810 aa, Klebsiella pneumoniae subsp. pneumoniae MGH 78578
MSVIAQAGAKGRQLHKFGGSSLADAKCYLRVAGIMKEYSQAGDMMVVSAAGSTTNQLISWLKLSQSDRLAAHQVQQSLRRYHTELIGGLLEPAAADTLIAAFIHDLERLAGLLDGGVSEAVYAEVVGHGEVWSARLMAAVLNQLGMEAAWLDARAFLRAERAAQPQVDEGLSYPLLQQLMAQHPNKRLVVTGFISRNQAGETVLLGRNGSDYSATQIGALAGASRVTIWSDVAGVYSADPRKVKDACLLPLLRLDEASELARLAAPVLHARTLQPVSASDIDLQLRCSYTPEQGSTRIERVLASGTGARIVTSHDDVCLVEFQVPAGHDFKLAHKELDALLKRAQLRPLAVGVHADRKLLQFCYTSEVADSALKLLDEAGLPGELRLRQKLALVAMVGAGVTRNPLHCHRFWQQLKGQPVEFTWQSEEGISLVAVLRAGPTESLIQGLHQSLFRAEKRIGLMLFGKGNIGSRWLELFAREQTTLSARTGFEFILAGVVDSKRSLLNYDGLDASRALAFFNDEAVEQDEESLFLWMRAHPYDDLVVLDVTASEQLADQYLDFASHGFHVISANKLAGASSSDKYRQIHDAFEKTGRHWLYNATVGAGLPVNHTVRDLIDSGDTILGLSGIFSGTLSWLFLQFDGTVPFTDLVDQAWQQGLTEPDPRVDLSGKDVMRKLVILAREAGYDIEPDQVRVESLVPAHCEEGSVDHFFENGEELNEQMLQRLEAAREMGLVLRYVARFDANGKARVGVEAVREEHPLAALLPCDNVFAIESRWYRDNPLVIRGPGAGRDVTAGAIQSDINRLAQLL

SEQ ID NO: 699 - DNA, 2463 bp, Salmonella enterica subsp. arizonae serovar 62:z4,z23:--
  CDS (1)..(2463): transl_table=11
atgcgagtgttgaagttcggcggtacatcagtggcaaatgcagaacgttttctgcgtgttgccgatattctggaaagcaatgccaggcaagggcaggtagcgaccgtactttccgcccccgcgaaaattaccaaccatctggtggcgatgattgaaaaaaccatcggcggtcaggatgctttgccgaatatcagcgatgccgaacgtattttttctgacctgctcgctggacttgccaacgcgcagccgggattcccgcttgcacggttgaaaatggttgtcgaacaagaattcgcgcagatcaaacatgttttgcatggtattagcctgctgggccagtgccctgacagcataaacgccgcgctgatttgccgcggcgaaaaaatgtcgatcgctattatggcgggactcctggaggcgcgtggacatcgcgtcacggtgatcgatccggtagaaaaactgctggcggtgggccattaccttgagtctaccgtcgatatcgcagaatcgactcgccgtatcgccgccagtcagattccgttcgatcacatgatcctgatggcaggctttaccgccggtaatgaaaaaggtgaactggtggtgctgggccgtaacggttccgactattccgccgccgtgctggccgcctgtctacgtgccgattgctgtgaaatctggactgacgttgacggcgtgtatacctgcgatccgcgccaggtgccggacgccaggttgctgaaggcgatgtcctaccaggaagcgatggaactctcttacttcggcgccaaagttctccatcctcgcactattacccccatcgcccagttccagatcccctgcctgataaaaaataccggaaatccgcaggcgccaggaacgttgatcggcgctacctgcgacgatgatgacctgccggtaaaaggaatctctaaccttaacaatatggcgatgtttagcgtctccggcccagggatgaaagggatggttgggatggcggcacgcgttttcgctgccatgtctcgcgccggaatctcggtggtactcattacccagtcctcctctgaatacagcatcagcttctgcgtgccgcagagcgacagcgctcatgcccggcgcgcgatgcaggatgagttttatctggagctgaaagaggggctgctggaaccgctggcggtcactgagcggctggcgattatctctgttgttggcgacggtatgcgcacgctacgcggtatttcagcgaaattcttcgccgcgctggcacgggccaatatcaatatcgtggcgatcgcgcagggctcttctgagcgctccatttctgtcgtggtgaacaacgatgacgctactaccggcgtgcgggtaacgcaccagatgctgttcaataccgatcaggtgattgaagtgttcgtcattggcgtcggcggcgttggcggcgcgctactggaacagcttaaacgtcagcaaagctggctgaagaacaagcacatcgatctgcgtgtgtgcggcgtggcgaactcaaaggcgctgctaaccaatgtgcatggcctgaatctggaaaactggcaggccgaactggcgcaagcgaacgcgccgttcaacctggggcgcttaattcgcttggtgaaagaatatcatttgctcaatccggtgattgtcgattgtacctccagccaggcggtggccgaccagtatgccgacttcctgcgcgaaggattccatgtggtgacgccgaacaagaaagcgaacacctcatcgatggattactaccatcagctacgttttgctgctgcgaaatcacggcgcaaattcttatatgacacgaacgtcggcgccggtttgccggtaatcgaaaacctgcaaaacctgctgaatgcgggcgatgaactacaaaaattttctggcattctttccgggtcgctctcttttattttcggcaaactggaagagggaatgaacctttcacaggcgactgccctggcacgtgagatgggctataccgaacccgatccgcgcgacgatctttccggtatggatgtggcgcgtaaactgttgatcctcgcccgcgagacaggccgcgagctggaactttccgatatcgtgattgagccggtactgccggacgggtttgacgcttccggcgatgtgaccgcctttatgacgaatctgtcgctgcttgacgacacgtttgccgcccgcgtggcgaaagcccgtgatgaaggtaaggtattacgctatgttggcaatatcgaagaggatagcgtgtgccgcgttaagattgccgaagtcgatggtaacgatccgctcttcaaagtgaaaaacggtgaaaacgcgctggcgttctacagccactattatcaacccttgccgctggtgctgcgcgggtacggcgcgggcaatgatgtgacggcggcgggcgtatttgccgatctgttacgtaccctctcatggaagttaggagtttaa

SEQ ID NO: 700 - protein, 820 aa, Salmonella enterica subsp. arizonae serovar 62:z4,z23:--
MRVLKFGGTSVANAERFLRVADILESNARQGQVATVLSAPAKITNHLVAMIEKTIGGQDALPNISDAERIFSDLLAGLANAQPGFPLARLKMVVEQEFAQIKHVLHGISLLGQCPDSINAALICRGEKMSIAIMAGLLEARGHRVTVIDPVEKLLAVGHYLESTVDIAESTRRIAASQIPFDHMILMAGFTAGNEKGELVVLGRNGSDYSAAVLAACLRADCCEIWTDVDGVYTCDPRQVPDARLLKAMSYQEAMELSYFGAKVLHPRTITPIAQFQIPCLIKNTGNPQAPGTLIGATCDDDDLPVKGISNLNNMAMFSVSGPGMKGMVGMAARVFAAMSRAGISVVLITQSSSEYSISFCVPQSDSAHARRAMQDEFYLELKEGLLEPLAVTERLAIISVVGDGMRTLRGISAKFFAALARANINIVAIAQGSSERSISVVVNNDDATTGVRVTHQMLFNTDQVIEVFVIGVGGVGGALLEQLKRQQSWLKNKHIDLRVCGVANSKALLTNVHGLNLENWQAELAQANAPFNLGRLIRLVKEYHLLNPVIVDCTSSQAVADQYADFLREGFHVVTPNKKANTSSMDYYHQLRFAAAKSRRKFLYDTNVGAGLPVIENLQNLLNAGDELQKFSGILSGSLSFIFGKLEEGMNLSQATALAREMGYTEPDPRDDLSGMDVARKLLILARETGRELELSDIVIEPVLPDGFDASGDVTAFMTNLSLLDDTFAARVAKARDEGKVLRYVGNIEEDSVCRVKIAEVDGNDPLFKVKNGENALAFYSHYYQPLPLVLRGYGAGNDVTAAGVFADLLRTLSWKLGV

SEQ ID NO: 701 - DNA, 2460 bp, Erwinia carotovora subsp. atroseptica SCRI1043
  CDS (1)..(2460): transl_table=11
atgcgagtgttgaaatttggcgggacttcagtagcgaatgcggagcgctttgcccgcgttgccgacattatcgaaaataacgcgcgccagggacaggtcgctaccgtattgtccgcgccggcgaaaattaccaaccatctggttgccatgattgagaaaaccgtcgccggacaagatatcctgcctcatttaaacgacgccgaaactatcttctcttcgctgctgcaaggtcttgctgcatcccagccgggttttgaacacgcccgcctgaaggcattcgtggaacaggaattcgcacagctgaaacacgtcttgcatggtatcgctctgctggggcagtgtcctgacagcgtgaatgccgcgatcatctgccgaggggaaaaactgtctattgccatcatggaagcggtctttcaggcgcgcggctatggggtatccgtcatcaatccggtcgaaaaactgctagcgcagggacattatctcgaatctaccgtcgatatcactgagtcgactcgccgtatcgctgaaagcgcgatcccgaaagatcatgtgatcctgatggcaggctttactgctggcaacgacaaaggcgagctggtggtgctgggccgcaacggttcagactattccgctgcggtgctggctgcgtgcctgcgtgcggactgttgtgagatctggaccgatgttgacggcgtttatacttgcgatcctcgtcaggtgccggatgcccgattattgaaatcaatgtcctatcaggaggcgatggagctgtcctatttcggcgccaaagttctccaccctcgcaccattgctcctatcgcccagttccagattccctgtctcatcaaaaacactgaaaatcctcaggctcccggtacgctcatcggcatggacagtaccgatacacagtatccggtgaagggcattaccaacctgaacaacatggcgatggttaacgtatccggccccggcatgaaaggtatggtcggcatggcagcgcgcgtgtttgccgcgatgtcgcgtgcgggtatctctgtggtgctgatcacgcagtcatcttctgaatacagcatcagcttctgcgtatcgcagaacgagctggcgcgtgccagaaaaacgctggaagacgagttctatctggaactgaaagaaggcgtgctggagccgctggatgtgatggaacgtctggcgatcatctctgtggtgggcgatggcatgcgcacgttgcgcggtctgtctgctcgtctgttctctgcgctggcgacggcaaacatcaatatcgtggctatcgcacagggctcgtccgagcgctctatctctgtcgtagtcaacaatgatgtcgccacgactggcgtgcgcgttgcacaccagatgctgtttaacaccgatcaggtgatcgacgtgtttgttatcggcgtcggcggcgtgggtggtgcactgctggagcaaattcaccgccagcagccgtggttgaaagacaagcatatcgacctgcgtgtgtgtgggatcgccaattctaaagccatgctgaccaacattaacggcgtttcgatggacacctggcgtgaagatctggcaaaagctcgtgagccgttcaatctgggccgtctgattcgtctggttaaagagtatcacctactgaacccagtgattgtcgattgcacctcgaatcaggctgttgccgatcagtatgtggatttcctggccgacggcttccacgtggtgacgccaaacaagaaagccaacaccgggtcgatgaattattatcatcaactgcgtagcgccgcatcgaaatcccgtcgtcgtttcctgtatgacaccaacgtcggtgcaggtctgccggtgatcgagaacctgcaaaatctgctgaatgcgggtgatgagctgattcgctttaccggtattctctctggctcgctgtcctttattttcggtaaactcgatgaaggcatgtcactgtcggaagcgacgacgcaggcgaaagaaaaaggctataccgaacccgatccacgtgacgatctgtctggtatggacgtggcgcgtaagctgctgattctggcgcgtgaagcgggttatcaattggagctgggtgatattgaggtggagtccgttctgcctatcagtttcgatgcctccggcgatgtcgccagctttatgcagcgcctgccggcggcagacgatgagtttgccagccgtgttgcacaagcgcgtgatgaaggtaaagtattgcgctatgtcggcgtcattgaagaaggtcgctgtaaggtcaaaatcagtgcggttggcggtaacgatccactgtttaaagtcaaagatggtgagaatgcgctggcgttctacagccgttattatcagccactgccgcttgtattgcgcgggtatggcgcgggtaacgatgttaccgctgctggtgtgttcgccgatctgctgcgcaccttgtcatggaagttgggagcataa

SEQ ID NO: 702 - protein, 819 aa, Erwinia carotovora subsp. atroseptica SCRI1043
MRVLKFGGTSVANAERFARVADIIENNARQGQVATVLSAPAKITNHLVAMIEKTVAGQDILPHLNDAETIFSSLLQGLAASQPGFEHARLKAFVEQEFAQLKHVLHGIALLGQCPDSVNAAIICRGEKLSIAIMEAVFQARGYGVSVINPVEKLLAQGHYLESTVDITESTRRIAESAIPKDHVILMAGFTAGNDKGELVVLGRNGSDYSAAVLAACLRADCCEIWTDVDGVYTCDPRQVPDARLLKSMSYQEAMELSYFGAKVLHPRTIAPIAQFQIPCLIKNTENPQAPGTLIGMDSTDTQYPVKGITNLNNMAMVNVSGPGMKGMVGMAARVFAAMSRAGISVVLITQSSSEYSISFCVSQNELARARKTLEDEFYLELKEGVLEPLDVMERLAIISVVGDGMRTLRGLSARLFSALATANINIVAIAQGSSERSISVVVNNDVATTGVRVAHQMLFNTDQVIDVFVIGVGGVGGALLEQIHRQQPWLKDKHIDLRVCGIANSKAMLTNINGVSMDTWREDLAKAREPFNLGRLIRLVKEYHLLNPVIVDCTSNQAVADQYVDFLADGFHVVTPNKKANTGSMNYYHQLRSAASKSRRRFLYDTNVGAGLPVIENLQNLLNAGDELIRFTGILSGSLSFIFGKLDEGMSLSEATTQAKEKGYTEPDPRDDLSGMDVARKLLILAREAGYQLELGDIEVESVLPISFDASGDVASFMQRLPAADDEFASRVAQARDEGKVLRYVGVIEEGRCKVKISAVGGNDPLFKVKDGENALAFYSRYYQPLPLVLRGYGAGNDVTAAGVFADLLRTLSWKLGA

SEQ ID NO: 703 - DNA, 2436 bp, Erwinia carotovora subsp. atroseptica SCRI1043
  CDS (1)..(2436): transl_table=11
atgagtgcattaggagtagcgccatcggtaacgggccgacagctgcataagtttggcggtagcagtctggctgatgtgaaatgttacctgcgcgtagccggtattatggcggagtatagccaccccggtgatttgatggtggtgtctgccgcaggcagtaccacaaaccagctgattagctggttgaaactgagtcagagcgatcgtctgtcggcgcatcaggttcagcaggcattacgccgttatcaaagtgaattgattgccgggcttctacccgcacaggatgcagaggcgctgacagcacagtttattcgcgatctggagcgtttggctgcgctgctggatggcaagattacggatgctgtctacgccgaagtggttgggcacggtgaaatttggtcggctcgtttgatgtgcgccgtgctgaatcatcgggatatgaatgcagcctggctggatgcgcgtgattttctctgtgcggaacgtgccgcgcagcctcaggttgatgaagggcgctcctggccgctgttgcagcaatatctgacgcaacattcagggcagcgtttggttgtgactggctttatctgccgtaatgacgcgggtgaaacggtactgctgggtcgtaatgggagtgactactccgcgacgcaaattggtgcgctggcgggtgttgagcgcgtgaccatctggagtgacgttgccggcgtttatagcgctgacccgcgcaaagtgaaagatgcctgcctactgccactgctgcggttggatgaagccagcgaactggcacgtctggcagctccggtgctgcatacgcgtactttgcagcctgtttctggcagcgatatagatttgcagctgcgttgcagctatcagcctgaacagggttcgacgcgcatcgaacgcgtgctggcctcgggtacgggtgccaaaattgtcaccagtcatgatgatgtgtgcctgattgaagttcaggttccttccgaacatgatttcgtgctactgcaaaaagaagtcgaacagattctgaaccgtgcgcaattgaaaccgctggcgattggcgttcatcaggatcgtagcctgctgcaactgtgctacacctctgaagtggtggaaagcgcattacagttgctgacacaggccgcgctgcccgttgaactcagcgagcgtgatgggctggcgatggtcgccatggtcggtgcgggtgtgggtaaaaacccgctacatagccaccgtttctaccagcagttgaaagatcagccgattgaatttgtccgccaggccgatgatggcatcagtctggtggcggttttgcgtgttggcccgacggaacatttgattcgtggtttgcaccattccctgttccgcgcggaaaagcgtatcggtctggtgctgttcggcaagggaaatattggttcacgctggctggaactgtttgcgcgtgagcagagcaacctttctgcacgtactggcttcgaatttgtactggctggcgtggtggacagtacgcgcagcctgttgaactatgatgggttggatgctagccgcgcattggctttcttcgaaagtgaagcgcaagagcgggatggcgaagatctgttcttgtggatgcgtgcgcatccctttgatgatttagtggtattggacgttaccgccagtgaatcggtcgccgatctgtatttggatttcgccagctacggttttcacgtcatcagcgccaacaaactggcgggtgcatccggcggcaataactatcgccagatccgcgatgcattcgccaaaaccgatcgccactggctgtataacgcgaccgttggtgcgggtttgccggtcaactttgccgtacgcgatttacgggaaagtggcgacagtattctgtcgattagcgggattttttccggcacgctctcttggctgtttttacagttcgacggcaccgtaccgttcaccgaactggtcgatcaggcttgccagcaggggttgaccgaaccggatccgcgcgttgacctctccggtcaggatgtcatgcgtaagctggtgattctggctcgtgaggcgggatatgatatcgaacctagtcaggttcgggtcgagtcgctggttccaccgagctgtgaacagggatctgtcgattacttctttgaaaacggagattcgctgaacgaacagatgctgcaacgtctggaagccgcacaggaaatgggcttggttctgcgccatgtcgcacgctttgacagtaacggtaaagcacgcgtcggcgtcgaggcggtccgtcccgatcatcctctggcttcgctgttgccgggtgataatgtatttgcgattgaaagccgttggtatcgggataacccgttggttatccgtggaccgggtgcggggcgcgatgtgacggcgggtgcgcttcaatctgatctaagccgtttggtgcagttactgtaa

SEQ ID NO: 704 - protein, 811 aa, Erwinia carotovora subsp. atroseptica SCRI1043
MSALGVAPSVTGRQLHKFGGSSLADVKCYLRVAGIMAEYSHPGDLMVVSAAGSTTNQLISWLKLSQSDRLSAHQVQQALRRYQSELIAGLLPAQDAEALTAQFIRDLERLAALLDGKITDAVYAEVVGHGEIWSARLMCAVLNHRDMNAAWLDARDFLCAERAAQPQVDEGRSWPLLQQYLTQHSGQRLVVTGFICRNDAGETVLLGRNGSDYSATQIGALAGVERVTIWSDVAGVYSADPRKVKDACLLPLLRLDEASELARLAAPVLHTRTLQPVSGSDIDLQLRCSYQPEQGSTRIERVLASGTGAKIVTSHDDVCLIEVQVPSEHDFVLLQKEVEQILNRAQLKPLAIGVHQDRSLLQLCYTSEVVESALQLLTQAALPVELSERDGLAMVAMVGAGVGKNPLHSHRFYQQLKDQPIEFVRQADDGISLVAVLRVGPTEHLIRGLHHSLFRAEKRIGLVLFGKGNIGSRWLELFAREQSNLSARTGFEFVLAGVVDSTRSLLNYDGLDASRALAFFESEAQERDGEDLFLWMRAHPFDDLVVLDVTASESVADLYLDFASYGFHVISANKLAGASGGNNYRQIRDAFAKTDRHWLYNATVGAGLPVNFAVRDLRESGDSILSISGIFSGTLSWLFLQFDGTVPFTELVDQACQQGLTEPDPRVDLSGQDVMRKLVILAREAGYDIEPSQVRVESLVPPSCEQGSVDYFFENGDSLNEQMLQRLEAAQEMGLVLRHVARFDSNGKARVGVEAVRPDHPLASLLPGDNVFAIESRWYRDNPLVIRGPGAGRDVTAGALQSDLSRLVQLL

SEQ ID NO: 705 - DNA, 2451 bp, Mannheimia succiniciproducens MBEL55E
  CDS (1)..(2451): transl_table=11
atgcgcgtacttaaatttggcggcacctcgcttgccaacccggaaagatttttgcaggcagcccggcttatcgaaaaagctcatttggaagagcaggccgccgccgttttgtcggcgcccgcaaaaattaccaatcacctcgtcgctctttctgaaaaagccagccttaatcaacctaccgaaacaaattttaatgaagcgttagacattttttataacattattaacgggctgcatgaaaaaaataataattttgatcttaaaggtacatcgcagcttatcgaaagcgaattcaatcagcttgcggaattattagaacaaattcgccaagcgggcaaagtggaagacgcggtaaaagcaacaatcgactgtcgcggtgaaaaattatctatcgctatgatgaaagcctggtttgaagcttgcggatatgaggtaacggtaattaatccggtggaaaaactgttagcttacggcaattacctggagtcatcggtcgatattgaggaatcggcaaaacgtgttgatgtggcttcaattccgaaaaataacgtcgtattaatggcgggatttaccgcaggaaatgaaaaaggcgaacttgttctgttaggacgtaacggttcggattattccgccgcttgtttagcggcctgcttgaacgccagtgcttgcgaaatctggactgatgttgacggcgtgtttacctgcgatccgcgtttggtaccggatgcccgtttgctgccaagtctttcttaccgcgaagcgatggaattgtcttatttcggtgcaaaagtgattcatccgagaaccatcggcccgttagttcgcagcaatattccttgtttgattaaaaatacgggaaatccgaccgcccccggttctattattgacggaaatgagccgcaatcaggcgaattacaggttaaaggtattaccaatttagataatgtggcgatgtttaatgtgtcgggtccgggtatgcaaggcatggtaggcatggctgcacgggttttctcaacgatgtcgaaagccggtgtttccgttattttgattactcaatcttcttccgaatacagtattagtttctgtgtgccgagtaaattagctgcgaaagcaaaagacgcgttaaatacggaattcgctaaagaattattagacaaagatttagaaccggttgaggttatcgaagatctttcaattatttccgtagtcggcgacggtatgaaacaggcgaaaggtattgcggcgcgtttcttctccgcattatcacaggcgaatatcagcattgtcgccattgcccaggggtcttccgaacgttcgatttccgccgtagtggcgcaaaataaagctattgaagcggtgaagtccacccaccaggcacttttcaacaataagaaaagcgtcgatatgtttcttgtgggggtcggcggtgtcggtggcgaattaatcgaacagattaagcagcaaaaagagtatctggcaaaaaaggatattgaaattcgggtttgcgctttggcaaactcgaataaaatgttgttgaatgaaaacggtttatcgctggataactggaaagaagatctatccaatgccacccaaccgtcggactttgacgtattactgtcatttattaaattgcaccatgtggtgaatccggtatttgtggactgcacaacggcagagtccgtatccggtttatatgcgcgcgctttaagcgagggttttcatgtggttacgccaaataaaaaagccaatacccgcgaaatggcgtattataatttggtacgtgaaaatgcgcgcaaaaatcaacgtaaattcctgtacgataccaatgtcggtgcgggcttgccggttatcgaaaatctgcagaatttgcttgccgccggcgatgaagtagaacgtttcaacggaattttatccggttccttatcctttattttcggtaaactggaagaaggtctgacattgtcgcaggcaacggcgcttgcccgtgaaaaaggctttaccgagccggatccgcgtgacgatttatccggtcaggatgtggcgcgtaagctgttaattttagcccgcgaaagcggtttagaattagaactttccgatgtggaagtggaaagcgtattgccgaaaggtttttccgaaggaaaaagtgcggtggaatttatggaaattttgccgcaactggatgccgaatttgccgcccgtgtagaaaaagcaggtgctcagaataaggttttacgttatgtcggacaaataaatgacggcaaatgcaaggtgtcgattgtggaagtcgatgcggacgatccgttatataaagtcaaaaacggtgaaaacgcactggcattttatactcgctactatcaaccgattccgctattattacgtggttacggtgcaggtaatgcggtaaccgccgccggtatttttgccgatatcctcagaacgttaagaaattaa

SEQ ID NO: 706 - protein, 816 aa, Mannheimia succiniciproducens MBEL55E
MRVLKFGGTSLANPERFLQAARLIEKAHLEEQAAAVLSAPAKITNHLVALSEKASLNQPTETNFNEALDIFYNIINGLHEKNNNFDLKGTSQLIESEFNQLAELLEQIRQAGKVEDAVKATIDCRGEKLSIAMMKAWFEACGYEVTVINPVEKLLAYGNYLESSVDIEESAKRVDVASIPKNNVVLMAGFTAGNEKGELVLLGRNGSDYSAACLAACLNASACEIWTDVDGVFTCDPRLVPDARLLPSLSYREAMELSYFGAKVIHPRTIGPLVRSNIPCLIKNTGNPTAPGSIIDGNEPQSGELQVKGITNLDNVAMFNVSGPGMQGMVGMAARVFSTMSKAGVSVILITQSSSEYSISFCVPSKLAAKAKDALNTEFAKELLDKDLEPVEVIEDLSIISVVGDGMKQAKGIAARFFSALSQANISIVAIAQGSSERSISAVVAQNKAIEAVKSTHQALFNNKKSVDMFLVGVGGVGGELIEQIKQQKEYLAKKDIEIRVCALANSNKMLLNENGLSLDNWKEDLSNATQPSDFDVLLSFIKLHHVVNPVFVDCTTAESVSGLYARALSEGFHVVTPNKKANTREMAYYNLVRENARKNQRKFLYDTNVGAGLPVIENLQNLLAAGDEVERFNGILSGSLSFIFGKLEEGLTLSQATALAREKGFTEPDPRDDLSGQDVARKLLILARESGLELELSDVEVESVLPKGFSEGKSAVEFMEILPQLDAEFAARVEKAGAQNKVLRYVGQINDGKCKVSIVEVDADDPLYKVKNGENALAFYTRYYQPIPLLLRGYGAGNAVTAAGIFADILRTLRN

SEQ ID NO: 707 - DNA, 2436 bp, Bacteroides fragilis NCTC 9343
  CDS (1)..(2436): transl_table=11
atgaaagtaatgaaattcggcggaacgtccgtaggttccgtgaacagcattttaagcgtaaagaaaatcgtagagtctgccggtgaaccggtaatcgtagtagtgtctgcattgggcgggatcactgaccagttgatcagtacctcccgaatggccgccatgggcgatgcagcttacgaaggggcataccgggaaatagttcgccgccacgaagagatggtgcagggagtgattcctgccggagagactcagaccctgttgcactatcaggtgaatgaattgctcgacgaactgaaagatatctttcagggtatttatctgattaaagatctttctccgaaaacgtccgataccattgtcagttatggtgaacgtctgtcttcactgattgcgtcaagactgatccaaggggctgtatggttcgactcacgtacttttatcaagacagaaaagaaacataataaacatacactggacacggaactgaccaatcggttggtgcgggaggctttcaaagaaatcccccgggtttcgctggtacccggattcatctcttcggataaggtttcgggagacgtaacgaatctgggcaggggcggttccgactataccgcagctgttattgccgcagctctcgatgccgatagtctggagatttggacggatgtagacggcttcatgacagccgacccgcgtgtgatcagtacggcctatactatcagcgagctgacttatgtagaggctaccgaactttgtaatttcggtgcaaaagtggtgtatccgcctaccatctatccggtatgtcacaaaaacataccgatcctgattaagaatactttcaacccggatgcccagggaacggtgatcaaacaacacgtagaccacacgaagagcaaagccatcaaagggatttcgtccatcaacgacacgagcctgattaccgtacagggtttaggtatggtgggcgtgatcggtgtcaactaccgcatctttaaggcgctggcaaagaatggaatcagtgtgttcctcgtttcgcaggcttcatcggagaacagtacctctatcggtgtgcgtaatgccgatgccgatctggcttgcgaagtgctgaacgaagagtttgccaaagagatcgaaatgggtgagatttcgcctatccaggcagagaagaacctggctacggtagctatcgtgggtgagaacatgaaacatacgccgggcattgccggaaagctgttcggtacgctgggacgaaatggcatcaatgtgatagcctgtgcacagggagcttccgagaccaacatctcgtttgttgtcgattcaaagtcgttgcgtaaatcgctgaatgtgattcacgactcgttcttcctctccgaatatcaggtgctcaacctctttatctgcggtgtgggcacggtgggaggaagtcttgtcgagcagatccgccagcagcagaagaagctgatggtagaaaatggcctgaaactccatgtggtaggtattatcgatgcgacgaaggcgatgttcagccgtgccggattcgatctggccaactatcgcgaagagctgaaagagaagggagtggacagttcgctggatactatacgtgacgagattatcggcatgaatatattcaattcggtatttgtggattgtacggccagtccggacattgcctctctatataaggacttcctgcaacataacatttctgtggtggcggccaataagattgctgcttcatcggcttacgagaattaccgtgaactgaagctgatagcccgccagcgtggtgtgaaatatctgtttgaaaccaacgtgggggccggacttccgattatcaataccatcaatgacctgatacatagcggtgataagattctgaagatcgaggcagtgctttcgggtacgctgaactatattttcaataagatcagtgccgatgttcccttcagccgtaccatcaagatggcgcaggaagagcgttattcggaacccgatccgcgcatcgacctgagcggtaaggacgtgatccgtaagctcgtgatcctggcgcgtgaggccggatacaagctggaacaggaagacgtggagaagaatcttttcgtaccgaatgacttctttgaaggttcgctggaagacttctggaaaaaagtgcctagtctggatgctgatttcgaagctcgccgcaaggtgctcgagagtgagaataaacattggcgtttcgttgccaagctggagaacggcaaagcatccgtcggtttgcaggaagtggaccgcaaccatcctttctacggactggaaggcagcaataacatcatcttgcttaccaccgaacgctataaagaatatccgatgatgattcagggatacggtgcgggtgccggagtgacggcggccggtgtatttgctgacattatgagcattgcaaacgtataa

SEQ ID NO: 708 - protein, 811 aa, Bacteroides fragilis NCTC 9343
MKVMKFGGTSVGSVNSILSVKKIVESAGEPVIVVVSALGGITDQLISTSRMAAMGDAAYEGAYREIVRRHEEMVQGVIPAGETQTLLHYQVNELLDELKDIFQGIYLIKDLSPKTSDTIVSYGERLSSLIASRLIQGAVWFDSRTFIKTEKKHNKHTLDTELTNRLVREAFKEIPRVSLVPGFISSDKVSGDVTNLGRGGSDYTAAVIAAALDADSLEIWTDVDGFMTADPRVISTAYTISELTYVEATELCNFGAKVVYPPTIYPVCHKNIPILIKNTFNPDAQGTVIKQHVDHTKSKAIKGISSINDTSLITVQGLGMVGVIGVNYRIFKALAKNGISVFLVSQASSENSTSIGVRNADADLACEVLNEEFAKEIEMGEISPIQAEKNLATVAIVGENMKHTPGIAGKLFGTLGRNGINVIACAQGASETNISFVVDSKSLRKSLNVIHDSFFLSEYQVLNLFICGVGTVGGSLVEQIRQQQKKLMVENGLKLHVVGIIDATKAMFSRAGFDLANYREELKEKGVDSSLDTIRDEIIGMNIFNSVFVDCTASPDIASLYKDFLQHNISVVAANKIAASSAYENYRELKLIARQRGVKYLFETNVGAGLPIINTINDLIHSGDKILKIEAVLSGTLNYIFNKISADVPFSRTIKMAQEERYSEPDPRIDLSGKDVIRKLVILAREAGYKLEQEDVEKNLFVPNDFFEGSLEDFWKKVPSLDADFEARRKVLESENKHWRFVAKLENGKASVGLQEVDRNHPFYGLEGSNNIILLTTERYKEYPMMIQGYGAGAGVTAAGVFADIMSIANV

SEQ ID NO: 709 - DNA, 2448 bp, Haemophilus influenzae 86-028NP
  CDS (1)..(2448): transl_table=11
atgcgcgtacttaaatttggcggcacttcgcttgcaaatccggaacgtttttcccaagcggcgaaattgatcgaacaagctcatttagaagagcaggctgcaggtgttttatctgcaccagccaaaataaccaaccatctcgtcgccctttctgaaaaagctgcattaaatcaatcaaccgatacgcatttcaacgaagcaatcgaaattttctataacatcatcaatggcttacatgccgaaaataatcaattcgacttaaatggcaccaaggcacttattgatgctgaatttgctcaaatcaaaggattattagaagaaattcgtcaggcaggaaaagtagaagatgcagttaaagcgaccattgattgccgtggggaaaaactttctattgcaatgatgaaagcttggtttgaagcgcgtggctatagcgtacatattgtggatcctgtcaaacaattattggcaaaaggcggttatcttgaatcttctgttgaaattgaagaatcaacaaaacgtgttgatgcagcaaatatcgcaaaagataaagtggtgctgatggcaggttttactgcgggtaatgaaaaaggcgagttggtattgctcggtcgtaatggctcagactattctgccgcctgtttagccgcttgtttaggcgcaagtgtatgcgaaatttggaccgatgtggacggcgtttatacttgcgatccgcgtttagtgcctgatgcacgtttattaccaacgctttcttatcgtgaagcgatggaactctcttatttcggtgcgaaagtgattcatcctcgtacgattgggccattgttgccacaaaatattccttgtgtcattaaaaatacaggaaatccttctgcgccaggttcgattattgatggcaatgtgaaatcagaaagtttgcaagttaaaggtatcactaacttagacaatttggcgatgtttaatgtgtcaggccccggtatgcaaggtatggtaggcatggcatctcgcgtattttcagccatgtcaggcgcaggcatttcagttattttaattactcagtcttcgtctgaatatagtattagtttctgtgtgcctgtgaaatctgcagaagtagcgaaaaccgtactagaaacggagtttgctaatgaattaaatgaacatcaattagaatcaattgaagtgattaaagatttatccattatttctgttgtgggcgatggaatgaagcaagcgaaaggcattgctgctcgtttcttctcggcattagcgcaggcaaacattagcattgtggcgattgcacaaggatctagcgaacgttcaatttctgcggttgtgccgcaaaataaagccattgaagcggtgaaggctacccatcaggcgcttttcaataataaaaaagtcgtggatatgtttttagtgggcgttggtggagtaggcggagaattaatagagcaggtaaagcgtcaaaaggagtatctagcaaagaagaatgttgaaattcgagtttgtgctattgcgaattccaaccgtatgttgcttgatgaaaatggattaaatttagaggattggaaaaacgatttagaaaatgcgactcagccatcagattttgatgtattgctttctttcattaaattacatcatgtggtgaatccagtatttgtagattgtacttcagccgaatctgtagcagggctttatgctcgtgcgttaaaagaaggtttccatgtggttacgccaaacaaaaaagcgaatacacgagaattagtttattacaatgagttacgccaaaatgcccaagcaagccagcataaatttttatatgaaaccaatgtaggtgcgggcttgccagttattgaaaatctccaaaacttacttgcagcaggtgatgagcttgaatattttgaagggattttatctggctcgctttcctttatttttggtaagttggaagaaggactttctctttcagaagtaaccgcacttgcgcgtgaaaaaggctttactgagccagatcctcgagatgatctttctggacaagatgtagcgcgcaaattattaattcttgctcgtgaagcgggaattgaacttgaactttcagatgttgaagttgaaggtgtattgccgaaaggcttctctgaaggaaaatctgcagatgagtttatggcaatgttgccacagcttgacaaggagtttaaaactcgcgttgccacagctaaagcagaaggcaaagtattgcgttatgttggaaaaattagtgaaggaaaatgcaaagtatccatcgttgcggtagatctgaataatccactttataaagtgaaagatggtgaaaatgccttggcattttatactcgttattatcaaccgattccacttttattacgtggttatggcgcaggtaatgcagttactgcggcaggtatctttgcagatattttaagaacattacaacattaa

SEQ ID NO: 710 - protein, 815 aa, Haemophilus influenzae 86-028NP
MRVLKFGGTSLANPERFSQAAKLIEQAHLEEQAAGVLSAPAKITNHLVALSEKAALNQSTDTHFNEAIEIFYNIINGLHAENNQFDLNGTKALIDAEFAQIKGLLEEIRQAGKVEDAVKATIDCRGEKLSIAMMKAWFEARGYSVHIVDPVKQLLAKGGYLESSVEIEESTKRVDAANIAKDKVVLMAGFTAGNEKGELVLLGRNGSDYSAACLAACLGASVCEIWTDVDGVYTCDPRLVPDARLLPTLSYREAMELSYFGAKVIHPRTIGPLLPQNIPCVIKNTGNPSAPGSIIDGNVKSESLQVKGITNLDNLAMFNVSGPGMQGMVGMASRVFSAMSGAGISVILITQSSSEYSISFCVPVKSAEVAKTVLETEFANELNEHQLESIEVIKDLSIISVVGDGMKQAKGIAARFFSALAQANISIVAIAQGSSERSISAVVPQNKAIEAVKATHQALFNNKKVVDMFLVGVGGVGGELIEQVKRQKEYLAKKNVEIRVCAIANSNRMLLDENGLNLEDWKNDLENATQPSDFDVLLSFIKLHHVVNPVFVDCTSAESVAGLYARALKEGFHVVTPNKKANTRELVYYNELRQNAQASQHKFLYETNVGAGLPVIENLQNLLAAGDELEYFEGILSGSLSFIFGKLEEGLSLSEVTALAREKGFTEPDPRDDLSGQDVARKLLILAREAGIELELSDVEVEGVLPKGFSEGKSADEFMAMLPQLDKEFKTRVATAKAEGKVLRYVGKISEGKCKVSIVAVDLNNPLYKVKDGENALAFYTRYYQPIPLLLRGYGAGNAVTAAGIFADILRTLQH

SEQ ID NO: 711 - DNA, 2478 bp, Colwellia psychrerythraea 34H
  CDS (1)..(2478): transl_table=11
atgcgtgtacttaaatttggtggctcttcactagcttcagcagagcgttttcgtcaagttgccgatattatccatgataaaagcaaatcatcaaaacttgccgttgttgtatcggccccacaaggggttaccaaccacttagttgctatgactgaaaatattagcgatgaagaaaaagtagtggcagatttaggtcacttcaaacgtgcaattactactattattgatgatttatcggcaagtataagcaactttaacaatcaacattgtgagcaagcgttagcgaattatgaacatcaaatttcacgctatatgcaaggtgcaatgttactaacctattgcccagatcatatccgtgcccgtattatcagtactggtgaacgtttaagtgtggcaatacttgatgccgtgttacaagcttatagcgtacaagtatcactgttagcaccagaaaagtttttgtataccaacaagtcatctttaaatgcagtagcagatttagtgttgtcgaaagaaaaatttgagcatgaatacactgaattaaatcaagtatcgttaatgccaggctttattggggtgaatgcggacaacaatgatggtacgccagaagtaactacattagggcgtaatggctctgattattcggcagcggtattagctgtttgtgctgtcgctgagtgttgtgagatttggacggatgtagatggagtctataacgcagatccgcgttacattaaagaagctaaattactcgattatttatcgtatcaagaagcaatggagctctcttattttggcgccagtgttttacacccaaaaacaattggaccaattgctcagtatcatatcccttgtttaattaagaataccagtaacccaagtgcaccaggtaccttaatttccaatgagaatgaccaacaaaaacgcgttaaagcaatttctaaccttgatgacttaaccatggtaaacgtgtcaggacctggcatgaaaggcatggtaggcatggcgagccgtgtattcgcaactatgagcagagaaaatatttctttggtgcttattagtcaatcatctagtgagtattgcattagcttctgtatttattcaagtgactctgcgcgtgctaaacaaagcttacacgaagagtttgaattagagctgttaaatggcctacttgaaccgttagcgctaaaaggtgaactatcaattgtgtcacttgttggtgatggtatgcaccatcaacgaggcgtggcagctaaattctttagttcattagcacaagcacgagttaatgtggttgctattgctcaagattcatcggagcgcagtatctcagttgttgtggaacaacgaaaatgtatggatgcgatgaaagtaagtcaccagaacttcttttctcataaaccaacgattgatgttttcttagtcggctgtggtgttgttggcagtgagctaatagcgcaaatatctcgtcaacaagcgagtttgaaaaagcaaaacattgtcttgaaagtttacggtattgctaactcgaaaggcatggtatttgataaagaaggtatcgacttaaataactggcaagatgctatggcgaatgcaactgaagcgctagcagttaatgtagataatcttaaaggttttgttcgtgataaccatctaatcaaccctgtttttgttgactcaacgtcaaatgaaacattagcaatgagttatgtagattaccttgctgaaggttttcatattgttacgccaaataaaaaagcaaatactgactcttgggaatattatcaagagttacgtagtactgcacaaaaaaccaatcgtcgtttcttatatgaaacaacggtcggtgctggtttacctgttattgataccctacaaagcttaattaaagcgggcgatgagttacagcgtttcgaaggtgtcttgtcgggttcgttatcttatatgtttggtaaattagaagagggtatgtcgttatcagaggcgactgcaattgctaaagaaaatggtttcactgaaccagaccctcgtgatgacttaagtggtatggacgttgcgcgtaaattattaattatggctcgtgaagctggcatgcagttagagttatcagatatcaatattgagtcagtattacccgacgattttgatgccagcggtgatgttagtcagtttatgagtaacttaactaagcttgatggtgactttgcagagcgcgtagcgagtgcaaaattagaaggtaaagtacttcgttatattggtaatattgttgatggtaattgccaagtttctatagagtctgtaggaattaaccacccgttatatagcattaaagatggcgaaaacgccttggctattcatagtcgttattaccagcctttaccgtttgttttacgcggttacggtgcgggcgcagcggttacagctgcaggtgtttttggtgatttattaagaaccttagcatgggagcaacagcactaa

SEQ ID NO: 712 - protein, 825 aa, Colwellia psychrerythraea 34H
MRVLKFGGSSLASAERFRQVADIIHDKSKSSKLAVVVSAPQGVTNHLVAMTENISDEEKVVADLGHFKRAITTIIDDLSASISNFNNQHCEQALANYEHQISRYMQGAMLLTYCPDHIRARIISTGERLSVAILDAVLQAYSVQVSLLAPEKFLYTNKSSLNAVADLVLSKEKFEHEYTELNQVSLMPGFIGVNADNNDGTPEVTTLGRNGSDYSAAVLAVCAVAECCEIWTDVDGVYNADPRYIKEAKLLDYLSYQEAMELSYFGASVLHPKTIGPIAQYHIPCLIKNTSNPSAPGTLISNENDQQKRVKAISNLDDLTMVNVSGPGMKGMVGMASRVFATMSRENISLVLISQSSSEYCISFCIYSSDSARAKQSLHEEFELELLNGLLEPLALKGELSIVSLVGDGMHHQRGVAAKFFSSLAQARVNVVAIAQDSSERSISVVVEQRKCMDAMKVSHQNFFSHKPTIDVFLVGCGVVGSELIAQISRQQASLKKQNIVLKVYGIANSKGMVFDKEGIDLNNWQDAMANATEALAVNVDNLKGFVRDNHLINPVFVDSTSNETLAMSYVDYLAEGFHIVTPNKKANTDSWEYYQELRSTAQKTNRRFLYETTVGAGLPVIDTLQSLIKAGDELQRFEGVLSGSLSYMFGKLEEGMSLSEATAIAKENGFTEPDPRDDLSGMDVARKLLIMAREAGMQLELSDINIESVLPDDFDASGDVSQFMSNLTKLDGDFAERVASAKLEGKVLRYIGNIVDGNCQVSIESVGINHPLYSIKDGENALAIHSRYYQPLPFVLRGYGAGAAVTAAGVFGDLLRTLAWEQQH

SEQ ID NO: 713 - DNA, 2475 bp, Myxococcus xanthus DK 1622
  CDS (1)..(2475): transl_table=11
gtgatgaagttcggtggcacgtccgtgggctcacccacgcggctccgccaggtagtggagctgattggcaagcacgcgcggcaaggcccgctggcagtggtcgtctccgcgatgggcgacaccacggactggctgctggacgcggcccacctcgccaccgagggtgacctggaaggcgcgctcgcggtggccacgcgcatcgccgacctcgcgaaggccaacgccgcggcgctggcgcccggacaagccaccgcgctggccgagcgtgtcgacgggctcctcgcgccgctgcgtcagttgctccatggcgtctcactcacgcgagagtgctccgcccccacgagagaccgggtgctgtcgttcggtgagttggtgtccgccacgctgctggcggagctgctcacggcccatcgcacgcccgccaccttccgtgacgcgcggcagctcctggtgacggatgaccgctttggcgcggcgcgggtggacctggttcggacgcgggagcgactccaagccgcccgggagacgtggggcgtcgaggtgcccgtgctccccggcttcatcgccgcgacgccggatggacgcaccaccacgctgggccgcaacggctccgactacaccgcggcgctggtggcccagggcctgggcgcgtcggaagtcacggtgtggacggacgtgctcggcctgcacaccgccgacccggagctggtcacggacgcctaccccgtggcgcacctcacccatggcgagggcctggagctggcggcggtgggtgcccgcatgctgcacccgcgcacgatgattccgctcatcgagtccggaatctccctgcgcatccgcaacaccatggagccggagcacccgggcacgctcatcgacgccatcggttcgcgcgacggccagcgtcccgcctgcatcgcgacgcgcgaggacctggcgctgctcggcatcgaggtgcgcaagctgtccgaccagttccaactgggggagcgcgtgctggccgcgctgcgagaagcgcgcgtcacggtgtggatgaccgcgcagtccgccaatggccagtcactggccgtcgtcgtgcctcgccccgacgcggagcacgcgcggtccgtgctcgtcaccgagctggcgcaggagctgtcacgccgcgaagtggaaccgctggaggtccgccagccggtgacgctgctgacgctggtggcggagaccatgggccacggcgtcaacgtggccgggcgcttcttcagcgcgctgggcgcggtgggcgtcaacgtgcgcgccagcgcccagggtgccagctcccgctccctttcgtgtgtcgtcgacgcggcggacaccgccgtcgccgcgcgcaccacgcacgcggccttcaacctggcccatcagcaggtgagcctcttcgtcctcggccgaggcacggtgggcggacaactgctggcccagctgcgcgcccagcaagcgctgctccgggacaggcacggcatcgcgctgcgcgtcgtggggctggcggacagcaagcgcgcgctcttcgacgcggcggggctcacgctcgatggcgtggaggcgcggctcgaaggcgtgacgcccgaggcgccccaggcgcgcaccctggtccccttgttggacgcgctccggcggctgcccgtccccatcctggtcgactgcaccgccgcgggcgggttggaggcgctctacacggaggccttccagcgcggcatccacgtggtggcggccaacaagaagccgctggcgctgccgtgggaggcccgcgaagcgctggtggacacggcgcgccgcaaccacgtcgcgtaccactacgagacgacggtggcgtccagcctgcccgtcatcgacacgctggcgaacctggtgcgcaccggtgacaccgttcgcctcatcaccgcgtccctgtccggcagcctgggcttcatctgcaacgaactgacggccggcgtgcccctgtcccgggccgtccgcaccgcccgggagcgcggcttcacggagccggaccctcgcgaggacctgagcggcacggacgtcgcgcgcaaggcgctcatcctcgctcgggagctgggcctgccgctctccctgtcggacgtggcgctggagcccttcgtcgccacggacgaatgcgccagcgtggactcgttcttccaggtgctcgccacgcaggatgcggcctacgcggagcgcgtggcccgctgccgccacgccggcaccgtgctgcgctacctggcacgcatcgacccatcgaaggcgggcacaggcagtcccgtcatccgtgtgggccccgtaggcgttgaagcgggccaccccgcggcggacctccgcggctccgagtccttcgtctccttcaccaccacccgccacagcgacttcccgctcaccgttcgaggcgcgggcgcgggcggcgccgtcaccgcgtccggcgtgctggcggacatcctccgcatctcccagacgctgcgcggtcgctga

SEQ ID NO: 714 - protein, 824 aa, Myxococcus xanthus DK 1622
MMKFGGTSVGSPTRLRQVVELIGKHARQGPLAVVVSAMGDTTDWLLDAAHLATEGDLEGALAVATRIADLAKANAAALAPGQATALAERVDGLLAPLRQLLHGVSLTRECSAPTRDRVLSFGELVSATLLAELLTAHRTPATFRDARQLLVTDDRFGAARVDLVRTRERLQAARETWGVEVPVLPGFIAATPDGRTTTLGRNGSDYTAALVAQGLGASEVTVWTDVLGLHTADPELVTDAYPVAHLTHGEGLELAAVGARMLHPRTMIPLIESGISLRIRNTMEPEHPGTLIDAIGSRDGQRPACIATREDLALLGIEVRKLSDQFQLGERVLAALREARVTVWMTAQSANGQSLAVVVPRPDAEHARSVLVTELAQELSRREVEPLEVRQPVTLLTLVAETMGHGVNVAGRFFSALGAVGVNVRASAQGASSRSLSCVVDAADTAVAARTTHAAFNLAHQQVSLFVLGRGTVGGQLLAQLRAQQALLRDRHGIALRVVGLADSKRALFDAAGLTLDGVEARLEGVTPEAPQARTLVPLLDALRRLPVPILVDCTAAGGLEALYTEAFQRGIHVVAANKKPLALPWEAREALVDTARRNHVAYHYETTVASSLPVIDTLANLVRTGDTVRLITASLSGSLGFICNELTAGVPLSRAVRTARERGFTEPDPREDLSGTDVARKALILARELGLPLSLSDVALEPFVATDECASVDSFFQVLATQDAAYAERVARCRHAGTVLRYLARIDPSKAGTGSPVIRVGPVGVEAGHPAADLRGSESFVSFTTTRHSDFPLTVRGAGAGGAVTASGVLADILRISQTLRGR

SEQ ID NO: 715 - DNA, 2460 bp, Myxococcus xanthus DK 1622
  CDS (1)..(2460): transl_table=11
atgagggtgatgaaattcggggggacgagcgtgggcaacgccgagcggatgcgcggcgtggcggacctggccgcggcggcgcgcaagcagacgcgggtgatgatggtcgcctcggccgtgtccggcatcaccaacctcctgttggaagcggcccgcgcggcccaggaaggtcagccggtggagtcgctccacggccgcttcgaggacgtccaccgcggcatcatccgcgagctggcgccggagctgggggaggcgcggcagcgctcgctggaagagggactttccacgctggcctcggagctgcgcgggctgctgcagggcgtggggctgctgcgggaatgttcgccctccgtgctcgcgcacctgtccggactgggcgagcgcgccgcgtgcctgattctgggcgcgctgatgcacgcacgcggactggagccgcacgcagtggagccacgggacgtcatcctctgcgcgggggacccgctccaggccacgccgctccaggaggagacccgggcgcgcttcacgccgctgcgcgaggccggcggtcccgggttgatgctgatgccgggcttcttcggcggtgacacccggggcaagacgatgtgcctgggccggggtggctcggattattcggcggcgctggcggcggcggcgctggacgcggagctgctggagatctggacggacgtggacggcatcttcagcgccgacccgcggctggtgccagaagccttcccgctgcccgaggtgagcttcgaggaagccatggagctggcctacttcggcgccaaggtgctccaccccaagacgattgcgcccgcgcgcgagcgcggcatccccgtgcgcgtctgcaacagcttccgccccgaccacccgggcacccgcgtcaccgacgacgccgcgccgcccgagcacccggtgcgcggcctctccttccttcccggcatcgccctggtgaacctgggcggcgcggggctcaagggcgttccgggcaccgccgcccgcgtcttcgagtccatggccctcgccaacatctccgtggtgctcatcacccagggctccagcgaatgctccatcagcttctgcgtccagcaggcggacgcggagcgcgccgtgcaggccctggaagtcgcgttcgagatggagcgcgcggcgggcaaggtggacaccatcgagcagcagcgcgggctcgccgtgctcagcatcgtcggtgatggcatgcgccaccgcgtgggcgtggcgggcaccttcttcagcgcgctggcggacgtgggttgcagcatcgccgccatcgcgcagggctccagcgagcgcagcatctccgcggtcatcgcggagacggacggtccccgcgccctggcccatgtccacggtcggtgcttcggcaccacggaagtcgtggagctgctgctggccggcgtgggcagcgtgggcggcgagctgctcaagcaggtccaccagcaggcgcccaagctgcgcgcccacggcgtggacctgcgcgtctgcgtcatcgccaacagcaagcgcgtcgcgacggcgagcgagggaattcccctggaggactggaagcagcggctggcggccagcagcgacggcgcgcccctggacgccttccgcgactgggcccgcgcgaagcggccgggccggcccgtcttcgtggactgcaccagcagcgaggacatcgcgctcgcctacccgtcgctgatggaggcggggctccacgtcgtcaccgccaacaagaaggccaacgccggccagtggagccactaccgcaagctgcgcgagacggcctcccgtcaccaacgccgcttcctctacgagacgaacgtgggcgcggcgctgcccgtcatcgacacgctgaagaacatgcttcgcacgggagaccgggtgctgcgcgtggaaggcattctctccggctcgctgtcattcatcctgggcctgacggaggaaggcgtccccttgtcgcaggcggtgggcaccgccatggagaagcgcttcaccgaacccgacccgcgcgacgacctccacggcaccgacgtggcgcgcaaggtgctcatcctcgcccgcgagctgggccgccaggtggagttggagcaggtgacgctggactccctgctgccgtcggacttcgacgccaccgggccgctggatgacttcctcgcccggctcccccaggtggacgccgccttccagcgccgcgtggagacactccgcgcggagggcaaggtgctacgctacgtgggcagcgtcacggaggacggttgctttgtcgggctcgtgccggtgcccctgacgcacccgctggcggcggtgaagggcggagagaacgcgctcagcttcacctcggagcgctacagccccacaccgctggtgattcgcggctatggcgcgggcgccgcggtgacagcggctggcgtgctggcggacgtgctccgcctggtcgacgggccactcccctga

SEQ ID NO: 716 - protein, 819 aa, Myxococcus xanthus DK 1622
MRVMKFGGTSVGNAERMRGVADLAAAARKQTRVMMVASAVSGITNLLLEAARAAQEGQPVESLHGRFEDVHRGIIRELAPELGEARQRSLEEGLSTLASELRGLLQGVGLLRECSPSVLAHLSGLGERAACLILGALMHARGLEPHAVEPRDVILCAGDPLQATPLQEETRARFTPLREAGGPGLMLMPGFFGGDTRGKTMCLGRGGSDYSAALAAAALDAELLEIWTDVDGIFSADPRLVPEAFPLPEVSFEEAMELAYFGAKVLHPKTIAPARERGIPVRVCNSFRPDHPGTRVTDDAAPPEHPVRGLSFLPGIALVNLGGAGLKGVPGTAARVFESMALANISVVLITQGSSECSISFCVQQADAERAVQALEVAFEMERAAGKVDTIEQQRGLAVLSIVGDGMRHRVGVAGTFFSALADVGCSIAAIAQGSSERSISAVIAETDGPRALAHVHGRCFGTTEVVELLLAGVGSVGGELLKQVHQQAPKLRAHGVDLRVCVIANSKRVATASEGIPLEDWKQRLAASSDGAPLDAFRDWARAKRPGRPVFVDCTSSEDIALAYPSLMEAGLHVVTANKKANAGQWSHYRKLRETASRHQRRFLYETNVGAALPVIDTLKNMLRTGDRVLRVEGILSGSLSFILGLTEEGVPLSQAVGTAMEKRFTEPDPRDDLHGTDVARKVLILARELGRQVELEQVTLDSLLPSDFDATGPLDDFLARLPQVDAAFQRRVETLRAEGKVLRYVGSVTEDGCFVGLVPVPLTHPLAAVKGGENALSFTSERYSPTPLVIRGYGAGAAVTAAGVLADVLRLVDGPLP

SEQ ID NO: 717 - DNA, 2454 bp, Cytophaga hutchinsonii ATCC 33406
  CDS (1)..(2454): transl_table=11
atgaaagtgttaaagttcggtggtacctcagtaggttcagtagagagtatccgtaaagtcgcagaaattctttcttcatacaaaaagaaagaaaagtttgtagttgttttttctgccatgtcaggaattacaaatttacttgttgaagtaggtcagaaagcatctacaacagatatttcttatcagcaggttttaaaaacgattgaacagaaacacgtaagcacggcaaagacattgattgatgttaagaatcagggcaaagttattgcgcagctgaaattgatattaaacgaactgcaggatttattacacggcgtttatttattgaaagaattatcgccgcgctctaacgatcttgtgttaagttttggcgaaaggctttcttcatacctggtttctgagttcttgaaacaggaaggcgtagacgttacattcctggatgcccgtaaagtaattattaccgatagcagctttggttcagcgaaagttgatttcaaaaaaacagacaaagcgatcaaagattatttcaaagatattaagtccagtgtcgtaactaccggttttatcggttcaaccgataaaggtgaaacgacaacattaggcagaggcggttcggattataccgcttccgtttttggtgctgcgctggatagcgaaggcattgaaatatggacagacgttgatggcatcatgacggcagacccgcgtaaagtaaaacgcgcatttacgcttccgcaggtgtcctacatcgaagcaatggaaatgtcgcacttcggcgctaaagttatatatccgccaacattacagccggcattcaaaaaaagaattcccatctggattaaaaatacattcaatacagcatttgaaggaacgttgatcaacgagaaaacaagtgcaacggatcactccgtaaaaggtatttcttctatagaaaatatttctatgctgaaccttaccggcagcggtatggttggcgtaccgggagtatccggccgcttattcggggcattggcacgtaactttatcaatgttatcttaattacacaggcatcttcagaacattctatctgctttgtaattgattcaaaagaatcggcaaaagcgaaagatgctgttgaagaagagtttgaacatgagatcaaagcaggcaaaatagataaactgcacgaaaaagataatctggcaatcgttgcagttgttggcgataacatgcgccatacaccgggtattgcaggtaaactcttctcttctttaggaaaaaatggcatcaacgttgttgccattgcacaaggctcttcagagatcaacttgtctgtagtaatcggaaaagaagatttaacaaaagcattaaatgttattcatgaatcattcttcctgagtgatgtgaaaacgattaacgtgtttgtagtaggtgtaggtctgatcggcagtgcattattaaaacagctgcagaaacagtccacctatcttcagaaagaaaaaggctttaagatcaatgtggttggtttagcaaacagtaaaaaaatgcttatcaatgaaaatggtgtagcattgaccagctggaaagaaaaactggacgaaggagagaaagcaaatctgaaagaatttgtaaaacgaatgattgatttgaatcttcggaactccatttttgttgacaatacatccaacaaagatgtggtttcattctatcacaacatcttggatgagagcatttctatcgttacacccaacaaacttgctaattcaggtttatataaggattaccagaaacttcaggaaactgcctttaaacgtggtgtgaagttaatgtacgaaacgaacgttggtgcaggtcttcctgttatcaatacattaaacgatttaaaagacagcggtgataaaatcattcgcatagaaggtgttttatcggggacattatcatacattttcaacaacttcaaaggcgacaaaaagttcagcgatattgttaaagaagcgaaggaaaaaggctttaccgagccggatcccagagatgatttaaatggaaaagatgttgcacgtaagattttaatcctgtcacgtgaagcgggtttcaatctagagtttgatgatgtagtagtagaaaacattctgccggcaccctgtctgaaagcgaaaacagttgaagagttcttcgtcgaattagagaaaaataataatgtattctctaagaaacgtgatgaagcggataaagcaaataaagtattacgtttcattgcaaaacttgaaaacggaaaagcggaagtaagtttgcaatcggtagacagtacgcatccattcttctccctttcaggaagcgataacatgattgcgtatacaacggaaagatacaaagaaagaccattggtaattaaaggtcctggagctggtgcagaagttactgctgcaggtgtatttggtgatatcatccgtatcagtaattacttaaaggggtaa

SEQ ID NO: 718 - protein, 817 aa, Cytophaga hutchinsonii ATCC 33406
MKVLKFGGTSVGSVESIRKVAEILSSYKKKEKFVVVFSAMSGITNLLVEVGQKASTTDISYQQVLKTIEQKHVSTAKTLIDVKNQGKVIAQLKLILNELQDLLHGVYLLKELSPRSNDLVLSFGERLSSYLVSEFLKQEGVDVTFLDARKVIITDSSFGSAKVDFKKTDKAIKDYFKDIKSSVVTTGFIGSTDKGETTTLGRGGSDYTASVFGAALDSEGIEIWTDVDGIMTADPRKVKRAFTLPQVSYIEAMEMSHFGAKVIYPPTLQPAFKKRIPIWIKNTFNTAFEGTLINEKTSATDHSVKGISSIENISMLNLTGSGMVGVPGVSGRLFGALARNFINVILITQASSEHSICFVIDSKESAKAKDAVEEEFEHEIKAGKIDKLHEKDNLAIVAVVGDNMRHTPGIAGKLFSSLGKNGINVVAIAQGSSEINLSVVIGKEDLTKALNVIHESFFLSDVKTINVFVVGVGLIGSALLKQLQKQSTYLQKEKGFKINVVGLANSKKMLINENGVALTSWKEKLDEGEKANLKEFVKRMIDLNLRNSIFVDNTSNKDVVSFYHNILDESISIVTPNKLANSGLYKDYQKLQETAFKRGVKLMYETNVGAGLPVINTLNDLKDSGDKIIRIEGVLSGTLSYIFNNFKGDKKFSDIVKEAKEKGFTEPDPRDDLNGKDVARKILILSREAGFNLEFDDVVVENILPAPCLKAKTVEEFFVELEKNNNVFSKKRDEADKANKVLRFIAKLENGKAEVSLQSVDSTHPFFSLSGSDNMIAYTTERYKERPLVIKGPGAGAEVTAAGVFGDIIRISNYLKG

SEQ ID NO: 719 - DNA, 2451 bp, Haemophilus somnus 129PT
  CDS (1)..(2451): transl_table=11
atgcgagtactcaaatttggcggcacatctttagcgaatccgcaacgctttttacaagcagcagcacttattgaaaaagcacatttagaggaacaagccgccggcgttctctctgcaccggcaaagattaccaatcatcttgtagcactttctgaaaaagccgctttaaatcaacctactgatggtcattttgatgaggctcttgagattttttataatattattaatggcttatatgcagaaaatactcattttgatcttgttggcaccaaagcattaattgagtcggagtttgcacaaattaagggattattagaaaacattcgtcaggcgggaaaagtagacgatgcggtaaaagcgacgattgactgtcgaggtgaaaaattatctattgcgatgatgaacgcttggtttgaagccaaaggatatacggttactgtgattaatccggtagagaaattattggcttatggctcttatttggaaagcagtgtggatattgcggaatcaactaaacgagttgatgcaaaatctattcctgctaaaaatattgttttgatggcaggatttacagctggaaatgacaaaggcgaattagttttattgggtcgtaacggttctgattattcggcagcgtgtttggctgcttgtttaggtgcaagtgtttgtgaaatttggacggatgtagatggtgtttatacctgtgatcctcgtttagtccctgatgctcggttactttccagtttatcttatcgtgaagcaatggagctttcttattttggggctaaagttattcaccctcgcactattggtcctttagttgagccgcaaattccttgtttgataaaaaatacgggtaaccctgaaggtgcaggatcaattattgacaatcgtgaaaatatttctgaagggctacaggttaaaggcattactaatttagataatgttgctatgttcaatgtatcaggaccgggtatgcaggggatggttggtatggcagcgcgtgttttttccgccatgtcaaaagccagcgtttccgttattttaatcacgcaatcttcttctgaatatagtattagtttttgcgtaccgactaaagctattgaaaaagcaaaagcggcactaaatgctgagtttgaacaggagcttgtcgctaaagatcttgatcctgtggaagtaattcatgatttgtcaattatttccgtagtaggtgatggtatggcgcagtctaaagggattgccgctagtttcttttcggcgttagctagtgccaatatcagtattgttgctattgcacaaggctcttccgaacgttcgatttcagcggttgttcctttgaataaggcgattgaagcggttaaagcaactcatcaggcattgttcaataatcgtaaagttgttgatatgtttttagtcggtgttggtggggtcggtggtgaacttattgaacaaattaaacggcaaagtgaatatttggcaaaaaaagatattgagattcgtgtttgtgcattggctaattcgaataaaatgttgttaaatgaaaatgggttaaatcttgataattggcgtgaagatttggcaaatgcaacgcaaccgtcagattttgatgtattgctttctttcattaaattacatcatgtggttaaccctgtttttgtggattgcacaaccgctgaaagtgtagcaggattatatgagagagctttgaaagaaggctttcatgtgattacaccgaacaaaaaagccaatacccgtgagctggattactataaccaagtgcgtgaaaatgcacgtaaaaatcatcgtaaattcctttacgatactaacgttggtgcaggattgcctgtgattgataacttacaaaatctattagccgccggtgatgatgtagtgagttttaacggtattttgtcaggatctctctctttcattttcggtaagttggaggaggggctttctctttcagaagctaccgcacttgcccgtgaaaaaggctttacagaaccggatccgagggatgatttatcagggcaagatgtggctcgtaagttattgattttggcacgtgaaatcggtttagaacttgagttgtcggatattgaggtagagggcgttttaccgcaaggtttctcagagggaaaatcagcagatgaatttatggcgatgttgccttcattggacgaagaatttgcagaacgtgttgcaaaagcaaaatcggaaggcaaagtattgcgttatgtaggacaaattgaagaaggcaaatgtaaggtttctattgttgcagttgatggagacgcaccgttatataaagtgaagaacggtgaaaatgcgttagctttttatactcgttattatcagccgattcctttgttattgcgtggttatggtgctggtaatgcggtaacggctgccggaatttttgccgatattttaagaaccttaaaacattaa

SEQ ID NO: 720 - protein, 816 aa, Haemophilus somnus 129PT
MRVLKFGGTSLANPQRFLQAAALIEKAHLEEQAAGVLSAPAKITNHLVALSEKAALNQPTDGHFDEALEIFYNIINGLYAENTHFDLVGTKALIESEFAQIKGLLENIRQAGKVDDAVKATIDCRGEKLSIAMMNAWFEAKGYTVTVINPVEKLLAYGSYLESSVDIAESTKRVDAKSIPAKNIVLMAGFTAGNDKGELVLLGRNGSDYSAACLAACLGASVCEIWTDVDGVYTCDPRLVPDARLLSSLSYREAMELSYFGAKVIHPRTIGPLVEPQIPCLIKNTGNPEGAGSIIDNRENISEGLQVKGITNLDNVAMFNVSGPGMQGMVGMAARVFSAMSKASVSVILITQSSSEYSISFCVPTKAIEKAKAALNAEFEQELVAKDLDPVEVIHDLSIISVVGDGMAQSKGIAASFFSALASANISIVAIAQGSSERSISAVVPLNKAIEAVKATHQALFNNRKVVDMFLVGVGGVGGELIEQIKRQSEYLAKKDIEIRVCALANSNKMLLNENGLNLDNWREDLANATQPSDFDVLLSFIKLHHVVNPVFVDCTTAESVAGLYERALKEGFHVITPNKKANTRELDYYNQVRENARKNHRKFLYDTNVGAGLPVIDNLQNLLAAGDDVVSFNGILSGSLSFIFGKLEEGLSLSEATALAREKGFTEPDPRDDLSGQDVARKLLILAREIGLELELSDIEVEGVLPQGFSEGKSADEFMAMLPSLDEEFAERVAKAKSEGKVLRYVGQIEEGKCKVSIVAVDGDAPLYKVKNGENALAFYTRYYQPIPLLLRGYGAGNAVTAAGIFADILRTLKH

SEQ ID NO: 721 - DNA, 2469 bp, Shewanella sp. MR-4
  CDS (1)..(2469): transl_table=11
atgaaagttatgaaatttggtggtacctcgcttgcaaattggcagcgattttcaatggcggcggatatcgtggccaaggcggcaaaagcagagccggtggctacagtgctttctgcgcccgcgacagtgacaaacgccttgctagaaatggtcgatgtggcggtgaaaggggaagattattcgccagtcattcaacacgttgagcgggtgtttacctcgatctatcaggatgcggtcagttctggactctcgagcagtcaaagcgaagtgttgttcgccggactgagtgcgcagcttgcgcgttggcaggacagattacgcggtattacgctgctgcaggaatgccctgacggagtacgcgccgagatcgttgttgctggcgagcgtttgtctgctgctttgatggagcaagtcatgctggcaaaaggcatcacttcggcgcagctagatccgcgtgagctgtttttaggccgtggtcgtccactcgaatccgtggtggatattgccgtcagtaaaccgcgattcaaaaatcttgccctcgatgaaaaacgggtttgggtgatgcccggctttactgccgccgatgaagacggcaaggttgtgaccttaggccgtaacggttctgactattccgctgccgtgctggccgcttgtttagatgcttcaagttgtgagatctggaccgacgttgacggcgtatacaacaccgatcctcgggttgtcaccgatgctaagttgctgtcacagctcagttatcaagaggcgatggagctgtcttattttggggctaaggtactgcatcctaaaaccattgcgcctatcgctcagtttcatattccctgttatatcaagaacagctttaatcccgatgcgcccggcactctagtatcgaatcaggccgatgaaagcggtctgcaggtgaaggccatttctaatctggataatcaaaccatgtttgatgtatcaggccccggcatgaagggcatggtcggcatggcgagccgcacactggcggcaatttcccgtagtggcgtttccgtgtcactcatcacccagagttcttgcgaatacagcatcagcttttgtgtggctacaagcgagtccgccaaagtgaagtcggcactggagcaagagtttgagctagaaatcaaaagtgacttactcgagccgattgaaatgcgccatgacttagcaatcgtctccttgatcggtgatggaatgcgtacccataaaggtgtggcggcgcggttcttccaagcgttagcgcaggcgagtgtgaatattatcgcgattgcgcaaggctcctccgagcgttctatttcaactgtaatcgagcagcgaaagaccaaacatgcggttgccgcctgtcatcagggctttttcgatgtgcagcaatatttggatgtgtttttagtgggttgcggcaatgttggcgcaggcttactcgagcaaatcaaacatcaggcgagtgtgttaaaagagcagcacattagtattcgtgtctgcggcatcgtgaattcaagcaagatgttactcgatagtgccggtattgatttaaataattggcaaaacctgcttgccgacagtcagcagccaagcgatctgcccgcgctattggcttgggtgaaagagcaacaattattaaaccctgtactggtggattgtacttcaagcgatcaagtgtcgaaccagtatttagaggtaatgaatgcgggcatgcacgtggtgacgcccaataagaaggccaatactcgagactacgcttactaccaagcactgcgtcaaacagccttgaaacaacgtcgtcagttcttgtatgagactaacgttggcgcaggattgcccgttatcgataacttgaaaaaactgttatttgctggcgataagttgcacaagtttaacggtattttgtcaggctccttatcctttatcttcggtaaactcgatgagggtatgacgctgtcagaagcgactaaactggcgcgggaaaaatgctttaccgagcccgatccccgtgatgatttaagtggtatggatgtggcgcgtaaagtgctgatcttggcccgtgaagtgggtttgaaacttgagctaagcgatatcgttgtcgactcagtcttacctgacgattttgatgattcaggcgatgtggaaagttttatggcgcgtttacccgaggccgatgccgcgattgcggcgcgagtggcagaggcgaaagcgcagggtaaagtgctgcgttatgtggggcagattgaagaaggcgcgtgttatgtgcgtatcaccgaagtcgatgctaccgatccgctctacagcgtaaaaggcggtgaaaacgcgctagcattctacagccgttattatcagccgattccttttgtattacgtggatacggtgcgggtacagaagtgacagcggccggcgcctttgccgatgtattaagaaccttaaattggactcgtgaggtgagtgtatga

SEQ ID NO: 722 - protein, 822 aa, Shewanella sp. MR-4
MKVMKFGGTSLANWQRFSMAADIVAKAAKAEPVATVLSAPATVTNALLEMVDVAVKGEDYSPVIQHVERVFTSIYQDAVSSGLSSSQSEVLFAGLSAQLARWQDRLRGITLLQECPDGVRAEIVVAGERLSAALMEQVMLAKGITSAQLDPRELFLGRGRPLESVVDIAVSKPRFKNLALDEKRVWVMPGFTAADEDGKVVTLGRNGSDYSAAVLAACLDASSCEIWTDVDGVYNTDPRVVTDAKLLSQLSYQEAMELSYFGAKVLHPKTIAPIAQFHIPCYIKNSFNPDAPGTLVSNQADESGLQVKAISNLDNQTMFDVSGPGMKGMVGMASRTLAAISRSGVSVSLITQSSCEYSISFCVATSESAKVKSALEQEFELEIKSDLLEPIEMRHDLAIVSLIGDGMRTHKGVAARFFQALAQASVNIIAIAQGSSERSISTVIEQRKTKHAVAACHQGFFDVQQYLDVFLVGCGNVGAGLLEQIKHQASVLKEQHISIRVCGIVNSSKMLLDSAGIDLNNWQNLLADSQQPSDLPALLAWVKEQQLLNPVLVDCTSSDQVSNQYLEVMNAGMHVVTPNKKANTRDYAYYQALRQTALKQRRQFLYETNVGAGLPVIDNLKKLLFAGDKLHKFNGILSGSLSFIFGKLDEGMTLSEATKLAREKCFTEPDPRDDLSGMDVARKVLILAREVGLKLELSDIVVDSVLPDDFDDSGDVESFMARLPEADAAIAARVAEAKAQGKVLRYVGQIEEGACYVRITEVDATDPLYSVKGGENALAFYSRYYQPIPFVLRGYGAGTEVTAAGAFADVLRTLNWTREVSV

SEQ ID NO: 723 - DNA, 2394 bp, Shewanella sp. MR-4
  CDS (1)..(2394): transl_table=11
atggcacgttgtcacttacataaatttggtggttccagcttagccgatgccgattgttatcgccgagtcgcccatattctgttaacccatggtcatagtgatgatctggtggtggtgtctgccgcgggtaaaaccactaactttttatataaattattgtccctgcgcgatagcaaccaattatggcaagaagagttgcaagttcttatcagctatcagcaaggcttgattgagcagctgttatccaatgagcaagcgcgggatctgcgtgagcgtttaaccacggataaagctcagttaatcagtctattatctttagattcccgtaacgattaccaaattagccatgtggtgagctttggtgagcgttggtcggcgcgcttaatggcggcgctgctgcgcgaatcgggtgtggccgcaagtcatgtggatgcctgctcgattctcgtggccgatgaggccgccgtaccgcaaattcgcgtgcaagaatcccgcgccaaagtacaagccttactggccgcgcatcctaacgagcgtttagtgatcaccggttttatctgtgccaacgagcgtggcgataccttgctattgggtcgcaatggctctgactttagcgccagcttaattgctagccttgccgacattgagcgcgtgaccatttggaccgacgttgaaggggtatttaacgctgatccgaataagatcaacgatgcgaaattactcaagagcatgtccctcgccgaagcagaccgcttggcacgtttaggttcgcctgttttgcattcgcgcactttgcagccgctgtttaacaccgaggtgagcctcgccgtacgttcaagctacgcctcccataccgactttaccctgattgctccccacagctcctcggcgagtgcgcctgtggtgactaacctcaatgccgtggtgttatttggctttaagatcgcgggcgatgtggccagtctgctcgagcaattagtcgaagcagggttaacgccactggcccattgggtatcggcgcatcaacggcttgagcttgcctataccgctgaaaaccaaaaacaagtacaaaaattattggatgcgcaggccgaagccctcggcattaaagatctgcaaattaataccgaactcggtttagtggcgcttgtgagtgccgatgccgagcattatcgccgcagctttgcccgtttactgagccgcgacgctaagcccttgttcagtggtgacttaagtttggtgaccttagtaccgcagtcgcaggttaatctgctgacgcaaaaagtgcatcgccgctgcgccggtccacgcaaacgcattggcgtattgctgctgggtgttggcaatattggcgaggcgtgggtgaagctgtttaagtcagtttctccctcattaaatcaagagcttgaagcgcgtgtcgaacttgtcggtttggtgagttccagcaaagccctgatcaagtctacggctgtggatttggaaaactggcagcaggaattcgatgccgaggcaacaccttggcaatatgagcacttattcgaacaattagaacaacttaactgcgatgaactgattgcattagatatcagtgccagcgccagtttgaccctacaatacccagagttttttgagcgtggcatccatatggtcagcgcgaacaagcttgcgggttctggcccgctgccgttctaccgcgagctgaaggagcaactcggttatcgccgtctattctggcgctataacgccagctgcggcgctggtttacctatccagcacgccttaaacgatttgcgtaacagcggcgatacggttgaggccgtcggcgggattttctctggtaccctgtgttggttattcgagaaatacgataccagcaaacccttctcggaattagtggttgaagcgcgtggcctagggattaccgaacccgatccccgcgacgatctttctggccgcgacatgcagcgcaagctgctgattttggcccgtgaaatcggtctggaaatcgagcttgaggatattgaactgcgctccctagtgccggcccatttagcggatattccactggagcaattccttgcccgtatcgctgagctggatgatgaattgcagcaacaatacggcgctgcggcggagcaaaacaaggtactgagatatgtcgcctccttggacaatagcgacgcggccctgaaagctgaggtgggattacagtggattgatgcgaatcatccctacgctaacctcacgcctggggacaatgtgtttgtgatccgctctgctttctatcaaggtaatcctttgattatccgtggaccgggtgcggggcgtgaagtgactgccgcagcggtgcaatcggatctgacgcagatctgtcgcgatctgctgcaagagtag

SEQ ID NO: 724 - protein, 797 aa, Shewanella sp. MR-4
MARCHLHKFGGSSLADADCYRRVAHILLTHGHSDDLVVVSAAGKTTNFLYKLLSLRDSNQLWQEELQVLISYQQGLIEQLLSNEQARDLRERLTTDKAQLISLLSLDSRNDYQISHVVSFGERWSARLMAALLRESGVAASHVDACSILVADEAAVPQIRVQESRAKVQALLAAHPNERLVITGFICANERGDTLLLGRNGSDFSASLIASLADIERVTIWTDVEGVFNADPNKINDAKLLKSMSLAEADRLARLGSPVLHSRTLQPLFNTEVSLAVRSSYASHTDFTLIAPHSSSASAPVVTNLNAVVLFGFKIAGDVASLLEQLVEAGLTPLAHWVSAHQRLELAYTAENQKQVQKLLDAQAEALGIKDLQINTELGLVALVSADAEHYRRSFARLLSRDAKPLFSGDLSLVTLVPQSQVNLLTQKVHRRCAGPRKRIGVLLLGVGNIGEAWVKLFKSVSPSLNQELEARVELVGLVSSSKALIKSTAVDLENWQQEFDAEATPWQYEHLFEQLEQLNCDELIALDISASASLTLQYPEFFERGIHMVSANKLAGSGPLPFYRELKEQLGYRRLFWRYNASCGAGLPIQHALNDLRNSGDTVEAVGGIFSGTLCWLFEKYDTSKPFSELVVEARGLGITEPDPRDDLSGRDMQRKLLILAREIGLEIELEDIELRSLVPAHLADIPLEQFLARIAELDDELQQQYGAAAEQNKVLRYVASLDNSDAALKAEVGLQWIDANHPYANLTPGDNVFVIRSAFYQGNPLIIRGPGAGREVTAAAVQSDLTQICRDLLQE

SEQ ID NO: 725 - DNA, 2469 bp, Shewanella sp. ANA-3
  CDS (1)..(2469): transl_table=11
atgaaagtaatgaaatttggtggtacctcgcttgcaaattggcagcgattttcaatggcggcggatatcgtggccaaggcggcgaaagcagaacctgtggctacagtgctttctgcgcccgcgacagtgacaaacgccttgctagaaatggtggatgtggcggtgaaaggggaagattattcgccagtcattcaacacgttgaacgggtgtttacctcgctctatcaggatgcggtcagttctggactctcgagcagtcaaagcgaagtgttgttcgccggactgagtgtgcagcttgcgcgttggcaggacagattacgcggtattacgctgctgcaggaatgccctgacggagtacgcgctgaaatcgttgttgctggcgagcgtttgtctgctgctttgatggagcaagtcatgctggcaaaaggcatcacttcggcgcagctagacccgcgtgagctgtttttaggtcgtggtcgtccgctcgaatccgtggtggatattgccgtcagtaaaccgcgattcaaaaatcttgccctcgatgaaaaacgggtttgggtgatgcccggctttaccgccgccgatgaagacggcaaggtcgtgaccttaggccgtaatggctctgactattccgctgccgtgctggccgcttgtttagatgcttcaagttgtgagatttggaccgacgttgacggcgtatacaacaccgatcctcgggttgtcaccgatgctaaattgttgtcacagctcagttatcaagaggcgatggagctgtcttactttggggctaaggtgctgcatcctaaaaccattgcgcctatcgctcagttccacatcccctgttatatcaagaacagctttaatcccgatgcgcccggcactctggtatcgaatcaggccgatgaaagcggtctgcaggtgaaggccatttctaatctggataatcaaaccatgtttgatgtttcaggccccggcatgaagggcatggtcggcatggcgagccgcacgctggcggcaatttcccgtagtggcgtttccgtgtcactcatcacccagagttcttgcgaatacagcatcagcttttgtgtggcgactagcgatgcggccaaggtgaaatcggcgctggagcaagagtttgaactagaaatcaaaagtgatttactcgagccgattgaaatgcgccatgacttagcaatcgtctccttgatcggtgatggcatgcgtacccataaaggtgtggcggcgcggttcttccaggcgttagcgcaggcgagtgtgaatatcatcgcgattgcgcaaggctcttctgaacgttctatttcaacggtaatcgagcagcgaaagaccaagcatgcggtagcggcttgtcatcagggctttttcgatgtgcagcaatatttggatgtgtttttagtgggttgcggcaatgttggcgcaggcttactcgagcaaatcaaacatcaggcgagcgtgttaaaagagcagcacattagcattcgtgtctgcggcatcgtgaattcaagcaagatgttactcgatagtgcgggtatcgatttaaacaattggcaaaacctgcttgccgacagtcagcaaccaagcgatctttctgcgctattggcttgggtgaaagagcaacagttattaaaccctgtgctggtggattgtacttcaagcgatcaagtgtcgaaccagtatttagaggtgatgaatgcgggcatgcacgtggtgacgcccaataagaaggccaatactcgagactacgcttactaccaagcactgcgtcaaacagccttgaaacaacgtcgtcagttcctgtatgagaccaacgttggcgccggattgcccgttatcgataatttgaaaaaactgttatttgctggcgataagttacacaagtttaacggtattttgtcaggctccttatcctttatcttcggtaaactcgatgagggtatgacgctgtcagaagcgactaaactggcgcgggaaaaatgctttaccgagcccgatccccgtgatgatttaagtggtatggatgtggcgcgtaaagtgctgattttggcccgtgaagtgggtttgaaacttgagctaagcgatatcgttgtcgactcagtcttacctgacgattttgatgattcaggcgatgtggaaagttttatggcgcgtttaaccgaggcagatgcggcgattgcggcgcgagtggcagaggcgaaagcgcagggtaaagtgctgcgttatgtggggcagattgaagaaggcgcgtgttatgtgcgtatcaccgaagtcgatgctaccgatccgctctacagcgtaaaaggtggtgaaaatgccctggcattctacagccgttattatcagccgattccttttgtattacgtggatacggtgcgggtacagaagtgacagcggccggcgcctttgccgatgtattaagaaccttaaattggactcgtgaggtgagtgtatga

SEQ ID NO: 726 - protein, 822 aa, Shewanella sp. ANA-3
MKVMKFGGTSLANWQRFSMAADIVAKAAKAEPVATVLSAPATVTNALLEMVDVAVKGEDYSPVIQHVERVFTSLYQDAVSSGLSSSQSEVLFAGLSVQLARWQDRLRGITLLQECPDGVRAEIVVAGERLSAALMEQVMLAKGITSAQLDPRELFLGRGRPLESVVDIAVSKPRFKNLALDEKRVWVMPGFTAADEDGKVVTLGRNGSDYSAAVLAACLDASSCEIWTDVDGVYNTDPRVVTDAKLLSQLSYQEAMELSYFGAKVLHPKTIAPIAQFHIPCYIKNSFNPDAPGTLVSNQADESGLQVKAISNLDNQTMFDVSGPGMKGMVGMASRTLAAISRSGVSVSLITQSSCEYSISFCVATSDAAKVKSALEQEFELEIKSDLLEPIEMRHDLAIVSLIGDGMRTHKGVAARFFQALAQASVNIIAIAQGSSERSISTVIEQRKTKHAVAACHQGFFDVQQYLDVFLVGCGNVGAGLLEQIKHQASVLKEQHISIRVCGIVNSSKMLLDSAGIDLNNWQNLLADSQQPSDLSALLAWVKEQQLLNPVLVDCTSSDQVSNQYLEVMNAGMHVVTPNKKANTRDYAYYQALRQTALKQRRQFLYETNVGAGLPVIDNLKKLLFAGDKLHKFNGILSGSLSFIFGKLDEGMTLSEATKLAREKCFTEPDPRDDLSGMDVARKVLILAREVGLKLELSDIVVDSVLPDDFDDSGDVESFMARLTEADAAIAARVAEAKAQGKVLRYVGQIEEGACYVRITEVDATDPLYSVKGGENALAFYSRYYQPIPFVLRGYGAGTEVTAAGAFADVLRTLNWTREVSV

SEQ ID NO: 727 - DNA, 2451 bp, Haemophilus somnus 2336
  CDS (1)..(2451): transl_table=11
atgcgagtactcaaatttggcggcacatctttagcgaatccgcaacgctttttacaagcagcagcacttattgaaaaagcacatttagaggaacaagccgcaggcgttctctctgcaccggcaaagattaccaatcatcttgtagcactttctgaaaaagccgctttaaatcaacctactgatggtcattttgatgaggctattgagattttttataatattattaatggcttatatgcagaaaatactcattttgatcttgttggcaccaaagcattaattgagtcggagtttgcacaaattaagggattattagaaaacattcgtcaggcgggaaaagtagaagatgcggtaaaagcgacgattgactgtcgaggtgaaaaattatctattgcgatgatgaacgcttggtttgaagccaaaggatatacggttactgtgattaatccggtagagaaattattggcttatggctcttatttggaaagcagtgtggatattgcggaatcaactaaacgagttgatgcaaaatctattcctgctaaaaatattgttttgatggcaggatttacagctggaaatgacaaaggcgaattagttttattgggtcgtaacggttctgattattcggcagcgtgtttggctgcttgtttaggtgcaagtgtttgtgaaatttggacggatgtagatggtgtttatacctgtgatcctcgtttagtccctgatgctcggttactttccagtttatcttatcgtgaagcaatggagctttcttattttggggctaaagttattcaccctcgcactattggtcctttagttgagccgcaaattccttgtttgataaaaaatacgggtaaccctgaaggtgcaggatcaattattgacaatcgtgaaaatatttctgaagggctacaggttaaaggcattactaatttagataatgttgctatgttcaatgtatcaggaccgggtatgcaggggatggttggtatggcagcacgtgttttttccgccatgtcaaaagccagcgtttccgttattttaatcacgcaatcttcttctgaatatagtattagtttttgcgtaccgactaaagctattgaaaaggcaaaagcggcactaaatgctgagtttgaacaggaacttgtcgctaaagatcttgatcctgtggaagtaattcatgatttgtcaattatttccgtagtaggtgatggtatggagcggtctaaagggattgccgctagtttcttttcggcattagctagtgccaatatcagtattgttgctattgcacaaggctcttccgagcgttcgatttcagcggttgttcctttgaataaggcgattgaagcggttaaagcaactcatcaggcattgtttaataatcgtaaagttgttgatatgtttttagtcggtgttggtggggtcggtggtgaacttattgaacaaattaaacggcaaagtgaatatttggcaaaaaaagatattgagattcgtgtttgtgcgttggctaattcgaataaaatgttgttaaatgaaaatgggttaaatcttggtaattggcgtgaagatttggcaaatgcaacacaaccgtcagattttgatgtattgctttctttcattaaattacatcatgtggttaaccctgtttttgtggattgcacaaccgctgaaagtgtagcaggattatatgaaagagctttgaaagaaggctttcatgtgattacaccgaacaaaaaagccaatacccgtgagctggattactataaccaagtgcgtgaaaatgcacgtaaaaatcatcgtaaattcctttacgatactaacgttggtgcaggattgcctgtgattgataacttacaaaatctattagccgccggcgatgatgtagtgagttttaacggtattttgtcaggatctctctctttcattttcggtaagttggaggaggggctttctctttcagaagctaccgcacttgctcgtgaaaaaggctttacagaaccggatccgagggatgatttatcagggcaagatgtggctcgtaaattattgattttggcacgtgaaatcggtttagaacttgagttgtcggatattgaggtagagggcgttttaccgcaaggtttctcagagggaaaatcagcagatgaatttatggcgatgttgccttcattggacgaagaatttgcagaacgtgttgcaaaagcaaaatcggaaggcaaagtattgcgttatgtaggacaaattgaagaaggcaaatgtaaggtttctattgttgcagttgatggagacgcaccgttatataaagtgaagaacggtgaaaatgcgttagctttttatactcgttattatcagccgattcctttgttattgcgtggttatggtgctggtaatgcggtaacggctgccggaatttttgccgatattttaagaaccttaaaacattaa

SEQ ID NO: 728 - protein, 816 aa, Haemophilus somnus 2336
MRVLKFGGTSLANPQRFLQAAALIEKAHLEEQAAGVLSAPAKITNHLVALSEKAALNQPTDGHFDEAIEIFYNIINGLYAENTHFDLVGTKALIESEFAQIKGLLENIRQAGKVEDAVKATIDCRGEKLSIAMMNAWFEAKGYTVTVINPVEKLLAYGSYLESSVDIAESTKRVDAKSIPAKNIVLMAGFTAGNDKGELVLLGRNGSDYSAACLAACLGASVCEIWTDVDGVYTCDPRLVPDARLLSSLSYREAMELSYFGAKVIHPRTIGPLVEPQIPCLIKNTGNPEGAGSIIDNRENISEGLQVKGITNLDNVAMFNVSGPGMQGMVGMAARVFSAMSKASVSVILITQSSSEYSISFCVPTKAIEKAKAALNAEFEQELVAKDLDPVEVIHDLSIISVVGDGMERSKGIAASFFSALASANISIVAIAQGSSERSISAVVPLNKAIEAVKATHQALFNNRKVVDMFLVGVGGVGGELIEQIKRQSEYLAKKDIEIRVCALANSNKMLLNENGLNLGNWREDLANATQPSDFDVLLSFIKLHHVVNPVFVDCTTAESVAGLYERALKEGFHVITPNKKANTRELDYYNQVRENARKNHRKFLYDTNVGAGLPVIDNLQNLLAAGDDVVSFNGILSGSLSFIFGKLEEGLSLSEATALAREKGFTEPDPRDDLSGQDVARKLLILAREIGLELELSDIEVEGVLPQGFSEGKSADEFMAMLPSLDEEFAERVAKAKSEGKVLRYVGQIEEGKCKVSIVAVDGDAPLYKVKNGENALAFYTRYYQPIPLLLRGYGAGNAVTAAGIFADILRTLKH

SEQ ID NO: 729 - DNA, 2448 bp, Haemophilus influenzae R2866
  CDS (1)..(2448): transl_table=11
atgcgcgtacttaaatttggcggcacttcgcttgcaaatccggaacgtttttcccaagcggcgaaattgatcgaacaagctcatttagaagagcaggctgcaggtgttttatctgcaccagccaaaataaccaaccatctcgtcgccctttctgaaaaagctgcattaaatcaatcaaccgatacgcatttcaacgaagcaatcgaaattttctataacatcatcaacggcttacatacggaaaataatcaattcgacttaaatggtaccaaagcacttattgatgctgaatttgctcaaatcaaaggattattagaagaaattcgtcaagcgggaaaagtagaagatgcagttaaagcgaccattgattgccgtggggaaaaactttctattgcaatgatgaaagcttggtttgaagcgcgtggctatagcatacatattgtggatcctgtcaaacaattattggcaaaaggcggttatcttgaatcttctgttgaaattgaagaatcaacaaaacgtgttgatgcagcaaatatcgcaaaagataaagtggtgctgatggcaggttttactgcgggtaatgaaaaaggcgagttggtattgctcggtcgtaatggctcagactattctgccgcctgtttagccgcttgtttaggcgcaagtgtatgcgaaatttggaccgatgtggacggcgtttatacttgcgatccgcgtttagtgcctgatgcacgtttattaccaacgctttcttatcgtgaagcgatggaactctcttatttcggtgcgaaagtgattcatcctcgtacgattgggccattgttgccacaaaatattccttgtgtcattaaaaatacaggaaatccttctgcgccaggttcgattattgatggcaatgtgaaatcagaaagtttgcaagttaaaggtatcactaacttagacaatttggcgatgtttaatgtgtcaggccccggtatgcaaggtatggtaggcatggcatctcgcgtattttcagccatgtcaggcgcaggcatttcagttattttaattactcagtcttcgtctgaatatagtattagtttctgtgtgcctgtgaaatctgcagaagtagcgaaaaccgtactagaaacggagtttgctaatgaattaaatgaacatcaattagaatcaattgaagtgattaaagatttatccattatttctgttgtgggcgatggaatgaagcaagcgaaaggcattgctgctcgtttcttctcggcattagcgcaggcaaacattagcattgtggcgattgcacaaggatctagcgaacgttcaatttctgcggttgtgccgcaaaataaagccattgaagcggtgaaggccacccatcaggcgcttttcaataataaaaaagtcgtggatatgtttttagtgggcgttggtggagtaggcggagaattaatagagcaggtaaagcgtcaaaaggagtatctagcaaagaagaatgttgaaattcgagtttgtgctattgcgaattccaaccgtatgttgcttgatgaaaatggattaaatttagaggattggaaaaacgatttagaaaatgcgactcagccatcagattttgatgtattgctttctttcattaaattacatcatgtggtgaatccagtatttgtagattgtacttcagccgaatctgtagcagggctttatgctcgtgcgttaaaagaaggtttccatgtggttacgccaaacaaaaaagcgaatacacgagaattagtttattacaatgagttacgccaaaatgcccaagcaagccagcataaatttttatatgaaaccaatgtaggtgcgggcttgccagttattgaaaatctccaaaacttacttgcagcaggtgatgagcttgaatattttgaagggattttatctggctcgctttcctttatttttggtaagttggaagaaggactttctctttcagaagtaaccgcacttgcgcgtgaaaaaggctttactgagccagatcctcgagatgatctttctggacaagatgtagcgcgcaaattattaattcttgctcgtgaagcgggaattgaacttgaactttcagatgttgaagttgaaggtgtattgccgaaaggcttctctgaaggaaaatctgcagatgagtttatggcaatgttgccacagcttgacgaggagtttaaaactcgcgttgccacagctaaagcagaaggcaaagtattgcgttatgttggaaaaattagtgaaggaaaatgcaaagtatccatcgttgcggtagatctgaataatccactttataaagtgaaagatggtgaaaatgccttggcattttatactcgttattatcaaccgattccacttttattacgtggttatggcgcaggtaatgcagttactgcggcaggtatctttgcagatattttaagaacattacaacattaa

SEQ ID NO: 730 - protein, 815 aa, Haemophilus influenzae R2866
MRVLKFGGTSLANPERFSQAAKLIEQAHLEEQAAGVLSAPAKITNHLVALSEKAALNQSTDTHFNEAIEIFYNIINGLHTENNQFDLNGTKALIDAEFAQIKGLLEEIRQAGKVEDAVKATIDCRGEKLSIAMMKAWFEARGYSIHIVDPVKQLLAKGGYLESSVEIEESTKRVDAANIAKDKVVLMAGFTAGNEKGELVLLGRNGSDYSAACLAACLGASVCEIWTDVDGVYTCDPRLVPDARLLPTLSYREAMELSYFGAKVIHPRTIGPLLPQNIPCVIKNTGNPSAPGSIIDGNVKSESLQVKGITNLDNLAMFNVSGPGMQGMVGMASRVFSAMSGAGISVILITQSSSEYSISFCVPVKSAEVAKTVLETEFANELNEHQLESIEVIKDLSIISVVGDGMKQAKGIAARFFSALAQANISIVAIAQGSSERSISAVVPQNKAIEAVKATHQALFNNKKVVDMFLVGVGGVGGELIEQVKRQKEYLAKKNVEIRVCAIANSNRMLLDENGLNLEDWKNDLENATQPSDFDVLLSFIKLHHVVNPVFVDCTSAESVAGLYARALKEGFHVVTPNKKANTRELVYYNELRQNAQASQHKFLYETNVGAGLPVIENLQNLLAAGDELEYFEGILSGSLSFIFGKLEEGLSLSEVTALAREKGFTEPDPRDDLSGQDVARKLLILAREAGIELELSDVEVEGVLPKGFSEGKSADEFMAMLPQLDEEFKTRVATAKAEGKVLRYVGKISEGKCKVSIVAVDLNNPLYKVKDGENALAFYTRYYQPIPLLLRGYGAGNAVTAAGIFADILRTLQH

SEQ ID NO: 731 - DNA, 2460 bp, Prosthecochloris aestuarii DSM 271
  CDS (1)..(2460): transl_table=11
atgaacgtcttaaaattcggcggtacgtcgatagaaaacggcaagaggatcagaaatgttctgaatattatccgggatgcaatgcatgatggtcccgttatcgttgtcgtttccgctatccgcaaggtgacagatcttcttctcgatgcggccctgactgcatgccgcggcggtggggactataaagaaaagcttgtggacattgagcgtttgcataccgctctggttgaggaccttctgacaggagaaaaggcagaagatgttcagcgatatctgtgcggggtgctttctgaactgggcgatgtgttgcacggagtctctctgctgcgtgagttgtcggaaaaaagcagtgcgttgatcatgagcttcggtgagcgtttttcggcctatatcatcagcagttatctcagtcaggagggtgtggcggcatcctatgtcgatgctcgcgggatgattgttaccgatacatcgcacggtgatgctcgagtcgatatggaggcctctgcgctccagatcagggagcggctgaacaatgcagattccattcctgttgtaaccggctatatcgggtcagctcccgatggaacggtgacgactctcggtcgcggaggctcggattacacggcgacgattatcggttccgtactcggcgccggagagattcagatctggacggatgtcgatggatttttcagtgctgatccgaaacgtgtcagggacgcttacgcgcttccatttatcagttatgccgaggctatggagctctcacatgccggcgcaaaagtgctgcatccatacgccgttcatcctgctatgaaggcagggattcccattacgatcagaaattcgatgaaccctggagctcctgggacaaggattgagaagctctcttcggaagaggcggtatcggctcgtccggtaaccggcttgagttcaatcagtgatattgtgctgctcaatatttcaggaagcgggatggttggtgtgccaggaatcgcatcaaggcttttcagctgtcttgcccgccatatgatcaatatcatttttatttcacaggcctcatcggagcagtccatcagccttgccattaatgcccttcaggcatcgaaagcccagatggcgcttgatgatgagtttgctgtcgagcttggttcccgccagatcgagtcactgacggtacgtcaagatatatcgatgatcgccgtggtcggtaaaagcatgtccggtcatcccggtgtttcagcgcatctctttgaaacgcttggtaaaaacggaatcaatgtcattgcggttgctcagggcgccaatgaaatgaacatatctttcgtgatcgacagccacgacgaagataaagcgttgaactgcgttcacgagtccttctttctttcgcgtcgaaaggtgcatgtctttattgccggtacagggacgatttcaagtagtctcattggtcagatccgtgatcaccatgagacgctttctgttggaaaaaatcttgatatcgttgtctgcggcatggctaacacgcgtatgatggctctcaataacgaggggatcgatttgaatgattggcaaagcgcgcttcagccccgtgaaggggagagaacgatcggtgattaccttgcccgcatcagaagccgcaaccttcataacaccatctttgtagactgcacggccagtgccgatgtcgctgctgcgtatccggagcttctgcgatcgaatatttctgtggtgacggccaacaagcttggtatggccggttcctgggatctttatgaaaccatcaacgatgccctgaacagctcgaatgccaaatttctctatgaaaccaatgtcggcgcgggtttgccgatcatcaatacgctcaacgatttgcgcaacagcggcgacaagatcctcaaaattgaaggggtgctttccggaacgctcagctatattttcaatgagttgcgcaaggggggggctttcagccgcatcgtgcgtcaggctcgtgatgccggctttacggaacccgatcccagagaggacctttcaggggccgatttcgcaaggaaatttctgattctcggcagggagctcggtttcagaatcaattatgaggatatccagtgtgaaagtcttgtgcctgatcatctgatgggccagatgcctgtcgaagagtttctcgaaaagcttgcctgtgtggatgaggagtatgacgacatgaatagaaaggcagccgcggagggtatgacgatcgcctatgccggtgaaattaacggcggtaaggcgaaaatcagtgtcaagatgctgccgttgtccaatcctgtcgccggtttgaacggtacggaaaatatggtcgtctttacgacggacaggtatttcgatacgcctcttgttgtcaagggtcccggtgcgggcggcgaggtgacagcgggcggagtttttgctgatattctccggattgcaagttatctggtgtag

SEQ ID NO: 732 - protein, 819 aa, Prosthecochloris aestuarii DSM 271
MNVLKFGGTSIENGKRIRNVLNIIRDAMHDGPVIVVVSAIRKVTDLLLDAALTACRGGGDYKEKLVDIERLHTALVEDLLTGEKAEDVQRYLCGVLSELGDVLHGVSLLRELSEKSSALIMSFGERFSAYIISSYLSQEGVAASYVDARGMIVTDTSHGDARVDMEASALQIRERLNNADSIPVVTGYIGSAPDGTVTTLGRGGSDYTATIIGSVLGAGEIQIWTDVDGFFSADPKRVRDAYALPFISYAEAMELSHAGAKVLHPYAVHPAMKAGIPITIRNSMNPGAPGTRIEKLSSEEAVSARPVTGLSSISDIVLLNISGSGMVGVPGIASRLFSCLARHMINIIFISQASSEQSISLAINALQASKAQMALDDEFAVELGSRQIESLTVRQDISMIAVVGKSMSGHPGVSAHLFETLGKNGINVIAVAQGANEMNISFVIDSHDEDKALNCVHESFFLSRRKVHVFIAGTGTISSSLIGQIRDHHETLSVGKNLDIVVCGMANTRMMALNNEGIDLNDWQSALQPREGERTIGDYLARIRSRNLHNTIFVDCTASADVAAAYPELLRSNISVVTANKLGMAGSWDLYETINDALNSSNAKFLYETNVGAGLPIINTLNDLRNSGDKILKIEGVLSGTLSYIFNELRKGGAFSRIVRQARDAGFTEPDPREDLSGADFARKFLILGRELGFRINYEDIQCESLVPDHLMGQMPVEEFLEKLACVDEEYDDMNRKAAAEGMTIAYAGEINGGKAKISVKMLPLSNPVAGLNGTENMVVFTTDRYFDTPLVVKGPGAGGEVTAGGVFADILRIASYLV

SEQ ID NO: 733 - DNA, 2508 bp, Xylella fastidiosa Ann-1
  CDS (1)..(2508): transl_table=11
atgtcatcgtctgctgtccggttgtccaccgttgaaactcctgtctacgttccgcgtaccgtcgttcacaaattcggtggcacttcggttgccgatgcggattgctatcgccatgtcgcgcgtctcctattagcacgcgaagagactgtgcaggtcaccatcgtttctgcgatgaaaggggtgactgatacgttgattgcactggccgaacaggcagccaatcattctcccgactggcaggcgttgtggcagcaaacccgcacgcgtcattgcgacgccgctcaggcattgcttggagagcatgccgctacgctgcaagattggttgaatacccattttaatgaactgcatgaaatgctggtggccttgtccgtcatcgggatgcttccatctgaagtgctggaccgcttacaaggcttgggcgaggtgtactccgcacagttgcttggggagtatttgcaattccagggtgaggattgtgtcgttctggatgcccgccaagtccttgtggtgagtcctggtgaatttggcgccgaagtcgattgggcaaccagtgcccagcacttggcccattggcgtatgcagcatccacagcggcgtgtggtggtcaccggtttcgttgcctctgatcgtactggacgtgccatcaccttgggtcgcaacggcagtgattattccggtgccatcttcgcggcgttgtttgaggccgatgagcttcacatctggacagatgttgatggagtcatgtccgccgacccccgggtcgtcccggatgcggtgcaactggatgccttgagttacgacgaagcatgtgaattggcctatttcggcgccaaggtagtgcatccacaaaccatgtcgccggtgatgaaacgcggagtgccgatcatcattcgaaacaccttccaacccagacatccagggactcggatcaccgctgatagcgtggtgagtggatctgttaaaggcctgaccctgagtccaggactggccgtgctgaacctggaaggcacggggctgatcggagtccctggtaccgctgaacgcgtgtttgccgccctgcgtaatgcacgtttgtctgtcgtgatgatctcacagggatcttcggagcattccatttgctgcctcgtgcaccaaaccgaggccgagcgtgcacgtgatgcgttgttgtatgcctttgcccatgaattggccatagggcatgtccagcgcgtacaactgaccaacaatatcagcgtattggcggcggttggcgacggcatggctggtcacctgggtgtagcggcgcgcttgtttgaatccttaaggcgcgcccatgtcaacatcctggccattgcccaggggtcttcagagcgcaatatttcggtggcaatcgacagtcagcaggcgacgaaggcactgcgcgctgcacacgctgctttctggttatcaccccagacattttcgattggtgtgattggtccgggtcacgttggtgaggccctgttggaccagctatgtgctgcacagcagcaattactgtccaaggcaaatctggatctgcgtttgcgtgcgatcgtttcacagcggcgtatgttattggatgagcgtggcctggggagtgactggcgccacgccttcgccgccgtaccagaggcggtcgatctggatgcttttaccgcacacttacaggccgcccatctgcctcatgcagtcatcattgactgtagcggcagtgctgaggtggctgatcgctatgccgactggctggcagccggtatccatgtcgtgacaccgaataaacaggctggctccggccccctgcatcgctaccacgcgattcgtgcagcagcagatgccagcggcgcacgctttcgctatgaagccacagtgggcgcaggcttaccggtgattacgacattgcgtgacttgatggataccggtgatagcgtcacctcaatcgaagggatcttttccggaactctggcgtggctattcaataaatatgatggcagcgtcccattctcccaattgatcgcccaggcgcgagcgatgggatataccgagcctgatccacgcgatgacctgtctggggttgacgtggcgcgtaagctggtgattctggcgcgcgatgcggggcgtgatatcagcctagaagatgttgcggtagaaagcctggtcccggagacattgtgtcaactcagcgttgccgatttcatggaacgactcaatgaaattgatgccacctttgcagagcgtttggctgcggccaaacagcgcggttgcgtattgcgttacgtcgcacaactgtcccctggacacgtccctagtgtcagcttgattgaattgccttctgaccatgccttcgtcaaccttcgtttgaccgataacgtagtgcaatttacaactcgtcgttattccgaaaaccccttggtcgtacaggggccgggcgccggtccagaggtcaccgcagccggtgtctttgcggatttacttcgagttgcagcgggcgagggcgcacgcttgtga

SEQ ID NO: 734 - protein, 835 aa, Xylella fastidiosa Ann-1
MSSSAVRLSTVETPVYVPRTVVHKFGGTSVADADCYRHVARLLLAREETVQVTIVSAMKGVTDTLIALAEQAANHSPDWQALWQQTRTRHCDAAQALLGEHAATLQDWLNTHFNELHEMLVALSVIGMLPSEVLDRLQGLGEVYSAQLLGEYLQFQGEDCVVLDARQVLVVSPGEFGAEVDWATSAQHLAHWRMQHPQRRVVVTGFVASDRTGRAITLGRNGSDYSGAIFAALFEADELHIWTDVDGVMSADPRVVPDAVQLDALSYDEACELAYFGAKVVHPQTMSPVMKRGVPIIIRNTFQPRHPGTRITADSVVSGSVKGLTLSPGLAVLNLEGTGLIGVPGTAERVFAALRNARLSVVMISQGSSEHSICCLVHQTEAERARDALLYAFAHELAIGHVQRVQLTNNISVLAAVGDGMAGHLGVAARLFESLRRAHVNILAIAQGSSERNISVAIDSQQATKALRAAHAAFWLSPQTFSIGVIGPGHVGEALLDQLCAAQQQLLSKANLDLRLRAIVSQRRMLLDERGLGSDWRHAFAAVPEAVDLDAFTAHLQAAHLPHAVIIDCSGSAEVADRYADWLAAGIHVVTPNKQAGSGPLHRYHAIRAAADASGARFRYEATVGAGLPVITTLRDLMDTGDSVTSIEGIFSGTLAWLFNKYDGSVPFSQLIAQARAMGYTEPDPRDDLSGVDVARKLVILARDAGRDISLEDVAVESLVPETLCQLSVADFMERLNEIDATFAERLAAAKQRGCVLRYVAQLSPGHVPSVSLIELPSDHAFVNLRLTDNVVQFTTRRYSENPLVVQGPGAGPEVTAAGVFADLLRVAAGEGARL

SEQ ID NO: 735 - DNA, 2508 bp, Xylella fastidiosa Ann-1
  CDS (1)..(2508): transl_table=11
atgtcatcgtctgctgtccggttgtccaccgttgaaactcctgtctacgttccgcgtaccgtcgttcacaaattcggtgggacttcggttgccgatgcggattgctatcgccatgtcgcgtgtctcctattagcacgtgaagagactgtgcaggtcaccattgtttctgcgatgaaaggggtgactgatacgttgattgcactggccgaacaggcagccaatcattctcccgactggcaggtgttgtggcagcaaacccgcacgcgtcattgcgacgccgctcaggcattgcttggagagcatgccgctacgctgcaagattggttgaatacccgttttaatgaactgcatgaaatgctggtggccttgtccgtcatcgggatgcttccatctgaagtgctggaccgcttacaaggcttgggcgaggtgtactccgcacagttgcttgggcagtatttgcaagcccagggtgaggattgtgtcgttctggatgcccgccaagtccttgtggtgagtcctggtgagtttggcgccgaagtcgattgggcaacgagtgcacagcacttagcccattggcgtatgcagcatccacagcggcgtgtggtggtcaccggtttcgttgcctctgatcgtactggacgcgccatcaccctgggtcgcaacggcagtgattattccggtgccatcttcgcggcgttgtttgaggccgatgagcttcacatctggacagatgttgatggagtcatgtccgccgacccccgggtcgtcccggatgcggtgcaactggatgccttgagttacgacgaagcatgtgaattggcctatttcggcgccaaggtagtgcatccacaaaccatgtcgccggtgatgaaacgcggagtgccgatcatcattcgaaacaccttccaacccggacatccagggactcggatcaccgctgatagcgtggtgagtggatctgttaaaggcctgaccctgagtccaggactggccgtgctgaacctggaaggcacgggtctgatcggtgtccctggtaccgctgaacgcgtgtttgccgccctgcgcaatgcacgtttgtctgtcgtgatgatctcacagggatcttcggagcattccatttgctgcctcgtgcaccaaaccgaggccgagcgtgcacgtgatgcgttgttgtataccttcgcccatgaattggcgatagggcatgtccagcgcgtacaactgaccaacaatatcagcgtattggcggcggttggcgacggcatggctggtcacctgggtgtagcggcgcgcttgtttgaatccttaaggcgtgcccatgtcaacatcctggccattgcccaggggtcttcagagcgcaatatttcggtggcaatcgacagtcagcaggcgacgaaggcactgcgcgctgcacacgctgctttctggttatcaccccagacattttcgattggtgtgattggtccaggtcacgttggtgaggccctgttggaccagctatgtactgcacagcagcaattactgtccaaggcaaatctggatctgcgtttgcgtgcgatcgtttcacggcggcgtatgttattggatgagcgtggcctggggagtgactggcgccacgccttcgccgccgcaccagaggcggtcgatctggatgcctttaccgcacacttacaggtcgcccatctgcctcatgcagtcatcattgactgtagcggcagtgctgaggtggctgatcgctatgccgactggctggcagccggtatccatgtcgtgacaccgaataaacaggctggctccggccccctgcatcgctaccacgcgattcgtgcagcagcagatgccagcggcgcacgctttcgctatgaagccacagtgggcgcaggcttgccggtgattacgacattgcgtgacttgatggataccggtgatagcgtcacctcaatcgaagggatcttttccggaactctggcgtggctattcaataaatatgatggcagcgtcccattctcccaattaatcgcccaggcgcgagcgatgggatataccgagccggatccacgcgatgacctgtctggggttgacgtggcgcgtaagctggtgattctggcgcgcgatgcggggcgtgatatcagcctagaagatgttgcggtagaaagcctggtgccggagacattgtgtcaactcagcgttgccgatttcatggaacgactcaatgaaattgatgccacctttgcagagcgtttggctgcggccaaacagcgcggttgcgtattgcgttacgtcgcacaactgtcccctggacacgtccctagtgtcagcttgattgaattgccttctgaccatgccttcgtcaatcttcgtttgaccgataacgtagtgcaatttacaactcgtcgttattccgaaaaccccttgatcgtacagggccctggcgccggtccagaggtcaccgcagccggtgtttttgcggatttactgcgagttgcagcgggcgagggcgcacgcttgtga

SEQ ID NO: 736 - protein, 835 aa, Xylella fastidiosa Ann-1
MSSSAVRLSTVETPVYVPRTVVHKFGGTSVADADCYRHVACLLLAREETVQVTIVSAMKGVTDTLIALAEQAANHSPDWQVLWQQTRTRHCDAAQALLGEHAATLQDWLNTRFNELHEMLVALSVIGMLPSEVLDRLQGLGEVYSAQLLGQYLQAQGEDCVVLDARQVLVVSPGEFGAEVDWATSAQHLAHWRMQHPQRRVVVTGFVASDRTGRAITLGRNGSDYSGAIFAALFEADELHIWTDVDGVMSADPRVVPDAVQLDALSYDEACELAYFGAKVVHPQTMSPVMKRGVPIIIRNTFQPGHPGTRITADSVVSGSVKGLTLSPGLAVLNLEGTGLIGVPGTAERVFAALRNARLSVVMISQGSSEHSICCLVHQTEAERARDALLYTFAHELAIGHVQRVQLTNNISVLAAVGDGMAGHLGVAARLFESLRRAHVNILAIAQGSSERNISVAIDSQQATKALRAAHAAFWLSPQTFSIGVIGPGHVGEALLDQLCTAQQQLLSKANLDLRLRAIVSRRRMLLDERGLGSDWRHAFAAAPEAVDLDAFTAHLQVAHLPHAVIIDCSGSAEVADRYADWLAAGIHVVTPNKQAGSGPLHRYHAIRAAADASGARFRYEATVGAGLPVITTLRDLMDTGDSVTSIEGIFSGTLAWLFNKYDGSVPFSQLIAQARAMGYTEPDPRDDLSGVDVARKLVILARDAGRDISLEDVAVESLVPETLCQLSVADFMERLNEIDATFAERLAAAKQRGCVLRYVAQLSPGHVPSVSLIELPSDHAFVNLRLTDNVVQFTTRRYSENPLIVQGPGAGPEVTAAGVFADLLRVAAGEGARL

SEQ ID NO: 737 - DNA, 2445 bp, Croceibacter atlanticus HTCC2559
  CDS (1)..(2445): transl_table=11
gtgaacgtacttaagtttggaggcacatctgttgccaatgcagagaatattaccaaagttattaatatcttaaaatctgaggcaaaagacacccaacttcttgctgttgtatctgctttaggcggtattacagatgtactattagaagctggtgagcttgctaatgctaaagatgaggcttacctaactacatttgatgctataaaagcaaggcaccttgaaactgtagaagctcttttcccagaacatattaaggaagacattattagtgaggtgagtgctatcttagagcgcttaaaggatattcttcaaggaatttatctaattaatgagttttcgtttaaaacaagagataaagtgttgtcttttggtgagttgttatcttcctatattatttctgaagctttaaaactacatgttaaagatgcgcaacttaaagactctagagagcttatcgctacagactcttattttaccaaagccaatgtaaaagaagagttgaccaaccaaaacatctcatcgtattttaagtcatctaaagcttctgtaacagtattacctggctttatatcaagaaatgaaattggcgaaacaaccacgttaggtcgtggtggttcagattatacagctgctatattagcttctgctctcaatgcttctcaattagaaatttggacagacgttagcggtatgtatacagcacaccctaaattggttaaacaagcctttcctatagctcaaatttcatatcaagaggctatggagttgtctcattttggcgctaaagtgttgtatcctccaaccatacaacctgtgttagataaaaacattcctatattaattaagaatacattttttccagaagacaaaggcacacgcatcgtaccaactgttagtgaagacaatccaattaaaggtattagccatttagaacaaatagccttactaacactagagggcaatggtatggttggcgtacctggttattccagacgcttgtttgaagccttgtctttaaatggaataaatgttgcccttattacacaagcctcttcagaacactctatatgcgtaggtattttagatagtgatgttactaaggctgttgaagctcttcatttagaatttgagtatgatattgacaaacataaaattaatcctgtacaagttgaggagaatttagctatagtagcactcattggtgatcaaatgaaatctcaccaaggtataagtggcagaatgtttagtgctttgggagaaaacaatgtaaatataagagccattgcccaaggtgcatcagaacgaaatatatctgctgtaattgccaaaaaagatgtgagtaaagctttaaacattttacataacaggttttttgaagagcaagtaaaaacgctaaacttatttataatgggcgttggaaatgttggacatcgcctcatagagcaaattgccaaacaacaacaacaccttatggatacgttattgattgacataaaggtaataggcttggcaaactcaaaacaaatgtattttaatgaattgggagtcgatttatcacattggaaaaaagccttaaaatctggaaggccacaaaccttacagacctggatagaaaatattgatgccttaaatttaagaaatagcatcttcctagatattaccgccaaccaaagcgtagcagaaagctatgcagaataccttaagcgtagtattgccgttgtagcctgtaacaagattgcatgttcttcaaattacagcaattacaaagagctaaaacgcttatctaaaaaatacaatgctccatttttatttgaaacaaatgtaggcgcaggattacccgtaattaacaccttaaataatttggtgaattctggtgataaagtaacctcaataaaagcggtactaagcggaagcttaaattttatcttcaataattttaatgatgccataagctttcacgatgttgtgaaacaagcacaagcagaaggttacacagaaccagatcctagaatagatttaagcggtgtagatgtagctagaaaaatcttaattctcttgcgagaaagtggtttacaaatggatattgaagatattgagaataacatgtttttaccacaagcctcaatggatgcagaaagtgtagacgctttttatgaaactttaaaaacacacaacaatcattttaatcaccttttagctgaagcaactgcaaaagattgtaagctaaaatatgttgcagaatttaataatggcagcgctaaagttggcttgcaacacatcccaaaagggcatcctctttataacttagaaggcaaggacaacattgtcatttttaattcagagcgttacatagatcaaccattactcataaaaggtgctggtgctggtgcagaagtgacggcatctggcctatttggagatataataagtttagcgagatcttag

SEQ ID NO: 738 - protein, 814 aa, Croceibacter atlanticus HTCC2559
MNVLKFGGTSVANAENITKVINILKSEAKDTQLLAVVSALGGITDVLLEAGELANAKDEAYLTTFDAIKARHLETVEALFPEHIKEDIISEVSAILERLKDILQGIYLINEFSFKTRDKVLSFGELLSSYIISEALKLHVKDAQLKDSRELIATDSYFTKANVKEELTNQNISSYFKSSKASVTVLPGFISRNEIGETTTLGRGGSDYTAAILASALNASQLEIWTDVSGMYTAHPKLVKQAFPIAQISYQEAMELSHFGAKVLYPPTIQPVLDKNIPILIKNTFFPEDKGTRIVPTVSEDNPIKGISHLEQIALLTLEGNGMVGVPGYSRRLFEALSLNGINVALITQASSEHSICVGILDSDVTKAVEALHLEFEYDIDKHKINPVQVEENLAIVALIGDQMKSHQGISGRMFSALGENNVNIRAIAQGASERNISAVIAKKDVSKALNILHNRFFEEQVKTLNLFIMGVGNVGHRLIEQIAKQQQHLMDTLLIDIKVIGLANSKQMYFNELGVDLSHWKKALKSGRPQTLQTWIENIDALNLRNSIFLDITANQSVAESYAEYLKRSIAVVACNKIACSSNYSNYKELKRLSKKYNAPFLFETNVGAGLPVINTLNNLVNSGDKVTSIKAVLSGSLNFIFNNFNDAISFHDVVKQAQAEGYTEPDPRIDLSGVDVARKILILLRESGLQMDIEDIENNMFLPQASMDAESVDAFYETLKTHNNHFNHLLAEATAKDCKLKYVAEFNNGSAKVGLQHIPKGHPLYNLEGKDNIVIFNSERYIDQPLLIKGAGAGAEVTASGLFGDIISLARS

SEQ ID NO: 739 - DNA, 2418 bp, Pseudoalteromonas tunicata D2
  CDS (1)..(2418): transl_table=11
atgaaagttatgaagtttggtgggtcgtcactggctgattatgcttgcttaaagcaagttgctcagttagtaaatgctcagttatcgtcacaggtattgctagtattgtctgctccaggtggcatgacagataagttggttgagctggcagagttcgctgaaaatggtgtggattatcaagtgcagtgggaagccttgttatctcgcagtttagaattaaaacaacatgttgaaagtgctggtagagtcattagtaattggcctgattttaaattattacaacaaaagttatcaggtgtttcgttactcggtgtatgtccagattcagtgcgcgcgtttgttatttcgtttggtgaacgtttaagtgttgcactgatgcaagcattgcttagtgagcacaatcctacatatttggaagcaactaattgtattttatctcgtggtggtcacttagatgcagaagcgagcatttctttaagtactcctcgttttgctgaccaaatggcattggcaccaagtcaaatttatatcatgcctggttttacggctagtaatgatgcgggtgagctcacgacacttggccgtaatggttctgactattcggcggcgattgcagctgcgtgcgtaaaagccgatgtatgccagatttggactgatgtagatggtgtttatagtgctgatcctcgttatatcagcaaagcaacaaaaatcgatagtttgtcatataaagaggcaatggagttatcgtattttggtgcaaaagtattacatccgaaaacaattttaccctgtgctaaagcaggtgtgccatgtgaaattaaaaatacccataaccctgaagcaccaggctctttaattagtgaagtttcaagcgctgaagagcccgtaaaagcattgtcgagtttgcaagaccttgcaatgttgacagtctcaggcccaggtatgaaaggcaaagttggcatggctgcgcgtgtatttactgcacttgcgcaagataacgtttcaattgtcttaattacacaatcttcatgtgaatttagcattagtttttgtgtgcatgaagctgatttaaatttggcattagatgcgcttgaggtagcttttgagctggaatcacaagcaggtttaattgagccggtacaagttaaacgtgagctggctattgtcactttggtgggggacaatatgaaagcgcaccgaggcttggcggcaaagttttttgcttctcttgcacaagcacaagtaaacattgtggctattgcacaagattcaactgaaagctctatttcagcggttatagatggggcattatgtaacgatgcggtaaaagtgtgtcacgaaaatttctttacccatatcccatcaattgatgtgtttttattaggttgcggtctagtgggggctgagctgattaagcaatttgaaaaacaacagcagtggcttgaacagcgtaatatcaaacttaacctatatggcgtggcaaattctaaacaattgttcttgaacgaggacggcatttgtttacaaaattggcctgcgcaattggccgaatcaacccaaagctttgagttagcaacacttgaagcgtttgttaaagcgaatcatttgattaacccggttattgtcgattgtagttcatcaagccaattggctgatcaatatgtgtcgtttttggccgctggttttcatgtggttgcagcgaataaaaaagccaatacttcatcacaagcttattaccagcaattaattcaaactagcctaaaaaataatcgtaaatttttatacgaaactaatgtgggtgcaggcttgccagtattagataacttgaaattacttttaagtgccggtgatgagttacttagttttaatggtattttatctggttcgttatcgtatatttttggtgccttacaagacggtttaacattatctgaagcaacattacaagcgaagaaaaacggttttaccgaacctgaccctcgtgatgacttatcagggacagatgtagctcgaaaactgctgatcatcgctcgtgaatcagggcttgagcttgagctttctgatattgaagttgagtctgtattacctaaggattttgccaaaggggcaagtgttgatgagtttatggcgcaattaccaagtttagatgtggcatttggcgcaaaagtacatcaagcacgtgatgaaggtaaagtattgcgttatgtcggcagcattgtaaatggtcattgtaaagtaggtattgaagccgttgcggccgagcatgcacttaatgatattcgtgatggtgagaatgcccttgcaattttaagtcagtattatcaacctcgtccgtttgtcattcgtggttatggagcgggtgcgcaagtcactgcggctggtgtattttctgatatcttaaaaatcgtatcacgctag

SEQ ID NO: 740 - protein, 805 aa, Pseudoalteromonas tunicata D2
MKVMKFGGSSLADYACLKQVAQLVNAQLSSQVLLVLSAPGGMTDKLVELAEFAENGVDYQVQWEALLSRSLELKQHVESAGRVISNWPDFKLLQQKLSGVSLLGVCPDSVRAFVISFGERLSVALMQALLSEHNPTYLEATNCILSRGGHLDAEASISLSTPRFADQMALAPSQIYIMPGFTASNDAGELTTLGRNGSDYSAAIAAACVKADVCQIWTDVDGVYSADPRYISKATKIDSLSYKEAMELSYFGAKVLHPKTILPCAKAGVPCEIKNTHNPEAPGSLISEVSSAEEPVKALSSLQDLAMLTVSGPGMKGKVGMAARVFTALAQDNVSIVLITQSSCEFSISFCVHEADLNLALDALEVAFELESQAGLIEPVQVKRELAIVTLVGDNMKAHRGLAAKFFASLAQAQVNIVAIAQDSTESSISAVIDGALCNDAVKVCHENFFTHIPSIDVFLLGCGLVGAELIKQFEKQQQWLEQRNIKLNLYGVANSKQLFLNEDGICLQNWPAQLAESTQSFELATLEAFVKANHLINPVIVDCSSSSQLADQYVSFLAAGFHVVAANKKANTSSQAYYQQLIQTSLKNNRKFLYETNVGAGLPVLDNLKLLLSAGDELLSFNGILSGSLSYIFGALQDGLTLSEATLQAKKNGFTEPDPRDDLSGTDVARKLLIIARESGLELELSDIEVESVLPKDFAKGASVDEFMAQLPSLDVAFGAKVHQARDEGKVLRYVGSIVNGHCKVGIEAVAAEHALNDIRDGENALAILSQYYQPRPFVIRGYGAGAQVTAAGVFSDILKIVSR

SEQ ID NO: 741 - DNA, 2346 bp, Pseudoalteromonas tunicata D2
  CDS (1)..(2346): transl_table=11
atgactcgttcagtacacaaatttggtggttcaagcttaagtagtgccaagcgctatcatgcagtgactaatattattttacagcaagcggcacttggtgatgttgttgtagtttcagccgcaggtaaaacgactgataccttagttaagctttggcagagttatcgccaagccgatcagcaggctatatcggatgttttagcattactttcggcaaatcagtttgaattaattgctgatttattaactgattcttataaagattcagcgcttgagctgttggatgccgagcttatttcgataggcgaaaaaattgcctcgcaacatttacaagaggctcatcttttagcgcatggtgagctgtggtctgcacggttattaggtttatatttacagcagctaaatgttgcagcacaaagctttgatgccagagagctgctgaccttagcgcaaggtgtattgcaacatgagaaaaacgtaattgcctgtgggcaatttagtgcaacaaaatataatgttgttacaggttttatcgcaagtgatgaacaagggcaaaccattacactcggtcgtaatgggagtgactatagtgcgactttatttgcgcgttatatctgtgctgagagtgtttcaatttggactgatacccaaggtgtatttagtactgatcctcgcaaagtaaaacaagcgattcgttatggtaaaatttgccgtggtcaagcaaatttgcttgctcgtttgggaaatccagttttacatgccaaaacactaaccccgcttaaagacactgatattaaacttgttgtgcgcagtagttttgatagtagcagtgcggcgactgaaatcgtaaaagaaggatttgcgaaacaaaaacgttttatcaccaatctagatcattacgatttattaaaagttgcagatttacatgaaggtgaagtgggtgagctaagtcggatagtacagcacgcacttcatcattttgtggaaaaagatgaggtatatttacttgtgccagctgctttaggtcatcaagttttaactctgttggctgggcgttgtaatctagttgagtcaaatgtgtcgggtattgccttggtgtgtcagcatggagatggccatcaattagcgcaatcggcaaaagtaattttggcagaaaataacgttaatttacgttttatttatagtcatgaagattattgtattctgctttgtgagcagcagttagatactgacagattaacaattttgcatgataagttagtcagtgtttcacaagagttggctgtggttgtggcgggcttgggcaatgtaggtaccgtattcttagagcagttaaaagagcagttaagtcgtttaaatcaattattgcccgtgaagctggttggcttaatacgcagcgagcaaatgttatttaatcctactgggattgatgtgcaaaattggcaagctgcttggcagactcatgcggtgtcataccatgaagctgaattattaagtcatttagctgagctagattatgagcataagttagtgattgatatcacagcaagtgagcagtttagtcaattgtatcctcagtttgttgctcataactgccaccttatttgtgccaataaatacgctggaacagctccacttgcttggtatgagcaattacaacaaagcttaaagcagcgtaacttgcagtggcgttataatacgtcggttggagctgggttaccgattaactttgcattaaatgatttacaaaactctggtgataaagtgcaaaggcttagcggtgttttttctggtacgttatcttggctttgcagccaatataccgctgaagtgcctttttctgaattagttatgcaagccaaagcgatgggttatagtgagcccgacccgagagaagatctttctggccgagatgtacagcgtaagttacttattttagccagagagttgggtttaaacttagagcttgatgacattgtgctttcgcctttaatgcccgaagctttaagtaacggtgattgggaattttttgttgataatcttgcattacttgatacttatgtcagcgagcttgctgcaaaggctgcgttagaagataaagtattgcgttatgttgctgaattggttttatcggatgataaagtgacagctcaagttggcttgcaaggtgttgcgaaacaagattctttagcaaccttaaagccaggtgataacatctttgtcattaacagccgttggtaccaagataatcctttggtgatccaaggtccgggagccggcaaagaggtgacggctgcgggtgtgcattctgatttatattggttatgtgtttcgttagctaaataa

SEQ ID NO: 742 - protein, 781 aa, Pseudoalteromonas tunicata D2
MTRSVHKFGGSSLSSAKRYHAVTNIILQQAALGDVVVVSAAGKTTDTLVKLWQSYRQADQQAISDVLALLSANQFELIADLLTDSYKDSALELLDAELISIGEKIASQHLQEAHLLAHGELWSARLLGLYLQQLNVAAQSFDARELLTLAQGVLQHEKNVIACGQFSATKYNVVTGFIASDEQGQTITLGRNGSDYSATLFARYICAESVSIWTDTQGVFSTDPRKVKQAIRYGKICRGQANLLARLGNPVLHAKTLTPLKDTDIKLVVRSSFDSSSAATEIVKEGFAKQKRFITNLDHYDLLKVADLHEGEVGELSRIVQHALHHFVEKDEVYLLVPAALGHQVLTLLAGRCNLVESNVSGIALVCQHGDGHQLAQSAKVILAENNVNLRFIYSHEDYCILLCEQQLDTDRLTILHDKLVSVSQELAVVVAGLGNVGTVFLEQLKEQLSRLNQLLPVKLVGLIRSEQMLFNPTGIDVQNWQAAWQTHAVSYHEAELLSHLAELDYEHKLVIDITASEQFSQLYPQFVAHNCHLICANKYAGTAPLAWYEQLQQSLKQRNLQWRYNTSVGAGLPINFALNDLQNSGDKVQRLSGVFSGTLSWLCSQYTAEVPFSELVMQAKAMGYSEPDPREDLSGRDVQRKLLILARELGLNLELDDIVLSPLMPEALSNGDWEFFVDNLALLDTYVSELAAKAALEDKVLRYVAELVLSDDKVTAQVGLQGVAKQDSLATLKPGDNIFVINSRWYQDNPLVIQGPGAGKEVTAAGVHSDLYWLCVSLAK

SEQ ID NO: 743 - DNA, 2460 bp, Photobacterium sp. SKA34
  CDS (1)..(2460): transl_table=11
atgcgagtatttaaatttggcggttcatcattagccgatgcagagcgatttttaagagcagcagatattattgcgagtaatgctcagcaaggtgacgtttctgtggtgctatcagcaccggggaaagtaacaaataaattagtttcagtgattgataacactgtgaaagccggtgagtcatcgctacagttggccgatctagaacaggtatttactgaattgttcagtggcttaaaagccttagaacctcagtttgataaagccgctttagatgcaaaactggcgagctctctaggacaattaaaagagtatgttcacggaattaaactattaggtttatgtcctgataacgtgtatgcgacgatcatcagtaaaggtgaacgtctttctattgcagcgatgaaagctttacttgaagcgaaaggacagcctgcgagcctgatcgatccgattaaatatctttacgctgaaggtgattaccttgaggcgcatgtcgatattgaaatttcaacgcagaatttccgacgagatccattacctgcagggcatgtttgtattatgccgggctttaccgcaggtaacagcaaaggtgagctagtgacactggggcgtaatggctctgattattctgctgcggtacttgcagcatgtctacgcgcggattgttgtgaaatttggacggatgttgatggtgtctatagctgtgatcctcgcttagtccctgatgcgcgcttgttgaaatctttaagctatcaagaagcgatggaactgtcttactttggcgcttctgtacttcaccctaaaactatcgctcctatcgcccaatttcaaattccatgtttaattaaaaatagctttagtccacaagcgcctgggacattgattggtcaagacacaggtgaagatcaattagccattaaaggtattaccaccttaaaagatcttacgatggttaacgtatcaggccctggtatgaaggggatggtaggtatggctgcacgcgtatttggcgcaatgtcatctgcgggtgtatctattgtgttgatcacccaatcatcgtctgaatacagcattagtttctgtattgaatcggctgatcatgttcaagctgaaaaagcgctaaacgaaagttttgaattggaattaaaagaaggcctgcttgagaccgttgagtttttagataacgtatctatcgttactttagttggcgatggtatgcgtacttctcacggcgttgcatcacgtttctttacctctttggctgaagtggatgtcaatattgttgcgattgcacaaggatcatctgagcgtgctatttcagcggttattccacaaaataaagtgccagaagctgtcaaagcgtgtcatgagaacttatttaatagccagcatttcttagatgttttcgtgattggtgtcggcggtgttggtggtgagctgatcgatcagatccagcgtcagcaaagtaaacttgctgatgacggcattgttattcgagtctgcggtatggcgaacagcaaaggattactccttagctgtgagggctttgacttagataactggcgcgatcaaatgggggcagtgaatgagccactcaatcttgctcgtatgatccagcttgttcagcgtaatcacattatcaatccagtgatcattgattgtacgtcggatcaaactattgctgagcaatatgccgattaccttgctgcaggcttccatgttattacaccgaataagaaagcaaacacggctagcatggcttattaccagcaattacgccaagcggcacgtttaagccgtcgtaaatttatgtatgacactacggtaggtgcaggtttacccgttattgaaaacttgcagaatctattggccgcaggtgatgaattacagcgcttctctggcattttatctggctcaatgtcatatatcttcggtaaattggatgaaggcatgagctttagcgaagcgacaaccgttgcgcgtaataatggctttactgagcccgatcctcgtgatgatttatcaggtatggatgtggcacgtaagctacttattctggcacgtgaatcagggcttgaattagagctttcagacgttgatgttgaacaagcactaccaccaggttttgatgcttcaggctctgttgatgactttatggcgcgtttatcacaagcggatgcatactttactcaattagctcaagaagcagcaaaagaagataaagtgctgcgttatgtcggtgaaatcgataatggtcattgctcggtgaaaattgttgcggtgaaccctgatgatccaatgtttaaaattaaagatggtgagaatgccttagctttctacagccgttactaccaaccgatcccgctggtattacgtggttacggtgcgggtacggaagtaactgcagcgggtgtctttgccgatctaatgcgtacattaggctggaagcgaggagtataa

SEQ ID NO: 744 - protein, 819 aa, Photobacterium sp. SKA34
MRVFKFGGSSLADAERFLRAADIIASNAQQGDVSVVLSAPGKVTNKLVSVIDNTVKAGESSLQLADLEQVFTELFSGLKALEPQFDKAALDAKLASSLGQLKEYVHGIKLLGLCPDNVYATIISKGERLSIAAMKALLEAKGQPASLIDPIKYLYAEGDYLEAHVDIEISTQNFRRDPLPAGHVCIMPGFTAGNSKGELVTLGRNGSDYSAAVLAACLRADCCEIWTDVDGVYSCDPRLVPDARLLKSLSYQEAMELSYFGASVLHPKTIAPIAQFQIPCLIKNSFSPQAPGTLIGQDTGEDQLAIKGITTLKDLTMVNVSGPGMKGMVGMAARVFGAMSSAGVSIVLITQSSSEYSISFCIESADHVQAEKALNESFELELKEGLLETVEFLDNVSIVTLVGDGMRTSHGVASRFFTSLAEVDVNIVAIAQGSSERAISAVIPQNKVPEAVKACHENLFNSQHFLDVFVIGVGGVGGELIDQIQRQQSKLADDGIVIRVCGMANSKGLLLSCEGFDLDNWRDQMGAVNEPLNLARMIQLVQRNHIINPVIIDCTSDQTIAEQYADYLAAGFHVITPNKKANTASMAYYQQLRQAARLSRRKFMYDTTVGAGLPVIENLQNLLAAGDELQRFSGILSGSMSYIFGKLDEGMSFSEATTVARNNGFTEPDPRDDLSGMDVARKLLILARESGLELELSDVDVEQALPPGFDASGSVDDFMARLSQADAYFTQLAQEAAKEDKVLRYVGEIDNGHCSVKIVAVNPDDPMFKIKDGENALAFYSRYYQPIPLVLRGYGAGTEVTAAGVFADLMRTLGWKRGV

SEQ ID NO: 745 - DNA, 2415 bp, Photobacterium sp. SKA34
  CDS (1)..(2415): transl_table=11
atgacaaaagcattacgccaattacataaatttggcggtagtagcttagccgatcctgagtgctatcaccgagtagcggatattctggctgagtattcaaacaatgaagatttaattgttgtttcagccgcaggaaagacaacaaatcaacttatatcatggttagcgcaattagaaaaagatggccgtcaagcacatgaaaccttgttatctgtgcgcagttatcagcaacaattaattgagtctttgctttctttaccgacagcagaacgtttgattgcgttgttacatgatgacctatcaacgattgctcgctatggtgaaagtactattagtccagcacttcgaggcactatccaagggtatggtgaaatatggtctgcgcgattactagctgcattattgtgccaacgtgacttacctgccaaagatttggattctcggttatttttacgcgccgaacacgccgcacagccagaagtcgatagccgatcatcgaagccattattgcaacagcagtttgcacagcatagccatcaccgtttagtgatcacaggcttcatggcccaaaatggtcaaggggaaaccgtcttacttggtcgcaatggttcagattattctgcgacaattattggtgcgttagcagatgtttatcgagtcacgatttggagtgatgtcgctggggtttatagtgctgatccacgtaaagtgagcgatgcctgtttattaccgttattacgattagatgaagccaatgagcttgctcgccttgctgcccctgttttgcatagccgtacattacaacctgtggcgcaaagtgcgatagatttaacactgcgctgtagccatcaaccagaatcaggttcaacgcgagtagagcgtgttctggcatccggtcgaggggcaaaaattgtctcttcgcttgatgatgtgtgtttgattgaagttgacgtaccacgaggtatggatgttcaacatgtacgcgaagatgttgagcgtttattgtcgcgccatcaactagcgcctttagcgcaaagtctagagcagagtaaaggccgtattatgctggcttatactcgagaggtggttaatgacgtattaaatttattgcaagatagcggtacacctgccgaattacggttgcgagaaggcttttcaatggttgcagccgtgggcgctggggtgatcaataaccctgttcactgtcatggcttttatcagcagctaaaaggcttaccggttgagtttatgacagaagctgattcgggattaagtttggttgcggtattgcgtcatgttgaaactgaaagtttggttagtgacattcaccaagcgctctttcaagctcaaaaacgcgtagggctagtactttgcggtaaaggcaatattggtacccgttggcttgaattattcgaccgagagaaattagcgttagaaaaacgtcatggtttaagtttcactttaatagggatactcgatagtcgtcgtggttggatgaactttacaggtatagatccctcactagcactgacacaatttgaacaagaagcaatagagtatcaagagagtgcacttttttctcaccttgcgaatgctgattatgatgatgtgattgtgcttgatgtaactgcaagtagtgagctgtcaaagcgttatgctgaaatagctgaacacggtttacacttaatttcagcgaataaagtggcgggctctgcgagcagcaaagactatcatgcggtgattgatgcgtttgcgaaaagtagccgtcattggttgtataacgcgacagttggtgctgggcttccggtgaatcacactgttcgtgatttacgagagagtggcgatcagatcatcgctgtttctggtattttctcaggcaccttgtcttggttgttccaacagtatgatggcagtgtgccattttctgagttagtagaacaagcatggcagcaaggactcactgagccagatcctcgccacgatttagatggcagtgatgtgatgcgtaagctcgtgatattagcccgtgaatcaggcctagacattgaacctgagcaggtaaaagttgaaagcttagtcccaagcgatcttgcaacattatctgttgagcagttttttgagcaaacccaagtacttgacgagattttagccgagcgattagaaagtgcgcgtgaggaagaaaaagttctgcgttatgtggctcgattagatcgtcacggtaacgcctatgttggtgttgaagccttaccacaagagcatgcgctagctaatttacttccgtgcgataatatctttgctattgaaagtcattggtaccgtgataatccgttagtgattcgaggaccaggagcagggcgtgatgtgactgctggtgcattattatcagatataaatcgtctggcgtgtttactgtaa

SEQ ID NO: 746 - protein, 804 aa, Photobacterium sp. SKA34
MTKALRQLHKFGGSSLADPECYHRVADILAEYSNNEDLIVVSAAGKTTNQLISWLAQLEKDGRQAHETLLSVRSYQQQLIESLLSLPTAERLIALLHDDLSTIARYGESTISPALRGTIQGYGEIWSARLLAALLCQRDLPAKDLDSRLFLRAEHAAQPEVDSRSSKPLLQQQFAQHSHHRLVITGFMAQNGQGETVLLGRNGSDYSATIIGALADVYRVTIWSDVAGVYSADPRKVSDACLLPLLRLDEANELARLAAPVLHSRTLQPVAQSAIDLTLRCSHQPESGSTRVERVLASGRGAKIVSSLDDVCLIEVDVPRGMDVQHVREDVERLLSRHQLAPLAQSLEQSKGRIMLAYTREVVNDVLNLLQDSGTPAELRLREGFSMVAAVGAGVINNPVHCHGFYQQLKGLPVEFMTEADSGLSLVAVLRHVETESLVSDIHQALFQAQKRVGLVLCGKGNIGTRWLELFDREKLALEKRHGLSFTLIGILDSRRGWMNFTGIDPSLALTQFEQEAIEYQESALFSHLANADYDDVIVLDVTASSELSKRYAEIAEHGLHLISANKVAGSASSKDYHAVIDAFAKSSRHWLYNATVGAGLPVNHTVRDLRESGDQIIAVSGIFSGTLSWLFQQYDGSVPFSELVEQAWQQGLTEPDPRHDLDGSDVMRKLVILARESGLDIEPEQVKVESLVPSDLATLSVEQFFEQTQVLDEILAERLESAREEEKVLRYVARLDRHGNAYVGVEALPQEHALANLLPCDNIFAIESHWYRDNPLVIRGPGAGRDVTAGALLSDINRLACLL

SEQ ID NO: 747 - DNA, 2460 bp, Vibrio sp. Ex25
  CDS (1)..(2460): transl_table=11
atgcgagtattgaagtttggcggttcatcactagctgatgcagatcgctttttaagagcggcagacatcattgccaataacgctcaacaagaagaagtggctgttgttctttcagccccaggtaaaacaacaaataagttggttgcagtcattgaaggcgcgttgcgcaatggtgaagcagagctgcaaatcaaagagttggatgaatcgtttaaaacgctcttcactcaaatccaagcagtactccccaatattgatggttcagctttcgataaccaagtgaaaacctcgctatctcaattacgtcaatttgttcacggcatcaatctattaggtatgtgcccaaacaacgtaaatgcgcgcattattagtaaaggtgagcgtgtttccattcagttgatgaaagctgtcttggaggcgaagggacaacaagcgagcttgatcgatcctgtcgagtatctgtatgcccaaggtgatcatcttgaagctatggttgatgtggatatttcaacgcaaaacttccgtcaaaaaccccttcctcagggtcatgtgaacattatgccgggctttacagctggcaacgaaaaaggagagcttgtcacgcttggtcggaatggctctgactactcggcagcggttcttgcagcttgtttacgcgcagactgctgtgaaatctggaccgacgttgatggtgtatacaactgtgacccacgtttagtcgaagatgctcgcctacttaaatcactaagctaccaagaagcgatggagctttcttattttggtgcttccgttctgcacccgaaaaccatcgcccctattgctcaattccacattccatgtctgatcaaaaacagctttaaccctcaaggtgcaggtactcttatcggccaagatactggtgaagataatcttgcgatcaaaggtattacaacacttaacgacctaaccatggttaacgtatcaggccctggtatgaaaggcatggtaggcatggcgagccgtgtattcggtgcgatgtcgtctgctggtgtatctattgttctgatcactcagtcttcttctgaatacagcatcagcttctgtattgaggctgaagataaagcgaaagcgcagcaagtgctggcagatgcgttcgagctagaactgaaagatggcttactagaaccggtcgagtttattgataatgtttcaatcattacgcttgttggtgacggtatgcgcacatcgcgtggtgtggcttctcgcttcttctcttctctagctgaagtgaacgtgaatatcgtagcgatagcacaaggctcatcagaacgtgcgatttctgccgttattccagaagacaaaatttctgaagcgatcaaagcgtgtcacgaaaacctattcaactcgaaacacttcctcgatgtgttcgttgttggtgttggtggtgtgggtggcgagcttgtggatcagatcgagcgccaacaagtcaaactggctgagaaaggcattgtgattcgagtttgtggcttagcaaacagcaaaggtcttttgcttgatagcgaaggcttaccgcttgagcactggcgtgatcgtatgtcagcagccacagaagagttcagcctagcgcgtctgatttctttggtacaacgcaatcatattatcaacccagtattggttgattgtacgtccagtgaagacattgctaaacaatacgccgattttctagcggcaggttttcatgttgtaacaccaaacaaaaaagcaaacacagcaagcatggcgtactaccatcagcttcgcgatgtggctcgtagctcccgtcgtaaattgatgtatgaaacaaccgtaggtgcaggcctaccggttattgaaaacttgcaaaacctaatttctgcaggcgatgaactggagcgcttcagcggtattctttccggttctctttcttatattttcggtaagttagatgaaggaatgagcttaagtgaagcgacgaatatcgcaaaagaaaatggctttactgaaccagatcctcgtgatgacctgtctggtatggatgtcgcgcgtaagctgttgatcctagctcgtgaagcgggcatgtcactagagcttgaagatgttgttgttgaccaagcgctaccgccaggttttgatgattcaggcagtgttgatgagtttatggcgcgtcttccagaagcagacgcttacttcaaagagttatcggctaaagcagcagaagaaggcaaagtactgcgttacgttggtgaaattaacgagggcaagtgcacagtaagcatcgctgcggtggatgaaaacgatccgatgtataaaatcaaagacggtgaaaacgcactggcattttacagccgttactaccagccaatcccacttgtgttgcgtggctatggcgcaggtactgaggtaacggctgcgggtgtattctctgacgtgatgcgtactttaggttggaaactaggggtataa

SEQ ID NO: 748 - protein, 819 aa, Vibrio sp. Ex25
MRVLKFGGSSLADADRFLRAADIIANNAQQEEVAVVLSAPGKTTNKLVAVIEGALRNGEAELQIKELDESFKTLFTQIQAVLPNIDGSAFDNQVKTSLSQLRQFVHGINLLGMCPNNVNARIISKGERVSIQLMKAVLEAKGQQASLIDPVEYLYAQGDHLEAMVDVDISTQNFRQKPLPQGHVNIMPGFTAGNEKGELVTLGRNGSDYSAAVLAACLRADCCEIWTDVDGVYNCDPRLVEDARLLKSLSYQEAMELSYFGASVLHPKTIAPIAQFHIPCLIKNSFNPQGAGTLIGQDTGEDNLAIKGITTLNDLTMVNVSGPGMKGMVGMASRVFGAMSSAGVSIVLITQSSSEYSISFCIEAEDKAKAQQVLADAFELELKDGLLEPVEFIDNVSIITLVGDGMRTSRGVASRFFSSLAEVNVNIVAIAQGSSERAISAVIPEDKISEAIKACHENLFNSKHFLDVFVVGVGGVGGELVDQIERQQVKLAEKGIVIRVCGLANSKGLLLDSEGLPLEHWRDRMSAATEEFSLARLISLVQRNHIINPVLVDCTSSEDIAKQYADFLAAGFHVVTPNKKANTASMAYYHQLRDVARSSRRKLMYETTVGAGLPVIENLQNLISAGDELERFSGILSGSLSYIFGKLDEGMSLSEATNIAKENGFTEPDPRDDLSGMDVARKLLILAREAGMSLELEDVVVDQALPPGFDDSGSVDEFMARLPEADAYFKELSAKAAEEGKVLRYVGEINEGKCTVSIAAVDENDPMYKIKDGENALAFYSRYYQPIPLVLRGYGAGTEVTAAGVFSDVMRTLGWKLGV

SEQ ID NO: 749 - DNA, 2409 bp, Vibrio sp. Ex25
  CDS (1)..(2409): transl_table=11
atgactttacaacgtcagctgcataagtttggtggcagtagcttagcaaacccagaatgctatttacgcgttgtggatattcttaaggagtattcgacggaaaatgatctcgtggtcgtttcggcggcaggaaaaactactaaccgcttgattgagttcctggaagggttagagaaagatggccgaatcgcacatgaagcacttcaaagcctaaggcagttccaaacggagctaatagaaaatttgttggaaaatgaagtacaagaagagctattagcgttactgcatgatgagttcagtaccttatctgagctgacagcaccactcactggcgcgcaaaaagccgcggtactaggacatggagaagtttggtctgctcgcctattggccgcgttattatctcaacgttctatccccgctgtcgcacaagatgcacgagcgtttttacgtgcggaagccgggactcaacctgaagttgatcgcgctcgttcatatcctttgataaaagaagttctcgcgcaacacaatcataaacgtgtggtaattactggctttatggctcagaacgagacgggcgaaaccattttacttggtcgcaatggctctgactattctgcaactgtcattggtgctctggctgaagtgagcacggtcaccatttggagtgacgttgccggtgtctatagtgccgatccgcggttggtggcagacgcgtgtctgttaccgttacttcgattggatgaagccagcgaactcgcccgtttagccgccccagtcctacacagtcgtacacttcagcctgtggcgcaaagtactatggatctcaacctcaagtgtagctatctgccggaatcgggctctactcgtattgagcgtgtcttagcgtctggccgtggcgctaaaattattacctcgctggatgatgttttattggtgcagctgtctttcatgcatgggcacgacttcgaaaaaacacagaatgatgtattacaagcgttgcagcgagcgcaattggagccattggcatttgaggcacagcccgatcaacacacgttgcgcttggcgtataccgcagaaattgccggtggcgcactgaaacacttacaagagcttgcggttgaagcggagattaagctcaaagaaggctactctctcttggcggcggtaggcgctggcgttacgaaaaacgccaaccattgttttggtttttatcagaagttaaaacactctccggttgaatttatttctgaaactgagtcggggctgagtttagtcgccgttttgcgtcgtactgataccgaagtgttggttcaaacgattcatagccagttgttccaagcgcaaaagcgcgtggcggtggctttatgtggcaagggcaacattggttctagctggttaaatttatttgcaactcaaaaaggtgaactcgaaaaacgtcatggaatgagctttgaccttgtagcggtcgtggatagtcaaacctactggttcgatgagcaaggtattgatgcagcaagtgttgctgaacgatttgatgatgaaagcctagcaaacgatgggtcttggttgactcacttaggagcgctaaaaaattacgatgaagccgtagtgcttgatgtgacagcgagcaaagacttagctcagcgctatgtagaaattgcgcagcagggcattcatttgatttccgctaacaaagtggcgggttcggctgatagccagtattaccatcaggttcaagatgcattcgctaaaattggtcgttattggctgtacaatgcgacggttggtgcggggttaccgataaaccataccgtgcgagatctacgtgaaagtggtgatgagatcgttgctctatcgggtattttctcagggacgttatcatggttattccaacaatttgacggctcagtaccatttaatgatttagtcgacctcgcttggcagcaaggtttaacagagcctgatcctcgttctgatttagatggttcagatgtgatgcgtaagctggttatcttagctcgagagtctggtctcgatattgagccgggcagcgttaaggttgaatctctggtaccagaagaattaagagaacttagcatcgatgacttcttcgataacggagggctgttgagtgaaatactgcaagagcgcctgacaaaagcacagagaaacgaccaagtgcttcgctacgttgctcgtttagaaaaaaatggtaaagcgacggtgggagtagaagcgttatctcgtgaacatgcgctcgccaacctactgccgtgcgacaacatttttgccattgaaagtaagtggtacaaagataacccactcgttattcgagggcctggcgcaggaagagaagtgacagccggcgcgattcaatccgacctcaaccgattagccggtttattctaa

SEQ ID NO: 750 - protein, 802 aa, Vibrio sp. Ex25
MTLQRQLHKFGGSSLANPECYLRVVDILKEYSTENDLVVVSAAGKTTNRLIEFLEGLEKDGRIAHEALQSLRQFQTELIENLLENEVQEELLALLHDEFSTLSELTAPLTGAQKAAVLGHGEVWSARLLAALLSQRSIPAVAQDARAFLRAEAGTQPEVDRARSYPLIKEVLAQHNHKRVVITGFMAQNETGETILLGRNGSDYSATVIGALAEVSTVTIWSDVAGVYSADPRLVADACLLPLLRLDEASELARLAAPVLHSRTLQPVAQSTMDLNLKCSYLPESGSTRIERVLASGRGAKIITSLDDVLLVQLSFMHGHDFEKTQNDVLQALQRAQLEPLAFEAQPDQHTLRLAYTAEIAGGALKHLQELAVEAEIKLKEGYSLLAAVGAGVTKNANHCFGFYQKLKHSPVEFISETESGLSLVAVLRRTDTEVLVQTIHSQLFQAQKRVAVALCGKGNIGSSWLNLFATQKGELEKRHGMSFDLVAVVDSQTYWFDEQGIDAASVAERFDDESLANDGSWLTHLGALKNYDEAVVLDVTASKDLAQRYVEIAQQGIHLISANKVAGSADSQYYHQVQDAFAKIGRYWLYNATVGAGLPINHTVRDLRESGDEIVALSGIFSGTLSWLFQQFDGSVPFNDLVDLAWQQGLTEPDPRSDLDGSDVMRKLVILARESGLDIEPGSVKVESLVPEELRELSIDDFFDNGGLLSEILQERLTKAQRNDQVLRYVARLEKNGKATVGVEALSREHALANLLPCDNIFAIESKWYKDNPLVIRGPGAGREVTAGAIQSDLNRLAGLF

SEQ ID NO: 751 - DNA, 2346 bp, Alteromonadales bacterium TW-7
  CDS (1)..(2346): transl_table=11
atgacacaaacagtacataaatttggtggttcaagccttagttcggctcaacggtatgagcgagttgcgagtattattttagagcatactcagccgggcgattgtgttgttgtatctgcggcgggaaaaacaaccgatactttggtgaagttatggcaaagctatcagcaacaggatacgcatgtcgttgctgatatattgctgcaattaaataatcatcaaactgatttaatcacacagttacttcatgcagatcttaaacgaactgctttaaggcttttgcatagtgaactaacagcgattagtgaattgataaaaaaccaaggcttgaaagaggctcccttgcttgctcatggtgaggtatggtctgcacgcttattggcgctttaccttacgcaattaaatattaatgcttgtgaccttgatgctcgaacactttttacattaaataatgggcaattgttacatacccaaaatgcgcagcaatgtgcgaagtttataaccccagactacattaatgttgttacaggctttattgcatcaaatacgttgggtgacacggttacacttggtcgcaatgggagtgactatagtgcaaccttacttgctaattactgccatgctaagcaggtgtgtatttggaccgatacacaaggtgtatacagcacagaccctcgtaaagttagtaaagcggttaaatacaataaagtatgtagaggtcaagccaacctattagctcgattaggtaatcctgttttacacgctaaaacgctttctcctttaagaaacagcgacataaaactatctgttcgtagtagttttgatgtgcaagcaacgcctacagatatagttaaagaaggaaatgtaaaacaaaagcgttttattactacgttaaacaacatcgatttattaacagttgaaaagctggccgaaggcgaagtcgcagatgttagccagcttattcaacacagcattcatcactttagtcaaaatggtgaaacttatttagttgtcccctctgcttcaacatataaagttgttagttattttgaggggagagcaaacattagcgagtcgagcttaaatggctgtgcggttgtagcgcctgttaatgatatttcaaaattaaatgtattggctattgatacgttaaatgctcatgccatcgagccccgctttactcaccaagacagtggatacattttactattaacggatcaggttatagatagcgatatactcagtgttttacacgataagcttattaataaaggccaagaagtcgctttaataatcgcgggccttggaaatgtgggagaggtatttatagagcagctgtcagctcaattcgagcgtttctctgatgactttacaattaaattggttgggttaatacgctctgaaacgttactttttaatcccagtggtataaacattgctgattggaaaaagcattttctctcacaaagcaaagtttataataaccaaacattactaaacataattagtgaacttgattatgagcataaagtggttgttgatattaccgcaagcgaggcatttagccagctatacccggagtttgttgcattagattgccacttgatcagtgctaacaaatacgctggaactgcagatacagcatggtataaagctttgcgtacgagtattagtgagcgaaatttgcattggcgctacaacacaagcgtaggtgcaggcttgcctgttaactttgcattggcagatttgcaaaacagtggtgacaaaatcactcgtattgaaggtgttttttcaggcacgttatcatggttatgcagtaagtttgacggaacaataccattttctgatctggtgcttgaagcacaaaagatggggttcacagagcccgatccgcgtgaagatttatcaggacgtgatatgcagcgtaaactgcttatacttgccagagagcttggtttagaactcgaccttgatgctataagcttatcagcactcatgcccgaaacgcttgctataggaggttgggacgactttttagctaatgaatccaccctcaatgactttattgacgctcatgctgcaaatgccaaagcacaaagttccgtacttcgttacacgggtttacttgaaattacggaaaacaaagtaaccgctcaagtaggtattacttatactcctattggtgatgcgttagctaatttaacacctggcgataatatttttgtcattaatagtaagtggtatagcgctaacgctcttgtgattcaagggcctggtgcgggtaaggaagtaaccgcggcgggtattcattctgacttatattggctggtacaaaatataaaataa

SEQ ID NO: 752 - protein, 781 aa, Alteromonadales bacterium TW-7
MTQTVHKFGGSSLSSAQRYERVASIILEHTQPGDCVVVSAAGKTTDTLVKLWQSYQQQDTHVVADILLQLNNHQTDLITQLLHADLKRTALRLLHSELTAISELIKNQGLKEAPLLAHGEVWSARLLALYLTQLNINACDLDARTLFTLNNGQLLHTQNAQQCAKFITPDYINVVTGFIASNTLGDTVTLGRNGSDYSATLLANYCHAKQVCIWTDTQGVYSTDPRKVSKAVKYNKVCRGQANLLARLGNPVLHAKTLSPLRNSDIKLSVRSSFDVQATPTDIVKEGNVKQKRFITTLNNIDLLTVEKLAEGEVADVSQLIQHSIHHFSQNGETYLVVPSASTYKVVSYFEGRANISESSLNGCAVVAPVNDISKLNVLAIDTLNAHAIEPRFTHQDSGYILLLTDQVIDSDILSVLHDKLINKGQEVALIIAGLGNVGEVFIEQLSAQFERFSDDFTIKLVGLIRSETLLFNPSGINIADWKKHFLSQSKVYNNQTLLNIISELDYEHKVVVDITASEAFSQLYPEFVALDCHLISANKYAGTADTAWYKALRTSISERNLHWRYNTSVGAGLPVNFALADLQNSGDKITRIEGVFSGTLSWLCSKFDGTIPFSDLVLEAQKMGFTEPDPREDLSGRDMQRKLLILARELGLELDLDAISLSALMPETLAIGGWDDFLANESTLNDFIDAHAANAKAQSSVLRYTGLLEITENKVTAQVGITYTPIGDALANLTPGDNIFVINSKWYSANALVIQGPGAGKEVTAAGIHSDLYWLVQNIK

SEQ ID NO: 753 - DNA, 2418 bp, Alteromonadales bacterium TW-7
  CDS (1)..(2418): transl_table=11
atgcgcgttttaaaatttggtggatcatcacttgccgactttgcctgccttgagcaggtagctcaattagttaaagcacaattaaaagatgaaatgcttttggtattatcggcgcccggtggaatgaccgactcactagttgctctagcgagttcggcagaacaaggccaagactttagctctttatgggaggctttaacgagtcgttgtaacgagctaaaagcagccgtggaaaaagggtatggcccaattgaccactggccaaattttgaagaactaaaaaataagcttgatggtgtatctttaattaagtgctgccccgatcaagtgcgtgcgtttgttataagctttggcgagcgagtaagtgtgtcgcttatgcagcgcttattgaactcacataaagcggtttatttagaggcgacaagttgcgttgcatcaacaggtggttttattgatgctgaagttgatttagttgcaagcaaagcgcattttcaagcggcattaaaagaaaagccagccacgatttatattatgcccggttttacagcaagcaatgataaaggcgagcttacaacactggggcgcaatggatctgattactcagcggctattgcagcggcgtgtttagaggcagatgtttgccaaatttggactgatgttgatggtgtttacagcgcagatcctcgttatatcaaaaaagccactaaagttgactttttgtcatacaaagaggcaatggagctttcttactttggcgctaaagtacttcacccaaaaactattttgccttgtgccaaagcgggcgtgccgtgtgaaataaaaaatacgcataaccctgatgcccaagggtcgctaatcggaaatgactattcatcagacgagcccgtaaaagcaatttcaagcctgcaagacttagctatgctgactgtctcgggtccaggaatgaaaggcaaagtgggtatggcctctaaagtttttaatgcgcttgctcacgataacgtatctatagtgttgatcacgcaatcgtcttgtgaatttagcattagcttttgtgtacatgagagcgacttagcccttgctttaactgctttacaaacagcgtttgagcttgaatctcaagcaggtttaattgagcctgttcaagtacagcgtaatttagccatagtaacgcttgtgggtgataacatgcgcgcacatcgtggtttagccgctaagttttttgcatccctttctcaagcacaagtaaacattgtggcaattgcacaggattctactgaaagtgctatttcagctgtgattgacggtgagttatgtaacgacgcagtgaaaatatgccatgagaactttttcacgcatgtgccttcaattgatgtgtttttactagggtgtggcttagtagggcaagaactgatatctcaattagagcgccaacaagcatggcttgaaaagcgtaacattaaacttaatttgtacggcgttgctaactctcgtcagttacatcttgatagcgagggtattgcctttagtgattggcagcaaaaattagcagtatcagagcagtcatttgacctaaaactggttgagcaatttgttaagcaaaatcacttagttaatcctgtgctggtggattgtacatcgtctgatgcacttgcagcgcaatatgttgactttttaaatgcgggttttcatgttgttgcagccaataaaaaggcaacaaccagctcatatacgtattatcaagatttaattgctgctacacaaaaaaataaccgcaagtttttatacgaaacaaacgtaggtgcaggccttcctgttatcgataatttgcagtctttatttggtgcaggagatgaattattagaatttagcggtattttatcgggctcattgtcatacatgtttggcgctttgcaagatggtttatcactgtcagaggcaaccattaaagcaaaagaaagtggttttacagagccagatcctcgtgatgatttatcgggaactgatgttgcgcgtaagttgttaattattgcgcgtgaagcaggtatgaaattagagctaacagacattgaagtagagtcggtattaccacaagggtttgccgaaggagatagtattgatgagtttatggcaaaattacctagcttagacgctgactttaacgcacgtattgagcaagcggcaagtgaaggaaaagttcttcgttacgtgggcacaattaaagaaggccactgtaaagtaggtattgaggcggttgattcatcacatgcgcttaatgttattcgcgatggtgaaaatgcgcttgcaattttaagtcaatactaccaaccacgtccttttgtaattcgtggttacggcgctggctctgaagtaactgctgcaggtgtatttgcagacgttttaaaaacattatcgcgctag

SEQ ID NO: 754 - protein, 805 aa, Alteromonadales bacterium TW-7
MRVLKFGGSSLADFACLEQVAQLVKAQLKDEMLLVLSAPGGMTDSLVALASSAEQGQDFSSLWEALTSRCNELKAAVEKGYGPIDHWPNFEELKNKLDGVSLIKCCPDQVRAFVISFGERVSVSLMQRLLNSHKAVYLEATSCVASTGGFIDAEVDLVASKAHFQAALKEKPATIYIMPGFTASNDKGELTTLGRNGSDYSAAIAAACLEADVCQIWTDVDGVYSADPRYIKKATKVDFLSYKEAMELSYFGAKVLHPKTILPCAKAGVPCEIKNTHNPDAQGSLIGNDYSSDEPVKAISSLQDLAMLTVSGPGMKGKVGMASKVFNALAHDNVSIVLITQSSCEFSISFCVHESDLALALTALQTAFELESQAGLIEPVQVQRNLAIVTLVGDNMRAHRGLAAKFFASLSQAQVNIVAIAQDSTESAISAVIDGELCNDAVKICHENFFTHVPSIDVFLLGCGLVGQELISQLERQQAWLEKRNIKLNLYGVANSRQLHLDSEGIAFSDWQQKLAVSEQSFDLKLVEQFVKQNHLVNPVLVDCTSSDALAAQYVDFLNAGFHVVAANKKATTSSYTYYQDLIAATQKNNRKFLYETNVGAGLPVIDNLQSLFGAGDELLEFSGILSGSLSYMFGALQDGLSLSEATIKAKESGFTEPDPRDDLSGTDVARKLLIIAREAGMKLELTDIEVESVLPQGFAEGDSIDEFMAKLPSLDADFNARIEQAASEGKVLRYVGTIKEGHCKVGIEAVDSSHALNVIRDGENALAILSQYYQPRPFVIRGYGAGSEVTAAGVFADVLKTLSR

SEQ ID NO: 755 - DNA, 2433 bp, Escherichia coli B
  CDS (1)..(2433): transl_table=11
atgagtgtgattgcgcaggcaggggcgaaaggtcgtcagctgcataaatttggtggcagtagtctggctgatgtgaagtgttatttgcgtgtcgcgggcattatggcggagttctctcagcctgacgatatgatggtggtttccgccgccggtagcaccactaaccagttgattaactggttgaaactaagccagaccgatcgtctctctgcgcatcaggttcaacaaacgctgcgtcgctatcagtgcgatctgattagcggtctgctacccgctgaagaagccgatagcctcattagcgcttttgtcagcgatctggaacgcctggcggcgttgctcgacagtggtattaacgatgcggtgtatgcggaagtggtgggccacggtgaagtgtggtcggcgcgcctgatgtctgcggtacttaatcaacaagggctgccagcggcctggcttgatgcccgcgagtttttacgcgctgaacgcgccgcacaaccgcaggttgatgaagggctttcttacccgttgctgcaacagctgctggtgcaacatccgggcaaacgtctggtggtgaccggatttatcagccgcaacaacgccggtgaaacggtgctgctggggcgtaacggttccgactattccgcgacacaaatcggtgcgctggcgggtgtttctcgcgtaaccatctggagcgacgtcgccggggtatacagtgccgacccgcgtaaagtgaaagatgcctgcctgctgccgttgctgcgtctggatgaggccagcgaactggcgcgcctggcggctcccgttcttcacgcccgtactttacagccggtttctggcagcgaaatcgacctgcaactgcgctgtagctacacgccggatcaaggttccacgcgcattgaacgcgtgctggcctccggtactggtgcgcgtattgtcaccagccacgatgatgtctgtttgattgagtttcaggtgcccgccagtcaggatttcaaactggcgcataaagagatcgaccaaatcctgaaacgcgcgcaggtacgcccgctggcggttggcgtacataacgatcgccagttgctgcaattttgctacacctcagaagtggccgacagtgcgctgaaaatcctcgacgaagcgggattacctggcgaactgcgcctgcgtcaggggctggcgctggtggcgatggtcggtgcaggcgtcacccgtaacccgctgcattgccaccgcttctggcagcaactgaaaggccagccggtcgaatttacctggcagtccgatgacggcatcagcctggtggcagtactgcgcaccggcccgaccgaaagcctgattcaggggctgcatcagtccgtcttccgcgcagaaaaacgcatcggcctggtattgttcggtaagggcaatatcggttcccgttggctggaactgttcgcccgtgagcagagcacgctttcggcacgtaccggctttgagtttgtgctggcaggtgtggtggacagccgccgcagcctgttgagctatgacgggctggacgccagccgcgcgttagccttcttcaacgatgaagcggttgagcaggatgaagagtcgttgttcctgtggatgcgcgcccatccgtatgatgatttagtggtgctggacgttaccgccagccagcagcttgctgatcagtatcttgatttcgccagccacggtttccacgttatcagcgccaacaaactggcgggagccagcgacagcaataaatatcgccagatccacgacgccttcgaaaaaaccgggcgtcactggctgtacaatgccaccgtcggtgcgggcttgccgatcaaccacaccgtgcgcgatctgatcgacagcggcgatactattttgtcgatcagcgggatcttctccggcacgctctcctggctgttcctgcaattcgacggtagcgtgccgtttaccgagctggtggatcaggcgtggcagcagggcttaaccgagcctgatccgcgtgacgacctctccggcaaagacgtaatgcgcaagctggtaattctggcgcgtgaagcgggttacaacattgaaccggaccaggtacgtgtggaatcgctggtgcctgctcattgcgaaggcggcagcatcgaccatttctttgaaaatggcgatgaacttaacgagcagatggtgcaacggctggaagcggcccgcgaaatggggctggtgctacgctacgtggcgcgtttcgatgccaacggcaaagcgcgtgtgggcgtggaggcggtgcgtgaagaccatccgctggcatcactgctgccgtgcgataacgtctttgccatcgaaagccgctggtatcgcgacaacccgctggtgatccgtgggcctggcgcggggcgcgacgtcaccgccggggcgattcagtcggatatcaaccggctggcacagttgttgtaa

SEQ ID NO: 756 - protein, 810 aa, Escherichia coli B
MSVIAQAGAKGRQLHKFGGSSLADVKCYLRVAGIMAEFSQPDDMMVVSAAGSTTNQLINWLKLSQTDRLSAHQVQQTLRRYQCDLISGLLPAEEADSLISAFVSDLERLAALLDSGINDAVYAEVVGHGEVWSARLMSAVLNQQGLPAAWLDAREFLRAERAAQPQVDEGLSYPLLQQLLVQHPGKRLVVTGFISRNNAGETVLLGRNGSDYSATQIGALAGVSRVTIWSDVAGVYSADPRKVKDACLLPLLRLDEASELARLAAPVLHARTLQPVSGSEIDLQLRCSYTPDQGSTRIERVLASGTGARIVTSHDDVCLIEFQVPASQDFKLAHKEIDQILKRAQVRPLAVGVHNDRQLLQFCYTSEVADSALKILDEAGLPGELRLRQGLALVAMVGAGVTRNPLHCHRFWQQLKGQPVEFTWQSDDGISLVAVLRTGPTESLIQGLHQSVFRAEKRIGLVLFGKGNIGSRWLELFAREQSTLSARTGFEFVLAGVVDSRRSLLSYDGLDASRALAFFNDEAVEQDEESLFLWMRAHPYDDLVVLDVTASQQLADQYLDFASHGFHVISANKLAGASDSNKYRQIHDAFEKTGRHWLYNATVGAGLPINHTVRDLIDSGDTILSISGIFSGTLSWLFLQFDGSVPFTELVDQAWQQGLTEPDPRDDLSGKDVMRKLVILAREAGYNIEPDQVRVESLVPAHCEGGSIDHFFENGDELNEQMVQRLEAAREMGLVLRYVARFDANGKARVGVEAVREDHPLASLLPCDNVFAIESRWYRDNPLVIRGPGAGRDVTAGAIQSDINRLAQLL

SEQ ID NO: 757 - DNA, 2463 bp, Escherichia coli B
  CDS (1)..(2463): transl_table=11
atgcgagtgttgaagttcggcggtacatcagtggcaaatgcagaacgttttctgcgggttgccgatattctggaaagcaatgccaggcaggggcaggtggccaccgtcctctctgcccccgccaaaatcaccaaccacctggtggcgatgattgaaaaaaccattagcggccaggatgctttacccaatatcagcgatgctgaacgtatttttgccgaacttctgacgggactcgccgccgcccagccgggattcccgctggcgcaattgaaaactttcgtcgaccaggaatttgctcaaataaaacatgtcctgcatggcattagtttgttagggcagtgcccggatagcatcaacgctgcgctgatttgccgtggcgagaaaatgtcgatcgccattatggccggcgtgttagaagcgcgtggtcacaacgttaccgttatcgatccggtcgaaaaactactggcagtggggcattacctcgaatctaccgtcgatattgctgagtccacccgccgtattgcggcaagtcgtattccggctgatcacatggtgctgatggcaggtttcaccgccggtaatgaaaaaggcgaactggtggtgcttggacgtaacggttccgactactccgctgcggtgctggctgcctgtttacgcgccgattgttgcgagatttggacggacgttgacggggtttatacctgcgacccgcgtcaggtgcccgatgcgaggttgttgaagtcgatgtcctaccaggaagcgatggagctttcctacttcggcgctaaagttcttcacccccgcaccattacccccatcgcccagttccagatcccttgcctgattaaaaataccggaaatcctcaagcaccaggtacgctcattggtgccagccgtgatgaagacgaattaccggtcaagggcatttccaatctgaataacatggcaatgttcagcgtttccggcccggggatgaaaggaatggtcggcatggcggcgcgcgtctttgctgcaatgtcacgcgcccgtatttccgtggtgctgattacgcaatcatcttccgaatacagtatcagtttctgcgttccgcaaagcgactgtgtgcgagctgaacgggcaatgcaggaagagttctacctggaactgaaagaaggcttactggagccgctggcggtgacggaacggctggccattatctcggtggtaggtgatggtatgcgcaccttgcgtgggatctcggcgaaattctttgccgcgctggcccgcgccaatatcaacattgtcgccattgctcagggatcttctgaacgctcaatctctgtcgtggtaaataacgatgatgcgaccactggcgtgcgcgttactcatcagatgctgttcaataccgatcaggttatcgaagtgtttgtgattggcgtcggtggcgttggcggtgcgctgctggagcaactgaagcgtcaacaaagctggctgaagaataaacatatcgacttacgtgtctgcggcgttgccaactcgaaggctctgcttaccaatgtgcatggcctaaacctggaaaactggcaggaagaactggcgcaagccaaagagccgtttaatctcgggcgcttaattcgcctcgtgaaagaatatcatctgctaaacccggtcattgttgactgcacctccagccaggcagtggcggatcaatatgccgacttcttgcgcgaaggtttccacgttgtcacgccgaacaaaaaggccaacacctcgtcgatggattactaccatctgttgcgtcatgcggcggaaaaatcgcggcgtaaattcctctatgacaccaacgttggggctggattaccggttattgagaacctgcaaaatctgctcaatgctggtgatgaattgatgaagttctccggcattctttcaggttcgctttcttatatcttcggcaagttagacgaaggcatgagtttctccgaggcgactactctggcgcgggaaatgggttataccgaaccggatccgcgagatgatctttctggtatggatgtagcgcgtaagctattgattctcgctcgtgaaacgggacgtgaactggagctggcggatattgaaattgaacctgtgctgcccgcagagtttaacgccgagggtgatgttgccgcttttatggcgaatctgtcacagctcgacgagctctttgccgcgcgcgtggcgaaggcccgtgatgaaggaaaagttttgcgctatgttggcaatattgatgaagatggcgtctgccgcgtgaagattgccgaagtggatgggaatgatccgctgttcaaagtgaaaaatggcgaaaacgccctggccttctatagccactattatcagccgctgccgttggtgctgcgcggatatggtgcgggcaatgacgttaccgctgctggtgtctttgccgatctgctacgtaccctctcatggaagttaggagtctga

SEQ ID NO: 758 - protein, 820 aa, Escherichia coli B
MRVLKFGGTSVANAERFLRVADILESNARQGQVATVLSAPAKITNHLVAMIEKTISGQDALPNISDAERIFAELLTGLAAAQPGFPLAQLKTFVDQEFAQIKHVLHGISLLGQCPDSINAALICRGEKMSIAIMAGVLEARGHNVTVIDPVEKLLAVGHYLESTVDIAESTRRIAASRIPADHMVLMAGFTAGNEKGELVVLGRNGSDYSAAVLAACLRADCCEIWTDVDGVYTCDPRQVPDARLLKSMSYQEAMELSYFGAKVLHPRTITPIAQFQIPCLIKNTGNPQAPGTLIGASRDEDELPVKGISNLNNMAMFSVSGPGMKGMVGMAARVFAAMSRARISVVLITQSSSEYSISFCVPQSDCVRAERAMQEEFYLELKEGLLEPLAVTERLAIISVVGDGMRTLRGISAKFFAALARANINIVAIAQGSSERSISVVVNNDDATTGVRVTHQMLFNTDQVIEVFVIGVGGVGGALLEQLKRQQSWLKNKHIDLRVCGVANSKALLTNVHGLNLENWQEELAQAKEPFNLGRLIRLVKEYHLLNPVIVDCTSSQAVADQYADFLREGFHVVTPNKKANTSSMDYYHLLRHAAEKSRRKFLYDTNVGAGLPVIENLQNLLNAGDELMKFSGILSGSLSYIFGKLDEGMSFSEATTLAREMGYTEPDPRDDLSGMDVARKLLILARETGRELELADIEIEPVLPAEFNAEGDVAAFMANLSQLDELFAARVAKARDEGKVLRYVGNIDEDGVCRVKIAEVDGNDPLFKVKNGENALAFYSHYYQPLPLVLRGYGAGNDVTAAGVFADLLRTLSWKLGV

SEQ ID NO: 759 - DNA, 2448 bp, unidentified eubacterium SCB49
  CDS (1)..(2448): transl_table=11
atgaacaaaatgaaggttttaaaatttggaggaagctctgtcgcaacggcagatagtattaaaaaagtttggcaaatagccctaaatgagtctgtcaataacaaaataattgtagtggtttctgccttaggaggtgttacagatttattacagcaagtaggggaacaagcaaataataaagaagaagattatatagatacttggcaaaaaataggccaacgtcatttggcaaccgcaaaagaattaaacctaaatgaaagcgctatagctcaaataggtgaattgttagatcggcttaaaaatattttacaaggtgtttatcttattaatgagttttcagacaaaacaaaagacaaagtgttaggttttggagagttattatctgcttttatgatttctgaaatagcaaatgagcaaaatatttcggtagtatttaaggatagtagcgccttaataaaaaccaatgatcattttacacaagccgaagtattacaacctacttcagataatttgattcgagaatatttcagtaaagaaaattcacaactaataataatgcctggttttattgcaaaaacaataactggcgaagcaaccactttaggaagaggaggttcagattatacggctgcaattttagcagcagcactagaggtgaacgagttagaaatatggacagatgttagcggaatgtacactgcaaacccgagactggtcgctcaggcttttgccataccagagatttcgtatcacgaagcaatggagttgtctcattttggagcaaaggttttatatccacctacaatacgacctgtgttgcaaaaaaacatacctattttaattaaaaacacttttaaacctactgaggctggtacaagaatatctaatggtagttttccaaatcaaaacccggtaaagggaatcacccatcttgatgatatcgccttacttactctagaagggaatggtatggtaggaattccaggcatttcaaaacgactttttgaagcattgtcagcaaaaaacatcaatattatattgattacacaagcttcttcagagcattctatatgtgttgcagtagatgctgtagataaaacacgagcggccacagcgatagacagcatgtttaaatatgaaatgtcaagtggcgaattgcaaactacaattgtagaagaaaacctttctgtaattgctgtaattggagatggtatgaaaagtcatcaaggggtaagtggtgacatgtttagtgcattagggaaaaataatgtgaatattcgagcgatagcccaaggtgcttcagagcgtaatatatctgcggttattgctcaaaaagatgtgaataaagcgctaagtgtattgcattatcgtttctttgaagaacagataaaaacaattcacctttttattgttggtgtgggtaatgtaggagctagactacttgctcaaattgcaaaacaacaagcatatctgctagatcaattaatgcttcaaataaaagctgtaggtttaagtaactcacgtaaaatgatttttaatccttcaggaattccattagataaatgggaagaacaactagaaaatggagaagcaaatgaaggggatgcatggtttactcgtctatgtcagtttaatttaccaaacagtgcttttgtagatattactgcaaatgcaggtgtggctaatatgtatagccgttacttaaaagaaagcattgcggttgtggcttgtaataaaattgcttgttcaaatgactacggaaattataaagaattgaaagatttgtcaaaaaaataccatgctccatttttatttgaaactaatgtaggagcaggattacctgtaataaacaccttaaataatttaataaattctggagataaagtaaacgaaatacaagcagtgctctcagggagtttaaactttgtgtttaataattttaatgatgaacgatctttttatgatgtggttttacaagcacaaaaagaagggtacacagagccagatccacgcatagatttaagtggggtagatgtagcgagaaaaatagtgattcttgcaagagaaagtggtcatgaaatagagatggatgctattgttaataagacgtttttatccactgctggtactaaggcaaatacggtatcggagtttctagaaactttaaaagtagatgctttacactatgagacactgtataaaaaagcaaaacaacatcattctagattaaaatatgtagcctcatttaaggatggaaaagcaagtgtaggcttgcaagaaatacctgtagatcaccctttttataatttggaagggaaagataatatagtgttgttttatacaaatcgctatgtagaccagcctctaattataaaaggagctggtgctggtgcagatgtgacggcttctggattatttggtgatatcattagtttaaaaaatcaataa

SEQ ID NO: 760 - protein, 815 aa, unidentified eubacterium SCB49
MNKMKVLKFGGSSVATADSIKKVWQIALNESVNNKIIVVVSALGGVTDLLQQVGEQANNKEEDYIDTWQKIGQRHLATAKELNLNESAIAQIGELLDRLKNILQGVYLINEFSDKTKDKVLGFGELLSAFMISEIANEQNISVVFKDSSALIKTNDHFTQAEVLQPTSDNLIREYFSKENSQLIIMPGFIAKTITGEATTLGRGGSDYTAAILAAALEVNELEIWTDVSGMYTANPRLVAQAFAIPEISYHEAMELSHFGAKVLYPPTIRPVLQKNIPILIKNTFKPTEAGTRISNGSFPNQNPVKGITHLDDIALLTLEGNGMVGIPGISKRLFEALSAKNINIILITQASSEHSICVAVDAVDKTRAATAIDSMFKYEMSSGELQTTIVEENLSVIAVIGDGMKSHQGVSGDMFSALGKNNVNIRAIAQGASERNISAVIAQKDVNKALSVLHYRFFEEQIKTIHLFIVGVGNVGARLLAQIAKQQAYLLDQLMLQIKAVGLSNSRKMIFNPSGIPLDKWEEQLENGEANEGDAWFTRLCQFNLPNSAFVDITANAGVANMYSRYLKESIAVVACNKIACSNDYGNYKELKDLSKKYHAPFLFETNVGAGLPVINTLNNLINSGDKVNEIQAVLSGSLNFVFNNFNDERSFYDVVLQAQKEGYTEPDPRIDLSGVDVARKIVILARESGHEIEMDAIVNKTFLSTAGTKANTVSEFLETLKVDALHYETLYKKAKQHHSRLKYVASFKDGKASVGLQEIPVDHPFYNLEGKDNIVLFYTNRYVDQPLIIKGAGAGADVTASGLFGDIISLKNQ

SEQ ID NO: 761 - DNA, 2460 bp, Moritella sp. PE36
  CDS (1)..(2460): transl_table=11
atgcgagttttaaaatttggtggtacatcgttagcgaatgctgaacgatttgcctgtgcggcagatatctctgtgagtaaaattgagcagtcacaggtagcattggtgttatctgcgccagcaaaagtgaccaacaatttagttgccgcggtgcaacaaacagttcgtggccttgacgccgagtcttcactggaagaaatcgatggtatttttaaagcacttgttgccggcttaaaagcacaatacgttaattttaatgcggagttagccttaacacagctggaaaaatcgttagcgacattaagagaatacttgtatggcgttaaattattatcgcaatgcccagaaaacattgaagcaaagattttatgtatcggtgaaaaactgagtattgtttgcatggagcaactgttattagcgcgtggctttaaagttgaagtgattgttccgcaagacaagctagtcggaaagggcggtgtattagaagccactgtggatattgacgcttctcgtgctcgtttcgaacaagatccaattaaagcggatcatatctatttaatgccgggctttactgcgggtgacgaacaaggcaacacggttgtgcttggtcgtaatggttctgattattctgcagcggtattagcggcgtgtctgtatgctgaatgctgtgagatatggacagacgtagatggtgtttacgcctgtgatccgcgtttagtgaaagatgccaaattacttaaaacattaagctatccagaagcgatggaattgtcgtattttggcgccaaagtattgcatccaaaaaccattgccccgattgcgcagcaccacattccttgtttgattaagaacactcaaaatccagaaggtgaaggcaccttaattggtggcttagtatcgaaaactcaggccgaggttaaatcattatcagagctaagtggcatgaccatgattaatgtatctggccctggtatgaaaggtatggttggcatggctggtcgtattttcgaaaccgtatcacgtgctggtgtatcaattgcccttatcacccaatcatcatcagaatacagcgtgagtttctgtatccacagttatgatgcaggtaaagctaaactggcactgaataacgaatttactttagagatcagtaaccagttactcgaacctatcgaaatgcgtgatggcttagcgattgtgtcgctggtgggcgatggcatgcgtaaagccaacggtattgctgcgcgtttctttacggcattagcacaagcatcggttaatctggttgctattgcgcaaggttcatctgagcgttctatttctgcggttattgatgaaagcaaagccaatgacgcgattaaagcctcacacaatattttctttggtaaacaacaatacatcgacctatttttattgggctgcggtggtgtgggcgcggcattagtcgaacaaatcaaacgtcaaaaagaatttttagcagaacgtcatattgagatccgtgtctgcggtatcgccaacagtcgccaaatgttactcgactcagaagggttatcattaacacattgggctgacgatcttgctgccagtgatattgaattctcattagccacactggaagatttggttaaacacagccacatcattaacccagtgattgttgattgtaccagtaatgataatcttgccagtcagtatgttgacttccttggccgtggtttccacgtcgttgcggcaaataaaaaagccaataccatgagcatggattattaccacgaactgcgttcaacggcattaaaaacccgtcgtcgtttcttatacgatacgaacgtaggtgccggtctgccggtgattgaaaatctacagaatctattaagcgcgggtgatgaactggtacgcttcaacggtattctgtcgggttcgatgtcatacatctttggtaaattagatgaaggcatgagtttctcacaagcaacggcgcaagcgcgtgataatggctttacggaaccagatccgcgtgaagatctaagcggcatggatatcgcacgtaaactgttaattattgcacgtgaagcgggcatggatttaaccttagaccaagttgaagttgaagcggcaataccagcgggctttgatgcaacagggaccaatgacgagttcatggctaacctgccaaaagccgatgcgtattttgccgatctgcaagcaacggctgctgcagaggggaacgtattacgttatattggtcagattgaagacggtaaatgtacagtatcgattgcggcagtaccagaatctgatccattgaataaagtcaaagatggcgagaatgcattggcattttatagccgttattatcagccaatcccaatggtattacgtggttatggcgccggttcagaggtgactgcagcaggtgtatttgccgatgtattacgtacccttaactggaagcaggaggtttaa

SEQ ID NO: 762 - protein, 819 aa, Moritella sp. PE36
MRVLKFGGTSLANAERFACAADISVSKIEQSQVALVLSAPAKVTNNLVAAVQQTVRGLDAESSLEEIDGIFKALVAGLKAQYVNFNAELALTQLEKSLATLREYLYGVKLLSQCPENIEAKILCIGEKLSIVCMEQLLLARGFKVEVIVPQDKLVGKGGVLEATVDIDASRARFEQDPIKADHIYLMPGFTAGDEQGNTVVLGRNGSDYSAAVLAACLYAECCEIWTDVDGVYACDPRLVKDAKLLKTLSYPEAMELSYFGAKVLHPKTIAPIAQHHIPCLIKNTQNPEGEGTLIGGLVSKTQAEVKSLSELSGMTMINVSGPGMKGMVGMAGRIFETVSRAGVSIALITQSSSEYSVSFCIHSYDAGKAKLALNNEFTLEISNQLLEPIEMRDGLAIVSLVGDGMRKANGIAARFFTALAQASVNLVAIAQGSSERSISAVIDESKANDAIKASHNIFFGKQQYIDLFLLGCGGVGAALVEQIKRQKEFLAERHIEIRVCGIANSRQMLLDSEGLSLTHWADDLAASDIEFSLATLEDLVKHSHIINPVIVDCTSNDNLASQYVDFLGRGFHVVAANKKANTMSMDYYHELRSTALKTRRRFLYDTNVGAGLPVIENLQNLLSAGDELVRFNGILSGSMSYIFGKLDEGMSFSQATAQARDNGFTEPDPREDLSGMDIARKLLIIAREAGMDLTLDQVEVEAAIPAGFDATGTNDEFMANLPKADAYFADLQATAAAEGNVLRYIGQIEDGKCTVSIAAVPESDPLNKVKDGENALAFYSRYYQPIPMVLRGYGAGSEVTAAGVFADVLRTLNWKQEV

SEQ ID NO: 763 - DNA, 2424 bp, Moritella sp. PE36
  CDS (1)..(2424): transl_table=11
atggacgcagttaagcgtagtattcataaatttggtggtagtagtttagcggatgccacttgttatcgtcgggtgtcggcgattattagcgagcatacgcaagcccgcgatctgattgttgtttctgcggcaggtaaaaccaccaaccaattaatagagctattacaattggctgaagatggtgatcaagctgcgtcagagcgtcttattgccacgtgtgaatatcaagccaagttaattgctgaattattagcagatgacttatgtatacaactcactgctgcgctgcaagatgatattcataccatagggcatttattagaagctcatcttgatgtttatgctaaaaaccaaatccttgcacatggggaagtatggtcagcacgattattagcggcgttactgagtcaaagtgaactacctgccaatgatttagattctcgcttgtttttaaccacagaattagccgcgcaacctgtggttgatgaaatggtgtctcgccaaaaattaactgcgtgtttagcgaacctacataaccgtgttgtggtgaccggctttattgctgctgatggacagctgcgaaccgtcacattagggcgtaatggttcggattattctgcaaccttgttaggcgcattagtcgatgcagagcaaacgacgatctggagtgatgttgccgggatatttagtgctgatccacgtcgggtaaaagatgccgagttacaaactaaactgtcactcgacgaagcggcagaactcgcgcgtttaggttcccccgtattacatgctcgcacattacagcccgttgttgagagtaaacaacatgtccaattgcgctgtagttatacccctagcgaaggctcaacccagatccaccgtcgtttacccaaaggtaagggcgctaaaatcgttacctcggttgatgatctgcacttaatcgatattgaattcgatcagcatgctgactaccaacaacaatacaatcagttgattactttgcttgcacagcaacaattatcccctatttgtattaaacgtcgtcccacagagcatgtggtgcgattaggttatacagctgaaattgtcgagtttgcactcacggcattacagacataccaactgcagcaaccgcaggttcgcgccattaatctgctgagtggtttttgtatggtggcgctggttggttctggagtcactgaaaatgcgttacagtcacatcagttttatcaattaatttcagagcacaatctgacgtttgtacaaaccggtgataatcgtttaagtatttgtgcagtattgcaaaaagtagtactagaaccattattgaaagaattacacaccgcgttatttaaacagccaaaacgtattggtgtggtgttatttggtaaaggtaatattggcgcaggttggttatctttgttcgctaaacaaacgcataagctacctgaacaacaaaacgtagacctgtgtttatgcggtgtatatggatcgcagggcggggtattagactttaatggtttggatgccgcgacggtacttgatgccttccagcctgagtcgtttgtttgggaacagttattatctaatcttgcattgcacccgtttgatgaattggtgatcatcgatattaccgccagtgaagcaatcagttattattaccctgaatttgcccaacacggtttccaccttatttcggcgaataaatttgccggagcggcgagcagtgagttttatcatcgggttaagcaaagctttagtgataatgaaagccattggttatataacgccacggtcggcgcaggattaccgatccaatcatctatggagatgctgcaacacagtggtgatcaagtcactgcggtgagcggtattttctctggtaccttatcttggttgttccaacaatatgatggtcaaattgccttctcgcaattagtcgaacaagcttggcaacaagggctaacagaaccggatcctcgtgaagatttatcgggtaaggacgtgcagcgcaaactgcttatcttaagccgtgaagcgggttatgacatggagcttagcgatatcaaactagagtcattggtatcagcagaactcatggcatttaaagtggatgagtttttagaacattgcgaagcactagatgacaaaatattacatatgtttaataaggccaaaaagcagggcttagtattacgttatgtggcccgttttagccgcaaagaaggggcgcaggttggcttagagttcttagagccaacccatccatttgctaacttattgccgtgcgataacatcttctcgattaacagccattggtatcgtcataacccattagtgatccaaggtccgggtgcgggtagagatgtgactgcgggcgctattcaagctgatcttttccaattatgtaagctgttagcacgttaa

SEQ ID NO: 764 - protein, 807 aa, Moritella sp. PE36
MDAVKRSIHKFGGSSLADATCYRRVSAIISEHTQARDLIVVSAAGKTTNQLIELLQLAEDGDQAASERLIATCEYQAKLIAELLADDLCIQLTAALQDDIHTIGHLLEAHLDVYAKNQILAHGEVWSARLLAALLSQSELPANDLDSRLFLTTELAAQPVVDEMVSRQKLTACLANLHNRVVVTGFIAADGQLRTVTLGRNGSDYSATLLGALVDAEQTTIWSDVAGIFSADPRRVKDAELQTKLSLDEAAELARLGSPVLHARTLQPVVESKQHVQLRCSYTPSEGSTQIHRRLPKGKGAKIVTSVDDLHLIDIEFDQHADYQQQYNQLITLLAQQQLSPICIKRRPTEHVVRLGYTAEIVEFALTALQTYQLQQPQVRAINLLSGFCMVALVGSGVTENALQSHQFYQLISEHNLTFVQTGDNRLSICAVLQKVVLEPLLKELHTALFKQPKRIGVVLFGKGNIGAGWLSLFAKQTHKLPEQQNVDLCLCGVYGSQGGVLDFNGLDAATVLDAFQPESFVWEQLLSNLALHPFDELVIIDITASEAISYYYPEFAQHGFHLISANKFAGAASSEFYHRVKQSFSDNESHWLYNATVGAGLPIQSSMEMLQHSGDQVTAVSGIFSGTLSWLFQQYDGQIAFSQLVEQAWQQGLTEPDPREDLSGKDVQRKLLILSREAGYDMELSDIKLESLVSAELMAFKVDEFLEHCEALDDKILHMFNKAKKQGLVLRYVARFSRKEGAQVGLEFLEPTHPFANLLPCDNIFSINSHWYRHNPLVIQGPGAGRDVTAGAIQADLFQLCKLLAR

SEQ ID NO: 765 - DNA, 2847 bp, Oryza sativa subsp
  CDS (1)..(2847)
atgtcctgcaggtcttcaggggcagtcacagaagtcacaaaccatctgccgcctatagccaaatggttcgacaacatgcacgtagacgtacgcgtgaactacattcgaaaccaagatgagcactcgcagaaacgtgcccggatatttgaaaatataatcgaaaagatgattcatgcctttgctaggacagtaggaattttatcagattttcgacacaagaggtgtgaatccgcagcggtggcgatggccagcgaccttccaggaggactttatggggatgtttcgaagaatatgctcaagccagctgctgctgtttcagttgagcaagctgaagctagtgctcaccttccaaaaggtgacatgtggtctgtgcataaatttggtgggacctgcatgggaacctcccagaggattcagaatgtggctgacataatccttcgcgacccttctgagaggaaactggtagttgtgtctgcaatgtctaaagtcactgacatgatgtacaaccttgtaaataaggctcaatcaagggatgattcttatatcactgcacttgatgaagttttcgagaagcatatggcagcagcaaaggatctgcttggaggagaggaccttgcaagattcttatctcagttgcacgcggatgtcagtaacctaaaagcaatgcttcgtgcaatttgcatagctgggcatgccacggagtctttctcagattttgttgttggacatggagagatatggtcagctcaattgttgtcatttgccataaagaagtctggaaccccttgcagttggatggacacacgagaagttttagttgtaaatcctacaggttccaaccaagtagatcctgactatttggaatctgagaaacgacttgagaaatggttcgctcgacagccagctgagacaataattgctactgggtttattgcgagtacacctgaaaacattcctacaaccttgaaaagagatggaagtgatttctctgcagccataattggttcacttgttaaggctggtcaggtcactatctggactgatgttgatggggtctttagtgcagatcccagaaaagttagcgaggctgtcatattaagcactttatcatatcaggaggcgtgggaaatgtcgtattttggggcaaatgtattacatccgcgtaccatcatacctgtgatgaaatacaatatcccaattgttataagaaatatgttcaatatttctgcccctggtaccatgatctgccagcagcctgcgaatgaaagtggtgatttggaggcttgcgtcaaagcatttgcaactatagataaattgtctcttgttaacgttgaaggaactggaatggctggtgttcctggtactgcaagtgccatatttggtgctgtgaaggatgttggagctaatgttatcatgatatcgcaggctagtagtgaacactccgtatgctttgctgtaccagaaaaggaagttgctgcagtttctgcagctttgcatgtcaggttccgtgaagcattatctgcaggcaggctatctaaggtcgaagtcattcataattgtagcatccttgctgctgtcggcctgaagatggcaagtactcctggggtcagtgcaaccctttttgatgcacttgcaaaggcaaatattaatgtaagggcaatagctcaaggttgtagtgagtacaacatcactgttgtattgaagcaagaggactgcgtaagggctcttagagctgctcactcaaggttcttcctctccaaaaccacacttgctgtcggaattattggacctgggttgattggtcgtactctccttaaccagctgaaggatcaggctgcagttcttaaggaaaatatgaacattgatctgcgtgtcatgggaatcactggttcgaggacaatggttttgagtgatacaggaatagatttggcccattggaaagagcagctacaaactgaagcagaaccagccaaccttgacaagtttgttgatcatttgtccgagaatcaattattccctaacagggttttggtggactgcacagcagacacaagtgttgcatcccactattatgactggttaaagaagggaatccatgtcatcacgccaaataagaaagcaaattcagggccactggacaagtatttgaaacttaggactctacaacgtgcatcatatacccattacttctatgaagcaactgttggtgctggccttcctatcattagcactctgcgcggtctcctggaaacaggtgacaagatattgcgtattgaggggatcttcagtggaacattgagttacattttcaacaattttgaaggaacaagagctttcagtgatgttgtttctgaagcaaaagaggctggatacactgaacctgatccaagagatgatctgtctggaactgatgtagccagaaaggtaataattcttgctagggaatctggattgaagcttgagctttctgatattcctgtaaggagtcttgtgccggaggcattgagatcctgttcaacagctgatgaatacatgcaaaagttaccatcctttgaccaggactgggcaagagagagtaaagatgctgaagctgccggagaagttttgcggtatgttggagtggtggatttggtgaacaaggagggtcaggtcgagctgcggaggtacaagaaggaccacccgttcgcgcagctatctggctccgacaacatcatcgccttcacgacgtcaagatacaaggagcaaccgctgatcgtgcgaggcccgggcgccggtgcagaggtgaccgcaggaggtgtcttcagtgacatactacggctggcctcctacctaggcgctccctcataa

SEQ ID NO: 766 - protein, 948 aa, Oryza sativa subsp
MSCRSSGAVTEVTNHLPPIAKWFDNMHVDVRVNYIRNQDEHSQKRARIFENIIEKMIHAFARTVGILSDFRHKRCESAAVAMASDLPGGLYGDVSKNMLKPAAAVSVEQAEASAHLPKGDMWSVHKFGGTCMGTSQRIQNVADIILRDPSERKLVVVSAMSKVTDMMYNLVNKAQSRDDSYITALDEVFEKHMAAAKDLLGGEDLARFLSQLHADVSNLKAMLRAICIAGHATESFSDFVVGHGEIWSAQLLSFAIKKSGTPCSWMDTREVLVVNPTGSNQVDPDYLESEKRLEKWFARQPAETIIATGFIASTPENIPTTLKRDGSDFSAAIIGSLVKAGQVTIWTDVDGVFSADPRKVSEAVILSTLSYQEAWEMSYFGANVLHPRTIIPVMKYNIPIVIRNMFNISAPGTMICQQPANESGDLEACVKAFATIDKLSLVNVEGTGMAGVPGTASAIFGAVKDVGANVIMISQASSEHSVCFAVPEKEVAAVSAALHVRFREALSAGRLSKVEVIHNCSILAAVGLKMASTPGVSATLFDALAKANINVRAIAQGCSEYNITVVLKQEDCVRALRAAHSRFFLSKTTLAVGIIGPGLIGRTLLNQLKDQAAVLKENMNIDLRVMGITGSRTMVLSDTGIDLAHWKEQLQTEAEPANLDKFVDHLSENQLFPNRVLVDCTADTSVASHYYDWLKKGIHVITPNKKANSGPLDKYLKLRTLQRASYTHYFYEATVGAGLPIISTLRGLLETGDKILRIEGIFSGTLSYIFNNFEGTRAFSDVVSEAKEAGYTEPDPRDDLSGTDVARKVIILARESGLKLELSDIPVRSLVPEALRSCSTADEYMQKLPSFDQDWARESKDAEAAGEVLRYVGVVDLVNKEGQVELRRYKKDHPFAQLSGSDNIIAFTTSRYKEQPLIVRGPGAGAEVTAGGVFSDILRLASYLGAPS

SEQ ID NO: 767 - DNA, 2526 bp, Vitis vinifera
  CDS (1)..(2526)
atggaaaaagttcagcttcccaaaggtgacaattggtctgtccataagtttggtggcacctgtgtgggaacctctgaaaggatcaagaatgttgcagagataattgttaaagatgattcggaaaggaagttagtggttgtgtctgcaatgtcaaaggtgacagatatgatgtatgacctcatctacaaagcacaatcacgagatgactcctatatatctgcagtggatgctgttttagaaaagcacagattaacagcacttgatctgcttgatggggatgatcttgcaagtttcttatcacggttgcaccatgacatcaatgaaatcaaagagatgcttcgggcaatatatatagctggtcatgcatcagagctcttttcagatattatcgtaggacatggagagctatggtctgcccagatgttatcatctgttgtcagaaagaaaggcattgattgcaaatggatggatacaagggatgtccttattgtaaaccctactagtgctaatcaagttgatcctgattttgtagaatctgaaatgagacttgagaaatggttcttccaaaacccatctaagacaatcgttgctactggtttcatagctagtacacctcaaaatattcctacaactttaaagagagatggaagtgatttctctgcagctataatgggcgctttattcagggctcgtcaggtcacaatttggacagatgttgatggtgtgtacagtgcagaccccagaaaagttgctgaggccgtgatactgaatcaactgtcttaccaagaggcctgggaaatgtcatattttggagcaaatgtgctgcatccccgcaccatcattccagtgatgcaatatggcattccgattgtaataaggaatattttcaatctctctgcacctggaacaatgatttgtcggccttctgttgatgaaaatgaaggtaaccagcgtttggagtctcctgtgaaagggtttgcaacaattgacaatgtggcactcataaatgttgaaggaactggaatggctggtgttcctggtacagctagtgccattttttctgctgtgaaagatgtgggagctaatgttattatgatatcacaggctagtagtgagcattctgtgtgttttgctgttcccgagaaggaagtagaagctgttgctgaagctttacaatctagattccgtcaggctttggatgctggtcgtctttctcaggttgcggtggtaccaaactgtagcatcttggccacggttggccagagaatggcgagtacacctggagtcagtgccagtcttttcagtgcactggctaaagctaatattaacatccgtgccatagctcaaggttgctctgagtataatataactgtagttgtcaagcgagaagattgtataagggccctgaaagctgtccactcaaggttttatctctcaagaaccacaatagcaatgggcattattggacctggattgatcggtggcacattacttgaccagctcagggatcaggcagctgtccttaaggaagactttaacattgatttgcgtgtgatgggaattacaggctcaaggacaatgcttttgagtgattcgggaattgacttatcaagatggagagaacttataaaggagaaaggagaagtgggtgacatgcataaattcgttaaccatgtgcatgggaaccattttatcccaaatactgcgttggtggattgtacagcagactctaatgttgctagccattaccatgaatggttgcgaaaagggattcatgtaatcaccccaaacaaaaaagcaaattccggtccacttgatcagtatttgaagttgagggctcttcagaggcaatcgtatacacattacttctatgaagccactgtcggggccggcctcccaatcattagcaccttacgaggtctccttgaaactggagacaaaatattgcgcattgaaggcattttcagtgggactttgagctatatcttcaacaactttaagggcacacgaagattcagtgaggtggtgatggaggccaaacaggctggttataccgagccagatccaagggatgatctatctggaacagatgttgccagaaaggtgataattcttgctagagaatctggtctaaaactggaacttgcggatactcctgttcaaagtctcgtgccagaaccattaagagctactgcatcagccgatgaatttatgcagcagttgccacaatacgacgaagacttggctaagcaactacaagatgctgaggatgcaggggaagtcctgagatacgtaggggtggtggatgtggttaacaaaaaggggctcgtggagctgcgaagatacaagaacgaccacccctttgcccagctttccggctctgataacatcattgctttcacaactgcaaggtacaagaaccagcctcttatagtccgggggcctggtgctggcgcccaagtaaccgccggcggtatattcagcgacgtattgcgccttgcctcctaccttggtgccccatcataa

SEQ ID NO: 768 - protein, 841 aa, Vitis vinifera
MEKVQLPKGDNWSVHKFGGTCVGTSERIKNVAEIIVKDDSERKLVVVSAMSKVTDMMYDLIYKAQSRDDSYISAVDAVLEKHRLTALDLLDGDDLASFLSRLHHDINEIKEMLRAIYIAGHASELFSDIIVGHGELWSAQMLSSVVRKKGIDCKWMDTRDVLIVNPTSANQVDPDFVESEMRLEKWFFQNPSKTIVATGFIASTPQNIPTTLKRDGSDFSAAIMGALFRARQVTIWTDVDGVYSADPRKVAEAVILNQLSYQEAWEMSYFGANVLHPRTIIPVMQYGIPIVIRNIFNLSAPGTMICRPSVDENEGNQRLESPVKGFATIDNVALINVEGTGMAGVPGTASAIFSAVKDVGANVIMISQASSEHSVCFAVPEKEVEAVAEALQSRFRQALDAGRLSQVAVVPNCSILATVGQRMASTPGVSASLFSALAKANINIRAIAQGCSEYNITVVVKREDCIRALKAVHSRFYLSRTTIAMGIIGPGLIGGTLLDQLRDQAAVLKEDFNIDLRVMGITGSRTMLLSDSGIDLSRWRELIKEKGEVGDMHKFVNHVHGNHFIPNTALVDCTADSNVASHYHEWLRKGIHVITPNKKANSGPLDQYLKLRALQRQSYTHYFYEATVGAGLPIISTLRGLLETGDKILRIEGIFSGTLSYIFNNFKGTRRFSEVVMEAKQAGYTEPDPRDDLSGTDVARKVIILARESGLKLELADTPVQSLVPEPLRATASADEFMQQLPQYDEDLAKQLQDAEDAGEVLRYVGVVDVVNKKGLVELRRYKNDHPFAQLSGSDNIIAFTTARYKNQPLIVRGPGAGAQVTAGGIFSDVLRLASYLGAPS

SEQ ID NO: 769 - DNA, 2751 bp, Glycine max
  CDS (1)..(2751)
atggcgtcgttttccgccgccgtcgctcagttctcccgcgtttcaccttctcacacttcgctccactctcactctcacggcacgctcttccaatctcaatgccgccctttcttcctctcgcgcacttcccattcactccggaagggtcttactttaccacggggaagagaggcaccgagtacatctgtacgtgcttcatttacagatgtttcaccgaatgtgtccttggaggaaaaacaactacccaaaggagaaacttggtctgttcacaaatttggtggaacctgtgtgggaacctctcagagaataaaaaatgttgcggacataattcttaaggatgattcggagaggaaattggtggttgtttctgcaatgtcaaaggtgacagatatgatgtatgaccttatccacaaggctcaatcacgcgatgagtcttatacagctgcattaaatgctgttttggagaagcacagtgcaactgcacatgacatacttgatggagataatcttgctactttcttgtctaaattgcatcatgatattagtaaccttaaggcgatgcttcgtgcaatatacatagctggtcatgcaacagagtcctttacagattttgttgtgggacatggagaattatggtctgctcagatgttgtctctagttattaggaagaatgggactgattgcaaatggatggatacaagggatgtccttatcgtaaatcctactggttctaatcaagttgatcctgactatttggaatctgagcaaagacttgaaaaatggtactctttgaatccatgtaaggtaatcattgccactggattcattgcaagcacacctcaaaacattcctaccacactgaagagagatggaagtgacttctcggcagcaattatgggtgctctatttaaggcccgtcaggtcacaatttggacagatgttgatggtgtgtatagtgcagatcctagaaaagttagtgaggctgtgattttgaagacactgtcttatcaagaggcttgggaaatgtcttattttggtgccaatgtcttgcatccccgcacaattattcctgtgatgcgatatggcatacccattatgataaggaacattttcaacctttctgctcctggaacaaagatctgccatccttctgttaatgatcatgaagatagccagaacctgcaaaattttgtcaaaggatttgcaaccatagacaacttggcacttgtaaacgtcgagggaactggaatggctggtgttccaggtactgccagtgctatttttggtgcagtaaaagatgttggagctaatgttatcatgatatctcaggctagtagtgagcattctgtatgctttgctgtgcccgagaaagaagtaaaagctgttgctgaggcattgcaatctagatttcgtcaagctttggataatgggcgtctttctcaggttgcagtcattccaaattgtagcattctggctgcagttggccagaaaatggcaagcactcctggtgttagtgcctcccttttcaatgcattggctaaggccaatataaatgtccgtgctatagcccaaggttgttctgagtacaatattactgttgttgttaagcgagaggattgtataaaggctttacgagctgtccattccagattttatctctcaagaaccaccatagcaatgggcattattggacctggattaattgggagcacactacttgagcagctaagggatcaggcctcaaccctaaaagaagaattcaacatcgatttgcgtgtaatgggcatacttggttcaaagtcaatgcttcttagtgatgtgggcattgacttagctagatggagagaacttcgagaggaaagaggagaagtggctaatatggaaaaatttgttcaacatgtacatggaaatcattttataccaaacacggcattagtggactgcacagctgactctgtcattgctggctattactatgattggttgcgcaaaggaatacatgtagttactcctaacaagaaggcaaattcaggaccacttgatcagtatttgaagttaagagctcttcaaaggcaatcctatacacattacttctatgaagcaactgtcggagctggtcttccaattgttagcactttacgtggcctccttgaaactggagacaaaatattacaaatcgaaggcatctttagtgggactttgagttacatatttaataactttaaagatggccgggcttttagtgaggtagtttctgaagcaaaggaagcaggttatactgagccagatccaagagatgatctgtctggaacagatgttgccagaaaggttataattcttgctagggagtcgggtttaaagctagaactgtctaatattccagttgaaagccctgtgccagaaccactacgagcttgtgcatcagctcaggagtttatgcaagagctaccaaaatttgatcaggagttcacaaagaaacaagaagatgctgagaatgctggggaagtcttgagatacgttggagtggtggacgtgactaataaaaaaggagtggtagagctgcgaagatacaagaaggatcatccctttgcgcaattgtctgggtcagataacattattgcatttacaacacgaaggtataaggatcagcctctgatagttcgtgggccaggagctggtgctcaagtcaccgctggtggaatatttagtgatattttacgacttgcctcatatcttggtgctccatcgtaa

SEQ ID NO: 770 - protein, 916 aa, Glycine max
MASFSAAVAQFSRVSPSHTSLHSHSHGTLFQSQCRPFFLSRTSHSLRKGLTLPRGREAPSTSVRASFTDVSPNVSLEEKQLPKGETWSVHKFGGTCVGTSQRIKNVADIILKDDSERKLVVVSAMSKVTDMMYDLIHKAQSRDESYTAALNAVLEKHSATAHDILDGDNLATFLSKLHHDISNLKAMLRAIYIAGHATESFTDFVVGHGELWSAQMLSLVIRKNGTDCKWMDTRDVLIVNPTGSNQVDPDYLESEQRLEKWYSLNPCKVIIATGFIASTPQNIPTTLKRDGSDFSAAIMGALFKARQVTIWTDVDGVYSADPRKVSEAVILKTLSYQEAWEMSYFGANVLHPRTIIPVMRYGIPIMIRNIFNLSAPGTKICHPSVNDHEDSQNLQNFVKGFATIDNLALVNVEGTGMAGVPGTASAIFGAVKDVGANVIMISQASSEHSVCFAVPEKEVKAVAEALQSRFRQALDNGRLSQVAVIPNCSILAAVGQKMASTPGVSASLFNALAKANINVRAIAQGCSEYNITVVVKREDCIKALRAVHSRFYLSRTTIAMGIIGPGLIGSTLLEQLRDQASTLKEEFNIDLRVMGILGSKSMLLSDVGIDLARWRELREERGEVANMEKFVQHVHGNHFIPNTALVDCTADSVIAGYYYDWLRKGIHVVTPNKKANSGPLDQYLKLRALQRQSYTHYFYEATVGAGLPIVSTLRGLLETGDKILQIEGIFSGTLSYIFNNFKDGRAFSEVVSEAKEAGYTEPDPRDDLSGTDVARKVIILARESGLKLELSNIPVESPVPEPLRACASAQEFMQELPKFDQEFTKKQEDAENAGEVLRYVGVVDVTNKKGVVELRRYKKDHPFAQLSGSDNIIAFTTRRYKDQPLIVRGPGAGAQVTAGGIFSDILRLASYLGAPS

SEQ ID NO: 771 - DNA, 2748 bp, Oryza sativa
  CDS (1)..(2748)
atgcggagcctcgccgtcgcgagccccctcccgcccgccgccgcggttcgccgccggccacgcgcatccgcctccggaagggaagtgatttcacaatgttggaagtgtgagataaatcaggaccaacctttggggaactccctaaggataggtcactcacaaggtagtttgcaaagacatggttccaggaatttgctcgcagctgctgcggctatttcaattgaacaagctgaagtcagtacttatcttccaaaaggtgacatgtggtctgtgcacaagtttggtggcacctgtatgggaacaccccagagaattcagaatgttgctgatattgttcttggtgactcttctgagaggaagctgatcattgtttctgcaatgtccaaagtcactgacatgatgttcaaccttgtgcataaagctcagtcaagggataattcttatgtgactgcactggatgaagtttttaataagcatatggctgcagcaaaggaacttcttgatggagaagacctagcaagattcttggctcagttgcattctgacatcagtaacctgagagcgatgcttcgtgctatttttatagctggacatgcaacagaatcgttctctgatttcgttgttgggcatggagagttgtggtcagctcaaatgttgtcgtatgctataaaaaagtctggggtgccttgcagttggatggatacaagagaagttctagtagtgaaacctagtggttctaatcaggtcgatcctgactatttggaatctgagaagcgactccagaaatggttttcacgacaaccagcagagataataatcgctactgggtttattgccagtacagccgaaaacattcctactacgcttaaaagggatggaagcgacttctcagcatcaataattggatcccttgttagggcatgtcaggtcactatctggactgatgttgatggggtatttagtgcagatcctagaaaagttagtgaggctgtgatcttaagcacattatcttatcaggaggcctgggaaatgtcatattttggtgcaaatgttttgcatccccgcaccattatacctgtgatgaaagacaatattcctattgtcattaggaatatgttcaatctatctgcccctggaacaacaatttgcaagcagcctgctaatgaaaatgctgatttagatgcttgtgtcaaatcatttgctactatagacaaattggcccttgttaatgtggaaggaactggaatggctggtgttccaggtacagcaagtgccatatttagtgctgccaaggatgttggagctaatggtatcatgatatctcaggctagcagcgaacactcggtatgctttgctgttccagaaaaggaagttgcagcagtctcgacagccttgcatgttaggtttcgtgaggcattagcagctggaaggctatctaaggtcgaagtcattcgtgggtgcagcattcttgctgctgttggcttgaggatggccagtactcctggagtcagtgcaatcctttttgatgcattagcaaaggcaaatattaatgtacgagcaatagcccaaggttgcagtgaatacaatattactgttgtgttgaagcaagaagattgtgtgagggctttgagagctgttcattcaaggttcttcctctccaaaaccactcttgccgttgggatcattggaccaggtttaattggtggaacacttcttgaccagctgaaagatcaggctgctgttctcaaggaaaatatgaatattgatctacgtgttattggaatatctggctcaagaacgatgcatttgagtgacataggggtagacttaaaccagtggaaagaccttctacgaaaagaagcagaaccagcagatcttgatagttttgttcgccatttgtctgaaaatcatgtatttccaaacaaagttttggtggactgcacagcagatacatacgtagcatgccactattatgattggttgaagaagggtatccatgtcatcacgccaaataagaaagcaaattctggtccgcttgatcggtatctgaaattaaggactctgcagcgtgcatcgtatactcattacttttatgaagcaactgttggtgctggccttccaatcattagcaccctacgaggtcttctagagacaggtgacaagatattgcgtattgagggcattttcagtgggactttgagttatattttcaacaattttgaaggtacacgaacttttagtaatgttgttgctgaagcaaaagaagctggatatacagagccagatccaagagatgatctatcaggaactgatgttgccagaaaggttattatccttgcaagggagtctggtctgaggctcgagctttccgatattcccgtaaagagcctgttgccagaggcactgaggtcatgttcgtcagcagatgaattcatgcagaagctaccgtcctttgatcaggactgggacaggcaacgcgatgaagctgaagctgcaggagaagtgctgcggtatgtgggcgtggtggacgtggcgaacaggaagggccgggtagagctgcagaggtacaagagagaccaccccttcgcgcagctctccggctccgacaacatcatcgccttcaccacgtcgaggtacaaggagcagccgctgatcgtgcgaggccccggcgccggcgcggaggtcaccgccggtggcgtcttctgcgacatcctgcggctggcgtcctacctgggagcaccctcctag

SEQ ID NO: 772 - protein, 915 aa, Oryza sativa
MRSLAVASPLPPAAAVRRRPRASASGREVISQCWKCEINQDQPLGNSLRIGHSQGSLQRHGSRNLLAAAAAISIEQAEVSTYLPKGDMWSVHKFGGTCMGTPQRIQNVADIVLGDSSERKLIIVSAMSKVTDMMFNLVHKAQSRDNSYVTALDEVFNKHMAAAKELLDGEDLARFLAQLHSDISNLRAMLRAIFIAGHATESFSDFVVGHGELWSAQMLSYAIKKSGVPCSWMDTREVLVVKPSGSNQVDPDYLESEKRLQKWFSRQPAEIIIATGFIASTAENIPTTLKRDGSDFSASIIGSLVRACQVTIWTDVDGVFSADPRKVSEAVILSTLSYQEAWEMSYFGANVLHPRTIIPVMKDNIPIVIRNMFNLSAPGTTICKQPANENADLDACVKSFATIDKLALVNVEGTGMAGVPGTASAIFSAAKDVGANGIMISQASSEHSVCFAVPEKEVAAVSTALHVRFREALAAGRLSKVEVIRGCSILAAVGLRMASTPGVSAILFDALAKANINVRAIAQGCSEYNITVVLKQEDCVRALRAVHSRFFLSKTTLAVGIIGPGLIGGTLLDQLKDQAAVLKENMNIDLRVIGISGSRTMHLSDIGVDLNQWKDLLRKEAEPADLDSFVRHLSENHVFPNKVLVDCTADTYVACHYYDWLKKGIHVITPNKKANSGPLDRYLKLRTLQRASYTHYFYEATVGAGLPIISTLRGLLETGDKILRIEGIFSGTLSYIFNNFEGTRTFSNVVAEAKEAGYTEPDPRDDLSGTDVARKVIILARESGLRLELSDIPVKSLLPEALRSCSSADEFMQKLPSFDQDWDRQRDEAEAAGEVLRYVGVVDVANRKGRVELQRYKRDHPFAQLSGSDNIIAFTTSRYKEQPLIVRGPGAGAEVTAGGVFCDILRLASYLGAPS

SEQ ID NO: 773 - DNA, 2463 bp, Escherichia coli
  CDS (1)..(2463): transl_table=11
atgcgagtgttgaagttcggcggtacatcagtggcaaatgcagaacgttttctgcgtgttgccgatattctggaaagcaatgccaggcaggggcaggtggccaccgtcctctctgcccccgccaaaatcaccaaccacctggtggcgatgattgaaaaaaccattagcggccaggatgctttacccaatatcagcgatgccgaacgtatttttgccgaacttttgacgggactcgccgccgcccagccggggttcccgctggcgcaattgaaaactttcgtcgatcaggaatttgcccaaataaaacatgtcctgcatggcattagtttgttggggcagtgcccggatagcatcaacgctgcgctgatttgccgtggcgagaaaatgtcgatcgccattatggccggcgtattagaagcgcgcggtcacaacgttactgttatcgatccggtcgaaaaactgctggcagtggggcattacctcgaatctaccgtcgatattgctgagtccacccgccgtattgcggcaagccgcattccggctgatcacatggtgctgatggcaggtttcaccgccggtaatgaaaaaggcgaactggtggtgcttggacgcaacggttccgactactctgctgcggtgctggctgcctgtttacgcgccgattgttgcgagatttggacggacgttgacggggtctatacctgcgacccgcgtcaggtgcccgatgcgaggttgttgaagtcgatgtcctaccaggaagcgatggagctttcctacttcggcgctaaagttcttcacccccgcaccattacccccatcgcccagttccagatcccttgcctgattaaaaataccggaaatcctcaagcaccaggtacgctcattggtgccagccgtgatgaagacgaattaccggtcaagggcatttccaatctgaataacatggcaatgttcagcgtttctggtccggggatgaaagggatggtcggcatggcggcgcgcgtctttgcagcgatgtcacgcgcccgtattttcgtggtgctgattacgcaatcatcttccgaatacagcatcagtttctgcgttccacaaagcgactgtgtgcgagctgaacgggcaatgcaggaagagttctacctggaactgaaagaaggcttactggagccgctggcagtgacggaacggctggccattatctcggtggtaggtgatggtatgcgcaccttgcgtgggatctcggcgaaattctttgccgcactggcccgcgccaatatcaacattgtcgccattgctcagggatcttctgaacgctcaatctctgtcgtggtaaataacgatgatgcgaccactggcgtgcgcgttactcatcagatgctgttcaataccgatcaggttatcgaagtgtttgtgattggcgtcggtggcgttggcggtgcgctgctggagcaactgaagcgtcagcaaagctggctgaagaataaacatatcgacttacgtgtctgcggtgttgccaactcgaaggctctgctcaccaatgtacatggccttaatctggaaaactggcaggaagaactggcgcaagccaaagagccgtttaatctcgggcgcttaattcgcctcgtgaaagaatatcatctgctgaacccggtcattgttgactgcacttccagccaggcagtggcggatcaatatgccgacttcctgcgcgaaggtttccacgttgtcacgccgaacaaaaaggccaacacctcgtcgatggattactaccatcagttgcgttatgcggcggaaaaatcgcggcgtaaattcctctatgacaccaacgttggggctggattaccggttattgagaacctgcaaaatctgctcaatgcaggtgatgaattgatgaagttctccggcattctttctggttcgctttcttatatcttcggcaagttagacgaaggcatgagtttctccgaggcgaccacgctggcgcgggaaatgggttataccgaaccggacccgcgagatgatctttctggtatggatgtggcgcgtaaactattgattctcgctcgtgaaacgggacgtgaactggagctggcggatattgaaattgaacctgtgctgcccgcagagtttaacgccgagggtgatgttgccgcttttatggcgaatctgtcacaactcgacgatctctttgccgcgcgcgtggcgaaggcccgtgatgaaggaaaagttttgcgctatgttggcaatattgatgaagatggcgtctgccgcgtgaagattgccgaagtggatggtaatgatccgctgttcaaagtgaaaaatggcgaaaacgccctggccttctatagccactattatcagccgctgccgttggtactgcgcggatatggtgcgggcaatgacgttacagctgccggtgtctttgctgatctgctacgtaccctctcatggaagttaggagtctga

SEQ ID NO: 774 - protein, 820 aa, Escherichia coli
MRVLKFGGTSVANAERFLRVADILESNARQGQVATVLSAPAKITNHLVAMIEKTISGQDALPNISDAERIFAELLTGLAAAQPGFPLAQLKTFVDQEFAQIKHVLHGISLLGQCPDSINAALICRGEKMSIAIMAGVLEARGHNVTVIDPVEKLLAVGHYLESTVDIAESTRRIAASRIPADHMVLMAGFTAGNEKGELVVLGRNGSDYSAAVLAACLRADCCEIWTDVDGVYTCDPRQVPDARLLKSMSYQEAMELSYFGAKVLHPRTITPIAQFQIPCLIKNTGNPQAPGTLIGASRDEDELPVKGISNLNNMAMFSVSGPGMKGMVGMAARVFAAMSRARIFVVLITQSSSEYSISFCVPQSDCVRAERAMQEEFYLELKEGLLEPLAVTERLAIISVVGDGMRTLRGISAKFFAALARANINIVAIAQGSSERSISVVVNNDDATTGVRVTHQMLFNTDQVIEVFVIGVGGVGGALLEQLKRQQSWLKNKHIDLRVCGVANSKALLTNVHGLNLENWQEELAQAKEPFNLGRLIRLVKEYHLLNPVIVDCTSSQAVADQYADFLREGFHVVTPNKKANTSSMDYYHQLRYAAEKSRRKFLYDTNVGAGLPVIENLQNLLNAGDELMKFSGILSGSLSYIFGKLDEGMSFSEATTLAREMGYTEPDPRDDLSGMDVARKLLILARETGRELELADIEIEPVLPAEFNAEGDVAAFMANLSQLDDLFAARVAKARDEGKVLRYVGNIDEDGVCRVKIAEVDGNDPLFKVKNGENALAFYSHYYQPLPLVLRGYGAGNDVTAAGVFADLLRTLSWKLGV

SEQ ID NO: 775 - DNA, 2460 bp, Serratia marcescens
  CDS (1)..(2460): transl_table=11
atgcgagtgctgaaatttggcggaacctcggtagcgaatgcggaacgttttctgcgcgtcgccgacatcatggagagtaacgcgcgtcagggacaggtagccacggtcttgtccgcccccgcaaagatcaccaaccatctggtggcgatgatcgacaaaacggtggcgggccaggacattctgccgaatatgagcgacgccgagcggatctttgccgacctgctgagcggactggcgcaggcgctgccgggctttgaatacgatcgtttgaaaggcgtggtcgatcaggaattcgcgcagctcaaacaggtgctgcatggcgtctcgctgctggggcagtgcccggacagcgtgaacgcggcgatcatctgccgtggcgaaaagctctccatcgccatcatggaaggggtgttccgcgccaagggttatccggtcacggtgatcaacccggtggagaaactgctggcgcagggccactacctggagtccaccgtggacatcgccgagtctacgctgcgcatcgccgccgcggcgatcccggccgatcacatcgtgctgatggccggtttcaccgccggtaatgataagggcgagctggtggtgctgggccgcaacggctccgactattccgccgcggtgctggccgcctgcctgcgcgccgactgttgcgagatctggaccgacgtcgacggcgtttatacctgcgatccgcgcaccgtgccggacgccaggttactgaaatcgatgtcgtaccaggaagcgatggagctttcctatttcggcgccaaagtgttacacccccgcaccatcactccgattgcccagtttcaaatcccttgcctgattaaaaacacctccaacccgcaggcccccggcacgctgatcggcaaagacagcaccgatgccgatatgccggtgaagggcatcaccaacctgaacaacatggcgatgatcaacgtctccggcccgggcatgaaaggcatggtcggcatggccgcacgggtcttcgccgtgatgtcgcgcgccggcatttcggtggtgctgatcacccaatcctcttccgaatacagcatcagcttctgcgtgccgcagggtgaactgcagcgcgcccgtcgcgcgctggaagaggagttctatctggagctgaaagacggcgtgctggatccgctggacgtgatggaacgcctggcgatcatctcggtggttggcgacggcatgcgcaccctgcgcggcatttccgcacgcttcttctccgcgctggcgcgcgccaacatcaatatcgttgccatcgcccaagggtcttccgaacgttccatttcggtggtggtcagcaatgattccgccaccaccggcgtgcgcgtcagccaccagatgctgttcaacaccgatcaggtgatcgaagtgttcgtcatcggcgtcggcggcgtcggcggggcgctgatcgagcagatctatcgccagcagccgtggctgaagcaaaaacatatcgatctgcgggtgtgcggcatcgccaactcgcgcgtgatgctgaccaatgtgcacggcatcgcgctggacagctggcgcgacgcgctggccggcgcgcaggagccgttcaatctcggccgtctgatccggctggtgaaggaatatcacctgctgaacccggtgatcgtcgactgtacctccagtcaggcggtggccgatcagtacgtggacttcctggcggacggcttccatgtggtgacgccgaacaaaaaggccaacacctcgtcgatgaactattatcagcaactgcgcgcggccgccgccggttcgcatcgcaagttcctgtacgacaccaacgtcggtgccggtctgccggtgattgagaacctgcaaaacctgctgaacgccggtgatgaactggtacgtttctccggtatcctgtccggctcgctgtcctttatcttcggcaagctggacgaagggctgtcgctgtcggcggcgaccctgcaggcccgggccaacggctacaccgagccggatccgcgcgacgatctgtccgggatggatgtggcgcgtaagctgctgatcctggcgcgcgaggccggttacaaactggaactgagcgatatcgaggtcgagccggtgctgccgccgtccttcgacgcgtcgggcgacgtggacaccttcctggcgcggttgccggagctggataaagagttcgcgcgcaacgtggctaacgccgccgagcaaggcaaggtgctgcgctatgtcggcctgatcgacgaagggcgctgcaaggtgcgcattgaggcggtggacggcaacgatccgttgtataaagtgaagaacggcgagaacgcgctggccttctacagccgctactatcagccgttgccgctggtgctgcgcggctacggcgccggtaacgatgtgactgcagcgggcgtattcgccgatctgctgcgcacactgtcatggaagttgggagtttaa

SEQ ID NO: 776 - protein, 819 aa, Serratia marcescens
MRVLKFGGTSVANAERFLRVADIMESNARQGQVATVLSAPAKITNHLVAMIDKTVAGQDILPNMSDAERIFADLLSGLAQALPGFEYDRLKGVVDQEFAQLKQVLHGVSLLGQCPDSVNAAIICRGEKLSIAIMEGVFRAKGYPVTVINPVEKLLAQGHYLESTVDIAESTLRIAAAAIPADHIVLMAGFTAGNDKGELVVLGRNGSDYSAAVLAACLRADCCEIWTDVDGVYTCDPRTVPDARLLKSMSYQEAMELSYFGAKVLHPRTITPIAQFQIPCLIKNTSNPQAPGTLIGKDSTDADMPVKGITNLNNMAMINVSGPGMKGMVGMAARVFAVMSRAGISVVLITQSSSEYSISFCVPQGELQRARRALEEEFYLELKDGVLDPLDVMERLAIISVVGDGMRTLRGISARFFSALARANINIVAIAQGSSERSISVVVSNDSATTGVRVSHQMLFNTDQVIEVFVIGVGGVGGALIEQIYRQQPWLKQKHIDLRVCGIANSRVMLTNVHGIALDSWRDALAGAQEPFNLGRLIRLVKEYHLLNPVIVDCTSSQAVADQYVDFLADGFHVVTPNKKANTSSMNYYQQLRAAAAGSHRKFLYDTNVGAGLPVIENLQNLLNAGDELVRFSGILSGSLSFIFGKLDEGLSLSAATLQARANGYTEPDPRDDLSGMDVARKLLILAREAGYKLELSDIEVEPVLPPSFDASGDVDTFLARLPELDKEFARNVANAAEQGKVLRYVGLIDEGRCKVRIEAVDGNDPLYKVKNGENALAFYSRYYQPLPLVLRGYGAGNDVTAAGVFADLLRTLSWKLGV

SEQ ID NO: 777 - DNA, 2433 bp, Escherichia coli
  CDS (1)..(2433): transl_table=11
atgagtgtgattgcgcaggcaggggcgaaaggtcgtcagctgcataaatttggtggcagtagtctggctgatgtgaagtgttatttgcgtgtcgcgggcattatggcggagtactctcagcctgacgatatgatggtggtttccgccgccggtagcaccactaaccagttgattaactggttgaaactaagccagaccgatcgtctctctgcgcatcaggttcaacaaacgctgcgtcgctatcagtgcgatctgattagcggtctgctacccgctgaagaagccgatagcctcattagcgcttttgtcagcgaccttgagcgcctggcggcgctgctcgacagcggtattaacgacgcagtgtatgcggaagtggtgggccacggggaagtatggtcggcacgtctgatgtctgcggtacttaatcaacaagggctgccagcggcctggcttgatgcccgcgagtttttacgcgctgaacgcgccgcacaaccgcaggttgatgaagggctttcttacccgttgctgcaacagctgctggtgcaacatccgggcaaacgtctggtggtgaccggatttatcagccgcaacaacgccggtgaaacggtgctgctggggcgtaacggttccgactattccgcgacacaaatcggtgcgctggcgggtgtttctcgcgtaaccatctggagcgacgtcgccggggtatacagtgccgacccgcgtaaagtgaaagatgcctgcctgctgccgttgctgcgtctggatgaggccagcgaactggcgcgcctggcggctcccgttcttcacgcccgtactttacagccggtttctggcagcgaaatcgacctgcaactgcgctgtagctacacgccggatcaaggttccacgcgcattgaacgcgtgctggcctccggtactggtgcgcgtattgtcaccagccacgatgatgtctgtttgattgagtttcaggtgcccgccagtcaggatttcaaactggcgcataaagagatcgaccaaatcctgaaacgcgcgcaggtacgcccgctggcggttggcgtacataacgatcgccagttgctgcaattttgctacacctcagaagtggccgacagtgcgctgaaaatcctcgacgaagcgggattacctggcgaactgcgcctgcgtcaggggctggcgctggtggcgatggtcggtgcaggcgtcacccgtaacccgctgcattgccaccgcttctggcagcaactgaaaggccagccggtcgaatttacctggcagtccgatgacggcatcagcctggtggcagtactgcgcaccggcccgaccgaaagcctgattcaggggctgcatcagtccgtcttccgcgcagaaaaacgcatcggcctggtattgttcggtaagggcaatatcggttcccgttggctggaactgttcgcccgtgagcagagcacgctttcggcacgtaccggctttgagtttgtgctggcaggtgtggtggacagccgccgcagcctgttgagctatgacgggctggacgccagccgcgcgttagccttcttcaacgatgaagcggttgagcaggatgaagagtcgttgttcctgtggatgcgcgcccatccgtatgatgatttagtggtgctggacgttaccgccagccagcagcttgctgatcagtatcttgatttcgccagccacggtttccacgttatcagcgccaacaaactggcgggagccagcgacagcaataaatatcgccagatccacgacgccttcgaaaaaaccgggcgtcactggctgtacaatgccaccgtcggtgcgggcttgccgatcaaccacaccgtgcgcgatctgatcgacagcggcgatactattttgtcgatcagcgggatcttctccggcacgctctcctggctgttcctgcaattcgacggtagcgtgccgtttaccgagctggtggatcaggcgtggcagcagggcttaaccgaacctgacccgcgtgacgatctctctggcaaagacgtgatgcgcaagctggtgattctggcgcgtgaagcaggttacaacatcgaaccggatcaggtacgtgtggaatcgctggtgcctgctcattgcgaaggcggcagcatcgaccatttctttgaaaatggcgatgaactgaacgagcagatggtgcaacggctggaagcggcccgcgaaatggggctggtgctgcgctacgtggcgcgtttcgatgccaacggtaaagcgcgtgtaggcgtggaagcggtgcgtgaagatcatccgttggcatcactgctgccgtgcgataacgtctttgccatcgaaagccgctggtatcgcgataaccctctggtgatccgcggacctggcgctgggcgcgacgtcaccgccggggcgattcagtcggatatcaaccggctggcacagttgttgtaa

SEQ ID NO: 778 - protein, 810 aa, Escherichia coli
MSVIAQAGAKGRQLHKFGGSSLADVKCYLRVAGIMAEYSQPDDMMVVSAAGSTTNQLINWLKLSQTDRLSAHQVQQTLRRYQCDLISGLLPAEEADSLISAFVSDLERLAALLDSGINDAVYAEVVGHGEVWSARLMSAVLNQQGLPAAWLDAREFLRAERAAQPQVDEGLSYPLLQQLLVQHPGKRLVVTGFISRNNAGETVLLGRNGSDYSATQIGALAGVSRVTIWSDVAGVYSADPRKVKDACLLPLLRLDEASELARLAAPVLHARTLQPVSGSEIDLQLRCSYTPDQGSTRIERVLASGTGARIVTSHDDVCLIEFQVPASQDFKLAHKEIDQILKRAQVRPLAVGVHNDRQLLQFCYTSEVADSALKILDEAGLPGELRLRQGLALVAMVGAGVTRNPLHCHRFWQQLKGQPVEFTWQSDDGISLVAVLRTGPTESLIQGLHQSVFRAEKRIGLVLFGKGNIGSRWLELFAREQSTLSARTGFEFVLAGVVDSRRSLLSYDGLDASRALAFFNDEAVEQDEESLFLWMRAHPYDDLVVLDVTASQQLADQYLDFASHGFHVISANKLAGASDSNKYRQIHDAFEKTGRHWLYNATVGAGLPINHTVRDLIDSGDTILSISGIFSGTLSWLFLQFDGSVPFTELVDQAWQQGLTEPDPRDDLSGKDVMRKLVILAREAGYNIEPDQVRVESLVPAHCEGGSIDHFFENGDELNEQMVQRLEAAREMGLVLRYVARFDANGKARVGVEAVREDHPLASLLPCDNVFAIESRWYRDNPLVIRGPGAGRDVTAGAIQSDINRLAQLL

SEQ ID NO: 779 - DNA, 2763 bp, Zea mays
  CDS (1)..(2763)
atgaggagcctcaccgtggcaagccgccacccgggcgccgctttctctacccgccgccgcccccttcttcaccccgccgcagccggaagggactcgaccttccagcggtgctggcgatgggaaaaaactcaggacagctccttcgggagctcactaaggaccagccgccttccaagaactgtgcacggagatattttgaagaatttgctcgcaccaactgctggtgctgtttcagttgagcaagctgaagctattgctgacctcccaaaaggtgacatgtggtcggtgcacaagtttggtggcacatgcatggggacctctgagagaattcacaatgttgctgatatagtccttcgtgatccttctgagaggaaactggtagttgtatctgcaatgtctaaggttaccgacatgatgtataatcttgtaaacaaggctcaatcaagggatgattcttacattgctgtactggatgaagtttttgataagcatatgacaacagcaaaggatttgcttgctggagaagaccttgcaagattcctgtctcagttacatgcagacatcagtaacctaaaagcaatgcttcgggccatatatatagctgggcatgcaacagagtctttctctgattttgttgttggtcatggagagttatggtctgctcaaatgttatcatatgcaatacagaagtctggaacaccatgcagttggatggatacaagggaagttctagttgtgaatccgtcaggagccaaccaggtagatcctgactatttggaatctgaaaaacgacttgaaaaatggttttctcgatgtccggctgagacaataattgctactgggtttattgcgagtacacctgaaaacatcccaacaaccttaaaaagagatggaagtgatttctctgcagccataattggttcccttgttaaggctcgccaggtgaccatctggactgatgttgatggggtatttagtgcagatcccagaaaagttagtgaggctgtaatcttaagcacattgtcgtatcaggaggcctgggaaatgtcatattttggggcaaatgtcttgcatccacgtactattatacctgtgatgaaatataatatccctattgttataaggaacatattcaatacttctgcccctggaactatgatctgtcaacagcctgctaatgaaaacggtgatttggaggcttgtgtcaaagcttttgcaactatagataaattggctttggttaatgtcgaagggactggaatggctggtgtcccaggtacagcaaatgccatatttggtgctgtgaaggatgttggagcaaatgttatcatgatatcacaggctagcagtgaacactctgtatgctttgctgttccagaaaaggaagttgcattggtttctgcagccttgcatgctaggtttcgtgaagcattggcagcagggaggttatctaaggttgaagtcattcataattgtagcatccttgctactgtcggcctgaggatggcaagtacacctggagtcagcgcgaccctttttgatgcactagctaaggcaaatattaatgtaagggcgatagctcaaggttgcagtgagtacaacattactattgtactgaagcaagaagactgcgtgcgggctctgagagctgcccactcaaggttcttcctctccaaaaccacactggctgttggcatcattggacctgggttgattggtcgcacactacttaatcagctgaaggatcaggctgctgtcctcaaggaaaatatgaacattgatttgcgtgtcatgggaatagctggttctaggacaatgcttttaagtgatataggagtagatttgacccagtggaaagagaagctacaaactgaagcagaacctgccaatcttgataagtttgttcatcatttgtctgagaatcactttttccctaacagagttttggtagattgcacagcagatacaagtgttgcatctcactattatgattggctaaagaaaggaatccatgtcatcactccaaacaagaaagcaaattcagggccacttgacaggtatcttaaacttagaactcttcagcgtgcatcatatactcattacttctatgaagcaactgttggtgctggcctccctatcattagcactctgcgtggtctcctagagacaggtgacaagatattgcgcattgaagggattttcagtggaacgttaagttatatttttaacaacttcgaaggagcaagaacctttagtgatgttgttgctgaagcaaaaaaagcaggatacacagaaccagatccaagagatgatctgtctggtactgatgttgccaggaaggtcataattcttgcaagggaatctggtttggggcttgaactttctgatattcctgtacgaagtcttgtgccggaggcacttaagtcatgtacctcagccgacgaatacatgcagaagttaccatcttttgacgaggattgggcaagagagaggaaaaatgctgaagctgcgggagaagttctgcggtatgttggagtggtggatgtggtcagcaagaaggggcaggtggagctgcgagcctacaagagggaccacccgttcgcgcagctatctggttccgacaacatcatagccttcaccacctcgaggtacaaggatcagccactgatcgtgcgtggtccgggggctggtgcggaagtgactgcaggaggcgtcttctgcgacatactgcgcctgtcttcctaccttggtgccccctcgtag

SEQ ID NO: 780 - protein, 920 aa, Zea mays
MRSLTVASRHPGAAFSTRRRPLLHPAAAGRDSTFQRCWRWEKTQDSSFGSSLRTSRLPRTVHGDILKNLLAPTAGAVSVEQAEAIADLPKGDMWSVHKFGGTCMGTSERIHNVADIVLRDPSERKLVVVSAMSKVTDMMYNLVNKAQSRDDSYIAVLDEVFDKHMTTAKDLLAGEDLARFLSQLHADISNLKAMLRAIYIAGHATESFSDFVVGHGELWSAQMLSYAIQKSGTPCSWMDTREVLVVNPSGANQVDPDYLESEKRLEKWFSRCPAETIIATGFIASTPENIPTTLKRDGSDFSAAIIGSLVKARQVTIWTDVDGVFSADPRKVSEAVILSTLSYQEAWEMSYFGANVLHPRTIIPVMKYNIPIVIRNIFNTSAPGTMICQQPANENGDLEACVKAFATIDKLALVNVEGTGMAGVPGTANAIFGAVKDVGANVIMISQASSEHSVCFAVPEKEVALVSAALHARFREALAAGRLSKVEVIHNCSILATVGLRMASTPGVSATLFDALAKANINVRAIAQGCSEYNITIVLKQEDCVRALRAAHSRFFLSKTTLAVGIIGPGLIGRTLLNQLKDQAAVLKENMNIDLRVMGIAGSRTMLLSDIGVDLTQWKEKLQTEAEPANLDKFVHHLSENHFFPNRVLVDCTADTSVASHYYDWLKKGIHVITPNKKANSGPLDRYLKLRTLQRASYTHYFYEATVGAGLPIISTLRGLLETGDKILRIEGIFSGTLSYIFNNFEGARTFSDVVAEAKKAGYTEPDPRDDLSGTDVARKVIILARESGLGLELSDIPVRSLVPEALKSCTSADEYMQKLPSFDEDWARERKNAEAAGEVLRYVGVVDVVSKKGQVELRAYKRDHPFAQLSGSDNIIAFTTSRYKDQPLIVRGPGAGAEVTAGGVFCDILRLSSYLGAPS

SEQ ID NO: 781 - DNA, 2751 bp, Arabidopsis thaliana
  CDS (1)..(2751)
atggcgactctgaagccgtcatttactgtttctccgccgaatagtaatccgattagatttggaagttttccgccgcaatgctttctccgtgttccgaaaccgcggcgacttatattgcctaggtttcggaagacgactggtggtggcggcggcttgattcgatgtgagcttccagattttcatctatcagcaacagcaactactgtatcaggtgtatcgacggtgaatttagtggatcaagttcagattcctaaaggtgaaatgtggagtgttcacaagtttggtgggacttgtgtgggaaactctcagaggatcagaaatgtagcagaggttataatcaatgataattccgaaagaaaacttgtggttgtctcggcgatgtcgaaggttacggacatgatgtatgacttaatccgcaaggcacaatcacgagatgattcttatttatccgcgttggaagctgtcttggaaaagcatcgtttaacagctcgtgaccttctcgatggagatgatctcgctagtttcttgtcacatttgcataatgatattagtaatcttaaagcaatgcttcgtgctatatacatagctggccatgcatcagagtcgttttcagattttgttgcaggacatggggagctttggtctgctcagatgctatcatatgttgtcagaaagactgggcttgagtgcaagtggatggatactagagacgtgctcattgttaatcccaccagctctaatcaggttgatcctgattttggtgaatctgagaagagactcgataaatggttctccttaaatccgtcgaaaattattattgcgactgggtttattgctagcactccgcaaaatattccaacaactttgaaaagagatgggagtgatttctcagcagctattatgggtgctttattgagagctcgtcaagtaaccatttggacagatgttgatggtgtatacagtgcggatcctcgtaaagttaatgaggcagtgatactccagacactttcttatcaagaggcctgggaaatgtcttattttggagcaaatgtgttacatcctcgcaccatcattcctgtgatgcgatataatattccgattgtgattagaaatattttcaatctctctgcaccgggaacaataatctgtcaacctcctgaagatgattatgaccttaaactgacaactcctgtcaaagggtttgcaactattgacaatttggccctcataaatgttgaaggtactggaatggctggtgtacccggtactgcaagtgacatttttggctgtgtaaaagatgttggagctaatgtgattatgatatcacaggctagcagtgagcattctgtgtgctttgctgtgcctgagaaggaagtaaacgcagtctctgaggcattgcggtcgagatttagtgaagctttacaagcgggacgtctttctcagattgaggtgataccaaactgtagcatcttagctgcagtcggccagaaaatggctagtacacctggagttagttgtacacttttcagtgctttggcgaaggctaatattaatgtccgagctatatctcaaggttgttctgagtacaatgttactgtcgttattaaacgtgaagatagcgttaaggcgttaagagctgtacactcgaggtttttcttgtcaagaacaacattagcaatgggaatcgtaggaccgggcttgattggtgcaacattacttgaccagctgcgggatcaggctgctgttctcaaacaagaatttaacattgatctgcgtgttttgggaatcactggttcaaagaagatgttattgagtgacattggtattgatttgtcgagatggagagaacttctaaacgagaagggaacagaggcggatttggataaattcactcaacaagtgcatggaaatcattttatccccaactctgtagtggttgattgtacagcagactctgctattgcaagccgttactatgattggttacgaaagggaattcatgtcattaccccaaataaaaaggctaactcaggtcccctcgatcagtacttgaaactgagagatcttcaaaggaaatcctacactcattacttctacgaagccactgttggagctggtcttccaattatcagcactttacgtggtctccttgagacaggagataagatactacgcatagagggcatttgcagtggaactttgagttatctattcaacaattttgttggagatcgaagtttcagcgaggttgtcactgaagcaaagaacgcaggtttcactgagcctgatccaagagatgatttatctggaactgatgttgcaaggaaggtgattatcctcgctcgagaatctggactgaaattggacctcgctgatctccccattagaagtctcgtaccagaacctctaaaaggatgcacttctgttgaagaattcatggagaaactcccacagtacgatggagacctagcaaaagaaaggctagatgctgaaaactctggggaagttctgagatatgttggagtggtggacgctgttaaccaaaagggaacagttgaacttcgaagatacaagaaagaacatccatttgcgcagctcgcaggttcagacaacataatagccttcacaacgacaaggtacaaggatcatccacttatagtccgaggacctggagctggtgctcaagtcacggccggtggtatattcagcgacatactaaggcttgcatcttatctcggtgcaccgtcttaa

SEQ ID NO: 782 - protein, 916 aa, Arabidopsis thaliana
MATLKPSFTVSPPNSNPIRFGSFPPQCFLRVPKPRRLILPRFRKTTGGGGGLIRCELPDFHLSATATTVSGVSTVNLVDQVQIPKGEMWSVHKFGGTCVGNSQRIRNVAEVIINDNSERKLVVVSAMSKVTDMMYDLIRKAQSRDDSYLSALEAVLEKHRLTARDLLDGDDLASFLSHLHNDISNLKAMLRAIYIAGHASESFSDFVAGHGELWSAQMLSYVVRKTGLECKWMDTRDVLIVNPTSSNQVDPDFGESEKRLDKWFSLNPSKIIIATGFIASTPQNIPTTLKRDGSDFSAAIMGALLRARQVTIWTDVDGVYSADPRKVNEAVILQTLSYQEAWEMSYFGANVLHPRTIIPVMRYNIPIVIRNIFNLSAPGTIICQPPEDDYDLKLTTPVKGFATIDNLALINVEGTGMAGVPGTASDIFGCVKDVGANVIMISQASSEHSVCFAVPEKEVNAVSEALRSRFSEALQAGRLSQIEVIPNCSILAAVGQKMASTPGVSCTLFSALAKANINVRAISQGCSEYNVTVVIKREDSVKALRAVHSRFFLSRTTLAMGIVGPGLIGATLLDQLRDQAAVLKQEFNIDLRVLGITGSKKMLLSDIGIDLSRWRELLNEKGTEADLDKFTQQVHGNHFIPNSVVVDCTADSAIASRYYDWLRKGIHVITPNKKANSGPLDQYLKLRDLQRKSYTHYFYEATVGAGLPIISTLRGLLETGDKILRIEGICSGTLSYLFNNFVGDRSFSEVVTEAKNAGFTEPDPRDDLSGTDVARKVIILARESGLKLDLADLPIRSLVPEPLKGCTSVEEFMEKLPQYDGDLAKERLDAENSGEVLRYVGVVDAVNQKGTVELRRYKKEHPFAQLAGSDNIIAFTTTRYKDHPLIVRGPGAGAQVTAGGIFSDILRLASYLGAPS

SEQ ID NO: 783 - DNA, 2754 bp, Zea mays
  CDS (1)..(2754)
atgcagggcctagccgtatcatgccagcttcctcctgctgcggccgcagctcggtggcggccgcgcgcttcttcctctaatagggaagcagttttacaatgttggaagtatgaattaagtcaagaccactatttgggaggccccctaaggataggtcagtctcaaggaagtttgcacagacatcgctctacaaattttctcagaccagctgctgcagctatttcagttgaacaagatgaagtcaatacttatcttccaaaaggtgatatgtggtctgtgcacaagttcggtggaacctgtatgggaactcccaaaagaatccagtgtgttgcaaatatagttcttggtgattcttctgagaggaagctgatcattgtttccgcaatgtccaaagtaactgacatgatgtacaaccttgtacaaaaggctcagtcacgggatgattcatatgcaatagcactggcagaagtttttgagaagcatatgactgcagcaaaggatcttcttgacggagaagatcttgcaagattcttgtctcagttgcattcagacgtcagcaacttgcgagccatgctccgtgctatttatatagctgggcatgcgacagaatctttctctgactttgttgttgggcatggagagttgtggtctgcgcagatgctgtcgtatgcaataaagaagtctggggcaccctgcagttggatggatacaagagaagttctagttgtaacacccagtggttgtaatcaagtagaccctgattacttggaatgtgagaagcgacttcagaaatggttttctcgacaaccagctgagataatagttgctacaggatttattgcaagtacagctggaaacattccaacaactctaaaaagggatggaagtgatttctcagcagccatagttggttctcttgtcagggcacgccaggtcactatttggactgatgttgacggggtatttagcgcagatcctagaaaagttagtgaggctgtgatcttaagcactctgtcttaccaggaggcctgggaaatgtcatattttggggcaaatgttttgcatccgcgcaccattatacctgtgatgaaagacaacattcccattgttattaggaacatgttcaacctctctgcccctggaaccatgatttgcaagcagcctgccaatgaaaatggtgatttagacgcatgtgtcaaatcatttgctactgtcgataatttagcacttgttaatgttgaaggaactggaatggctggcgttccaggtacagcaagtgctatatttagtgctgttaaggatgttggagctaatgttatcatgatatctcaggctagcagcgaacattcagtatgctttgctgttccagaaaaggaagttgctgtagtttctgctgagttacatgataggtttcgtgaggcattagctgcagggaggctgtctaaggttgaagttattaatggttgcagcattcttgctgctgttggtctgaggatggccagcactccaggagtcagtgcaatactttttgatgcattagcaaaggcaaacattaatgttcgagcaatagctcaaggttgcagtgaatacaatattactgttgtattgaagcaacaagattgtgtaagggctctgagagctgctcactcaaggttcttcctctccaaaaccacacttgctgttgggatcattggacctggtttaattggtggagcactccttaaccagttgaagaatcagactgctgttctcaaggaaaatatgaacattgatctgcgtgtcattggaataactggctcaagtacaatgcttctgagcgacacgggaatagacttaacccagtggaaacagcttctacaaaaggaagcagaaccagctgatattggtagttttgttcatcatttatctgataatcatgtatttccgaacaaagttttggtggactgcacagcggatacaagtgtggcatcccactattacgattggttaaagaagggtattcatgtcatcacgccaaataagaaagcaaattctgggccacttgatcagtacctgaaattacggactatgcagcgtgcctcatacactcattacttttatgaagcaactgttggtgctggcctcccaatcatcagcaccttgcgaggtcttctggagacgggtgacaagatactgcgtattgagggcattttcagtggaactttgagttatatatttaacaatttcgaaggaacaagggcgtttagtgatgttgttgccgaagcaagagaggcgggatacactgaacctgacccaagggatgatctatctggaactgacgttgcccgaaaggtcgttgtcctcgcgagggaatctggtctgaggcttgaactttctgacattcctgtgaagagccttgtgccagaaacacttgcatcatgctcgtcagcagatgaattcatgcagaagctaccgtccttcgacgaggactgggccaggcaacgcagtgatgctgaggctgcaggcgaagtcctgcgttacgttggagcgttggatgcggtgaacaggagcggacaggtggagctacgcaggtacaggagggaccacccgttcgcgcagctctccggctccgacaacatcatcgccttcaccacgtccaggtacaaggagcagccgctgatcgtgcggggtccgggtgccggcgcggaggtgacagccggtggcgtcttctgcgacattctgcggctggcgtcttacctcggtgctccttcttga

SEQ ID NO: 784 - protein, 917 aa, Zea mays
MQGLAVSCQLPPAAAAARWRPRASSSNREAVLQCWKYELSQDHYLGGPLRIGQSQGSLHRHRSTNFLRPAAAAISVEQDEVNTYLPKGDMWSVHKFGGTCMGTPKRIQCVANIVLGDSSERKLIIVSAMSKVTDMMYNLVQKAQSRDDSYAIALAEVFEKHMTAAKDLLDGEDLARFLSQLHSDVSNLRAMLRAIYIAGHATESFSDFVVGHGELWSAQMLSYAIKKSGAPCSWMDTREVLVVTPSGCNQVDPDYLECEKRLQKWFSRQPAEIIVATGFIASTAGNIPTTLKRDGSDFSAAIVGSLVRARQVTIWTDVDGVFSADPRKVSEAVILSTLSYQEAWEMSYFGANVLHPRTIIPVMKDNIPIVIRNMFNLSAPGTMICKQPANENGDLDACVKSFATVDNLALVNVEGTGMAGVPGTASAIFSAVKDVGANVIMISQASSEHSVCFAVPEKEVAVVSAELHDRFREALAAGRLSKVEVINGCSILAAVGLRMASTPGVSAILFDALAKANINVRAIAQGCSEYNITVVLKQQDCVRALRAAHSRFFLSKTTLAVGIIGPGLIGGALLNQLKNQTAVLKENMNIDLRVIGITGSSTMLLSDTGIDLTQWKQLLQKEAEPADIGSFVHHLSDNHVFPNKVLVDCTADTSVASHYYDWLKKGIHVITPNKKANSGPLDQYLKLRTMQRASYTHYFYEATVGAGLPIISTLRGLLETGDKILRIEGIFSGTLSYIFNNFEGTRAFSDVVAEAREAGYTEPDPRDDLSGTDVARKVVVLARESGLRLELSDIPVKSLVPETLASCSSADEFMQKLPSFDEDWARQRSDAEAAGEVLRYVGALDAVNRSGQVELRRYRRDHPFAQLSGSDNIIAFTTSRYKEQPLIVRGPGAGAEVTAGGVFCDILRLASYLGAPS

SEQ ID NO: 785 - DNA, 2451 bp, Buchnera aphidicola subsp
  CDS (1)..(2451): transl_table=11
atgaaattattaaaatttggtggtacatcattagctaatgcagaaaaatttttatctgtatctagtattattgaagaaaacactcaaacagatcaaattgcggtagtactttctgcaccagctaaaattactaactatctagtaaaaattatagaaaacactattaagaataatcaaattttagaaacagtacatcttgcagaaaatatatttatgcaactaataaacaattttttaaatatacaatctaattttcctcataaagaaatagaaaaaattataaaaaaagaatttaatgagttaaaaaatatcatacaagggattttattattaaaacagtgtccagataatattcgtgcaattataatttctcgtggagaaatactttcagttttcataatgaaaagtatattacaatctaaaaattataatgtaactattattaatcctgttaaaaatttagttgctataggtgataattatcttgattcaactgttgatatatctgaatctaaaaaaaatattcagaacatgaatattaatcaaagtaatattattttaatggctggttttattgcgggaaataaagataaaaaattagtggtattaggacgaaatggttctgattattcagctgcggtgttagcggcttgtttagatgcgaattgttgtgaaatctggactgatgttgacggagtttttacttctgatccaagaaaagttccaaatgctcgtttattaaaatcaatatcatatcaagaagcaatggaactgtcttatttcggtgctaaggtgctacaccctcgtactattgaaccaattgctcaatttaaaattccatgtttaattaaaaatacaaataatgttaaatctattggaacattaatttgcgaacaaaactgttccgaaaaagatttcctaaaaggggttactcatcttgatgaaatagcaatgtttaatatatctggacctcatataaaagatgtaggaagtgtaatttcacgtatatttacaatgatgtctagaggaaatattaaaatattattaattactcaatcatcttcagaaaataaaattaatttctgtgtttacgaacatgatatttataaaattttatatttattcaataaagaatttcaactagaattaaaagatggtttgttgaatcccttcaaaataaagaaaaatttatctatcctctcaatagtaggatcgaatatctataaaaaacacaatattgcgtcaaaaatattttctgttctaggcgctttaaaaatcaacgtcattgcaatctcacaaggttcttcgaaacattctatttcattagtgattaaaaaagaaaacattttaaaagctgttcaacatgttcataatacattgttttttaataaaaaaactattcatatgtttttaataggaataggtggaattggcagtacattactgaaccaaatattaaaacaaaaacaatttttagataaaaaaaatatagaaattaaaatttgtgctattgcaaattctaaaaaaatattattgttagacaatacaaatgatttatctaactggaaaaatgattttaaaaaatcaactcaaaaatttaatttagaattgttaaataatctaataaaaaataatcatttttcaaactcagtcattgtagattgtacatctagtcaattattatccgaacaatatgtaaattttattgataataattttcatgtcgttacttcaaataaaaaagcaaataccagcgaatggaattactataaaaaaataagaaagtctgtggctcaaacaggtaaaaaatttctatatgaaactaatgtcggtgctggattacctgtaatagaaactcttcaaaatttatttaaatcgggtgataatttaatttgttttaaaggtatattatctggatcactatcttttatatttggaagattagaagaaggtattttgttatcacaagctactagagaagctaaggaattgggttttactgaaccaaacccgtgtgatgatttatcaggtatagatgtagcacgaaaattactaattttagcacgtgaatctggatataatatagaattaaaagatattaaaattgaacctttattgccaaataattttaaaatatatgaggacactgataaatttttattaaaattaaaagaactagacgtatatttttcaaataaaatcaaacaggcgcttaatgtaggtaatgtattacgatttgtagcaacaatagaacaaaaaagacaattttttataaaacttgaagaagttaatattaataatccattatacaaagtaaaaaatggtgaaaatgcactagcattttatactaattattatcaaccaattcctctggtactaagaggctacggtgctggtaacaatgttacggcgtctggagtattttccgacttactgcgtacactatcataa

SEQ ID NO: 786 - protein, 816 aa, Buchnera aphidicola subsp
MKLLKFGGTSLANAEKFLSVSSIIEENTQTDQIAVVLSAPAKITNYLVKIIENTIKNNQILETVHLAENIFMQLINNFLNIQSNFPHKEIEKIIKKEFNELKNIIQGILLLKQCPDNIRAIIISRGEILSVFIMKSILQSKNYNVTIINPVKNLVAIGDNYLDSTVDISESKKNIQNMNINQSNIILMAGFIAGNKDKKLVVLGRNGSDYSAAVLAACLDANCCEIWTDVDGVFTSDPRKVPNARLLKSISYQEAMELSYFGAKVLHPRTIEPIAQFKIPCLIKNTNNVKSIGTLICEQNCSEKDFLKGVTHLDEIAMFNISGPHIKDVGSVISRIFTMMSRGNIKILLITQSSSENKINFCVYEHDIYKILYLFNKEFQLELKDGLLNPFKIKKNLSILSIVGSNIYKKHNIASKIFSVLGALKINVIAISQGSSKHSISLVIKKENILKAVQHVHNTLFFNKKTIHMFLIGIGGIGSTLLNQILKQKQFLDKKNIEIKICAIANSKKILLLDNTNDLSNWKNDFKKSTQKFNLELLNNLIKNNHFSNSVIVDCTSSQLLSEQYVNFIDNNFHVVTSNKKANTSEWNYYKKIRKSVAQTGKKFLYETNVGAGLPVIETLQNLFKSGDNLICFKGILSGSLSFIFGRLEEGILLSQATREAKELGFTEPNPCDDLSGIDVARKLLILARESGYNIELKDIKIEPLLPNNFKIYEDTDKFLLKLKELDVYFSNKIKQALNVGNVLRFVATIEQKRQFFIKLEEVNINNPLYKVKNGENALAFYTNYYQPIPLVLRGYGAGNNVTASGVFSDLLRTLS

SEQ ID NO: 787 - DNA, 2445 bp, Buchnera aphidicola subsp
  CDS (1)..(2445): transl_table=11
atgaaactattgaaatttggtggaacttcgctagctaatgcaaaaaagtttttatgtgtagctgacattatagaaaaaaaaaataaaaaggaacaaattgcagttgttctttcagctccagctaaaataactaattacttagctacaataattgaaaataagattgatgatgaagttttaaaaaaaattaatcttgcaaaaaacatttttattgaattaatacaagacattaaaagaatacaaccacttttcccatatgaaaatacaaaatcaacaattgaaatagaatttaataaattaaaaaaaataatcaatggtattcttttaataaaacaatgtccagaaggtattaaacctatcataatatctcgtggagaaatactttcagttgatattatgaaaaatatattacaatctagaaatcatgaagttactattttaaatccagtcacaaatcttttatcaataggaaactatttagattctactattgatattaaagagtctaaaaaacgtattaaaaaaattaatatagatcaaaaaaatattattttaatggctggttttattgcaggcaataaagaaggagaattagtagtactaggacgtaatggttctgattattctgctgcaattttagcttcttgcttaaatgccaaatgttgtgaaatttggactgatgttgatggtgttttgacagcagatccgaggatagtttcaaatacttacctattggattacatatcatatcaagaagccatggaattatcttattttggggctaaggtactacatcctcgaactattgaaccaatttctcagtttcaaataccttgcgtcataaaaaacactaataacactgagtctaagggaacttggattggtaaagaaaataatccaagtgacaattctctaaaaggggtgacatatcttgataacatcataatgttcaatatttctggttcttgtctaaaagattcaggaaatacaattgcacgtatttttactattctctcaagagagagtatgaaaattattttaataatacaatcttcttcagaaaatcaaataaatttttgtactttcgaaaaagacattgattatattttattaatattaaaaaaagaatttacgttagaaataaaagaaggattattaaatgattttaatatagtaaaaaatttaactattttgtcagttattggctctaatatttctgaaaaaaataatattgcatcaaaaattttttcttctttaggttcatcaaaaatcaatgtacttgcaattgcacatggatcttcaaaacattctatatcaatagtaattaaaaaagaaaaccttttacaaggtatacaaaatattcataatacattattttttaagaaaacaatcataaatgtttttctaattggaataggtggagtgggaaaagcattattaaaacaaatcttaaagcaagaaaaatttttagaccaaaaaaatataaaaatacaatttcgtatgattgctaattctaaaaaattactttttttaaaaaattcaataaatttaaataattgggaagaaaattttaaaaaatcaaaagaaaaatttaatttaacaatattaaatgaactattaaaaaatacctgcgattctaattcagtaataatagattgtacatctgattatattttgtcaaagcaatatatcagtttcattaaaaagggatttcatataattacttcgaataaaaaagctaatacagattcgttaaaatattacagtgaaattagaactactgcattaaaagaaaataaaaaatttttatatgaaactaatgttggagcaggattaccagttattaacacacttcaaagtttatttagtacaggtgattgtcttatatcttttaaaggtatattatctggttctttatctttcatatttggaaaactggaagaaggtgttttattatctgaagcaactaaagaagcaaaaaaattaggttttactgaacctaatcccttcgatgatttatctggaatcgacgttgctagaaaactattagttttagctcgagaaattggatattcaatagaactaaaagacataagcattgaacccatattaccagaaagatttaaaaaatatcaaaattctgaagaatttttatttaaattaaaagaactagattcattcttttcagaaagagttaataaagcacgtgatataggcaatgtactgcgttttattggaagtatagaaaaaaatggaaaatgttcagtgaaaattgaggaaataaatagcaataatccattatataaggtaaaaaatggtgaaaatgcactaacattttatacaaattattatcaaccaattcctcttgtattaagaggatatggtgcgggtaacgatgttactgcctctggggtgttttccgacttactacgtataatattataa

SEQ ID NO: 788 - protein, 814 aa, Buchnera aphidicola subsp
MKLLKFGGTSLANAKKFLCVADIIEKKNKKEQIAVVLSAPAKITNYLATIIENKIDDEVLKKINLAKNIFIELIQDIKRIQPLFPYENTKSTIEIEFNKLKKIINGILLIKQCPEGIKPIIISRGEILSVDIMKNILQSRNHEVTILNPVTNLLSIGNYLDSTIDIKESKKRIKKINIDQKNIILMAGFIAGNKEGELVVLGRNGSDYSAAILASCLNAKCCEIWTDVDGVLTADPRIVSNTYLLDYISYQEAMELSYFGAKVLHPRTIEPISQFQIPCVIKNTNNTESKGTWIGKENNPSDNSLKGVTYLDNIIMFNISGSCLKDSGNTIARIFTILSRESMKIILIIQSSSENQINFCTFEKDIDYILLILKKEFTLEIKEGLLNDFNIVKNLTILSVIGSNISEKNNIASKIFSSLGSSKINVLAIAHGSSKHSISIVIKKENLLQGIQNIHNTLFFKKTIINVFLIGIGGVGKALLKQILKQEKFLDQKNIKIQFRMIANSKKLLFLKNSINLNNWEENFKKSKEKFNLTILNELLKNTCDSNSVIIDCTSDYILSKQYISFIKKGFHIITSNKKANTDSLKYYSEIRTTALKENKKFLYETNVGAGLPVINTLQSLFSTGDCLISFKGILSGSLSFIFGKLEEGVLLSEATKEAKKLGFTEPNPFDDLSGIDVARKLLVLAREIGYSIELKDISIEPILPERFKKYQNSEEFLFKLKELDSFFSERVNKARDIGNVLRFIGSIEKNGKCSVKIEEINSNNPLYKVKNGENALTFYTNYYQPIPLVLRGYGAGNDVTASGVFSDLLRIIL

SEQ ID NO: 789 - DNA, 2451 bp, Buchnera aphidicola subsp
  CDS (1)..(2451): transl_table=11
atgaaaatactaaaatttggcggtacttcgctttcaaattcagaactattttttcatgtagcaactattattgaaaataatttaaataacgaacaaattgctattgtattatcagcgcctggtaacaccactaatttattggaaatagctattaatcaaaccataaataataaaaatataataccaattgttcaaaaaatagaaaaaaattttttaaaattaattaatgatatttatcaagtagaacaaaaactattatacgaaaaaattaaaaataatattgaaaacaaactactagaattaaaaaacctgcttcaaggaataaatttattacgacaatgccctgacaaaattcgagcaaaaataattagttcaggagaatatttgtctatttctatcatgaactcaattttaatatcgagaggttataatactacaataatcgatcccgtaaaaaaactgttaactaaagaagatacctatctcaatgctactgttaatataaaaatatctaaattccgcattctttctatgaaaataccaaaacatcacattattcttatgccaggctttacagctggaaataaacaaggagaattagtaacattaggacgaaatggttcagattattcggcaactattctatctgtttgtctaaatagtactatgtgcgaaatctggacagatgtcaatggagtatatacatgtgatcctaaattagtgtctgatgctaaactattaacatcattgtcttatcgagaagcaatagaattatcttatcttggagcaaaaattctacatcctaacactatttatcctatacaaaagtttaaaattccatgtacaataaaaaatactcacaatccatcttccattggtactaaaatcagttgtaatcatgtcaaaaataaaaacttgataacaggtgttacataccttgagaatgttcacatgttttcaatttcatgtttatactctaaaaatatagaaacaattatccctaaaatattttcttgtatgtcattatctaaaatttggataattttaactattcaaacatcttcgcaaaatacaattagcttttgtatattaaaaacaatgaccaatacagctttacatgtattacataaagcactatacctagaattaaaacataagttattaaaaccaattaaagtagaaaaaaaactaactctaatttctgttatcagttcagacatattaaacaatactaaaattactgaaaaagttttctcaattctgaaacatgttaatatcaatacacttgctatttctaagggagcatcaaaaaactctatttctattgtcgttaaacatgatgacggtatattaggagttagagcactacataaaggaatatttaacaaaaattgcactgctgaaatattcttaattggaataggacgagtaggacaaacatttttaaaacaaataatagaacaaaaaaactggctaaaatctaaaaatatagatctaaaaatttgtggcattgctaattctaaaaattttattttaaatttagacggaattaacccaaaaaattggaaacgagatttaaatttatctaaaaaatcatttaattttaaacatcttctaaactcaattcaaaactactatctaataaatccaataattgtcgattgtacatccgacaaaaatatagctaaccagtatatatcctttattaattgtggttttcacattgttacccctaataaaaaagcaaatactacaaattggaaatattatgaagacatacgattagctgcgcaaaaagaaaaaaagaaatttttctacgaaactaatgttggggcaggactacctgtaatagaaaatttaaaaaacttactacgtacaggagacacattaatacactttaaaggaattctatcaggatctttgtcatttatttttggaaaattagaagataatatatctttatctgaagcaacaaaacaagcacaaagtctaggattcactgaaccaaatccaaaagacgatttatctggaatagacgtagctcgaaaattgttaatattggctagagaagtaggatataagttagaattaaaagatattaaaatagaacctctattacctaaagaatttaacaacatttctaatacaactgattttataactaaactgaaagaactcgaccaaatattttgtaatcgagttaaaaaagcgcgaaaattaggaaaacgtctcagatttgttggaataatcaatcaaaaaggaaattgccaagttaaaatagacgaagtagatcataacgatccactatacaatatcaaaaatggagaaaatgcactagcattctatagtaaatactatcaaccaattccattagtactgagaggttacggagctggaaataatgtaactgcttctggaatattttcagatgtattacgcatcttgttatga

SEQ ID NO: 790 - protein, 816 aa, Buchnera aphidicola subsp
MKILKFGGTSLSNSELFFHVATIIENNLNNEQIAIVLSAPGNTTNLLEIAINQTINNKNIIPIVQKIEKNFLKLINDIYQVEQKLLYEKIKNNIENKLLELKNLLQGINLLRQCPDKIRAKIISSGEYLSISIMNSILISRGYNTTIIDPVKKLLTKEDTYLNATVNIKISKFRILSMKIPKHHIILMPGFTAGNKQGELVTLGRNGSDYSATILSVCLNSTMCEIWTDVNGVYTCDPKLVSDAKLLTSLSYREAIELSYLGAKILHPNTIYPIQKFKIPCTIKNTHNPSSIGTKISCNHVKNKNLITGVTYLENVHMFSISCLYSKNIETIIPKIFSCMSLSKIWIILTIQTSSQNTISFCILKTMTNTALHVLHKALYLELKHKLLKPIKVEKKLTLISVISSDILNNTKITEKVFSILKHVNINTLAISKGASKNSISIVVKHDDGILGVRALHKGIFNKNCTAEIFLIGIGRVGQTFLKQIIEQKNWLKSKNIDLKICGIANSKNFILNLDGINPKNWKRDLNLSKKSFNFKHLLNSIQNYYLINPIIVDCTSDKNIANQYISFINCGFHIVTPNKKANTTNWKYYEDIRLAAQKEKKKFFYETNVGAGLPVIENLKNLLRTGDTLIHFKGILSGSLSFIFGKLEDNISLSEATKQAQSLGFTEPNPKDDLSGIDVARKLLILAREVGYKLELKDIKIEPLLPKEFNNISNTTDFITKLKELDQIFCNRVKKARKLGKRLRFVGIINQKGNCQVKIDEVDHNDPLYNIKNGENALAFYSKYYQPIPLVLRGYGAGNNVTASGIFSDVLRILL

SEQ ID NO: 791 - DNA, 2448 bp, Haemophilus influenzae
  CDS (1)..(2448): transl_table=11
atgcgcgtacttaaatttggcggcacttcgcttgcaaatccggaacgtttttcccaagcggcgaaattgatcgagcaagctcatttagaagagcaggctgcaggtgttttatctgcaccagccaaaataaccaaccatctcgtcgccctttctgaaaaagcagcattaaatcaatcaaccgatacgcatttcaacgaagcaatcgaaattttctataacatcatcaacggcttacatacggaaaataatcaattcgacttaaatggtaccaaagcacttattgatgctgaatttgttcaaattaaaggattattagaagaaatccgtcaggcaggaaaagtagaagatgcagttaaagcgaccattgattgccgtggggaaaaactttctattgcaatgatgaaagcttggtttgaagcgcgtggctatagcgtacatattgtggatcctgtcaaacaattattggcaaaaggcggttatcttgaatcttctgttgaaattgaagaatcaacaaaacgtgttgatgcagcaaatatcgcaaaagataaagtggtgctgatggcaggttttactgcgggtaatgaaaaaggcgagttggtattgctcggtcgtaatggctcagactattctgccgcctgtttagccgcttgtttaggcgcaagtgtatgcgaaatttggaccgatgtggacggcgtttatacttgcgatccgcgtttagtgcctgatgcacgtttattaccaacgctttcttatcgtgaagcgatggaactctcttatttcggtgcgaaagtgattcatcctcgtacgattgggccattgttgccacaaaatattccttgtgtcattaaaaatacaggaaatccttctgcaccaggttcgattattgatggcaatgtgaaatcagaaagtttgcaagttaaaggtatcactaacttagacaatttggcgatgtttaatgtgtcaggccctggtatgcaaggtatggtaggcatggcatctcgcgtattttcagccatgtcaggcgcaggcatttcagttattttaattactcagtcttcgtctgaatatagtattagtttctgtgtgcctgtgaaatctgcagaagtagcgaaaaccgtactagaaacggagtttgctaatgaattaaatgaacatcaattagaaccaattgaagtgattaaagacttatccattatttctgttgtgggcgatggaatgaagcaagcgaaaggcattgctgctcgtttcttctcggcattagcgcaggcaaacattagcattgtggcgattgcacaaggatctagcgaacgttcaatttctgcggttgtgccgcaaaataaagccattgaagcggtgaaggctacccatcaggcgcttttcaataataaaaaagtcgtggatatgtttttagtgggcgttggtggagtaggcggagaattaattgagcaggtaaagcgtcaaaaggagtatctagcaaagaagaatgttgaaattcgagtttgtgctattgcgaattccaaccgtatgttgcttgatgaaaatggattaaatttagaggattggaaaaacgatttagaaaatgcgactcagccatcagattttgatgtattgctttctttcattaaattacatcatgtggtgaatccagtatttgtagattgtacttcagccgaatctgtagcagggctttatgctcgtgcgttaaaagaaggtttccatgtggttacgccaaacaaaaaagcgaatacacgagaattagtttattacaatgagttacgccaaaatgcccaagcaagccagcataaatttttatatgaaaccaatgtaggtgcgggcttgccagttattgaaaatctccaaaacttacttgcagcaggtgatgagcttgaatattttgaagggattttatctggctcgctttcctttatttttggtaagttggaagaaggactttctctttcagaagtaaccgcacttgcgcgtgaaaaaggctttactgagccagatcctcgagatgatctttctggacaagatgtagcacgcaaattattaattcttgctcgtgaagcgggaattgaacttgaactttcagatgttgaagttgaaggtgtattgccaaaaggcttctccgatggaaaatctgcagatgagtttatggcaatgttgcctcagcttgatgaagaatttaaaactcgcgttgccacagctaaagcagaaggcaaagtattgcgttatgttggaaaaattagtgaaggaaaatgcaaagtatccatcgttgcggtagatctgaataatccactttataaagtgaaagatggtgaaaatgccttggcattttacactcgctattatcagccgattccacttttattacgtggttatggcgcaggtaatgcagttactgcggcaggtatctttgcagatattttaagaacattacaacattaa

SEQ ID NO: 792 - protein, 815 aa, Haemophilus influenzae
MRVLKFGGTSLANPERFSQAAKLIEQAHLEEQAAGVLSAPAKITNHLVALSEKAALNQSTDTHFNEAIEIFYNIINGLHTENNQFDLNGTKALIDAEFVQIKGLLEEIRQAGKVEDAVKATIDCRGEKLSIAMMKAWFEARGYSVHIVDPVKQLLAKGGYLESSVEIEESTKRVDAANIAKDKVVLMAGFTAGNEKGELVLLGRNGSDYSAACLAACLGASVCEIWTDVDGVYTCDPRLVPDARLLPTLSYREAMELSYFGAKVIHPRTIGPLLPQNIPCVIKNTGNPSAPGSIIDGNVKSESLQVKGITNLDNLAMFNVSGPGMQGMVGMASRVFSAMSGAGISVILITQSSSEYSISFCVPVKSAEVAKTVLETEFANELNEHQLEPIEVIKDLSIISVVGDGMKQAKGIAARFFSALAQANISIVAIAQGSSERSISAVVPQNKAIEAVKATHQALFNNKKVVDMFLVGVGGVGGELIEQVKRQKEYLAKKNVEIRVCAIANSNRMLLDENGLNLEDWKNDLENATQPSDFDVLLSFIKLHHVVNPVFVDCTSAESVAGLYARALKEGFHVVTPNKKANTRELVYYNELRQNAQASQHKFLYETNVGAGLPVIENLQNLLAAGDELEYFEGILSGSLSFIFGKLEEGLSLSEVTALAREKGFTEPDPRDDLSGQDVARKLLILAREAGIELELSDVEVEGVLPKGFSDGKSADEFMAMLPQLDEEFKTRVATAKAEGKVLRYVGKISEGKCKVSIVAVDLNNPLYKVKDGENALAFYTRYYQPIPLLLRGYGAGNAVTAAGIFADILRTLQH

SEQ ID NO: 793 - DNA, 2766 bp, Oryza sativa
  CDS (1)..(2766)
atgtggagcctcgccgtcgcgagcccgcaccccgccgccgccttcgccgcggcccgtccccgccgcggccctcgccccgccgccgccccctcccacagaggtgtgaatccgcagcggtggcgatgtgagaagactcaggcatggtcgttttggagctctctgtgggccagcgaccttccaggaggactttatggggatgtttcgaagaatatgctcaagccagctgctgctgtttcagttgagcaagctgaagctagtgctcaccttccaaaaggtgacatgtggtctgtgcataaatttggtgggacctgcatgggaacctcccagaggattcagaatgtggctgacataatccttcgcgacccttctgagaggaaactggtagttgtgtctgcaatgtctaaagtcactgacatgatgtacaaccttgtaaataaggctcaatcaagggatgattcttatatcactgcacttgatgaagttttcgagaagcatatggcagcagcaaaggatctgcttggaggagaggaccttgcaagattcttatctcagttgcacgcggatgtcagtaacctaaaagcaatgcttcgtgcaatttgcatagctgggcatgccacggagtctttctcagattttgttgttggacatggagagatatggtcagctcaattgttgtcatttgccataaagaagtctggaaccccttgcagttggatggacacacgagaagttttagttgtaaatcctacaggttccaaccaagtagatcctgactatttggaatctgagaaacgacttgagaaatggttcgctcgacagccagctgagacaataattgctactgggtttattgcgagtacacctgaaaacattcctacaaccttgaaaagagatggaagtgatttctctgcagccataattggttcacttgttaaggctggtcaggtcactatctggactgatgttgatggggtctttagtgcagatcccagaaaagttagcgaggctgtcatattaagcactttatcatatcaggaggcgtgggaaatgtcgtattttggggcaaatgtattacatccgcgtaccatcatacctgtgatgaaatacaatatcccaattgttataagaaatatgttcaatatttctgcccctggtaccatgatctgccagcagcctgcgaatgaaagtggtgatttggaggcttgcgtcaaagcatttgcaactatagataaattgtctcttgttaacgttgaaggaactggaatggctggtgttcctggtactgcaagtgccatatttggtgctgtgaaggatgttggagctaatgttatcatgatatcgcaggctagtagtgaacactccgtatgctttgctgtaccagaaaaggaagttgctgcagtttctgcagctttgcatgtcaggttccgtgaagcattatctgcaggcaggctatctaaggtcgaagtcattcataattgtagcatccttgctgctgtcggcctgaagatggcaagtactcctggggtcagtgcaaccctttttgatgcacttgcaaaggcaaatattaatgtaagggcaatagctcaaggttgtagtgagtacaacatcactgttgtattgaagcaagaggactgcgtaagggctcttagagctgctcactcaaggttcttcctctccaaaaccacacttgctgtcggaattattggacctgggttgattggtcgtactctccttaaccagctgaaggatcaggctgcagttcttaaggaaaatatgaacattgatctgcgtgtcatgggaatcactggttcgaggacaatggttttgagtgatacaggaatagatttggcccattggaaagagcagctacaaactgaagcagaaccagccaaccttgacaagtttgttgatcatttgtccgagaatcaattattccctaacagggttttggtggactgcacagcagacacaagtgttgcatcccactattatgactggttaaagaagggaatccatgtcatcacgccaaataagaaagcaaattcagggccactggacaagtatttgaaacttaggactctacaacgtgcatcatatacccattacttctatgaagcaactgttggtgctggccttcctatcattagcactctgcgcggtctcctggaaacaggtgacaagatattgcgtattgaggggatcttcagtggaacattgagttacattttcaacaattttgaaggaacaagagctttcagtgatgttgtttctgaagcaaaagaggctggatacactgaacctgatccaagagatgatctgtctggaactgatgtagccagaaaggtaataattcttgctagggaatctggattgaagcttgagctttctgatattcctgtaaggagtcttgtgccggaggcattgagatcctgttcaacagctgatgaatacatgcaaaagttaccatcctttgaccaggactgggcaagagagagtaaagatgctgaagctgccggagaagttttgcggtatgttggagtggtggatttggtgaacaaggagggtcaggtcgagctgcggaggtacaagaaggaccacccgttcgcgcagctatctggctccgacaacatcatcgccttcacgacgtcaagatacaaggagcaaccgctgatcgtgcgaggcccgggcgccggtgcagaggtgaccgcaggaggtgtcttcagtgacatactacggctggcctcctacctaggcgctccctcataa

SEQ ID NO: 794 - protein, 921 aa, Oryza sativa
MWSLAVASPHPAAAFAAARPRRGPRPAAAPSHRGVNPQRWRCEKTQAWSFWSSLWASDLPGGLYGDVSKNMLKPAAAVSVEQAEASAHLPKGDMWSVHKFGGTCMGTSQRIQNVADIILRDPSERKLVVVSAMSKVTDMMYNLVNKAQSRDDSYITALDEVFEKHMAAAKDLLGGEDLARFLSQLHADVSNLKAMLRAICIAGHATESFSDFVVGHGEIWSAQLLSFAIKKSGTPCSWMDTREVLVVNPTGSNQVDPDYLESEKRLEKWFARQPAETIIATGFIASTPENIPTTLKRDGSDFSAAIIGSLVKAGQVTIWTDVDGVFSADPRKVSEAVILSTLSYQEAWEMSYFGANVLHPRTIIPVMKYNIPIVIRNMFNISAPGTMICQQPANESGDLEACVKAFATIDKLSLVNVEGTGMAGVPGTASAIFGAVKDVGANVIMISQASSEHSVCFAVPEKEVAAVSAALHVRFREALSAGRLSKVEVIHNCSILAAVGLKMASTPGVSATLFDALAKANINVRAIAQGCSEYNITVVLKQEDCVRALRAAHSRFFLSKTTLAVGIIGPGLIGRTLLNQLKDQAAVLKENMNIDLRVMGITGSRTMVLSDTGIDLAHWKEQLQTEAEPANLDKFVDHLSENQLFPNRVLVDCTADTSVASHYYDWLKKGIHVITPNKKANSGPLDKYLKLRTLQRASYTHYFYEATVGAGLPIISTLRGLLETGDKILRIEGIFSGTLSYIFNNFEGTRAFSDVVSEAKEAGYTEPDPRDDLSGTDVARKVIILARESGLKLELSDIPVRSLVPEALRSCSTADEYMQKLPSFDQDWARESKDAEAAGEVLRYVGVVDLVNKEGQVELRRYKKDHPFAQLSGSDNIIAFTTSRYKEQPLIVRGPGAGAEVTAGGVFSDILRLASYLGAPS

SEQ ID NO: 795 - DNA, 2748 bp, Oryza sativa
  CDS (1)..(2748)
atgcggagcctcgccgtcgcgagccccctcccgcccgccgccgcggttcgccgccggccacgcgcatccgcctccggaagggaagtgatttcacaatgttggaagtgtgagataaatcaggaccaacctttggggaactccctaaggataggtcactcacaaggtagtttgcaaagacatggttccaggaatttgctcgcagctgctgcggctatttcaattgaacaagctgaagtcagtacttatcttccaaaaggtgacatgtggtctgtgcacaagtttggtggcacctgtatgggaacaccccagagaattcagaatgttgctgatattgttcttggtgactcttctgagaggaagctgatcattgtttctgcaatgtccaaagtcactgacatgatgttcaaccttgtgcataaagctcagtcaagggataattcttatgtgactgcactggatgaagtttttaataagcatatggctgcagcaaaggaacttcttgatggagaagacctagcaagattcttggctcagttgcattctgacatcagtaacctgagagcgatgcttcgtgctatttttatagctggacatgcaacagaatcgttctctgatttcgttgttgggcatggagagttgtggtcagctcaaatgttgtcgtatgctataaaaaagtctggggtgccttgcagttggatggatacaagagaagttctagtagtgaaacctagtggttctaatcaggtcgatcctgactatttggaatctgagaagcgactccagaaatggttttcacgacaaccagcagagataataatcgctactgggtttattgccagtacagccgaaaacattcctactacgcttaaaagggatggaagcgacttctcagcatcaataattggatcccttgttagggcatgtcaggtcactatctggactgatgttgatggggtatttagtgcagatcctagaaaagttagtgaggctgtgatcttaagcacattatcttatcaggaggcctgggaaatgtcatattttggtgcaaatgttttgcatccccgcaccattatacctgtgatgaaagacaatattcctattgtcattaggaatatgttcaatctatctgcccctggaacaacaatttgcaagcagcctgctaatgaaaatgctgatttagatgcttgtgtcaaatcatttgctactatagacaaattggcccttgttaatgtggaaggaactggaatggctggtgttccaggtacagcaagtgccatatttagtgctgccaaggatgttggagctaatgttatcatgatatctcaggctagcagcgaacactcggtatgctttgctgttccagaaaaggaagttgcagcagtctcgacagccttgcatgttaggtttcgtgaggcattagcagctggaaggctatctaaggtcgaagtcattcgtgggtgcagcattcttgctgctgttggcttgaggatggccagtactcctggagtcagtgcaatcctttttgatgcattagcaaaggcaaatattaatgtacgagcaatagcccaaggttgcagtgaatacaatattactgttgtgttgaagcaagaagattgtgtgagggctttgagagctgttcattcaaggttcttcctctccaaaaccactcttgccgttgggatcattggaccaggtttaattggtggaacacttcttgaccagctgaaagatcaggctgctgttctcaaggaaaatatgaatattgatctacgtgttattggaatatctggctcaagaacgatgcatttgagtgacataggggtagacttaaaccagtggaaagagcttctacgaaaagaagcagaaccagcagatcttgatagttttgttcgccatttgtctgaaaatcatgtatttccaaacaaagttttggtggactgcacagcagatacatacgtagcatgccactattatgattggttgaagaagggtatccatgtcatcacgccaaataagaaagcaaattctggtccgcttgatcggtatctgaaattaaggactctgcagcgtgcatcgtatactcattacttttatgaagcaactgttggtgctggccttccaatcattagcaccctacgaggtcttctagagacaggtgacaagatattgcgtattgagggcattttcagtgggactttgagttatattttcaacaattttgaaggtacacgaacttttagtaatgttgttgctgaagcaaaagaagctggatatacagagccagatccaagagatgatctatcaggaactgatgttgccagaaaggttattatccttgcaagggagtctggtctgaggctcgagctttccgatattcccgtaaagagccttgtgccagaggcactgaggtcatgttcgtcagcagatgaattcatgcagaagctaccgtcctttgatcaggactgggacaggcaacgcgatgaagctgaagctgcaggagaagtgctgcggtatgtgggcgtggtggacgtggcgaacaggaagggccgggtagagctgcagaggtacaagagagaccaccccttcgcgcagctgtccggctccgacaacatcatcgccttcaccacgtcgaggtacaaggagcagccgctgatcgtgcgaggccccggcgccggcgcggaggtcaccgccggtggcgtcttctgcgacatcctgcggctggcgtcctacctgggagcaccctcctag

SEQ ID NO: 796 - protein, 915 aa, Oryza sativa
MRSLAVASPLPPAAAVRRRPRASASGREVISQCWKCEINQDQPLGNSLRIGHSQGSLQRHGSRNLLAAAAAISIEQAEVSTYLPKGDMWSVHKFGGTCMGTPQRIQNVADIVLGDSSERKLIIVSAMSKVTDMMFNLVHKAQSRDNSYVTALDEVFNKHMAAAKELLDGEDLARFLAQLHSDISNLRAMLRAIFIAGHATESFSDFVVGHGELWSAQMLSYAIKKSGVPCSWMDTREVLVVKPSGSNQVDPDYLESEKRLQKWFSRQPAEIIIATGFIASTAENIPTTLKRDGSDFSASIIGSLVRACQVTIWTDVDGVFSADPRKVSEAVILSTLSYQEAWEMSYFGANVLHPRTIIPVMKDNIPIVIRNMFNLSAPGTTICKQPANENADLDACVKSFATIDKLALVNVEGTGMAGVPGTASAIFSAAKDVGANVIMISQASSEHSVCFAVPEKEVAAVSTALHVRFREALAAGRLSKVEVIRGCSILAAVGLRMASTPGVSAILFDALAKANINVRAIAQGCSEYNITVVLKQEDCVRALRAVHSRFFLSKTTLAVGIIGPGLIGGTLLDQLKDQAAVLKENMNIDLRVIGISGSRTMHLSDIGVDLNQWKELLRKEAEPADLDSFVRHLSENHVFPNKVLVDCTADTYVACHYYDWLKKGIHVITPNKKANSGPLDRYLKLRTLQRASYTHYFYEATVGAGLPIISTLRGLLETGDKILRIEGIFSGTLSYIFNNFEGTRTFSNVVAEAKEAGYTEPDPRDDLSGTDVARKVIILARESGLRLELSDIPVKSLVPEALRSCSSADEFMQKLPSFDQDWDRQRDEAEAAGEVLRYVGVVDVANRKGRVELQRYKRDHPFAQLSGSDNIIAFTTSRYKEQPLIVRGPGAGAEVTAGGVFCDILRLASYLGAPS

SEQ ID NO: 797 - DNA, 2751 bp, Glycine max
  CDS (1)..(2751)
atggcgtcgttttccgccgccgtcgctcagttctcccgcgtttcacccactcacacttcgctccactctcactctcacggcacgctcttccaatctcaatgccgccctttcttcctctcgcgcacttcccattcactccggaagggtcttactttaccacggggaagagaggcaccaagtacaacagtacgtgcttcatttacagatgtttcaccgaatgtgtccttggaggaaaaacaactacccaaaggagaaacttggtctgttcacaaatttggtggaacctgtgtgggaacctctcagagaataaaaaatgttgcggacataattcttaaggatgattcggagaggaaattggtggttgtttctgcaatgtcaaaggtgacagatatgatgtatgaccttatccacaaggctcaatcacgcgatgagtcttatacagctgcattaaatgctgttttggagaagcacagtgcaactgcacatgacatacttgatggagataatcttgctactttcttgtctaaattgcatcatgatattagtaaccttaaggcgatgcttcgtgcaatatacatagctggtcatgcaacagagtcctttacagattttgttgtgggacatggagaattatggtctgctcagatgttgtctctagttattaggaagaatgggactgattgcaaatggatggatacaagggatgtccttatcgtaaatcctactggttctaatcaagttgatcctgactatttggaatctgagcaaagacttgaaaaatggtactctttgaatccatgtaaggtaatcattgccactggattcattgcaagcacacctcaaaacattcctaccacactgaagagagatggaagtgacttctcggcagcaattatgggtgctctatttaaggcccgtcaggtcacaatttggacagatgttgatggtgtgtatagtgcagatcctagaaaagttagtgaggctgtgattttgaagacactgtcttatcaagaggcttgggaaatgtcttattttggtgccaatgtcttgcatccccgcacaattattcctgtgatgcgatatggcatacccattatgataaggaacattttcaacctttctgctcctggaacaaagatctgccatccttctgttaatgatcatgaagatagccagaacctgcaaaattttgtcaaaggatttgcaaccatagacaacttggcacttgtaaacgtcgagggaactggaatggctggtgttccaggtactgccagtgctatttttggtgcagtaaaagatgttggagctaatgttatcatgatatctcaggctagtagtgagcattctgtatgctttgctgtgcccgagaaagaagtaaaagctgttgctgaggcattgcaatctagatttcgtcaagctttggataatgggcgtctttctcaggttgcagtcattccaaattgtagcattctggctgcagttggccagaaaatggcaagcactcctggtgttagtgcctcccttttcaatgcattggctaaggccaatataaatgtccgtgctatagcccaaggttgttctgagtacaatattactgttgttgttaagcgagaggattgtataaaggctttacgagctgtccattccagattttatctctcaagaaccaccatagcaatgggcattattggacctggattaattgggagcacactacttgagcagctaagggatcaggcctcaaccctaaaagaagaattcaacatcgatttgcgtgtaatgggcatacttggttcaaagtcaatgcttcttagtgatgtgggcattgacttagctagatggagagaacttcgagaggaaagaggagaagtggctaatatggaaaaatttgttcaacatgtacatggaaatcattttataccaaacacggcattagtggactgcacagctgactctgtcattgctggctattactatgattggttgcgcaaaggaatacatgtagttactcctaacaagaaggcaaattcaggaccacttgatcagtatttgaagttaagagctcttcaaaggcaatcctatacacattacttctatgaagcaactgtcggagctggtcttccaattgttagcactttacgtggcctccttgaaactggagacaaaatattacaaatcgaaggcatctttagtgggactttgagttacatatttaataactttaaagatggccgggcttttagtgaggtagtttctgaagcaaaggaagcaggttatactgagccagatccaagagatgatctatccggaacagatgttgccagaaaggtgataattcttgctagggagtcgggtttaaagctagaactgtctaatattccagttgaaagccttgtgccagaaccactacgagcttgtgcatcagctcaggagtttatgcaagagctaccaaaatttgatcaggagttcacaaagaaacaagaagatgctgagaatgctggggaagtcttgagatacgttggagtggtggacgtgactaataaaaaaggagtggtagagctgcgaagatacaagaaggatcatccctttgcgcaattgtctgggtcagataacattattgcatttacaacacgaaggtataaggatcagcctctgatagttcgtgggccaggagctggtgctcaagtcaccgctggtggaatatttagtgatattttacgacttgcctcatatcttggtgctccatcgtaa

SEQ ID NO: 798 - protein, 916 aa, Glycine max
MASFSAAVAQFSRVSPTHTSLHSHSHGTLFQSQCRPFFLSRTSHSLRKGLTLPRGREAPSTTVRASFTDVSPNVSLEEKQLPKGETWSVHKFGGTCVGTSQRIKNVADIILKDDSERKLVVVSAMSKVTDMMYDLIHKAQSRDESYTAALNAVLEKHSATAHDILDGDNLATFLSKLHHDISNLKAMLRAIYIAGHATESFTDFVVGHGELWSAQMLSLVIRKNGTDCKWMDTRDVLIVNPTGSNQVDPDYLESEQRLEKWYSLNPCKVIIATGFIASTPQNIPTTLKRDGSDFSAAIMGALFKARQVTIWTDVDGVYSADPRKVSEAVILKTLSYQEAWEMSYFGANVLHPRTIIPVMRYGIPIMIRNIFNLSAPGTKICHPSVNDHEDSQNLQNFVKGFATIDNLALVNVEGTGMAGVPGTASAIFGAVKDVGANVIMISQASSEHSVCFAVPEKEVKAVAEALQSRFRQALDNGRLSQVAVIPNCSILAAVGQKMASTPGVSASLFNALAKANINVRAIAQGCSEYNITVVVKREDCIKALRAVHSRFYLSRTTIAMGIIGPGLIGSTLLEQLRDQASTLKEEFNIDLRVMGILGSKSMLLSDVGIDLARWRELREERGEVANMEKFVQHVHGNHFIPNTALVDCTADSVIAGYYYDWLRKGIHVVTPNKKANSGPLDQYLKLRALQRQSYTHYFYEATVGAGLPIVSTLRGLLETGDKILQIEGIFSGTLSYIFNNFKDGRAFSEVVSEAKEAGYTEPDPRDDLSGTDVARKVIILARESGLKLELSNIPVESLVPEPLRACASAQEFMQELPKFDQEFTKKQEDAENAGEVLRYVGVVDVTNKKGVVELRRYKKDHPFAQLSGSDNIIAFTTRRYKDQPLIVRGPGAGAQVTAGGIFSDILRLASYLGAPS

SEQ ID NO: 799 - DNA, 2817 bp, Glycine max
  CDS (1)..(2817)
atggcgtcgttttccgccgccgtcgctcagttctcccgcgtttcaccttctcacacttcgctccactctcactctcacggcacgctcttccaatctcaatgccgccctttcttcctctcgcgcacttcccattcactccggaagggtcttactttaccacggggaagagaggcaccgagtacatctgtacgtgcttcatttacagatgtttcaccgaatgtgtccttggaggaaaaacaactacccaaaggagaaacttggtctgttcacaaatttggtggaacctgtgtgggaacctctcagagaataaaaaatgttgcggacataattcttaaggatgattcggagaggaaattggtggttgtttctgcaatgtcaaaggtgacagatatgatgtatgaccttatccacaaggctcaatcacgcgatgagtcttatacagctgcattaaatgctgttttggagaagcacagtgcaactgcacatgacatacttgatggagataatcttgctactttcttgtctaaattgcatcatgatattagtaaccttaaggcgatgcttcgtgcaatatacatagctggtcatgcaacagagtcctttacagattttgttgtgggacatggagaattatggtctgctcagatgttgtctctagttattaggaagaatgggactgattgcaaatggatggatacaagggatgtccttatcgtaaatcctactggttctaatcaagttgatcctgactatttggaatctgagcaaagacttgaaaaatggtactctttgaatccatgtaaggtaatcattgccactggattcattgcaagcacacctcaaaacattcctaccacactgaagagagatggaagtgacttctcggcagcaattatgggtgctctatttaaggctcgtcaggtcacaatttggacagatgttgatggtgtgtatagtgcagatcctagaaaagttagtgaggctgtgattttgaagacactgtcttatcaagaggcttgggaaatgtcttattttggtgccaatgtcttgcatccccgcacaattattcctgtgatgcgatatggcatacccattatgataaggaacattttcaacctttctgctcctggaacaaagatctgccatccttctgttaatgatcatgaagatagccagaacctgcaaaattttgtcaaaggatttgcaaccatagacaacttggcacttgtaaacgtcgagggaactggaatggctggtgttccaggtactgccagtgctatttttggtgcagtaaaagatgttggagctaatgttatcatgatatctcaggctagtagtgagcattctgtatgctttgctgtgcccgagaaagaagtaaaagctgttgctgaggcattgcaatctagatttcgtcaagctttggataatgggcgtctttctcaggttgcagtcattccaaattgtagcattctggctgcagttggccagaaaatggcaagcactcctggtgttagtgcctcccttttcaatgcattggctaaggccaatataaatgtccgtgctatagcccaaggttgttctgagtacaatattactgttgttgttaagcgagaggattgtataaaggctttacgagctgtccattccagattttatctctcaagaaccaccatagcaatgggcattattggacctggattaattgggagcacactacttgagcagctaagggatcaggcagctgaagtttctattgtaagcttgcaggacaaggcctcaaccctaaaagaagaattcaacatcgatttgcgtgtaatgggcatacttggttcaaagtcaatgcttcttagtgatgtgggcattgacttagctagatggagagaacttcgagaggaaagaggagaagtggctaatatggaaaaatttgttcaacatgtacatggaaatcattttataccaaacacggcattagtggactgcacagctgactctgtcattgctggctattactatgattggttgcgcaaaggaatacatgtagttactcctaacaagaaggcaaattcaggaccacttgatcagctttttcccatctatgctctctatatccagtatttgaagttaagagctcttcaaaggcaatcctatacacattacttctatgaagcaactgtcggagctggtcttccaattgttagcactttacgtggcctccttgaaactggagacaaaatattacaaatcgaaggcatctttagtgggactttgagttacatatttaataactttaaagatggccgggcttttagtgaggtagtttctgaagcaaaggaagcaggttatactgagccagatccaagagatgatctgtctggaacagatgttgccagaaaggttataattcttgctagggagtcgggtttaaagctagaactgtctaatattccagttgaaagccttgtgccagaaccactacgagcttgtgcatcagctcaggagtttatgcaagagctaccaaaatttgatcaggagttcacaaagaaacaagaagatgctgagaatgctggggaagtcttgagatacgtgggagtggtggacgtgactaatgaaaaaggagtggtagagctgcgaagatacaagaaggatcatccgtttgcacaattgtctgggtcagataacattattgcatttacaacacgaaggtataaggatcagcctctgatagttcgtgggccaggagctggtgctcaagtcacagctggtggaatatttagtgatattttacgacttgcctcatatcttggtgctccatcataa

SEQ ID NO: 800 - protein, 938 aa, Glycine max
MASFSAAVAQFSRVSPSHTSLHSHSHGTLFQSQCRPFFLSRTSHSLRKGLTLPRGREAPSTSVRASFTDVSPNVSLEEKQLPKGETWSVHKFGGTCVGTSQRIKNVADIILKDDSERKLVVVSAMSKVTDMMYDLIHKAQSRDESYTAALNAVLEKHSATAHDILDGDNLATFLSKLHHDISNLKAMLRAIYIAGHATESFTDFVVGHGELWSAQMLSLVIRKNGTDCKWMDTRDVLIVNPTGSNQVDPDYLESEQRLEKWYSLNPCKVIIATGFIASTPQNIPTTLKRDGSDFSAAIMGALFKARQVTIWTDVDGVYSADPRKVSEAVILKTLSYQEAWEMSYFGANVLHPRTIIPVMRYGIPIMIRNIFNLSAPGTKICHPSVNDHEDSQNLQNFVKGFATIDNLALVNVEGTGMAGVPGTASAIFGAVKDVGANVIMISQASSEHSVCFAVPEKEVKAVAEALQSRFRQALDNGRLSQVAVIPNCSILAAVGQKMASTPGVSASLFNALAKANINVRAIAQGCSEYNITVVVKREDCIKALRAVHSRFYLSRTTIAMGIIGPGLIGSTLLEQLRDQAAEVSIVSLQDKASTLKEEFNIDLRVMGILGSKSMLLSDVGIDLARWRELREERGEVANMEKFVQHVHGNHFIPNTALVDCTADSVIAGYYYDWLRKGIHVVTPNKKANSGPLDQLFPIYALYIQYLKLRALQRQSYTHYFYEATVGAGLPIVSTLRGLLETGDKILQIEGIFSGTLSYIFNNFKDGRAFSEVVSEAKEAGYTEPDPRDDLSGTDVARKVIILARESGLKLELSNIPVESLVPEPLRACASAQEFMQELPKFDQEFTKKQEDAENAGEVLRYVGVVDVTNEKGVVELRRYKKDHPFAQLSGSDNIIAFTTRRYKDQPLIVRGPGAGAQVTAGGIFSDILRLASYLGAPS

SEQ ID NO: 801 - DNA, 20 bp, Artificial sequence
  primer
atgccggtggtttctctggc

SEQ ID NO: 802 - DNA, 22 bp, Artificial sequence
  primer
ttaagacggagccccgagatag

SEQ ID NO: 803 - protein, 868 aa, Artificial sequence
  consensus sequence
  Variant (5)..(15): Xaa in position 5 to 15 is any amino acid
  Variant (18)..(29): Xaa in position 18 to 29 is any amino acid
  Variant (30)..(32): Xaa in position 30 to 32 is any or no amino acid
  Variant (34)..(34): Xaa in position 34 is any amino acid
  Variant (37)..(40): Xaa in position 37 to 40 is any amino acid
  Variant (41)..(47): Xaa in position 41 to 47 is any or no amino acid
  Variant (49)..(101): Xaa in position 49 to 101 is any amino acid
  Variant (102)..(109): Xaa in position 102 to 109 is any or no amino acid
  Variant (111)..(123): Xaa in position 111 to 123 is any amino acid
  Variant (124)..(130): Xaa in position 124 to 130 is any or no amino acid
  Variant (133)..(134): Xaa in position 133 to 134 is any amino acid
  Variant (136)..(149): Xaa in position 136 to 149 is any amino acid
  Variant (150)..(153): Xaa in position 150 to 153 is any or no amino acid
  Variant (155)..(158): Xaa in position 155 to 158 is any amino acid
  Variant (160)..(187): Xaa in position 160 to 187 is any amino acid
  Variant (188)..(197): Xaa in position 188 to 197 is any or no amino acid
  Variant (200)..(210): Xaa in position 200 to 210 is any amino acid
  Variant (211)..(215): Xaa in position 211 to 215 is any or no amino acid
  Variant (217)..(217): Xaa in position 217 is any amino acid
  Variant (219)..(219): Xaa in position 219 is any amino acid
  Variant (223)..(223): Xaa in position 223 is any amino acid
  Variant (226)..(233): Xaa in position 226 to 233 is any amino acid
  Variant (235)..(238): Xaa in position 235 to 238 is any amino acid
  Variant (244)..(244): Xaa in position 244 is any amino acid
  Variant (247)..(249): Xaa in position 247 to 249 is any amino acid
  Variant (253)..(253): Xaa in position 253 is any amino acid
  Variant (255)..(256): Xaa in position 255 to 256 is any amino acid
  Variant (258)..(259): Xaa in position 258 to 259 is any amino acid
  Variant (261)..(263): Xaa in position 261 to 263 is any amino acid
  Variant (265)..(266): Xaa in position 265 to 266 is any amino acid
  Variant (269)..(269): Xaa in position 269 is any amino acid
  Variant (271)..(274): Xaa in position 271 to 274 is any amino acid
  Variant (277)..(277): Xaa in position 277 is any amino acid
  Variant (282)..(282): Xaa in position 282 is any amino acid
  Variant (284)..(285): Xaa in position 284 to 285 is any amino acid
  Variant (287)..(291): Xaa in position 287 to 291 is any amino acid
  Variant (293)..(297): Xaa in position 293 to 297 is any amino acid
  Variant (299)..(305): Xaa in position 299 to 305 is any amino acid
  Variant (308)..(308): Xaa in position 308 is any amino acid
  Variant (310)..(318): Xaa in position 310 to 318 is any amino acid
  Variant (319)..(327): Xaa in position 319 to 327 is any or no amino acid
  Variant (329)..(361): Xaa in position 329 to 361 is any amino acid
  Variant (362)..(371): Xaa in position 362 to 371 is any or no amino acid
  Variant (373)..(373): Xaa in position 373 is any amino acid
  Variant (375)..(393): Xaa in position 375 to 393 is any amino acid
  Variant (394)..(394): Xaa in position 394 is any or no amino acid
  Variant (396)..(414): Xaa in position 396 to 414 is any amino acid
  Variant (415)..(422): Xaa in position 415 to 422 is any or no amino acid
  Variant (425)..(433): Xaa in position 425 to 433 is any amino acid
  Variant (434)..(437): Xaa in position 434 to 437 is any or no amino acid
  Variant (439)..(440): Xaa in position 439 to 440 is any amino acid
  Variant (442)..(447): Xaa in position 442 to 447 is any amino acid
  Variant (448)..(449): Xaa in position 448 to 449 is any or no amino acid
  Variant (451)..(452): Xaa in position 451 to 452 is any amino acid
  Variant (455)..(455): Xaa in position 455 is any amino acid
  Variant (457)..(461): Xaa in position 457 to 461 is any amino acid
  Variant (462)..(462): Xaa in position 462 is any or no amino acid
  Variant (464)..(476): Xaa in position 464 to 476 is any amino acid
  Variant (478)..(492): Xaa in position 478 to 492 is any amino acid
  Variant (493)..(493): Xaa in position 493 is any or no amino acid
  Variant (495)..(495): Xaa in position 495 is any amino acid
  Variant (497)..(498): Xaa in position 497 to 498 is any amino acid
  Variant (500)..(504): Xaa in position 500 to 504 is any amino acid
  Variant (506)..(512): Xaa in position 506 to 512 is any amino acid
  Variant (513)..(524): Xaa in position 513 to 524 is any or no amino acid
  Variant (526)..(538): Xaa in position 526 to 538 is any amino acid
  Variant (539)..(540): Xaa in position 539 to 540 is any or no amino acid
  Variant (542)..(549): Xaa in position 542 to 549 is any amino acid
  Variant (551)..(554): Xaa in position 551 to 554 is any amino acid
  Variant (555)..(555): Xaa in position 555 is any or no amino acid
  Variant (557)..(582): Xaa in position 557 to 582 is any amino acid
  Variant (583)..(586): Xaa in position 583 to 586 is any or no amino acid
  Variant (588)..(589): Xaa in position 588 to 589 is any amino acid
  Variant (591)..(591): Xaa in position 591 is any amino acid
  Variant (593)..(597): Xaa in position 593 to 597 is any amino acid
  Variant (599)..(600): Xaa in position 599 to 600 is any amino acid
  Variant (602)..(607): Xaa in position 602 to 607 is any amino acid
  Variant (609)..(609): Xaa in position 609 is any amino acid
  Variant (612)..(614): Xaa in position 612 to 614 is any amino acid
  Variant (617)..(617): Xaa in position 617 is any amino acid
  Variant (619)..(625): Xaa in position 619 to 625 is any amino acid
  Variant (626)..(635): Xaa in position 626 to 635 is any or no amino acid
  Variant (637)..(651): Xaa in position 637 to 651 is any amino acid
  Variant (653)..(655): Xaa in position 653 to 655 is any amino acid
  Variant (662)..(665): Xaa in position 662 to 665 is any amino acid
  Variant (667)..(668): Xaa in position 667 to 668 is any amino acid
  Variant (670)..(672): Xaa in position 670 to 672 is any amino acid
  Variant (675)..(680): Xaa in position 675 to 680 is any amino acid
  Variant (683)..(683): Xaa in position 683 is any amino acid
  Variant (686)..(686): Xaa in position 686 is any amino acid
  Variant (689)..(690): Xaa in position 689 to 690 is any amino acid
  Variant (692)..(700): Xaa in position 692 to 700 is any amino acid
  Variant (702)..(706): Xaa in position 702 to 706 is any amino acid
  Variant (708)..(710): Xaa in position 708 to 710 is any amino acid
  Variant (712)..(712): Xaa in position 712 is any amino acid
  Variant (719)..(719): Xaa in position 719 is any amino acid
  Variant (724)..(724): Xaa in position 724 is any amino acid
  Variant (727)..(727): Xaa in position 727 is any amino acid
  Variant (730)..(731): Xaa in position 730 to 731 is any amino acid
  Variant (737)..(737): Xaa in position 737 is any amino acid
  Variant (739)..(741): Xaa in position 739 to 741 is any amino acid
  Variant (743)..(752): Xaa in position 743 to 752 is any amino acid
  Variant (754)..(762): Xaa in position 754 to 762 is any amino acid
  Variant (763)..(766): Xaa in position 763 to 766 is any or no amino acid
  Variant (768)..(774): Xaa in position 768 to 774 is any amino acid
  Variant (776)..(784): Xaa in position 776 to 784 is any amino acid
  Variant (786)..(788): Xaa in position 786 to 788 is any amino acid
  Variant (790)..(790): Xaa in position 790 is any amino acid
  Variant (796)..(804): Xaa in position 796 to 804 is any amino acid
  Variant (805)..(811): Xaa in position 805 to 811 is any or no amino acid
  Variant (813)..(821): Xaa in position 813 to 821 is any amino acid
  Variant (823)..(830): Xaa in position 823 to 830 is any amino acid
  Variant (832)..(839): Xaa in position 832 to 839 is any amino acid
  Variant (841)..(843): Xaa in position 841 to 843 is any amino acid
  Variant (844)..(844): Xaa in position 844 is any or no amino acid
  Variant (847)..(848): Xaa in position 847 to 848 is any amino acid
  Variant (851)..(851): Xaa in position 851 is any amino acid
  Variant (855)..(856): Xaa in position 855 to 856 is any amino acid
  Variant (860)..(860): Xaa in position 860 is any amino acid
  Variant (862)..(864): Xaa in position 862 to 864 is any amino acid
  Variant (866)..(867): Xaa in position 866 to 867 is any amino acid
KFGGXXXXXXXXXXXVAXXXXXXXXXXXXXXXVXSAXXXXXXXXXXXTXXXXXXXXXXXXXXXXXXXXXXXXXXXXXXXXXXXXXXXXXXXXXXXXXXXXXXXXXXXXXLXXXXXXXXXXXXXXXXXXXXGEXXSXXXXXXXXXXXXXXXXXXDXXXXLXXXXXXXXXXXXXXXXXXXXXXXXXXXXXXXXXXXXXXGFXXXXXXXXXXXXXXXXLXRXGSDXSAXXXXXXXXAXXXXIWTDVXGVXXXDPRXVXXAXXLXXXSXXEAXEXXXXGAXVLHPXTXXPXXXXXIXXXXXNXXXXXXXGTXIXXXXXXXXXXXXXXXXXXKXXXXXXXXXXXXXXXXXXXXXXXXXXXXXXXXXXXXXXXXXXXQXSXXXXXXXXXXXXXXXXXXXXLXXXXXXXXXXXXXXXXXXXXXXXXXXXVGXXXXXXXXXXXXXFXXLXXXXXXXXAXXQGXSXXXXXXVXXXXXXXXXXXXXHXXXXXXXXXXXXXXXXGXGXXGXXXXXQXXXXXXXXXXXXXXXXXXXLXXXXXXXXXXXXXXXSXXXXXXXXGXXXXXWXXXXXXXXXXXXXXXXXXXXXXXXXXXXXXVXXDXTXXXXXAXXYXXXXXXGXHVXXXNKXAXXXXXXXXXXXXXXXXXYXXXXXXXXXXXXXXXYXXXVGAGLPXXXXLXXLXXXGDXXXXXXGIXSGXLSXXFXXXXXXXXXSXXXXXAXXXGXTEPDPRXDLSGXDVXRKXXILAREXGXXXEXXXXXXXXXXPXXXXXXXXXXXXXFXXXXXXXDXXXXXXXXXAXXXGXVLRYVXXXXXXXXXXXXXXXXVXXXXXXXXXPXXXXXXXXNXXXXXXXXYXXXXPLXXRGXGAGXXVTAXGXXXDXXR

SEQ ID NO: 804 - protein, 60 aa, Artificial sequence
  protein pattern
  Variant (2)..(3): Xaa in position 2 to 3 is any amino acid
  Variant (6)..(6): Xaa in position 6 is Ala or Asp
  Variant (9)..(9): Xaa in position 9 is any amino acid
  Variant (10)..(10): Xaa in position 10 is Ala, Asn, Ser or Thr
  Variant (11)..(11): Xaa in position 11 is Ala, Cys, Ser or Thr
  Variant (15)..(15): Xaa in position 15 is any amino acid
  Variant (16)..(16): Xaa in position 16 is Ile or Val
  Variant (17)..(18): Xaa in position 17 to 18 is any amino acid
  Variant (20)..(21): Xaa in position 20 to 21 is any amino acid
  Variant (22)..(22): Xaa in position 22 is Ile, Leu or Val
  Variant (23)..(24): Xaa in position 23 to 24 is any amino acid
  Variant (25)..(25): Xaa in position 25 is Ile, Leu or Met
  Variant (26)..(28): Xaa in position 26 to 28 is any amino acid
  Variant (31)..(31): Xaa in position 31 is any amino acid
  Variant (33)..(33): Xaa in position 33 is Leu or Met
  Variant (34)..(34): Xaa in position 34 is Ala or Ser
  Variant (35)..(35): Xaa in position 35 is any amino acid
  Variant (36)..(36): Xaa in position 36 is Phe or Leu
  Variant (37)..(37): Xaa in position 37 is Ala or Gly
  Variant (39)..(39): Xaa in position 39 is any amino acid
  Variant (41)..(41): Xaa in position 41 is Ile, Leu or Val
  Variant (43)..(43): Xaa in position 43 is Ala, Pro, Ser or Thr
  Variant (44)..(44): Xaa in position 44 is any amino acid
  Variant (46)..(47): Xaa in position 46 to 47 is any amino acid
  Variant (49)..(54): Xaa in position 49 to 54 is any amino acid
  Variant (55)..(55): Xaa in position 55 is Asp, Glu or Pro
  Variant (56)..(57): Xaa in position 56 to 57 is any amino acid
  Variant (58)..(58): Xaa in position 58 is Ile or Leu
  Variant (59)..(59): Xaa in position 59 is Lys or Arg
  Variant (60)..(60): Xaa in position 60 is Cys or Asn
IXXDVXGVXXXDPRXXXXAXXXXXXXXXEAXEXXXXXAXVXHXXTXXPXXXXXXXXXXXX

SEQ ID NO: 805 - protein, 58 aa, Artificial sequence
  protein pattern
  Variant (3)..(3): Xaa in position 3 is any amino acid
  Variant (6)..(6): Xaa in position 6 is Ser or Thr
  Variant (8)..(8): Xaa in position 8 is Ala or Ser
  Variant (9)..(9): Xaa in position 9 is Phe, Trp or Tyr
  Variant (10)..(10): Xaa in position 10 is Ile, Leu or Met
  Variant (12)..(15): Xaa in position 12 to 15 is any amino acid
  Variant (16)..(16): Xaa in position 16 is Asp, Glu, Gly or Ser
  Variant (17)..(17): Xaa in position 17 is Ala, Asp, Glu, Gly, Asn, Gln, Ser or Thr
  Variant (18)..(19): Xaa in position 18 to 19 is any amino acid
  Variant (20)..(20): Xaa in position 20 is Phe or Leu
  Variant (21)..(21): Xaa in position 21 is Ala, Asn, Ser or Thr
  Variant (22)..(22): Xaa in position 22 is Ala, Asp, Glu, Asn or Gln
  Variant (23)..(23): Xaa in position 23 is Ala, Ile, Leu or Val
  Variant (24)..(26): Xaa in position 24 to 26 is any amino acid
  Variant (28)..(30): Xaa in position 28 to 30 is any amino acid
  Variant (31)..(31): Xaa in position 31 is Cys or Gly
  Variant (32)..(32): Xaa in position 32 is any amino acid
  Variant (36)..(36): Xaa in position 36 is Asp or Asn
  Variant (38)..(39): Xaa in position 38 to 39 is any amino acid
  Variant (42)..(42): Xaa in position 42 is Asp, Asn or Ser
  Variant (44)..(44): Xaa in position 44 is any amino acid
  Variant (47)..(47): Xaa in position 47 is any amino acid
  Variant (50)..(50): Xaa in position 50 is Leu or Val
  Variant (51)..(51): Xaa in position 51 is any amino acid
  Variant (52)..(52): Xaa in position 52 is Ile or Val
  Variant (53)..(53): Xaa in position 53 is Ile or Leu
  Variant (54)..(54): Xaa in position 54 is Ala, Ser or Thr
  Variant (56)..(56): Xaa in position 56 is Asp or Glu
  Variant (57)..(57): Xaa in position 57 is any amino acid
GIXSGXLXXXFXXXXXXXXXXXXXXXAXXXXXTEPXPXXDLXGXDVXRKXXXXXRXXG

SEQ ID NO: 806 - protein, 30 aa, Artificial sequence
  protein pattern
  Variant (2)..(2): Xaa in position 2 is any amino acid
  Variant (3)..(4): Xaa in position 3 to 4 is any or no amino acid
  Variant (6)..(7): Xaa in position 6 to 7 is any or no amino acid
  Variant (9)..(10): Xaa in position 9 to 10 is Ile, Leu or Val
  Variant (11)..(11): Xaa in position 11 is any amino acid
  Variant (13)..(13): Xaa in position 13 is any amino acid
  Variant (17)..(17): Xaa in position 17 is any amino acid
  Variant (18)..(18): Xaa in position 18 is Ala, Asp, Glu, Asn or Gln
  Variant (22)..(22): Xaa in position 22 is Ala, Gly or Ser
  Variant (23)..(23): Xaa in position 23 is Ala or Gly
  Variant (24)..(24): Xaa in position 24 is Ile, Leu or Val
  Variant (25)..(25): Xaa in position 25 is any amino acid
  Variant (26)..(26): Xaa in position 26 is Ala, Cys, Gly or Ser
  Variant (28)..(28): Xaa in position 28 is Ile, Leu or Val
  Variant (29)..(29): Xaa in position 29 is any amino acid
  Variant (30)..(30): Xaa in position 30 is Gln, Arg or Ser
YXXXPXXLXXXGXGAGXXVTAXXXXXDXXX

SEQ ID NO: 807 - protein, 28 aa, Artificial sequence
  protein pattern
  Variant (2)..(2): Xaa in position 2 is any amino acid
  Variant (3)..(5): Xaa in position 3 to 5 is any or no amino acid
  Variant (7)..(7): Xaa in position 7 is any or no amino acid
  Variant (14)..(14): Xaa in position 14 is Ile or Val
  Variant (15)..(16): Xaa in position 15 to 16 is any amino acid
  Variant (17)..(17): Xaa in position 17 is Asn or Thr
  Variant (18)..(18): Xaa in position 18 is Leu or Val
  Variant (19)..(19): Xaa in position 19 is any amino acid
  Variant (20)..(20): Xaa in position 20 is Asp, Gly, Asn or Ser
  Variant (22)..(23): Xaa in position 22 to 23 is any amino acid
  Variant (24)..(24): Xaa in position 24 is Ala, Ser or Thr
  Variant (27)..(27): Xaa in position 27 is any amino acid
  Variant (28)..(28): Xaa in position 28 is Ile, Leu or Val
YXXXXTXVGAGLPXXXXXXXLXXXGDXX

SEQ ID NO: 808 - protein, 17 aa, Artificial sequence
  protein pattern
  Variant (2)..(2): Xaa in position 2 is any amino acid
  Variant (3)..(5): Xaa in position 3 to 5 is any or no amino acid
  Variant (7)..(7): Xaa in position 7 is Asp or Asn
  Variant (11)..(11): Xaa in position 11 is any amino acid
  Variant (14)..(14): Xaa in position 14 is Ala, Ser or Thr
  Variant (15)..(15): Xaa in position 15 is any amino acid
  Variant (16)..(16): Xaa in position 16 is Phe, Ile, Leu, Met or Val
  Variant (17)..(17): Xaa in position 17 is Ala, Gly or Ser
LXXXXRXGSDXSAXXXX

SEQ ID NO: 809 - protein, 17 aa, Artificial sequence
  protein pattern
  Variant (3)..(3): Xaa in position 3 is Ser or Thr
  Variant (4)..(4): Xaa in position 4 is Cys or Ser
  Variant (5)..(5): Xaa in position 5 is Ile, Leu, Met or Val
  Variant (6)..(6): Xaa in position 6 is Ala, Glu, Gly or Ser
  Variant (7)..(7): Xaa in position 7 is Asp, Asn, Ser or Thr
  Variant (8)..(13): Xaa in position 8 to 13 is any amino acid
  Variant (15)..(16): Xaa in position 15 to 16 is any amino acid
  Variant (17)..(17): Xaa in position 17 is Ile, Leu or Val
GGXXXXXXXXXXXVXXX

SEQ ID NO: 810 - protein, 12 aa, Artificial sequence
  protein pattern
  Variant (2)..(2): Xaa in position 2 is Leu or Val
  Variant (5)..(5): Xaa in position 5 is any amino acid
  Variant (6)..(6): Xaa in position 6 is Ala, Gly or Ser
  Variant (7)..(8): Xaa in position 7 to 8 is any amino acid
  Variant (10)..(10): Xaa in position 10 is Asp or Asn
  Variant (11)..(11): Xaa in position 11 is any amino acid
  Variant (12)..(12): Xaa in position 12 is Leu or Met
VXSAXXXXTXXX

SEQ ID NO: 811 - protein, 14 aa, Artificial sequence
  protein pattern
  Variant (2)..(4): Xaa in position 2 to 4 is any amino acid
  Variant (5)..(5): Xaa in position 5 is Asp, Glu, Gly or Asn
  Variant (6)..(6): Xaa in position 6 is any amino acid
  Variant (11)..(11): Xaa in position 11 is Ile or Val
  Variant (12)..(12): Xaa in position 12 is Ala or Gly
  Variant (13)..(13): Xaa in position 13 is any amino acid
  Variant (14)..(14): Xaa in position 14 is Phe, Ile, Leu or Val
AXXXXXVLRYXXXX

SEQ ID NO: 812 - DNA, 1134 bp, Arabidopsis thaliana
  CDS (1)..(1134)
atggttgctgaagctgagatcagggttcttgacgttaagtgccatatctccgctcctaaagatcagaagaattttcagatcgacgaagttcgtgtttctgagtctgtccgtgctgagatttcgggttccgctgaaacgcctcgattcggatcgggcatgagttgtgtaactactaccattggagaatccgccagtgactttatcccaactatacgttcagggagctttgctgacattcgaagtcgagaaaccatggaggatgaacacatttgcatagatgatttgtcagctcaccttggatcctacaacttctcggtaccaagtgctttttatggtgtgtttgatggtcatggtgggcctgaggcagcaattttcatgaaggagaacttgactagattgtttttccaagatgctgtgtttccagagatgccctccattgtggacgcgtttttcttagaagaactggagaattctcaccgaaaggcttttgctttggctgatcttgccatggctgatgaaaccattgtcagtggttcatgcgggacaaccgctttgaccgctctcataatcggacgacatcttcttgttgctaatgctggagattgtcgtgcagtgctatgtaggagaggagtggctgttgatatgtctttcgatcacagatcaacatatgagccagaaagaaggcggattgaagatttaggaggatactttgaggatggatacctcaacggagtcctagctgtcacgcgtgccattggagattgggaactgaagaatcctttcactgactcctcttcaccactgatttcagacccagagattggacagatcattctaacagaggacgacgagttcttgattttggcatgtgatggtatatgggatgtgttgtcaagccagaatgcagtgagtaatgtaaggcaaggattgaggaggcatggtgacccgagacaatgtgcgatggaactaggaaaagaagcagcgaggcttcagtcatcagataatatgacggttatagtgatctgcttctcctcagttccgtcttcacctaaacaaccgcaaagaagaagattaagattctgtgtttctgacgaagcccgagctcggttacaagcaatgcttgcaggcgagtga

SEQ ID NO: 813 - protein, 377 aa, Arabidopsis thaliana
MVAEAEIRVLDVKCHISAPKDQKNFQIDEVRVSESVRAEISGSAETPRFGSGMSCVTTTIGESASDFIPTIRSGSFADIRSRETMEDEHICIDDLSAHLGSYNFSVPSAFYGVFDGHGGPEAAIFMKENLTRLFFQDAVFPEMPSIVDAFFLEELENSHRKAFALADLAMADETIVSGSCGTTALTALIIGRHLLVANAGDCRAVLCRRGVAVDMSFDHRSTYEPERRRIEDLGGYFEDGYLNGVLAVTRAIGDWELKNPFTDSSSPLISDPEIGQIILTEDDEFLILACDGIWDVLSSQNAVSNVRQGLRRHGDPRQCAMELGKEAARLQSSDNMTVIVICFSSVPSSPKQPQRRRLRFCVSDEARARLQAMLAGE

SEQ ID NO: 814 - DNA, 1582 bp, Triticum aestivum
  CDS (201)..(1349)
atttttcttcttccccccctgcccagatcaagaaaccgtgtcctagaatccaccgagatcgctggaaaggcgacatcctccggagactcttctcgctcccctcgtcggcacggatcgagcggttgttttagttggaagatttctcctttcttttccttctggtcgctggccggagacacggcgtgtcggggcgcgcggagatggtggccgaggcggaggtgatgcatcagcagccggcgcccgttctggaggtgcagtaccgccggtgcgtcgccaagggggccgggatgtcggcggtcgccgtgccggaggtggaggtggaggtcgccgtcgagctgcctcgcatgggattggcgaacaccgatggtgcgacgagtgtgtccgctgagacactacagtttgtacccaatattcggtctggaagctttgctgatatcggacctaggaggtacatggaagatgaacacatccggatagatgatctttcagctcatcttggctcgctgttggtgtgcccactacctagtgccttctatggggtctttgatggccatgggggtccggatgctgcagcctacatgaaaaggcatgccatgaggttcctgtttgaggatagagagttcccacaagcattgcaagtggatgatgtattccttcagtccgtcgaggaatgcattcgcagcgcgttcttgcaagccgatcttgctctggcagataatttagacatcagccgctcctccggaactaccgcactcgcagcattagtatttgggaggcaactgttggttgcgaacaccggtgactgccgagcggtcctttgccggagaggcatagcgatggagatgtctcgggaccacagggcaaactacgccgaggagtgcgagagggtggccgcctccggcggatacatcgaggacgggtacctcaacggggtgctctcgttgacgcgtgccctaggcgactgggacatgaaggtgcccgactgctccacgtcgcccctcatcgcggagcccgagttccagcaggcgacgctgagcgaggacgacgagttcctcatcatgggctgcgacggcatctgggacgtgatgacgagccagcacgcggtgagcgtggtccggcggggcctgcggcagcacgacgaccccgagcggtgcgcgcgggagctcgtcatggaggcgaagcggctcgagacggccgacaacctgaccgtcatcgtggtgtgcttcgggtcggagctcgggtcaccgccgccgccccccgctgccgcggcggcgaggccgaggagctgcaagggcctgtcggcggaggccctgtgcaacctgaggagctggctggagactgaccgctagctctagcttgagatgcctgctctgctcctgctcccctacctagtgctgctggtcggttcgttcccacgctgtaaatatgctgacatcggtcgaggaatcgtaactgccacttcccttttagtccctaccatttttttcaggcggtagcccggcagttttgtaggggcattctcccattgtttcctgtgcttttcacaaaaaaaaaaaaaaaaaagcttatcgataccgtcgac

SEQ ID NO: 815 - protein, 382 aa, Triticum aestivum
MVAEAEVMHQQPAPVLEVQYRRCVAKGAGMSAVAVPEVEVEVAVELPRMGLANTDGATSVSAETLQFVPNIRSGSFADIGPRRYMEDEHIRIDDLSAHLGSLLVCPLPSAFYGVFDGHGGPDAAAYMKRHAMRFLFEDREFPQALQVDDVFLQSVEECIRSAFLQADLALADNLDISRSSGTTALAALVFGRQLLVANTGDCRAVLCRRGIAMEMSRDHRANYAEECERVAASGGYIEDGYLNGVLSLTRALGDWDMKVPDCSTSPLIAEPEFQQATLSEDDEFLIMGCDGIWDVMTSQHAVSVVRRGLRQHDDPERCARELVMEAKRLETADNLTVIVVCFGSELGSPPPPPAAAAARPRSCKGLSAEALCNLRSWLETDR

SEQ ID NO: 816 - DNA, 1607 bp, Zea mays subsp. mays
  CDS (274)..(1491)
atttctcctctcctctcccctcgctagttcgtcgcgtcctcctcagatcaacaaaccgtgtcctgctgctgcctctggaaaccaccgggggatcgccccgcccttttcttcccgcaccccagatcctccgtcccaaaacggcagcttccggaggtctcccgtctccctgctccttccggcgcgacgggtggcccggctcgcggatccggcggtcttcggtcgacggcgaggcggcgctcgtcttggatcgggagtggttgctgaggcgcggagatggtggccgaggcggaagtcatgcatcagtcccccgttccggtgctggaggtgcagtaccaccggcgcgcgacgaccaagggggttgacgacgtcgtcgggatgtccgcgcccgcccccgcggaggttggggttggggttggggttgaggtcgaggtcgaggtcgaggtcgccgtggaggtgcctcgcatggggttggagcagcctgatgtcgcaccaagtttatccacggacatgatacagcagtttgtgcccaacatccgttctggtagcttcgccgacattgggcctcggaggtatatggaggacgagcacatccgaatagatgatctttccgcccatctcggctcgatgttggtctgccctctgcctagcgccttctacggggtctttgacggccatggcggcccggacgccgcagcctacatgaagaggcatgcgatgaggttcttgtttgaggaaagcgagttcccacaggcgtcgcaggtggatgaggtgtacctcgagtccgtggagagctgtgtccgcagagccttcctgcaggcggaccttgccctggctgatgatctggacatcagccggtcctctggaaccacggcgctcactgcattagtgtttggaaggcaactggtggtcgcgaacacgggggactgccgcgcggtgttgtgccggaaaggagtggcgatggagatgtcccgcgaccaccgcgcgaaccacgtggaggagcgcgagagggtggccgcgtcgggcgggtacatcgaggacgggtacctgaacggggtgctgtcggtgacgcgggcgctgggcgactgggacatgaaggcgcccggcgcgtcggcgtcggcggcgctgatcgcggagcccgagttccggcgggcgacgctgggtgaggacgacgagttcctcgtcatggggtgcgacgggatctgggacgtgatgacgagccagcacgcggtgagcctggtgcggcgcggcctgcggcagcacgacgaccccgcgcgctgcgcccgggagctggtgatggaggccaagcggctggagacggccgacaacctgacggtcgtcgtggtgtgcttcgcgccggagatggggtcgccgtttacaccgcagcaacagcaggaggaggagctgcccgcgaggcccaggagctgcaagaagggcctgtcgacggaggcgctgtgcagcctgaggagctggctggatacggaccaccggtagagggaggaagagctggggggtgtgtaaatactggagtattatgctgacagcaacactggttgattatgagcgctgggccatctgttgaggattttacgtaggctggttcagcagcc

SEQ ID NO: 817 - protein, 405 aa, Zea mays subsp. mays
MVAEAEVMHQSPVPVLEVQYHRRATTKGVDDVVGMSAPAPAEVGVGVGVEVEVEVEVAVEVPRMGLEQPDVAPSLSTDMIQQFVPNIRSGSFADIGPRRYMEDEHIRIDDLSAHLGSMLVCPLPSAFYGVFDGHGGPDAAAYMKRHAMRFLFEESEFPQASQVDEVYLESVESCVRRAFLQADLALADDLDISRSSGTTALTALVFGRQLVVANTGDCRAVLCRKGVAMEMSRDHRANHVEERERVAASGGYIEDGYLNGVLSVTRALGDWDMKAPGASASAALIAEPEFRRATLGEDDEFLVMGCDGIWDVMTSQHAVSLVRRGLRQHDDPARCARELVMEAKRLETADNLTVVVVCFAPEMGSPFTPQQQQEEELPARPRSCKKGLSTEALCSLRSWLDTDHR

SEQ ID NO: 818 - DNA, 1812 bp, Glycine max
  CDS (130)..(1272)
taattttgtcactgtaattcttcttcttcaaagaaaaccccaatttcgaacgcttcaaattcaattcaggaaaccctagtgattaatttcgttgcgaaacggcgattcaagattatcgtgagccagaagatggtagcggaagcggaaattatctgtcagcagaacattccgatgttggacgtgaagtatcatatttgcgtggctcaagaacacaacgtgaaggttgaggtttcacccaaatcaccttcacctcctgttccgatctttggccaagcagtgagttgctctgagatcattaaagattccattttggaggcccctgcgatgaattttttcccaaatgtgcgttctggtagctatgccgagattggaccgcgcgtttctatggatgatgaacacatttgtattgatgatctgggagctcatcttggatttgtgttcaagtgtccgataccgagtgcattttatgcagtttttgatggccatggggggcctgatgcagcagcctttgttaagaggaatgctatgaggttgttttttgaagatgcagacatgctgcagtcgtatgatgctgatgcgttttttctacagaaattggaggattcccatcggagagcttttctacgggcagatcttgccttggctgatgaacaaactgttggtagttcttgtgggactactgcattgactgcccttgtgcttggaaggcatttgcttgttgctaatgctggtgactgccgagcagttctttgccggagaggtgtggctgttgagatgtctaatgatcacaggccaagttatctaccagagaagaggagggtggaggagttaggtgggttcattgatgatggatatctcaatggttatctttcagtaactcgagcccttggggattgggacttgaaatttccacttggtgctgcatcccctcttattgctgagccagatgttcggctggttacattgactgagggtgatgagttcttgatcattgggtgtgatgggatttgggatgtaatgtctagccaagttgcagttagtcttgttcgccgaggattaagaaggcatgatgacccacagcaatgtgccggagagctagtcaaggaagcattgcgcctaaatacatcagataatctcactgtaattgttgtatgcttgtcgcccattgaaagcattgttgaatcatgtccaccccaaaggagaagattcaaagcttgcagtttgtctgaagaggcccgtaatagattgaagagcttgattgagggaaattgattgtaaatgcaattcttgtgattgacaaatgttcctttcttaaaaaattaatctgttttttaggctgtttcagagagagctaaaaagcagccagcagttttgtagggatagaagggatatttggttagggggtagaaggtgtttggatttatttaattgggaggtgttttttctgggttatgtttggtacatgtagagacaattgctagctaattttggcggattagattcggtccccaccatggccgttcccattttacattgttgctgcttctgtaaataaaaatgaggggttgtctgagacataggatagccgaatgcatggttgagtttcttgtttgttgttcttggatcctccatgttatatggatggatatgcttggcccatcttatcaactggtagggctatggcctatgtcatgggacaacatcatcctttggcatcacacaaactaaatcgcttatcttatgtgatgaatttttctccgttatcctttatttattaataaaaaggagtgttaataaaaaaaaaaaaaaaaa

SEQ ID NO: 819 - protein, 380 aa, Glycine max
MVAEAEIICQQNIPMLDVKYHICVAQEHNVKVEVSPKSPSPPVPIFGQAVSCSEIIKDSILEAPAMNFFPNVRSGSYAEIGPRVSMDDEHICIDDLGAHLGFVFKCPIPSAFYAVFDGHGGPDAAAFVKRNAMRLFFEDADMLQSYDADAFFLQKLEDSHRRAFLRADLALADEQTVGSSCGTTALTALVLGRHLLVANAGDCRAVLCRRGVAVEMSNDHRPSYLPEKRRVEELGGFIDDGYLNGYLSVTRALGDWDLKFPLGAASPLIAEPDVRLVTLTEGDEFLIIGCDGIWDVMSSQVAVSLVRRGLRRHDDPQQCAGELVKEALRLNTSDNLTVIVVCLSPIESIVESCPPQRRRFKACSLSEEARNRLKSLIEGN

SEQ ID NO: 820 - DNA, 1143 bp, Oryza sativa (japonica cultivar-group)
  CDS (1)..(1143)
atggtggccggggcggaggtgatgcatcaggtcgtgccgctgctggaggcgtcgttccaccgccggtgctccgtgaagggggtcgacgaggtgtcgccgccggtggaggagatgtcgccggaggctgcctcggaagccgccatcgaggtgcctgaactgatggttaaggcacccgtggaatcactacagttttcccccaacattcgatctggtagctttgccgatattggacctaggcggtacatggaagatgaacatatcagaattgatgatctttctggtcatcttggctcactgttgatgtgccctgcacctaatgccttctatggggtctttgatggccatgggggtccagatgcagcagcctacatgaaaaggcatgctataaggctgttctttgaggattctgagttcccacaggcattagaagaagatgaatcattttatgaatcagttgagaaatctatccacaatgcattcttgagcgcagaccttgctctcgctgacgatttggctatcagccgatcatcaggaacaacagctcttgctgctttgatatttggaaggcagctgttggtcgcgaatgctggggactgccgcgcggtcctgtgtcggaaaggtgtagctgtggagatgtctcgtgatcacaggccaacatatgatgcagagcatgaaaggattaccgagtgtgggggatacattgaggatggctacctcaatggagtactatctgtgaccagggcattgggggattgggacatgaaaatgcctcaaggctcgcggtcgcctctcatcgccgagccagagttccagcaaaccacactcaccgaagacgacgagttcctcatcataggctgcgatgggatatgggacgtcatgagcagccagcacgcggtgaccatagtccgcaaggggctccgacgacacgatgaccccgagaggtgcgcgagggagcttgccatggaggcgaagaggctccagacctttgacaacctcacggtgatagtcatctgctttggatctgagctcggtggtggttcaccgtcttcggagcaggcgccgatcaggagggttagatgttgcaagagcctgtcttcagaggccctttgcaacctgaagaaatggctggaacctaatgagtag

SEQ ID NO: 821 - protein, 380 aa, Oryza sativa (japonica cultivar-group)
MVAGAEVMHQVVPLLEASFHRRCSVKGVDEVSPPVEEMSPEAASEAAIEVPELMVKAPVESLQFSPNIRSGSFADIGPRRYMEDEHIRIDDLSGHLGSLLMCPAPNAFYGVFDGHGGPDAAAYMKRHAIRLFFEDSEFPQALEEDESFYESVEKSIHNAFLSADLALADDLAISRSSGTTALAALIFGRQLLVANAGDCRAVLCRKGVAVEMSRDHRPTYDAEHERITECGGYIEDGYLNGVLSVTRALGDWDMKMPQGSRSPLIAEPEFQQTTLTEDDEFLIIGCDGIWDVMSSQHAVTIVRKGLRRHDDPERCARELAMEAKRLQTFDNLTVIVICFGSELGGGSPSSEQAPIRRVRCCKSLSSEALCNLKKWLEPNE

SEQ ID NO: 822 - DNA, 1047 bp, Oryza sativa (japonica cultivar-group)
  CDS (1)..(1047)
atgcatgggaggccgtcgaggccattagcttcctcctcgtcgtcgtcgtcgtcccgcgtcttctccttcttcttggcgccgcgggttttcttgttcttggtggtggtggtggtcgtcgtcttcttgccgggtcggtcgtcttgctggtggctggagggcacggaggagttggaggaggagatggggtttgccggggactgctcgccggtcagcggtggcgggctcagtgaaaacggcaagttcagttatgggtatgcaagtgctcctgggaaaagggcttcaatggaggatttctacgagacgagaatcgatggtgttgatggagagaccattggattatttggcgtattcgacggccatggcggagctcgagcggctgaatatgtcaagcagcaccttttcagcaatttaattaagcatccaaagttcatcagtgatatcaagtccgctatcgctgaaacgtacaaccatacagattcagaatttctgaaagccgaaagtagtcacactagggatgctggctcaactgcctcaacagctattcttgtaggcgatcgcttgctggttgctaatgttggagattctagagcagttgtttgtagaggcggggatgcaattgcagtttcaagggatcacaaacccgaccagtcagatgagagacaaagaattgaggacgctgggggcttcgtgatgtgggctgggacgtggcgtgttggtggtgttcttgctgtttctcgagcatttggtgataagctattgaagcagtatgtagttgctgatccagagatcaaggaggagattgtcgatagctcccttgagttcctcatccttgctagcgatggactttgggatgttgtaagtaacaaggaagctgttgacatggtgaggcctattcaggatcccgaacaggcagcgaagaggcttctccaggaggcgtaccaaaggggtagcgccgataacatcaccgttgttattgtccgctttttggagggaacaacgactggtggtggaccaagtagggaggccgccagcgaccaaaactcatag

SEQ ID NO: 823 - protein, 348 aa, Oryza sativa (japonica cultivar-group)
MHGRPSRPLASSSSSSSSRVFSFFLAPRVFLFLVVVVVVVFLPGRSSCWWLEGTEELEEEMGFAGDCSPVSGGGLSENGKFSYGYASAPGKRASMEDFYETRIDGVDGETIGLFGVFDGHGGARAAEYVKQHLFSNLIKHPKFISDIKSAIAETYNHTDSEFLKAESSHTRDAGSTASTAILVGDRLLVANVGDSRAVVCRGGDAIAVSRDHKPDQSDERQRIEDAGGFVMWAGTWRVGGVLAVSRAFGDKLLKQYVVADPEIKEEIVDSSLEFLILASDGLWDVVSNKEAVDMVRPIQDPEQAAKRLLQEAYQRGSADNITVVIVRFLEGTTTGGGPSREAASDQNS

SEQ ID NO: 824 - DNA, 1065 bp, Oryza sativa (japonica cultivar-group)
  CDS (1)..(1065)
atgtgcgtggaggaactcgaaggcgcagagaggctcgattttggtggggttgcggagctcgagacaacaccggcagacttcgagatggagaaagtttgtgagaacacagtatctcttgatttcaagcaggctaggtcgagcagttttgtcccagttatccgatcaggggactggtcggatattggaggtcgcgattacatggaagatgctcatgtctgcatctcagatctagctaataattttggtcataattcagtggatgatgagattatttccttttatggggtctttgatgggcatggtggaaaagatgcagctcattatgtgcgtgataacttgccacgggttatcgtggaagatgctgattttcctcttgagctagagaaagttgtcaggaggtcatttgtgcaaactgatagtcaatttgcagagaggtgctctcatcagaatgcactttcttctggaacgacagcgcttacagcaatgatttttggaaggtctcttctggttgctaatgctggtgattgccgagcagttctttcaaggcgtggtaccgcaattgaaatgtccaaggaccacaggacttgctgcctcaacgaaagaaagcgtatagaatcacttggcggctatgttgatgatggctatttgaatggtcaattagcagtcactagagcattgggtgactggcatctcgagggtctgaaagaagtgggtgagccaggtggccccttgagcgcggaaccagagctcaagatgatcacactgacgaaggaagacgagttcttgataataggaagcgacggcatctgggacttcttctcgaaccagaatgccgtggatttcaccaggaagaggctccaagagcacaatgacttgaggttgtgctgcaagcagatcgtcgaggaggcaataaggcgaggggcctcagacaacctaacggcggtgatggtctcattccaccaggaggcccctcctcagctcagagtgaacaggacggggagggtcgagcggagcatatcggctgaagggcttcacagcctcagggtgctcctggaaggccaatga

SEQ ID NO: 825 - protein, 354 aa, Oryza sativa (japonica cultivar-group)
MCVEELEGAERLDFGGVAELETTPADFEMEKVCENTVSLDFKQARSSSFVPVIRSGDWSDIGGRDYMEDAHVCISDLANNFGHNSVDDEIISFYGVFDGHGGKDAAHYVRDNLPRVIVEDADFPLELEKVVRRSFVQTDSQFAERCSHQNALSSGTTALTAMIFGRSLLVANAGDCRAVLSRRGTAIEMSKDHRTCCLNERKRIESLGGYVDDGYLNGQLAVTRALGDWHLEGLKEVGEPGGPLSAEPELKMITLTKEDEFLIIGSDGIWDFFSNQNAVDFTRKRLQEHNDLRLCCKQIVEEAIRRGASDNLTAVMVSFHQEAPPQLRVNRTGRVERSISAEGLHSLRVLLEGQ

SEQ ID NO: 826 - DNA, 1215 bp, Oryza sativa (japonica cultivar-group)
  CDS (1)..(1215)
atggcggagatttgctgcgaggttgtggctggatcgtcgtcggaggggaagggcccggagtgcgacaccgggagccgagcggcgaggcggcggcggatggagatccggcggctcagggtggtcgcggagcgtggggcggaggaggagacctccgggaagaggcggaggcttgatggcggcgggggagaggcctcgacggacgaggaggacagggaggtggagcgcgctaggtacggctttacgtcggtgtgcggacgccggagggacatggaggactccgtctccgcctgcccggggttcctccccggccaccacttcttcggggtgttcgacggccacggctgctctcatgtggcgacgtcgtgcgggcagcggatgcacgagatcgtggtcgacgaggccggcgccgccgctgggtcggcggggttggacgaggaggcgcggtggaggggcgtcatggagaggagcttcgcgcggatggacgcggaggccgtggcctcgtcacgggggagcgtcgccccggcccccacctgccggtgcgagatgcagctgcccaagtgcgaccacgtcggctcaacggccgtcgtcgccgttctgggccctcgccacgtcgtcgtcgccaactgcggcgactcgcgcgccgtcctctgccgcggtggcgccgccatacccctctcatgcgaccataagccggaccggcccgacgagctcgaacggatccacgcggcgggagggcgcgtcatcttctgggacggcgcccgcgtctttggcatgctcgccatgtcacgagccatcggggacagctatttgaagccgtacgtgatatgcgacccggaggtgagggtgatggagaggaaggacggcgaggacgagttcctcatcctggccagcgacggcctgtgggacgtggtgagcaacgaggttgcctgcaacgtcgtgcgcgcctgcctgcggagcagcgggcggcgcgagaggaaccggtcgagcccgacgtccaacctaagcccgaggcagagcagcagcagcggcgacgaggcgcccaacgacggtgctccttccgccgccgctggctcggagagcgacgaggagagcgccgccgaggaggacaaggcgtgcgccgaggcggccgtcctgctgaccaagctggctttggcgcggcaaacctcggacaatgtcagcgtcgtcgtcgtaaatctcaggcgccggaaattgtga

SEQ ID NO: 827 - protein, 404 aa, Oryza sativa (japonica cultivar-group)
MAEICCEVVAGSSSEGKGPECDTGSRAARRRRMEIRRLRVVAERGAEEETSGKRRRLDGGGGEASTDEEDREVERARYGFTSVCGRRRDMEDSVSACPGFLPGHHFFGVFDGHGCSHVATSCGQRMHEIVVDEAGAAAGSAGLDEEARWRGVMERSFARMDAEAVASSRGSVAPAPTCRCEMQLPKCDHVGSTAVVAVLGPRHVVVANCGDSRAVLCRGGAAIPLSCDHKPDRPDELERIHAAGGRVIFWDGARVFGMLAMSRAIGDSYLKPYVICDPEVRVMERKDGEDEFLILASDGLWDVVSNEVACNVVRACLRSSGRRERNRSSPTSNLSPRQSSSSGDEAPNDGAPSAAAGSESDEESAAEEDKACAEAAVLLTKLALARQTSDNVSVVVVNLRRRKL

SEQ ID NO: 828 - DNA, 1176 bp, Oryza sativa (japonica cultivar-group)
  CDS (1)..(1176)
atgtcctgcacggtcgccatcccgagctcgccggtgttctcgccgtcgcgccgcccgctctcctgcaaggccgcgtccgcgtccgcctcgccggagtccgtatccgtcgccgcgtcctcgccggcgcaggccgcgccccccgccgggtcgccgctccgccccttcgcgctgcgcgcccacctgcgcgaggaggccacgccgtcgccccagccgtcggccgccgcggctgcggcggtctccgcccctgcggggtccgtgcttaagaggcggcgcccggcccctctcgtggttccggtgtgcggcggggcggccgctgccgccgccgccgcggcggtggccgcggtggaatcggatccgaggaacgaggtggaggaggacggcgaggagttcgcggtgtactgccggaggggaaaggggaggagaagggtggagatggaggaccggcatgtggccaaggtcgccctcggcggagaccccaaagtggccttttttggtgtattcgatggccacggcgggaagagcgcggcggagttcgtcgccgagaacatgcccaagttcatggccgaggagatgtgcaaggtggacggcggcgacagtggcgagactgaacaggcagtgaagcggtgctacctgaagacggacgaggaattcctcaagagggaggagagcgggggcgcctgctgcgtcaccgctttgctgcagaaaggtggcctcgttgtgtctaatgccggagattgccgtgccgtgctcagccgcgccgggaaggcagaggcgctcacctctgatcaccgggcctcgcgcgaggatgagagggaaagaattgagaatctgggtggattcgtggtgaattaccgaggaacatggcgagttcagggatccttagcagtgtcaagaggcatcggtgatgcacacctcaagcagtgggtggtgtctgatccagacaccacaactctgggtgttgattcgcagtgcgaattcttgattcttgcctctgatggtttgtgggacaaggtggagaaccaggaggcagttgacattgccaggccgctttacatcagcaacgacaaagcttctcgcatgactgcttgcaggaggctcgtcgaaactgcggttactaggggctcgactgacgatatcagcattgtgatcatacagctgcagcaattctcaagataa

SEQ ID NO: 829 - protein, 391 aa, Oryza sativa (japonica cultivar-group)
MSCTVAIPSSPVFSPSRRPLSCKAASASASPESVSVAASSPAQAAPPAGSPLRPFALRAHLREEATPSPQPSAAAAAAVSAPAGSVLKRRRPAPLVVPVCGGAAAAAAAAAVAAVESDPRNEVEEDGEEFAVYCRRGKGRRRVEMEDRHVAKVALGGDPKVAFFGVFDGHGGKSAAEFVAENMPKFMAEEMCKVDGGDSGETEQAVKRCYLKTDEEFLKREESGGACCVTALLQKGGLVVSNAGDCRAVLSRAGKAEALTSDHRASREDERERIENLGGFVVNYRGTWRVQGSLAVSRGIGDAHLKQWVVSDPDTTTLGVDSQCEFLILASDGLWDKVENQEAVDIARPLYISNDKASRMTACRRLVETAVTRGSTDDISIVIIQLQQFSR

SEQ ID NO: 830 - DNA, 1170 bp, Oryza sativa (japonica cultivar-group)
  CDS (1)..(1170)
atggtggcggaggcggaggtgatgcatcagcccgtgccggtgttggaggtgccgtaccaccggtgcgtcgccaagggtgtcgaggaggtggccgccgcggcggcggtcgcgccgccgccggtggtcgaggtcgaggttgccgtccaggtgcctcacatggggttggagagtgctgctggtgcaccgagcatatcagttgatgcactacagtttgttcccagtattcgatctggtagctttgctgatattggacctaggaggtacatggaagatgagcacatccggatagatgatctctctgcccatcttggatcgctcttggtgtgtccgttgcctagtgccttctatggggtcttcgatggccatggaggcctggatgctgcagcctacatgaaaaggcatgcaatgaggttcctgtttgaggacagtgagttcccacaagcatcgcaagtagatgaaacatatgttcagtcagttgagaactctgtgcgcagagcgttcttgcaagcagatcttgccttagctgatgatttagatatcagccgctcttccggaactacagcactcaccgcattagtcttcggaaggcaattgctggttgcaaatgcgggggattgccgtgcggtcctttgccggagaggcgtagcgatggagatgtctcgagatcacagagcaaactatgccgaggagtgtgaacgggttgctgcatccggaggatacatcgaggatggctacctcaacggagtcctatccgtgacacgggccctaggggactgggacatgaaaatgcccgacggctcgatatcccctctcatcgccgagccagagttccgacagaccatgctcacggaggacgacgagttcctcatcatggggtgcgacgggatctgggacgtgatgaccagccagcacgcggtgagcatcgtccgacgggggctccggcagcacgacgaccccgagaggtgcgcgagggagcttgtcatggaggccaagaggctcgagaccgccgacaacctgacggtgatcgtcgtctgcttcgtctcggagcttgggtcgccgcggcaggagcaggtgggggggcaggcgggggtggcgaggccgaggagttgcaagagcctctctgcggaggccctgtgcaacctgaggagctggctggagactgatcgctag

SEQ ID NO: 831 - protein, 389 aa, Oryza sativa (japonica cultivar-group)
MVAEAEVMHQPVPVLEVPYHRCVAKGVEEVAAAAAVAPPPVVEVEVAVQVPHMGLESAAGAPSISVDALQFVPSIRSGSFADIGPRRYMEDEHIRIDDLSAHLGSLLVCPLPSAFYGVFDGHGGLDAAAYMKRHAMRFLFEDSEFPQASQVDETYVQSVENSVRRAFLQADLALADDLDISRSSGTTALTALVFGRQLLVANAGDCRAVLCRRGVAMEMSRDHRANYAEECERVAASGGYIEDGYLNGVLSVTRALGDWDMKMPDGSISPLIAEPEFRQTMLTEDDEFLIMGCDGIWDVMTSQHAVSIVRRGLRQHDDPERCARELVMEAKRLETADNLTVIVVCFVSELGSPRQEQVGGQAGVARPRSCKSLSAEALCNLRSWLETDR

SEQ ID NO: 832 - DNA, 1146 bp, Oryza sativa (japonica cultivar-group)
  CDS (1)..(1146)
atgagggagacgggcgcgacggatgaggggcacgcgtgcgaagttgtagtagccggaggtgacggcaaggccgcggcggcacgccggcgccgacgtctcgagctccggcggctcgggctggcggcggaggatgatgcggcggcgaagagaatccggtcggtgaaggacgggtcgtcgtctgatgactcgtcgacggaggttgttccccggagctggccggcgtgcgtgtcgcacggctcggtgtcggtgatcgggcggcggagggagatggaggacgcggtggccatcgagcggacgttcatggcttcgacgggggatggtgcgggcgctatcaggggcggcggggagggcgaggaggacttcttcgcggtgtacgacggccacggcgggtcgcgggtggcggaggcgtgcaggaagcggatgcacgttgtgctcgcggaggaggtgagcctgcggcggctgcgggggcagagcgcgtcgggcggcgacgtgcgctggaaggaggcgatgttggccagcttcgcgaggatggacggcgaggtcgtcgggagcgtcgccgccgccgccccccgcgtcgacggcaccgagccgtcggggttcaggacggtgggctccaccgccgtggtcgccgtcgtgggacgccgccgcatcgtcgttgccaactgcggcgactcgcgcgccgtgctctcccgcggtggcgtcgcgctgccactctccactgaccacaagccagatcggcctgacgagttggaacgagtggaagcagctggaggcagagtcatcaactggaacggttaccgtgtccttggtgttttagccacttctagatccataggcgactactacctgaagccgttcgtgagcgcagagccggaggtgagggtggtggagaggacggacaaggacgagttcctgatcctggcgagcgacgggctgtgggacgtggtgtccaacgaggtggcgtgcaagatcgccaggaactgcctcaacggccgcgcggcctccatgttcccggagtccgtctccggcagctcggccgccgacgccgcggcgctcctcgccgagctcgccgtctcgcgcggcagcagggacaacatcagcgtcgtcgtcgtcgagctcaggcggctcaagagcagggcagcttga

SEQ ID NO: 833 - protein, 381 aa, Oryza sativa (japonica cultivar-group)
MRETGATDEGHACEVVVAGGDGKAAAARRRRRLELRRLGLAAEDDAAAKRIRSVKDGSSSDDSSTEVVPRSWPACVSHGSVSVIGRRREMEDAVAIERTFMASTGDGAGAIRGGGEGEEDFFAVYDGHGGSRVAEACRKRMHVVLAEEVSLRRLRGQSASGGDVRWKEAMLASFARMDGEVVGSVAAAAPRVDGTEPSGFRTVGSTAVVAVVGRRRIVVANCGDSRAVLSRGGVALPLSTDHKPDRPDELERVEAAGGRVINWNGYRVLGVLATSRSIGDYYLKPFVSAEPEVRVVERTDKDEFLILASDGLWDVVSNEVACKIARNCLNGRAASMFPESVSGSSAADAAALLAELAVSRGSRDNISVVVVELRRLKSRAA

SEQ ID NO: 834 - DNA, 1476 bp, Oryza sativa (japonica cultivar-group)
  CDS (1)..(1476)
atggtttacgatggcgccgtgaaggaccaggagagctcggctaacccggcgtcggcatcggctgctctgtcggaggcatcggcggcggcgtcggaggtaacagcggctgccgcggcgggggcgggggctggggcggcggaggagggggcggctgtgagtgggcgaccgccgaggcctccccacgacaagcggctcggcgtgcggcatcccttgaagcaccgcaggttccgcgccggggggaaggtgatggtggagcccggggatccgccgtccgcccaggaggtggcggatgaggaggccagcgaggtggagcaggaggcggcgccggtggagagggaaccaccacaggaggagggtggtgatgtagaggtgtcgtctgcaccggcagagatggaggtggtggagggggatgcaatggaggtgtcacctgagccagcagtggctgtgggggagtcggagttggaaggccgaccaggcgaggaggaggaggtgtcctcgcctgtggtttctcaaggggagaggaagcaggagactgctgctgctgctcctgtgccagcagtggaggagaagaaacacaaggatcaagagaataagcacaaagagagggaaagggagaaggagagagagagggtggatgaagtgggctacatgagtggtggatggaagagtgaggatggatttctgagttgtggatattcgagttttagaggaaaaagagcaagcatggaagacttctatgatataaaatcatctaaaattgatgataaacaaataagcctctttggaatatttgatggtcatggtggttcacgtgctgctgagtatttgaaggagcacttgtttgagaacctcatgaaacatccagagttcatgacaaatacaaaattagcaataagcgaaacatataaaaaaactgattcagagtttttggattctgaaagccacactcatagagatgatggatcaaccgcatcgacagcggttttggttggaaatcatctctatgtggcaaatgttggcgactctcgtgctgtaatatcaaaggctggcaaagctattgcactctctgaggatcacaagccaaatagaagcgatgagaggaagcgaattgagagtgctggtggggttgttatgtgggctggaacttggagggtaggtggtgtacttgcaatgtctcgggcatttggcaaccgcttgttgaagcaatttgttgttgcagatcctgagattcaggaacaagaaatagatgatgaattggagtttctgattttagctagtgatgggctgtgggatgtggttccgaatgaggatgctgtttcactcgtgaagattgaggaggaacctgaggcagcagctcggaagctgacagagactgcattttcccgagggagtggtgacaatatcacatgcattgtcgtgaaatttcaacatgacaagatggacggtgattcctcaccaacaagcgataaaagctga

SEQ ID NO: 835 - protein, 491 aa, Oryza sativa (japonica cultivar-group)
MVYDGAVKDQESSANPASASAALSEASAAASEVTAAAAAGAGAGAAEEGAAVSGRPPRPPHDKRLGVRHPLKHRRFRAGGKVMVEPGDPPSAQEVADEEASEVEQEAAPVEREPPQEEGGDVEVSSAPAEMEVVEGDAMEVSPEPAVAVGESELEGRPGEEEEVSSPVVSQGERKQETAAAAPVPAVEEKKHKDQENKHKEREREKERERVDEVGYMSGGWKSEDGFLSCGYSSFRGKRASMEDFYDIKSSKIDDKQISLFGIFDGHGGSRAAEYLKEHLFENLMKHPEFMTNTKLAISETYKKTDSEFLDSESHTHRDDGSTASTAVLVGNHLYVANVGDSRAVISKAGKAIALSEDHKPNRSDERKRIESAGGVVMWAGTWRVGGVLAMSRAFGNRLLKQFVVADPEIQEQEIDDELEFLILASDGLWDVVPNEDAVSLVKIEEEPEAAARKLTETAFSRGSGDNITCIVVKFQHDKMDGDSSPTSDKS

SEQ ID NO: 836 - DNA, 1083 bp, Oryza sativa (japonica cultivar-group)
  CDS (1)..(1083)
atgtgcgtggaggagtcggagggcgcggagaggctggattttggggagcccgccgccgccgccgccgacgccgggaagagcaagagcaagagccccgacgaactcccctcgcctcggatggaaagagtttgtgagaacactacagctgctgatttcaagcaaaataagtctggtaattttgtcccaaatattcgatctggggattggtcggatattggaggtcgtcaatacatggaagatacccatgtgtgtattactgacctagctaagaactttggttatcaatcggtggataatgaagctatttccttttatggggtctttgatgggcatggtggaaaagatgctgcccattttgttcgtgataatttaccaaggatcattgtggaagatgctgattttcctcttgagcttgagaaagtagtaagaagatcctttgttcatgcagataatcagtttgcaaagacaacactgtcttctggcacaacagcacttacagcaatgattttcggaaggactcttctgattgcaaatgctggagattgtagggcggttctttcacggtgcggcactgcaattgaaatgtcagtggaccacaggccttgcagcctcagcgaaaaactgcgtgtagaatcacttggtggctatgtcgacgatggttacctcaacggtttgttaggagtcactagagcactcggtgactggcatcttgagggcatgaaagaagctggcaatccaggaggtccacttagtgctgaaccagagctaaagatgatcacactgacaaaggacgacgagttcttgataattggcagcgacgggatctgggacgtcttctcaaaccaaaacgtggtggactttgcacggaggcgcctccaagaacacaacgatgtgaagtcctgctgcagggagatcgttgaggaggcaataaagcgaggcgccaccgacaacttaaccgcggtgttggtctccttccacctggaggctcctccccaggtcagagtgagccgacccggtagggtggcgcgcagcatttcggctgaggggctgaacagcttgaggacactcctgagaaaccaatga

SEQ ID NO: 837 - protein, 360 aa, Oryza sativa (japonica cultivar-group)
MCVEESEGAERLDFGEPAAAAADAGKSKSKSPDELPSPRMERVCENTTAADFKQNKSGNFVPNIRSGDWSDIGGRQYMEDTHVCITDLAKNFGYQSVDNEAISFYGVFDGHGGKDAAHFVRDNLPRIIVEDADFPLELEKVVRRSFVHADNQFAKTTLSSGTTALTAMIFGRTLLIANAGDCRAVLSRCGTAIEMSVDHRPCSLSEKLRVESLGGYVDDGYLNGLLGVTRALGDWHLEGMKEAGNPGGPLSAEPELKMITLTKDDEFLIIGSDGIWDVFSNQNVVDFARRRLQEHNDVKSCCREIVEEAIKRGATDNLTAVLVSFHLEAPPQVRVSRPGRVARSISAEGLNSLRTLLRNQ

SEQ ID NO: 838 - DNA, 1104 bp, Oryza sativa (japonica cultivar-group)
  CDS (1)..(1104)
atggaagagcataggcttggcggcggcggcggcggaggcggaggcggggggaggccgccgatcccgggggcggcggggaggaagcttccggggctctcgcggcacgcctcgttcgtgaggagtcctgcaaacagtacaaaatctggaactgagaaaacttttgaaaacatggatgctgttgcatatatgcctgttgtaaggtctggaggttgggctgatattgggtcaaggcacacaatggaggatgtctttatttgttctgataacctcatgaaagagtttggagttgaaagttttgaagatggtccgagcgcattttatggggtttttgatgggcatggtggaaagcacgctgctgactttgtgtgcagcaatttggcaaggtttatcgttgaggatgaggattttccaagggagatagagaaagctctgtcctcagcgttcttacagactgatgctgctttcgcagatgcttgttctgtgaactcctctcttgcttctggcacaactgctcttgctgctcttgtggttgggaggtcacttctggtagcaaatgctggtgattgtagagcagtactttgttgtcgtggaaaagccattgaaatgtccagggatcacaagccttcttgcaacagagagaaggttcgcattgaagcctctggtggttatgtttatgatggctacctgaatgggcagcttaatgttgcgcgggcaataggagactggcacatggaaggaatgaaggcatgtgatggtcttggacctcttagtgctgagcctgaggtgatgatcaggaatctcactgaggaggatgaattcctcatcatcggttgtgatgggatctgggacgtattccgcagccaaaatgcggtagactttgcacgccgaaagctccaggagcacaatgatcctgttacctgttgtaaagaacttgttgatgaggccatcaagaggaagagcggcgacaacctttctgttgttgtcatctgcttcaactctcggccgcctcctgtcctaacaactccaaggcctcgtgtacagaggagtatatctgcagaaggcctgagggagttgcaaagctttcttgatagcttggctgattga

SEQ ID NO: 839 - protein, 367 aa, Oryza sativa (japonica cultivar-group)
MEEHRLGGGGGGGGGGGRPPIPGAAGRKLPGLSRHASFVRSPANSTKSGTEKTFENMDAVAYMPVVRSGGWADIGSRHTMEDVFICSDNLMKEFGVESFEDGPSAFYGVFDGHGGKHAADFVCSNLARFIVEDEDFPREIEKALSSAFLQTDAAFADACSVNSSLASGTTALAALVVGRSLLVANAGDCRAVLCCRGKAIEMSRDHKPSCNREKVRIEASGGYVYDGYLNGQLNVARAIGDWHMEGMKACDGLGPLSAEPEVMIRNLTEEDEFLIIGCDGIWDVFRSQNAVDFARRKLQEHNDPVTCCKELVDEAIKRKSGDNLSVVVICFNSRPPPVLTTPRPRVQRSISAEGLRELQSFLDSLAD

SEQ ID NO: 840 - DNA, 1107 bp, Oryza sativa (japonica cultivar-group)
  CDS (1)..(1107)
atgggagtttaccttagtacccccaaaaccgagaagctatctgaagatggcgaaaatgataagcttaaatttggactctcatctatgcaaggatggcgtgcaactatggaggatgctcattcagctttgctagatatcgataatgacacatcattctttggtgttttcgatggacatggaggaagagtggttgctaaattctgtgcaaaatatctgcacagagaagttctcagaagtgaggcctattcagcaggtgacctgggcaatgcagcccataaagctttctttagaatggatgagatgatgcgaggtcaaagaggctggcgagaactacaagcacttggagataagataaaccagattagtggcatgatagaaggcttgatctggtctccaagaggcagtgattcaaatgatcaacacgatgattgggcttttgaagaggggccacactctgactttgctgggccaacctgtgggagcacagcttgtgttgcaatagtaagaaatagccaacttgttgtcgcaaatgctggtgattcccgctgtgttatctcaaggaatggtcaggcatacaatttatcaagagaccacaaaccagagcttgaagcagagagagaaagaatactaaaagcaggagggtacatacagatgggacgagtaaatggaactataaacttgtcaagggcaattggtgacattgaatttaaacagaacaagttcttgtctcctgataagcaaatgttaactgcaaaccctgacatcaacacagtggagctttgtgatgatgatgactttcttgttttagcatgtgatggcatctgggactgcatgtctagccaacagctggttgatttcatccacgaacacataaacacagagagcagcctttctgcggtatgcgaaagagtgctagatagatgcctggctccatcaactttgggtggagaaggatgcgacaacatgacaatgatcctagtgcagttcaagaagccaattagtcagaacaagaatgtcagtcctgcggaacaatcagctgccgacaaacaaccaactggagacacacattggtctgagattcatgtgaccgaggagagtagctcgtga

SEQ ID NO: 841 - protein, 368 aa, Oryza sativa (japonica cultivar-group)
MGVYLSTPKTEKLSEDGENDKLKFGLSSMQGWRATMEDAHSALLDIDNDTSFFGVFDGHGGRVVAKFCAKYLHREVLRSEAYSAGDLGNAAHKAFFRMDEMMRGQRGWRELQALGDKINQISGMIEGLIWSPRGSDSNDQHDDWAFEEGPHSDFAGPTCGSTACVAIVRNSQLVVANAGDSRCVISRNGQAYNLSRDHKPELEAERERILKAGGYIQMGRVNGTINLSRAIGDIEFKQNKFLSPDKQMLTANPDINTVELCDDDDFLVLACDGIWDCMSSQQLVDFIHEHINTESSLSAVCERVLDRCLAPSTLGGEGCDNMTMILVQFKKPISQNKNVSPAEQSAADKQPTGDTHWSEIHVTEESSS

SEQ ID NO: 842 - DNA, 864 bp, Oryza sativa (japonica cultivar-group)
  CDS (1)..(864)
atggggctcgccggagaggccgctggctcgcctggcagtggcggcgggttcagtgcaaatggtaaatttagctatggttatgcgagctctcctggaaaaagatcctccatggaggacttctatgacaccagaattgatggtgtcgatggagagaccgttggactgtttggtgtctttgatggtcatggtggagctcgagcagcagaattcgtcaagcagaacctcttcaccaatttaatcaagcacccaaagttattcagtgataccaagtctgcaattgctgaaacttacactagcacggactctgaacttctgaaagctgaaaccagccacaatcgagatgcagggtcgactgcctccactgcaattctcgtaggcgaccgtctgctcgttgcaaatgttggagattctagggctgtcatttgtagaggaggagatgctatagctgtgtcaagagaccacaagcctgatcagtcagacgagaggcagaggatagaggatgctggtggttttgtgatgtgggctggaacatggcgcgtgggtggtgttcttgctgtctctcgagcatttggtgacaaactcctgaagcaatatgtggttgctgatccagagatcaaggaggaggtggtcgacagctctctcgagttcctcatccttgctagtgatggcctctgggacgtggtgaccaacgaggaagctgtggccatggtgaagccaattctggattcagagcaggctgcaaagaagctcctccaggaggcctcacagaggggaagcgcagacaacatcacctgcctcgtcgtccgtttcttggagcaggagaatcacctgccagagagaccgacgaatgatcaagcctcctaa

SEQ ID NO: 843 - protein, 287 aa, Oryza sativa (japonica cultivar-group)
MGLAGEAAGSPGSGGGFSANGKFSYGYASSPGKRSSMEDFYDTRIDGVDGETVGLFGVFDGHGGARAAEFVKQNLFTNLIKHPKLFSDTKSAIAETYTSTDSELLKAETSHNRDAGSTASTAILVGDRLLVANVGDSRAVICRGGDAIAVSRDHKPDQSDERQRIEDAGGFVMWAGTWRVGGVLAVSRAFGDKLLKQYVVADPEIKEEVVDSSLEFLILASDGLWDVVTNEEAVAMVKPILDSEQAAKKLLQEASQRGSADNITCLVVRFLEQENHLPERPTNDQAS

SEQ ID NO: 844 - DNA, 1059 bp, Oryza sativa (japonica cultivar-group)
  CDS (1)..(1059)
atgggggtgtacctgagcacgcccaagacggagaagtactccggcgagggcgggaacgaccgcctccgctacggcctcgcatccatgcagggatggcggacgaccatggaggacgcgcacactgccctgccacgcctggacgaatgcacatccttttttggtgtctatgatggccatggagggaaggcagtatctaagttttgtgcgaaacatctacacttgcaagtactgaaaaatgaggcttattcatctggtgatttggctacttctgtcttaaagtcatttttcagaatggatgagatgatgaaagggcaaagggggtggagggaactggctgaattgggggacaagggacaaaagtttactggcatgttagaaggcataatatggtccccgaaacctggagagtcagataaacctgaggacacttggactgaggagggtcctcattctcattttcctgggccaacatctggaagcactgcttgtgtggctatcataagaaatgatgaactcattgttgcaaatgctggtgattcccggtgtgtgctctcaaggaagggtcgagcttatgacctgtcaaaagatcacaagccagatcttgatgcagaaaaggagaggatactgaatgctggtggtttcattgttgctgggcgggtcaatggaagtttgaacttggcaagggcaataggggatatggaattgaagcagaatgaatttctcccagccgagagacagattgtcactgctgaacctgaattaaacacagttaaactttctgaggatgatgagttcatcgttttagcatgtgatggcatatgggattgcatgtcaagtcaagaagtggtggactttgttcacaaagaaatgaacactgaggatagcctatctgctgtctgcgagaagttgcttgaccattgcttggcacctgtatccggtggtgatggctgtgataatatgacagtgatcatagtcaagttcaagaagccaagcaagtcagctgctacttcaagcacaaatcaatctgtctcttcagaagagatgcgaccaaaaatttga

SEQ ID NO: 845 - protein, 352 aa, Oryza sativa (japonica cultivar-group)
MGVYLSTPKTEKYSGEGGNDRLRYGLASMQGWRTTMEDAHTALPRLDECTSFFGVYDGHGGKAVSKFCAKHLHLQVLKNEAYSSGDLATSVLKSFFRMDEMMKGQRGWRELAELGDKGQKFTGMLEGIIWSPKPGESDKPEDTWTEEGPHSHFPGPTSGSTACVAIIRNDELIVANAGDSRCVLSRKGRAYDLSKDHKPDLDAEKERILNAGGFIVAGRVNGSLNLARAIGDMELKQNEFLPAERQIVTAEPELNTVKLSEDDEFIVLACDGIWDCMSSQEVVDFVHKEMNTEDSLSAVCEKLLDHCLAPVSGGDGCDNMTVIIVKFKKPSKSAATSSTNQSVSSEEMRPKI

SEQ ID NO: 846 - DNA, 1143 bp, Arabidopsis thaliana
  CDS (1)..(1143)
atgtcgtcttcagttgccgtttgcaactcaccggtgttctctccgtcttcgtctcttttctgcaacaaaccgttgaacacttctccggcacatgaaaccctaaccctgtctctttcccatctcaatcctcccgtttcttctacttctccttccgccgcgtctcccacatctccgttctgcctccgtctcctgaaaccgccggctaaactagggtttggatcggactctggtccgggaagcattctgaagaggaaacgaccgacgacgcttgatataccggtggctccggttggtattgcagctcctatatcgaatgcagatacgccgagggaggagagtagagcagtggagagggaaggtgatggttactctgtttattgcaagagaggtaaaagagaagctatggaggatcgtttctctgccatcactaatcttcaaggagatcccaaacaggcaatattcggagtctatgatggtcacggaggaccaacagcggctgagtttgcggctaagaacttgtgtagtaacattcttggcgagatagttggtgggaggaacgagtcaaagattgaagaagctgtaaaacgtggttatctagcgactgattctgagtttctcaaggaaaaaaacgttaagggcggctcgtgctgtgtcacggctctgatcagcgacggaaatcttgtggtggccaatgctggtgactgccgtgctgttttgagcgttggaggattcgcggaggccttgacttctgaccaccgcccttccagagatgatgaacgaaacagaattgagagctcgggcggttatgtggatacattcaatagtgtttggagaattcaaggatcattagcggtatctagaggaataggagatgctcatctcaaacaatggataatatctgaaccagagataaatattctccgaatcaatccccaacacgagttcttgatcttagcatcagatggtctatgggacaaggttagtaatcaggaggcagtagacatagctcgaccattttgcaaagggaccgatcagaaacggaagccattgctggcttgcaagaagctcgttgacctctctgtatcacgaggctccttggacgatattagtgtgatgttgattcagttgtgccacctcttctga

SEQ ID NO: 847 - protein, 380 aa, Arabidopsis thaliana
MSSSVAVCNSPVFSPSSSLFCNKPLNTSPAHETLTLSLSHLNPPVSSTSPSAASPTSPFCLRLLKPPAKLGFGSDSGPGSILKRKRPTTLDIPVAPVGIAAPISNADTPREESRAVEREGDGYSVYCKRGKREAMEDRFSAITNLQGDPKQAIFGVYDGHGGPTAAEFAAKNLCSNILGEIVGGRNESKIEEAVKRGYLATDSEFLKEKNVKGGSCCVTALISDGNLVVANAGDCRAVLSVGGFAEALTSDHRPSRDDERNRIESSGGYVDTFNSVWRIQGSLAVSRGIGDAHLKQWIISEPEINILRINPQHEFLILASDGLWDKVSNQEAVDIARPFCKGTDQKRKPLLACKKLVDLSVSRGSLDDISVMLIQLCHLF

SEQ ID NO: 848 - DNA, 1152 bp, Arabidopsis thaliana
  CDS (1)..(1152)
atgattttgagtcaaacaatggttgctgaagctgagatcagggttcttgacgttaagtgccatatctccgctcctaaagatcagaagaattttcagatcgacgaagttcgtgtttctgagtctgtccgtgctgagatttcgggttccgctgaaacgcctcgattcggatcgggcatgagttgtgtaactactaccattggagaatccgccagtgactttatcccaactatacgttcagggagctttgctgacattcgaagtcgagaaaccatggaggatgaacacatttgcatagatgatttgtcagctcaccttggatcctacaacttctcggtaccaagtgctttttatggtgtgtttgatggtcatggtgggcctgaggcagcaattttcatgaaggagaacttgactagattgtttttccaagatgctgtgtttccagagatgccctccattgtggacgcgtttttcttagaagaactggagaattctcaccgaaaggcttttgctttggctgatcttgccatggctgatgaaaccattgtcagtggttcatgcgggacaaccgctttgaccgctctcataatcggacgacatcttcttgttgctaatgctggagattgtcgtgcagtgctatgtaggagaggagtggctgttgatatgtctttcgatcacagatcaacatatgagccagaaagaaggcggattgaagatttaggaggatactttgaggatggatacctcaacggagtcctagctgtcacgcgtgccattggagattgggaactgaagaatcctttcactgactcctcttcaccactgatttcagacccagagattggacagatcattctaacagaggacgacgagttcttgattttggcatgtgatggtatatgggatgtgttgtcaagccagaatgcagtgagtaatgtaaggcaaggattgaggaggcatggtgacccgagacaatgtgcgatggaactaggaaaagaagcagcgaggcttcagtcatcagataatatgacggttatagtgatctgcttctcctcagttccgtcttcacctaaacaaccgcaaagaagaagattaagattctgtgtttctgacgaagcccgagctcggttacaagcaatgcttgcaggcgagtga

SEQ ID NO: 849 - protein, 383 aa, Arabidopsis thaliana
MILSQTMVAEAEIRVLDVKCHISAPKDQKNFQIDEVRVSESVRAEISGSAETPRFGSGMSCVTTTIGESASDFIPTIRSGSFADIRSRETMEDEHICIDDLSAHLGSYNFSVPSAFYGVFDGHGGPEAAIFMKENLTRLFFQDAVFPEMPSIVDAFFLEELENSHRKAFALADLAMADETIVSGSCGTTALTALIIGRHLLVANAGDCRAVLCRRGVAVDMSFDHRSTYEPERRRIEDLGGYFEDGYLNGVLAVTRAIGDWELKNPFTDSSSPLISDPEIGQIILTEDDEFLILACDGIWDVLSSQNAVSNVRQGLRRHGDPRQCAMELGKEAARLQSSDNMTVIVICFSSVPSSPKQPQRRRLRFCVSDEARARLQAMLAGE

SEQ ID NO: 850 - DNA, 1068 bp, Arabidopsis thaliana
  CDS (1)..(1068)
atgggtacatacctaagttctccgaaaactgaaaagttatcagaagatggtgagaatgataagctcagatttggtttatcgtctatgcaaggttggcgcgctaccatggaagacgcgcatgctgcaattcttgatcttgatgataagacatcgttcttcggtgtgtatgatggccatggaggtaaagtcgttgcaaagttctgtgccaagtatctacaccagcaggttatcagtaatgaagcgtataaaactggagacgtcgaaacatctcttcgaagagcattctttagaatggatgacatgatgcaaggacaaagaggatggcgagagttagctgtacttggcgacaagatgaacaaatttagcggcatgattgaaggatttatatggtcaccaagaagcggtgacaccaataaccaacccgatagttggcctcttgaagatggtcctcattctgatttcacgggacctacctcggggtgcacagcgtgtgtagctcttattaaagataagaagctctttgttgcaaatgccggtgactcacgttgtgtgatatcaagaaagagtcaggcttacaatctttctaaagatcacaagcctgatcttgaagttgaaaaagaaaggatattgaaagctggtggctttattcacgctgggagaatcaatggaagcttgaatctgacaagagccattggtgatatggagttcaagcagaataagtttttaccatctgaaaagcaaatggttactgctgatccagatataaacactattgacctatgtgatgatgatgactttcttgttgttgcttgcgatggaatatgggattgtatgtcaagccaggaactagttgattttatccatgaacagttaaaatctgaaacaaaactttcaacagtatgtgaaaaggttgttgatagatgtttggctccagatacagcgactggtgaaggttgtgataatatgaccatcatcttggttcagttcaagaagcctaacccatctgagactgaaccagaagattccaaaccagaaccaagcgaagatgagccgagctcatcaagctag

SEQ ID NO: 851 - protein, 355 aa, Arabidopsis thaliana
MGTYLSSPKTEKLSEDGENDKLRFGLSSMQGWRATMEDAHAAILDLDDKTSFFGVYDGHGGKVVAKFCAKYLHQQVISNEAYKTGDVETSLRRAFFRMDDMMQGQRGWRELAVLGDKMNKFSGMIEGFIWSPRSGDTNNQPDSWPLEDGPHSDFTGPTSGCTACVALIKDKKLFVANAGDSRCVISRKSQAYNLSKDHKPDLEVEKERILKAGGFIHAGRINGSLNLTRAIGDMEFKQNKFLPSEKQMVTADPDINTIDLCDDDDFLVVACDGIWDCMSSQELVDFIHEQLKSETKLSTVCEKVVDRCLAPDTATGEGCDNMTIILVQFKKPNPSETEPEDSKPEPSEDEPSSSS

SEQ ID NO: 852 - DNA, 1179 bp, Arabidopsis thaliana
  CDS (1)..(1179)
atggaagaaactagaggaatttctgatccagagaatgggagttcgagttacggcggtaaaccgccgaatccactctccttctcttcttcctccgccgctgctgccgtttacaggcaaaccttcgacggcgagcgatcgttggcgccgtgtaataagaggtcactggttcgacactcatctctcgtgaagacaatggtgtcagatatatctgttgagaatgagtttactatagagaagaacaagtctgagtttgttcctgctacgcgttctggagcttggtctgatattggctccaggtcaagcatggaagatgcttatctatgcgttgataatttcatggatagctttggccttctgaattctgaggctggtccaagtgccttctatggggtatttgatggacatggtgggaagcatgccgctgagtttgcatgtcaccatataccgaggtacattgttgaagatcaagagtttcctagtgaaatcaataaggtgttatcttcagcatttcttcaaacagacactgccttcttagaggcgtgttcattggatgggagccttgcttcaggaactactgctttggcagctattctttttggaaggtcgttggtggtagcaaacgctggagattgcagagcagtcttatcccgtcagggaaaagccattgaaatgtcaagagaccacaaacccatgagcagtaaggaaaggagacgcattgaagcatcgggtggacatgtattcgatggctatctaaatggacaacttaatgtggctcgagcgctaggtgactttcatatggaaggcatgaagaagaagaaagatggttctgattgtggacctctaattgcagagcctgagctcatgacaacaaaactaacagaagaggatgagttccttataattgggtgtgacggggtttgggatgtgttcatgagccagaatgctgtagattttgccagaaggagactacaggagcacaatgacccggtcatgtgtagtaaggagctggttgaggaagctttgaagaggaagagtgctgataatgtgacggcagtggttgtgtgtcttcagccacagccaccaccgaacttggtagcgccgaggttgagagttcacagaagcttctcggcggagggtttaaaagatttacagagctacttggatggcttgggaaactaa

SEQ ID NO: 853 - protein, 392 aa, Arabidopsis thaliana
MEETRGISDPENGSSSYGGKPPNPLSFSSSSAAAAVYRQTFDGERSLAPCNKRSLVRHSSLVKTMVSDISVENEFTIEKNKSEFVPATRSGAWSDIGSRSSMEDAYLCVDNFMDSFGLLNSEAGPSAFYGVFDGHGGKHAAEFACHHIPRYIVEDQEFPSEINKVLSSAFLQTDTAFLEACSLDGSLASGTTALAAILFGRSLVVANAGDCRAVLSRQGKAIEMSRDHKPMSSKERRRIEASGGHVFDGYLNGQLNVARALGDFHMEGMKKKKDGSDCGPLIAEPELMTTKLTEEDEFLIIGCDGVWDVFMSQNAVDFARRRLQEHNDPVMCSKELVEEALKRKSADNVTAVVVCLQPQPPPNLVAPRLRVHRSFSAEGLKDLQSYLDGLGN

SEQ ID NO: 854 - DNA, 1143 bp, Arabidopsis thaliana
  CDS (1)..(1143)
atgagtatggatttttcacctttgttaacggttcttgagggagatttcaacaaggataatacttcttctgcaacagaaattgatactttagagaacttagatgacactaggcagataagtaaaggaaaacctccgaggcacctcacaagcagtgctactaggctgcagcttgcagccaatgcggatgtggatgtttgtaacttggttatgaagtcacttgatgacaaatcagagtttctacctgtataccgatcaggaagttgtgctgagcaaggggcaaaacagttcatggaagatgaacacatttgcatcgatgatcttgttaatcatcttggtgcagctattcaatgctcttctcttggagccttctatggggtatttgatggccacggtggcacagatgcagcacactttgttagaaagaacattctgagattcattgtagaggactcctccttcccactatgcgtaaagaaagcaattaagagtgctttcttaaaagctgattatgaatttgcagatgattcttctcttgacatctcttctgggaccactgcgcttacagcttttatttttggacggaggttgataattgcaaatgctggtgattgccgagcagtactggggagaagaggtagggcaattgagttgtccaaagatcacaaaccaaactgcacagccgagaaagtaagaatagaaaagttaggtggagttgtgtatgacggttacctcaacgggcaactatcagttgcacgtgccattggagactggcacatgaaaggtcccaaaggctctgcttgtccgctaagcccagagccagagttgcaagagacagacctgagtgaagacgacgagttcttgataatgggatgtgatggtctgtgggatgtgatgagcagccagtgcgctgtgacaatagctaggaaggaactgatgattcataatgatccagagagatgctctagagagcttgtgagggaggcccttaaacggaatacatgtgacaatttgacagtgattgttgtgtgcttctctccggatcctccacagaggatagagatccgaatgcagtcacgggtgaggcggagcatatctgcggaagggttaaacctactcaaaggcgtgctcgatggctatccgtga

SEQ ID NO: 855 - protein, 380 aa, Arabidopsis thaliana
MSMDFSPLLTVLEGDFNKDNTSSATEIDTLENLDDTRQISKGKPPRHLTSSATRLQLAANADVDVCNLVMKSLDDKSEFLPVYRSGSCAEQGAKQFMEDEHICIDDLVNHLGAAIQCSSLGAFYGVFDGHGGTDAAHFVRKNILRFIVEDSSFPLCVKKAIKSAFLKADYEFADDSSLDISSGTTALTAFIFGRRLIIANAGDCRAVLGRRGRAIELSKDHKPNCTAEKVRIEKLGGVVYDGYLNGQLSVARAIGDWHMKGPKGSACPLSPEPELQETDLSEDDEFLIMGCDGLWDVMSSQCAVTIARKELMIHNDPERCSRELVREALKRNTCDNLTVIVVCFSPDPPQRIEIRMQSRVRRSISAEGLNLLKGVLDGYP

SEQ ID NO: 856 - DNA, 1173 bp, Arabidopsis thaliana
  CDS (1)..(1173)
atgcaactctcaaagaatccgatcaaacaaacgagaaatcgagagaagaattacaccgacgatttcaccatgaagagatctgtaatcatggctcctgaatctccggtttttttcccacctccgcttgttttctctccgacgtcggtcaaaacgccgttgtcttctcctcgttcgtcgccaccgaagctgacgatggttgcttgtcctccaagaaagccaaaggagacgaagactacgggttctgattctgaaacggtgttgaaaaggaaacgaccaccgatgcttgacttaacggcggctccgacggttgcatcgtggtgcagtacgacgagagagacggcggagaaaggagcggaagttgttgaagcagaagaagatggatactactctgtttattgcaagagaggaagacgcggaccaatggaagataggtatttcgcggccgttgatcgtaacgacgacggaggttacaaaaatgctttctttggggtatttgatggtcacggcggatccaaggcggcggaattcgctgcgatgaatctagggaacaatatcgaggcggcaatggcatcggcgagatcaggagaagatggttgttcgatggagagtgcgataagagaaggttatatcaaaacggatgaggatttcttgaaagaaggttcgagaggtggcgcgtgttgtgtaaccgctttgatatcgaaaggcgagcttgcggtttcgaatgcaggcgactgccgggctgttatgagtcgtggtggaaccgcggaagctctcacttccgatcataatccttctcaagcaaatgagctcaaaaggattgaagcattgggtggttatgttgactgctgcaacggcgtttggagaattcaagggacattagcagtctcacgaggaattggagaccggtacctcaaggagtgggtgatagctgaaccggaaaccagaacattacggattaaaccggagttcgaattcttgatcttagcatctgatggcctgtgggacaaggtaacgaaccaagaggccgtcgatgtcgttcgaccgtactgcgtaggcgtagagaatccaatgacactttctgcttgcaagaaactggctgagctatcggttaagagaggctctttggatgatataagtctaattataattcagctacaaaactttcttccatga

SEQ ID NO: 857 - protein, 390 aa, Arabidopsis thaliana
MQLSKNPIKQTRNREKNYTDDFTMKRSVIMAPESPVFFPPPLVFSPTSVKTPLSSPRSSPPKLTMVACPPRKPKETKTTGSDSETVLKRKRPPMLDLTAAPTVASWCSTTRETAEKGAEVVEAEEDGYYSVYCKRGRRGPMEDRYFAAVDRNDDGGYKNAFFGVFDGHGGSKAAEFAAMNLGNNIEAAMASARSGEDGCSMESAIREGYIKTDEDFLKEGSRGGACCVTALISKGELAVSNAGDCRAVMSRGGTAEALTSDHNPSQANELKRIEALGGYVDCCNGVWRIQGTLAVSRGIGDRYLKEWVIAEPETRTLRIKPEFEFLILASDGLWDKVTNQEAVDVVRPYCVGVENPMTLSACKKLAELSVKRGSLDDISLIIIQLQNFLP

SEQ ID NO: 858 - DNA, 1269 bp, Arabidopsis thaliana
  CDS (1)..(1269)
atgcgtacaagcaaagcttcagtgacccaaacatggctgctttacacacagctttgtctttggaaagatctcataatccgctatgtccgtcagatcataagaagagcaaaatcgatgcttttcagtcaaaacatggtcgctgattccgccgagatcagtgttatcgatgtcaagtctcatctctccgttgcgaaagatcctagtaactttcagattgccgaaattcgaattcatgattcaatttgtattgatattccgagctctgaagaaacgcctcttttagaatcgatcaagagttgttctgcaactactattgaagagcatgttactgagtttgtaccaaatataagctcagggagttatgcagataagggtgactaccgggagtacatggaagatgaacacatatgcatagacgacctttcagatcatcttgggtcttccttttacagatttccggtgcctatggctttctacggtgtgtttgatggccatggtggatctgacgcatcacagtatataaaagagaatgctatgagcttgttctttgaagatgctgtttttcgacaatcgccctctgttgtggactctcttttcttgaaagaactggagacatctcaccgggaagcttataggcttgctgatcttgcaatggaggacgaaagaatagttagtagttcgtgcggaacaaccgcattgactgctcttgtaatcggaagacatttaatggtcgctaatgttggtgattgtcgtgcggtgctctgcagaaaaggaaaagctgttgatatgtcatttgatcacaaatctacatttgagccagaacggagacgagtagaggatttaggagggtactttgaaggcgagtatctctatggtgaccttgctgttacaagagctcttggagactggtcaataaagaggttttcaccccttggtgaatctttgtcacctctgatctcagacccggacattcaacagatgattctaactgaggaagacgagttcttgattatgggatgtgacggtgtttgggacgtgatgacaagccagtatgctgttactttcgtcaggcaaggacttaggagacacggtgatcctagaaggtgcgctatggaacttggaagggaagcgttaaggctagactcatcagataacgttacagtggtggtcatctgcttctcatcatccccagctcctcagagaagaaggatacggttctgtgtttccgatgaagctcgagcccggttacagacaatgctagaaggctaa

SEQ ID NO: 859 - protein, 422 aa, Arabidopsis thaliana
MRTSKASVTQTWLLYTQLCLWKDLIIRYVRQIIRRAKSMLFSQNMVADSAEISVIDVKSHLSVAKDPSNFQIAEIRIHDSICIDIPSSEETPLLESIKSCSATTIEEHVTEFVPNISSGSYADKGDYREYMEDEHICIDDLSDHLGSSFYRFPVPMAFYGVFDGHGGSDASQYIKENAMSLFFEDAVFRQSPSVVDSLFLKELETSHREAYRLADLAMEDERIVSSSCGTTALTALVIGRHLMVANVGDCRAVLCRKGKAVDMSFDHKSTFEPERRRVEDLGGYFEGEYLYGDLAVTRALGDWSIKRFSPLGESLSPLISDPDIQQMILTEEDEFLIMGCDGVWDVMTSQYAVTFVRQGLRRHGDPRRCAMELGREALRLDSSDNVTVVVICFSSSPAPQRRRIRFCVSDEARARLQTMLEG

SEQ ID NO: 860 - DNA, 1086 bp, Arabidopsis thaliana
  CDS (1)..(1086)
atggcaccggtgactgaagtttctccgatgatcaacacattggaagtcgcagatgacaaaatgacgaatctcagttcctctgggaaacctccaagaaacatctctgcaatgcgccattgcaacagcactgcctggttgaccgattacgaaggagatgagagatttggtgcaaaatctccggaaggagtaaattcaacattccagcctgtgtttagatctggaagttggtctgataaaggaccaaaacaatcaatggaagatgaattcatttgtgttgatgatctcactgagtatattggatcatccactggagctttctatggggtgtttgatggacacggaggtgttgatgctgcatcattcacaaaaaagaacattatgaagcttgtaatggaagacaaacatttcccaaccagcacaaagaaggcaacaaggagtgcttttgtgaagactgatcatgctttggctgatgcttcttctcttgatagatcctctggcactactgcactcactgctctcattttggacaagactatgttgattgcaaacgctggtgactccagagcggtgcttgggaaacgaggcagagccattgagttatcaaaggaccacaaacctaactgtacttccgagcggctacgtattgagaagcttggaggtgtgatctacgatggttaccttaacgggcagctatctgtggctcgagccttaggagattggcacattaagggaactaaaggttcactctgcccgctcagctgcgagcctgagctggaagagattgtgctgacggaagaggatgagtatcttataatgggctgtgatggactctgggatgtgatgagtagccagtgtgcagtgacgatggtgaggagggagctgatgcagcataatgatcctgagagatgctctcaagctttggttaaggaggctcttcaacgaaacagctgtgacaatcttactgtagtggttgtctgtttctcgcccgaagcgcctcctcggattgagattcccaagtcgcataagaggaggagcatctctgcagagggattggatctcctcaaaggtgttttgaacgagttgtga

SEQ ID NO: 861 - protein, 361 aa, Arabidopsis thaliana
MAPVTEVSPMINTLEVADDKMTNLSSSGKPPRNISAMRHCNSTAWLTDYEGDERFGAKSPEGVNSTFQPVFRSGSWSDKGPKQSMEDEFICVDDLTEYIGSSTGAFYGVFDGHGGVDAASFTKKNIMKLVMEDKHFPTSTKKATRSAFVKTDHALADASSLDRSSGTTALTALILDKTMLIANAGDSRAVLGKRGRAIELSKDHKPNCTSERLRIEKLGGVIYDGYLNGQLSVARALGDWHIKGTKGSLCPLSCEPELEEIVLTEEDEYLIMGCDGLWDVMSSQCAVTMVRRELMQHNDPERCSQALVKEALQRNSCDNLTVVVVCFSPEAPPRIEIPKSHKRRSISAEGLDLLKGVLNEL

SEQ ID NO: 862 - DNA, 1152 bp, Arabidopsis thaliana
  CDS (1)..(1152)
atggtagcagaagcagaggttgtgtttcaacagagtttaccggcggttctggagattgagttgtttgacggagtttcctccgccgttaaatctcccgtttcttctccgaaattgggttttactcagtcaacggcgtcggtttccggaagtttaacgacttctcctgtggctgatatctttccagagggtgattgcgatcctagtgtcttggattatattccgaccatccggtctggaagctttgctgatattgggccaaagagaaacatggaagatgaacacattcgcatagacgatttatcttctcaagttggttccctttttgagttgccgaagcctagtgctttctatgcggtttttgacgggcatggaggaccagaagcagcagcatacgtacgggaaaatgccattaggtttttctttgaagatgagcagtttccacagacatcggaagtgagtagtgtttatgtggaagaagttgagacttcattgagaaatgcgtttcttcaagctgatctagctttggcagaggattgcagtatcagcgattcttgtggtaccaccgctctgactgctcttatttgtggaagactcttaatggttgcaaatgccggagactgcagagcggttctatgcaggaaaggcagagcgatagacatgtctgaagaccataaaccgattaatctacttgagagaagaagagtggaggaatccggcggtttcatcactaatgacggttacctaaatgaagtcctagctgtaacccgagctctgggcgactgggatttaaaactgccacacggctctcaatctccactgatctcggaaccagaaatcaagcagataactctaactgaagacgatgagtttcttgtgattgggtgcgatgggatttgggatgtcttgacgagccaagaagcggttagcattgttaggcgtggcttaaaccggcacaacgatccaacaagatgtgcgcgagagctagtgatggaggctctggggcggaactcatttgataatttaactgcggtggtggtatgtttcatgacaatggacagaggggacaagccggtggtgccattggagaagagaaggtgttttagtctttcgcctgaagctttctgtagcttgaggaatctgttggatggctga

SEQ ID NO: 863 - protein, 383 aa, Arabidopsis thaliana
MVAEAEVVFQQSLPAVLEIELFDGVSSAVKSPVSSPKLGFTQSTASVSGSLTTSPVADIFPEGDCDPSVLDYIPTIRSGSFADIGPKRNMEDEHIRIDDLSSQVGSLFELPKPSAFYAVFDGHGGPEAAAYVRENAIRFFFEDEQFPQTSEVSSVYVEEVETSLRNAFLQADLALAEDCSISDSCGTTALTALICGRLLMVANAGDCRAVLCRKGRAIDMSEDHKPINLLERRRVEESGGFITNDGYLNEVLAVTRALGDWDLKLPHGSQSPLISEPEIKQITLTEDDEFLVIGCDGIWDVLTSQEAVSIVRRGLNRHNDPTRCARELVMEALGRNSFDNLTAVVVCFMTMDRGDKPVVPLEKRRCFSLSPEAFCSLRNLLDG

SEQ ID NO: 864 - DNA, 1113 bp, Arabidopsis thaliana
  CDS (1)..(1113)
atggttaaaccctgttggagaataggtgccggtatggagagaagtaagatcaatcccacaaaggttgatggtttgacatggtacaaagatcttggtcttcacacctttggagagttttccatggcaatgatccaagccaacagtgtgatggaggatcagtgccagatcgaatcagggccgcttacattcaacaatccgacagttcaaggcacatttgttggagtttacgatggccatggaggtccagaggcttccagattcattgcagacaacatcttccccaagttaaagaagtttgcgtccgagggtagggagatttcagagcaggtgatcagcaaagcatttgccgagacagacaaagattttctcaagacagtgacgaagcaatggcctacgaacccacagatggcatcagtggggtcatgttgcttggcaggagtgatatgcaacggattggtgtatattgcaaacacgggagattccagagctgtgttgggcagatctgagagaggtggagtgagagctgttcagttatctgtagagcacaatgccaatcttgagtctgcgaggcaagagctatggtcattgcatcctaatgaccccaccattcttgtgatgaagcaccgcttgtggcgtgtgaaaggcgttatccaggtcacaagatccataggtgatgcatacctcaaaagagcagagttcaacagagaacctttgctgcccaaattcagactaccagaacatttcactaagccaatccttagtgcggatccatcagtcaccattacgcggcttagcccacaagatgagtttataattcttgcttcagatgggctttgggagcatcttagcaaccaggaagctgttgatattgtgcataattcccctcgacaaggaatagcaaggagactacttaaagctgcattgaaggaagcagcaaagaaaagagagatgagatactcagacctaacagagatccatcctggtgtaagaaggcatttccacgacgatataaccgttattgtggtctatctcaacccccacccggtcaaaaccaattcttgggcttcacctctgtcaattagagggggatacccgatgcattcaacatcatga

SEQ ID NO: 865 - protein, 370 aa, Arabidopsis thaliana
MVKPCWRIGAGMERSKINPTKVDGLTWYKDLGLHTFGEFSMAMIQANSVMEDQCQIESGPLTFNNPTVQGTFVGVYDGHGGPEASRFIADNIFPKLKKFASEGREISEQVISKAFAETDKDFLKTVTKQWPTNPQMASVGSCCLAGVICNGLVYIANTGDSRAVLGRSERGGVRAVQLSVEHNANLESARQELWSLHPNDPTILVMKHRLWRVKGVIQVTRSIGDAYLKRAEFNREPLLPKFRLPEHFTKPILSADPSVTITRLSPQDEFIILASDGLWEHLSNQEAVDIVHNSPRQGIARRLLKAALKEAAKKREMRYSDLTEIHPGVRRHFHDDITVIVVYLNPHPVKTNSWASPLSIRGGYPMHSTS

SEQ ID NO: 866 - DNA, 1251 bp, Arabidopsis thaliana
  CDS (1)..(1251)
atgactgaaatctacagaacaatttcaaccggacgtggagacgacgtttctccgactaaatgccgtgaacgtcgtcgtcggagaattgagatgcggagacaagcggcggttttcggcgaacctagttcgtctaggaatcgtgatcggacggacatggaagtttactcaagttttgacgttccattgaggaaacaagctcggaggtcagagatcggtggtcttccggcggatatcgggggctttttggcacctccggcggcatcttcttgccaaaaatcggaagcgccggtgtggaagggagaagaaacggaggatgagccgttgtacggtatagtttcggttatgggaagatctcgtaagatggaggattcggttactgttaaaccgaatttgtgcaaaccggaagttaaccggcaaagaccggttcatttctttgcggtatacgatggccacggcggttctcaggtgtcaacattgtgcagcacgactatgcacacgtttgtcaaggaggagctagagcaaaacctcgaagaggaggaagaaggaagcgaaaacgatgtcgtggagaggaaatggcggggcgtgatgaaacggagtttcaagaggatggatgagatggcaacgagtacatgcgtgtgtgggactagtgtgccgttgtgtaactgtgatccgagggaggctgcgatttcgggttcaacggcggtcactgcggttttgacgcacgatcatattattgtagccaatactggtgactcacgtgcggtgttgtgtcgaaatggaatggctattcctctgagtaacgatcacaagccggatagaccagacgagcgtgcgaggattgaagcagctggtggtcgagttttagtagtggatggagctagagttgaaggaattctagccacgtccagagccataggggacaggtatctaaaaccaatggtagcatgggaaccagaagtaacattcatgagaagggaatctggagatgaatgcttagtattagcaagcgatgggctttgggatgtactctcgagtcagctagcttgtgacatagctaggttttgtctccgcgaagaaactccctcgagccttgatttaaatagaatggctcaagaagacgacaatgacggagaacaaaatccttcaaggagtgtattggctgcaacgttgctaacgcggttggctttgggtagacaaagcagtgataatataagtgtggtcgtcattgatctcaagaatagctctcagtaa

SEQ ID NO: 867 - protein, 416 aa, Arabidopsis thaliana
MTEIYRTISTGRGDDVSPTKCRERRRRRIEMRRQAAVFGEPSSSRNRDRTDMEVYSSFDVPLRKQARRSEIGGLPADIGGFLAPPAASSCQKSEAPVWKGEETEDEPLYGIVSVMGRSRKMEDSVTVKPNLCKPEVNRQRPVHFFAVYDGHGGSQVSTLCSTTMHTFVKEELEQNLEEEEEGSENDVVERKWRGVMKRSFKRMDEMATSTCVCGTSVPLCNCDPREAAISGSTAVTAVLTHDHIIVANTGDSRAVLCRNGMAIPLSNDHKPDRPDERARIEAAGGRVLVVDGARVEGILATSRAIGDRYLKPMVAWEPEVTFMRRESGDECLVLASDGLWDVLSSQLACDIARFCLREETPSSLDLNRMAQEDDNDGEQNPSRSVLAATLLTRLALGRQSSDNISVVVIDLKNSSQ

SEQ ID NO: 868 - DNA, 1155 bp, Arabidopsis thaliana
  CDS (1)..(1155)
atggtagcagaagcagaggttgtgtttcaacagagtttaccggcggttctggagattgagttgtttgacggagtttcctccgccgttaaatctcccgtttcttctccgaaattgggttttactcagtcaacggcgtcggtttccggaagtttaacgacttctcctgtgcaggctgatatctttccagagggtgattgcgatcctagtgtcttggattatattccgaccatccggtctggaagctttgctgatattgggccaaagagaaacatggaagatgaacacattcgcatagacgatttatcttctcaagttggttccctttttgagttgccgaagcctagtgctttctatgcggtttttgacgggcatggaggaccagaagcagcagcatacgtacgggaaaatgccattaggtttttctttgaagatgagcagtttccacagacatcggaagtgagtagtgtttatgtggaagaagttgagacttcattgagaaatgcgtttcttcaagctgatctagctttggcagaggattgcagtatcagcgattcttgtggtaccaccgctctgactgctcttatttgtggaagactcttaatggttgcaaatgccggagactgcagagcggttctatgcaggaaaggcagagcgatagacatgtctgaagaccataaaccgattaatctacttgagagaagaagagtggaggaatccggcggtttcatcactaatgacggttacctaaatgaagtcctagctgtaacccgagctctgggcgactgggatttaaaactgccacacggctctcaatctccactgatctcggaaccagaaatcaagcagataactctaactgaagacgatgagtttcttgtgattgggtgcgatgggatttgggatgtcttgacgagccaagaagcggttagcattgttaggcgtggcttaaaccggcacaacgatccaacaagatgtgcgcgagagctagtgatggaggctctggggcggaactcatttgataatttaactgcggtggtggtatgtttcatgacaatggacagaggggacaagccggtggtgccattggagaagagaaggtgttttagtctttcgcctgaagctttctgtagcttgaggaatctgttggatggctga

SEQ ID NO: 869 - protein, 384 aa, Arabidopsis thaliana
MVAEAEVVFQQSLPAVLEIELFDGVSSAVKSPVSSPKLGFTQSTASVSGSLTTSPVQADIFPEGDCDPSVLDYIPTIRSGSFADIGPKRNMEDEHIRIDDLSSQVGSLFELPKPSAFYAVFDGHGGPEAAAYVRENAIRFFFEDEQFPQTSEVSSVYVEEVETSLRNAFLQADLALAEDCSISDSCGTTALTALICGRLLMVANAGDCRAVLCRKGRAIDMSEDHKPINLLERRRVEESGGFITNDGYLNEVLAVTRALGDWDLKLPHGSQSPLISEPEIKQITLTEDDEFLVIGCDGIWDVLTSQEAVSIVRRGLNRHNDPTRCARELVMEALGRNSFDNLTAVVVCFMTMDRGDKPVVPLEKRRCFSLSPEAFCSLRNLLDG

SEQ ID NO: 870 - DNA, 1134 bp, Nasonia vitripennis
  CDS (1)..(1134)
atgggggcatttttggacacacctaaaactgacaagtataatgagcatggcgaaggcaacggtcttaaatatggggttgctagcatgcagggatggcgactcgaaatggaggatgcgcatcaggctataactggtcttgaaggtggtctcgaagactggagtttctttgctgtgtttgatggccatgcaggtgctaaagtgtcagcgcatagtgcagaacatttattagagtgcataatgcaaacagaggaattcaaagctgaagatgtgatacgaggaatacattctggctttttaagattggatgacaaaatgcgaggtcttccagaaatgtgcgatggtactgataaatctggttctactgcggtatgtgcatttatatctccaaagaacatctatatcgccaattgtggagactcgcgcgcagtgttgtgccgggcgggcaacccgatcttctcaacgcgtgatcacaaaccggtcctacctgccgaaaaggagcgtatacagaatgctggcggcaacgttgtcatccagcgggtaaacggactattggcagtatcccgagctcttggcgactacgagtacaagaatgttgagggccgtggaccctgcgagcaacttgtctcacccgaacccgagattttcgtgcgtgatcgagacgaccagcatgacgagttcttggtgttggcatgcgacggtatctgggatgttatgaccaatgaaaacttgtgcaatttcatacactctaggctactacttaccgacgatttggaggcagttactaatgaagttatagacacttgtttgtacaagggtagcagagacaacatgagtattgtattgatcacgttccctgcagctccgaagcccaatatcgaggctaaaaagaaggaagccgaactcgacatgttcattgagaggacaattaaagatatagtttcacgagaggcggacaaaaaggactttgtttttttaaaacttcttcatatgctcatggatcaaggcatatccaatttacctcccggtggtggacttcctgcaaagcaaaaattaatagaaaatgtgtttcgagaagtttgcccaagcaaagcagacagtataggtcttccgtatgattaccttctatataattaa

SEQ ID NO: 871 - protein, 377 aa, Nasonia vitripennis
MGAFLDTPKTDKYNEHGEGNGLKYGVASMQGWRLEMEDAHQAITGLEGGLEDWSFFAVFDGHAGAKVSAHSAEHLLECIMQTEEFKAEDVIRGIHSGFLRLDDKMRGLPEMCDGTDKSGSTAVCAFISPKNIYIANCGDSRAVLCRAGNPIFSTRDHKPVLPAEKERIQNAGGNVVIQRVNGLLAVSRALGDYEYKNVEGRGPCEQLVSPEPEIFVRDRDDQHDEFLVLACDGIWDVMTNENLCNFIHSRLLLTDDLEAVTNEVIDTCLYKGSRDNMSIVLITFPAAPKPNIEAKKKEAELDMFIERTIKDIVSREADKKDFVFLKLLHMLMDQGISNLPPGGGLPAKQKLIENVFREVCPSKADSIGLPYDYLLYN

SEQ ID NO: 872 - DNA, 1734 bp, Gibberella zeae PH-1
  CDS (1)..(1734)
atgtttggcggcagttccaacaactcagcgggcaacaaatccgagagcgattcaaaatccgataaatccccttctcccgagcccggtacaggccttagtgccccatctcccatcaagacaactgatcaggctgcgagcggtgaaaaacgtagcggaaatggcagtccaccaactcgccaggatgttggcgggccgagtgacaagaagcgcagaagtagcagcgttagtagccgggcgagtagtcttctggcctctgcaaagaactcgctcaacttctcttctcagagtagtcgcggcggaggctccgaagtgaactcgcagacatctcttcagaaactcggcaagcaggatcctgctctcgcagtcccacagggccaacataacaactctgctggggactctatgcccggacccaaatctacatttcgtgttggcgtttgggaagataggaacaagaaatgccgccgaactatggaagatactcatgctttcctgtacaattttgtgcaaaccccagctctgaacgacgcatccgcaaaggataaaccggaaggagatgacctggtcacttctgatatggttgagtcggacaatggctattttgctatctttgatgggcatgcaggcacattcgccgccgactggtgtggcaaaaaactacatatcatcctcgaggatatcatacgcaagaaccctaatgctctgatccctgaagttttagaccaggcctttacagctgctgatgcgcagcttgaaaaacttccgcttaagaatagcggatgcaccgctgcggtcgcagtattgcgctgggaggaccgggcctcaaacgaccgatctgccatcaagcccgtcaaaccagaagagcccatcgaaatggataaggctaatgatggatcatccaacgaagaggcgaccaaggccacaaattcaaagggcaagggtagtggacggcagcgcgtactgtacaccgcaaacgttggcgacgcccgcattattctctgccgaggtggaaaggctctacgactctcttacgaccacaagggtagtgacgaggtcgaaggcaaacgcattgccgctgccggcgggctgatcctcaacaatcgtgtcaatggcgtactggccgtgactcgtgcccttggcgatgcttacatgaagaagctcgttacgggccacccttataccactgagacggtcattcagcccgacagtgacgagttcattatcattgcttgcgatggaatctgggatgtatgcagtgaccaggaagccgttgaccttgtccgcaacgtgaatgaccccatctcggcctcgaagcagcttgtcgactatgcgctgaatcgcttcagcactgataacttgtcttgtatggtcgttcggcttgaccagaacaaggaagctgcggtggaagtggaaggcgcggcgtcacaggtcagcgaggcggacaagattgtcagcgagactaagcaaaagattgcagaaggtatagcacccgctgtcggtgtatcagcaaccagcaacgcgccccaatcccaacctcctatagctgttcaggagggcgattttgtgccaacctcactggacgacatagtaactgaagaacctccccatgttgcagatcccaagtcagacgacgtgcctatactgaataaggcggccgttttggaggctcggaaagacaagccagcagaagagaagccggttgaagagcaagagacacctcctgggcaggaataa

SEQ ID NO: 873 - protein, 577 aa, Gibberella zeae PH-1
MFGGSSNNSAGNKSESDSKSDKSPSPEPGTGLSAPSPIKTTDQAASGEKRSGNGSPPTRQDVGGPSDKKRRSSSVSSRASSLLASAKNSLNFSSQSSRGGGSEVNSQTSLQKLGKQDPALAVPQGQHNNSAGDSMPGPKSTFRVGVWEDRNKKCRRTMEDTHAFLYNFVQTPALNDASAKDKPEGDDLVTSDMVESDNGYFAIFDGHAGTFAADWCGKKLHIILEDIIRKNPNALIPEVLDQAFTAADAQLEKLPLKNSGCTAAVAVLRWEDRASNDRSAIKPVKPEEPIEMDKANDGSSNEEATKATNSKGKGSGRQRVLYTANVGDARIILCRGGKALRLSYDHKGSDEVEGKRIAAAGGLILNNRVNGVLAVTRALGDAYMKKLVTGHPYTTETVIQPDSDEFIIIACDGIWDVCSDQEAVDLVRNVNDPISASKQLVDYALNRFSTDNLSCMVVRLDQNKEAAVEVEGAASQVSEADKIVSETKQKIAEGIAPAVGVSATSNAPQSQPPIAVQEGDFVPTSLDDIVTEEPPHVADPKSDDVPILNKAAVLEARKDKPAEEKPVEEQETPPGQE

SEQ ID NO: 874 - DNA, 951 bp, Apis mellifera
  CDS (1)..(951)
atgggccaaacacttagtgaacctgtgacagctaagaatttagcatgctgtagaaattcaaactatcgagttggaagttcttgtatgcaaggttggcgtatcaaaatggaagattgccatgtacatatactttcattacctgatgatcctggtactgcattttttgcagtatatgatggtcatggaggtgcagcaatggcacaatatgctggaaaacatcttcacgagtatataactaaaagaagtgaatataaagcaggtaatattattcaagcaatacaacagggtttcttggaattagatagagcaatgcaaaatgatgcaacacttaaagatgaacaagcaggaactactgttatagcacttcttataaaggataatgttatatatagtgcaaatgcaggtgatagtagagcagtggcaagtataaatggcaatgctattccacttagtcgtgatcataaaccaacattgaaggatgaacgtgaaaggattgaggctgctggtggttgggttgaatttaatagagttaatggtcaactagcattaactcgtgctctcggtgattttatgttcaaacgaaatgaacgtaaatctccgcaagaacaaatcgttactgcctttcctgaagttcaagcctttcaaataacagaagattgggaatttgttgttttggcatgtgatggtatttgggatgtaatgacaagcaatgaagtagttaattttataagaacacgtttagttcaatcgaaattcggaacaagattagaacaagatacattggatcctgaagaaatttgtgaagaacttatgaaacattgccttgcaccagatgctttaatgggtactggttgtgataatatgacagtcgttcttgtatgttttcttcatggaaaaccatattctcatttgatttcacgctgcaaagaatctattagtacaaattcttag

SEQ ID NO: 875 - protein, 316 aa, Apis mellifera
MGQTLSEPVTAKNLACCRNSNYRVGSSCMQGWRIKMEDCHVHILSLPDDPGTAFFAVYDGHGGAAMAQYAGKHLHEYITKRSEYKAGNIIQAIQQGFLELDRAMQNDATLKDEQAGTTVIALLIKDNVIYSANAGDSRAVASINGNAIPLSRDHKPTLKDERERIEAAGGWVEFNRVNGQLALTRALGDFMFKRNERKSPQEQIVTAFPEVQAFQITEDWEFVVLACDGIWDVMTSNEVVNFIRTRLVQSKFGTRLEQDTLDPEEICEELMKHCLAPDALMGTGCDNMTVVLVCFLHGKPYSHLISRCKESISTNS

SEQ ID NO: 876 - DNA, 1701 bp, Aspergillus nidulans FGSC A4
  CDS (1)..(1701)
atgttcagtggctcctcgagcccacccaaagataaatcagatactatcccccgatcaggtcccataaatacaccgtcgctcagtattcagaccgagggtaccgttggatctcaagcgaaatcaccccctcccactagtttcttcggacgcagagcaagcgaggaacagagccctggcggcgacaagaagcgccgaagcagtacggtctcaaaggcagcatcatttttcgcaaacgcaaaaaactccctgagccttagtagcccccgaaccgaaagcgcgctcagttcttcgcttccagagtcttccttacacagatacggaaatatggacccagcgctcaacgttccacagggctcactgaataattccgcgggcgaatcttcaccaactcctcgatcatctttcagagtcggcgttacagaggaccggaacaaaaaatgtcgccggactatggaagatacccatgcctatctttataatttccttggtaaccctgtaccgtcagcgcaaaatgatgattctgatcagagctcgcatcctagcgacgcttcgccaaagaccggagaattgacgcccattgttgaaacagataatggctacttcgcaattttcgatggccatgcaggaacttttgctgcccaatggtgtggaaagaagttgcatcttatcttggaagacgtaatgcgcaagaacataaatgcgcctgttcccgagcttctcgaccaaacatttacttccgtggaccagcagctggaaaagctgccggttaagaatagcggttgcactgcggttgtcgcattactcagatgggaagatagaattcccaccccaagttccgtgaccggttcgtccgccatcgggccggcagccgtggcagcgaccaaggccggagcggattcaaaggcagatgacacccctacccaggaagccgccgctaccccggttcctgctattccccccaagttacgcgaaaaggcgattcgccagcgtgtcctatatacagccaatgttggcgatgcccgtgtgatactgtgtaggaacggcaaagcccttcgcctgtcttacgatcacaagggtagtgatgagaacgaagggagaaggattgctaacgcgggaggcttgattctcaataatcgagttaacggagttctcgctgtaactagagcccttggcgatgcctatatcaaagatcttgttactgggcatccttacacaacagagactgtcatccagccagaccttgacgagttcatcattttggcctgtgacgggctctgggatgtatgtagtgatcaagaggctgtcgatttgattcgcaatgtgtctgatgcccaggaggcatcgaagattctggttgatcatgcccttgcgcggttcagcactgacaacctttcctgtatggtgattcgtctctatgcagaccgccaccgcgaagttgctagtcaagcagtcgacctggctgggtgggagagccgctcctcgcgtggtttaagcgagaccgataagattgtcgaaggagctaggaagagcatggccaacactggaatagcagatgaatcggaaacgctcaagaaagttcacgatgaggcagaagaatgcacaccagaggaagtaccggagtccatattatctgcctcgccaaatgccccagcggctacactcaatcagccgaacaagccgggttcgagcgacagtacatga

SEQ ID NO: 877 - protein, 566 aa, Aspergillus nidulans FGSC A4
MFSGSSSPPKDKSDTIPRSGPINTPSLSIQTEGTVGSQAKSPPPTSFFGRRASEEQSPGGDKKRRSSTVSKAASFFANAKNSLSLSSPRTESALSSSLPESSLHRYGNMDPALNVPQGSLNNSAGESSPTPRSSFRVGVTEDRNKKCRRTMEDTHAYLYNFLGNPVPSAQNDDSDQSSHPSDASPKTGELTPIVETDNGYFAIFDGHAGTFAAQWCGKKLHLILEDVMRKNINAPVPELLDQTFTSVDQQLEKLPVKNSGCTAVVALLRWEDRIPTPSSVTGSSAIGPAAVAATKAGADSKADDTPTQEAAATPVPAIPPKLREKAIRQRVLYTANVGDARVILCRNGKALRLSYDHKGSDENEGRRIANAGGLILNNRVNGVLAVTRALGDAYIKDLVTGHPYTTETVIQPDLDEFIILACDGLWDVCSDQEAVDLIRNVSDAQEASKILVDHALARFSTDNLSCMVIRLYADRHREVASQAVDLAGWESRSSRGLSETDKIVEGARKSMANTGIADESETLKKVHDEAEECTPEEVPESILSASPNAPAATLNQPNKPGSSDST

SEQ ID NO: 878 - DNA, 867 bp, Oryza sativa subsp
  CDS (1)..(867)
atggggtttgccggggactgctcgccggtcagcggtggcgggctcagtgaaaacggcaagttcagttatgggtatgcaagtgctcctgggaaaagggcttcaatggaggatttctatgagacgagaatcgatggtgttgatggagagaccattggattatttggcgtattcgacggccatggcggagctcgagcggctgaatatgtcaagcagcaccttttcagcaatttaattaagcatccaaagttcatcagtgatatcaagtccgctatcgctgaaacgtacaaccatacagattcagaatttctgaaagccgaaagtagtcacactagggatgctggctcaactgcctcaacagctattcttgtaggcgatcgcttgctggttgctaatgttggagattctagagcagttgtttgtagaggcggggatgcaattgcagtttcaagggatcacaaacccgaccagtcagatgagagacaaagaattgaggacgctgggggcttcgtgatgtgggctgggacgtggcgtgttggtggtgttcttgctgtttctcgagcatttggtgataagctattgaagcagtatgtagttgctgatccagagatcaaggaggagattgtcgatagctccctcgagttcctcatccttgctagcgatggactttgggatgttgtaagtaacaaggaagctgttgacatggtgaggcctattcaggatcccgaacaggcagcgaaaaggcttctccaggaggcgtaccaaaggggtagcgccgataacatcaccgttgttattgtccgctttttggagggaacaacgactggtggtggaccaagtagggaggccgccagcgaccaaaactcatag

SEQ ID NO: 879 - protein, 288 aa, Oryza sativa subsp
MGFAGDCSPVSGGGLSENGKFSYGYASAPGKRASMEDFYETRIDGVDGETIGLFGVFDGHGGARAAEYVKQHLFSNLIKHPKFISDIKSAIAETYNHTDSEFLKAESSHTRDAGSTASTAILVGDRLLVANVGDSRAVVCRGGDAIAVSRDHKPDQSDERQRIEDAGGFVMWAGTWRVGGVLAVSRAFGDKLLKQYVVADPEIKEEIVDSSLEFLILASDGLWDVVSNKEAVDMVRPIQDPEQAAKRLLQEAYQRGSADNITVVIVRFLEGTTTGGGPSREAASDQNS

SEQ ID NO: 880 - DNA, 1065 bp, Oryza sativa subsp
  CDS (1)..(1065)
atgtgcgtggaggaactcgaaggcgcagagaggctcgattttggtggggttgcggagctcgagacaacaccggcagatttcgagatggagaaagtttgtgagaacacagtatctcttgatttcaagcaggctaggtcgagcagttttgtcccagttatccgatcaggggactggtcggatattggaggtcgcgattacatggaagatgctcatgtctgcatctcagatctagctaagaattttggtcataattcagtggatgatgagattatttccttttatggggtctttgatgggcatggtggaaaagatgcagctcattatgtgcgtgataacttgccacgggttatcgtggaagatgctgattttcctcttgagctagagaaagttgtcaggaggtcatttgtgcaaactgatagtcaatttgcagagaggtgctctcatcagaatgcactttcttctggaacgacagcgcttacagcaatgatttttggaaggtctcttctggttgctaatgctggtgattgccgagcagttctttcaaggcgtggtaccgcaattgaaatgtccaaggaccacaggacttgctgcctcaacgaaagaaagcgtatagaatcacttggcggctatgttgatgatggctatttgaatggtcaattagcagtcactagagcattgggtgactggcatctcgagggtctgaaagaagtgggtgagccaggtggccccttgagcgcggaaccagagctcaagatgatcacactgacgaaggaagacgagttcttgataataggaagcgacggcatctgggacttcttctcgaaccagaatgccgtggatttcaccaggaagaggctccaagagcacaatgacttgaggttgtgctgcaagcagatcgtcgaggaggcaataaggcgaggggcctcagacaacctaacggcggtgatggtctcattccaccaggaggcccctcctcagctcagagtgaacaggacggggagggtcgagcggagcatatcggctgaagggcttcacagcctcagggtgctcctggaaggccaatga

SEQ ID NO: 881 - protein, 354 aa, Oryza sativa subsp
MCVEELEGAERLDFGGVAELETTPADFEMEKVCENTVSLDFKQARSSSFVPVIRSGDWSDIGGRDYMEDAHVCISDLAKNFGHNSVDDEIISFYGVFDGHGGKDAAHYVRDNLPRVIVEDADFPLELEKVVRRSFVQTDSQFAERCSHQNALSSGTTALTAMIFGRSLLVANAGDCRAVLSRRGTAIEMSKDHRTCCLNERKRIESLGGYVDDGYLNGQLAVTRALGDWHLEGLKEVGEPGGPLSAEPELKMITLTKEDEFLIIGSDGIWDFFSNQNAVDFTRKRLQEHNDLRLCCKQIVEEAIRRGASDNLTAVMVSFHQEAPPQLRVNRTGRVERSISAEGLHSLRVLLEGQ

SEQ ID NO: 882 - DNA, 1221 bp, Oryza sativa subsp
  CDS (1)..(1221)
atggcggagatttgctgcgaggttgtggctggatcgtcgtcggaggggaagggcccggagtgcgacaccgggagccgagcggcgaggcggcggcggatggagatccggcggctcagggtggtcgcggagcgtggggcggaggaggagacctccgggaagaggcggaggcttgatggcggcgggggagaggcctcgacggacgaggacagggaggtggagcgcgctaggtacggctttacgtcggtgtgcggacgccggagggacatggaggactccgtctccgcctgcccggggttcctccccggccaccacttcttcggggtgttcgacggccacggctgctctcatgtggcgacgtcgtgcgggcagcggatgcacgagatcgtggtcgacgaggccggcgccgccgctgggtcggcggcgttggacgaggaggcgcggtggaggggcgtcatggagaggagcttcgcgcggatggacgcggaggccgtggcctcgtcacgggggagcgtcgccccggcccccacctgccggtgcgagatgcagctgcccaagtgcgaccacgtcggctcaacggccgtcgtcgccgttctgggccctcgccacgtcgtcgtcgccaactgcggcgactcgcgcgccgtcctctgccgcggtggcgccgccatacccctctcatgcgaccataagccggaccggcccgacgagctcgaacggatccacgcggcgggagggcgcgtcatcttctgggacggcgcccgcgtctttggcatgctcgccatgtcacgagccatcggggacagctatttgaagccgtacgtgatatgcgacccggaggtgagggtgatggagaggaaggacggcgaggacgagttcctcatcctggccagcgacggcctgtgggacgtggtgagcaacgaggtggcctgcaacgtcgtgcgcgcctgcctgaggagcagcgggcggcgcgagaggaaccggtcgagcccgacgtccaacctaagcccgaggcagagcagcagcagcggcgacgaggcgcccaacgacggtgctccttccgccgccgccgccgccgctggctcggagagcgacgaggagagcgccgccgaggaggacaaggcgtgcgccgaggcggccgtcctgctgaccaagctggctttggcgcggcaaacctcggacaatgtcagcgtcgtcgtcgtaaatctcaggcgccggaaattgtga

SEQ ID NO: 883 - protein, 406 aa, Oryza sativa subsp
MAEICCEVVAGSSSEGKGPECDTGSRAARRRRMEIRRLRVVAERGAEEETSGKRRRLDGGGGEASTDEDREVERARYGFTSVCGRRRDMEDSVSACPGFLPGHHFFGVFDGHGCSHVATSCGQRMHEIVVDEAGAAAGSAALDEEARWRGVMERSFARMDAEAVASSRGSVAPAPTCRCEMQLPKCDHVGSTAVVAVLGPRHVVVANCGDSRAVLCRGGAAIPLSCDHKPDRPDELERIHAAGGRVIFWDGARVFGMLAMSRAIGDSYLKPYVICDPEVRVMERKDGEDEFLILASDGLWDVVSNEVACNVVRACLRSSGRRERNRSSPTSNLSPRQSSSSGDEAPNDGAPSAAAAAAGSESDEESAAEEDKACAEAAVLLTKLALARQTSDNVSVVVVNLRRRKL

SEQ ID NO: 884 - DNA, 1176 bp, Oryza sativa subsp
  CDS (1)..(1176)
atgtcctgcacggtcgccatcccgagctcgccggtgttctcgccgtcgcgccgcccgctctcctgcaaggccgcgtccgcgtccgcctcgccggagtccgtatccgtcgccgcgtcctcgccggcgcaggccgcgccccccgccgggtcgccgctccgccccttcgcgctgcgcgcccacctgcgcgaggaggccacgccgtcgccccagccgtcggccgccgcggctgcggcggtctccgcccctgcggggtccgtgcttaagaggcggcgcccggcccctctcgtggttccggtgtgcggcggggcggccgctgccgccgccgccgcggcggtggccgcggtggaatcggatccgaggaacgaggtggaggaggacggcgaggagttcgcggtgtactgccggaggggaaaggggaggagaagggtggagatggaggaccggcatgtggccaaggtcgccctcggcggagaccccaaagtggccttttttggtgtattcgatggccacggcgggaagagcgcggcggagttcgtcgccgagaacatgcccaagttcatggccgaggagatgtgcaaggtggacggcggcgacagtggcgagactgaacaggcagtgaagcggtgctacctgaagacggacgaggaattcctcaagagggaggagagcgggggcgcctgctgcgtcaccgctttgctgcagaaaggtggcctcgttgtgtctaatgccggagattgccgtgccgtgctcagccgcgccgggaaggcagaggcgctcacctctgatcaccgggcctcgcgcgaggatgagagggaaagaattgagaatctgggtggattcgtggtgaattaccgaggaacatggcgagttcagggatccttagcagtgtcaagaggcatcggtgatgcacacctcaagcagtgggtggtgtctgatccagacaccacaactctgggtgttgattcgcagtgcgaattcttgattcttgcctctgatggtttgtgggacaaggtggagaaccaggaggcagttgacattgccaggccgctttgcatcagcaacgacaaagcttctcgcatgactgcttgcaggaggctcgtcgaaactgcggttactaggggctcgactgacgatatcagcattgtgatcatacagctgcagcaattctcaagataa

SEQ ID NO: 885 - protein, 391 aa, Oryza sativa subsp
MSCTVAIPSSPVFSPSRRPLSCKAASASASPESVSVAASSPAQAAPPAGSPLRPFALRAHLREEATPSPQPSAAAAAAVSAPAGSVLKRRRPAPLVVPVCGGAAAAAAAAAVAAVESDPRNEVEEDGEEFAVYCRRGKGRRRVEMEDRHVAKVALGGDPKVAFFGVFDGHGGKSAAEFVAENMPKFMAEEMCKVDGGDSGETEQAVKRCYLKTDEEFLKREESGGACCVTALLQKGGLVVSNAGDCRAVLSRAGKAEALTSDHRASREDERERIENLGGFVVNYRGTWRVQGSLAVSRGIGDAHLKQWVVSDPDTTTLGVDSQCEFLILASDGLWDKVENQEAVDIARPLCISNDKASRMTACRRLVETAVTRGSTDDISIVIIQLQQFSR

SEQ ID NO: 886 - DNA, 1251 bp, Oryza sativa subsp
  CDS (1)..(1251)
atggtggcggaggcggaggtgatgcatcagcccgtgccggtgttggaggtgccgtaccaccggtgcgtcgccaagggtgtcgaggaggtggccgccgcggcggcggtggcgccgccgccggtggtcgaggtcgaggtcgccgtccaggtgcctcacatggtttattatggagtttactgcctttctgtttattacacgagattgttttctgttcgtggatgcaaaagactgacacagtttgggttggagagtgctgctggtgcaccgagcatatcagttgatgcactacagtttgttcccagtattcgatctggtagctttgctgatattggacctaggaggtacatggaagatgagcacatccggatagatgatctctctgcccatcttggatcgctcttggtgtgtccgttgcctagtgccttctatggggtcttcgatggccatggaggcctggatgctgcagcctacatgaaaaggcatgcaatgaggttcctgtttgaggacagtgagttcccacaagcatcgcaagtagatgaaacatatgttcagtcagttgagaactctgtgcgcagagcgttcttgcaagcagatcttgccttagctgatgatttagatatcagccgctcttccggaactacagcactcaccgcattagtcttcggaaggcaattgctggttgcaaatgcgggggattgccgtgcggtcctttgccggagaggcgtagcgatggagatgtctcgagatcacagagcaaactatgccgaggagtgtgaacgggttgctgcatccggaggatacatcgaggatggctacctcaacggagtcctatccgtgacacgggccctaggggactgggacatgaaaatgcccgacggctcgatatcccctctcatcgccgagccagagttccgacagaccatgctcacggaggacgacgagttcctcatcatggggtgcgacgggatctgggacgtgatgaccagccagcacgcggtgagcatcgtccgacgggggctccggcagcacgacgaccccgagaggtgcgcgagggagctcgtcatggaggccaagaggctcgagaccgccgacaacctgacggtgatcgtcgtctgcttcgtctcggagcttgggtcgccgcggcgggagcaggtgggggggcaggcgggggtggcgaggccgaggagttgcaagagcctctctgcggaggccctgtgcaacctgaggagctggctggagactgatcgctag

SEQ ID NO: 887 - protein, 416 aa, Oryza sativa subsp
MVAEAEVMHQPVPVLEVPYHRCVAKGVEEVAAAAAVAPPPVVEVEVAVQVPHMVYYGVYCLSVYYTRLFSVRGCKRLTQFGLESAAGAPSISVDALQFVPSIRSGSFADIGPRRYMEDEHIRIDDLSAHLGSLLVCPLPSAFYGVFDGHGGLDAAAYMKRHAMRFLFEDSEFPQASQVDETYVQSVENSVRRAFLQADLALADDLDISRSSGTTALTALVFGRQLLVANAGDCRAVLCRRGVAMEMSRDHRANYAEECERVAASGGYIEDGYLNGVLSVTRALGDWDMKMPDGSISPLIAEPEFRQTMLTEDDEFLIMGCDGIWDVMTSQHAVSIVRRGLRQHDDPERCARELVMEAKRLETADNLTVIVVCFVSELGSPRREQVGGQAGVARPRSCKSLSAEALCNLRSWLETDR

SEQ ID NO: 888 - DNA, 1194 bp, Oryza sativa subsp
  CDS (1)..(1194)
atgagggagacgggcgcgacggatgaggggcacgcgtgcgaagttgtagtagccggaggtgatggcaaggccgcggcggcacgccggcgtcgacgtctcgagctccggcggctcgggctggcggcggaggatgatgcggcggcgaagagaatccggtcggtgaaggacgggtcgtcgtctgatgactcgtcgacggaggttgttccccggagctggccggcgtgcgtgtcgcacggctcggtgtcggtgatcgggcggcggagggagatggaggacgcggtggccatcgagcggacgttcatggcttcgacgggggatggtgcgggcgctatcaggggcggcggggagggcgaggaggatttcttcgcggtgtacgacggccacggcgggtcgcgggtggcggaggcgtgcaggaagcggatgcacgttgtgctcgcggaggaggtgagcctgcggcggctgcgggggcagagcgcgtcgggcggcgacgtgcgctggaaggaggcgatgttggccagcttcgcgaggatggacggcgaggtcgtcgggagcgtcgccgccgccgccccccgcgtcgacggcaccgagccgtcggggttcaggacggtgggctccaccgccgtggtcgccgtcgtgggacgccgccgcatcgtcgttgccaactgcggcgactcgcgcgccgtgctctcccgcggtggcgtcgcgctgccactctccactgaccacaagccagatcggcctgacgagttggaacgagtggaagcagctggaggcagagtcatcaactggaacggttaccgtgtccttggtgttttagccacttctagatccatagcattggcatatgtaaaacttacaaatgccaaggcatctcgaatttcaggcgactactacctgaagccgttcgtgagcgcagagccggaggtgagggtggtggagaggacggacaaggacgagttcctgatcctggcgagcgacgggctgtgggacgtggtgtccaacgaggtggcgtgcaagatcgccaggaactgcctcaacggccgcgcggcctccatgttcccggagtccgtctccggcagctcggccgccgacgccgcggcgctcctcgccgagctcgccgtctcgcgcggcagcagggacaacatcagcgtcgtcgtcgtcgagctcaggcggctcaagagcagggcagcttga

SEQ ID NO: 889 - protein, 397 aa, Oryza sativa subsp
MRETGATDEGHACEVVVAGGDGKAAAARRRRRLELRRLGLAAEDDAAAKRIRSVKDGSSSDDSSTEVVPRSWPACVSHGSVSVIGRRREMEDAVAIERTFMASTGDGAGAIRGGGEGEEDFFAVYDGHGGSRVAEACRKRMHVVLAEEVSLRRLRGQSASGGDVRWKEAMLASFARMDGEVVGSVAAAAPRVDGTEPSGFRTVGSTAVVAVVGRRRIVVANCGDSRAVLSRGGVALPLSTDHKPDRPDELERVEAAGGRVINWNGYRVLGVLATSRSIALAYVKLTNAKASRISGDYYLKPFVSAEPEVRVVERTDKDEFLILASDGLWDVVSNEVACKIARNCLNGRAASMFPESVSGSSAADAAALLAELAVSRGSRDNISVVVVELRRLKSRAA

SEQ ID NO: 890 - DNA, 1476 bp, Oryza sativa subsp
  CDS (1)..(1476)
atggtttacgatggcgccgtgaaggaccaggagagctcggctaacccggcgtcggcatcggctgctctgtcggaggcatcggcggcggcgtcggaggtaacagcggctgccgcggcgggggcgggggctggggcggcggaggagggggcggctgtgagtgggcgaccgccgaggcctccccacgacaagcggctcggcgtgcggcatcccttgaagcaccgcaggttccgcgccggggggaaggtgatggtggagcccggggatccgccgtccgcccaggaggtggcggatgaggaggccagcgaggtggagcaggaggcggcgccggtggagagggaaccaccacaggaggagggtggtgatgtagaggtgtcgtctgcaccggcagagatggaggtggtggagggggatgcaatggaggtgtcacctgagccagcagtggctgtgggggagtcggagttggaaggccgaccaggcgaggaggaggaggtgtcctcgcctgtggttcctcaaggggagaggaagcaggagactgctgctgctgctcctgtgccagcagtggaggagaagaaacacaaggatcaagagaataagcacaaagagagggaaagggagaaggagagagagagggtggatgaagtgggctacatgagtggtggatggaagagtgaggatggatttctgagttgtggatattcgagttttagaggaaaaagagcaagcatggaagacttctatgatataaaatcatctaaaattgatgataaacaaataagcctctttggaatatttgatggtcatggtggttcacgtgctgctgagtatttgaaggagcacttgtttgagaacctcatgaaacatccagagttcatgacaaatacaaaattagcaataagcgaaacatataaaaaaactgattcagagtttttggattctgaaagccacactcatagagatgatggatcaaccgcatcgacagcggttttggttggaaatcatctctatgtggcaaatgttggcgactctcgtgctgtaatatcaaaggctggcaaagctattgcactctctgaggatcacaagccaaatagaagcgatgagaggaagcgaattgagagtgctggtggggttgttatgtgggctggaacttggagggtaggtggtgtacttgcaatgtctcgggcatttggcaaccgcttgttgaagcaatttgttgttgcagatcctgagattcaggaacaagaaatagatgatgaattggagtttctgattttagctagtgatgggctgtgggatgtggttccgaatgaggatgctgtttcactcgtgaagattgaggaggaacctgaggcagcagctcggaagctgacagagactgcattttcccgagggagtggtgacaatatcacatgcattgtcgtgaaatttcaacatgacaagatggacggtgattcctcaccaacaagcgataaaagctga

SEQ ID NO: 891 - protein, 491 aa, Oryza sativa subsp
MVYDGAVKDQESSANPASASAALSEASAAASEVTAAAAAGAGAGAAEEGAAVSGRPPRPPHDKRLGVRHPLKHRRFRAGGKVMVEPGDPPSAQEVADEEASEVEQEAAPVEREPPQEEGGDVEVSSAPAEMEVVEGDAMEVSPEPAVAVGESELEGRPGEEEEVSSPVVPQGERKQETAAAAPVPAVEEKKHKDQENKHKEREREKERERVDEVGYMSGGWKSEDGFLSCGYSSFRGKRASMEDFYDIKSSKIDDKQISLFGIFDGHGGSRAAEYLKEHLFENLMKHPEFMTNTKLAISETYKKTDSEFLDSESHTHRDDGSTASTAVLVGNHLYVANVGDSRAVISKAGKAIALSEDHKPNRSDERKRIESAGGVVMWAGTWRVGGVLAMSRAFGNRLLKQFVVADPEIQEQEIDDELEFLILASDGLWDVVPNEDAVSLVKIEEEPEAAARKLTETAFSRGSGDNITCIVVKFQHDKMDGDSSPTSDKS

SEQ ID NO: 892 - DNA, 1167 bp, Oryza sativa subsp
  CDS (1)..(1167)
atgtgcgtggaggagtcggagggcgcggagaggctggattttggggagcccgccgccgccgccgccgacgccgggaagagcaagagcaagagccccgacgaactcccctcgcctcggctagtactgattgtgcctagactgatcgtgtgtgtggaggagttaagttttctgcatttgttagctgcgaagtttggtggcctgatggaaagagtttgtgagaacactacagctgctgatttcaagcaaaataagtctggtaattttgtcccaaatattcgatctggggattggtcggatattggaggtcgtcaatacatggaagatacccatgtgtgtattactgacctagctaagaactttggttatcaatcggtggataatgaagctatttccttttatggggtctttgatgggcatggtggaaaagatgctgcccattttgttcgtgataatttaccaaggatcattgtggaagatgctgattttcctcttgagcttgagaaagtagtaagaagatcctttgttcatgcagataatcagtttgcaaagacaacactgtcttctggcacaacagcacttacagcaatgattttcggaaggactcttctgattgcaaatgctggagattgtagggcggttctttcacggtgcggcactgcaattgaaatgtcagtggaccacaggccttgcagcctcagcgaaaaactgcgtgtagaatcacttggtggctatgtcgacgatggttacctcaacggtttgttaggagtcactagagcactcggtgactggcatcttgagggcatgaaagaagctggcaatccaggaggtccacttagtgctgaaccagagctaaagatgatcacactgacaaaggacgacgagttcttgataattggcagcgacgggatctgggacgtcttctcaaaccaaaacgtggtggactttgcacggaggcgcctccaagaacacaacgatgtgaagtcctgctgcagggagatcgttgaggaggcaataaagcgaggcgccaccgacaacttaaccgcggtgttggtctccttccacctggaggctcctccccaggtcagagtgagccgacccggtagggtggcgcgcagcatttcggctgaggggctgaacagcttgaggacactcctgagaaaccaatga

SEQ ID NO: 893 - protein, 388 aa, Oryza sativa subsp
MCVEESEGAERLDFGEPAAAAADAGKSKSKSPDELPSPRLVLIVPRLIVCVEELSFLHLLAAKFGGLMERVCENTTAADFKQNKSGNFVPNIRSGDWSDIGGRQYMEDTHVCITDLAKNFGYQSVDNEAISFYGVFDGHGGKDAAHFVRDNLPRIIVEDADFPLELEKVVRRSFVHADNQFAKTTLSSGTTALTAMIFGRTLLIANAGDCRAVLSRCGTAIEMSVDHRPCSLSEKLRVESLGGYVDDGYLNGLLGVTRALGDWHLEGMKEAGNPGGPLSAEPELKMITLTKDDEFLIIGSDGIWDVFSNQNVVDFARRRLQEHNDVKSCCREIVEEAIKRGATDNLTAVLVSFHLEAPPQVRVSRPGRVARSISAEGLNSLRTLLRNQ

SEQ ID NO: 894 - DNA, 1170 bp, Oryza sativa subsp
  CDS (1)..(1170)
atggaagagcataggcttggcggcggcggcggcggaggcggaggcggggggaggccgccgatcccgggggcggcggggaggaagcttccggggctctcgcggcacgcctcgttcgagcaagcaggtccaagatactttgcttcaagatctaaaacgtcaactattttgatactggagggagtgaggagtcctgcaaacagtacaaaatctggaactgagaaaacttttgaaaacatggatgctgttgcatatatgcctgttgtaaggtctggaggttgggctgatattgggtcaaggcacacaatggaggatgtctttatttgttctgataacctcatgaaagagtttggagttgaaagttttgaagatggtccgagcgcattttatggggtttttgatgggcatggtggaaagcacgctgctgactttgtgtgcagcaatttggcaaggtttatcgttgaggatgaggattttccaagggagatagagaaagctctgtcctcagcgttcttacagactgatgctgctttcgcagatgcttgttctgtgaactcctctcttgcttctggcacaactgctcttgctgctcttgtggttgggaggtcacttctggtagcaaatgctggtgattgtagagcagtactttgttgtcgtggaaaggccattgaaatgtccagggatcacaagccttcttgcaacagagagaaggttcgcattgaagcctctggtggttatgtttatgatggctacctgaatgggcagcttaatgttgcgcgggcaataggagactggcacatggaaggaatgaaggcatgtgatggtcttggacctcttagtgctgagcctgaggtgatgatcaggaatctcactgaggaggatgaattcctcatcatcggttgtgatgggatctgggacgtattccgcagccaaaatgcggtagactttgcacgccgaaagctccaggagcacaatgatcctgttacctgttgtaaagaacttgttgatgaggccatcaagaggaagagcggcgacaacctttctgttgttgtcatctgcttcaactctcggccgcctcctgtcctaacaactccaaggcctcgtgtacagaggagtatatctgcagaaggcctgagggagttgcaaagctttcttgatagcttggctgattga

SEQ ID NO: 895 - protein, 389 aa, Oryza sativa subsp
MEEHRLGGGGGGGGGGGRPPIPGAAGRKLPGLSRHASFEQAGPRYFASRSKTSTILILEGVRSPANSTKSGTEKTFENMDAVAYMPVVRSGGWADIGSRHTMEDVFICSDNLMKEFGVESFEDGPSAFYGVFDGHGGKHAADFVCSNLARFIVEDEDFPREIEKALSSAFLQTDAAFADACSVNSSLASGTTALAALVVGRSLLVANAGDCRAVLCCRGKAIEMSRDHKPSCNREKVRIEASGGYVYDGYLNGQLNVARAIGDWHMEGMKACDGLGPLSAEPEVMIRNLTEEDEFLIIGCDGIWDVFRSQNAVDFARRKLQEHNDPVTCCKELVDEAIKRKSGDNLSVVVICFNSRPPPVLTTPRPRVQRSISAEGLRELQSFLDSLAD

SEQ ID NO: 896 - DNA, 1086 bp, Oryza sativa subsp
  CDS (1)..(1086)
atgggagtttaccttagtacccccaaaaccgagaagctatctgaagatggcgaaaatgataagcttaaatttggactctcatctatgcaaggatggcgtgcaactatggaggatgctcattcagctttgctagatatcgataatgacacatcattctttggtgttttcgatggacatggaggaagagtggttgctaaattctgtgcaaaatatctgcacagagaagttctcagaagtgaggcctattcagcaggtgacctgggcaatgcagcccataaagctttctttagaatggatgagatgatgcgaggtcaaagaggctggcgagaactacaggcacttggagataagataaaccagattagtggcatgatagaaggcttgatctggtctccaagaggcagtgattcaaatgatcaacacgatgattgggcttttgaagagggaccacactctgactttgctgggccaacctgtgggagcacagcttgtgttgcaatagtaagaaataaccaacttgttgtcgcaaatgctggcgattcccgctgtgttatctcaaggaatggtcaggcatacaatttatcaagagaccacaaaccagagcttgaagcagagagagaaagaatactaaaagcaggagggtacatacagatgggacgagtaaatggaactataaacttgtcaagggcaattggtgacattgaatttaaacagaacaagttcttgtctcctgataagcaaatgttaactgcaaaccctgacatcaacacagtggagctttgtgatgatgatgactttcttgttttagcatgtgatggcatctgggactgcatgtctagccaacagctggttgatttcatccacgaacacataaacacagagagcagcctttctgcggtatgcgaaagagtgctagatagatgcctggctccatcaactttgggtggagaaggatgcgacaacatgacaatgatcctagtgcagttcaagaagccaattagtcagaacaagaatgtcagtcctgcggaacaatcagctgccgacaaacaaccaactggagacacacattggtctgagattcagtga

SEQ ID NO: 897 - protein, 361 aa, Oryza sativa subsp
MGVYLSTPKTEKLSEDGENDKLKFGLSSMQGWRATMEDAHSALLDIDNDTSFFGVFDGHGGRVVAKFCAKYLHREVLRSEAYSAGDLGNAAHKAFFRMDEMMRGQRGWRELQALGDKINQISGMIEGLIWSPRGSDSNDQHDDWAFEEGPHSDFAGPTCGSTACVAIVRNNQLVVANAGDSRCVISRNGQAYNLSRDHKPELEAERERILKAGGYIQMGRVNGTINLSRAIGDIEFKQNKFLSPDKQMLTANPDINTVELCDDDDFLVLACDGIWDCMSSQQLVDFIHEHINTESSLSAVCERVLDRCLAPSTLGGEGCDNMTMILVQFKKPISQNKNVSPAEQSAADKQPTGDTHWSEIQ

SEQ ID NO: 898 - DNA, 984 bp, Oryza sativa subsp
  CDS (1)..(984)
atgcgtgaggtgctcctcctcggctcgttggtggttctcgccttgttgtcgctgttcccgtgctgctcctgtctctcgcagggagcggaggaggaggaggacgacggcgaggtgcgcttgatggggctcgccggagaggccgccggctcgcctggcagtggcggcgggttcagtgcaaatggtaaatttagctatggttatgcgagctctcctggaaaaagatcctccatggaggacttctatgacaccagaattgatggtgtcgatggagagaccgttggactgtttggtgtctttgatggtcatggtggagctcgagcagcagaattcgtcaagcagaacctcttcaccaatttaatcaagcacccaaagttattcagtgataccaagtctgcaattgctgaaacttacactagcacggactctgaacttctgaaagctgaaaccagccacaatcgagatgcagggtcgactgcctccactgcaattctcgtaggcgaccgtctgctcgttgcaaatgttggagattctagggctgtcatttgtagaggaggagatgctatagctgtgtcaagagaccacaagcctgatcagtcagacgagaggcagaggatagaggatgctggtggttttgtgatgtgggctggaacatggcgcgtgggtggtgttcttgctgtctctcgagcatttggtgacaaactcctgaagcaatatgtggttgctgatccagagatcaaggaggaggtggtcgacagctctctcgagttcctcatccttgctagtgatggcctctgggacgtggtgaccaacgaggaagctgtggccatggtgaagccaattctggattcagagcaggctgcaaagaagctcctccaggaggcctcacagaggggaagcgcagacaacatcacctgcctcgtcgtccgtttcttggagcaggagaatcacctgccagagagaccgacgaatgatcaagcctcctaa

SEQ ID NO: 899 - protein, 327 aa, Oryza sativa subsp
MREVLLLGSLVVLALLSLFPCCSCLSQGAEEEEDDGEVRLMGLAGEAAGSPGSGGGFSANGKFSYGYASSPGKRSSMEDFYDTRIDGVDGETVGLFGVFDGHGGARAAEFVKQNLFTNLIKHPKLFSDTKSAIAETYTSTDSELLKAETSHNRDAGSTASTAILVGDRLLVANVGDSRAVICRGGDAIAVSRDHKPDQSDERQRIEDAGGFVMWAGTWRVGGVLAVSRAFGDKLLKQYVVADPEIKEEVVDSSLEFLILASDGLWDVVTNEEAVAMVKPILDSEQAAKKLLQEASQRGSADNITCLVVRFLEQENHLPERPTNDQAS

SEQ ID NO: 900 - DNA, 1068 bp, Oryza sativa subsp
  CDS (1)..(1068)
atggcggaggtgtgctgtgattctgcggtggtggtcggggcggaggcggaggcgagggcgagggcgcgcgccgggaggcggcggcgggcgggagttgagggggcagggaggtggaacgccacggcgacggctgcgggtgtggcggcggaggaggccgcgacgaggaagcggagggcgagtggtggtgaggccgggttggtggtggtggcgaagcggcacggggcggcgtcggtcgccgggaggaggagggagatggaggacgccgtgtcgctgcgcgaggcgttcgccgcgccggcgaacggggaggttgcggcggcgaggtgtgacttctacggggtgttcgacgggcacggctgctcgcacgtggcggacgcgtgcagggagcggatgcacgagctcgtcgcggaggagatgggcgccgggtcaccggcggcggcggcgcgcgagccggcgtcttggacggagacgatggagcggagcttcgcgaggatggacgccgaggtgatcgccggctgccgagccgagagcggcagctgccggtgcgaggggcagaagtgcgaccacgtggggtccaccgcggtggtggccgtcgtggaggagagccgcgtcgtcgtcgccaactgcggcgactcccgcgccgtgctctgccgcggcggcgcgcccgtgcagctatccgaccacaagcccgaccgccccgacgagctggagcggatcgaggcggccggcggccgcgtcatcttctgggagggcgcccgtgtcctcggcgtcctcgccatgtcgcgctccatcggcgacgcctacctgaagccctacgtcaccgccgtgccggaggtgacggtgaccggcaggtcggacttcgacgagtgcctcatcctcgccagcgacggcctctgggacgtcgtcagcaacgaggccgcgtgcgaggtggcgcagtcgtgcctccgccgcggcaggcagcggtggtgcgccgaggcggcggcggtgctgaccaagctggccctcgctcgccgcagctccgacaacatctctgtcgtcgtcgtcgatctccggcgaggcaacgccttgtag

SEQ ID NO: 901 - protein, 355 aa, Oryza sativa subsp
MAEVCCDSAVVVGAEAEARARARAGRRRRAGVEGAGRWNATATAAGVAAEEAATRKRRASGGEAGLVVVAKRHGAASVAGRRREMEDAVSLREAFAAPANGEVAAARCDFYGVFDGHGCSHVADACRERMHELVAEEMGAGSPAAAAREPASWTETMERSFARMDAEVIAGCRAESGSCRCEGQKCDHVGSTAVVAVVEESRVVVANCGDSRAVLCRGGAPVQLSDHKPDRPDELERIEAAGGRVIFWEGARVLGVLAMSRSIGDAYLKPYVTAVPEVTVTGRSDFDECLILASDGLWDVVSNEAACEVAQSCLRRGRQRWCAEAAAVLTKLALARRSSDNISVVVVDLRRGNAL

SEQ ID NO: 902 - DNA, 990 bp, Oryza sativa subsp
  CDS (1)..(990)
atgtcggcgggatggtggggcccacaggacctgggtgcggggacgctgagcttgatctcgcccacggacattcgccctggcttcctgccggtgttccgttccgggagctgcgccgatatcggtaccaaatcgtacatggaggacgagcatgtgtgcgtcgataacctcatcgagcacctgggagtgcgtacacctgtgatccctgcaccgggtgccttctacggggtgtttgatggtcatggtggtacggacgctgcttgttttgttcggaagaacttactgaggttcataattgaggatggtcacttccccagcagcatagagaaggcaatcaggagtgcatttgtgagggctgatcatgcaattgcggattcccattctcttgaccgcaattctgggactacagcattgacagcacttatttttggcaggacattgctcgttgcaaatgcaggagactgtcgagcggtattagggaagagaggccgagctgttgagttgtcaagagaccataaacccagctgcagaagcgaaaagatcagaatcgagaaccttggtggtactgtctttgatggctatctcaatggtcagctgtctgtagcaagggcgattggtgattggcacgtgaaaggttccaaagggtccataagccctctcactgcagagccagagtttcaggaggttagactcaccgaggaagatgagttcttaataatcggctgtgacgggctttgggatgtgatgaccagccagtgcgctgtcacaatggtaaggaaagagctgatgacacacaatgatccggaaagatgctcgcaagagctagttcaagaggctctgcgacggaactcatgcgacaacctaactgtattggttgtgtgcttctcatcagacccaccacctcagatcgaggtcccaagatttcgagtacgaagaagcatttcgatggaaggattgcatatgttaaagggagctcttgacagtaatgcctga

SEQ ID NO: 903 - protein, 329 aa, Oryza sativa subsp
MSAGWWGPQDLGAGTLSLISPTDIRPGFLPVFRSGSCADIGTKSYMEDEHVCVDNLIEHLGVRTPVIPAPGAFYGVFDGHGGTDAACFVRKNLLRFIIEDGHFPSSIEKAIRSAFVRADHAIADSHSLDRNSGTTALTALIFGRTLLVANAGDCRAVLGKRGRAVELSRDHKPSCRSEKIRIENLGGTVFDGYLNGQLSVARAIGDWHVKGSKGSISPLTAEPEFQEVRLTEEDEFLIIGCDGLWDVMTSQCAVTMVRKELMTHNDPERCSQELVQEALRRNSCDNLTVLVVCFSSDPPPQIEVPRFRVRRSISMEGLHMLKGALDSNA

SEQ ID NO: 904 - DNA, 927 bp, Oryza sativa subsp
  CDS (1)..(927)
atggggtttgccggggactgctcgccggtcagcggtggcgggctcagggggaagatccaagaggaggaggaggaggaggagaaggatgacaagtttttcatggcgcgtgaaaacggcaagttcagttatgggtatgcaagtgctcctgggaaaagggcttcaatggaggatttctacgagacgagaatcgatggtgttgatggagagaccattggattatttggcgtattcgacggccatggcggagctcgagcggctgaatatgtcaagcagcaccttttcagcaatttaattaagcatccaaagttcatcagtgatatcaagtccgctatcgctgaaacgtacaaccatacagattcagaatttctgaaagccgaaagtagtcacactagggatgctggctcaactgcctcaacagctattcttgtaggcgatcgcttgctggttgctaatgttggagattctagagcagttgtttgtagaggcggggatgcaattgcagtttcaagggatcacaaacccgaccagtcagatgagagacaaagaattgaggacgctgggggcttcgtgatgtgggctgggacgtggcgtgttggtggtgttcttgctgtttctcgagcatttggtgataagctattgaagcagtatgtagttgctgatccagagatcaaggaggagattgtcgatagctcccttgagttcctcatccttgctagcgatggactttgggatgttgtaagtaacaaggaagctgttgacatggtgaggcctattcaggatcccgaacaggcagcgaagaggcttctccaggaggcgtaccaaaggggtagcgccgataacatcaccgttgttattgtccgctttttggagggaacaacgactggtggtggaccaagtagggaggccgccagcgaccaaaactcatag

SEQ ID NO: 905 - protein, 308 aa, Oryza sativa subsp
MGFAGDCSPVSGGGLRGKIQEEEEEEEKDDKFFMARENGKFSYGYASAPGKRASMEDFYETRIDGVDGETIGLFGVFDGHGGARAAEYVKQHLFSNLIKHPKFISDIKSAIAETYNHTDSEFLKAESSHTRDAGSTASTAILVGDRLLVANVGDSRAVVCRGGDAIAVSRDHKPDQSDERQRIEDAGGFVMWAGTWRVGGVLAVSRAFGDKLLKQYVVADPEIKEEIVDSSLEFLILASDGLWDVVSNKEAVDMVRPIQDPEQAAKRLLQEAYQRGSADNITVVIVRFLEGTTTGGGPSREAASDQNS

SEQ ID NO: 906 - DNA, 1251 bp, Oryza sativa subsp
  CDS (1)..(1251)
atggtggcggaggcggaggtgatgcatcagcccgtgccggtgttggaggtgccgtaccaccggtgcgtcgccaagggtgtcgaggaggtggccgccgcggcggcggtcgcgccgccgccggtggtcgaggtcgaggttgccgtccaggtgcctcacatggtttattatggagtttactgcctttctgtttattacacgagattgttttctgttcgtggatgcaaaagactgacacagtttgggttggagagtgctgctggtgcaccgagcatatcagttgatgcactacagtttgttcccagtattcgatctggtagctttgctgatattggacctaggaggtacatggaagatgagcacatccggatagatgatctctctgcccatcttggatcgctcttggtgtgtccgttgcctagtgccttctatggggtcttcgatggccatggaggcctggatgctgcagcctacatgaaaaggcatgcaatgaggttcctgtttgaggacagtgagttcccacaagcatcgcaagtagatgaaacatatgttcagtcagttgagaactctgtgcgcagagcgttcttgcaagcagatcttgccttagctgatgatttagatatcagccgctcttccggaactacagcactcaccgcattagtcttcggaaggcaattgctggttgcaaatgcgggggattgccgtgcggtcctttgccggagaggcgtagcgatggagatgtctcgagatcacagagcaaactatgccgaggagtgtgaacgggttgctgcatccggaggatacatcgaggatggctacctcaacggagtcctatccgtgacacgggccctaggggactgggacatgaaaatgcccgacggctcgatatcccctctcatcgccgagccagagttccgacagaccatgctcacggaggacgacgagttcctcatcatggggtgcgacgggatctgggacgtgatgaccagccagcacgcggtgagcatcgtccgacgggggctccggcagcacgacgaccccgagaggtgcgcgagggagcttgtcatggaggccaagaggctcgagaccgccgacaacctgacggtgatcgtcgtctgcttcgtctcggagcttgggtcgccgcggcaggagcaggtgggggggcaggcgggggtggcgaggccgaggagttgcaagagcctctctgcggaggccctgtgcaacctgaggagctggctggagactgatcgctag

SEQ ID NO: 907 - protein, 416 aa, Oryza sativa subsp
MVAEAEVMHQPVPVLEVPYHRCVAKGVEEVAAAAAVAPPPVVEVEVAVQVPHMVYYGVYCLSVYYTRLFSVRGCKRLTQFGLESAAGAPSISVDALQFVPSIRSGSFADIGPRRYMEDEHIRIDDLSAHLGSLLVCPLPSAFYGVFDGHGGLDAAAYMKRHAMRFLFEDSEFPQASQVDETYVQSVENSVRRAFLQADLALADDLDISRSSGTTALTALVFGRQLLVANAGDCRAVLCRRGVAMEMSRDHRANYAEECERVAASGGYIEDGYLNGVLSVTRALGDWDMKMPDGSISPLIAEPEFRQTMLTEDDEFLIMGCDGIWDVMTSQHAVSIVRRGLRQHDDPERCARELVMEAKRLETADNLTVIVVCFVSELGSPRQEQVGGQAGVARPRSCKSLSAEALCNLRSWLETDR

SEQ ID NO: 908 - DNA, 1086 bp, Oryza sativa subsp
  CDS (1)..(1086)
atgggagtttaccttagtacccccaaaaccgagaagctatctgaagatggcgaaaatgataagcttaaatttggactctcatctatgcaaggatggcgtgcaactatggaggatgctcattcagctttgctagatatcgataatgacacatcattctttggtgttttcgatggacatggaggaagagtggttgctaaattctgtgcaaaatatctgcacagagaagttctcagaagtgaggcctattcagcaggtgacctgggcaatgcagcccataaagctttctttagaatggatgagatgatgcgaggtcaaagaggctggcgagaactacaagcacttggagataagataaaccagattagtggcatgatagaaggcttgatctggtctccaagaggcagtgattcaaatgatcaacacgatgattgggcttttgaagaggggccacactctgactttgctgggccaacctgtgggagcacagcttgtgttgcaatagtaagaaatagccaacttgttgtcgcaaatgctggtgattcccgctgtgttatctcaaggaatggtcaggcatacaatttatcaagagaccacaaaccagagcttgaagcagagagagaaagaatactaaaagcaggagggtacatacagatgggacgagtaaatggaactataaacttgtcaagggcaattggtgacattgaatttaaacagaacaagttcttgtctcctgataagcaaatgttaactgcaaaccctgacatcaacacagtggagctttgtgatgatgatgactttcttgttttagcatgtgatggcatctgggactgcatgtctagccaacagctggttgatttcatccacgaacacataaacacagagagcagcctttctgcggtatgcgaaagagtgctagatagatgcctggctccatcaactttgggtggagaaggatgcgacaacatgacaatgatcctagtgcagttcaagaagccaattagtcagaacaagaatgtcagtcctgcggaacaatcagctgccgacaaacaaccaactggagacacacattggtctgagattcagtga

SEQ ID NO: 909 - protein, 361 aa, Oryza sativa subsp
MGVYLSTPKTEKLSEDGENDKLKFGLSSMQGWRATMEDAHSALLDIDNDTSFFGVFDGHGGRVVAKFCAKYLHREVLRSEAYSAGDLGNAAHKAFFRMDEMMRGQRGWRELQALGDKINQISGMIEGLIWSPRGSDSNDQHDDWAFEEGPHSDFAGPTCGSTACVAIVRNSQLVVANAGDSRCVISRNGQAYNLSRDHKPELEAERERILKAGGYIQMGRVNGTINLSRAIGDIEFKQNKFLSPDKQMLTANPDINTVELCDDDDFLVLACDGIWDCMSSQQLVDFIHEHINTESSLSAVCERVLDRCLAPSTLGGEGCDNMTMILVQFKKPISQNKNVSPAEQSAADKQPTGDTHWSEIQ

SEQ ID NO: 910 - DNA, 1056 bp, Oryza sativa subsp
  CDS (1)..(1056)
atgggggtgtacctgagcacgcccaagacggagaagtactccggcgagggcgggaacgaccgcctccgctacggcctcgcatccatgcagggatggcggacgaccatggaggacgcgcacactgccctgccacgcctggacgaatgcacatccttttttggtgtctatgatggccatggagggaaggcagtatctaagttttgtgcgaaacatctacacttgcaagtactgaaaaatgaggcttattcatctggtgatttggctacttctgtcttaaagtcatttttcagaatggatgagatgatgaaagggcaaagggggtggagggaactggctgaattgggggacaagggacaaaagtttactggcatgttagaaggcataatatggtccccgaaacctggagagtcagataaacctgaggacacttggactgaggagggtcctcattctcattttcctgggccaacatctggaagcactgcttgtgtggctatcataagaaatgatgaactcattgttgcaaatgctggtgattcccggtgtgtgctctcaaggaagggtcgagcttatgacctgtcaaaagatcacaagccagatcttgatgcagaaaaggagaggatactgaatgctggtggtttcattgttgctgggcgggtcaatggaagtttgaacttggcaagggcaataggggatatggaattgaagcagaatgaatttctcccagccgagagacagattgtcactgctgaacctgaattaaacacagttaaactttctgaggatgatgagttcatcgttttagcatgtgatggcatatgggattgcatgtcaagtcaagaagtggtggactttgttcacaaagaaatgaacactgaggatagcctatctgctgtctgcgagaagttgcttgaccattgcttggcacctgtatccggtggtgatggctgtgataatatgacagtgatcatagtcaagttcaagaagccaagcaagtcagctgctacttcaagcacaaatcaatctgtctcttcagaagagatgcgaccaaagtga

SEQ ID NO: 911 - protein, 351 aa, Oryza sativa subsp
MGVYLSTPKTEKYSGEGGNDRLRYGLASMQGWRTTMEDAHTALPRLDECTSFFGVYDGHGGKAVSKFCAKHLHLQVLKNEAYSSGDLATSVLKSFFRMDEMMKGQRGWRELAELGDKGQKFTGMLEGIIWSPKPGESDKPEDTWTEEGPHSHFPGPTSGSTACVAIIRNDELIVANAGDSRCVLSRKGRAYDLSKDHKPDLDAEKERILNAGGFIVAGRVNGSLNLARAIGDMELKQNEFLPAERQIVTAEPELNTVKLSEDDEFIVLACDGIWDCMSSQEVVDFVHKEMNTEDSLSAVCEKLLDHCLAPVSGGDGCDNMTVIIVKFKKPSKSAATSSTNQSVSSEEMRPK

SEQ ID NO: 912 - DNA, 1146 bp, Medicago sativa
  CDS (1)..(1146)
atgtcttgctccgtcgcggtttcgaattcgccggtgttttcaccttcttcatctcttttctgcaacaaatctgaaacgttaacgttatctctttctcatctcaaaccatcttcaacaacaacaacaacaacaacgtcttcttcatcgtcttcttcctcgccttctccttgttcttcaccttcttcacctttttgtcttcggttaccgaaactacccttggtttttacgtctaacaaagattctgggtcgcagaatgatgctgttttgaagaggaaaagacctaccaggcttaatatacctgtttctgaacatgctttttgtgttccggcgacaccgtctgcggtggcgagggatgttgttgaggcggagggagatgggtattctgtttattgtaagagagggaggagggagtatatggaagatcgttatacagctggggttaatcttcgtggtgaaaacaatttggctttttttggagtatttgatggccatggaggtgccaaagccgctgaatttgcgcgaaataacttagaaaagaacatcttggacgaagttatcatgaccgacgaagatgatgttgaggaggcagtgaagcgcggttacctcaataccgattctgagttcatgaaaaaagatctacatggtggctcttgttgtgtaacagcattcattaggaatggtaacttagttgtgtctaacgctggtgattgccgtgctgttattagtagaggaggggttgctgaggcactaacatctgatcaccgaccttcaagggaagatgaaaaggacagaattgagaccctgggtggttatgttgatttatgtcgcggtgtttggaggattcaaggatctcttgctgtatcaagaggaatcggagaccgacacttgaaacaatgggtgacagcagagcctgagactaaagttattagaattgaacctgaacatgacttgttaatattagcttccgatggattatgggataaggttagtaatcaggaagcagtagacattgctcgtcaattttgcgtaggaaataacaaccaacaaccgttgatggcctgtaaaaagcttgcacaattgtctgtttcaagaggctctttggatgataccagtgtcatgataatcaaattcaaacactatgtttag

SEQ ID NO: 913 - protein, 381 aa, Medicago sativa
MSCSVAVSNSPVFSPSSSLFCNKSETLTLSLSHLKPSSTTTTTTTSSSSSSSSPSPCSSPSSPFCLRLPKLPLVFTSNKDSGSQNDAVLKRKRPTRLNIPVSEHAFCVPATPSAVARDVVEAEGDGYSVYCKRGRREYMEDRYTAGVNLRGENNLAFFGVFDGHGGAKAAEFARNNLEKNILDEVIMTDEDDVEEAVKRGYLNTDSEFMKKDLHGGSCCVTAFIRNGNLVVSNAGDCRAVISRGGVAEALTSDHRPSREDEKDRIETLGGYVDLCRGVWRIQGSLAVSRGIGDRHLKQWVTAEPETKVIRIEPEHDLLILASDGLWDKVSNQEAVDIARQFCVGNNNQQPLMACKKLAQLSVSRGSLDDTSVMIIKFKHYV

SEQ ID NO: 914 - DNA, 1564 bp, Mesembryanthemum crystallinum
  CDS (287)..(1366)
tcgcattaaaactcaaactctgataatttccaaatacctagcagtgtgaaaacaagaaaaaccccaattaaacacatcatcccaattccaattccaattccaaatcaatcgtctacctcattcattccttcatccaacttttcggatttctgatttctgatttccttcgtcttgctttctgaaattctctgcgttctatccattggattgtttcaaggaatcttgcttgtttcctctattctctgtcatttgggtttataacaacaacaacaacatcaacaacatcatgggtgcagaagctgaaatcgtttgccctaaaagcgtccctaatttggataccgttctctcttgttcccaactggatataatgaccccagatgcagtgtcagataactctcttgcttctacaatgctgcagtttgtccccaatattcggtcaggaagctttgctgatattgggccacgtaaatatatggaagatgagcatataaggattgacgatctatctgtgcaattgggctcactctttagatgtcccaagccaagtgctttctatggggtctttgatggtcatggaggatccgaagcagcagcttatgtcagggaaaatgtgatgagattcttttttgaagatgtcagttttcccgaagcctcagagttggatgagatatttcttgaaggtgtggagaactgcctccgaagagctttctttcttgcagacttggctctagctgatgactgcagcatcagtacctcttcgggaacaactgctcttacagctttagttttgggaaggctcctgcttgttgctaatgctggtgattgtcgtgctgtactttgtcggaaaggagaggccattgatatgtctcaagaccacagacctacatacccatctgagaagagaagagtggaagaattaggtggatatgtagatgatggatatctaaatggagtgttgtcagtttcgcgggcccttggggactgggacatgaagcttcccaagggctcagcctcgcccctcatctcagagcctgaattgagacagataatcttgactgaagatgacgagttcctcattattggatgcgacggaatctgggatgtaatttcaagccaacaagcagtgagcatcgtgcgctggggattgaagcgtcacgatgacccagaacaatcggcaaaggatcttgtcaacgaggccttgaggcgtcacactattgacaatctcacagtcatcattgtttgcttttcttctattgatcatcagcgagagcagacaggacccaggccacggagattcagatgcagcctttctgcggaggccttgtctagcctgaggagcctgctggagggaaatgaaagtcactgattgttatttgcgagtgtaaataagatttgttttaggaagtgagtgcgtcattatgtgtgtgattgttacaaacacatctttcactgtttgtagctgcttcagtcccattcttagaaaaagcagcttgcagttttgttagggtttccattgatatttaactgtgttgtagaacctctgtgaccagggcatgttttaccc

SEQ ID NO: 915 - protein, 359 aa, Mesembryanthemum crystallinum
MGAEAEIVCPKSVPNLDTVLSCSQLDIMTPDAVSDNSLASTMLQFVPNIRSGSFADIGPRKYMEDEHIRIDDLSVQLGSLFRCPKPSAFYGVFDGHGGSEAAAYVRENVMRFFFEDVSFPEASELDEIFLEGVENCLRRAFFLADLALADDCSISTSSGTTALTALVLGRLLLVANAGDCRAVLCRKGEAIDMSQDHRPTYPSEKRRVEELGGYVDDGYLNGVLSVSRALGDWDMKLPKGSASPLISEPELRQIILTEDDEFLIIGCDGIWDVISSQQAVSIVRWGLKRHDDPEQSAKDLVNEALRRHTIDNLTVIIVCFSSIDHQREQTGPRPRRFRCSLSAEALSSLRSLLEGNESH

SEQ ID NO: 916 - DNA, 1257 bp, Ostreococcus tauri
  CDS (1)..(1257)
atgtcgcacgaacgaagcgcgagcggggataagatgatagaggcgggtgagaagctcgagcgagcgtactcgccgagcctgcgaagcggagagcacgccgaggtgggatgtcgagactcgatggaggacgcggtggtgttggacgataacgtacgggtgaagggcgcggaggacgtggtggcgttctacggcgtctttgatggacacggcgggcgagccatggcggagtttttgcgtgataatctcatgaagaatgtggttgagaatgatcatttcatctcgaatcctgaattggcgctgaaggaggcgttttatcggaccgatgaagacttttacgccacggcgggacctagtgacacaagcggaagcacggggctagcggcgtgcgtcatcggtgggaagttgtacatcgccaacgccggcgattgtcgtgcggtgttgagtcgtaaggggaaggctatcgatctctccatcgatcagaaacctagctcgcagagcgaaatggagaggattaaaagcgcaggcggtttcgtcgaggacgggtacgtgaacggactgcttggcgtctcgagagcgttcggagactggcacattgaaggtctcaagggtcgtggaggcaagccgggtcccttgacggtcgatcctgagatcgagaagactcgattgacggaggaggacgagtttttaatcctcgcttgtgacggcttgtgggatgtttttagctcacaaaatgccgttgacatggcgcgagcaagccttcgtcagcacaacgatccaacaagcacggcgagagagctcgcgtccgaagcactacgaaggcatagttccgacaacgtgtccgtcgtcatcgtgtgcttgactccagagccaccaaagaaggaaacgttcatacgaacgtcaccgagcttgctacgttccctctccatcgacgccatatctcaggtgtcgagagcaatggccgaagatgccaacgcaccgcctgtaccgcaggcattcgcaccaaaaagagtgcactcgctgagagacttgagtcacgttcgaagctgctcgggagattcagatgactcgctagctgccgagatagcttcgcaaccaagcgccgaacaggtgtcgcaagtcttagaaagcatcgcagctattaacgtacagaacaatgtgcagaccggagctctggggttggagcggatgaatagctcgtctgtcggtctcgaaccaatgagcgaactggacacgcttgatgaggaagaggcgacgtaa

SEQ ID NO: 917 - protein, 418 aa, Ostreococcus tauri
MSHERSASGDKMIEAGEKLERAYSPSLRSGEHAEVGCRDSMEDAVVLDDNVRVKGAEDVVAFYGVFDGHGGRAMAEFLRDNLMKNVVENDHFISNPELALKEAFYRTDEDFYATAGPSDTSGSTGLAACVIGGKLYIANAGDCRAVLSRKGKAIDLSIDQKPSSQSEMERIKSAGGFVEDGYVNGLLGVSRAFGDWHIEGLKGRGGKPGPLTVDPEIEKTRLTEEDEFLILACDGLWDVFSSQNAVDMARASLRQHNDPTSTARELASEALRRHSSDNVSVVIVCLTPEPPKKETFIRTSPSLLRSLSIDAISQVSRAMAEDANAPPVPQAFAPKRVHSLRDLSHVRSCSGDSDDSLAAEIASQPSAEQVSQVLESIAAINVQNNVQTGALGLERMNSSSVGLEPMSELDTLDEEEAT

SEQ ID NO: 918 - DNA, 1083 bp, Oryza sativa
  CDS (1)..(1083)
atggctcaacctcaacgtcccctccaagttcctgacataacaaagtctactcattctggagggaacactgtacttgcttatgcttcatcagctatgcaaggataccgtagcaccatggaagatgcccatgcgactattgaaaatcttgatgctcccactaacacgtcattctttggtgtttatgatggccatggaggttctgctgtagcaaggtattgcgcaaatcacttgcacaataaggttttggagcaagaagattttagcagtaaccttgctaatgcattgaggcaatcctttttcagaatggatgagatgttgagaaatcaggcggcaagcaaggaattaactgagtatggtagtggcaacgagtattggagaacagctgggcggtcttggctcagatgtgctccttgtgtgcagggacctgtctattgtggaccattagcagaaggatgtacagcatgtgtggttctcattagaaatacgcagatcgttgttggaaatgctggtgatgctcgttgtgtaatctcaaggaatggtcaggcaatcgctttatccaatgatcacaaaccaaattttccggaggaaactcagagaatagtagctgcaggaggttccgtatctttttctaggggttcccaccgtgttaataatggaattgcagtatcaagagcaatcggtatagcttatatgtttgttggcggggatttatcttacaagaacaacaaaaagttgcgtcctgaacaacaattgctgacttgttctcctgaaattcgagctgaccaattaactgatgataccgagtttcttgttatagcatgtgatggagtctgggatgtcttggcaaaccaggctgtggttgattttgtacgccttcacttaaacaatggggtggagctgtcggtaatctgcgagagccttcttcaggaggccattacacgagacccaccatcgacggacaacatgagcgtcatactggttcggttcctgcacccagagggcaacaggggggcgagggcggctacttccagcaccagtaccggcaccgtccccagccgccacagcaaaagcatatcgctttga

SEQ ID NO: 919 - protein, 360 aa, Oryza sativa
MAQPQRPLQVPDITKSTHSGGNTVLAYASSAMQGYRSTMEDAHATIENLDAPTNTSFFGVYDGHGGSAVARYCANHLHNKVLEQEDFSSNLANALRQSFFRMDEMLRNQAASKELTEYGSGNEYWRTAGRSWLRCAPCVQGPVYCGPLAEGCTACVVLIRNTQIVVGNAGDARCVISRNGQAIALSNDHKPNFPEETQRIVAAGGSVSFSRGSHRVNNGIAVSRAIGIAYMFVGGDLSYKNNKKLRPEQQLLTCSPEIRADQLTDDTEFLVIACDGVWDVLANQAVVDFVRLHLNNGVELSVICESLLQEAITRDPPSTDNMSVILVRFLHPEGNRGARAATSSTSTGTVPSRHSKSISL

SEQ ID NO: 920 - DNA, 1155 bp, Medicago truncatula
  CDS (1)..(1155)
atgtgtgtgcaagaggatgaacaagttgatcaagataataataatatggagaaacttgataacagaagaatttcatggcctttgcattgtgatcttttgcatgaccagatggataatacagaaagagactcttcttttagaatttcaagtgaccaaatcagtgctcctaattcatttcctctggaaagcatttgtgaggatacagagattgcagacaaaaaacagaacctgataaatttcgtccctacacttcggtcgggggagtggtctgatattggaggtcgcccatacatggaggatactcacataagcattgaggacttggcaaagaaatttggttacgatgctgtttgcgacgaagctatttccttttatggtgtatttgatggacatggagggaagactgctgcgcaatttgttcgggatcatcttccgaaggtgattgttgaggatgctgacttccctcttgaactcgagaaggtggtcacaaggtcatttttggagacggattcagagtttgcaaaaacatgctctattgagtcttccctatcttctggtacaactgctttgactgcaattatatttggaaggtctttacttgtagccaatgctggggactgcagggctgttttgtcccgagctggaggggtaatagaattgtccaaagatcataggcctttatgcatgaaagaaaggatgaggatcgagtcgcttggcggatttattgatgatggttacttgaatggacagctaggtgtgacgcgggctctaggcaactggcatcttgaaggaatgaaggaagtgagtggaagaaatggaccattaagtgctgagccagaacttaaattgatgacattgacaaaagatgacgagtttttgataattggaagcgatggaatatgggatgtttttcgtagccaaaacgctgtagattttgctagaaggaggcttcaagagcacaatgatgtgaaacaatgttgcaaggaaataataggtgaagcaataaagcgaggagcaacagataatttaactgttgtgatggtatgttttcaatcagaaccaccaccacctttggttgttgaaaggcctaacagagtcaggagaagcatatctgctgagggacttcagaatcttaaatacctgttagaaagatag

SEQ ID NO: 921 - protein, 384 aa, Medicago truncatula
MCVQEDEQVDQDNNNMEKLDNRRISWPLHCDLLHDQMDNTERDSSFRISSDQISAPNSFPLESICEDTEIADKKQNLINFVPTLRSGEWSDIGGRPYMEDTHISIEDLAKKFGYDAVCDEAISFYGVFDGHGGKTAAQFVRDHLPKVIVEDADFPLELEKVVTRSFLETDSEFAKTCSIESSLSSGTTALTAIIFGRSLLVANAGDCRAVLSRAGGVIELSKDHRPLCMKERMRIESLGGFIDDGYLNGQLGVTRALGNWHLEGMKEVSGRNGPLSAEPELKLMTLTKDDEFLIIGSDGIWDVFRSQNAVDFARRRLQEHNDVKQCCKEIIGEAIKRGATDNLTVVMVCFQSEPPPPLVVERPNRVRRSISAEGLQNLKYLLER

SEQ ID NO: 922 - DNA, 1173 bp, Medicago truncatula
  CDS (1)..(1173)
atggtggctgaagcagaggttgttgtgtgtcaacaaagcgtggatgtgaagtattttccgaataaaggaagcaataatcacgagatcggtgatgtagattcgaattttgatcgagttcgtgtttctgaatcagtttctgctgagttacttactacaaaagaagatgtcaggactacagataaaatctcggaagctgctcttgactctgcggttctgcaatttgtccccagcatccgttccggtagttttgccgacattgggccgcgtagatacatggaagatgaacatataaggatagatgatttgtcatctcatctgggatcactatacaattttcctaaaccaagtgccttttatggggtgtttgatggtcacggaggacctgaagctgctgcttatataagaaaaaacgttctaaaattcttctttgaggatgtcaatttccctcagatatctgaagttgataatgtatttttacaagaggtagagaattccctcagaaaggcttttcttttggcagactcagctttggctgatgatagcaatgtgaacacttcatcagggaccacagctcttactgctttgatatttggaaggcttctaatggtggcaaatgccggtgactgccgagcagttctcagtcgtaaaggagaggccattgacatgtctcaagatcataggcctatttatccatcagagcggaggcgagttgaagaattgggtggctacgtagaggatggttatcttaatggcgttttatcagttacgagagcactaggggactgggacatgaagttacctaggggtactccctcacctttgattgcagatcctgagttccgccaagtggttctaacagaggatgacgaattcctcatcataggatgcgacggcatctgggatgtgatgacaagtcagcatgctgttagccttgttcgtaaaggtttgaggaggcacgatgacccagagaagtgcgccagggatttagttatggaggcattacggctcaacacatttgacaatcttacagtgatcatcatatgcctctcctcccttgaccatggggagtcagagccatcaccacctccccaacggaaattgagatgctgtagcctctctgcagaggctctttgtagcttgagaagcttgttggaaggcaatgctagcaactga

SEQ ID NO: 923 - protein, 390 aa, Medicago truncatula
MVAEAEVVVCQQSVDVKYFPNKGSNNHEIGDVDSNFDRVRVSESVSAELLTTKEDVRTTDKISEAALDSAVLQFVPSIRSGSFADIGPRRYMEDEHIRIDDLSSHLGSLYNFPKPSAFYGVFDGHGGPEAAAYIRKNVLKFFFEDVNFPQISEVDNVFLQEVENSLRKAFLLADSALADDSNVNTSSGTTALTALIFGRLLMVANAGDCRAVLSRKGEAIDMSQDHRPIYPSERRRVEELGGYVEDGYLNGVLSVTRALGDWDMKLPRGTPSPLIADPEFRQVVLTEDDEFLIIGCDGIWDVMTSQHAVSLVRKGLRRHDDPEKCARDLVMEALRLNTFDNLTVIIICLSSLDHGESEPSPPPQRKLRCCSLSAEALCSLRSLLEGNASN

SEQ ID NO: 924 - DNA, 846 bp, Medicago truncatula
  CDS (1)..(846)
atggaagatgaacacgtacgtatggatgatcttactcaacacataggttctgcttcaaatgttccttttcctggagctttctatggggtgtttgatggtcatggaggaaccgatgctgctttgtttgtaagaaataacatccttagactcattgttgaggactctcaatttccaacttgcgtggggaaggcaattacaagtgcgtttatgaaagctgattatgcttttgcagattccagctcgcttgatatctcctctggcaccaccgctttaactgcacttgtatttgggaggaacatgataattgcaaatgcgggggattgtcgagctgtactgggaaggcgagggagagcaattgagatgtcaaaagaccagaaaccaaattgtatttcagaaagactaaggattgaaaaacttggtggggtggtatatgatggatacttgaatggccaattatctgtttcacgtgccttaggagactggcacatgaagggtcccaagggttctgcctgtcctttgagtgccgagccagagttgcaggaaatctttttgactgaggatgacgaattcttgattatgggctgtgatggcctgtgggatgtcatgagtaaccaaggtgctgtgacaatggcaagaaaagagttgatgatacataatgatcctcaaaggtgttcgagagagttggtcagagaggctcttaagcgtaactcatgtgataatttaacggttatcgtggtatgtttctccccagatcctccttccaggatagagatacctccttctcgagtcaggaggagtatatcagcagaaagcctcactttacttaagggtgtattagagtgttag

SEQ ID NO: 925 - protein, 281 aa, Medicago truncatula
MEDEHVRMDDLTQHIGSASNVPFPGAFYGVFDGHGGTDAALFVRNNILRLIVEDSQFPTCVGKAITSAFMKADYAFADSSSLDISSGTTALTALVFGRNMIIANAGDCRAVLGRRGRAIEMSKDQKPNCISERLRIEKLGGVVYDGYLNGQLSVSRALGDWHMKGPKGSACPLSAEPELQEIFLTEDDEFLIMGCDGLWDVMSNQGAVTMARKELMIHNDPQRCSRELVREALKRNSCDNLTVIVVCFSPDPPSRIEIPPSRVRRSISAESLTLLKGVLEC

SEQ ID NO: 926 - DNA, 1713 bp, Aspergillus oryzae
  CDS (1)..(1713)
atgttcagtggctcctcgagcccacccaaagacaagtcgaattcagttccacattccggcgctgtcgatacacaatctctaagtgtacatcccgaggaaggctctgcagcccaaaccagcaagtctctgctttccggaggtttctttacgagaaggactagcgaggaccaggcccctgccggggagaagaagcgccggagtagcacagtcacgaaagcggcgacgtttttcaccaacgctaagaattcactgagtttgagtagtagtcctcgtgaatcttcgtcgtttaattacacggttcgatctccgcaaacgttgcagtcgcttgggagcatggacccggcattgagtgtcccacaagggtcattgaacaactctgctggcgattcgctaccaactcctcgctcatcgtttaaagttggtgtcacagaagatcggaatcgaaaatgtcgccggactatggaagatacccatgcatatctctacaactttttggggacccccgcaccattagcccgggctgatggcgagaacgaggctggttcttccctcgcacccgatgaagcgtctagtgttgttgaaaccgacaatgggtattttgccatcttcgatggacatgccggcacattcgctgctgaatggtgtgggaagaaattacatctgattctagaggatataatgaagaagaatcctaatactcccgttcccgaacttctcgaccaaacatttactactgtcgatcaacagttagagaagttgcctgtgaagaacagtgggtgtactgctgtcattgcccttctgcgatgggaagaccggatccccagttcgcattcggcaactggctcttcggcactcgctcccgcagcagccgcagccgcagccgcaaagggcgattccaattcagaggccgatgacacacccactcaagcaactagttctggtccgtcaattctgccgaaactacaagagaaagctatacggcaacgagtcttgtacacggccaatgtgggtgatgctcgtataattttatgtcgcaacggcaaggcgcttcggttgtcctacgatcacaaaggtagtgacgaaaatgagggcaagagaatagctaacgccgggggtttgatacttaacaacagagtaaacggcgttcttgcagtgactagagccctgggtgatgcttatctcaaggatctcgttaccggacacccgtataccacggagaccgtggtccaaccggactctgatgaatttatcatattggcctgcgacgggctgtgggatgtctgcactgaccaggaagctgtggatcttgttcgaaatgttccagacgcccaggaggcatctaagatcctggtcgattatgctcttgctcgctttagcactgataacctttcgtgcatggttatccggcttgatacgaatcgtgtcaaggaggtcatcaacaagacagctgagccaattggtgtggctggcgatccatctatggatgtcgagcatggcgtgagcgaagcagacaagatcattgagggggcaagaaagagcatggccaatgcagacattgccgacgatggcgaaacggctgagaagggcaagaacgatattctgcataaaatggtcgatggcgagcccggcccagagatgtcattggacgattctaatgatgcaccgaccgtcagccacctaaacaagactaatgcaaataacgggattccctaa

SEQ ID NO: 927 - protein, 570 aa, Aspergillus oryzae
MFSGSSSPPKDKSNSVPHSGAVDTQSLSVHPEEGSAAQTSKSLLSGGFFTRRTSEDQAPAGEKKRRSSTVTKAATFFTNAKNSLSLSSSPRESSSFNYTVRSPQTLQSLGSMDPALSVPQGSLNNSAGDSLPTPRSSFKVGVTEDRNRKCRRTMEDTHAYLYNFLGTPAPLARADGENEAGSSLAPDEASSVVETDNGYFAIFDGHAGTFAAEWCGKKLHLILEDIMKKNPNTPVPELLDQTFTTVDQQLEKLPVKNSGCTAVIALLRWEDRIPSSHSATGSSALAPAAAAAAAAKGDSNSEADDTPTQATSSGPSILPKLQEKAIRQRVLYTANVGDARIILCRNGKALRLSYDHKGSDENEGKRIANAGGLILNNRVNGVLAVTRALGDAYLKDLVTGHPYTTETVVQPDSDEFIILACDGLWDVCTDQEAVDLVRNVPDAQEASKILVDYALARFSTDNLSCMVIRLDTNRVKEVINKTAEPIGVAGDPSMDVEHGVSEADKIIEGARKSMANADIADDGETAEKGKNDILHKMVDGEPGPEMSLDDSNDAPTVSHLNKTNANNGIP

SEQ ID NO: 928 - DNA, 990 bp, Oryza sativa subsp
  CDS (1)..(990)
atgtcggcgggatggtggggcccacaggacctgggtgcggggacgctgagcttgatctcgcccacggacattcgccctggcttcctgccggtgttccgttccgggagctgcgccgatatcggtaccaaatcgtacatggaggacgagcatgtgtgcgtcgataacctcatcgagcacctgggagtgcgtacacctgtgatccctgcaccgggtgccttctacggggtgtttgatggtcatggtggtacggacgctgcttgttttgttcggaagaacttactgaggttcataattgaggatggtcacttccccagcagcatagagaaggcaatcaggagtgcatttgtgagggctgatcatgcaattgcggattcccattctcttgaccgcaattctgggactacagcattgacagcacttatttttggcaggacattgctcgttgcaaatgcaggagactgtcgagcggtattagggaagagaggccgagctgttgagttgtcaagagaccataaacccagctgcagaagcgaaaagatcagaatcgagaaccttggtggtactgtctttgatggctatctcaatggtcagctgtctgtagcaagggcgattggtgattggcacgtgaaaggttccaaagggtccataagccctctcactgcagagccagagtttcaggaggttagactcaccgaagaagatgagttcttaataatcggctgtgacgggctttgggatgtgatgaccagccagtgcgctgtcacaatggtaaggaaagagctgatgacacacaacgatccggaaagatgctcgcaagagctagttcaagaggctctgcgacggaactcatgcgacaacctaactgtagtggttgtgtgcttctcatcagacccaccacctcagatcgaggtcccaagatttcgagtacgaagaagcatttcgatggaaggattgcatatgttaaagggagctcttgacagtaatgcctga

SEQ ID NO: 929 - protein, 329 aa, Oryza sativa subsp
MSAGWWGPQDLGAGTLSLISPTDIRPGFLPVFRSGSCADIGTKSYMEDEHVCVDNLIEHLGVRTPVIPAPGAFYGVFDGHGGTDAACFVRKNLLRFIIEDGHFPSSIEKAIRSAFVRADHAIADSHSLDRNSGTTALTALIFGRTLLVANAGDCRAVLGKRGRAVELSRDHKPSCRSEKIRIENLGGTVFDGYLNGQLSVARAIGDWHVKGSKGSISPLTAEPEFQEVRLTEEDEFLIIGCDGLWDVMTSQCAVTMVRKELMTHNDPERCSQELVQEALRRNSCDNLTVVVVCFSSDPPPQIEVPRFRVRRSISMEGLHMLKGALDSNA

SEQ ID NO: 930 - DNA, 1191 bp, Nicotiana benthamiana
  CDS (1)..(1191)
atgtcttgtaccgtggccatttcaaatttgccggcgttctggccggtggctagggttccgctgaccaaatctctcctctgtaaatcagcttcattttcttcttcttcttctcctaattcatctaaaaccctaacgaaattcccttcctttacctcctcctcttcttcttcttcttctccgtctttacaatttcatattcttcggtttcagaagccattgccagtgcctgcaccggcgcctattaaccttattagaaattctacggaatgttctacttctacaccgaattctacttctccaacggttttgaagaggaagagaccggctaaattggatattccgattgtttcgacgacttttgggaattttccggcgcttccagccgctgcggcggcggattttgtggaggttgagggtgatggttattatgtttgctgtaagcgtggtaggagaggtccgatggaggatcgtttctctgcacttgttaatttacaaggaggttctaaagagggtatttttggtatatttgatggacatggaggagctaaagctgcaaagtttgcagcagagaacttgaataagaacattatggacgaagtagtaacgaggaaagatgaaaatgtcatggaggcagtaaaaaacggttatttgaagacagattccgaatttcttaaccaagaatttcggggtggatcatgctgtgtaacagcattgatcaggaatggcgatttagtggtatccaatgctggcgattgtcgtgcagttgttagtcgagatgggattgctgaagcactgacttcggatcataagccttcaaggaaggacgagaaggacagaattgagactttgggtggctatgtagattattgtaatggtgtttggagaatccagggatatcttgctgtatcaagaggtatcggagatcggtatcttaaacaatggataattgcagaacccgagacaatggtccttaggcttaaccctgaattggagttcttagtccttgcatcagatggtttatgggataaagttagcaatcaggaagcagtagatgctgctaggcctttgtgtgcacgcatcagtaagccacaactcttgtcggcctctaaaagcctcgttgatcttgctgtttcacgaggttctgttgatgacataagtgtgatgataattcagctgcagcaattttgctga

SEQ ID NO: 931 - protein, 396 aa, Nicotiana benthamiana
MSCTVAISNLPAFWPVARVPLTKSLLCKSASFSSSSSPNSSKTLTKFPSFTSSSSSSSSPSLQFHILRFQKPLPVPAPAPINLIRNSTECSTSTPNSTSPTVLKRKRPAKLDIPIVSTTFGNFPALPAAAAADFVEVEGDGYYVCCKRGRRGPMEDRFSALVNLQGGSKEGIFGIFDGHGGAKAAKFAAENLNKNIMDEVVTRKDENVMEAVKNGYLKTDSEFLNQEFRGGSCCVTALIRNGDLVVSNAGDCRAVVSRDGIAEALTSDHKPSRKDEKDRIETLGGYVDYCNGVWRIQGYLAVSRGIGDRYLKQWIIAEPETMVLRLNPELEFLVLASDGLWDKVSNQEAVDAARPLCARISKPQLLSASKSLVDLAVSRGSVDDISVMIIQLQQFC

SEQ ID NO: 932 - DNA, 1089 bp, Oryza sativa subsp
  CDS (1)..(1089)
atgggggtgtacctgagcacgcccaagacggagaagtactccggcgagggcgggaacgaccgcctccgctacggcctcgcatccatgcagggatggcggacgaccatggaggacgcgcacactgccctgccacgcctggacgaatgcacatccttttttggtgtctatgatggccatggagggaaggcagtatctaagttttgtgcgaaacatctacacttgcaagtactgaaaaatgaggcttattcatctggtgatttggctacttctgtcttaaagtcatttttcagaatggatgagatgatgaaagggcaaagggggtggagggaactggctgaattgggggacaagggacaaaagtttactggcatgttagaaggcataatatggtccccgaaacctggagagtcagataaacctgaggacacttggactgaggagggtcctcattctcattttcctgggccaacatctggaagcactgcttgtgtggctatcataagaaatgatgaactcattgttgcaaatgctggtgattcccggtgtgtgctctcaaggaagggtcgagcttatgacctgtcaaaagatcacaagccagatcttgatgcagaaaaggagaggatactgaatgctggtggtttcattgttgctgggcgggtcaatggaagtttgaacttggcaagggcaataggggatatggaattgaagcagaatgaatttctcccagccgagagacagattgtcactgctgaacctgaattaaacacagttaaactttctgaggatgatgagttcatcgttttagcatgtgatggcatatgggattgcatgtcaagtcaagaagtggtggactttgttcacaaagaaatgaacactgaggatagcctatctgctgtctgcgagaagttgcttgaccattgcttggcacctgtatccggtggtgatggctgtgataatatgacagtgatcatagtcaagttcaagaagccaagcaagtcagctgctacttcaagcacaaatcaatctgtctcttcagaagagatgcgaccaaacgagcttgatgatggcccaagcgatccaaacaagtag

SEQ ID NO: 933 - protein, 362 aa, Oryza sativa subsp
MGVYLSTPKTEKYSGEGGNDRLRYGLASMQGWRTTMEDAHTALPRLDECTSFFGVYDGHGGKAVSKFCAKHLHLQVLKNEAYSSGDLATSVLKSFFRMDEMMKGQRGWRELAELGDKGQKFTGMLEGIIWSPKPGESDKPEDTWTEEGPHSHFPGPTSGSTACVAIIRNDELIVANAGDSRCVLSRKGRAYDLSKDHKPDLDAEKERILNAGGFIVAGRVNGSLNLARAIGDMELKQNEFLPAERQIVTAEPELNTVKLSEDDEFIVLACDGIWDCMSSQEVVDFVHKEMNTEDSLSAVCEKLLDHCLAPVSGGDGCDNMTVIIVKFKKPSKSAATSSTNQSVSSEEMRPNELDDGPSDPNK

SEQ ID NO: 934 - DNA, 1152 bp, Arabidopsis thaliana
  CDS (1)..(1152)
atgattttgagtcaaacaatggttgctgaagctgagatcagggttcttgacgttaagtgccatatctccgctcctaaagatcagaagaattttcagatcgacgaagttcgtgtttctgagtctgtccgtgctgagatttcgggttccgctgaaacgcctcgattcggatcgggcatgagttgtgtaactactaccattggagaatccgccagtgactttatcccaactatacgttcagggagctttgctgacattcgaagtcgagaaaccatggaggatgaacacatttgcatagatgatttgtcagctcaccttggatcctacaacttctcggtaccaagtgctttttatggtgtgtttgatggtcatggtgggcctgaggcagcaattttcatgaaggagaacttgactagattgtttttccaagatgctgtgtttccagagatgccctccattgtggacgcgtttttcttagaaggactggagaattctcaccgaaaggcttttgctttggctgatcttgccatggctgatgaaaccattgtcagtggttcatgcgggacaaccgctttgaccgctctcataatcggacgacatcttcttgttgctaatgctggagattgtcgtgcagtgctatgtaggagaggagtggctgttgatatgtctttcgatcacagatcaacatatgagccagaaagaaggcggattgaagatttaggaggatactttgaggatggatacctcaacggagtcctagctgtcacgcgtgccattggagattgggaactgaagaatcctttcactgactcctcttcaccactgatttcagacccagagattggacagatcattctaacagaggacgacgagttcttgattttggcatgtgatggtatatgggatgtgttgtcaagccagaatgcagtgagtaatgtaaggcaaggattgaggaggcatggtgacccgagacaatgtgcgatggaactaggaaaagaagcagcgaggcttcagtcatcagataatatgacggttatagtgatctgcttctcctcagttccgtcttcacctaaacaaccgcaaagaagaagattaagattctgtgtttctgacgaagcccgagctcggttacaagcaatgcttgcaggcgagtga

SEQ ID NO: 935 - protein, 383 aa, Arabidopsis thaliana
MILSQTMVAEAEIRVLDVKCHISAPKDQKNFQIDEVRVSESVRAEISGSAETPRFGSGMSCVTTTIGESASDFIPTIRSGSFADIRSRETMEDEHICIDDLSAHLGSYNFSVPSAFYGVFDGHGGPEAAIFMKENLTRLFFQDAVFPEMPSIVDAFFLEGLENSHRKAFALADLAMADETIVSGSCGTTALTALIIGRHLLVANAGDCRAVLCRRGVAVDMSFDHRSTYEPERRRIEDLGGYFEDGYLNGVLAVTRAIGDWELKNPFTDSSSPLISDPEIGQIILTEDDEFLILACDGIWDVLSSQNAVSNVRQGLRRHGDPRQCAMELGKEAARLQSSDNMTVIVICFSSVPSSPKQPQRRRLRFCVSDEARARLQAMLAGE

SEQ ID NO: 936 - DNA, 936 bp, Oryza sativa subsp
  CDS (1)..(936)
atggatgctgttgcatatatgcctgttgtaaggtctggaggttgggctgatattgggtcaaggcacacaatggaggatgtctttatttgttctgataacctcatgaaagagtttggagttgaaagttttgaagatggtccgagcgcattttatggggtttttgatgggcatggtggaaagcacgctgctgactttgtgtgcagcaatttggcaaggtttatcgttgaggatgaggattttccaagggagatagagaaagctctgtcctcagcgttcttacagactgatgctgctttcgcagatgcttgttctgtgaactcctctcttgcttctggcacaactgctcttgctgctcttgtggttgggaggtcacttctggtagcaaatgctggtgattgtagagcagtactttgttgtcgtggaaaagccattgaaatgtccagggatcacaagccttcttgcaacagagagaaggttcgcattgaagcctctggtggttatgtttatgatggctacctgaatgggcagcttaatgttgcgcgggcaataggagactggcacatggaaggaatgaaggcatgtgatggtcttggacctcttagtgctgagcctgaggtgatgatcaggaatctcactgaggaggatgaattcctcatcatcggttgtgatgggatctgggacgtattccgcagccaaaatgcggtagactttgcacgccgaaagctccaggagcacaatgatcctgttacctgttgtaaagaacttgttgatgaggccatcaagaggaagagcggcgacaacctttctgttgttgtcatctgcttcaactctcggccgcctcctgtcctaacaactccaaggcctcgtgtacagaggagtatatctgcagaaggcctgagggagttgcaaagctttcttgatagcttggctgattga

SEQ ID NO: 937 - protein, 311 aa, Oryza sativa subsp
MDAVAYMPVVRSGGWADIGSRHTMEDVFICSDNLMKEFGVESFEDGPSAFYGVFDGHGGKHAADFVCSNLARFIVEDEDFPREIEKALSSAFLQTDAAFADACSVNSSLASGTTALAALVVGRSLLVANAGDCRAVLCCRGKAIEMSRDHKPSCNREKVRIEASGGYVYDGYLNGQLNVARAIGDWHMEGMKACDGLGPLSAEPEVMIRNLTEEDEFLIIGCDGIWDVFRSQNAVDFARRKLQEHNDPVTCCKELVDEAIKRKSGDNLSVVVICFNSRPPPVLTTPRPRVQRSISAEGLRELQSFLDSLAD

SEQ ID NO: 938 - DNA, 1071 bp, Oryza sativa subsp
  CDS (1)..(1071)
atggcggaggtgtgctgtgattctgcggtggtggtcggggcggaggcggaggcgagggcgagggcgcgcgccgggaggcggcggcgggcgggagttgagggggcagggaggtggaacgccacggcgacggctgcgggtgtggcggcggaggaggccgcgacgaggaagcggagggcgagtggtggtgaggccgggttggtggtggtggcgaagcggcacggggcggcgtcggtcgccgggaggaggagggagatggaggacgccgtgtcgctgcgcgaggcgttcgccgcgccggcgaacggggaggttgcggcggcgaggtgtgacttctacggggtgttcgacgggcacggctgctcgcacgtggcggacgcgtgcagggagcggatgcacgagctcgtcgcggaggagatgggcgccgggtcaccggcggcggcggcgcgcgagccggcgtcttggacggagacgatggagcggagcttcgcgaggatggacgccgaggtgatcgccggctgccgagccgagagcggcagctgccggtgcgaggggcagaagtgcgaccacgtggggtccaccgcggtggtggccgtcgtggaggagagccgcgtcgtcgtcgccaactgcggcgactcccgcgccgtgctctgccgcggcggcgcgcccgtgcagctatcctccgaccacaagcccgaccgccccgacgagctggagcggatcgaggcggccggcggccgcgtcatcttctgggagggcgcccgtgtcctcggcgtcctcgccatgtcgcgctccatcggcgacgcctacctgaagccctacgtcaccgccgtgccggaggtgacggtgaccggcaggtcggacttcgacgagtgcctcatcctcgccagcgacggcctctgggacgtcgtcagcaacgaggccgcgtgcgaggtggcgcagtcgtgcctccgccgcggcaggcagcggtggtgcgccgaggcggcggcggtgctgaccaagctggccctcgctcgccgcagctccgacaacatctctgtcgtcgtcgtcgatctccggcgaggcaacgccttgtag

SEQ ID NO: 939 - protein, 356 aa, Oryza sativa subsp
MAEVCCDSAVVVGAEAEARARARAGRRRRAGVEGAGRWNATATAAGVAAEEAATRKRRASGGEAGLVVVAKRHGAASVAGRRREMEDAVSLREAFAAPANGEVAAARCDFYGVFDGHGCSHVADACRERMHELVAEEMGAGSPAAAAREPASWTETMERSFARMDAEVIAGCRAESGSCRCEGQKCDHVGSTAVVAVVEESRVVVANCGDSRAVLCRGGAPVQLSSDHKPDRPDELERIEAAGGRVIFWEGARVLGVLAMSRSIGDAYLKPYVTAVPEVTVTGRSDFDECLILASDGLWDVVSNEAACEVAQSCLRRGRQRWCAEAAAVLTKLALARRSSDNISVVVVDLRRGNAL

SEQ ID NO: 940 - DNA, 1281 bp, Prunus avium
  CDS (1)..(1281)
atggctggaatttgctgcggtgttgtcggagaagctgaggcgtcgactacgattgaagcaagctcaaggaattcgaggcgcaggagattggagctcctaccgcttaaatacatagctgacatggccgtgaaaccgtcgacggtggagaacagccggaagcggcagaagatcgatctgtaccgttcatcgtcgtcggtgccacacaacgcagtggaaagctcctcggaagcgaaatcgaaatcggaaagcgaagggtcgaagctgaacgcgaccgtgcgttttggcgacgatgattttgatgctgtgaatacacgtggagatcatcaggagtctaaatctgtgcgtgtggacaacgaagcggtgcaggtgcaggcactgcaggggagccctcggtttggtatgacttcggtttgtgggagaagacgagacatggaagacgccgtttcgattcacccttcgttctaccaaaacgacggtccagactctaatggagcccacttctatggagttttcgacggccatggctgctctcatgtggccttgaagtgcaaggatcggttgcatgaaatcgtgaagcaagagctcgaaacggaaggcgggtacatacagtggaagggcgcgatggagcgaagcttcgcgaagatggacgatgaggtccaggaaggaaacctggttgctcaaggcccgaattgccggtgcgagcttcagactccgcagtgcgacgccgttggatctacggcggtcgttgctgtcgtcactccggagaaaattatcgtctctaattgtggcgattcccgcgccgtgctttgccgaaacggcgtcgccgtccctctttcctccgatcataagccggatcgacccgatgagctggttcggatcgaagccgcgggcgggcgggtcatctactgggacggtgcgagagtcctgggagttttagccatgtcgagagccattggcgacaactatctgaaaccgtacgtgatatcggaaccggaggtgacgatcatggatcggtcggcggaggacgagtgtctgattctggcgagcgacggcctctgggacgtggtatcaaacgacaccgcgtgcggagtcgttcgcatgtgtttgcgcgcgcagaagacgacttcgcattcggagtcgtctggaagagacgcggcagtgaggtccgacaaggcgtgttcggacgcctccatcttgttgaccaagttggccttggctaggcagagcagcgacaacgtcagcgttgtcgtggtggatttgagaagacccgggaggtgctaa

SEQ ID NO: 941 - protein, 426 aa, Prunus avium
MAGICCGVVGEAEASTTIEASSRNSRRRRLELLPLKYIADMAVKPSTVENSRKRQKIDLYRSSSSVPHNAVESSSEAKSKSESEGSKLNATVRFGDDDFDAVNTRGDHQESKSVRVDNEAVQVQALQGSPRFGMTSVCGRRRDMEDAVSIHPSFYQNDGPDSNGAHFYGVFDGHGCSHVALKCKDRLHEIVKQELETEGGYIQWKGAMERSFAKMDDEVQEGNLVAQGPNCRCELQTPQCDAVGSTAVVAVVTPEKIIVSNCGDSRAVLCRNGVAVPLSSDHKPDRPDELVRIEAAGGRVIYWDGARVLGVLAMSRAIGDNYLKPYVISEPEVTIMDRSAEDECLILASDGLWDVVSNDTACGVVRMCLRAQKTTSHSESSGRDAAVRSDKACSDASILLTKLALARQSSDNVSVVVVDLRRPGRC

SEQ ID NO: 942 - DNA, 1317 bp, Trichoderma reesei
  CDS (1)..(1317)
atgggccaaaccctctcggagcccgttgtcgaaaagacttccgaaaagggcgaggatgacagactcatctacggcgtgtccgccatgcagggctggcgcatcagcatggaggacgctcacacggctgagctgaatctccccccacctgacaacgacaccaagacgcaccccgacaggctgtcctttttcggagtcttcgacggacacggaggagacaaagtagcgttattcgcaggcgagaacattcacaacattgttttcaagcaggagagcttcaaatccggtgattacgctcagggtctcaaggacggctttctcgctacggatcgggctattctcaacgaccccaaatacgaagaggaagtctctggctgcactgcctgcgtcaccctgattgccggaaacaaactatatgtcgccaacgccggtgattctcgaagcgtgctgggcatcaagggacgggccaaacccctatccaacgaccacaagcctcagcttgaaacggagaagaaccgaatcacagccgctggcggtttcgtcgactttggccgagtcaacggcaatctggctctgtcgcgtgccattggcgactttgaattcaagaagagcgccgagctgtcccccgaaaaccagatcgttaccgcctttcccgatgtcgaggtgcacgagcttacagaggaggacgagttcctggtgattgcctgtgacggtatctgggattgccaatcttcccaggctgttgttgagtttgtgcgacgaggcatcgccgccaagcaggaccttgacaagatctgcgagaacatgatggacaactgccttgcgtccaactcagaaacgggtggcgtcggctgcgacaacatgaccatggtcatcatcggcttcctgcacggcaagaccaaggaggagtggtatgacgaaattgccaagagagtggccaacggagacggcccctgtgcccccccggaatatgccgagttccgcggtcccggcgttcaccacaactacgaagacagcgacagcggctacgacgtcgacgccgacagcggcggcaagtttagccttgccggatcccggggtcgcatcatcttcctgggcgacggcaccgaagtcctgacgggctccgacgacacggagatgtttgacaatgctgacgaggacaaggaccttgcgagccaggtgcccaagagctccggcaagaccgatgcaaaggaggagacagaggccaagccggcaccagaggcggagtcgtccaaacccgcggatgggtcggagaagaagcaagacgaaaagacacccgaggagagtaagaaggattag

SEQ ID NO: 943 - protein, 438 aa, Trichoderma reesei
MGQTLSEPVVEKTSEKGEDDRLIYGVSAMQGWRISMEDAHTAELNLPPPDNDTKTHPDRLSFFGVFDGHGGDKVALFAGENIHNIVFKQESFKSGDYAQGLKDGFLATDRAILNDPKYEEEVSGCTACVTLIAGNKLYVANAGDSRSVLGIKGRAKPLSNDHKPQLETEKNRITAAGGFVDFGRVNGNLALSRAIGDFEFKKSAELSPENQIVTAFPDVEVHELTEEDEFLVIACDGIWDCQSSQAVVEFVRRGIAAKQDLDKICENMMDNCLASNSETGGVGCDNMTMVIIGFLHGKTKEEWYDEIAKRVANGDGPCAPPEYAEFRGPGVHHNYEDSDSGYDVDADSGGKFSLAGSRGRIIFLGDGTEVLTGSDDTEMFDNADEDKDLASQVPKSSGKTDAKEETEAKPAPEAESSKPADGSEKKQDEKTPEESKKD

SEQ ID NO: 944 - DNA, 1185 bp, Nicotiana tabacum
  CDS (1)..(1185)
atgtcttgtgccgtcgccatttcaaattcaccggcgttctcgccggcgtctagggttccggtgaccaaatctctctgtaaatcagcttcattttcttcttcttctcctaattcatctaaaaccctaacgaaattcccttcctttacctcctcctcctcctcttcttcttcttcttcttcttcttctccttcttctccgtctttacaatttcaaattcttcggcttcagaagccgttacaggcatcagcatcgactaaccgtattagaaattctacagaatgttctacttctgcgccggttttgaagaggaaaagaccggctaaattggatattccggtagtttcgacgacttttgggaatttcccggcgactccggcagcagcgacggcggattttgtggaggttgagggcgatgggtattatgtttgttgtaagcgtggtaggagaggtccgatggaggatcgttactctgcacttgtcgatttacaaggagattctaaagagggtatttttggtatatttgatggacatggaggagctaaagctgcagaatttgcagcagagaacttgaataagaacattatggatgaattagtaaataggaaagatgatgatgtcgtggaggcgctcaaaaatggttatttgaagacagattccgaatttcttaaccaagaatttcggggtggatcatgctgtgtaacagcactggtcaggaacggtgatctagtggtatccaatgctggcgattgtcgtgcagttgttagtcggggtgggattgctgaaacactgacttcggaccataagccttcaaggaaggacgagaaggacagaattaagacttcgggtggctatgtagattgttgtaatggtgtttggagaatccagggatctcttgctgtgtcaagaggtattggagatcggtatcttaaacaatggataattgcagagcctgagacaaaggtcgtcgggcttcatcctgaattggagttcttagttcttgcttcggatggtttatgggataaagtcagcaatcaggaagcagtagatgctgctaggcctttgtgcacaggcatcagtaagccacaacccttgtcggcctcaaaaagcctcattgatcttgctgtttcacgaggttctgttgatgatataagtgtgatgataattcaactgcagcgattttgctga

SEQ ID NO: 945 - protein, 394 aa, Nicotiana tabacum
MSCAVAISNSPAFSPASRVPVTKSLCKSASFSSSSPNSSKTLTKFPSFTSSSSSSSSSSSSSPSSPSLQFQILRLQKPLQASASTNRIRNSTECSTSAPVLKRKRPAKLDIPVVSTTFGNFPATPAAATADFVEVEGDGYYVCCKRGRRGPMEDRYSALVDLQGDSKEGIFGIFDGHGGAKAAEFAAENLNKNIMDELVNRKDDDVVEALKNGYLKTDSEFLNQEFRGGSCCVTALVRNGDLVVSNAGDCRAVVSRGGIAETLTSDHKPSRKDEKDRIKTSGGYVDCCNGVWRIQGSLAVSRGIGDRYLKQWIIAEPETKVVGLHPELEFLVLASDGLWDKVSNQEAVDAARPLCTGISKPQPLSASKSLIDLAVSRGSVDDISVMIIQLQRFC

SEQ ID NO: 946 - DNA, 1504 bp, Nicotiana tabacum
  CDS (97)..(1251)
aaataaagtgataaaaattccaatttgattctccaaaaaaaaaaaaaaaaaaacattttggttatttttttgtttgctaaaactgataaaaaagaaatgtgtgtccaagagtcagaggaagtgagtgaggaaatggagaatttggatatttcaaagagtgatgagaatataaagattggatctttacaagtagaagatgaattgggaaatacccaaaaagagaattgtgaaaaaaacacatcttctagcttttctgtgatcagaaactctttcccaatggaaagcatttctgaggatacaactattgcagaccgtaagcagatactctccaataaattcctccctactcttagatctggagagtggtccgatattggaggtcgtcttgatatggaagatactcatatttgtattgcggacctggctaagaattttggtcaaagtattcttggtgaggaggaggccgtctctttttatggagtctttgatggccatggtgggaagggagcagcactctttgttcgtgacttcttaccaagaatcattgttgaggatgcagatttccctttgaaacttgagaaagtggtcagtaaatcttttttggagacagatgctgcttttgccaagtcatgctccgctgattctgacttgtcctcgggcacaactgcactcactgctatgatatttggaagatcattactcgtggcaaatgctggcgattgtcgagcagtactctctcgaggtggattggctatagaaatgtcaaaggatcacagaccttgttgtgtcagtgaaagaacacgtgtcgagtccttgggtggatttgtcgatgatggttatttgaacggacagttaggcgtgacccgggcattgggtgactggcatattaagggactaaaggaagtcgaaaagggtggaccattgagtgctgaaccagaactaaagctgcttacattaacaaaggaggacgagttcttgatcatcggtagtgatggaatatgggatgttttcagaagccaaaacgcagtggattttgctcgaaggagactgcaagaacataacaacgctaaattatgctgcaaggaagtcgtggacgaggccaaaaaacgtggtgctatcgacaacttaacagtagtcatggtatgttttcactctgaaccaccaccaactattgtattccaaagatcaagaattaggaagtgtatatctgcagaaggacttcagaacctgagatctttactcgacgggtagagctgtcgtgtgcagttaccacttcgggcattaggaaatgtataatgccagttactacattcttctggagtacattgtacatacctcagaggtaggatatgttctaccttttaatgctccaatttagaattcaagcagaaggaataaagcttgagggagaaatgagcaagccaaggaaccaaaaattttgtaaatatatcattcttcaattgtatgctccctttacactaaagggaacatatctgaacttcaa

SEQ ID NO: 947 - protein, 384 aa, Nicotiana tabacum
MCVQESEEVSEEMENLDISKSDENIKIGSLQVEDELGNTQKENCEKNTSSSFSVIRNSFPMESISEDTTIADRKQILSNKFLPTLRSGEWSDIGGRLDMEDTHICIADLAKNFGQSILGEEEAVSFYGVFDGHGGKGAALFVRDFLPRIIVEDADFPLKLEKVVSKSFLETDAAFAKSCSADSDLSSGTTALTAMIFGRSLLVANAGDCRAVLSRGGLAIEMSKDHRPCCVSERTRVESLGGFVDDGYLNGQLGVTRALGDWHIKGLKEVEKGGPLSAEPELKLLTLTKEDEFLIIGSDGIWDVFRSQNAVDFARRRLQEHNNAKLCCKEVVDEAKKRGAIDNLTVVMVCFHSEPPPTIVFQRSRIRKCISAEGLQNLRSLLDG

SEQ ID NO: 948 - DNA, 1769 bp, Mesembryanthemum crystallinum
  CDS (281)..(1423)
gaattcgcggccgcgtcgacgcaattagggttttcatctgaaagattttctagcattcacttgcagagagtgcatactttcagccttatcttttagaattagggtttacctctagcaattgtgatgatttattagcatctgcgctttttgcagaaagtgggtacttcgttttgggtttgatttttgtgggcaggaattgaatcgaattgaattgaattgaattcaagttagcatttttttggggtttttgagttagggttagggttttctggagaatgtgatggtatgtcaaatggaggctaacaataaggttaatgggggtggagagaatgggagctcgagcgagggtcgacctccgaacccgctcgcagctacatatcggcaatgttacagtgctactcgcgtctcgtctacgtgtaagaagacacttatgcgacatccatctcttgttaaggcaacagatattcctattgagcccctggcagtagcagattgtgagagcgagttccttcccattgttcggtctggggcttggacggatattgggtttcgttcaaacatggaagatgcttatctttgtgttgatgattttattcaccattatggggttgaacatatcaatgaaagtccaaatgcgttctatggggtgttcgacggtcatggaagaaaacatgctgctgactttgcctgctgtcatctaccgcggttcatcttcgaggataatgacttcccaagagaaattgagagggtcattacctcagcttttctgcagactgacaatgcttttgctgaagcatgctcactggatgctggccttgcctctggtacaactgcactggcagctcttgttcttgggaggtcattggttgtggcaaatgttggtgactgccgggcagtattatgtcggaggggcaaagcaatcgagatgtcgagggaccacaaaccgcattgctctagggagataaaacgcatcgaagcatctggtgggtatgtcgatgatggctacttgaacggccaactcaatgttgctagggctctgggagattggcacatggaaggaatgaagggggcggatggcgggcctctaactgctgagccagagctcataacaaccgagctgacacaagaggatgagttcctcatcataggatgtgatggattatgggatgtttttaggagccaaaatgctgtagattttgcacggcgacggcttcaagaccacaatgaccctgtaatgtgtagccgggatcttgttgacgaggctttgaaaaggaagagtggtgataatctggctgttgttgtagtttgttttcagcctcagcctcctcctaacttgatcgtcccaagggcccgggttcagcgaagtgtttctgctgaagggttgagggagttgcaaagctttttggatggcctagaaagttaacaaaagatggtgacgaaatacttgtcttctcctttgttatgtttttcaacttcgtagtcgaaatttggagagaaacttcgaggtgatggtccaactgtaccatatgcggcagtaagtttacttagctttcttgtttcactgtacttctatagtcaattcatcttaggcacaagtttagtatctgtagtctcacctcgctgtatggttgaattttgtagtcagtaggttggcctttgtcatgatgcatttacttgataattcatgaggatgtcatttaggaactgttaccctcaatgatgctacattccatgattcttgatcgagtatttacctttatgtacttgta

SEQ ID NO: 949 - protein, 380 aa, Mesembryanthemum crystallinum
MVCQMEANNKVNGGGENGSSSEGRPPNPLAATYRQCYSATRVSSTCKKTLMRHPSLVKATDIPIEPLAVADCESEFLPIVRSGAWTDIGFRSNMEDAYLCVDDFIHHYGVEHINESPNAFYGVFDGHGRKHAADFACCHLPRFIFEDNDFPREIERVITSAFLQTDNAFAEACSLDAGLASGTTALAALVLGRSLVVANVGDCRAVLCRRGKAIEMSRDHKPHCSREIKRIEASGGYVDDGYLNGQLNVARALGDWHMEGMKGADGGPLTAEPELITTELTQEDEFLIIGCDGLWDVFRSQNAVDFARRRLQDHNDPVMCSRDLVDEALKRKSGDNLAVVVVCFQPQPPPNLIVPRARVQRSVSAEGLRELQSFLDGLES

SEQ ID NO: 950 - DNA, 1107 bp, Zea mays
  CDS (1)..(1101)
atggtgatttaccttagcacaccaaaaaccgacaaggtatccgaagatggggaaaacgataaacttaaattcggactttcatctatgcaagggtggcgtgcaactatggaagacgctcactcggctttgctagatcttgacaatgacactgcatcctttggtgtttttgatggacatggaggaaaagtagttgccaaattctgtgcaaaatatctacacagagaagttctccataccgaagcctatgctgctggtgacctgggtgctgctgtccacagagcttacttaagaatggatgaaatgatgcggggtcaaagaggatggcgggaactccaagcacttggagataagataaatcagttcactggcataatagaaggcttgatttggtcccctaaagcaagtgattcaaatgatagacatgatgattgggctttcgaggagggaccacactctgactttactgggccaaattgtgggagtacagcatgtgtagcattagtcagaaataggcaactcgttgtggcaaatgctggtgactcccgctgcgtcatctcaaggaatggccaggcatacaatttgtcaagagaccataaaccagagcttgaggcagagagagaaaggatacaaagtgctgggggttacattaaaatggggcatgtaaatggaagtttaaacttgtcaagagctattggagacatggagcttaaacaaaacaagttcttgtcccctgataagcaaattttgaccgcaaaccctgacataaacattgtcgagctatgtgacgacgacgaattcattgttttagcatgtgatggcatttgggactgcatgtcaagccagcagttggttgatttcatccgtgaacatataaacacagaggaaagcctttctgcagtatgtgaaggagtgcttgatagatgcctggctccatcgaccatgggtggcgagggatgcgataacatgacgatgatcttggtgcagttcaagaagccatttgctcaggtaaaggatgccagtgatgcggaacaactaactggagatgcgggatgctctgagacccatggggccgaggagaatggctctgacaagcagatatagtaatga

SEQ ID NO: 951 - protein, 366 aa, Zea mays
MVIYLSTPKTDKVSEDGENDKLKFGLSSMQGWRATMEDAHSALLDLDNDTASFGVFDGHGGKVVAKFCAKYLHREVLHTEAYAAGDLGAAVHRAYLRMDEMMRGQRGWRELQALGDKINQFTGIIEGLIWSPKASDSNDRHDDWAFEEGPHSDFTGPNCGSTACVALVRNRQLVVANAGDSRCVISRNGQAYNLSRDHKPELEAERERIQSAGGYIKMGHVNGSLNLSRAIGDMELKQNKFLSPDKQILTANPDINIVELCDDDEFIVLACDGIWDCMSSQQLVDFIREHINTEESLSAVCEGVLDRCLAPSTMGGEGCDNMTMILVQFKKPFAQVKDASDAEQLTGDAGCSETHGAEENGSDKQI

SEQ ID NO: 952 - DNA, 1377 bp, Oryza sativa
  CDS (1)..(1377)
atgggcctggtttatttttgggctgctacagccacccgccgctggtggcccatctgcgtgatgtcgtcaacggcgagaccacacggtgacgtcaccgtcccggaccccgctggtggcccccacctcccgggagcacacaacagtcgacacgacgaactgtacctttggggcgtgagagaagttgtggtgcttctccggccgtccgccatcgctgctgaccgcagcatccgcagccacagcttctccgacgccggcgacggccgtttcccccccggaggcgtcgagccggagaccccgccgggtagcagcagcggcggaagcacgccggtgggcggcaagccgccgcgccaccacctcacgtccatccgccactgcgccagcagcgctcgcatcgccgccgcaaccgcagaattcgacctgggtgcggggacgctgagcttgatctcgcccacggacattcgccctggcttcctgccggtgttccgttccgggagctgcgccgatatcggtaccaaatcgtacatggaggacgagcatgtgtgcgtcgataacctcatcgagcacctgggagtgcgtacacctgtgatccctgcaccgggtgccttctacggggtgtttgatggtcatggtggtacggacgctgcttgttttgttcggaagaacttactgaggttcataattgaggatggtcacttccccagcagcatagagaaggcaatcaggagtgcatttgtgagggctgatcatgcaattgcggattcccattctcttgaccgcaattctgggactacagcattgacagcacttatttttggcaggacattgctcgttgcaaatgcaggagactgtcgagcggtattagggaagagaggccgagctgttgagttgtcaagagaccataaacccagctgcagaagcgaaaagatcagaatcgagaaccttggtggtactgtctttgatggctatctcaatggtcagctgtctgtagcaagggcgattggtgattggcacgtgaaaggttccaaagggtccataagccctctcactgcagagccagagtttcaggaggttagactcaccgaagaagatgagttcttaataatcggctgtgacgggctttgggatgtgatgaccagccagtgcgctgtcacaatggtaaggaaagagctgatgacacacaacgatccggaaagatgctcgcaagagctagttcaagaggctctgcgacggaactcatgcgacaacctaactgtagtggttgtgtgcttctcatcagacccaccacctcagatcgaggtcccaagatttcgagtacgaagaagcatttcgatggaaggattgcatatgttaaagggagctcttgacagtaatgcctga

SEQ ID NO: 953 - protein, 458 aa, Oryza sativa
MGLVYFWAATATRRWWPICVMSSTARPHGDVTVPDPAGGPHLPGAHNSRHDELYLWGVREVVVLLRPSAIAADRSIRSHSFSDAGDGRFPPGGVEPETPPGSSSGGSTPVGGKPPRHHLTSIRHCASSARIAAATAEFDLGAGTLSLISPTDIRPGFLPVFRSGSCADIGTKSYMEDEHVCVDNLIEHLGVRTPVIPAPGAFYGVFDGHGGTDAACFVRKNLLRFIIEDGHFPSSIEKAIRSAFVRADHAIADSHSLDRNSGTTALTALIFGRTLLVANAGDCRAVLGKRGRAVELSRDHKPSCRSEKIRIENLGGTVFDGYLNGQLSVARAIGDWHVKGSKGSISPLTAEPEFQEVRLTEEDEFLIIGCDGLWDVMTSQCAVTMVRKELMTHNDPERCSQELVQEALRRNSCDNLTVVVVCFSSDPPPQIEVPRFRVRRSISMEGLHMLKGALDSNA

SEQ ID NO: 954 - DNA, 1152 bp, Oryza sativa
  CDS (1)..(1152)
atgggcctggtttatttttgggctgctacagccacccgccgctggtggcccatctgcgtgatgtcgtcaacggcgagaccacacggtgacgtcaccgtcccggaccccgctggtggcccccacctcccgggagcacacaacagtcgacacgacgaactgtacctttggggcgtgagagaagttgtggtggacctgggtgcggggacgctgagcttgatctcgcccacggacattcgccctggcttcctgccggtgttccgttccgggagctgcgccgatatcggtaccaaatcgtacatggaggacgagcatgtgtgcgtcgataacctcatcgagcacctgggagtgcgtacacctgtgatccctgcaccgggtgccttctacggggtgtttgatggtcatggtggtacggacgctgcttgttttgttcggaagaacttactgaggttcataattgaggatggtcacttccccagcagcatagagaaggcaatcaggagtgcatttgtgagggctgatcatgcaattgcggattcccattctcttgaccgcaattctgggactacagcattgacagcacttatttttggcaggacattgctcgttgcaaatgcaggagactgtcgagcggtattagggaagagaggccgagctgttgagttgtcaagagaccataaacccagctgcagaagcgaaaagatcagaatcgagaaccttggtggtactgtctttgatggctatctcaatggtcagctgtctgtagcaagggcgattggtgattggcacgtgaaaggttccaaagggtccataagccctctcactgcagagccagagtttcaggaggttagactcaccgaagaagatgagttcttaataatcggctgtgacgggctttgggatgtgatgaccagccagtgcgctgtcacaatggtaaggaaagagctgatgacacacaacgatccggaaagatgctcgcaagagctagttcaagaggctctgcgacggaactcatgcgacaacctaactgtagtggttgtgtgcttctcatcagacccaccacctcagatcgaggtcccaagatttcgagtacgaagaagcatttcgatggaaggattgcatatgttaaagggagctcttgacagtaatgcctga

SEQ ID NO: 955 - protein, 383 aa, Oryza sativa
MGLVYFWAATATRRWWPICVMSSTARPHGDVTVPDPAGGPHLPGAHNSRHDELYLWGVREVVVDLGAGTLSLISPTDIRPGFLPVFRSGSCADIGTKSYMEDEHVCVDNLIEHLGVRTPVIPAPGAFYGVFDGHGGTDAACFVRKNLLRFIIEDGHFPSSIEKAIRSAFVRADHAIADSHSLDRNSGTTALTALIFGRTLLVANAGDCRAVLGKRGRAVELSRDHKPSCRSEKIRIENLGGTVFDGYLNGQLSVARAIGDWHVKGSKGSISPLTAEPEFQEVRLTEEDEFLIIGCDGLWDVMTSQCAVTMVRKELMTHNDPERCSQELVQEALRRNSCDNLTVVVVCFSSDPPPQIEVPRFRVRRSISMEGLHMLKGALDSNA

SEQ ID NO: 956 - DNA, 1218 bp, Arabidopsis thaliana
  CDS (1)..(1218)
atgtcgtcttcagttgccgtttgcaactcaccggtgttctctccgtcttcgtctcttttctgcaacaaaccgttgaacacttctccggcacatgaaaccctaaccctgtctctttcccatctcaatcctcccgtttcttctacttctccttccgccgcgtctcccacatctccgttctgcctccgtctcctgaaaccgccggctaaactagggtttggatcggactctggtccgggaagcattctgaagaggaaacgaccgacgacgcttgatataccggtggctccggttggtattgcagctcctatatcgaatgcagatacgccgagggaggagagtagagcagtggagagggaaggtgatggttactctgtttattgcaagagaggtaaaagagaagctatggaggatcgtttctctgccatcactaatcttcaaggagatcccaaacaggcaatattcggagtctatgatggtcacggaggaccaacagcggctgagtttgcggctaagaacttgtgtagtaacattcttggcgagatagttggtgggaggaacgagtcaaagattgaagaagctgtaaaacgtggttatctagcgactgattctgagtttctcaaggaaaaaaacgttaagggcggctcgtgctgtgtcacggctctgatcagcgacggaaatcttgtggtggccaatgctggtgactgccgtgctgttttgagcgttggaggattcgcggaggccttgacttctgaccaccgcccttccagagatgatgaacgaaacagaattgagagctcggtaagaattcttgcaaaagaagttactgttaggttttatcatgattacatggttctgattacgataatcctgcagggcggttatgtggatacattcaatagtgtttggagaattcaaggatcattagcggtatctagaggaataggagatgctcatctcaaacaatggataatatctgaaccagagataaatattctccgaatcaatccccaacacgagttcttgatcttagcatcagatggtctatgggacaaggttagtaatcaggaggcagtagacatagctcgaccattttgcaaagggaccgatcagaaacggaagccattgctggcttgcaagaagctcgttgacctctctgtatcacgaggctccttggacgatattagtgtgatgttgattcagttgtgccacctcttctga

SEQ ID NO: 957 - protein, 405 aa, Arabidopsis thaliana
MSSSVAVCNSPVFSPSSSLFCNKPLNTSPAHETLTLSLSHLNPPVSSTSPSAASPTSPFCLRLLKPPAKLGFGSDSGPGSILKRKRPTTLDIPVAPVGIAAPISNADTPREESRAVEREGDGYSVYCKRGKREAMEDRFSAITNLQGDPKQAIFGVYDGHGGPTAAEFAAKNLCSNILGEIVGGRNESKIEEAVKRGYLATDSEFLKEKNVKGGSCCVTALISDGNLVVANAGDCRAVLSVGGFAEALTSDHRPSRDDERNRIESSVRILAKEVTVRFYHDYMVLITIILQGGYVDTFNSVWRIQGSLAVSRGIGDAHLKQWIISEPEINILRINPQHEFLILASDGLWDKVSNQEAVDIARPFCKGTDQKRKPLLACKKLVDLSVSRGSLDDISVMLIQLCHLF

SEQ ID NO: 958 - DNA, 1305 bp, Arabidopsis thaliana
  CDS (1)..(1305)
atggaggaagtatctccggcgatcgcaggtcctttcaggccattctccgaaacccagatggatttcaccgggatcagattgggtaaaggttactgcaataaccaatactcaaatcaagattccgagaacggagatctaatggtttcgttaccggagacttcatcatgctctgtttctgggtcacatggttctgaatctaggaaagttttgatttctcggatcaattctcctaatttaaacatgaaggaatcagcagctgctgatatagtcgtcgttgatatctccgccggagatgagatcaacggctcagatattactagcgagaagaagatgatcagcagaacagagagtaggagtttgtttgaattcaagagtgtgcctttgtatggttttacttcgatttgtggaagaagacctgagatggaagatgctgtttcgactataccaagattccttcaatcttcctctggttcgatgttagatggtcggtttgatcctcaatccgccgctcatttcttcggtgtttacgacggccatggcggttctcaggtagcgaactattgtagagagaggatgcatttggctttggcggaggagatagctaaggagaaaccgatgctctgcgatggtgatacgtggctggagaagtggaagaaagctcttttcaactcgttcctgagagttgactcggagattgagtcagttgcgccggagacggttgggtcaacgtcggtggttgccgttgttttcccgtctcacatcttcgtcgctaactgcggtgactctagagccgttctttgccgcggcaaaactgcacttccattatccgttgaccataaaccggatagagaagatgaagctgcgaggattgaagccgcaggagggaaagtgattcagtggaatggagctcgtgttttcggtgttctcgccatgtcgagatccattggcgatagatacttgaaaccatccatcattcctgatccggaagtgacggctgtgaagagagtaaaagaagatgattgtctgattttggcgagtgacggggtttgggatgtaatgacggatgaagaagcgtgtgagatggcaaggaagcggattctcttgtggcacaagaaaaacgcggtggctggggatgcatcgttgctcgcggatgagcggagaaaggaagggaaagatcctgcggcgatgtccgcggctgagtatttgtcaaagctggcgatacagagaggaagcaaagacaacataagtgtggtggtggttgatttgaagcctcggaggaaactcaagagcaaacccttgaactga

SEQ ID NO: 959 - protein, 434 aa, Arabidopsis thaliana
MEEVSPAIAGPFRPFSETQMDFTGIRLGKGYCNNQYSNQDSENGDLMVSLPETSSCSVSGSHGSESRKVLISRINSPNLNMKESAAADIVVVDISAGDEINGSDITSEKKMISRTESRSLFEFKSVPLYGFTSICGRRPEMEDAVSTIPRFLQSSSGSMLDGRFDPQSAAHFFGVYDGHGGSQVANYCRERMHLALAEEIAKEKPMLCDGDTWLEKWKKALFNSFLRVDSEIESVAPETVGSTSVVAVVFPSHIFVANCGDSRAVLCRGKTALPLSVDHKPDREDEAARIEAAGGKVIQWNGARVFGVLAMSRSIGDRYLKPSIIPDPEVTAVKRVKEDDCLILASDGVWDVMTDEEACEMARKRILLWHKKNAVAGDASLLADERRKEGKDPAAMSAAEYLSKLAIQRGSKDNISVVVVDLKPRRKLKSKPLN

SEQ ID NO: 960 - DNA, 1044 bp, Schizosaccharomyces pombe
  CDS (1)..(1044)
atgaagggaagccatccaaatgcaggttccctgttggaaccacttcacaagttgaacccattttctgaaaattctacaagtggacatcgaaaaaacgctagtgatcattcggcggatggagaaactcgaccgattgcaattgagatgaaggatagtaaaggcaacacagtcccagttggtaactcgcgccctagtaaagcctctaactggcttgctggactgatggaggataaaaaccaaagatggcgtaggtctatggaggatactcatatttgcttgtatgattttgggggtaatcaggacgacggcttcgttgccgtttatgacggacatgctggcattcaagcatctgactactgtcagaagaatcttcacaaggtacttttggaaaaggttaggaatgagccggaccggctggtcacagacctaatggacgaaacatttgtcgaggtcaacagcaaaattgcaaaggctactcacaatgacatttgcggttgtaccgctgcagttgctttctttagatatgagaaaaaccgcacccgccgtgttctctacacagctaatgcaggtgatgcacgtatcgtattatgccgtgatggtaaggctattcgactttcttacgatcacaagggatccgatgccaatgagtctcgtcgtgtgacccagttgggtggtctcatggtacaaaaccgaattaatggcgttcttgctgtcacaagggccttaggtgatacctatcttaaggaattggtcagtgcgcatcccttcaccactgaaacccgaatctggaacggtcatgatgagttcttcattatcgcttgtgatggcttgtgggatgtagtatcggatcaggaagctgtcgactttgttcgcaatttcgtaagccctcgcgaagccgctgttcgcctggtagaatttgcattaaaacgtcttagtacagacaatatcacttgtattgtagttaacttgactcgcaatcccggtgatctcgatgattcaggacttaccgctgataatgattcatacagtaatgactattattag

SEQ ID NO: 961 - protein, 347 aa, Schizosaccharomyces pombe
MKGSHPNAGSLLEPLHKLNPFSENSTSGHRKNASDHSADGETRPIAIEMKDSKGNTVPVGNSRPSKASNWLAGLMEDKNQRWRRSMEDTHICLYDFGGNQDDGFVAVYDGHAGIQASDYCQKNLHKVLLEKVRNEPDRLVTDLMDETFVEVNSKIAKATHNDICGCTAAVAFFRYEKNRTRRVLYTANAGDARIVLCRDGKAIRLSYDHKGSDANESRRVTQLGGLMVQNRINGVLAVTRALGDTYLKELVSAHPFTTETRIWNGHDEFFIIACDGLWDVVSDQEAVDFVRNFVSPREAAVRLVEFALKRLSTDNITCIVVNLTRNPGDLDDSGLTADNDSYSNDYY

SEQ ID NO: 962 - DNA, 1113 bp, Schizosaccharomyces pombe
  CDS (1)..(1113)
atgggccaaacactctcagaacccgtactcgacaaacattcgagttctggcggggatcgatggcttcattttggcgtttcacacatgcaaggatggcgtatttcgatggaagacgcgcattgtgcgttgctaaactttacggattccaattcttctaatcctccgacaagcttctttggggtctttgatgggcacggaggcgacagagtcgccaagtactgcaggcagcacttaccagatatcattaaaagtcagccgtctttttggaagggtaactatgatgaagctttgaaatctggttttttggctgcagacaatgcgttaatgcaagatcgggacatgcaggaagatccttcgggatgcacagctaccactgccttgattgtcgaccatcaagtaatatattgtgcaaatgctggggactcgcgaacggtcttaggtagaaagggaactgcggaaccactttcttttgatcacaaaccaaacaacgacgtggaaaaagctcgaatcacggctgcagggggattcatcgactttggtcgagtgaatggtagtttggctctttctcgtgccattggagactttgagtacaagaaagacagttccttacctccagaaaaacagatcgttacagcttttcctgatgtcgttattcataacatagatccagatgatgaatttttaattctggcctgtgatggaatttgggattgcaagagctctcaacaagtcgtggagtttgtaagaagaggcattgttgcgcggcagtctttggaagtaatttgtgaaaatcttatggaccgttgtattgctagtaacagcgagtcctgcggtatcggatgtgacaacatgactatttgcattgttgcctttttgcatggtcgtggtcttgaggattggtataattggattacacagcgcgtcaactcgggagaaggtccttgcgcacctccatcttatgctgagttgcgaggacctaacactatagcggatgcaagaaatctgcagttggaatatgatcatatagctagccatgagtatggaagcggtgatacatacgatagcgattcagatgatgaaaccattgcctacgatcgctattaccttcattaa

SEQ ID NO: 963 - protein, 370 aa, Schizosaccharomyces pombe
MGQTLSEPVLDKHSSSGGDRWLHFGVSHMQGWRISMEDAHCALLNFTDSNSSNPPTSFFGVFDGHGGDRVAKYCRQHLPDIIKSQPSFWKGNYDEALKSGFLAADNALMQDRDMQEDPSGCTATTALIVDHQVIYCANAGDSRTVLGRKGTAEPLSFDHKPNNDVEKARITAAGGFIDFGRVNGSLALSRAIGDFEYKKDSSLPPEKQIVTAFPDVVIHNIDPDDEFLILACDGIWDCKSSQQVVEFVRRGIVARQSLEVICENLMDRCIASNSESCGIGCDNMTICIVAFLHGRGLEDWYNWITQRVNSGEGPCAPPSYAELRGPNTIADARNLQLEYDHIASHEYGSGDTYDSDSDDETIAYDRYYLH

SEQ ID NO: 964 - DNA, 1200 bp, Arabidopsis thaliana
  CDS (1)..(1200)
atggctgggatttgttgcggtgttgttggagagactgaaccggcggcaccggttgattcaacttctcgagcttctcttagacggaggttagatctacttccgtcgatcaaaattgttgctgactccgccgttgctcctccgcttgaaaactgccgtaaacggcagaagcgtgagacagtagtgctctcgacgttaccgggaaatctagatctggattcgaatgtgaggagtgagaataagaaggctagatcagcggttacgaattcaaattctgttacggaagcagagagtttcttttccgatgtacctaagatcggtacgacgtcggtttgtggtagaagacgagacatggaagacgctgtctcgattcatccttcgtttcttcaacggaactctgagaatcatcatttctacggtgtctttgacggccatggctgctctcatgttgcggagaagtgcagagaacggttgcatgatatagtgaagaaggaagttgaagttatggcttccgacgagtggacagagacgatggttaagagttttcaaaaaatggataaagaagttagccaacgagagtgtaacttagttgttaatggtgctactcggagtatgaaaaattcttgtagatgtgaattgcagtctcctcagtgtgacgccgtcggatccaccgctgttgtatcggttgtcacgccggagaagatcattgtttctaattgcggtgattcacgggctgtgctttgtcgtaacggtgtagccattcctctctccgtagatcacaagccggatcgacccgatgaattgattcggatccaacaagctggtgggcgagttatatattgggatggagctagggttcttggagttcttgccatgtctagagcaattggtgataattacttgaaaccgtatgtgattccggatccggaggtaacagtgacggatcgaactgatgaggatgagtgtttgatcttggcgagtgatggactatgggatgttgtaccaaacgagacggcgtgtggcgtggctcgcatgtgccttcgaggtgctggtgcgggtgacgactcagatgcggcgcacaatgcgtgctccgatgcggcgttgctcttaacaaagttggctctagcaagacagagctccgataacgtgagcgtcgttgtggttgacttgaggaagaggaggaataatcaagcgtcgtcttaa

SEQ ID NO: 965 - protein, 399 aa, Arabidopsis thaliana
MAGICCGVVGETEPAAPVDSTSRASLRRRLDLLPSIKIVADSAVAPPLENCRKRQKRETVVLSTLPGNLDLDSNVRSENKKARSAVTNSNSVTEAESFFSDVPKIGTTSVCGRRRDMEDAVSIHPSFLQRNSENHHFYGVFDGHGCSHVAEKCRERLHDIVKKEVEVMASDEWTETMVKSFQKMDKEVSQRECNLVVNGATRSMKNSCRCELQSPQCDAVGSTAVVSVVTPEKIIVSNCGDSRAVLCRNGVAIPLSVDHKPDRPDELIRIQQAGGRVIYWDGARVLGVLAMSRAIGDNYLKPYVIPDPEVTVTDRTDEDECLILASDGLWDVVPNETACGVARMCLRGAGAGDDSDAAHNACSDAALLLTKLALARQSSDNVSVVVVDLRKRRNNQASS

SEQ ID NO: 966 - DNA, 1086 bp, Oryza sativa
  CDS (1)..(1086)
atgggaatatatctcagcagtccaaaaactgaaaagttttctgaagatggtgaaaatgactgtcttagatatggtttatcgtccatgcaagggtggcgtgcaacaatggaagatgctcatgctgcatatactgatctggatgagtccacttcattttttggtgtctatgatggtcatggaggtaaggtggttgcaaagttttgtgccaagtttcttcatcaacaggtgctcaaaagtgagacatacttaactggagatataggaacctcccttcagaaagcctttttaagaatggatgaaatgatgcgtggtcaaaagggatggagggaattatcaatattgggggataagataaacaagtttactgggatgatagaagggttgatttggtctccacgaagcagtgatggtaattgccaagttgatgattggggtcttgaggaggggcctcattctgattttgctggaccaacttcgggaagcactgcctgtgttgccgttattagaaacaaccaacttgttgttgcaaatgctggtgattcgcgttgtgtgatatctcggaagggccaggcatacaatttgtctagagaccacaaacctgatcttgagattgagaaggacagaatcttaaaagctggtggttttattcatgcaggacgagttaatggaagtttaaatcttgcaagagctattggtgacatggaatttaaacagaataagtttcttcctgctgaaaaacaaattgtaactgccaatccagacataaacactgttgagctttgtgacgaagatgaatttgtggtgttagcttgtgatggcatatgggattgcatgtcaagtcaacaactggtagattttgttcgtgaacaattgcacttgaaaacgaaactttctgcagtgtgcgaaagcgtacttgaccggtgtttggcaccatcaactgctggtggtgaaggatgtgacaatatgaccatgatcgtggtgcagttcaaaagacctgctcagtccagtgcaccagcagaagagcaatcctcttcttcaaacggacaagctgaacctgaaacaaaactagagagaagtgaaagttag

SEQ ID NO: 967 - protein, 361 aa, Oryza sativa
MGIYLSSPKTEKFSEDGENDCLRYGLSSMQGWRATMEDAHAAYTDLDESTSFFGVYDGHGGKVVAKFCAKFLHQQVLKSETYLTGDIGTSLQKAFLRMDEMMRGQKGWRELSILGDKINKFTGMIEGLIWSPRSSDGNCQVDDWGLEEGPHSDFAGPTSGSTACVAVIRNNQLVVANAGDSRCVISRKGQAYNLSRDHKPDLEIEKDRILKAGGFIHAGRVNGSLNLARAIGDMEFKQNKFLPAEKQIVTANPDINTVELCDEDEFVVLACDGIWDCMSSQQLVDFVREQLHLKTKLSAVCESVLDRCLAPSTAGGEGCDNMTMIVVQFKRPAQSSAPAEEQSSSSNGQAEPETKLERSES

SEQ ID NO: 968 - DNA, 1296 bp, Oryza sativa
  CDS (1)..(1296)
atggcctctggtgaagggaggcggcgtcatcatgatcttgtgcctcttgctgcattgctcaagagagagatgaagagtgagaagatggagaagcctactgtgagggttggacatgcagctcagtccaagaaaggggaggattactttctaattaagactgattgtcaacgagtgcctgggaactcttcatcatccttttctgtatttgcgatctttgatgggcataatggaaacgccgctgccatttttaccagggagcatttgttaaatcatgtgctgggtgctcttcctcgagggcttggacgagatgagtggttacaagctttaccaagggcattggttgctggctttgttaagactgacaaagaatttcagagcagaggagaaacttcgggaaccacagctacattcgtaatagtggataggtggactgtgactgttgcatctgttggagattcccgttgtatactagatacccagggtggtgctgttacctccttaactgttgatcaccgacttgaggagaatattgaagagagggaacgtgtcacttctagtggaggtgaagttgggagacttagcattgttggtggggctgagattggtccccttcgttgctggccagggggtctatgcctttctaggtcaataggtgacatggatgttggggagttcatagttccaataccatatgtcaaacaagtgaagctatcaaaggccggtgggaggcttataattgcctctgatggcatatgggatgctctatcctcagaaatggctgcaaaatcttgccgtggtttgcctgctgaacttgctgctatgcaggttgtcaaggaagcactaagaacgagagggttaaaggatgatacaacttgcatagtagttgacataatcccacctgataacgaattgccaccaacacctcccccccccaaacggaacaagctgagagatcttctttccttcaggaagagctcccgtgattctgccagtaagctgtcaaaaaagctttccgctataaatatagtggaggaactgtttgaagaaggatcagcaatgcttgctgaaagattaggaaatgatgacaacttgaactcggggcaatcaacatctggcatttttgtctgtgctgtatgtcaagttgatcttgctccaagtgagggcatctctgtccacgcaggttctattttctccaccagctccaaaccctgggaaggtccttttctatgttttgattgccgtgataagaaggatgctatggaaggaaaacgcccaagtggagttaaggtgtcatag

SEQ ID NO: 969 - protein, 431 aa, Oryza sativa
MASGEGRRRHHDLVPLAALLKREMKSEKMEKPTVRVGHAAQSKKGEDYFLIKTDCQRVPGNSSSSFSVFAIFDGHNGNAAAIFTREHLLNHVLGALPRGLGRDEWLQALPRALVAGFVKTDKEFQSRGETSGTTATFVIVDRWTVTVASVGDSRCILDTQGGAVTSLTVDHRLEENIEERERVTSSGGEVGRLSIVGGAEIGPLRCWPGGLCLSRSIGDMDVGEFIVPIPYVKQVKLSKAGGRLIIASDGIWDALSSEMAAKSCRGLPAELAAMQVVKEALRTRGLKDDTTCIVVDIIPPDNELPPTPPPPKRNKLRDLLSFRKSSRDSASKLSKKLSAINIVEELFEEGSAMLAERLGNDDNLNSGQSTSGIFVCAVCQVDLAPSEGISVHAGSIFSTSSKPWEGPFLCFDCRDKKDAMEGKRPSGVKVS

SEQ ID NO: 970 - DNA, 1182 bp, Oryza sativa
  CDS (1)..(1182)
atgctatctgctgcgatggaatacttgagatcttgctggggcccggcgtcgtcgccggccgggcgcccccgcaaaggatcggatgcggcggggcggcaggatgggctgctgtggtacaaggacgccggccagctcgtcgccggcgagttctcgatggccgtggtccaggccaacaacctgctcgaggaccacagccaggtggaatccgggccactgagcaccacggatcccaacctgcagggcactcttgtgggcgtctatgatgggcatggaggcccggagacggcgcgctacatcaatgaccatctcttcaaccatctgaggggatttgcttctgagcacaagtgcatgtcagcggatgtgattcggaaggcgtttcgagcaactgaggagggattcttttctgtagttagtagtcaatggtcgatgaggcctcaattagcggcagtaggctcttgctgtctggttggtgtgatctgtgctggaaatctatatattgcaaaccttggcgattcccgtgctgttctcggtagacttgtgaagggaactggggaggttctggctatgcagttgtcagcagaacacaatgcatcctttgaagaggtcaggcgagagctgcaggcagcacatcctgatgatccccatattgtggttctaaagcacaatgtttggcgtgtgaagggtattatccagataacaagatccattggagatgtgtatctgaagaaaccggagttcaacagagaacctttgcatagcaaatttcggcttcaagaaactttcaggaggcctcttcttagttctgaaccagctattgttgtacaccaattacagacaactgatcagttcatcatttttgcatctgatggactatgggagcatattagtaatcaggaagcagttgatcttgtccaacataatccccgcaatgggattgctagaagactagtaaaggctgcaatgcagcaggcagcaaaaaagagggagatgaggtattcagatctgaagaaaattgatcgtggggtaaggcggcacttccatgatgatataacagttgttgtggtgttctttgattcgaatgccataaccactgctaactggagccgaccttcagtttctcttcgagggggtggtgttactctccctgcaaattcccttgctccattctcagttcctacatag

SEQ ID NO: 971 - protein, 393 aa, Oryza sativa
MLSAAMEYLRSCWGPASSPAGRPRKGSDAAGRQDGLLWYKDAGQLVAGEFSMAVVQANNLLEDHSQVESGPLSTTDPNLQGTLVGVYDGHGGPETARYINDHLFNHLRGFASEHKCMSADVIRKAFRATEEGFFSVVSSQWSMRPQLAAVGSCCLVGVICAGNLYIANLGDSRAVLGRLVKGTGEVLAMQLSAEHNASFEEVRRELQAAHPDDPHIVVLKHNVWRVKGIIQITRSIGDVYLKKPEFNREPLHSKFRLQETFRRPLLSSEPAIVVHQLQTTDQFIIFASDGLWEHISNQEAVDLVQHNPRNGIARRLVKAAMQQAAKKREMRYSDLKKIDRGVRRHFHDDITVVVVFFDSNAITTANWSRPSVSLRGGGVTLPANSLAPFSVPT

SEQ ID NO: 972 - DNA, 1269 bp, Brassica napus
  CDS (1)..(1269)
atggacaaagcttctcctgcagtagctgctgtaccattcagaccgttccctgatcctaagctggaattcgccggaatcagaagctattgcagcacttcgctgccggaaagtacgtgctccggcgaggaatcaatgaaagattcgtcctttattaagatcaacaacatgaggcagggttctactacttcatcatcatctcgtttagctgacgttaccgtggatatctccgccggagaagaaatcaacggctcggatgagtttgatccgagatcgacggctcagagcgagaagagagtgctcagcagaacagagagtagaagcttgttcgagttcaagagcgtgcctttgtacggagtgacttcgatctgcggaagacgatcggagatggaagattccgtctcggcgattcctagattccttcaagtttcgctgctcgattgtggtcgggtcgctaacgggcttaatcctcactcgagtgctcacttcttcggtgtttacgacggacacggcggttctcaggtggcggattattgccgtgagaggatgcatttggcgttgacggaggagatattgaaggagaagccggagttttgcgacggtgacacgtggcaagagaagtggaagagagctttgttcagctcttttatgagagttgacttggagcttgactttgtccccgaaactgtggggtccacttctgtggtcgccgttgtctttccgacgcatatcttcgtctctaactgcggcgactccagagcggttctgtgccgcggcaaaacgccactcgcgttatccgtcgatcacaaaccggatagagaagatgaagcggctaggatagaagtagctggtggaaaagtaatccagtggaacggagctcgtgttttcggtgtgctcgccatgtcaagatccatcggcgataaatacctaaaaccatcggtgatccctgatccggacgtgacttcaatccggcgagtcaaagaagacgactgtctcatcttagcaagtgacggtctttgggacgtgatgaccaacgaagaagtgtgtgacatggctcggaaacggatattgttatggcacaagaagaatgccatggcgggggatgctttgctgccggcggagaaaagaggagaaggaaaagatccggcggcaatgtcggcggcagagtatttgtcgaagatggctctgcaaagaggaagcaaagacaacataagtgtaatagtggttgatttgaagggaataagaaaattcaagagcaaagccttgaactga

SEQ ID NO: 973 - protein, 422 aa, Brassica napus
MDKASPAVAAVPFRPFPDPKLEFAGIRSYCSTSLPESTCSGEESMKDSSFIKINNMRQGSTTSSSSRLADVTVDISAGEEINGSDEFDPRSTAQSEKRVLSRTESRSLFEFKSVPLYGVTSICGRRSEMEDSVSAIPRFLQVSLLDCGRVANGLNPHSSAHFFGVYDGHGGSQVADYCRERMHLALTEEILKEKPEFCDGDTWQEKWKRALFSSFMRVDLELDFVPETVGSTSVVAVVFPTHIFVSNCGDSRAVLCRGKTPLALSVDHKPDREDEAARIEVAGGKVIQWNGARVFGVLAMSRSIGDKYLKPSVIPDPDVTSIRRVKEDDCLILASDGLWDVMTNEEVCDMARKRILLWHKKNAMAGDALLPAEKRGEGKDPAAMSAAEYLSKMALQRGSKDNISVIVVDLKGIRKFKSKALN

SEQ ID NO: 974 - DNA, 1236 bp, Brassica napus
  CDS (1)..(1236)
atggaggaagtttctccggcggttgctatgcctttcatgccattccccgagaccccccagatggagctcgcagggatcatgctgggtaaaggctactgcaacggccaatactcatctcaagattccgacaacggcgaagagacttcttcgtgttctgtttctggagctcaacctaggatagtttcttcgtcgtcagacaaagtcgccggagaagggatcaacggctcggacgagagatcgacggttcagagcgagaagaagatgatcagcaggacggagagcaggagcctgttcgagttcaagagtgtgcctttgtacggttttacttcgatctgtgggagaagaccggagatggaagatgctgtctccgcgatacctaggttccttcaatctccgaccaattcgctggtggatggtcggttcaatcctcagtcaaccgctcatttcttcggtgtctacgacggccacggcggttctcaggtagcggactattgtagagagaggatgcatctggctttagctgaggagatagccagggagaatccgatgctctgcgatggcgacacgtggcaggagaagtggaagagggctttgttcaactcgttcctccgcgttgactcggagatcgagtcggtggccccggagactgttgggtcaacctcggtggtcgctgtcgttttcccgactcatatcttcgtcgcgaattgcggcgactccagagccgttctttgccgtggcaaaactgcccttcctttgtccactgaccacaaaccggatagagaagatgaagcggagaggattgaagcagccggggggaaagttatcaggtggaacggagctcgtgtctttggtgttctcgccatgtcaagatccattggcgatagatacttgaaaccgtcgatcattcctgatccggaagtgacggctgtgaggagagttaaagaagatgactgtctgatactagcgagtgacggtgtttgggatgtaatgacggatgaggaagcgtgcgagatggcgcggaagcggattctcttgtggcacaagaagaacgcaatggctggagatgcgtcgttactcacgaacgagaggagaggggaagggaaagatccggccgcaatgtcggcagctgagtacttgtcaaaactggcgttacagagagggagcaaagacaacatcactgtggtggtggttgatttgaagcctcagaggaaattcaagagcaaacccttgaattga

SEQ ID NO: 975 - protein, 411 aa, Brassica napus
MEEVSPAVAMPFMPFPETPQMELAGIMLGKGYCNGQYSSQDSDNGEETSSCSVSGAQPRIVSSSSDKVAGEGINGSDERSTVQSEKKMISRTESRSLFEFKSVPLYGFTSICGRRPEMEDAVSAIPRFLQSPTNSLVDGRFNPQSTAHFFGVYDGHGGSQVADYCRERMHLALAEEIARENPMLCDGDTWQEKWKRALFNSFLRVDSEIESVAPETVGSTSVVAVVFPTHIFVANCGDSRAVLCRGKTALPLSTDHKPDREDEAERIEAAGGKVIRWNGARVFGVLAMSRSIGDRYLKPSIIPDPEVTAVRRVKEDDCLILASDGVWDVMTDEEACEMARKRILLWHKKNAMAGDASLLTNERRGEGKDPAAMSAAEYLSKLALQRGSKDNITVVVVDLKPQRKFKSKPLN

SEQ ID NO: 976 - DNA, 1191 bp, Zea mays
  CDS (1)..(1191)
atgggagccggggctgaggtcatgcatcaggtcgtgccgctgctggagccgccgctccaccggtgcgtcgttaagagcgtcgatgtcatggaggaggtggttgccgtggcgcctgggcaggtgcagccagcgacgtcgccgaaggcgctgttggaggttgccgtagaggtgcccgatctggagttgaagagatcttctaatgctgggagtagtgtatctgcagaacaactgcagtttgtccctatcattcgatctggtagctttgctgatattggacctaggcggttcatggaagatgagcatattagaattgatgatctttctggtcatcttggctcactgttgatggtctctgcgcctagcgcgttctacggggtgtttgacggtcatgggggttcagatgcagcagcctacatgaaaacacatgcaatgaggttgttctttgaagatgctgacttccctcaagcatcacaagaggataaaatatttgctgaatctgttgaggattcggtccgcagagctttcttgcgggctgaccttgcacttgctgatgattcagtcatcaaccgttcttctggcaccacagcgctgacagcattggtccttgggaggcaactgttggtagcaaacgctggggactgccgcgccgtcctgtgtaggaaagggacagcggtggaggtgtcaaaggatcacaggccgacatacgacgcagagcgtcaaagggttatcgagtgcggtggatacatcgaagatgggtacctcaacggcgtactctctgtgacccgggctttaggggactgggacatgaagctgccccaaggctctccgtcgccccttatcgcagagccagagatccactggaccaccctgacggaagacgacgagttcctcatcatcggctgcgatgggatatgggatgtgatgagcagccagcacgcggtgagcacggtccgcaagggcctccggaggcacgatgaccccgggcggagtgcccaggagctcgccatggaggcgaagaggctcgagaccttcgacaacctcaccgtgatcgttgtctgctttgtccccgacctcgccgggggctcggctacgccctcggagcaggtgccggctggaaggatcaggtgccgcaagagcttgtcgccagaggcactctgcaagctgaggagatggctcgagtctgaccagtag

SEQ ID NO: 977 - protein, 396 aa, Zea mays
MGAGAEVMHQVVPLLEPPLHRCVVKSVDVMEEVVAVAPGQVQPATSPKALLEVAVEVPDLELKRSSNAGSSVSAEQLQFVPIIRSGSFADIGPRRFMEDEHIRIDDLSGHLGSLLMVSAPSAFYGVFDGHGGSDAAAYMKTHAMRLFFEDADFPQASQEDKIFAESVEDSVRRAFLRADLALADDSVINRSSGTTALTALVLGRQLLVANAGDCRAVLCRKGTAVEVSKDHRPTYDAERQRVIECGGYIEDGYLNGVLSVTRALGDWDMKLPQGSPSPLIAEPEIHWTTLTEDDEFLIIGCDGIWDVMSSQHAVSTVRKGLRRHDDPGRSAQELAMEAKRLETFDNLTVIVVCFVPDLAGGSATPSEQVPAGRIRCRKSLSPEALCKLRRWLESDQ

SEQ ID NO: 978 - DNA, 1083 bp, Zea mays
  CDS (1)..(1083)
atggctcatcaaaagcgtgaaggcagctacgccgatgatgatagtacatccaagcgcatcaaaggcaccgacactgcttctgaaacgggggacagtgtagagtctagtgtttcacagcaaatggatgctgaagctaggaggacctgccaaaaggaaagcgaagcaccatcggacaaatgcgtttcagatggggaatgcgctgcaaactctaaggttttgggtgagcagaagatggtattgactgttgtcgaggctgatgcggcggacgacaagggttgcaggcacactatggaggacgcctgggtggtgctccccaatgctggtgcagaatccccaggaagcttgaggtgcgtacattttgcgatttatgacgggcatggtggtcgcttggcggcagattatgcacagaagcatttgcatcagaatgtcatcgctgcaggattaccacgtgagttgatggatattaaagctgcaaagaaggctgtaattgaaggtttccgtagaactgatgaatctttactgcaagaaagtactaagggaaattggcaagatggtgcaacagctgtatgcgtttggatcctgggacagacggttgtagttgcgaatgttggagatgctaaagcagtattggctcgttctatttcaactgagggtgaaggtgtggttgatgagaccaaaagtcaactaaaggctattgttttgacaagagaacataaagccatcttttcacaggagcgctcccgaatccagaaggctggaggttctgttggctctaatggaagattacaaggtcgtattgaagtatcaagagctttcggtgatcgccagtttaagaaggttgggttgattgcaacaccagatgtccattcctttgaacttactaagaaagaccatttcatcattctagggtgcgatggcttatggggagtatttggaccaggtgatgctgtcgaatttgttcagaatcagttgaaggagacctcatcagccacacttgcggtgcgccgcctcgtgaaggaagctgttcgcgagaggcgatgcaaggataactgcactgctgttttgatcgtcttcaggcactag

SEQ ID NO: 979 - protein, 360 aa, Zea mays
MAHQKREGSYADDDSTSKRIKGTDTASETGDSVESSVSQQMDAEARRTCQKESEAPSDKCVSDGECAANSKVLGEQKMVLTVVEADAADDKGCRHTMEDAWVVLPNAGAESPGSLRCVHFAIYDGHGGRLAADYAQKHLHQNVIAAGLPRELMDIKAAKKAVIEGFRRTDESLLQESTKGNWQDGATAVCVWILGQTVVVANVGDAKAVLARSISTEGEGVVDETKSQLKAIVLTREHKAIFSQERSRIQKAGGSVGSNGRLQGRIEVSRAFGDRQFKKVGLIATPDVHSFELTKKDHFIILGCDGLWGVFGPGDAVEFVQNQLKETSSATLAVRRLVKEAVRERRCKDNCTAVLIVFRH

SEQ ID NO: 980 - DNA, 1059 bp, Triticum aestivum
  CDS (1)..(1059)
atgggagtttacctcagtactccaaagaccgataagctatccgaagacggggaaaatgataaactcaaatttggtctttcatctatgcaaggatggcgtgcaagcatggaagatgctcattcagcattgctagatcttgacaatgagacggcattcttcggtgtttttgatggccatggaggaagggtggttgccaaattctgtgcaaaatatctacactctcaagttctcaaaagtgaagcatattcttctggtgatctaggaactgctgttcataaagctttctttagaatggatgaaatgatgcgaggacagagaggttggagagaactatctgcactaggagataagatgaacaagttcagtggcatgatagaagggttgatttggtctccgagaggcagtgattcgaagaatgcagaagatgactgggctctagaggagggaccccactctgactttgatgggccaacatgtggaagtacagcatgcgtagcactagtaaggaataaccaacttgtcgtggcaaacgctggtgattcccggtgtgttatttctagggctggccaggcatacaatttgtccagagaccacaagccagagcttgtagctgagagagaaagaatactaaaagcaggcgggttcatacgcatggggcggataaatggaagtttgaacttagcgagagcgattggagatatggaatttaagcagaacaaattcttgcctcctgagaagcaaatagtgacttcaaatcctgacatcaatgttgtggaactttgcaatgaggatgactttcttgttttagcatgtgatggcatttgggactgtatgtcaagccagcagttggtggatttcatccatgagcatatacacacggagagcagcctttctgcagtgtgtgaaagagtgctcgacagatgcctggctccatcaacaatgggtggagacggatgcgacaacatgaccatgatcttggtgcagttcaaaaaaccagtcagtgacaagaaaaaggctgacgtgggggagcaatctgcgaaaggcaaggaagagtcttga

SEQ ID NO: 981 - protein, 352 aa, Triticum aestivum
MGVYLSTPKTDKLSEDGENDKLKFGLSSMQGWRASMEDAHSALLDLDNETAFFGVFDGHGGRVVAKFCAKYLHSQVLKSEAYSSGDLGTAVHKAFFRMDEMMRGQRGWRELSALGDKMNKFSGMIEGLIWSPRGSDSKNAEDDWALEEGPHSDFDGPTCGSTACVALVRNNQLVVANAGDSRCVISRAGQAYNLSRDHKPELVAERERILKAGGFIRMGRINGSLNLARAIGDMEFKQNKFLPPEKQIVTSNPDINVVELCNEDDFLVLACDGIWDCMSSQQLVDFIHEHIHTESSLSAVCERVLDRCLAPSTMGGDGCDNMTMILVQFKKPVSDKKKADVGEQSAKGKEES

SEQ ID NO: 982 - DNA, 1218 bp, Linum usitatissimum
  CDS (1)..(1218)
atggctctattagggccacaccagctcgaacggctcccactgaccaaccgccaacttggtcacttctccaccggcggccgtttctccagaccacccaccaccgctaacatacttagcacagctcaacatcaccctcttccagtccatcaatctgccaaaacccttcgttgctcagccatcgccatagacgcagcttctagtttctccgatgtcgctggtgtcaggtgggggttcacttccgtccagggcgtccgtgaggagatggaggatgatatcgtcattcgatccgatggcggccttgacgggttctctttcgccgctgttctcgacggccacggcggcttcaattctgtcaacttcctcagggatgaattgtacaaagagtgcgtggctgctttacaaggtgggttgctattgggtgggaaagactacaacgccatcaaagaggctctggaatctgcgttcgtcaatgttgattcgaaattgttaacctggctggaaatgaatcacgccgaggatgaatctggttcgactgccactgttgtgattatcgcaagtgataggctcatcatttcccatatcggggactccaatgtggtattgtctcgttctggtaaagcagaagtgttgactgatcctcatcgtccatatggaagcaacaagagttcccttcaagaaatcagaagaatcagggaagcaggtggatggatcaacaatgggaggatttgtggtgacatagctgtatctcgtgcatttggtgatatgaggttcaagacgaagaaaactgagatgttgcagaaaggagtccaggaaggtcgatggacagagaagtttacttctagagtgcaattcaatggagacttagttgttgcatctccagatatttatcaagtaacattgggttcagatgccgagtttatactattagcatctgatggcttatgggactacataaaaagttcagatgcagttcaatttgttagggatcaacttaagcaacatggaaatgtccaggtagcctgtgaagaacttgcaagagcagctctggatcgacgttcacaagacaacattagcatcattgtcgcagatttagggaggacagattggcaaactgtgccggttgagcagaaaaatgttgtgtttgaactaggccaagcttttgctacgattggcatcgtctcagttggaatatggatgacatgtctgctttctttctag

SEQ ID NO: 983 - protein, 405 aa, Linum usitatissimum
MALLGPHQLERLPLTNRQLGHFSTGGRFSRPPTTANILSTAQHHPLPVHQSAKTLRCSAIAIDAASSFSDVAGVRWGFTSVQGVREEMEDDIVIRSDGGLDGFSFAAVLDGHGGFNSVNFLRDELYKECVAALQGGLLLGGKDYNAIKEALESAFVNVDSKLLTWLEMNHAEDESGSTATVVIIASDRLIISHIGDSNVVLSRSGKAEVLTDPHRPYGSNKSSLQEIRRIREAGGWINNGRICGDIAVSRAFGDMRFKTKKTEMLQKGVQEGRWTEKFTSRVQFNGDLVVASPDIYQVTLGSDAEFILLASDGLWDYIKSSDAVQFVRDQLKQHGNVQVACEELARAALDRRSQDNISIIVADLGRTDWQTVPVEQKNVVFELGQAFATIGIVSVGIWMTCLLSF

SEQ ID NO: 984 - DNA, 1167 bp, Zea mays
  CDS (1)..(1167)
atgtcttgcacggtggccatcccgagctcgccagtcttctcgccctcacgccgcccactctcctgcaaggccgcctccgcctcaccggagcccaccgtccccgcctctaccgcggcgcccgcgcccgccgccgccgccggctcgccgctccgccccttcgcgctccgcgcgctgctgcgggaggaggtctccccgtctccgccgccccagccgacctccgccgcagcggtggctttggtaccgagcggggccgcgctgaagcggcggcgaccgacgccgcttgtcgtgccggcgtccggcgccgcggcagctgctgctgcggcggcggcggtggccgctgtggaggcggatccgaggaacgaggtggaggaggaaggggaggagttcgcagcgtactgccggaggggaaagggaaggagaagggtggaaatggaggaccggcatgtgtccaaggtcgctctcggcggggacccccaagtggcactgtttggtgtgttcgatggccacggcgggaaaaacgcggcagagttcgccgcggagaacatgcccaagtttatggccgaggagttgacgaaggtaaacggcggagagatcgaaggagcggtgaagaggggttacctcaagacggacgaggagttcctcaagagggacgagagcgggggcgcgtgctgcgtcacagccgtcctccaaaagggtggactggtcgtctccaacgctggagactgccgtgcggtgctcagccgagcagggaaggcagaggcgctcacctctgaccaccgggcgtccagggaggacgagaaggaaaggattgagaatttgggtggatttgtggtgaattaccgtggaacatggcgagtccagggctccctggcagtgtctaggggcattggggatggacacctaaagcagtgggttgtggctgacccagacaccacgacgctcctggttgaccagcagtgcgagttcttgatacttgcttctgatggcctctgggataagatcgacaatcaggaggcggtagaccttgcacgacctctctgcatcaacaatgacaagacctctcgcatggctgcctgcaggatgctcaccgagacatcgatttccaggggctcgactgatgatatcagtgtcgtgatcgtgcagttgcagaaattttcaagctcgtaa

SEQ ID NO: 985 - protein, 388 aa, Zea mays
MSCTVAIPSSPVFSPSRRPLSCKAASASPEPTVPASTAAPAPAAAAGSPLRPFALRALLREEVSPSPPPQPTSAAAVALVPSGAALKRRRPTPLVVPASGAAAAAAAAAAVAAVEADPRNEVEEEGEEFAAYCRRGKGRRRVEMEDRHVSKVALGGDPQVALFGVFDGHGGKNAAEFAAENMPKFMAEELTKVNGGEIEGAVKRGYLKTDEEFLKRDESGGACCVTAVLQKGGLVVSNAGDCRAVLSRAGKAEALTSDHRASREDEKERIENLGGFVVNYRGTWRVQGSLAVSRGIGDGHLKQWVVADPDTTTLLVDQQCEFLILASDGLWDKIDNQEAVDLARPLCINNDKTSRMAACRMLTETSISRGSTDDISVVIVQLQKFSSS

SEQ ID NO: 986 - DNA, 1083 bp, Zea mays
  CDS (1)..(1083)
atggaagagcacgtgcctcgaggcggcggcggcgggaggcccccgatcccggcggcggcggcgaggaagccggcgctcgcgcggcactcctcttttgtgaggagtcctgcaaacaatacaaagcctgcaactgagagagcttttgaaggcatggacactgaatttatccctattgtacgatctggtgggtgggctgatattggctccaggcacacaatggaggatgtctttatctgctttgataatttcatgcaagattttggaattgaaagttttgaagaaggacccagtgccttttatgggatttttgatgggcatggtggaaagcatgcagctgattttgtgtgcagtaatttaccaaggtttattgtcgaggatgaggattttcctagggagatagtgaaagcaatgtcctctgcattcttgcaggctgatgcttcttttgcagatgcttgttctctgaactgctctctttcttctggtacaactgctcttgcagcacttgtggttgggagatcacttctggtcgcgaatgctggtgactgccgagcagtactttgtcgtcgtggaaaggcaattgagatgtccagggatcacaaaccatcttgcaacagggagaagatacgtattgaggcattgggtggatatgtcgatgatggctacctgaatgggcagcttaatgtcgctcgagcaattggggactggcatatggaaggcatgaaggcatgtggtggtcttggtcctcttactgccgagcctgaggtaatgacaatggatctaactgatgaggacgaattcctgatcatgggctgtgatgggatctgggatgtattcctcagccaaaatgcagtagattttgctcgccgtaagctccaagaacacaatgacccggctgcctgctgtaaagaactagttgatgaggccattaagaggaagagtggtgataacctttctgtggttgtcgtctgcttcaactctaggccgcctcctgttctaacaactcctaggcctcgtgtacagaggagcatatctgcagaaggcctgagagagctgcagagcttccttgatagtttggccgattga

SEQ ID NO: 987 - protein, 360 aa, Zea mays
MEEHVPRGGGGGRPPIPAAAARKPALARHSSFVRSPANNTKPATERAFEGMDTEFIPIVRSGGWADIGSRHTMEDVFICFDNFMQDFGIESFEEGPSAFYGIFDGHGGKHAADFVCSNLPRFIVEDEDFPREIVKAMSSAFLQADASFADACSLNCSLSSGTTALAALVVGRSLLVANAGDCRAVLCRRGKAIEMSRDHKPSCNREKIRIEALGGYVDDGYLNGQLNVARAIGDWHMEGMKACGGLGPLTAEPEVMTMDLTDEDEFLIMGCDGIWDVFLSQNAVDFARRKLQEHNDPAACCKELVDEAIKRKSGDNLSVVVVCFNSRPPPVLTTPRPRVQRSISAEGLRELQSFLDSLAD

SEQ ID NO: 988 - DNA, 1119 bp, Zea mays
  CDS (1)..(1119)
atgagcggaggggtggaaccggagaccccgccgggtagcagcagcaggagcgggggcagcaggagcgtcggtggcaagccgccacgccaccacctcacgtctatccgccactgcgccagcatcgcccgcatcgccgccgcctccgccggattcgggctggattcggggacgctcagcttgatctcacctaccgcagacatccatccgggcttcttgcctgtgttcaggtcggggagtttcgctgatattggacccaaaacgtacatggaggacgaacatgtctgtgtggacaacctggttgagcacctcgggttctatggcccgggcatccctgcaccgggtgctttctatggggtgtttgatggccatggtggcactgatgctgcctgttttgtccggaaaaatatactgaagttcataaccgaagattgccacttccccaacagcatcgagaaggcaatcagaagcgcttttgtaaaggccgacaatgcaattgcggattcccattctcttgaccggaattctgggaccacagcattgacggtccttatatttggcaggacactgcttgttgcgaatgccggtgactgtcgagctgtattaggaaagcgaggccgagctgttgaactctctagagaccacaaacccagctgcatagttgaaaggctcagaatcgaaaacctgggtggtaccgtctttgatggctacctcaacggtcagctggctgtagcaagggcaatcggtgattggcacatgaaaggctccaagggctctgtatgccctcttacaccagaacctgagtttagggaggttaggcttactgaggaagatgagttcttgataataggctgtgatggcctttgggatgtgatgagcagccagtttgctgtttccatggtcaggaaagagctgatggaacacaatgatccacaacggtgctcgcgagagcttgtccacgaagcgcttaggcgcgactgctgtgataacctaaccgtagttgttgtgtgcttctcagcggacccaccccctcaaatcgagatcccaagattccgagtacgaagaagcatctcaatggaagggcttcataggctgaggggtgctcttgacagtaatatctga

SEQ ID NO: 989 - protein, 372 aa, Zea mays
MSGGVEPETPPGSSSRSGGSRSVGGKPPRHHLTSIRHCASIARIAAASAGFGLDSGTLSLISPTADIHPGFLPVFRSGSFADIGPKTYMEDEHVCVDNLVEHLGFYGPGIPAPGAFYGVFDGHGGTDAACFVRKNILKFITEDCHFPNSIEKAIRSAFVKADNAIADSHSLDRNSGTTALTVLIFGRTLLVANAGDCRAVLGKRGRAVELSRDHKPSCIVERLRIENLGGTVFDGYLNGQLAVARAIGDWHMKGSKGSVCPLTPEPEFREVRLTEEDEFLIIGCDGLWDVMSSQFAVSMVRKELMEHNDPQRCSRELVHEALRRDCCDNLTVVVVCFSADPPPQIEIPRFRVRRSISMEGLHRLRGALDSNI

SEQ ID NO: 990 - DNA, 1131 bp, Brassica napus
  CDS (1)..(1131)
atggtagcagaagcagaggttgtgtttcaacagagtttgccggtggttctggatattgacggggttacttccgccgtcgtatctccgctttcttctccgaaattgggtatccgtcgatcgacggcgtcggtttccggcggtttatcgacttctccggtggaggatgattgcgattccactatcccggtttatattccaaccatccggtctgggagctacgctgacatcggaccaaagagatccatggaagacgaacacatttgcgtagatgatctatcctcccaacttggctgtcttttccagttgccaaagccaagtgctttctatgcggttttcgatggtcacggaggatcagaagcagcaacgtacgtaaagcaaaacgccatcaggcttttgtttgaagatgataacttcccacagacatctgaagtgaacagtgtttatgtggaacaagtcaagagttcgctgagaaacgcgtttctacaagctgatctagctttggctgaggattgcagcatcagctcttcctctggcaccacggctctcgccgcacttatctgcggaagactcttaatggtagcaaacgctggagactgcagagcagttctttgcagaaaaggcaaagcgatagagatgtctcacgaccatagaccgatcaatataccagagagaagaagagtagaagaatccggaggtgtcattgaagacggctacctaaacggagagctatccgtaacgcgagctctcggagactgggacatgaaacgcacgccacacggctcctctaactctccactcatctccgaacccgaaataaagcagacaactctaacagaggaggacgagtttcttgtgatcgggtgcgacgggatttgggatgttttgacgagccaggaagccgttagcgttgtgaaacgcggcttgaacaggcatggtgatccgacgagatgtgcgagagagctcgtgatggaggctctgagactgaacacgtttgataacttaacggcggttgtggtatgttttgtgacggtagaccgagagggtgaggcggtggttccgttggagaagaaacggtgtagtagcctaacgccggaggctttccgaagcttgaggaatctgttggatggctga

SEQ ID NO: 991 - protein, 376 aa, Brassica napus
MVAEAEVVFQQSLPVVLDIDGVTSAVVSPLSSPKLGIRRSTASVSGGLSTSPVEDDCDSTIPVYIPTIRSGSYADIGPKRSMEDEHICVDDLSSQLGCLFQLPKPSAFYAVFDGHGGSEAATYVKQNAIRLLFEDDNFPQTSEVNSVYVEQVKSSLRNAFLQADLALAEDCSISSSSGTTALAALICGRLLMVANAGDCRAVLCRKGKAIEMSHDHRPINIPERRRVEESGGVIEDGYLNGELSVTRALGDWDMKRTPHGSSNSPLISEPEIKQTTLTEEDEFLVIGCDGIWDVLTSQEAVSVVKRGLNRHGDPTRCARELVMEALRLNTFDNLTAVVVCFVTVDREGEAVVPLEKKRCSSLTPEAFRSLRNLLDG

SEQ ID NO: 992 - DNA, 1290 bp, Brassica napus
  CDS (1)..(1290)
atgtcaacaaaaggagaacatcatacagttccactttcagttttgctcaagcgtgaatcagcaaatgaaaagatagacaaccctgaacttgtacacggccagtttaaccagagcaagaaaggagaggactttacgtttgttaaaacagactgccaaagggtcacgggagatgatggcgttactaccttctcagttttcgggctttttgatggacacaatggccctgcagcagctatatacaccaaggaaaaccttctgaacaatgtattagctgcaataccccctgatctcaacagagatgagtgggttgcggcacttcctagggctttggttgcaggatttgtcaaaactgataaagatttccaggaaagagcaagaacctctggaacgaccgtaacttttgtcattgtagaaggatgggtggtgagtgttgcatctgtaggtgactctcgttgcatactcgagcctgctgaaggtggtgtctatcatttatctgctgatcatcggctcgaaataaacgaagaagagcgagatcgcgtcactgcaagtggtggtgaagttggtcggttaaatactggtggtggaactgagattggccctctgagatgttggccgggtggtctctgtctctcaagatccattggagacctggatgttggcgaatacattgttccagttccttatgtgaagcaagtcaagttgtcttcagctggtggtcgacttatcatctcaagtgatggtgtgtgggatgcaattagcgcagaagaggctcttgattgttgccggggcttgccacctgaagcttcggctgagcaaattgttaaagcagctgtggggaagaaaggtattcgagatgatacaacatgtattgtcgttgatatactaccatcagaaaaaccagctgcttccctaccgcctccaaaaaagcaaggaaaaggaataataaagtccatgttcaaaagaaaatcttcaggctcatcttctaatactgagaaagagtatcttgaacctgatgaagttgaagaactgtttgaagaaggctctgctatgctttcagagagattagacacaaagtacccgctctgcaatatgtttaagttgttcatgtgtgctgtgtgtcaagtagaagtgaaacctggagaaggtgtttcgatacatgctggaacggctaattgcccaaagcttcgtccatgggatggtccattcctatgcgcaagttgccaagagaagaaagacgcaatggaagggaaacgatcatcgggagatagacatagcagtgagagcgactag

SEQ ID NO: 993 - protein, 429 aa, Brassica napus
MSTKGEHHTVPLSVLLKRESANEKIDNPELVHGQFNQSKKGEDFTFVKTDCQRVTGDDGVTTFSVFGLFDGHNGPAAAIYTKENLLNNVLAAIPPDLNRDEWVAALPRALVAGFVKTDKDFQERARTSGTTVTFVIVEGWVVSVASVGDSRCILEPAEGGVYHLSADHRLEINEEERDRVTASGGEVGRLNTGGGTEIGPLRCWPGGLCLSRSIGDLDVGEYIVPVPYVKQVKLSSAGGRLIISSDGVWDAISAEEALDCCRGLPPEASAEQIVKAAVGKKGIRDDTTCIVVDILPSEKPAASLPPPKKQGKGIIKSMFKRKSSGSSSNTEKEYLEPDEVEELFEEGSAMLSERLDTKYPLCNMFKLFMCAVCQVEVKPGEGVSIHAGTANCPKLRPWDGPFLCASCQEKKDAMEGKRSSGDRHSSESD

SEQ ID NO: 994 - DNA, 1152 bp, Brassica napus
  CDS (1)..(1152)
atggtatctacaacattcaggagaattgtgacgccttgttggagacctttcggtgttggagaaggttctgttccggatgatgatggtaacggccgtcttgatggtctcttgtggtataaagactccggtaaccacctcaccggagagttttccatggcggtggttcaagcgaacgctcttctcgaagaccatagccagttagagtctggtcctattagtttccatgagtctggacccgaagcgacttttgtcggtgtttacgatggtcacggaggtcctgaggcagctcggtttgtgaacgagaggttgttttacaacatgagaaggtgcgcttctgagcagcgaggggtggtctctcccgacgtgatcaccagagcgttcgtggcaacagaagaggagtttctcgggttggttcaggagcagtggaagaccaaaccgcagatagcttccgtgggagcttgttgcttggtgggtgttgtctgcaacggaatgctatacgtcgcaaacgcgggagactctcgtgttgtcttggggaggcttcagagtccgtttaaagagatgaaggctgttcagctatcctcagagcataacgctagtgttgagtctgtgagagatgagctgcgtttgttgcatcctaatgacccgaacattgtggtattgaaacacaaagtgtggcgtgtgaaagggatcatacaggtttcgagatccataggcgacgcgtacttgaagagagcagagtttaaccaagaaccgttgttgcctaagttcagagttgcggaacgttttgagaagcctataatgagagctgagccgacgataacagttcataagattcaccctgaagatcagtttcttatatttgcttcagatggtttgtgggagcatctgagtaaccaagaagcagttgatatcgtcaatacttgtccacgcaatggtgtggctcggaggttactgaaagctgcattgcaagtagcagcaaagaagagagagatgaggtattcggatttggagaagatagagcctggcattaggagacactttcatgatgatatcactgtgattgttgtttttcttcactctgcaaatttggggattcgaactccggtctcggtcagaggaggtggtgaactctcaggcaatgccattttctag

SEQ ID NO: 995 - protein, 383 aa, Brassica napus
MVSTTFRRIVTPCWRPFGVGEGSVPDDDGNGRLDGLLWYKDSGNHLTGEFSMAVVQANALLEDHSQLESGPISFHESGPEATFVGVYDGHGGPEAARFVNERLFYNMRRCASEQRGVVSPDVITRAFVATEEEFLGLVQEQWKTKPQIASVGACCLVGVVCNGMLYVANAGDSRVVLGRLQSPFKEMKAVQLSSEHNASVESVRDELRLLHPNDPNIVVLKHKVWRVKGIIQVSRSIGDAYLKRAEFNQEPLLPKFRVAERFEKPIMRAEPTITVHKIHPEDQFLIFASDGLWEHLSNQEAVDIVNTCPRNGVARRLLKAALQVAAKKREMRYSDLEKIEPGIRRHFHDDITVIVVFLHSANLGIRTPVSVRGGGELSGNAIF

SEQ ID NO: 996 - DNA, 1134 bp, Brassica napus
  CDS (1)..(1134)
atgttagctacgttaatgaaactattgagtgcttgtctctggccttcttcctcctctgattcttcagctgggagacaagatgggttgctctggtacaaagactctggtcagcacctacttggtgagttctctatggcggttgttcaggccaacaatctccttgaggatcagagccaacttgagtctggccctctgagtacacttgattctggtccttacggaacttttgttggagtatatgacggtcacggcggccctgagacctcacgctttgtcaacgatcatctctttcaacatttgaagagatttgcagcagaggaagcctgtatgtcgatggatgtaattagaaaggcctacgaggcgactgaagaagggtttctaggggttgtgacaaagcagtggccggtgaagccacagattgcagctgttgggtcttgctgcttggtcggtgtcatatgcggagggatgctctacatcgctaacgttggggattcccgtgcagttcttggaagggctgtgaaggccacaggcgaggttattgcgcttcagctctcagcggaacataacgtgagcatagagtctgttagacaggaaatgcactccttacatccagatgactcgcatattgttgtgttaaagcacaatgtgtggcgcgttaaggggcttattcagatatcaagatccataggcgacgtgtatcttaagaaggcggagttcaacagggaaccattgtacacaaagtatagactccgcgagccgatgaagaggccaatcttgagtggggaaccgtcgataacagagcatgagctccaaccacaagatcagtttctgatatttgcttcagacggactatgggaacagctgagcaaccaagaagctgttgacatcgttcagaaccacccacgaaacgggatagcacgtagactggtgaagatggcactgcaagctgcagcaaagaagagagagatgagatactctgatctgaagaagatagagagaggcgtgaggaggcatttccacgatgacatcactgtcgtggtcatctaccttgacaccaatgtaatgagctctgccaaaggacgatcctctctttctatcagaggccgcggtatgaccttcccaaagaaactctaa

SEQ ID NO: 997 - protein, 377 aa, Brassica napus
MLATLMKLLSACLWPSSSSDSSAGRQDGLLWYKDSGQHLLGEFSMAVVQANNLLEDQSQLESGPLSTLDSGPYGTFVGVYDGHGGPETSRFVNDHLFQHLKRFAAEEACMSMDVIRKAYEATEEGFLGVVTKQWPVKPQIAAVGSCCLVGVICGGMLYIANVGDSRAVLGRAVKATGEVIALQLSAEHNVSIESVRQEMHSLHPDDSHIVVLKHNVWRVKGLIQISRSIGDVYLKKAEFNREPLYTKYRLREPMKRPILSGEPSITEHELQPQDQFLIFASDGLWEQLSNQEAVDIVQNHPRNGIARRLVKMALQAAAKKREMRYSDLKKIERGVRRHFHDDITVVVIYLDTNVMSSAKGRSSLSIRGRGMTFPKKL

SEQ ID NO: 998 - DNA, 1149 bp, Brassica napus
  CDS (1)..(1149)
atgattggtatggatttttcacctttgataacggttctagagggagatttcaacatggacaatgcttcttcaacagaaactgatactttagatgactctactaagctaatgagtagtaaaggaaaacctccgaggcacctatcttctatgcaacgtatcacaaccactactactagtaggcttcaggttgcagtcactgcggatttggatgtttgtaagtcacctgatgaaaaatcggattttttacctgtataccgatcaggaagctgtgctgagcaaggggcaaaacagttcatggaagatgaacatatttgcatcgatgatctcgttgaccatcttggtgcatctcttgattcctcatctctttcagccttctatggggtattcgacggccacggtggcacagatgcagcactgtttgttagaaagaacattctgagattcattatagaagacacttacttccctctatgtgtcaaaaaggcaataaagaatgctttcttgaaagctgattaccaatttgcagatgattcttctcttgacatctcttctggaaccactgcccttacagcttttatttttggaaggaggttgataattgcaaacgctggtgattgccgagcggtgcttggcagaagaggcagagcaattgagttatccaaagaccacaaaccaaactgcatcgccgagaaagtaagaatagaaaatttaggtggagttgtgtatgatggctacctcaacgggcaactatcagttgcacgtgccattggggactggcacatgaaaggccccaaaggctctgcttgtcccttaagcccagagccagagttgcaagaaaccgaccttagtgaagaagatgagttcttgataatggggtgcgatggtctttgggatgtgatgagcagtcaatgcgcggtgacaatcgctaggaaagaactgatgattcataatgatccagagagatgctctagagagctggtgagggaggctcttaaaaggaatacgtgtgataatttgactgtgattgttgtgtgcttctctcctgatcctccacagaggatagagatccggatgcagtcaagggtgaggcggagtatatctgcggaagggctaaatctacttaaaggtgtgcttgatggttatccctaa

SEQ ID NO: 999 - protein, 382 aa, Brassica napus
MIGMDFSPLITVLEGDFNMDNASSTETDTLDDSTKLMSSKGKPPRHLSSMQRITTTTTSRLQVAVTADLDVCKSPDEKSDFLPVYRSGSCAEQGAKQFMEDEHICIDDLVDHLGASLDSSSLSAFYGVFDGHGGTDAALFVRKNILRFIIEDTYFPLCVKKAIKNAFLKADYQFADDSSLDISSGTTALTAFIFGRRLIIANAGDCRAVLGRRGRAIELSKDHKPNCIAEKVRIENLGGVVYDGYLNGQLSVARAIGDWHMKGPKGSACPLSPEPELQETDLSEEDEFLIMGCDGLWDVMSSQCAVTIARKELMIHNDPERCSRELVREALKRNTCDNLTVIVVCFSPDPPQRIEIRMQSRVRRSISAEGLNLLKGVLDGYP

SEQ ID NO: 1000 - DNA, 1134 bp, Brassica napus
  CDS (1)..(1134)
atgttagctacgttaatgaaactattgagtgcttgtctctggccttcttcctcctctgattcttcagctgggagacaagatgggttgctctggtacaaagactctggtcagcacctacttggtgagttctctatggcggttgttcaggccaacaatctccttgaggatcagagccaacttgagtctggccctctgagtacacttgattctggtccttacggaacttttgttggagtatatgacggtcacggcggccctgagacctcacgctttgtcaacgatcatctctttcaacatttgaagagatttgcagcagaggaagcctgtatgtcgatggatgtaattagaaaggcctacgaggcgactgaagaagggtttctaggggttgtgacaaagcagtggccggtgaagccacagattgcagctgttgggtcttgctgcttggtcggtgtcatatgcggagggatgctctacatcgctaacgttggggattcccgtgcagttcttggaagggctgtgaaggccacaggcgaggttattgcgcttcagctctcagcggagcataatgtgagcatagagtctgttagacaggaaatgcactccttacatccagatgactcgcatattgttgtgttaaagcacaatgtgtggcgcgttaaggggcttattcagatatcaagatccataggcgacgtgtatcttaagaaggcggagttcaacagggaaccattgtacacaaagtatagactccgcgagccgatgaagaggccaatcttgagtggggaaccgtcgataacagagcatgagatccaaccacatgatcagtttctgatatttgcttcagacgggctatgggaacagatgagcaaccaagaagctgttgacatcgttcagaaccacccacgaaacgggatagcacgtagactggtgaagatggcactgcaagctgcagcaaagaagagagaaatgagatatactgatctgaagaagatagagagaggggttaggaggcatttccacgatgacatcactgtcgtggtcatcttccttgacaccaatgtgatgagctctgccaaaggaggatcctctgtttctatcagaggcggcggtatgactttccccaagaaactctaa

SEQ ID NO: 1001 - protein, 377 aa, Brassica napus
MLATLMKLLSACLWPSSSSDSSAGRQDGLLWYKDSGQHLLGEFSMAVVQANNLLEDQSQLESGPLSTLDSGPYGTFVGVYDGHGGPETSRFVNDHLFQHLKRFAAEEACMSMDVIRKAYEATEEGFLGVVTKQWPVKPQIAAVGSCCLVGVICGGMLYIANVGDSRAVLGRAVKATGEVIALQLSAEHNVSIESVRQEMHSLHPDDSHIVVLKHNVWRVKGLIQISRSIGDVYLKKAEFNREPLYTKYRLREPMKRPILSGEPSITEHEIQPHDQFLIFASDGLWEQMSNQEAVDIVQNHPRNGIARRLVKMALQAAAKKREMRYTDLKKIERGVRRHFHDDITVVVIFLDTNVMSSAKGGSSVSIRGGGMTFPKKL

SEQ ID NO: 1002 - DNA, 1038 bp, Glycine max
  CDS (1)..(1038)
atgggaatatatctcagcactccaaaaactgaaaagttttctgaagatggtgaaaatgactgtcttagatatggtttatcatccatgcaagggtggcgtgcaacaatggaagatgctcatgctgcatatactgatctggatgagtccacttcattttttggtgtctatgatggccatggaggtaaggtggttgcaaagttttgtgccaagtttcttcatcaacagttgttcaaaagtgagacatacttaactggagatataggagcctcccttcagaaagcctttttgagaatggatgaaatgatgcgtggtcaaaggggatggagggaattatcaatattgggggataagataaacaagtttactgggatgatagaagggttgatttggtctccacgaagcagtgatgggaattgccatgttgatgattgggcttttgaggaggggcctcattctgattttgctggaccaacttcaggaagcactgcctgtgttgcagttattagaaacaaccaacttgttgttgcaaatgctggtgattcgcgttgtgtgatatccaggaagggccaggcatacaatttgtctagagaccacaaacctgatcttgagattgagaaggaaagaatcttaaaagctggtggtttcattcacgtaggacgagtcaatggaagtttaaatcttgcaagagctattggtgacatggaatttaaacagaataagtttctttctgctgaaaaacaaattgtaactgccaatccagacatcaacactgttgagctttgtgacgaagatgagtttgtggtgttagcttgtgatggcatatgggattgcatgtcaagtcaacaactggttgattttgttcatgaacaattgcactcggaaacaaaactttctgccgtgtgtgaaagagtacttgatcggtgtttggcaccatcaactgccagtggtgaaggatgtgacaacatgaccatgattgtggtgcagttcaaaagacctgctcagtccagtgtaccagcagaagagtcctcttcaaactga

SEQ ID NO: 1003 - protein, 345 aa, Glycine max
MGIYLSTPKTEKFSEDGENDCLRYGLSSMQGWRATMEDAHAAYTDLDESTSFFGVYDGHGGKVVAKFCAKFLHQQLFKSETYLTGDIGASLQKAFLRMDEMMRGQRGWRELSILGDKINKFTGMIEGLIWSPRSSDGNCHVDDWAFEEGPHSDFAGPTSGSTACVAVIRNNQLVVANAGDSRCVISRKGQAYNLSRDHKPDLEIEKERILKAGGFIHVGRVNGSLNLARAIGDMEFKQNKFLSAEKQIVTANPDINTVELCDEDEFVVLACDGIWDCMSSQQLVDFVHEQLHSETKLSAVCERVLDRCLAPSTASGEGCDNMTMIVVQFKRPAQSSVPAEESSSN

SEQ ID NO: 1004 - DNA, 1071 bp, Glycine max
  CDS (1)..(1071)
atggtatgcagcagttgtgtaaggtctttggttgttcaagctggaaccttcgtcaacagagtgagaatcaacgaatttgggaggagtttgctggcggttcagagtttttctcattggccgattcgtgaatacaagacaatcacagggatgatggttgatacgggttctatgtcaagtgctggaccccttgttgatatgatgccagagaaagatgatgatggtcgatttgctagtggagggtggaaaagtgaagatggaagacttagctgtggttattcaagttttaggggaaagagagtgacaatggaagatttttatgatattaagacattgaagattggtggccaatcaatatgcttatttggaatatttgatggtcatggtggttctcgtgctgctgagtatttaaaggagcatctttttgataatctcttgaagcatccaaattttttgacagatgccaaattggctataagtgaaacatatcaacagactgatgctaattttctggattctgaaaaggacaccttcagggatgatggatctacagcttcgacagcagttttggttgataaccatctttatgtagcaaatgttggagattctaggactataatatcaaaagctggtaaagcaaatgctctctctgaggatcataaaccaaatagaagtgatgagcggaagagaatcgagaatgctggtggtgttgtcatgtgggcaggtacttggagggttggaggggtgctagcaatgtctcgtgcctttggtaaccgtatgctgaagcagtttgtagtagcagaacctgagatccaggaccaggagatagatgaacaaattgaactgattattcttgcaagtgatggactctgggatgtagtacagaatgatgatgctgtttctcttgcccgcacggaagaggagcctgaggcagctgcacgaaagttaacagaagcagcattttctcgtgggagtgcagataacattacatgcattgtggtgcaattccaccatgagaaagcagaactagctaatcctgacaaagcagaagcagctagtgctcagcatgagtag

SEQ ID NO: 1005 - protein, 356 aa, Glycine max
MVCSSCVRSLVVQAGTFVNRVRINEFGRSLLAVQSFSHWPIREYKTITGMMVDTGSMSSAGPLVDMMPEKDDDGRFASGGWKSEDGRLSCGYSSFRGKRVTMEDFYDIKTLKIGGQSICLFGIFDGHGGSRAAEYLKEHLFDNLLKHPNFLTDAKLAISETYQQTDANFLDSEKDTFRDDGSTASTAVLVDNHLYVANVGDSRTIISKAGKANALSEDHKPNRSDERKRIENAGGVVMWAGTWRVGGVLAMSRAFGNRMLKQFVVAEPEIQDQEIDEQIELIILASDGLWDVVQNDDAVSLARTEEEPEAAARKLTEAAFSRGSADNITCIVVQFHHEKAELANPDKAEAASAQHE

SEQ ID NO: 1006 - DNA, 1134 bp, Glycine max
  CDS (1)..(1134)
atgaagacgccaaaacgccaatcgtcgccggcaaacgctgctcgaccagtggagtctgattccggcgagatcgtcacgaggttcaagaacggtggccggagaaggatcaaaatcaagcgaatgaagtacacttgccagacgaagatccgcgtcaggaatgacgccggcgctggcggcgtgtctcaaccgctggcggtggattctgaaggagagaagagagagattgacgagcacgtggagatatcgctgtcgctggcttcctcgtcgtcggaagaggaagagcgattgtcgtcgaagcaaagcgacggcgttttgtcgtacggttcggcgtcggtgatagggagcaggacggagatggaggacgcggtgagctcggagatagggtttgcagcgaagtgcgacttctttgcggtgtacgacggccacggcggagctcaggtggcggaggcgtgcaaggagaggctgcaccggctggtggcggaggaagtggtggggagtagtgagagtcacgtggaatgggactggcggggagtgatggaagggtgttttcggaaaatggacagcgaggtcgccggtaacgcggccgtcaggacggtgggttccacagcggttgtcgccgtcgtcgcggcggaggaggttatcgttgctaattgcggtgattctagggccgtgttgggaagaggaggtgaggccgtggacttgtctagtgatcataagccccacaggcccgatgagttgatgagaatcgaagaggctggtggaagggtcattaactggaatggccagcgcgtgcttggtgttcttgccacttcacgatccataggagatcagtaccttagaccttatgtaatatcaaaaccagaagtgacagtgacccagcgaagcagcaaggatgaatttctcatactagcaagtgatggattgtgggatgtgatgtcaagtgaagttgcgtgccaagttgtaaggaaatgcttccaggggcagattaggagagtgtgcgatggagttgggaatcatcaaaaccgtgctaccgaggctgcagacctcttggctgagatagcattggcaaagggaagtagagataacaccagtgtcattgtagttgagctaagaggaacagtaacaactgattga

SEQ ID NO: 1007 - protein, 377 aa, Glycine max
MKTPKRQSSPANAARPVESDSGEIVTRFKNGGRRRIKIKRMKYTCQTKIRVRNDAGAGGVSQPLAVDSEGEKREIDEHVEISLSLASSSSEEEERLSSKQSDGVLSYGSASVIGSRTEMEDAVSSEIGFAAKCDFFAVYDGHGGAQVAEACKERLHRLVAEEVVGSSESHVEWDWRGVMEGCFRKMDSEVAGNAAVRTVGSTAVVAVVAAEEVIVANCGDSRAVLGRGGEAVDLSSDHKPHRPDELMRIEEAGGRVINWNGQRVLGVLATSRSIGDQYLRPYVISKPEVTVTQRSSKDEFLILASDGLWDVMSSEVACQVVRKCFQGQIRRVCDGVGNHQNRATEAADLLAEIALAKGSRDNTSVIVVELRGTVTTD

SEQ ID NO: 1008 - DNA, 1020 bp, Glycine max
  CDS (1)..(1020)
atgggaacgaatctcagcactcccaaaactgagaagtcttctgatgatggtgaaaatgagcatcttagatatggtttatcatctatgcaaggctggcgtgcaacaatggaagatgcacatgctgcacatcttgatctggatgcatccacttccttttttggtgtttatgatggtcatggaggtaaagtggttgcaaagttttgtgccaagtatcttcaccagcaggtgctcaagaatgaagcatacatagctggagatataggaacctctcttaaggaatcatttttcagaatggacgacatgatgcgtggtcaaaggggatggagggaattagcagttttgggtgataagatagacaagtttaatggtaagatagaagggttgatttggtctccacgaagcagacatagtaaggagcaagatgatacttgggcctttgaggagggccctcattctaattttgctggaccaacttcaggaagcactgcatgtgttgcaattattagaaacaacaaactttttgtagcaaatgccggtgattcacgttgtgtaatatgtaggaagggtcaggcgtatgatttgtcgatagatcataaacctgatcttgagattgagaaggaaagaatcgtaaaagctggtggttttattcatgcgggacgagttaatgggagtttaagccttgcaagagctataggtgacatggaatttaagcagaatagattcctttctgctgaaaagcaaatggtgacagccaatccagacataaatactgttgaactttgtgatgaagatgaatttatagtgctggcttgtgatggcatatgggattgcttgtcaagccaacaattggtagattttgtacgtcaacaactgctcttggaaactaaactttctgccgtttgcgaaagagtactagatcaatgtttggcaccaacaattactgttggtgatggatgtgataacatgaccatgattttggtgcagttcaaaaaactggcccaatcaagtgcaccggcataa

SEQ ID NO: 1009 - protein, 339 aa, Glycine max
MGTNLSTPKTEKSSDDGENEHLRYGLSSMQGWRATMEDAHAAHLDLDASTSFFGVYDGHGGKVVAKFCAKYLHQQVLKNEAYIAGDIGTSLKESFFRMDDMMRGQRGWRELAVLGDKIDKFNGKIEGLIWSPRSRHSKEQDDTWAFEEGPHSNFAGPTSGSTACVAIIRNNKLFVANAGDSRCVICRKGQAYDLSIDHKPDLEIEKERIVKAGGFIHAGRVNGSLSLARAIGDMEFKQNRFLSAEKQMVTANPDINTVELCDEDEFIVLACDGIWDCLSSQQLVDFVRQQLLLETKLSAVCERVLDQCLAPTITVGDGCDNMTMILVQFKKLAQSSAPA

SEQ ID NO: 1010 - DNA, 1134 bp, Glycine max
  CDS (1)..(1134)
atgaagacgccaaaacgccaatcgtcgccggcaaacgctgctcgaccagtggggtctgattccggcgagatcgtcacgaggttcaagaacggtggccggagaaggatcaaaatcaagcgaatgaagtacacttgccagacgaagatccgcgtcaggaatgacgccggcgctggcggcgtgtctcaaccgccggcggtggattctgaaggagagaagagagagattgacgagcacgtggagatatcgctgtcgctggcttcctcgtcgtcggaagaggaagagcgattgtcgtcgaagcaaagcgacggcgttttgtcgtacggttcggcgtcggtgatagggagcaggacggagatggaggacgcggtgagctcggagatagggtttgcagcgaagtgcgacttctttgcggtgtacgacggccacggcggagctcaggtggcggaggcgtgcaaggagaggctgcaccggctggtggcggaggaagtggtggggagtagtgagagtcacgtggaatgggactggcggggagtgatggaagggtgttttcggaaaatggacagcgaggtcgccggtaacgcggccgtcaggatggtgggttccacagcggttgtcgccgtcgtggcgctggaggaggttatcgttgctaattgcggtgattctagggccgtgttgggaagaggaggtgaggccgtggacttgtctagtgatcataagccccacaggcccgatgagttgatgagaatcgaagaggctggtggaagggtcattaactggaatggccagcgcgtgcttggtgttcttgccacttcacgatccataggagatcagtaccttagaccttatgtaatatcaaaaccagaagtgacagtgacccagcgaagcagcaaggatgaatttctcatactagcaagtgatggattgtgggatgtgatgtcaagtgaagttgcgtgccaagttgtaaggaaatgcttccaggggcagattaggagagtgtgcgatggagttgggaatcatcaaaaccgtgctaccgatgctgcagacctcttggctgagatagcattggcaaagggaagtagagataacaccagtgtcattgtagttgagctaagaggaacagtaacaactgattga

SEQ ID NO: 1011 - protein, 377 aa, Glycine max
MKTPKRQSSPANAARPVGSDSGEIVTRFKNGGRRRIKIKRMKYTCQTKIRVRNDAGAGGVSQPPAVDSEGEKREIDEHVEISLSLASSSSEEEERLSSKQSDGVLSYGSASVIGSRTEMEDAVSSEIGFAAKCDFFAVYDGHGGAQVAEACKERLHRLVAEEVVGSSESHVEWDWRGVMEGCFRKMDSEVAGNAAVRMVGSTAVVAVVALEEVIVANCGDSRAVLGRGGEAVDLSSDHKPHRPDELMRIEEAGGRVINWNGQRVLGVLATSRSIGDQYLRPYVISKPEVTVTQRSSKDEFLILASDGLWDVMSSEVACQVVRKCFQGQIRRVCDGVGNHQNRATDAADLLAEIALAKGSRDNTSVIVVELRGTVTTD

SEQ ID NO: 1012 - DNA, 1152 bp, Glycine max
  CDS (1)..(1152)
atgtgtgtgcaagatggtgaacaagctggtgaagatcatatagagaagaacgttgataacagcataagagtttcatggcctttgcattgtgatctcttgaatgcccacatggataacaaggaaaaagactcttcttttagaactccctctgaccagatcagtgttgcaaattcatctcctctggaaagcatatgtgaggatgcagaaattgtggacaaaaaacaaaacttaatgaactttgtccctactcttcggtctggagagtggtctgatattggagatcgcacttccatggaggatacacatatatgcatcggagacttggcagaaaaatttggcaataacgaactttgcaaggaagctatttccttttatggtgtatttgatggacacggagggaagagcgctgcacaatttgttcgtgatcatctgccacgggtgattgttgaggatgctgactttcctttggaattagagaaggttgtcacaaggtcatttttggagatcgatgcagagtttgcaagatcatgttctaccgagtcttccctgtcttctggtacaactgcactgactgcaattatattaggaaggtctttacttgttgccaatgctggagactgccgtgctgtattgtcccgtggtggaggggctatagaaatgtccaaagatcacaggccattgtgcattaaggaaaggaagaggattgagtctctaggtggatacatagatgatggttacctgaacggccagttaggtgtgactcgtgcactaggcaactggcatctccaaggaatgaaggaaattaatggaaagggtggaccattgagtgctgagcctgaacttaaattaatcacattgacaaaagaagatgaattcttgataattgggagtgatgggatctgggatgtttttcgcagccaaaatgccgtagactttgctcgaaggaggcttcaagagcacaatgatgtgaagcagtgttgcaaggaggtgataggagaagcaataaagagaggagcaacagacaacttgacagtggtgatgatatgttttcactcagaaccaccagctcctatggttgtagaaaggcctagagtcagaagaagcatatctgctgaggggcttcaaaatcttaagtgcttgctagaaggataa

SEQ ID NO: 1013 - protein, 383 aa, Glycine max
MCVQDGEQAGEDHIEKNVDNSIRVSWPLHCDLLNAHMDNKEKDSSFRTPSDQISVANSSPLESICEDAEIVDKKQNLMNFVPTLRSGEWSDIGDRTSMEDTHICIGDLAEKFGNNELCKEAISFYGVFDGHGGKSAAQFVRDHLPRVIVEDADFPLELEKVVTRSFLEIDAEFARSCSTESSLSSGTTALTAIILGRSLLVANAGDCRAVLSRGGGAIEMSKDHRPLCIKERKRIESLGGYIDDGYLNGQLGVTRALGNWHLQGMKEINGKGGPLSAEPELKLITLTKEDEFLIIGSDGIWDVFRSQNAVDFARRRLQEHNDVKQCCKEVIGEAIKRGATDNLTVVMICFHSEPPAPMVVERPRVRRSISAEGLQNLKCLLEG

SEQ ID NO: 1014 - DNA, 1134 bp, Glycine max
  CDS (1)..(1134)
atgaagacgccaaaacgccaatcgtcgccggcaaacgctgctcgaccagtggagtctgattccggcgagatcgtcacgaggttcaagaacggtggccggagaaggatcaaaatcaagcgaatgaagtacacttgccagacgaagatccgcgtcaggaatgacgccggcgctggcggcgtgtctcaaccgccggcggtggattctgaaggagagaagagagagattgacgagcacgtggagatatcgctgtcgctggcttcctcgtcgtcggaagaggaagagcgattgtcgtcgaagcaaagcgacggcgttttgtcgtacggttcggcgtcggtgatagggagcaggacggagatggaggacgcggtgagctcggagatagggtttgcagcgaagtgcgacttctttgcggtgtacgacggccacggcggagctcaggtggcggaggcgtgcaaggagaggctgcaccggctggtggcggaggaagtggtggggagtagtgagagtcacgtggaatgggactggcggggagtgatggaagggtgttttcggaaaatggacagcgaggtcgccggtaacgcggccgtcaggatggtgggttccacagcggttgtcgccgtcgtcgcggcggaggaggttatcgttgctaattgcggtgattctagggccgtgttgggaagaggaggtgaggccgtggacttgtctagtgatcataagccccacaggcccgatgagttgatgagaatcgaagaggctggtggaagggtcattaactggaatggccagcgcgtgcttggtgttcttgccacttcacgatccataggagatcagtaccttagaccttatgtaatatcaaaaccagaagtgacagtgacccagcgaagcagcaaggatgaatttctcatactagcaagtgatggattgtgggatgtgatgtcaagtgaagttgcgtgccaagttgtaaggaaatgcttccaggggcagattaggagagtgtgcgatggagttgggaatcatcaaaaccgtgctaccgaggctgcagacctcttggctgagatagcattggcaaagggaagtagagataacaccagtgtcattgtagttgagctaagaggaacagtaacaactgattga

SEQ ID NO: 1015 - protein, 377 aa, Glycine max
MKTPKRQSSPANAARPVESDSGEIVTRFKNGGRRRIKIKRMKYTCQTKIRVRNDAGAGGVSQPPAVDSEGEKREIDEHVEISLSLASSSSEEEERLSSKQSDGVLSYGSASVIGSRTEMEDAVSSEIGFAAKCDFFAVYDGHGGAQVAEACKERLHRLVAEEVVGSSESHVEWDWRGVMEGCFRKMDSEVAGNAAVRMVGSTAVVAVVAAEEVIVANCGDSRAVLGRGGEAVDLSSDHKPHRPDELMRIEEAGGRVINWNGQRVLGVLATSRSIGDQYLRPYVISKPEVTVTQRSSKDEFLILASDGLWDVMSSEVACQVVRKCFQGQIRRVCDGVGNHQNRATEAADLLAEIALAKGSRDNTSVIVVELRGTVTTD

SEQ ID NO: 1016 - DNA, 1296 bp, Glycine max
  CDS (1)..(1296)
atggcctctggtgaagggaggcggcgtcatcatgatcttgtgcctcttgctgcattgctcaagagagagatgaagagtgagaagatggagaagcctactgtgagggttggacatgcagctcagtccaagaaaggggaggattactttctaattaagactgattgtcaacgagtgcctgggaactcttcatcttccttttctgtatatgcggtttttgatgggcataatggaaatgctgctgccatttttactagggagcatttgttaaatcatgtgttgggtgctcttcctcgagggcttggacgagatgagtggttacaagctttaccaagggcactggttgctggctttgttaagactgacaaggaatttcagagcagaggagaaacttctggaaccacagccacattcgtaatagtggataggtggactgtgactgttgcatcagttggagattcccgttgtatactagatacccagggtggtgctgttacctccttaactgttgatcaccgacttgaggagaatattgaagagagggaacgtgtcacttctagtggaggtgaagttgggagacttagcattgttggtggggctgagattggtccccttcgttgctggccaggaggtctatgcctttctaggtcaataggtgacatggatgttggggagttcatagttccaataccatatgtcaaacaagtaaagctgtcaaaagctggtgggaggcttgtaattgcctctgatggcatatgggatgctctatcatcagaaatggctgcaaaatcttgccgtggtttgcctgctgaacttgctgctatgcaggttgtcaaggaagcactaagaacgagagggttaaaggatgatacaacttgcatagtagttgacataatcccacctgataacgaattgccaccaacacctcccccccccaaacggaacaagctgagagatcttctttccttcaggaagagctcccgtgattctgccagtaagctgtcaaaaaagctttccgctataaatatagtggaggaactgtttgaagaaggatcagcaatgcttgctgaaagattaggaaatgatgacaacttgaactcggggcaatcaacatctggcatttttgtctgtgctgtatgtcaagttgatcttgctccaagtgagggcatctctgtccacgcaggttctattttctccaccagctccaaaccctgggaaggtccttttctatgttttgattgccgtgataagaaggatgctatggaaggaaaacgcccaagtggagttaaggtgtcatag

SEQ ID NO: 1017 - protein, 431 aa, Glycine max
MASGEGRRRHHDLVPLAALLKREMKSEKMEKPTVRVGHAAQSKKGEDYFLIKTDCQRVPGNSSSSFSVYAVFDGHNGNAAAIFTREHLLNHVLGALPRGLGRDEWLQALPRALVAGFVKTDKEFQSRGETSGTTATFVIVDRWTVTVASVGDSRCILDTQGGAVTSLTVDHRLEENIEERERVTSSGGEVGRLSIVGGAEIGPLRCWPGGLCLSRSIGDMDVGEFIVPIPYVKQVKLSKAGGRLVIASDGIWDALSSEMAAKSCRGLPAELAAMQVVKEALRTRGLKDDTTCIVVDIIPPDNELPPTPPPPKRNKLRDLLSFRKSSRDSASKLSKKLSAINIVEELFEEGSAMLAERLGNDDNLNSGQSTSGIFVCAVCQVDLAPSEGISVHAGSIFSTSSKPWEGPFLCFDCRDKKDAMEGKRPSGVKVS

SEQ ID NO: 1018 - DNA, 1092 bp, Glycine max
  CDS (1)..(1092)
atggggatatacctcagcactcccaaaacagagaaggcctctgaagatggtgagaacgacaagcttcgcttcggtttgtcttccatgcagggctggcgtgcttccatggaagatgctcatgcagctcatccatatttggacgagtctacgtcatactttggtgtttatgatggccatggaggcaaagcagtttcaaaattctgtgccaagtatctacaccagcaggtgcttaagagtgaagcttacttagctggagatttaggcacatctttacagaaatcttttctcagaatggatgagatgatgcgtggacaaagagggtggagagaattagcagtcttgggggataaaatagaaaagttgtctggtatgctagaaggctttatatggtctcccaggagtagtgaagccaatgaccgtgtcaatgattgggcttttgaggaggggccccattctgattttactggaccaaactctggaagcacagcttgtgtggctgtcatccgaggaaacaaacttgttgttgctaatgctggagattctagatgtgtcttatcaaggaaaggccaggcacacaatttgtccaaggaccacaagcctgaacttgaggctgagaaagacaggattctgaaagctggtggtttcatccaagttggacgggtcaatggaagtttaaacttggctagagcaattggagatatggaattcaagcagaataagtatttgcctgttgaaaagcagattgtaactgctgatccggacataacttcagttgagctttgtgatgatgacgagtttcttgtaatagcttgtgatggaatatgggattgtatgtctagccaacagcttgtggacttcatacatcaacagttaaagactgagaataaactttctgcggtttgtgagaaagtatttgataggtgcttggcaccaacagctggtggtgagggatgtgataacatgaccatgatcttgattcagttcaaaaaaccttccaacagcccagatgcatcatctgtcacgaaccagcctcaatcgtctgctcaaccatctgaagctgatagaagttcagagacaatagaatcgaagtga

SEQ ID NO: 1019 - protein, 363 aa, Glycine max
MGIYLSTPKTEKASEDGENDKLRFGLSSMQGWRASMEDAHAAHPYLDESTSYFGVYDGHGGKAVSKFCAKYLHQQVLKSEAYLAGDLGTSLQKSFLRMDEMMRGQRGWRELAVLGDKIEKLSGMLEGFIWSPRSSEANDRVNDWAFEEGPHSDFTGPNSGSTACVAVIRGNKLVVANAGDSRCVLSRKGQAHNLSKDHKPELEAEKDRILKAGGFIQVGRVNGSLNLARAIGDMEFKQNKYLPVEKQIVTADPDITSVELCDDDEFLVIACDGIWDCMSSQQLVDFIHQQLKTENKLSAVCEKVFDRCLAPTAGGEGCDNMTMILIQFKKPSNSPDASSVTNQPQSSAQPSEADRSSETIESK

SEQ ID NO: 1020 - DNA, 1191 bp, Glycine max
  CDS (1)..(1191)
atggtggctgaagcagaggttgtgtgtcaacaaaacgtgggtgtgttggatgtgaagcattttccaaataaggtaagcgatgttcacgagatcggagacgcagatgctaattcgcctccgagttttgaccgagttcgtgccactgagtcggtctccgccgagttactcacttcacaagaagatgttaagtctgcagacaggatctcagatgctgctctagaatctgcggttctgcaatctatcccatgcatccgttctggtagttttgctgacattgggccacggagatacatggaagatgaacatataaggatagatgatttgtcgtctcatctgggatctctatacaactttccaaaaccaagtgccttctatggggtgtttgatggtcatggaggacctgaagctgcagcttatataagaaaaaacgtgacaaaattcttcttcgaagatgtcaatttcccacagacatcagaagtcgataatgtatttttggaagaggtagaggattccctcagaaaggcatttcttttggctgattcagctttggccgatgattgcagcgtgaatagttcatcaggcactacggcccttactgctttgatatttggaaggcttctaatggtggccaatgctggcgactgccgagcagttctctgtcgcaaaggagaggccattgacatgtctgaagatcacaggcctatttatctatcagagcggaggcgagttgaagaattgggtggctacatagaagatggttatctgaatggggttttatcagttactcgagcactaggggactgggacatgaagttacctaagggtgctccctcacctttgattgcagagcctgagtttcggcaagtggttctaacagatgatgatgaattcctcatcattggatgcgacggcatctgggatgtgatgtcaagtcagcatgctgttagccttgttcggaaaggcctgaggcggcacgatgacccagagaaatgcgccagggacctggttatggaggcattacgtctcaacacattcgacaatctcactgtgatcattgtatgtttctcttcccttgaccacgcggagccagagccatcccctcctcgccaacggaaattgagatgctgtagcctctctgcagaggctctttgtagcttgaggagcttgttggaaggcagtgcaagcaactga

SEQ ID NO: 1021 - protein, 396 aa, Glycine max
MVAEAEVVCQQNVGVLDVKHFPNKVSDVHEIGDADANSPPSFDRVRATESVSAELLTSQEDVKSADRISDAALESAVLQSIPCIRSGSFADIGPRRYMEDEHIRIDDLSSHLGSLYNFPKPSAFYGVFDGHGGPEAAAYIRKNVTKFFFEDVNFPQTSEVDNVFLEEVEDSLRKAFLLADSALADDCSVNSSSGTTALTALIFGRLLMVANAGDCRAVLCRKGEAIDMSEDHRPIYLSERRRVEELGGYIEDGYLNGVLSVTRALGDWDMKLPKGAPSPLIAEPEFRQVVLTDDDEFLIIGCDGIWDVMSSQHAVSLVRKGLRRHDDPEKCARDLVMEALRLNTFDNLTVIIVCFSSLDHAEPEPSPPRQRKLRCCSLSAEALCSLRSLLEGSASN

SEQ ID NO: 1022 - DNA, 1092 bp, Glycine max
  CDS (1)..(1092)
atggggatatacctcagcactcccaaaacagagaaggcctctgaagatggtgagaacgacaagcttcgcttcggtttgtcttccatgcagggctggcgtgctaccatggaagatgctcatgcagctcatccatgtttggacgagtccacgtcatactttggtgtttatgatggccatggaggcaaagcagtttcaaaattctgtgccaagtatctacacctgcaggtgcttaagagtgaagcttacttagctggagatttaggcacatctttacagaaatcttttctcagaatggatgagatgatgcgtggacaaagagggtggagagaattagcaatcttgggggataaaatagaaaagttgtctggtatgctagagggctttatatggtctcccaggagtagtgaagccaatgaccgtgttgatgattgggcttttgaggaggggccccattctgattttactggaccaaactctggaagcacagcttgtgtggctgtcgtccgaggaaacaaacttgttgttgctaatgctggagattctagatgtgtcttatcaaggaaaggccaggcacacaatttgtccaaggaccacaaacctgaacttgaggctgagaaagacaggattctaaaagctggtggtttcatccaagttggacgggtcaatggaagtttaaacttggctagagcaattggagatatggaattcaagcagaataagtatttgcctgccgaaaagcagattgtaactgctgatccggacataacttcagttgagctttgtgatgatgacgagtttcttgtaatagcttgtgatggaatatgggattgtatgtctagccaacagcttgtagacttcatacatcaacagttaaaaacagagaataaactttctgcggtttgtgagagagtatttgataggtgcttggcaccaacagctggtggtgagggatgtgataacatgaccatgattttgattcagttcaaaaaaccttccagcagcccagatgcatcatctgtcatgaaccagcctcaatcgtctgctcaatcatctgaagctgatagaagttcggagacagtagaatcgaagtga

SEQ ID NO: 1023 - protein, 363 aa, Glycine max
MGIYLSTPKTEKASEDGENDKLRFGLSSMQGWRATMEDAHAAHPCLDESTSYFGVYDGHGGKAVSKFCAKYLHLQVLKSEAYLAGDLGTSLQKSFLRMDEMMRGQRGWRELAILGDKIEKLSGMLEGFIWSPRSSEANDRVDDWAFEEGPHSDFTGPNSGSTACVAVVRGNKLVVANAGDSRCVLSRKGQAHNLSKDHKPELEAEKDRILKAGGFIQVGRVNGSLNLARAIGDMEFKQNKYLPAEKQIVTADPDITSVELCDDDEFLVIACDGIWDCMSSQQLVDFIHQQLKTENKLSAVCERVFDRCLAPTAGGEGCDNMTMILIQFKKPSSSPDASSVMNQPQSSAQSSEADRSSETVESK

SEQ ID NO: 1024 - DNA, 1044 bp, Glycine max
  CDS (1)..(1044)
atggataacaaagaaaaagactcttcttttagaattccctctgaccagatcagtgttgtaaattcatctcctctggaaagcatatgtgaggatgcagaaattgtggacaaaaaacagaacatgatgaactttgtccctactcttcggtctggagagtgttctgatattggagatcgcccttccatggaggatacccacatatgcattggagacttggcagaaaaatttggcaataacgaactttgcaaggaagctatttccttttatggtgtatttgatggacacggagggaagagcgctgcacaatttgttcgtgatcatctgccacgggtgattgttgaggatgctgactttcctttggaattagagaaggttgtcacaaggtcatttttggagatcgatgcagagtttgcaagatcatgttctaccgagtcttccctgtcttctggtacaactgcactgactgcaattatattaggaaggtctttacttgttgccaatgctggagactgccgtgctgtattgtcccgtggtggaggggctatagaaatgtccaaagatcacaggccattgtgcattaaggaaaggaagaggattgagtctctaggtggatacatagatgatggttacctgaacggccagttaggtgtgactcgtgcactaggcaactggcatctccaaggaatgaaggaaattaatggaaagggtggaccattgagtgctgagcctgaacttaaattaatcacattgacaaaagaagatgaattcttgataattgggagtgatgggatcttggatgtttttcgcagccaaaatgccgtagactttgctcgaaggaggcttcaagagcacaatgatgtgaagcagtgttgcaaggaggtgataggagaagcaataaagagaggagcaacagacaacttgacagtggtgatgatatgttttcactcagaaccaccagctcctatggttgtagaaaggcctagagtcagaagaagcatatctgctgaggggcttcaaaatcttaagtgcttgctagaaggataa

SEQ ID NO: 1025 - protein, 347 aa, Glycine max
MDNKEKDSSFRIPSDQISVVNSSPLESICEDAEIVDKKQNMMNFVPTLRSGECSDIGDRPSMEDTHICIGDLAEKFGNNELCKEAISFYGVFDGHGGKSAAQFVRDHLPRVIVEDADFPLELEKVVTRSFLEIDAEFARSCSTESSLSSGTTALTAIILGRSLLVANAGDCRAVLSRGGGAIEMSKDHRPLCIKERKRIESLGGYIDDGYLNGQLGVTRALGNWHLQGMKEINGKGGPLSAEPELKLITLTKEDEFLIIGSDGILDVFRSQNAVDFARRRLQEHNDVKQCCKEVIGEAIKRGATDNLTVVMICFHSEPPAPMVVERPRVRRSISAEGLQNLKCLLEG

SEQ ID NO: 1026 - DNA, 1191 bp, Glycine max
  CDS (1)..(1191)
atggtagctgaagcagaggttgcgtgtcaacaaaacgtgggtgtgttggatgtgaagcattttccaaataagggaagcgatgttcaccagatcggagacgcagatgctaattcgcctccgtgttttgaccgagttcgtgccactgagtcggtctccgccgagttactcacttcacaagaagatgttaagtctgcagacaggatctcagatgctgctcttgaatctgcggttctgcaatctatcccttgcatccgttctggtagttttgctgacattgggccacggagatacatggaagatgaacatataaggatagatgatttgtcgtctcatctgggatctctatacaactttcccaaaccaagtgccttttatggggtgtttgatggtcatggaggacctgaagctgcagcttatataagaaaaaacgtgacaaaattcttctttgaggatgtcaatttcccacggacatcagaagtcgataatgtatttttggaagaggtagaggattccctcagaaaggcatttcttttggctgattcagctttggccgatgattgcagtgtgaatagttcatcaggcactacggcccttactgctttgatatttggaaggcttctaatggtggccaatgctggcgactgccgagcagttctctgtcgcaaaggagaggccattgacatgtctgaagatcacaggcctatttatctatcagagcggaggcgagttgaagaattgggtggctacatagaagatggttatctgaatggggttttatcagttactcgagcactaggggactgggacatgaagttacctaagggtgctccctcacctttgattgcagagcctgagtttcggcaagtggttctaacagatgatgatgaattcctcatcattggatgcgacggcatctgggatgtgatgtcaagtcagcatgctgttagccttgttcggaaaggcctgaggcggcacgatgacccagagaaatgcgccagggacctggttatggaggcattacgtctcaacacattcgacaatctcactgtgatcattgtatgtttctcttcccttgaccacgcggagccagagccatcccctcctcgccaacggaaattgagatgctgtagcctctctgcagaggctctttgtagcttgaggagcttgttggaaggcagtgcaagcaactga

SEQ ID NO: 1027 - protein, 396 aa, Glycine max
MVAEAEVACQQNVGVLDVKHFPNKGSDVHQIGDADANSPPCFDRVRATESVSAELLTSQEDVKSADRISDAALESAVLQSIPCIRSGSFADIGPRRYMEDEHIRIDDLSSHLGSLYNFPKPSAFYGVFDGHGGPEAAAYIRKNVTKFFFEDVNFPRTSEVDNVFLEEVEDSLRKAFLLADSALADDCSVNSSSGTTALTALIFGRLLMVANAGDCRAVLCRKGEAIDMSEDHRPIYLSERRRVEELGGYIEDGYLNGVLSVTRALGDWDMKLPKGAPSPLIAEPEFRQVVLTDDDEFLIIGCDGIWDVMSSQHAVSLVRKGLRRHDDPEKCARDLVMEALRLNTFDNLTVIIVCFSSLDHAEPEPSPPRQRKLRCCSLSAEALCSLRSLLEGSASN

SEQ ID NO: 1028 - DNA, 1086 bp, Glycine max
  CDS (1)..(1086)
atgggaatatatctcagcagtccaaaaactgaaaagttttctgaagatggtgaaaatgactgtcttagatatggtttatcgtccatgcaagggtggcgtgcaacaatggaagatgctcatgctgcatatactgatctggatgagtccacttcattttttggtgtctatgatggtcatggaggtaaggtggttgcaaagttttgtgccaagtttcttcatcaacaggtgctcaaaagtgagacatacttaactggagatataggaacctcccttcagaaagcctttttaagaatggatgaaatgatgcgtggtcaaaagggatggagggaattatcaatattgggggataagataaacaagtttactgggatgatagaagggttgatttggtctccacgaagcagtgatgggaattgccatgttgatgattgggcttttgaggaggggcctcattctgattttgctggaccaacttcaggaagcactgcctgtgttgcagttattagaaacaaccaacttgttgttgcaaatgctggtgattcgcgttgtgtgatatccaggaagggccaggcatacaatttgtctagagaccacaaacctgatcttgagattgagaaggaaagaatcttaaaagctggtggtttcattcacgtaggacgagtcaatggaagtttaaatcttgcaagagctattggtgacatggaatttaaacagaataagtttcttcctgctgaaaaacaaattgtaactgccaatccagacataaacactgttgagctttgtgacgaagatgaatttgtggtgttagcttgtgatggcatatgggattgcatgtcaagtcaacaactggtagattttgttcgtgaacaattgcacttgaaaacgaaactttctgcagtgtgcgaaagcgtacttgaccggtgtttggcaccatcaactgctggtggtgaaggatgtgacaatatgaccatgatcgtggtgcagttcaaaagacctgctcagtccagtgcaccagcagaagagcaatcctcttcttcaaacggacaagctgaacctgaaacaaaactagagagaagtgaaagttag

SEQ ID NO: 1029 - protein, 361 aa, Glycine max
MGIYLSSPKTEKFSEDGENDCLRYGLSSMQGWRATMEDAHAAYTDLDESTSFFGVYDGHGGKVVAKFCAKFLHQQVLKSETYLTGDIGTSLQKAFLRMDEMMRGQKGWRELSILGDKINKFTGMIEGLIWSPRSSDGNCHVDDWAFEEGPHSDFAGPTSGSTACVAVIRNNQLVVANAGDSRCVISRKGQAYNLSRDHKPDLEIEKERILKAGGFIHVGRVNGSLNLARAIGDMEFKQNKFLPAEKQIVTANPDINTVELCDEDEFVVLACDGIWDCMSSQQLVDFVREQLHLKTKLSAVCESVLDRCLAPSTAGGEGCDNMTMIVVQFKRPAQSSAPAEEQSSSSNGQAEPETKLERSES

SEQ ID NO: 1030 - DNA, 1092 bp, Glycine max
  CDS (1)..(1092)
atggggatatacctcagcactcccaaaacagagaaggcctctgaagatggtgagaacgacaagcttcgcttcggtttgtcttccatgcagggctggcgtgcttccatggaagatgctcatgcagctcatccatatttggacgagtccacgtcatactttggtgtttatgacggccatggaggcaaagcagtttcaaaattctgtgccaagtatctacaccagcaggtgcttaagagtgaagcttacttagctggagatttaggcacatctttacagaaatcttttctcagaatggatgagatgatgcgtggacaaagagggtggagagaattagcagtcttgggggataaaatagaaaagttgtctggtatgctagaaggctttatatggtctcccaggagtagtgaagccaatgaccgtgtcaatgattgggcttttgaggaggggccccattctgattttactggaccaaactctggaagcacagcttgtgtggctgtcgtccgaggaaacaaacttgttgttgctaatgctggagattctagatgtgtcttatcaaggaaaggccaggcacacaatttgtccaaggaccacaaacctgaacttgaggctgagaaagacaggattctaaaagctggtggtttcatccaagttggacgggtcaatggaagtttaaacttggctagagcaattggagatatggaattcaagcagaataagtatttgcctgccgaaaagcagattgtaactgctgatccggacataacttcagttgagctttgtgatgatgacgagtttcttgtaatagcttgtgatggaatatgggattgtatgtctagccaacagcttgtagacttcatacatcaacagttaaaaacagagaataaactttctgcggtttgtgagagagtatttgataggtgcttggcaccaacagctggtggtgagggatgtgataacatgaccatgatcttgattcagttcaaaaaaccttccagcagcccagatgcatcatctgtcacgaaccagcctcaatcgtctgctcaatcatctgaagctgatagaagttcggagacaatagaatcgaagtga

SEQ ID NO: 1031 - protein, 363 aa, Glycine max
MGIYLSTPKTEKASEDGENDKLRFGLSSMQGWRASMEDAHAAHPYLDESTSYFGVYDGHGGKAVSKFCAKYLHQQVLKSEAYLAGDLGTSLQKSFLRMDEMMRGQRGWRELAVLGDKIEKLSGMLEGFIWSPRSSEANDRVNDWAFEEGPHSDFTGPNSGSTACVAVVRGNKLVVANAGDSRCVLSRKGQAHNLSKDHKPELEAEKDRILKAGGFIQVGRVNGSLNLARAIGDMEFKQNKYLPAEKQIVTADPDITSVELCDDDEFLVIACDGIWDCMSSQQLVDFIHQQLKTENKLSAVCERVFDRCLAPTAGGEGCDNMTMILIQFKKPSSSPDASSVTNQPQSSAQSSEADRSSETIESK

SEQ ID NO: 1032 - DNA, 1143 bp, Zea mays
  CDS (1)..(1143)
atgggggtttacctcagtactccaaaaactgacaagctatctgaaaatggagaaaatgatagacttaagtttggtctttcatctatgcaaggatggcgagcaaccatggaagatgctcattcagcattgctagatcttgatagcgagacagcattctttggtgtttttgatggtcatggaggaagagtcgttgccaaattctgtgcaaaatatctgcatggtcaagtcctcaaaagcgaagcctattcaactggtgacctaggcgctgctgtccatagagctttcttcagaatggatgaaatgatgcaaggacagagaggttggcgagaactatctgcacttggagacaaaataaacaagtttagtggtatgatagaaggattgatttggtctccaaggggcagtgattcaaataatcaacaagatgattgggcttcagaggagggacctcactctgactttgctgggccaacatgtgggagtacagcgtgtgtagcactaataagaaacacccaacttgttgtggcaaatgctggtgattcccgatgtgttatttcaaggggtgggaaggcatacaatttatcgagggaccacaaaccagagcttgcagctgagagagaaaggataatgaaagcagggggcttcatccatatgggacgagtaaatggaagtctaaacttgtcaagggcaattggagatgtggaattgaaacagaacaaattcctgcctcccgagaagcaaattgtgacggccaatcctgatatcaacgtcgtggagctctgcgacgatgacgactttgttgttgtagcatgtgatggcatttgggactgcatgtcaagccaacagctggtggatttcatccacgagcgtataaacacggagagcagcctgtctgccgtgtgcgagagagtgctggacagatgcctggctccatcaacgatcgctggagacgggtgcgacaacatgaccatgatcatagtgcagatcaaaaaacctgtcgatcggaacaagaaggccgaagcagcagggcaatctgccagcaatgcggacgaagccaagagtcgtgttgctgaggagttaagcatggctggcactcacaagggcgcaaccatttgctttcataaggcaggtgaaaaaaaatga

SEQ ID NO: 1033 - protein, 380 aa, Zea mays
MGVYLSTPKTDKLSENGENDRLKFGLSSMQGWRATMEDAHSALLDLDSETAFFGVFDGHGGRVVAKFCAKYLHGQVLKSEAYSTGDLGAAVHRAFFRMDEMMQGQRGWRELSALGDKINKFSGMIEGLIWSPRGSDSNNQQDDWASEEGPHSDFAGPTCGSTACVALIRNTQLVVANAGDSRCVISRGGKAYNLSRDHKPELAAERERIMKAGGFIHMGRVNGSLNLSRAIGDVELKQNKFLPPEKQIVTANPDINVVELCDDDDFVVVACDGIWDCMSSQQLVDFIHERINTESSLSAVCERVLDRCLAPSTIAGDGCDNMTMIIVQIKKPVDRNKKAEAAGQSASNADEAKSRVAEELSMAGTHKGATICFHKAGEKK

SEQ ID NO: 1034 - DNA, 1113 bp, Zea mays
  CDS (1)..(1113)
atggcggcggcgatgtgcgtggatgacgaggccgcctccgccgccgcggaaagcgcgggggtcgacaagctggatctcggcgcggccgcgggcggcaagaggagcgtctacctcatggactgcgcgccggtctggggctgcgcgtccacgcgcggccgcagcgccgagatggaggacgcctgcgccgcggccccgcggttcgccgacgtgccggtgcgcctcctcgccagccgcagggacctcgacggcctgggcctcgacgccggcgcgctccgcctgccggcgcacctgttcggcgtcttcgacggccacggcggtgccgaggtggccaactactgccgggagaggctccaggtactcttgaggcaggagctgaggctactcggcgaggatttggggcagactagctgcgacgtggacatgaaggagcactgggacgagctgttcaccgggtgcttccagaggctggatgacgaggtgtcagggcaggcgagcaggctcgtcggtgccgtccaggagtcacggccggtggccgccgagaacgtgggctccactgcggttgtcgccgtcgtgtgctcatcccatgtggtggtcgccaactgcggggattcgcgtgccgttctctgccgtgggaaggagccagtagagctgtcgattgatcacaagcctgacaggaaggatgagcgcgcgaggattgaggccctgggaggcaaggtcatccaatggaacggctatagggtctccggtatacttgctatgtcaagatcgattggggaccgatatttgaaaccattcgtcattccaaaaccagaagtcaccgttgttcctagggcgaaagatgacgactgcctcattcttgcaagtgatgggctgtgggatgtagtgtcgaatgaagaggcatgcaaagctgcgcgtcggcagatccagctgtggcacaagaacaacggtgtcacatcatcattgtgtgacgagggtgatgaatccaatgatcctgctgcacaagctgctgctgattatcttatgaggctcgcactgaagaagggtaccgaggacaatatcactgtcattgtggttgacttgaaacctcgaaagaaggccaagagcaactcataa

SEQ ID NO: 1035 - protein, 370 aa, Zea mays
MAAAMCVDDEAASAAAESAGVDKLDLGAAAGGKRSVYLMDCAPVWGCASTRGRSAEMEDACAAAPRFADVPVRLLASRRDLDGLGLDAGALRLPAHLFGVFDGHGGAEVANYCRERLQVLLRQELRLLGEDLGQTSCDVDMKEHWDELFTGCFQRLDDEVSGQASRLVGAVQESRPVAAENVGSTAVVAVVCSSHVVVANCGDSRAVLCRGKEPVELSIDHKPDRKDERARIEALGGKVIQWNGYRVSGILAMSRSIGDRYLKPFVIPKPEVTVVPRAKDDDCLILASDGLWDVVSNEEACKAARRQIQLWHKNNGVTSSLCDEGDESNDPAAQAAADYLMRLALKKGTEDNITVIVVDLKPRKKAKSNS

SEQ ID NO: 1036 - DNA, 1065 bp, Zea mays
  CDS (1)..(1065)
atgtgcgtggaggggctggacgacgcagcagggaggctcggcttcggagaccaggacaccgacaggcgcgccggtgatgcgatggagagagtttgtgagaacacagtggctgttgacttcaagcagactaagctgaacaacttcgtcccattcatccggtcaggggaatggtctgatattggaggtcgcgattacatggaagatgcccatgtgtgcatctctgatctggcaaagaattttggctataactcagccgatgatgaagtaatatccttctatggggtgttcgatggccataacggcaaagacgcagcccattatgtccgtgataacttgccacgggtcatcgtagaagacgctgattttcctcttgagcttgaaaaggtagtaaagaggtcatttgtgcaaactgatagtaagtttgcagagaaattctctcatcacaagggactctcttctggaacgacagcacttacagcaatgatttttggaaggtcccttctggtggccaatgccggtgactgcagagcggtgctatcgcggcgtggcactgccattgagatgtccaaggaccacaggccttgctgcatgaacgaaaggaagcgcgtagagtcacttggcggctacgttgacgacggttacctgaacggtcagctggcagtgaccagagcgctcggtgattggcatctggatggcatgaaagaggtgggcgagccaggagggcccctgagcgccgaaccagagctgaagatggtcacgctgaccaaggacgacgagttcctgataatcggcagcgacggcatctgggacttcttctcgagccagaacgccgtggacttcgcgcggcggaggctccaggaccacaacgacctgaggctgtgctgcagggagatggtcgacgaggcggtgcggcggggcgccagcgacaacctgacggctgtgatggtctcgttccacccggacgcccctcccccgagccgagccaacaagaggaccggcagggtcaccaggagcatttcggctgaggggcttcacagcctcagagtgctcctggaaggccagtga

SEQ ID NO: 1037 - protein, 354 aa, Zea mays
MCVEGLDDAAGRLGFGDQDTDRRAGDAMERVCENTVAVDFKQTKLNNFVPFIRSGEWSDIGGRDYMEDAHVCISDLAKNFGYNSADDEVISFYGVFDGHNGKDAAHYVRDNLPRVIVEDADFPLELEKVVKRSFVQTDSKFAEKFSHHKGLSSGTTALTAMIFGRSLLVANAGDCRAVLSRRGTAIEMSKDHRPCCMNERKRVESLGGYVDDGYLNGQLAVTRALGDWHLDGMKEVGEPGGPLSAEPELKMVTLTKDDEFLIIGSDGIWDFFSSQNAVDFARRRLQDHNDLRLCCREMVDEAVRRGASDNLTAVMVSFHPDAPPPSRANKRTGRVTRSISAEGLHSLRVLLEGQ

SEQ ID NO: 1038 - DNA, 1080 bp, Zea mays
  CDS (1)..(1080)
atgggggtttacctcagtactccaaaaactgacaagctatctgaaaatggagaaaatgatagacttaagtttggtctttcatctatgcaaggatggcgagcaaccatggaagatgctcattcagcattgctagatcttgatagcgagacagcattctttggtgtttttgatggtcatggaggaagagtcgttgccaaattctgtgcaaaatatctgcatggtcaagtcctcaaaagcgaagcctattcaactggtgacctaggcactgctgtccatagagctttcttcagaatggatgaaatgatgcaaggacagagaggttggcgagaactatctgcacttggagacaaaataaacaagtttagtggtatgatagaaggattgatttggtctccaaggggcagtgattcaaataatcaacaagatgattgggcttcagaggagggacctcactctgactttgctgggccaacatgtgggagtacagcgtgtgtagcattaataagaaacacccaacttgttgtggcaaatgctggtgattcccgatgtgttatttcaaggggtgggaaggcatacaatttatcgagggaccacaaaccagagcttgcagctgagagagaaaggataatgaaagcagggggcttcatccatatgggacgagtaaatggaagtttaaacttgtcaagggcaattggagacgtggaattgaaacagaacaaattcctgcctcccgagaagcaaattgtgacggccaatcctgatatcaacgtcgtggagctctgcgatgatgacgactttgttgttgtagcatgtgatggcatttgggactgcatgtcaagccaacagctggtggattttatccacgagcgtataaacacggagagcagcctgtctgccgtgtgcgagagagtgctggacagatgcctggctccatcaacgatcgctggagacgggtgcgacaacatgaccatgatcctggtgcagttcaaaaaacctgtcgatcggaacaagaaggccgaagcagcagggcaatctgccagcaatgtggacgaagccaagagtcgtgttgctgaggagtga

SEQ ID NO: 1039 - protein, 359 aa, Zea mays
MGVYLSTPKTDKLSENGENDRLKFGLSSMQGWRATMEDAHSALLDLDSETAFFGVFDGHGGRVVAKFCAKYLHGQVLKSEAYSTGDLGTAVHRAFFRMDEMMQGQRGWRELSALGDKINKFSGMIEGLIWSPRGSDSNNQQDDWASEEGPHSDFAGPTCGSTACVALIRNTQLVVANAGDSRCVISRGGKAYNLSRDHKPELAAERERIMKAGGFIHMGRVNGSLNLSRAIGDVELKQNKFLPPEKQIVTANPDINVVELCDDDDFVVVACDGIWDCMSSQQLVDFIHERINTESSLSAVCERVLDRCLAPSTIAGDGCDNMTMILVQFKKPVDRNKKAEAAGQSASNVDEAKSRVAEE

SEQ ID NO: 1040 - DNA, 1197 bp, Zea mays
  CDS (1)..(1197)
atgctatcagctctgatggattatttgaaatcttgctggggtccggcatcaccggctgggcgtccccgcaaaggatcggatgccaccggccgccaggacgggctcctgtggtacaaggacggcgggcaggtcgtcgatggtgagttctccatggccgtggtccaggccaataacctattggaggaccatagccaggttgaatccgggccgcttagcacatcggagcctggactgcaaggcaccttcgtcggggtctacgatgggcacggtggcccggagacagcgcgttacatcaatgaccatctcttcaaccacttgaggagattcgcatctgagcacaagtgcatgtcagcggatgtgattcggaaggcattccgagcgactgaggagggtttcatttctgtggttagtaaccaatggtcattgagacctcaattagcagctgtaggctcttgctgtctagttggtgtggtttgcagcggaactctatatgttgcaaaccttggggactcccgtgctgttctggggagacttgtcaagggaactggggaggttttggcaatgcagctctcagcagaacacaatgcatcctatgaggaggttagacgagagctgcaggcatcacatcctgatgatccccatattgtggtcctaaaacacaatgtttggcgtgtaaagggtattatccagataacaaggtcaattggagatgtgtatctgaagaaaccagaatttaatagagaacctttgcacagcaagtttcgtcttcaggaaacttttaggagaccacttcttagttctgatccagcaattactgtccaccaaatacagccaactgataagttcatcatttttgcatctgatggactctgggaacatcttagtaatcaggaagtggttgacatggtccaaagtagcccgcgtaatggaatcgcacgaaagttagtaaagtctgcagtgcaggaagcagcgaagaagagggagatgcggtattcagacctcaagaaagttgatcggggggtgaggcggcacttccacgacgatataactgtcattgtggtatttttcgattcaaacgccatgacaactgctgcctggagcagaccctcggtctctctccgagggggtgggtttccaatccattcaaacacccttgctccattctcggttcctacagagctaaacaactcctactga

SEQ ID NO: 1041 - protein, 398 aa, Zea mays
MLSALMDYLKSCWGPASPAGRPRKGSDATGRQDGLLWYKDGGQVVDGEFSMAVVQANNLLEDHSQVESGPLSTSEPGLQGTFVGVYDGHGGPETARYINDHLFNHLRRFASEHKCMSADVIRKAFRATEEGFISVVSNQWSLRPQLAAVGSCCLVGVVCSGTLYVANLGDSRAVLGRLVKGTGEVLAMQLSAEHNASYEEVRRELQASHPDDPHIVVLKHNVWRVKGIIQITRSIGDVYLKKPEFNREPLHSKFRLQETFRRPLLSSDPAITVHQIQPTDKFIIFASDGLWEHLSNQEVVDMVQSSPRNGIARKLVKSAVQEAAKKREMRYSDLKKVDRGVRRHFHDDITVIVVFFDSNAMTTAAWSRPSVSLRGGGFPIHSNTLAPFSVPTELNNSY

SEQ ID NO: 1042 - DNA, 1065 bp, Zea mays
  CDS (1)..(1065)
atgtgcgtggaggagccgaaggacgccgaacggtttggttttggagacccaggggtcgaggagcccgctaagtttcccttggctcagatggagagagtttgtgaaaatacaacttctgctgatttcaggcagaagttaagcaattttgtcccagtaatccgatcgggggattggtctgatattggaggtcgccaatacatggaagacacccacgtgtgcattccagaccttgctaagaactttggtttcccatcattagataatgaagttgtttcattctatggggtctttgatggtcacggtggaaaagatgctgcccatttcgtttgtgataatttaccaaggatgattgtggaagattcagatttccctcttcagcttgaaaaagttgtgagaaggtcctttatgcagattgattgccagtttgctgagacatgctctctccatagagcatcgtcctccggtacaactgcacttacagcaatggtttttggaaggtctcttctggtcgctaatgccggtgactgtagggcggttctttcccggtgtggcaccgcagtcgaaatgtccatggaccacaggccttgcagtctcagcgaaaaactgcgcgtagaatcgcttggtggctacgtggacgatggctatctgaacggtctgctaggagtcaccagagcgcttggtgactggcatctcgagggcatgaaaggagctggtgagacaggtggtcccctgagtgctgacccagagctcaagatgaccacgctgacgaaggacgacgagttcttgataattggcagcgacgggatctgggacgtcttctcgaaccagaactcggtggacttcgcccggaagcgcctccaggagcacaacgatgtgaagttgtgctgcagggaaatcgtcgaggaggcgatcaggcggggggctactgataacttgactgcagtgctggtctcgttccacctggaggccccgcctcggatcagagtggaccgtcctggtagggtggagaggagcatatctgctgaagggctcaatagcctcaggatactcctgggaaggcagtag

SEQ ID NO: 1043 - protein, 354 aa, Zea mays
MCVEEPKDAERFGFGDPGVEEPAKFPLAQMERVCENTTSADFRQKLSNFVPVIRSGDWSDIGGRQYMEDTHVCIPDLAKNFGFPSLDNEVVSFYGVFDGHGGKDAAHFVCDNLPRMIVEDSDFPLQLEKVVRRSFMQIDCQFAETCSLHRASSSGTTALTAMVFGRSLLVANAGDCRAVLSRCGTAVEMSMDHRPCSLSEKLRVESLGGYVDDGYLNGLLGVTRALGDWHLEGMKGAGETGGPLSADPELKMTTLTKDDEFLIIGSDGIWDVFSNQNSVDFARKRLQEHNDVKLCCREIVEEAIRRGATDNLTAVLVSFHLEAPPRIRVDRPGRVERSISAEGLNSLRILLGRQ

SEQ ID NO: 1044 - DNA, 1083 bp, Zea mays
  CDS (1)..(1083)
atggaagagcacgtgcctcgaggcggcggcggcgggaggcccccgatcccggcggcggcggcgaggaagccggcgctcgcgcggcactcctcttttgtgaggagtcctgcaaacaatacaaagcctgcaactgagagagcttttgaaggcatggacactgaatttatccctattgtacgatctggtgggtgggctgatattggctccaggcacacaatggaggatgtctttatctgctttgataatttcatgcaagattttggaattgaaagttttgaagaaggacccagtgccttttatgggatttttgatgggcatggtggaaagcatgcagctgattttgtgtgcagtaatttaccaaggtttattgtcgaggatgaggattttcctagggagatagtgaaagcaatgtcctctgcattcttgcaggctgatgcttcttttgcagatgcttgttctctgaactgctctctttcttctgatacaactgctcttgcagcacttgtggttgggagatcacttctggtcgcgaatgctggtgactgccgagcagtactttgtcgtcgtggaaaggcaattgagatgtccagggatcacaaaccatcttgccacagggagaagatacgtattgaggcattgggtggatatgtcgatgatggctacctgaatgggcagcttaatgtcgctcgagcaattggggactggcatatggaaggcatgaaggcatgtggtggtcttggtcctcttactgccgagcctgaggtaatgacaatggatctaactgatgaggacgaattcctgatcatgggctgtgatgggatctgggatgtattcctcagccaaaatgcagtagattttgctcgccgtaagctccaagaacacaatgacccggctgcctgctgtaaagaactagttgatgaggccattaagaggaagagtggtgataacctttctgtggttgtcgtctgcttcaactctaggccgcctcctgttctaacaactcctaggcctcgtgtacagaggagcatatctgcagaaggcctgagagagctgcagagcttccttgatagtttggccgattga

SEQ ID NO: 1045 - protein, 360 aa, Zea mays
MEEHVPRGGGGGRPPIPAAAARKPALARHSSFVRSPANNTKPATERAFEGMDTEFIPIVRSGGWADIGSRHTMEDVFICFDNFMQDFGIESFEEGPSAFYGIFDGHGGKHAADFVCSNLPRFIVEDEDFPREIVKAMSSAFLQADASFADACSLNCSLSSDTTALAALVVGRSLLVANAGDCRAVLCRRGKAIEMSRDHKPSCHREKIRIEALGGYVDDGYLNGQLNVARAIGDWHMEGMKACGGLGPLTAEPEVMTMDLTDEDEFLIMGCDGIWDVFLSQNAVDFARRKLQEHNDPAACCKELVDEAIKRKSGDNLSVVVVCFNSRPPPVLTTPRPRVQRSISAEGLRELQSFLDSLAD

SEQ ID NO: 1046 - DNA, 1119 bp, Zea mays
  CDS (1)..(1119)
atgagcggaggggtggaaccggagaccccgccgggtagcagcagcaggagcgggggcagcaggagcgtcggtggcaagccgccacgccaccacctcacgtctatccgccactgcgccagcatcgcccgcatcgccgccgcctccgccggattcgggctggattcggggacgctcagcttgatctcacctaccgcagacatccatccgggcttcttgcctgtgttcaggtcggggagtttcgctgatattggacccaaaacgtacatggaggacgaacatgtctgtgtggacaacctggttgagcacctcgggttctatggcccgggcatccctgcaccgggtgctttctatggggtgtttgatggccatggtggcactgatgctgcctgttttgtccggaaaaatatactgaagttcataaccgaagattgccacttccccaacagcatcgagaaggcaatcagaagcgcttttgtaaaggccgacaatgcaattgcggattcccagtctcttgaccggaattctgggaccacggcgttgacggtccttatatctggcaggacactgcttgtcgcgaatgccggtgactgtagagccgtattaggaaagcgaggccgagcttttgaactctcgagagaccacaaacccagctgcagcgtcgagaagctcagaatcgaaaaccttggcggtaccgtcttcgatggctacctcaacggtcagctggctgtagcaagggcgatcggtgactggcacatgaaaggctccaaaggctctgcgtgccctctcacaccggaacctgagtttagggaggttaggcttaccgaggaagacgagttcttgataataggctgcgatggcctctgggacgtgatgagcagccagtttgctgtctccatggtcaggaaagagctgatggaacacaatgacccacagcggtgctcgcgggagcttgtccaggaagctcttaggcgcgactgctgtgataacctaaccgtagtcgtcgtgtgcttctcagatgacccgccccctcagatcgaggtcccgagattccgggtacggagaagcatctcaatggaagggctgcatacgctgaggggagctcttgacagtaacgtttga

SEQ ID NO: 1047 - protein, 372 aa, Zea mays
MSGGVEPETPPGSSSRSGGSRSVGGKPPRHHLTSIRHCASIARIAAASAGFGLDSGTLSLISPTADIHPGFLPVFRSGSFADIGPKTYMEDEHVCVDNLVEHLGFYGPGIPAPGAFYGVFDGHGGTDAACFVRKNILKFITEDCHFPNSIEKAIRSAFVKADNAIADSQSLDRNSGTTALTVLISGRTLLVANAGDCRAVLGKRGRAFELSRDHKPSCSVEKLRIENLGGTVFDGYLNGQLAVARAIGDWHMKGSKGSACPLTPEPEFREVRLTEEDEFLIIGCDGLWDVMSSQFAVSMVRKELMEHNDPQRCSRELVQEALRRDCCDNLTVVVVCFSDDPPPQIEVPRFRVRRSISMEGLHTLRGALDSNV

SEQ ID NO: 1048 - DNA, 1065 bp, Zea mays
  CDS (1)..(1065)
atgtgcgtggaggggctggacgacgcagcagggaggctcggcttcggagaccaggacaccgacaggcgcgccggtgatgcgatggagagagtttgtgagaacacagtggctgttgacttcaagcagactaagctgaacaactttgtgccattcatccggtcaggggaatggtctgatattggaggtcgcgattacatggaagatgcccatgtgtgcatctctgatctggcaaagaattttggctatgactcagtcgaagatgaagtaatttctttctatggggtgtttgatggccataatggcaaagatgctgctcattatgtccgtgataacttgccacgggtcatcgtggaagacgctgattttcctcttgagcttgaaaaggtggtaaagaggtcatttgtgcaaactgatagtaagtttgcagagaaattttctcatcacaggggactttcttctggaacgacagcacttacagcaatgatttttggaaggtcccttctggttgcgaatgccggtgactgcagagcggtgctctcgcggcgtggcactgccattgagatgtccaaggaccacaggccttgctgcatgaacgaaaggaagcgcgtagagtcacttggcggctacgttgacgacggttacctgaacggtcagctggcagtgaccagagcgctcggtgattggcatctggatggcatgaaagaggtgggcgagccaggagggcccctgagcgccgaaccagagctgaagatggtcacgctgaccaaggacgacgagttcctgataatcggcagcgacggcatctgggacttcttctcgagccagaacgccgtggacttcgcgcggcggaggctccaggaccacaacgacctgaggctgtgctgcagggagatcgtggacgaggcggtgcggcggggcgccagcgacaacttgacggcggtgatggtctcgttccacccggacgcccctcccccgagccgtgccaacaagaggaccggcagggtcacgcggagcatttcggctgaggggcttcacagcctcagagtgctcctggaaggccagtga

SEQ ID NO: 1049 - protein, 354 aa, Zea mays
MCVEGLDDAAGRLGFGDQDTDRRAGDAMERVCENTVAVDFKQTKLNNFVPFIRSGEWSDIGGRDYMEDAHVCISDLAKNFGYDSVEDEVISFYGVFDGHNGKDAAHYVRDNLPRVIVEDADFPLELEKVVKRSFVQTDSKFAEKFSHHRGLSSGTTALTAMIFGRSLLVANAGDCRAVLSRRGTAIEMSKDHRPCCMNERKRVESLGGYVDDGYLNGQLAVTRALGDWHLDGMKEVGEPGGPLSAEPELKMVTLTKDDEFLIIGSDGIWDFFSSQNAVDFARRRLQDHNDLRLCCREIVDEAVRRGASDNLTAVMVSFHPDAPPPSRANKRTGRVTRSISAEGLHSLRVLLEGQ

SEQ ID NO: 1050 - DNA, 1167 bp, Zea mays
  CDS (1)..(1167)
atgtcttgcacggtgaccatcccgaactcgccagtattctcgccttcacgccgcccgctgtcctgcaaggccgctcccgcgtcgccggagcccgccgtcgccgtctccgcctcttccgcggcgcccgcgcccgcgcccgccgccgccggctcgccgctccgccccttcgcgctccgcgcgctgctccgggaggaggtattcccgtctccatcgccccagctggcctctgccgcagcggtggcctcggtaccaagcggggccgtgctgaagcggcggcgacctgcgccgctccttgtgccggcgtccggcgcgactgctgctgctgcggtggctgccgtggaggcagatccgacgaacgaggtggaggaggagggggaggagttcgcagcgtactgccggagggggaaggggaggagaagggtggaaatggaggaccggcatgtggccgaggtcgctctcggcggagatccccaagtggcgctctttggtgtattcgatggtcacgggggcaaaaatgcggcagagttcgctgcggagaacatgcccaagtttttggccgaggagttcaagaaggtgaacggcggaggagagatcgaaggagctgtcaacaggggttacctcaagacggacgaggaattcctcaagagggacgagagcgggggcgcgtgctgcgtcacagccgttctccaaaagggtggtctggtcgtctccaacgctggagactgccgtgcggtgctcagccgagcagggaaagcagatgtgctcacctcggaccaccgggcctcccgggaggatgagaaggagagaattgaaaatttgggtggatttgtggtgaattaccatgggacatggcgagtccagggttccctggcagtgtctaggggcattggggatggacacctaaagcagtgggttgtggctaacccagacactaggacgctcctcgtcgaccaccagtgcgagttcttgatacttgcttctgatggcctatgggataagatcgataatcaggaggcagtagaccttgcacgtcctctatgcattaacaatgacaagacctctcgcctggctgcctgcaggatgctcactgagacgtcgatttccaggggctcaactgatgatatcagtgtcatgattgtgcaattgcagaagttttcaagttcctaa

SEQ ID NO: 1051 - protein, 388 aa, Zea mays
MSCTVTIPNSPVFSPSRRPLSCKAAPASPEPAVAVSASSAAPAPAPAAAGSPLRPFALRALLREEVFPSPSPQLASAAAVASVPSGAVLKRRRPAPLLVPASGATAAAAVAAVEADPTNEVEEEGEEFAAYCRRGKGRRRVEMEDRHVAEVALGGDPQVALFGVFDGHGGKNAAEFAAENMPKFLAEEFKKVNGGGEIEGAVNRGYLKTDEEFLKRDESGGACCVTAVLQKGGLVVSNAGDCRAVLSRAGKADVLTSDHRASREDEKERIENLGGFVVNYHGTWRVQGSLAVSRGIGDGHLKQWVVANPDTRTLLVDHQCEFLILASDGLWDKIDNQEAVDLARPLCINNDKTSRLAACRMLTETSISRGSTDDISVMIVQLQKFSSS

SEQ ID NO: 1052 - DNA, 1518 bp, Zea mays
  CDS (1)..(1518)
atggtttacgatggtgccgtgaaggaccaggaccaggagagcgcagcggcgagcactgcgttggcggcatcggtggtggcggcgtctcccgagcaggtggtggtggggagcacgagggtctcggcgaggccgccgcaagacaagcgcctcggcgtgcgccaccccttgaagcaccgctggttccgtgcccggggtaaggtgatggtggagctcggaggggtgccgcccgctcacgccgtgccggaaggcgaggaggaggaagaggaggaggagggagtcagcgagagcgaggtggaagaggagttagtggaggtagaggtggagcaagcctcgtcagcggggacgggaatgcggggcgttgaagtggaggtgttatccgcgccagcaacaggggtgcaggagatggacgtggaggtcggtgaaatggaggtgtcgcctgagcccgcggtcgctgtggggggcaccgagctggagccccagccggacgacgaggacgaggtctcatccgtcaccttggcgcgaggggagaggaagcaggaggccgctcctgctcctgcttcctctgccgtgctagctgtggaggcgcccagggagaaggatcaggatggggagagggtggagaaggagaagagggacaaggagagggaaatgcagaaggagcgggagagggtggatgaggtcggctacatgagcggaggatggaagagtgtggatggaacgctgaattgtggatattcaagttttagaggaaaaagggcaagcatggaagatttctatgatataaaatcatctaaaattgatgataaacaaatacatctctttggaatttttgatggtcatggcggttcacgtgctgctgagtatttgaaggagcatttgtttgagaacctcatgaaacatccagagttcatgacaaacacaaaattagcaataaatgaaacatataggaagaccgattcagagttcttggatgctgaaaggaattctcatagagatgatgggtcaacagcatcaacagcagtgctagttggtgaccatctttacgtggcaaatgttggagactcaagggctgttatatcaaaggctggcaaagctattgcgctctctgaagatcacaagccgaacagaagtgatgagaggaaacgaatcgagagtgctggtggaatagttatgtgggctggaacttggagggtaggtggtgtacttgcaatgtctcgggcatttggcaaccgtctcttaaaacaatttgttattgcagaccctgagattcaggaacaagaaataaatgatgagttggagtttctaattatagctagtgatgggctgtgggatgtggttccgaatgaggacgctgtttcacttgtgaagatggaggaggatcctgaggcagcagcccggaagctgacagagactgcgttctcccgtgggagcggcgataacatcacctgcatcgttgtgaagttcgagcatgacaagcctggtggcggcggctactcgcctccaggcgacaagagttga

SEQ ID NO: 1053 - protein, 505 aa, Zea mays
MVYDGAVKDQDQESAAASTALAASVVAASPEQVVVGSTRVSARPPQDKRLGVRHPLKHRWFRARGKVMVELGGVPPAHAVPEGEEEEEEEEGVSESEVEEELVEVEVEQASSAGTGMRGVEVEVLSAPATGVQEMDVEVGEMEVSPEPAVAVGGTELEPQPDDEDEVSSVTLARGERKQEAAPAPASSAVLAVEAPREKDQDGERVEKEKRDKEREMQKERERVDEVGYMSGGWKSVDGTLNCGYSSFRGKRASMEDFYDIKSSKIDDKQIHLFGIFDGHGGSRAAEYLKEHLFENLMKHPEFMTNTKLAINETYRKTDSEFLDAERNSHRDDGSTASTAVLVGDHLYVANVGDSRAVISKAGKAIALSEDHKPNRSDERKRIESAGGIVMWAGTWRVGGVLAMSRAFGNRLLKQFVIADPEIQEQEINDELEFLIIASDGLWDVVPNEDAVSLVKMEEDPEAAARKLTETAFSRGSGDNITCIVVKFEHDKPGGGGYSPPGDKS

SEQ ID NO: 1054 - DNA, 21 bp, Artificial sequence
  primer
atggttgctgaagctgagatc

SEQ ID NO: 1055 - DNA, 20 bp, Artificial sequence
  primer
tcactcgcctgcaagcattg

SEQ ID NO: 1056 - protein, 537 aa, Artificial sequence
  consensus sequence
  Variant (2)..(6): Xaa in position 2 to 6 is any amino acid
  Variant (8)..(8): Xaa in position 8 is any amino acid
  Variant (9)..(11): Xaa in position 9 to 11 is any or no amino acid
  Variant (13)..(14): Xaa in position 13 to 14 is any amino acid
  Variant (18)..(32): Xaa in position 18 to 32 is any amino acid
  Variant (33)..(65): Xaa in position 33 to 65 is any or no amino acid
  Variant (68)..(68): Xaa in position 68 is any amino acid
  Variant (74)..(76): Xaa in position 74 to 76 is any amino acid
  Variant (78)..(105): Xaa in position 78 to 105 is any amino acid
  Variant (106)..(119): Xaa in position 106 to 119 is any or no amino acid
  Variant (121)..(123): Xaa in position 121 to 123 is any amino acid
  Variant (125)..(134): Xaa in position 125 to 134 is any amino acid
  Variant (135)..(184): Xaa in position 135 to 184 is any or no amino acid
  Variant (186)..(186): Xaa in position 186 is any amino acid
  Variant (189)..(190): Xaa in position 189 to 190 is any amino acid
  Variant (192)..(199): Xaa in position 192 to 199 is any amino acid
  Variant (200)..(258): Xaa in position 200 to 258 is any or no amino acid
  Variant (262)..(262): Xaa in position 262 is any amino acid
  Variant (265)..(265): Xaa in position 265 is any amino acid
  Variant (267)..(267): Xaa in position 267 is any amino acid
  Variant (269)..(270): Xaa in position 269 to 270 is any amino acid
  Variant (272)..(272): Xaa in position 272 is any amino acid
  Variant (274)..(274): Xaa in position 274 is any amino acid
  Variant (275)..(289): Xaa in position 275 to 289 is any or no amino acid
  Variant (291)..(293): Xaa in position 291 to 293 is any amino acid
  Variant (295)..(295): Xaa in position 295 is any amino acid
  Variant (298)..(303): Xaa in position 298 to 303 is any amino acid
  Variant (304)..(308): Xaa in position 304 to 308 is any or no amino acid
  Variant (310)..(311): Xaa in position 310 to 311 is any amino acid
  Variant (313)..(316): Xaa in position 313 to 316 is any amino acid
  Variant (317)..(342): Xaa in position 317 to 342 is any or no amino acid
  Variant (344)..(351): Xaa in position 344 to 351 is any amino acid
  Variant (352)..(355): Xaa in position 352 to 355 is any or no amino acid
  Variant (357)..(357): Xaa in position 357 is any amino acid
  Variant (359)..(361): Xaa in position 359 to 361 is any amino acid
  Variant (363)..(364): Xaa in position 363 to 364 is any amino acid
  Variant (365)..(380): Xaa in position 365 to 380 is any or no amino acid
  Variant (383)..(385): Xaa in position 383 to 385 is any amino acid
  Variant (387)..(392): Xaa in position 387 to 392 is any amino acid
  Variant (393)..(420): Xaa in position 393 to 420 is any or no amino acid
  Variant (422)..(432): Xaa in position 422 to 432 is any amino acid
  Variant (433)..(433): Xaa in position 433 is any or no amino acid
  Variant (437)..(440): Xaa in position 437 to 440 is any amino acid
  Variant (443)..(443): Xaa in position 443 is any amino acid
  Variant (446)..(452): Xaa in position 446 to 452 is any amino acid
  Variant (454)..(479): Xaa in position 454 to 479 is any amino acid
  Variant (480)..(535): Xaa in position 480 to 535 is any or no amino acid
GXXXXXGXXXXRXXMEDXXXXXXXXXXXXXXXXXXXXXXXXXXXXXXXXXXXXXXXXXXXXXXXXGVXDGHGGXXXAXXXXXXXXXXXXXXXXXXXXXXXXXXXXXXXXXXXXXXXXXXFXXXDXXXXXXXXXXXXXXXXXXXXXXXXXXXXXXXXXXXXXXXXXXXXXXXXXXXXXXXXXXXXGXTAXXAXXXXXXXXXXXXXXXXXXXXXXXXXXXXXXXXXXXXXXXXXXXXXXXXXXXXXXXXXXXXXXXXXXXVANXGDXRXVXXRXGXXXXXXXXXXXXXXXXAXXXSXDHXXXXXXXXXXXEXXRXXXXXXXXXXXXXXXXXXXXXXXXXXXXXXGXXXXXXXXXXXXGXLXXXRXXXXXXXXXXXXXXXXXXGDXXXKXXXXXXXXXXXXXXXXXXXXXXXXXXXXXXXXXXPXXXXXXXXXXXXEFLXXXXDGXWDXXXXXXXVXXXXXXXXXXXXXXXXXXXXXXXXXXXXXXXXXXXXXXXXXXXXXXXXXXXXXXXXXXXXXXXXXXXXXXXXXXXXXXXXXXDN

SEQ ID NO: 1057 - protein, 24 aa, Artificial sequence
  protein pattern
  Variant (2)..(2): Xaa in position 2 is any amino acid
  Variant (3)..(5): Xaa in position 3 to 5 is any or no amino acid
  Variant (7)..(7): Xaa in position 7 is Ile, Leu or Val
  Variant (8)..(8): Xaa in position 8 is Ile or Val
  Variant (9)..(9): Xaa in position 9 is Phe, Ile, Leu, Met or Val
  Variant (10)..(10): Xaa in position 10 is Ala or Gly
  Variant (11)..(11): Xaa in position 11 is Cys or Ser
  Variant (14)..(14): Xaa in position 14 is Ile, Leu or Val
  Variant (16)..(16): Xaa in position 16 is Asp or Glu
  Variant (17)..(19): Xaa in position 17 to 19 is any amino acid
  Variant (20)..(20): Xaa in position 20 is Asp, Asn or Ser
  Variant (21)..(23): Xaa in position 21 to 23 is any amino acid
  Variant (24)..(24): Xaa in position 24 is Cys or Val
DXXXXFXXXXXDGXWXXXXXXXXX

SEQ ID NO: 1058 - protein, 14 aa, Artificial sequence
  protein pattern
  Variant (2)..(3): Xaa in position 2 to 3 is any or no amino acid
  Variant (5)..(5): Xaa in position 5 is Phe or Tyr
  Variant (10)..(10): Xaa in position 10 is Cys or Gly
  Variant (11)..(12): Xaa in position 11 to 12 is any amino acid
  Variant (13)..(13): Xaa in position 13 is Ala, Thr or Val
  Variant (14)..(14): Xaa in position 14 is Ala or Ser
FXXVXDGHGXXXXX

SEQ ID NO: 1059 - protein, 17 aa, Artificial sequence
  protein pattern
  Variant (2)..(2): Xaa in position 2 is any amino acid
  Variant (4)..(4): Xaa in position 4 is any amino acid
  Variant (7)..(7): Xaa in position 7 is Ala, Cys or Ser
  Variant (9)..(9): Xaa in position 9 is Ala, Cys, Ser or Val
  Variant (11)..(11): Xaa in position 11 is Ile, Leu, Met or Val
  Variant (12)..(12): Xaa in position 12 is Cys, Gly or Ser
  Variant (13)..(16): Xaa in position 13 to 16 is any amino acid
  Variant (17)..(17): Xaa in position 17 is Ala, Gly, Pro or Val
VXNXGDXRXVXXXXXXX

SEQ ID NO: 1060 - protein, 11 aa, Artificial sequence
  protein pattern
  Variant (2)..(2): Xaa in position 2 is any amino acid
  Variant (4)..(4): Xaa in position 4 is Ala, Cys, Gly, Asn or Ser
  Variant (5)..(5): Xaa in position 5 is any amino acid
  Variant (6)..(6): Xaa in position 6 is Ala, Ser or Thr
  Variant (8)..(8): Xaa in position 8 is Ala, Gly or Ser
  Variant (9)..(9): Xaa in position 9 is Phe, Ile or Leu
GXLXXXRXXGD

SEQ ID NO: 1061 - DNA, 861 bp, Arabidopsis thaliana
  CDS (1)..(861)
atggaaaattcgatgaagaagaagaagagcttcaaagaaagtgaagatgaagaactaagaagagggccttggactttggaggaagacacacttctcacaaattacatcctccataacggtgagggtcgttggaatcacgtcgccaaatgtgctgggctaaagagaactgggaaaagttgtagattgagatggttgaattacttgaaacccgacataagacgagggaatcttactcctcaagaacagcttttgatccttgagcttcactctaaatggggtaataggtggtccaagattgcacagtacttgccaggaagaacggataacgagatcaagaactattggagaacaagagttcaaaaacaagctcgtcaactcaacatcgaatctaacagcgacaagttctttgacgctgttcgtagtttttgggtccctagattgatcgagaagatggaacaaaactcatccactactactacttattgttgtccccaaaacaacaacaacaactctcttcttcttccttctcaatctcacgactctttaagtatgcaaaaagatatagattactcgggtttcagcaacatagacggttcttcttcaacttctacttgcatgtctcatctaacaacagttccacactttatggatcaaagcaacaccaatatcatcgatggctcgatgtgtttccatgaaggcaatgttcaagaattcggaggatatgttcctggcatggaggattacatggtaaactcggacatctcaatggaatgtcacgtggcggatggttattcagcgtacgaggatgttacacaagatcccatgtggaatgtggatgacatttggcagtttagggagtaa

SEQ ID NO: 1062 - protein, 286 aa, Arabidopsis thaliana
MENSMKKKKSFKESEDEELRRGPWTLEEDTLLTNYILHNGEGRWNHVAKCAGLKRTGKSCRLRWLNYLKPDIRRGNLTPQEQLLILELHSKWGNRWSKIAQYLPGRTDNEIKNYWRTRVQKQARQLNIESNSDKFFDAVRSFWVPRLIEKMEQNSSTTTTYCCPQNNNNNSLLLPSQSHDSLSMQKDIDYSGFSNIDGSSSTSTCMSHLTTVPHFMDQSNTNIIDGSMCFHEGNVQEFGGYVPGMEDYMVNSDISMECHVADGYSAYEDVTQDPMWNVDDIWQFRE

SEQ ID NO: 1063 - DNA, 1337 bp, Glycine max
  CDS (89)..(1015)
actcgaactcatcatttctaattgttctgatccatatatatcatactttctttgtaataacttaaagaaccccacaaaaacaccaaccatgtccacaattgcaaagagagatttgagttctaatgaagaagagagtgagctgagaagaggtccttggactcttgaagaagacagcttactcatacactatattgctcgtcatggtgaaggccgttggaatatgttagccaaaagtgcaggattgaagaggactggaaaaagttgcagacttagatggctgaattatttgaaaccagacattaagagagggaacctcactccacaggagcaactcttgatccttgaactccattccaagtggggtaacaggtggtcaaaaattgctcagcatctgccaggaagaacagacaatgagatcaagaactattggagaacaaggatacagaaacaggcacgccaacttaacattgaatctggtagcaagagattcattgatgctgtcaagtgtttttggatgccaagattgctccaaaagatggaacagagcaattctccaagccctcatcactcttccatgacaaacatgatgaatttagggaattccggagaagcttctatgagttcaatgtcaagcagcttcaatattaatccttctatgtcttcttcctcatctcctccacaaagggaatttattatggatgatgcaaatcattttaatactatgtccaaccccatcaatccatccccagattccttccaattttcacagctacttgaaatttctgaacaccccaaaagtccttcaaatgtgtttgagaacaatgtttgcagttatccaatccaggacaattgctatgttgataccaataactatggcatggaaggcataaacatggatcccctttcagcaatggatacttacgacttcccacagtttgattttcagacagcaggaaatggatggatgctagacagcatgggggattctactttatggaacatggaggctatgtgacagtgttggcaagagaaggcatgcatctcaagctcttttcatcgtgggatgttatattatcgaaagaaaaaaaagtttgaagattcttatgctatactgattcttagtgtgagtatacattctcataggtagaaattagtactaagtgtaaggttatttgatatgaacctcttgaaatatagtattttaaatagaaaatgcaggagatggtattagagttcccctgtttcagatttattagaagttggaaaagttgtaatttgaccaagacagtgtatcttggctgttataagtggcattttgaacataattcgttttaaag

SEQ ID NO: 1064 - protein, 308 aa, Glycine max
MSTIAKRDLSSNEEESELRRGPWTLEEDSLLIHYIARHGEGRWNMLAKSAGLKRTGKSCRLRWLNYLKPDIKRGNLTPQEQLLILELHSKWGNRWSKIAQHLPGRTDNEIKNYWRTRIQKQARQLNIESGSKRFIDAVKCFWMPRLLQKMEQSNSPSPHHSSMTNMMNLGNSGEASMSSMSSSFNINPSMSSSSSPPQREFIMDDANHFNTMSNPINPSPDSFQFSQLLEISEHPKSPSNVFENNVCSYPIQDNCYVDTNNYGMEGINMDPLSAMDTYDFPQFDFQTAGNGWMLDSMGDSTLWNMEAM

SEQ ID NO: 1065 - DNA, 1181 bp, Glycine max
  CDS (22)..(960)
tttcagtgagtgagaatagccatgtctacttcaaagagcgtcagcagttctagtgaagatgacaatgaacttagaagagggccttggactctggaagaggataacttgctctcccaatatatttttaatcatggggaagggcgatggaatttgctggctaaacgttcaggattaaagagaactgggaaaagttgcagattaaggtggctaaattatctaaagccagatgtaaaacggggaaatttaaccccacaagagcaacttataattcttgaactccactcaaagtggggaaacaggtggtcaaaaattgcacaacatttgccaggcagaacagacaatgaaatcaagaactattggagaactaggattcagaaacaagcaagacatttgaaaatttacactgacagcagagagtttcaagaacttgttaggcgtttctggatgcctagattgcttcagaaagcaaaagaatcatcttcttcaaacatgtcaattcaaaaccaggcaattcctatgccttttgattatgtttctcagcatttaactgttgggaccatacctccttggcagggaccttgtatgaatgaagctggtcccacttacatggaccaacatgagcagactcagactcggaacaccaacaatggttcatgcatctccttgtctgagtcagcaaatattccaaaagtgcctcagcattttggacacaccaccatcacccaatttcatgccttgaataccaatgactttggcaccttcacatatgaaggttataatgtaaacaacaatgtctatgagatggacaacttcaaaacgactactacatgggtggctgaggatgcgcaatacccaattggtgattgtcaaatggtaggaagcaattgggtaaacaacgattttgcatgtaacatgtggaacatggatgaactgtggcagtttagcaagttacaaaaataagattttagggttttgttttttttggaataaccaaaagtccaaaactctttctttgatgacgttattattgttatcatgaactgtggattagctaccgaattaattaatacagatggcgattgttttctgtacatctgtcttgtattactctgttcagataagtacttttgtaatttgtattgattgagaaaagtcattaattagtcactagtacaaaaaaa

SEQ ID NO: 1066 - protein, 312 aa, Glycine max
MSTSKSVSSSSEDDNELRRGPWTLEEDNLLSQYIFNHGEGRWNLLAKRSGLKRTGKSCRLRWLNYLKPDVKRGNLTPQEQLIILELHSKWGNRWSKIAQHLPGRTDNEIKNYWRTRIQKQARHLKIYTDSREFQELVRRFWMPRLLQKAKESSSSNMSIQNQAIPMPFDYVSQHLTVGTIPPWQGPCMNEAGPTYMDQHEQTQTRNTNNGSCISLSESANIPKVPQHFGHTTITQFHALNTNDFGTFTYEGYNVNNNVYEMDNFKTTTTWVAEDAQYPIGDCQMVGSNWVNNDFACNMWNMDELWQFSKLQK

SEQ ID NO: 1067 - DNA, 1336 bp, Eucalyptus grandis
  CDS (133)..(1050)
ctttactattctaagtcctctacttctggtttggaatcactaatttcttggtctcactttcgcttggcctatcacccgagagttctctgcagaaacttcacagccgtcctctgctctttcaccaaccattgtatgcctggttttactagggctaggaagatgagcatgtccggagaagaagagggtgacctgcgaagggggccatggactcgcgaggaagacaatttgctcattcactcgatcacatgccacggcgagggacgctggaatatgttggcgaagagcgcaggattgaagagaactggcaaaagctgcagattaaggtggctgaattacctgagacccgacatcaagcgcgggaatctcaccccgcaggaacagctcatgatccttgaacttcaccacaaatggggcaacaggtggtcgaaaatcgcgcagtatctcccaggaaggacagataacgagatcaagaactactggaggacgcgggtgcagaagcaagcgcgccagctcaacatcgaatccgacagcgagaggtttctcgatgcggtccgccatatctggatgccccggctgctccagaaaatggagcaagcttcgtcctctgatcaaacaaccaggacttctgatatgagcatgaattgttctgtttctgcctctccagtacattatcctccctccacatcctcacccagcaaattgacccagaactcgaattcttcgatggaggtctcgagttatacgatggctgatgcagatatttctccgaatttcccgataacgggacagacacctgaaattcctgaagcattctcaaatgcagatgtagtaggctttggcaacagtactgcgtacaaccctttgcttgcgggcgacggttacttcggggacggcaccagctatgatgtgaacgactatgccaccatgtcagcactgagcgcttgcaacgggtttccattgcagggccacgtggaaggaggcaactgggcggtcgatgatgtggcggatgcttgttggacagtcgatgacatatggaagtttagagactaatgcagggctggaggatagtctagttatttatgcgtagaccaatcccaagatcttttcaactgggtctaaaatttttacttattgattcgtcataagcttcttctgtgacaccctagaagtgggttcgattttaaatgcagatgatgttaatagttctcattttttgaaaattattggcatgacgttagcacttatccaagcagtgccctaacataggggttttgttgcaattttattgaccagcccaaaaaagtggtagataattgttcttatattaaaaaaaaaa

SEQ ID NO: 1068 - protein, 305 aa, Eucalyptus grandis
MPGFTRARKMSMSGEEEGDLRRGPWTREEDNLLIHSITCHGEGRWNMLAKSAGLKRTGKSCRLRWLNYLRPDIKRGNLTPQEQLMILELHHKWGNRWSKIAQYLPGRTDNEIKNYWRTRVQKQARQLNIESDSERFLDAVRHIWMPRLLQKMEQASSSDQTTRTSDMSMNCSVSASPVHYPPSTSSPSKLTQNSNSSMEVSSYTMADADISPNFPITGQTPEIPEAFSNADVVGFGNSTAYNPLLAGDGYFGDGTSYDVNDYATMSALSACNGFPLQGHVEGGNWAVDDVADACWTVDDIWKFRD

SEQ ID NO: 1069 - DNA, 837 bp, Arabidopsis thaliana
  CDS (1)..(837)
atgtcaaatataacaaagaagaagtgtaatggaaatgaagagggtgcagagcagaggaaagggccttggacactcgaggaagacactcttctcaccaattacatttcccataacggtgaaggccgatggaatctgctcgctaaatcttctggaaaaagttgtagattgagatggttgaattaccttaaacccgacataaagcgtgggaatctcactcctcaagaacaacttttaatccttgagctccattctaaatggggtaataggtggtcaaaaatttcgaagtatttaccaggaagaacagacaacgatatcaaaaactactggagaactagagtccagaaacaagcacgccagctcaacatagattccaatagccacaagttcatagaagttgttcgtagcttttggtttccaagactgatcaacgagattaaagacaactcatacaccaacaatattaaagctaatgctcctgatttacttggaccaattttacgagacagcaaagatttgggtttcaacaacatggattgttccacttccatgtcagaagatctcaagaaaacttcacaattcatggatttttctgatcttgaaaccacaatgtccttggaaggatcacgagggggtagtagtcaatgtgtgagtgaggtttatagctccttcccttgcctagaggaggagtacatggtggccgttatgggcagttcagacatttcagcattgcatgattgtcacgtggctgattccaagtacgaggatgatgtgacacaagatctaatgtggaacatggatgacatttggcagtttaacgagtatgcacactttaattag

SEQ ID NO: 1070 - protein, 278 aa, Arabidopsis thaliana
MSNITKKKCNGNEEGAEQRKGPWTLEEDTLLTNYISHNGEGRWNLLAKSSGKSCRLRWLNYLKPDIKRGNLTPQEQLLILELHSKWGNRWSKISKYLPGRTDNDIKNYWRTRVQKQARQLNIDSNSHKFIEVVRSFWFPRLINEIKDNSYTNNIKANAPDLLGPILRDSKDLGFNNMDCSTSMSEDLKKTSQFMDFSDLETTMSLEGSRGGSSQCVSEVYSSFPCLEEEYMVAVMGSSDISALHDCHVADSKYEDDVTQDLMWNMDDIWQFNEYAHFN

SEQ ID NO: 1071 - DNA, 1185 bp, Oryza sativa (japonica cultivar-group)
  CDS (1)..(1185)
atgcacgagagcgacagcgatcctgattctgacaggacacactggtatatgagcaatagcgatgacgagtcatttgttgataaagataaagattgcagaaggagcaccgtagccctgctgttgaagaaaggtccatggacatcttgggaggactccatcttagagaagtacatcaagaagcatggtgaaaggaactggaagcttgtgcagaagaacactggcctcttgaggtgtggcaagagttgccgtcttcggtggatgaaccatctgaggcctaacctaaagaagggggctttcagcaaggaagaagagaataaaattattaatcttcatcgcaaaatggggaataagtggtctcggatggctgctgatttgccagggcgtactgataatgaaataaagaactactggaacactcgaataaagaaatgcaagaacaatcgttcgcctttgtatcctgctaatgtatgcaacgatgctttgaatgaagatcaacatgagtctgctgaccccaacgttagggagaagctgaccaataatcatctagaagatactactagtatgtattctgcaccccagttttcagatgcttccatcagtaatatacttgataggagacttgcatcaaaagattatgactccatagaagatcaaagaaaccaaatagaagttgtagcaaaatatgagattccacttcctgtgttgaaaacaacgaacaatgacatatttccatcagcctctatctttgccaaccatggtatttcaaatggcaatctctctgctttgtccacaactgatgctttgcagatggagctccctttaatccaatttgatccaaacaaccagttcgtttactcaagggcttatgcgatgcacctaacaaactttgctttattaaatgatcaatcagaagaattactaaatgatactgatgtattgaactatgtggtgatgaaagaagagctttctggagggagtttgagtcctactattaatatgccatgtgaagcacataactccatggctgcctctaatgagctggtagtgccacaatatgaaggagatgctccacctcttcaagatgatttcacatcatatttctatttgaatgatactaatctatccatattcgaagacacaaatgaattgtttttggaaaacaagttggatactaaaggtaactga

SEQ ID NO: 1072 - protein, 394 aa, Oryza sativa (japonica cultivar-group)
MHESDSDPDSDRTHWYMSNSDDESFVDKDKDCRRSTVALLLKKGPWTSWEDSILEKYIKKHGERNWKLVQKNTGLLRCGKSCRLRWMNHLRPNLKKGAFSKEEENKIINLHRKMGNKWSRMAADLPGRTDNEIKNYWNTRIKKCKNNRSPLYPANVCNDALNEDQHESADPNVREKLTNNHLEDTTSMYSAPQFSDASISNILDRRLASKDYDSIEDQRNQIEVVAKYEIPLPVLKTTNNDIFPSASIFANHGISNGNLSALSTTDALQMELPLIQFDPNNQFVYSRAYAMHLTNFALLNDQSEELLNDTDVLNYVVMKEELSGGSLSPTINMPCEAHNSMAASNELVVPQYEGDAPPLQDDFTSYFYLNDTNLSIFEDTNELFLENKLDTKGN

SEQ ID NO: 1073 - DNA, 858 bp, Oryza sativa (japonica cultivar-group)
  CDS (1)..(858)
atggggaggcagccgtgctgcgacaagctgggggtgaagagggggccgtggacggcggaggaggacaagaagctgatgagcttcatcctgaccaacggccattgctgctggcgcgccgtgccgaagctcgccgggctgctccgctgcggcaagagctgccgcctccggtggacaaactacctccgccccgacctcaagcgcggcctcctcaccgacgccgaggagcagctcgtcatcgacctccacgccaagctcggcaacagatggtccaagattgctgccaagctaccgggcaggacggacaacgagatcaagaaccactggaacacgcacatcaagaagaagctcatcaagatgggcatcgacccggtgacgcacgagcccctcgaccggaagcaggagagcccggccaccacctcgcagtccaccgtcacggcggagtcgtccaagtccggcgaggcgaccaggcagcaaagccggcagcttgacgacgccgtcgtcagggacatgtccgtgtctgccggtggcgacagcccgccggagtcgagcactaacaccgccagcaccgccggtggcagtagcagcagcagcagtagccatcaccaggaccctctggtgaagtggctgctggaagaggacctgctgcccaccggtgacgagccatggctcaatttcacggccagcaacgacgtcgacgagttcagtagcatcgccgccaccggcgccacgccggcgctgccgtgggacgtcggcatgacgacggactggctgctcgactaccaagattttgggatgggagactcgagcttggtggtcgatgcctccatggtcaacagctcaaatgggtccaacttctag

SEQ ID NO: 1074 - protein, 285 aa, Oryza sativa (japonica cultivar-group)
MGRQPCCDKLGVKRGPWTAEEDKKLMSFILTNGHCCWRAVPKLAGLLRCGKSCRLRWTNYLRPDLKRGLLTDAEEQLVIDLHAKLGNRWSKIAAKLPGRTDNEIKNHWNTHIKKKLIKMGIDPVTHEPLDRKQESPATTSQSTVTAESSKSGEATRQQSRQLDDAVVRDMSVSAGGDSPPESSTNTASTAGGSSSSSSSHHQDPLVKWLLEEDLLPTGDEPWLNFTASNDVDEFSSIAATGATPALPWDVGMTTDWLLDYQDFGMGDSSLVVDASMVNSSNGSNF

SEQ ID NO: 1075 - DNA, 843 bp, Arabidopsis thaliana
  CDS (1)..(843)
atgggtaggcctccatgctgtgacaagatagggatcaagaaaggaccatggactcctgaagaagatatcattcttgtttcttacattcaagaacatggtcctggaaactggagatcagttcccaccaacactgggttattgagatgcagcaaaagttgtagactgagatggacaaattatctgagacctggaattaaacgtggaaactttactcctcatgaagaaggaatgatcattcacttgcaagccttattgggtaacaaatgggcgtccatagcttcatacctaccacaaagaacggacaatgatatcaagaactactggaacacacatttaaagaagaagctcaacaagtctgacagtgatgagaggagcagatcagagaacattgcgctgcaaacttcttcgacaagaaacaccattaatcatagatctacctatgcttcaagcaccgaaaacatttcccgccttcttgagggttggatgagagcgtctccaaagagtagtacaagtactactttcttggaacacaaaatgcagaaccggacaaacaatttcatcgatcatcacagcgatcagtttccatacgagcagcttcaaggttcttgggaagagggtcatagcaaaggaatcaacggggatgatgaccagggtataaagaattcagagaataacaacggtgatgatgttcatcatgaagatggtgatcatgaggatgatgatgatcataatgctacaccaccattgacatttattgagaaatggcttttggaggaaacaagtactactgggggtcaaatggaagagatgagccacttgatggagctctctaatatgctttaa

SEQ ID NO: 1076 - protein, 280 aa, Arabidopsis thaliana
MGRPPCCDKIGIKKGPWTPEEDIILVSYIQEHGPGNWRSVPTNTGLLRCSKSCRLRWTNYLRPGIKRGNFTPHEEGMIIHLQALLGNKWASIASYLPQRTDNDIKNYWNTHLKKKLNKSDSDERSRSENIALQTSSTRNTINHRSTYASSTENISRLLEGWMRASPKSSTSTTFLEHKMQNRTNNFIDHHSDQFPYEQLQGSWEEGHSKGINGDDDQGIKNSENNNGDDVHHEDGDHEDDDDHNATPPLTFIEKWLLEETSTTGGQMEEMSHLMELSNML

SEQ ID NO: 1077 - DNA, 1101 bp, Arabidopsis thaliana
  CDS (1)..(1101)
atggggagacattcttgctgttacaaacaaaagctgaggaaagggctttggtctcctgaagaagacgagaagcttcttactcacatcaccaatcacggccatggctgctggagctctgtccctaaactcgctggtttgcagagatgtgggaagagttgtcgactaagatggatcaattacttgagacctgatttaaagagaggagctttttctcctgaagaagagaatctcatcgtcgaacttcatgccgtccttggaaacagatggtcacagattgcgtcaaggcttccgggtagaaccgacaacgagatcaagaatctatggaactcaagcatcaagaagaaactgaaacaaagaggcattgacccaaacacacacaagcccatctctgaagttgagagttttagcgacaaagacaaaccaacaacaagcaacaacaaaagaagcggtaacgatcacaagtctcctagttcctcttctgcgactaaccaagacttcttcctcgaaaggccatctgatttatccgactacttcggatttcagaagcttaacttcaactccaatctaggactctctgttacaactgattcttcactctgctcgatgattccgccgcagtttagccccgggaacatggttggttctgtccttcagacaccagtatgcgtaaagccctcgattagtcttcctcccgacaacaacagttcgagtcctatctccggaggagatcatgtgaaattggctgcaccaaactgggaatttcagacaaacaacaataatacctcaaatttcttcgacaatggcggattctcatggtctatcccaaattcttctacttcttcttcacaagtcaaaccaaatcataacttcgaagaaataaaatggtcagagtatttgaacacaccgttcttcatagggagtactgtacagagtcaaacctctcaaccaatctacatcaaatcagaaacagattacttagccaatgtttcaaacatgacagatccttggagccaaaacgagaacttgggcacaactgaaactagtgacgtgttctccaaggatcttcagagaatggccgtctcttttggtcagtccctttag

SEQ ID NO: 1078 - protein, 366 aa, Arabidopsis thaliana
MGRHSCCYKQKLRKGLWSPEEDEKLLTHITNHGHGCWSSVPKLAGLQRCGKSCRLRWINYLRPDLKRGAFSPEEENLIVELHAVLGNRWSQIASRLPGRTDNEIKNLWNSSIKKKLKQRGIDPNTHKPISEVESFSDKDKPTTSNNKRSGNDHKSPSSSSATNQDFFLERPSDLSDYFGFQKLNFNSNLGLSVTTDSSLCSMIPPQFSPGNMVGSVLQTPVCVKPSISLPPDNNSSSPISGGDHVKLAAPNWEFQTNNNNTSNFFDNGGFSWSIPNSSTSSSQVKPNHNFEEIKWSEYLNTPFFIGSTVQSQTSQPIYIKSETDYLANVSNMTDPWSQNENLGTTETSDVFSKDLQRMAVSFGQSL

SEQ ID NO: 1079 - DNA, 825 bp, Arabidopsis thaliana
  CDS (1)..(825)
atgggcaaaggaagagcaccatgttgtgacaaaaccaaagtgaagagaggaccatggagccatgatgaagacttgaaactcatctctttcattcacaagaatggtcatgagaattggagatctctcccaaagcaagctggattgttgaggtgtggcaagagttgtcgtctgcgatggattaattacctcagacctgatgtgaaacgtggcaatttcagtgcagaggaagaagacaccatcatcaaacttcaccagagctttggtaacaagtggtcgaagattgcttctaagctgcctggaagaacagacaatgagatcaagaatgtgtggcatacacatctcaagaaaagattgagctcggaaactaaccttaatgccgatgaagcgggttcaaaaggttctttgaatgaagaagagaactctcaagagtcatctccaaatgcttcaatgtcttttgctggttccaacatttcaagcaaagacgatgatgcacagataagtcaaatgtttgagcacattctaacttatagcgagtttacggggatgttacaagaggtagacaaaccagagctgctggagatgccttttgatttagatcctgacatttggagtttcatagatggttcagactcattccaacaaccagagaacagagctcttcaagagtctgaagaagatgaagttgataaatggtttaagcacctggaaagcgaactcgggttagaagaaaacgataaccaacaacaacaacaacagcataaacagggaacagaagatgaacattcatcatcactcttggagagttacgagctcctcatacattaa

SEQ ID NO: 1080 - protein, 274 aa, Arabidopsis thaliana
MGKGRAPCCDKTKVKRGPWSHDEDLKLISFIHKNGHENWRSLPKQAGLLRCGKSCRLRWINYLRPDVKRGNFSAEEEDTIIKLHQSFGNKWSKIASKLPGRTDNEIKNVWHTHLKKRLSSETNLNADEAGSKGSLNEEENSQESSPNASMSFAGSNISSKDDDAQISQMFEHILTYSEFTGMLQEVDKPELLEMPFDLDPDIWSFIDGSDSFQQPENRALQESEEDEVDKWFKHLESELGLEENDNQQQQQQHKQGTEDEHSSSLLESYELLIH

SEQ ID NO: 1081 - DNA, 1059 bp, Arabidopsis thaliana
  CDS (1)..(1059)
atggtgcggacaccgtgttgcaaagctgaactagggttaaagaaaggagcttggactcccgaggaagatcagaagcttctctcttaccttaaccgccacggtgaaggtggatggcgaactctccccgaaaaagctggactcaagagatgcggcaaaagctgcagactgagatgggccaattatcttagacctgacatcaaaagaggagagttcactgaagacgaagaacgttcaatcatctctcttcacgcccttcacggcaacaaatggtctgctatagctcgtggactaccaggaagaaccgataacgagatcaagaactactggaacactcatatcaaaaaacgtttgatcaagaaaggtattgatccagttacacacaagggcataacctccggtaccgacaaatcagaaaacctcccggagaaacaaaatgttaatctgacaactagtgaccatgatcttgataatgacaaggcgaagaagaacaacaagaattttggattatcatcggctagtttcttgaacaaagtagctaataggttcggaaagagaatcaatcagagtgttctgtctgagattatcggaagtggaggcccacttgcttctactagtcacactactaatactacaactacaagtgtttccgttgactctgaatcagttaagtcaacgagttcttccttcgcaccaacctcgaatcttctctgccatgggaccgttgcaacaacaccagtttcatcgaactttgacgttgatggtaacgttaatctgacgtgttcttcgtccacgttctctgattcctccgttaacaatcctctaatgtactgcgataatttcgttggtaataacaacgttgatgatgaggatactatcgggttctccacatttctgaatgatgaagatttcatgatgttggaggagtcttgtgttgaaaacactgcgttcatgaaagaacttacgaggtttcttcacgaggatgaaaacgacgtcgttgatgtgacgccggtctatgaacgtcaagacttgtttgacgaaattgataactattttggatga

SEQ ID NO: 1082 - protein, 352 aa, Arabidopsis thaliana
MVRTPCCKAELGLKKGAWTPEEDQKLLSYLNRHGEGGWRTLPEKAGLKRCGKSCRLRWANYLRPDIKRGEFTEDEERSIISLHALHGNKWSAIARGLPGRTDNEIKNYWNTHIKKRLIKKGIDPVTHKGITSGTDKSENLPEKQNVNLTTSDHDLDNDKAKKNNKNFGLSSASFLNKVANRFGKRINQSVLSEIIGSGGPLASTSHTTNTTTTSVSVDSESVKSTSSSFAPTSNLLCHGTVATTPVSSNFDVDGNVNLTCSSSTFSDSSVNNPLMYCDNFVGNNNVDDEDTIGFSTFLNDEDFMMLEESCVENTAFMKELTRFLHEDENDVVDVTPVYERQDLFDEIDNYFG

SEQ ID NO: 1083 - DNA, 945 bp, Arabidopsis thaliana
  CDS (1)..(945)
atgaagagacattcttgttgttacaaacaaaagctgagaaaaggtctttggtctcctgaagaagatgagaaacttctcaattacattaccaaacatggccatggttgctggagttctgtccctaaactcgcaggtctcgagagatgtggaaagagctgtagactcagatggatcaattacttaagacctgatttaaagagaggagctttctcttcagaggaacagaatctcattgtcgagcttcatgctgttcttggaaacagatggtcgcaaattgctgcgaggcttcccgggagaaccgacaacgagataaagaacttgtggaattcgtgcattaagaagaagctgatgaagaaaggcattgaccctattacacataaacccctctccgaggttggtaaagaaacaaacagaagcgacaataacaattccacaagtttttcctcagaaactaatcaagacttgtttgtcaagaaaacgtctgattttgccgagtattctgcgtttcagaaagaagaatccaactctgtttcactcagaaattcgctctcttccatgatcccaacgcaattcaacatcgacgatggttctgtctcaaatgcgggttttgatacacaagtatgcgtgaaaccctcgattattcttcttcctcctccaaacaacacttcaagcactgtctctggacaggatcatgtaaacgtgtcagagcctaattgggaatcaaacagtggaaccacaagccacctcaacaatcccggtatggaagaaatgaaatggtccgaggagtacctaaacgaatcgttattctctacccaagtttacgtgaaatcagagacggatttcaactccaacattgcctttccttggagccaaagccaagcttgtgacgtattccccaaggatcttcagagaatggccttctcttttggtggtcagaccctttag

SEQ ID NO: 1084 - protein, 314 aa, Arabidopsis thaliana
MKRHSCCYKQKLRKGLWSPEEDEKLLNYITKHGHGCWSSVPKLAGLERCGKSCRLRWINYLRPDLKRGAFSSEEQNLIVELHAVLGNRWSQIAARLPGRTDNEIKNLWNSCIKKKLMKKGIDPITHKPLSEVGKETNRSDNNNSTSFSSETNQDLFVKKTSDFAEYSAFQKEESNSVSLRNSLSSMIPTQFNIDDGSVSNAGFDTQVCVKPSIILLPPPNNTSSTVSGQDHVNVSEPNWESNSGTTSHLNNPGMEEMKWSEEYLNESLFSTQVYVKSETDFNSNIAFPWSQSQACDVFPKDLQRMAFSFGGQTL

SEQ ID NO: 1085 - DNA, 849 bp, Arabidopsis thaliana
  CDS (1)..(849)
atggggagacaaccatgctgtgacaaagtagggttgaagaaaggaccatggactgcagaagaggataggaagctcataaacttcatccttaccaatggacaatgttgttggagagctgttcctaagctttctggtcttcttaggtgtggcaagagttgcagacttcgttggactaactatcttagaccagaccttaagagaggtcttctctctgattacgaagagaagatggtcattgatctccattcccagcttggaaacaggtggtcaaagatagcttctcatttaccaggaagaacagacaacgaaatcaagaatcattggaacactcacatcaagaagaagttgaggaaaatggggattgatcctcttacacataaaccactctctatcgtcgaaaaagaagacgaagaacccttaaagaagctacagaataatacagttccttttcaagaaacaatggagcgtcctttagagaacaacatcaagaacatatcaagacttgaagagtctttaggtgatgatcaattcatggagataaatcttgagtatggtgtcgaagatgtccctcttattgaaacagagtctttagaccttatctgcagcaattcaacaatgtcttcatccacgtccacatcttcgcattcttctaatgattcgagtttcttgaaggatttgcagttcccggagttcgagtggtccgactatggtaatagtaataatgataataataatggtgtggacaacattatagagaacaatatgatgagcctgtgggaaattagtgactttagcagtttggatttgctgcttaatgatgagagttcttccacttttgggttgttttga

SEQ ID NO: 1086 - protein, 282 aa, Arabidopsis thaliana
MGRQPCCDKVGLKKGPWTAEEDRKLINFILTNGQCCWRAVPKLSGLLRCGKSCRLRWTNYLRPDLKRGLLSDYEEKMVIDLHSQLGNRWSKIASHLPGRTDNEIKNHWNTHIKKKLRKMGIDPLTHKPLSIVEKEDEEPLKKLQNNTVPFQETMERPLENNIKNISRLEESLGDDQFMEINLEYGVEDVPLIETESLDLICSNSTMSSSTSTSSHSSNDSSFLKDLQFPEFEWSDYGNSNNDNNNGVDNIIENNMMSLWEISDFSSLDLLLNDESSSTFGLF

SEQ ID NO: 1087 - DNA, 1032 bp, Arabidopsis thaliana
  CDS (1)..(1032)
atgatgatgaggaaaccggacattactacgatcagagacaaaggcaagccaaatcatgcatgtggtggtaataacaacaaaccgaagctaagaaaaggactttggtcgcctgatgaagatgagaagctgataagatacatgttgactaatggacaaggatgttggagtgacatcgctagaaatgctggtcttttacgttgtggtaaaagttgtcgccttcgctggatcaattacttgaggcctgatcttaaacgtggatccttctctcctcaggaggaggatctcatcttccatttgcattccattcttggtaacaggtggtctcaaatagctactcggcttccaggtagaacagacaacgagatcaaaaacttttggaactcgacattgaagaagcggcttaagaacaacagcaacaacaatacttcatcaggatcatcacctaacaatagtaatagtaattccttggacccaagagatcaacatgtggatatgggaggcaactcaacttcattgatggatgactatcatcatgatgaaaacatgatgacagtggggaacaccatgcgcatggactcttcctccccattcaatgttggaccaatggttaatagtgtgggcttaaaccaactttatgatcccttgatgatatcagtgccggataacggatatcaccaaatgggaaacacagtgaatgtgttcagcgttaatggtttaggagattatggaaacacaattcttgatccaattagcaagagagtatcagtagaaggtgatgattggttcattcccccctcggagaataccaacgtcattgcttgtagtacaagcaacaacctaaacttacaggcccttgatccttgcttcaatagcaaaaatctttgtcattcagaaagcttcaaggtagggaatgtgttggggatagagaatggttcttgggaaatagaaaaccctaaaatcggagattgggatttggatggtctcatcgataacaactcttcttttcccttccttgatttccaagtcgattga

SEQ ID NO: 1088 - protein, 343 aa, Arabidopsis thaliana
MMMRKPDITTIRDKGKPNHACGGNNNKPKLRKGLWSPDEDEKLIRYMLTNGQGCWSDIARNAGLLRCGKSCRLRWINYLRPDLKRGSFSPQEEDLIFHLHSILGNRWSQIATRLPGRTDNEIKNFWNSTLKKRLKNNSNNNTSSGSSPNNSNSNSLDPRDQHVDMGGNSTSLMDDYHHDENMMTVGNTMRMDSSSPFNVGPMVNSVGLNQLYDPLMISVPDNGYHQMGNTVNVFSVNGLGDYGNTILDPISKRVSVEGDDWFIPPSENTNVIACSTSNNLNLQALDPCFNSKNLCHSESFKVGNVLGIENGSWEIENPKIGDWDLDGLIDNNSSFPFLDFQVD

SEQ ID NO: 1089 - DNA, 858 bp, Arabidopsis thaliana
  CDS (1)..(858)
atgggaagagctccatgctgtgagaagatggggttgaagagaggaccatggacacctgaagaagatcaaatcttggtctcttttatcctcaaccatggacatagtaactggcgagccctccctaagcaagctggtcttttgagatgtggaaaaagctgtagacttaggtggatgaactatttaaagcctgatattaaacgtggcaatttcaccaaagaagaggaagatgctatcatcagcttacaccaaatacttggcaatagatggtcagcgattgcagcaaaactgcctggaagaaccgataacgagatcaagaacgtatggcacactcacttgaagaagagactcgaagattatcaaccagctaaacctaagaccagcaacaaaaagaagggtactaaaccaaaatctgaatccgtaataacgagctcgaacagtactagaagcgaatcggagctagcagattcatcaaacccttctggagaaagcttattttcgacatcgccttcgacaagtgaggtttcttcgatgacactcataagccacgacggctatagcaacgagattaatatggataacaaaccgggagatatcagtactatcgatcaagaatgtgtttctttcgaaacttttggtgcggatatcgatgaaagcttctggaaagagacactgtatagccaagatgaacacaactacgtatcgaatgacctagaagtggctggtttagttgagatacaacaagagtttcaaaacttgggctccgctaataatgagatgatttttgacagtgagatggacttctggttcgatgtattggctagaaccggcggggaacaagatctcttagccgggctctag

SEQ ID NO: 1090 - protein, 285 aa, Arabidopsis thaliana
MGRAPCCEKMGLKRGPWTPEEDQILVSFILNHGHSNWRALPKQAGLLRCGKSCRLRWMNYLKPDIKRGNFTKEEEDAIISLHQILGNRWSAIAAKLPGRTDNEIKNVWHTHLKKRLEDYQPAKPKTSNKKKGTKPKSESVITSSNSTRSESELADSSNPSGESLFSTSPSTSEVSSMTLISHDGYSNEINMDNKPGDISTIDQECVSFETFGADIDESFWKETLYSQDEHNYVSNDLEVAGLVEIQQEFQNLGSANNEMIFDSEMDFWFDVLARTGGEQDLLAGL

SEQ ID NO: 1091 - DNA, 810 bp, Arabidopsis thaliana
  CDS (1)..(810)
atgagtttgtggggagggatgggaggaggatggggaatggtagaagaaggttggagaaaagggccttggactgctgaagaagaccgccttttgatcgattatgtgcagcttcacggtgaagggcgatggaactctgttgcgaggctcgcggggttgaagagaaatgggaaaagctgcaggttaagatgggttaactacctaagaccagacctcaagagaggacaaatcactcctcatgaagaaaccattatccttgagttacatgctaagtggggcaataggtggtccacgattgcacgtagtttaccgggaagaacagacaacgaaatcaagaactattggcgaacccatttcaagaagaagacgaagtctccaactaacagtgcggagaagacaaagaaccgaatcttgaagaggcaacaatttcagcagcaaagacaaatggagttgcagcaagaacaacagttgcttcaattcaatcaaatcgacatgaaaaagatcatgtcgttactagatgacgacaacaacaatggtgataacaccttcagcagtagcagtagtggcgaaagtggagcattatatgtacctcatcagatcacacattcaacaacaacttctggttgtgaaccaaatagtaacgggtattacccggtggttccggtaacaatacctgaggctaatgtgaatgaagataacgctatttgggacggtttatggaatctggattttgaaggacaaggaagttttggtggcgctgcttgtgccccaaggaagcactatttccagaacatggtcattcccttctgttaa

SEQ ID NO: 1092 - protein, 269 aa, Arabidopsis thaliana
MSLWGGMGGGWGMVEEGWRKGPWTAEEDRLLIDYVQLHGEGRWNSVARLAGLKRNGKSCRLRWVNYLRPDLKRGQITPHEETIILELHAKWGNRWSTIARSLPGRTDNEIKNYWRTHFKKKTKSPTNSAEKTKNRILKRQQFQQQRQMELQQEQQLLQFNQIDMKKIMSLLDDDNNNGDNTFSSSSSGESGALYVPHQITHSTTTSGCEPNSNGYYPVVPVTIPEANVNEDNAIWDGLWNLDFEGQGSFGGAACAPRKHYFQNMVIPFC

SEQ ID NO: 1093 - DNA, 843 bp, Arabidopsis thaliana
  CDS (1)..(843)
atgaggaagccagaggtagccattgcagctagtactcaccaagtaaagaagatgaagaagggactttggtctcctgaggaagactcaaagctgatgcaatacatgttaagcaatggacaaggatgttggagtgatgttgcgaaaaacgcaggacttcaaagatgtggcaaaagctgccgtcttcgttggatcaactatcttcgtcctgacctcaagcgtggcgctttctctcctcaagaagaggatctcatcattcgctttcattccatcctcggcaacaggtggtctcagattgcagcacgattgcctggtcggaccgataacgagatcaagaatttctggaactcaacaataaagaaaaggctaaagaagatgtccgatacctccaacttaatcaacaactcatcctcatcacccaacacagcaagcgattcctcttctaattccgcatcttctttggatattaaagacattataggaagcttcatgtccttacaagaacaaggcttcgtcaacccttccttgacccacatacaaaccaacaatccatttccaacgggaaacatgatcagccacccgtgcaatgacgattttaccccttatgtagatggtatctatggagtaaacgcaggggtacaaggggaactctacttcccacctttggaatgtgaagaaggtgattggtacaatgcaaatataaacaaccacttagacgagttgaacactaatggatccggaaacgcacctgagggtatgagaccagtggaagaattttgggaccttgaccagttgatgaacactgaggttccttcgttttacttcaacttcaaacaaagcatatga

SEQ ID NO: 1094 - protein, 280 aa, Arabidopsis thaliana
MRKPEVAIAASTHQVKKMKKGLWSPEEDSKLMQYMLSNGQGCWSDVAKNAGLQRCGKSCRLRWINYLRPDLKRGAFSPQEEDLIIRFHSILGNRWSQIAARLPGRTDNEIKNFWNSTIKKRLKKMSDTSNLINNSSSSPNTASDSSSNSASSLDIKDIIGSFMSLQEQGFVNPSLTHIQTNNPFPTGNMISHPCNDDFTPYVDGIYGVNAGVQGELYFPPLECEEGDWYNANINNHLDELNTNGSGNAPEGMRPVEEFWDLDQLMNTEVPSFYFNFKQSI

SEQ ID NO: 1095 - DNA, 924 bp, Arabidopsis thaliana
  CDS (1)..(924)
atgggtgacaaaggaaggagcttaaagatcaacaagaacatggaggaattcacgaaagtggaagaagaaatggacgtaaggagaggtccatggacagttgaggaagatttagagctcatcaattacattgctagtcatggtgaaggtcgatggaactctctcgctcgttgcgccgaactcaaaaggaccggaaaaagctgcagacttcggtggctgaactatctccgaccagatgtgcgccgtggaaacataaccctcgaagaacaactcttgattcttgaacttcacacacgttggggcaatagatggtctaagattgcacaatatttaccaggaagaacggataacgagatcaaaaactattggagaacacgtgttcaaaagcatgcaaaacagcttaaatgcgacgtgaacagtcaacaatttaaagacaccatgaagtatctttggatgcctcggctcgtagaaaggatccaagccgcgtccatcgggtctgtttccatgtcatcttgcgtcaccacctcctcagatcagttcgtgatcaacaacaacaacaccaacaacgtggataatttggctttaatgagtaaccctaatggttacatcacgccggataattccagcgtggcagtatctcctgtatcagatttgacggagtgtcaagtgagtagtgaagtgtggaagattggtcaggatgagaatttggtggatccaaaaatgacatcgccgaattatatggataatagcagtggactattaaacggagattttacgaagatgcaagatcaaagtgaccttaattggtttgaaaatattaatgggatggtaccaaattattcggacagtttttggaacattggaaatgatgaagacttctggctcttacaacaacatcaacaagtccacgacaatggaagcttctga

SEQ ID NO: 1096 - protein, 307 aa, Arabidopsis thaliana
MGDKGRSLKINKNMEEFTKVEEEMDVRRGPWTVEEDLELINYIASHGEGRWNSLARCAELKRTGKSCRLRWLNYLRPDVRRGNITLEEQLLILELHTRWGNRWSKIAQYLPGRTDNEIKNYWRTRVQKHAKQLKCDVNSQQFKDTMKYLWMPRLVERIQAASIGSVSMSSCVTTSSDQFVINNNNTNNVDNLALMSNPNGYITPDNSSVAVSPVSDLTECQVSSEVWKIGQDENLVDPKMTSPNYMDNSSGLLNGDFTKMQDQSDLNWFENINGMVPNYSDSFWNIGNDEDFWLLQQHQQVHDNGSF

SEQ ID NO: 1097 - DNA, 960 bp, Arabidopsis thaliana
  CDS (1)..(960)
atgggaaaatcttcaagctcggaggaaagtgaagtgaagaaagggccatggactccggaggaagacgagaagctcgtaggctatattcaaacgcacggtcccggcaaatggcgtacccttcccaagaacgccgggttaaaaagatgcgggaagagttgtagattgcgatggacgaattatctaagacccgatatcaagagaggagagttctctcttcaagaggaagaaaccatcattcaacttcatcgtcttcttggaaacaaatggtccgcaattgctattcacttaccaggaagaacagataatgaaatcaaaaactattggaacacacatattaaaaagaaactcttacgaatggggattgatccggtgactcattgtccccgcattaatcttctccagctctcttcgtttcttacctcatcattgtttaaatctatgtcacaaccgatgaatactccatttgatctcactacttcaaatattaatcctgatatcttgaatcatctcactgcctctctcaacaacgttcagaccgaatcataccaaccaaaccaacagcttcaaaacgacctaaacactgaccaaaccactttcaccggtttgctcaactcaacaccacccgttcaatggcaaaacaatggagaatacttgggagattatcacagttataccggtacaggtgatccatctaataacaaagtccctcaagccggaaactactcatcagccgcatttgtatccgaccacattaatgatggtgagaattttaaggccggatggaatttcagttcatcaatgctagcgggaacttcatcgagcagctcgacaccgttgaattcgtcttcgactttttatgtcaatggtggaagcgaagatgatagagagagttttggtagcgacatgttgatgtttcatcatcatcatgatcataataataatgctttgaatctatcataa

SEQ ID NO: 1098 - protein, 319 aa, Arabidopsis thaliana
MGKSSSSEESEVKKGPWTPEEDEKLVGYIQTHGPGKWRTLPKNAGLKRCGKSCRLRWTNYLRPDIKRGEFSLQEEETIIQLHRLLGNKWSAIAIHLPGRTDNEIKNYWNTHIKKKLLRMGIDPVTHCPRINLLQLSSFLTSSLFKSMSQPMNTPFDLTTSNINPDILNHLTASLNNVQTESYQPNQQLQNDLNTDQTTFTGLLNSTPPVQWQNNGEYLGDYHSYTGTGDPSNNKVPQAGNYSSAAFVSDHINDGENFKAGWNFSSSMLAGTSSSSSTPLNSSSTFYVNGGSEDDRESFGSDMLMFHHHHDHNNNALNLS

SEQ ID NO: 1099 - DNA, 888 bp, Arabidopsis thaliana
  CDS (1)..(888)
atggtgaggacaccatgttgcaaagaagaaggaataaagaaaggagcttggactcctgaggaagatcaaaagcttattgcttatcttcacctacatggtgaaggtggatggcgtactctccctgaaaaagctggattgaagagatgtggaaagagttgtagattgagatgggctaattacttaagacccgacattaagagaggagagtttagtcctgaagaagacgacactatcatcaagcttcatgctcttaagggtaacaagtgggccgcaatcgccactagcttggcgggacgaactgacaacgaaataaaaaactattggaacacaaatctcaagaagcggttgaagcaaaaaggcatcgatgcaatcactcacaaaccgatcaattcaaccggtcaaaccggtttcgaaccaaaagtaaataaaccggtatattcatccggttccgctaggcttcttaaccgcgtcgcaagcaaatacgcggttgaattaaaccgggacttactgaccgggatcatcagtggaaactccaccgtcgccgaagattcacaaaactccggcgacgttgattctccgacctccacattgctcaacaaaatggcggcaacatcagttttgatcaacactacgactacatattccggcttctccgacaactgttctttcactgatgaattcaacgaattctttaacaatgaagagatctccgatatttacacgactgtcgataattttgggtttatggaagagttaaagagtattttaagctacggcgatgccagcgccggagttattgaaaattcgccggaggtcaatgtagctgatgcaatggagttcattgattcctggaacgaagatgacaatatggttggagtctttgtctga

SEQ ID NO: 1100 - protein, 295 aa, Arabidopsis thaliana
MVRTPCCKEEGIKKGAWTPEEDQKLIAYLHLHGEGGWRTLPEKAGLKRCGKSCRLRWANYLRPDIKRGEFSPEEDDTIIKLHALKGNKWAAIATSLAGRTDNEIKNYWNTNLKKRLKQKGIDAITHKPINSTGQTGFEPKVNKPVYSSGSARLLNRVASKYAVELNRDLLTGIISGNSTVAEDSQNSGDVDSPTSTLLNKMAATSVLINTTTTYSGFSDNCSFTDEFNEFFNNEEISDIYTTVDNFGFMEELKSILSYGDASAGVIENSPEVNVADAMEFIDSWNEDDNMVGVFV

SEQ ID NO: 1101 - DNA, 852 bp, Arabidopsis thaliana
  CDS (1)..(852)
atgtcaaatataacaaagaagaagtgtaatggaaatgaagagggtgcagagcagaggaaagggccttggacactcgaggaagacactcttctcaccaattacatttcccataacggtgaaggccgatggaatctgctcgctaaatcttctgggctaaagagagcaggaaaaagttgtagattgagatggttgaattaccttaaacccgacataaagcgtgggaatctcactcctcaagaacaacttttaatccttgagctccattctaaatggggtaataggtggtcaaaaatttcgaagtatttaccaggaagaacagacaacgatatcaaaaactactggagaactagagtccagaaacaagcacgccagctcaacatagattccaatagccacaagttcatagaagttgttcgtagcttttggtttccaagactgatcaacgagattaaagacaactcatacaccaacaatattaaagctaatgctcctgatttacttggaccaattttacgagacagcaaagatttgggtttcaacaacatggattgttccacttccatgtcagaagatctcaagaaaacttcacaattcatggatttttctgatcttgaaaccacaatgtccttggaaggatcacgagggggtagtagtcaatgtgtgagtgaggtttatagctccttcccttgcctagaggaggagtacatggtggccgttatgggcagttcagacatttcagcattgcatgattgtcacgtggctgattccaagtacgaggatgatgtgacacaagatctaatgtggaacatggatgacatttggcagtttaacgagtatgcacactttaattag

SEQ ID NO: 1102 - protein, 283 aa, Arabidopsis thaliana
MSNITKKKCNGNEEGAEQRKGPWTLEEDTLLTNYISHNGEGRWNLLAKSSGLKRAGKSCRLRWLNYLKPDIKRGNLTPQEQLLILELHSKWGNRWSKISKYLPGRTDNDIKNYWRTRVQKQARQLNIDSNSHKFIEVVRSFWFPRLINEIKDNSYTNNIKANAPDLLGPILRDSKDLGFNNMDCSTSMSEDLKKTSQFMDFSDLETTMSLEGSRGGSSQCVSEVYSSFPCLEEEYMVAVMGSSDISALHDCHVADSKYEDDVTQDLMWNMDDIWQFNEYAHFN

SEQ ID NO: 1103 - DNA, 732 bp, Arabidopsis thaliana
  CDS (1)..(732)
atgaatataagtagaacagaattcgcaaactgtaaaacccttataaatcataaagaagaagtcgaagaagtcgagaaaaagatggaaatagaaataaggagaggtccatggactgtggaagaagacatgaagctcgtcagttacatttctcttcacggtgaaggaagatggaactccctctctcgttctgctggactgaatagaacggggaaaagttgcagattgcggtggctaaattatctccggccggatatccgccgtggagacatatcccttcaagaacaatttatcatccttgaactccattctcgttggggaaatcggtggtcaaagattgctcaacatttaccgggaagaacagataacgagataaagaattattggagaacacgtgttcaaaagcatgcaaaacttctaaaatgtgacgtgaacagcaagcaattcaaagacaccatcaaacatctctggatgcctcgtctcatcgagagaatcgccgccactcaaagtgtccaatttacctctaaccactactcgcctgagaactccagcgtcgccaccgccacgtcatcaacgtcgtcgtctgaggctgtgagatcgagtttctacggtggtgatcaggtggaatttggaacgttggatcatatgacaaatggtggttattggttcaacggcggagatacgtttgaaactttgtgtagttttgacgagctcaacaagtggctcatacagtag

SEQ ID NO: 1104 - protein, 243 aa, Arabidopsis thaliana
MNISRTEFANCKTLINHKEEVEEVEKKMEIEIRRGPWTVEEDMKLVSYISLHGEGRWNSLSRSAGLNRTGKSCRLRWLNYLRPDIRRGDISLQEQFIILELHSRWGNRWSKIAQHLPGRTDNEIKNYWRTRVQKHAKLLKCDVNSKQFKDTIKHLWMPRLIERIAATQSVQFTSNHYSPENSSVATATSSTSSSEAVRSSFYGGDQVEFGTLDHMTNGGYWFNGGDTFETLCSFDELNKWLIQ

SEQ ID NO: 1105 - DNA, 924 bp, Arabidopsis thaliana
  CDS (1)..(924)
atgagagagaagtgggaaatgaaaagagatgaaatgggacatcgatgttgtggaaaacacaaagtgaagagaggtctttggtctccagaggaagacgagaagcttcttcgttatatcaccactcatggtcatcctagttggagttccgttccaaagcttgccgggttgcagagatgtgggaagagttgcagattaaggtggataaactatctaaggcctgatctgaggagaggttcgtttaatgaggaagaagagcagattatcatcgacgtacatcgtattcttggtaacaaatgggctcagattgctaagcacttacctggacgcactgataatgaagtcaagaacttttggaactcatgcattaagaagaaacttctttctcaaggcttagatccttctacacataatcttatgccttcacacaaaagatcttcttcttcaaacaataataatatccccaagccaaacaaaacgacgtccatcatgaagaaccctactgatcttgatcaatcaaccactgctttttcaatcacaaacatcaatccacccacttccactaaaccaaacaaacttaaatctcctaaccagactacaatcccatctcaaaccgtgatccctatcaatgataacatgtcaagtactcaaaccatgatccctatcaatgatcccatgtcaagtcttttagatgatgagaatatgattcctcactggtcagatgttgatggaatggcgatccacgaagctccgatgttgcctagtgataaggcagtagtgggagtggatgatgatgatctcaacatggacattttgtttaacactccttcttcttctgcttttgatcctgattttgcttccattttctcctctgcaatgtctatcgatttcaatcccatggatgatcttggcagctggaccttttag

SEQ ID NO: 1106 - protein, 307 aa, Arabidopsis thaliana
MREKWEMKRDEMGHRCCGKHKVKRGLWSPEEDEKLLRYITTHGHPSWSSVPKLAGLQRCGKSCRLRWINYLRPDLRRGSFNEEEEQIIIDVHRILGNKWAQIAKHLPGRTDNEVKNFWNSCIKKKLLSQGLDPSTHNLMPSHKRSSSSNNNNIPKPNKTTSIMKNPTDLDQSTTAFSITNINPPTSTKPNKLKSPNQTTIPSQTVIPINDNMSSTQTMIPINDPMSSLLDDENMIPHWSDVDGMAIHEAPMLPSDKAVVGVDDDDLNMDILFNTPSSSAFDPDFASIFSSAMSIDFNPMDDLGSWTF

SEQ ID NO: 1107 - DNA, 801 bp, Arabidopsis thaliana
  CDS (1)..(801)
atggggagacagccatgctgtgacaagctaggggtgaagaaagggccgtggacggtggaggaagataagaagcttataaacttcatactaaccaatggccattgttgctggcgtgctttgccgaagctggccggtctccgtcgctgtggaaagagctgccgcctccggtggactaactatctccggcctgacttaaaacgaggccttctctcgcatgatgaagaacaacttgtcatagatcttcatgctaatctcggcaataagtggtctaagatagcttcaagattacctggaagaacagataacgaaataaaaaaccattggaatactcatatcaagaagaaacttcttaagatgggaatcgatcctatgacccatcaacccctaaatcaagaaccttctaatatcgataattccaaaaccattccgtccaatccagacgatgtctcagtggaaccaaagacaactaacacgaaatacgtggagataagtgtcacgacaacagaagaagaaagtagtagcacggttactgatcaaaacagttcgatggataatgaaaatcatctaattgacaacatttatgatgatgatgaattgtttagttacttatggtccgacgaaactactaaagatgaggcctcttggagtgatagtaactttggtgttggtggaacattatatgaccacaatatctccggcgccgatgcagattttccgatatggtcaccggaaagaatcaatgacgagaagatgtttttggattattgtcaagactttggtgttcatgattttgggttttga

SEQ ID NO: 1108 - protein, 266 aa, Arabidopsis thaliana
MGRQPCCDKLGVKKGPWTVEEDKKLINFILTNGHCCWRALPKLAGLRRCGKSCRLRWTNYLRPDLKRGLLSHDEEQLVIDLHANLGNKWSKIASRLPGRTDNEIKNHWNTHIKKKLLKMGIDPMTHQPLNQEPSNIDNSKTIPSNPDDVSVEPKTTNTKYVEISVTTTEEESSSTVTDQNSSMDNENHLIDNIYDDDELFSYLWSDETTKDEASWSDSNFGVGGTLYDHNISGADADFPIWSPERINDEKMFLDYCQDFGVHDFGF

SEQ ID NO: 1109 - DNA, 1077 bp, Oryza sativa subsp
  CDS (1)..(1077)
atgtcgcagaggagagttgcagggcccatgggagtgatgagcaagcagcagcaggaggccatggcagaggagatgatggagctgaggcgaggaccatggaccctcgaggaagacaacctcctcatgaactacattgcctgccatggcgaaggccgctggaatctcctcgcccgctgctccgggttgaagaggacgggcaagagctgcaggctaagatggctcaactacctcaagcctgacataaagcgcgggaatctgacgccggaggagcagctgctcattcttgagctccattccaagtggggaaacaggtggtcgaggatagcgcagcatctgccggggaggacggacaacgagatcaagaactactggaggacgagggtgcagaagcaggccaggcagctcaaggtcgacgccaacagcaccgtcttccgcgacgccgtccgctgctattggatgcctcgcctcctcgagaagatggccggagcagccaccgaccccactccgccgccgccaccgccactccaccaccacgccgccatggccaccgcctcctcctcgccgttcgacttcgacacccacctgcagcaagcagaagcagcaacggcgtgcgtcgtcccgaacaacgtgtaccaccaccacatcgacccgagcccgagcacgtcgacgtcggccggctcgacggcggccgcggcggcgttccagccgctgccctgcttctccgagctgagatgggaccagcagatgcagtcctccggcgagctcgacgacggcgccgccggcttgttcgtcgactcggcgtcggcgctgggaagcctcagcctcgacgggctggaccttggtccggccgagtactactccgactcgacgctcctcgactacctcaactccagctgcaccggcagcgccatgatgacgatgatgaccgcctccggcaacgccggcagctacaactactgcggcggcgccatggacggcggcgacacgtggaggtccgacgagctaatggatgagttgttccatcatatcgatcaagatagaagtactagtgatcgatcaagcaaaaaccaaaagtag

SEQ ID NO: 1110 - protein, 358 aa, Oryza sativa subsp
MSQRRVAGPMGVMSKQQQEAMAEEMMELRRGPWTLEEDNLLMNYIACHGEGRWNLLARCSGLKRTGKSCRLRWLNYLKPDIKRGNLTPEEQLLILELHSKWGNRWSRIAQHLPGRTDNEIKNYWRTRVQKQARQLKVDANSTVFRDAVRCYWMPRLLEKMAGAATDPTPPPPPPLHHHAAMATASSSPFDFDTHLQQAEAATACVVPNNVYHHHIDPSPSTSTSAGSTAAAAAFQPLPCFSELRWDQQMQSSGELDDGAAGLFVDSASALGSLSLDGLDLGPAEYYSDSTLLDYLNSSCTGSAMMTMMTASGNAGSYNYCGGAMDGGDTWRSDELMDELFHHIDQDRSTSDRSSKNQK

SEQ ID NO: 1111 - DNA, 1035 bp, Oryza sativa subsp
  CDS (1)..(1035)
atggggaggggacgagcgccgtgctgcgccaaggtggggctgaacaggggttcgtggacgccgcaggaggacatgcggctcatcgcctacatccagaagcacggccacgccaactggcgagccctccccaagcaggccggattgctgcggtgcggcaagagctgccgcctccggtggatcaactacctgcgccccgacctgaagcgcggcaacttcaccgccgacgaggaggacaccatcatcaagctgcacggcctactcgggaacaagtggtccaagatcgcgtcgtgcctgcccgggaggacggacaacgagatcaagaacgtgtggaacacccacctgaagaagagggtgtcgcagagagagaagccgggtgacaccaagaagaagggcaaggccgcggacgccagcgacgacgccgacgcgcattccccgtcgtcgtcggcgtcctcctcgacgacgacggtggccaataacaacaacagcggcgacacggccggcgagcagtgcggcacgagcaaggagcccgagaacgtcgacgtgtccttcttcgagcaagacatcgacatctcggacatgctggtggacgcgcccacggaggcgccgctggtcgcggcgccaatgccgccgtccccgtgctcgtcgtcctccctgacgacgacgacgtgcgtcggcgccgtgtcggacgagctgctcgacctgccggagatcgacatcgagccggatatatggagcatcatcgacggctacggcggcgatgagcccgtcgtctccggcgccgacggcgatgcaacagtgccatgtaccgccagcccgggagaggagggagcagagtggtgggtagagaatttggagaaggagctcggcctgtgggggcccatggacgagtccctggcccatccggacccacccggacaggtttgttacccgggcccactcacggaaacagagggggacccagtctccacctacttccagtccgggcccaccgcctctccgctccaggagatcgcatcacccgccgttctctcatga

SEQ ID NO: 1112 - protein, 344 aa, Oryza sativa subsp
MGRGRAPCCAKVGLNRGSWTPQEDMRLIAYIQKHGHANWRALPKQAGLLRCGKSCRLRWINYLRPDLKRGNFTADEEDTIIKLHGLLGNKWSKIASCLPGRTDNEIKNVWNTHLKKRVSQREKPGDTKKKGKAADASDDADAHSPSSSASSSTTTVANNNNSGDTAGEQCGTSKEPENVDVSFFEQDIDISDMLVDAPTEAPLVAAPMPPSPCSSSSLTTTTCVGAVSDELLDLPEIDIEPDIWSIIDGYGGDEPVVSGADGDATVPCTASPGEEGAEWWVENLEKELGLWGPMDESLAHPDPPGQVCYPGPLTETEGDPVSTYFQSGPTASPLQEIASPAVLS

SEQ ID NO: 1113 - DNA, 750 bp, Oryza sativa subsp
  CDS (1)..(750)
atgcagtatacggtggaagggagcggcggcggcggcgtgcagacggtggaggcggcggtccgcaaggggccctggacgatggaggaggacctcagcctcgtcaactacatcgccgccaacggcgagggcgcgtggaacaccctcgcccgcgccgccgggcttaaccgtaccgggaagagctgccggctgcggtggctgaactacctgcgacccgacgtgcggcgcggcaacatcacgccggaggagcacacgctcatcgtcgagctacaggccagatggggcaacaggtggtccaagattgcaaggtaccttcctggccggaccgacaacgagatcaagaacttctggaggaccaagatacagaagaagcacaggaaaagcactgacggaatttacgcgacgacgacgagcgaaagcatcatgcctgcggctacagtgcaccagaacacggtggccgaggaccaaggcagcagcagcgtctccggccggaccaccaccgccaccgtcgccgtcacgcaggagtacgccactgaggcgccgccgccgagcggcatgagtagtgataactacttggaccagctgcagccaggctacgcgagctcaatccatggaggacaagatggcggtgctgctgccgccgccgctggtgacgtcgtcgtctccgacgagttcttggcagcgtcgagcgacaacttctgggccctcgaggatttgtggcccacggtgcagtctctccacggcaattgctga

SEQ ID NO: 1114 - protein, 249 aa, Oryza sativa subsp
MQYTVEGSGGGGVQTVEAAVRKGPWTMEEDLSLVNYIAANGEGAWNTLARAAGLNRTGKSCRLRWLNYLRPDVRRGNITPEEHTLIVELQARWGNRWSKIARYLPGRTDNEIKNFWRTKIQKKHRKSTDGIYATTTSESIMPAATVHQNTVAEDQGSSSVSGRTTTATVAVTQEYATEAPPPSGMSSDNYLDQLQPGYASSIHGGQDGGAAAAAAGDVVVSDEFLAASSDNFWALEDLWPTVQSLHGNC

SEQ ID NO: 1115 - DNA, 789 bp, Oryza sativa subsp
  CDS (1)..(789)
atggggaggcagccgtgctgtgacaagaagaaggtgaagagggggccatggacggcagaggaggacaagaagctcatcagtttcatcctgacacatggccgctgctgctggcgagcagtgcctaagttggcagggctgctgcgctgtggcaagagctgccggttgcggtggaccaactatctccgccctgacctcaagcgtggcctcctcaccgcagacgaggagcagcttgttgtggacctccatgccaagcttggtaacagatggtccaagatcgccgccaaattaccagggagaacagacaacgagatcaagaaccattggaacacgcacatcaagaagaagctcatcaagatgggcatcgacccagccacacatcagcctctgcccaacaccaaggtggttagccaaacaagaacctccacgctgtccactgccacaaccgaatcagccaagtcaaatggcatggcatatccgttcgatcccgagggaggctgcagcagggacatgtcagtgcccacagactcgatggagcagtcaagcaggaacaccagcagtcatggcctggacccattggtgaactggctgttggaggcagagcttccagctgacgagccatggctaaattttactagcagcaatgaagatgacttcagtggcatcgttaagcagtcagcatgggatggaagcacaacagactggctgcttgactaccaagacttcagcatggacgattcgagcttgattgatggtgcaagggttcagaattcagatggattgaacttttag

SEQ ID NO: 1116 - protein, 262 aa, Oryza sativa subsp
MGRQPCCDKKKVKRGPWTAEEDKKLISFILTHGRCCWRAVPKLAGLLRCGKSCRLRWTNYLRPDLKRGLLTADEEQLVVDLHAKLGNRWSKIAAKLPGRTDNEIKNHWNTHIKKKLIKMGIDPATHQPLPNTKVVSQTRTSTLSTATTESAKSNGMAYPFDPEGGCSRDMSVPTDSMEQSSRNTSSHGLDPLVNWLLEAELPADEPWLNFTSSNEDDFSGIVKQSAWDGSTTDWLLDYQDFSMDDSSLIDGARVQNSDGLNF

SEQ ID NO: 1117 - DNA, 903 bp, Oryza sativa subsp
  CDS (1)..(903)
atggcagcatcgcagaggagcaggagcacggcggcgcagctcgacgtcgacgaccaggcggcagccgatcagctgatgacgatgatgcggcggccagcggcggtactacaggatgaggccgccgccgaggaggaggcctccgcggcggcagcggacctgcagctggagctccggcgagggccgtggaccgtcgacgaggacctcaccctcgtcaactacatcgccgaccacggcgagggacgctggaactccctcgcccgcgccgccgggttgaagaggacggggaagagctgcaggctgcggtggctgaactacctccggcccgacgtgaagcgcggcaacttcaccgccgacgagcagctgctcatcctcgacctccactcccgatggggcaaccggtggtcaaagatagcgcaacatttgccagggaggaccgacaacgagatcaagaactactggaggacccgagtgcaaaagcatgccaagcagctgaactgcgatgccaacagtgctaggttcaaggatgctatgagatatctatggatgcctcgcctcgccgatgcaagccagctcggtgatcaccatgggtataatagtaccactgccatgggcgatgctcatgggatgccagtgatgacatcgtcgtcgtcggactcgttcgcgacatcagagtcatacgatgggggcctttatgcaaatgtgcaggacaatgagatggtgaatggtggggactactggatgcaggcagcaaataaagggttatgtagtaattatgagtcagagcaacttcatcctcatgagcatagccagtttcaggatccagatcttgttggttgggttcagggcttttctgagggcctttccgagaatttttggagcttggaggacatttggaagatgtag

SEQ ID NO: 1118 - protein, 300 aa, Oryza sativa subsp
MAASQRSRSTAAQLDVDDQAAADQLMTMMRRPAAVLQDEAAAEEEASAAAADLQLELRRGPWTVDEDLTLVNYIADHGEGRWNSLARAAGLKRTGKSCRLRWLNYLRPDVKRGNFTADEQLLILDLHSRWGNRWSKIAQHLPGRTDNEIKNYWRTRVQKHAKQLNCDANSARFKDAMRYLWMPRLADASQLGDHHGYNSTTAMGDAHGMPVMTSSSSDSFATSESYDGGLYANVQDNEMVNGGDYWMQAANKGLCSNYESEQLHPHEHSQFQDPDLVGWVQGFSEGLSENFWSLEDIWKM

SEQ ID NO: 1119 - DNA, 1077 bp, Oryza sativa subsp
  CDS (1)..(1077)
atgtcgcagaggagagttgcagggcccatgggagtgatgagcaagcagcagcaggaggccatggcagaggagatgatggagctgaggcgaggaccatggaccctcgaggaagacaacctcctcatgaactacattgcctgccatggcgaaggccgctggaatctcctcgcccgctgctccgggttgaagaggacgggcaagagctgcaggctaagatggctcaactacctcaagcctgacataaagcgcgggaatctgacgccggaggagcagctgctcattcttgagctccattccaggtggggaaacaggtggtcgaggatagcgcagcatctgccggggaggacggacaacgagatcaagaactactggaggacgagggtgcagaagcaggccaggcagctcaaggtcgacgccaacagcaccgtcttccgcgacgccgtccgctgctattggatgcctcgcctcctcgagaagatggccggagcagccaccgaccccactccgccgccgccaccgccactccaccaccacgccgccatggccaccgcctcctcctcgccgttcgacttcgacacccacctgcagcaagcagaagcagcaacggcgtgcgtcgtcccgaacaacgtgtaccaccaccacatcgacccgagcccgagcacgtcgacgtcggccggctcgacggcggccgcggcggcgttccagccgctgccctgcttctccgagctgagatgggaccagcagatgcagtcctccggcgagctcgacgacggcgccgccggcgtgttcgtcgactcggcgtcggcgctgggaagcctcagcctcgacgggctggaccttggtccggccgagtactactccgactcgacgctcctcgactacctcaactccagctgcaccggcagcgccatgatgacgatgatgaccgcctccggcaacgccggcagctacaactactgcggcggcgccatggacggcggcgacacgtggaggtccgacgagctaatggatgagttgttccatcatatcgatcaagatagaagtactagtgatcgatcaagcaaaaatcaaaagtag

SEQ ID NO: 1120 - protein, 358 aa, Oryza sativa subsp
MSQRRVAGPMGVMSKQQQEAMAEEMMELRRGPWTLEEDNLLMNYIACHGEGRWNLLARCSGLKRTGKSCRLRWLNYLKPDIKRGNLTPEEQLLILELHSRWGNRWSRIAQHLPGRTDNEIKNYWRTRVQKQARQLKVDANSTVFRDAVRCYWMPRLLEKMAGAATDPTPPPPPPLHHHAAMATASSSPFDFDTHLQQAEAATACVVPNNVYHHHIDPSPSTSTSAGSTAAAAAFQPLPCFSELRWDQQMQSSGELDDGAAGVFVDSASALGSLSLDGLDLGPAEYYSDSTLLDYLNSSCTGSAMMTMMTASGNAGSYNYCGGAMDGGDTWRSDELMDELFHHIDQDRSTSDRSSKNQK

SEQ ID NO: 1121 - DNA, 846 bp, Oryza sativa subsp
  CDS (1)..(846)
atggcggcggcggaagtgcagtcggctgccgggtgggggaggcagctgcagcaggacggcggcgggtggaggaaagggccgtggacgagccaggaggacgcgctgctcgtcgagcatgtcaggcagcacggcgaaggccggtggaattctgtctccaagcttacaggtctgaagagaagcggcaagagctgcaggctacgatgggttaactacctgaggcctgatctgaagagaggcaagatcactccccaggaggagagcatcatcgtccagctccatgccttgtggggcaacaggtggtcgacgatcgcgcgtagcctcccgggcaggacggacaacgagatcaagaactactggaggacgcacttcaagaagggcaagccgtccaagaacatcgagcgcgccagggccaggttcctgaagcagcgccgcgagatgcagcagagccagcagctgcagcagccgacgctaatgccgacgccgacgccgcagagcaaggacatcatcgttgccgagaccggtgacgcgcgcaccgactacgacgcgtgcggcgccgcagcggctgtggcgccgtcgtcgtcgtcgtcgtctttgtcgatggcgggccgcgaggcggaggacttgatcatgcaccaggacgcgatggacgacctcatgatgtgccccgccatgtcctaccacctcatcctccacggcgccgccgtcgccggccatcagctgagcgacggcggcggcagctgctgcgcctctaccagcgaggactacggctccagcgaggacgacggcgccacctggggcagcctgtggaacctcgacggcgccgccggagcatgcacgctgtggtag

SEQ ID NO: 1122 - protein, 281 aa, Oryza sativa subsp
MAAAEVQSAAGWGRQLQQDGGGWRKGPWTSQEDALLVEHVRQHGEGRWNSVSKLTGLKRSGKSCRLRWVNYLRPDLKRGKITPQEESIIVQLHALWGNRWSTIARSLPGRTDNEIKNYWRTHFKKGKPSKNIERARARFLKQRREMQQSQQLQQPTLMPTPTPQSKDIIVAETGDARTDYDACGAAAAVAPSSSSSSLSMAGREAEDLIMHQDAMDDLMMCPAMSYHLILHGAAVAGHQLSDGGGSCCASTSEDYGSSEDDGATWGSLWNLDGAAGACTLW

SEQ ID NO: 1123 - DNA, 861 bp, Vitis vinifera
  CDS (1)..(861)
atgggcagagcaccttgttgttctaaggttggtttgcatagaggttcatggactgccagagaagacacattgctgaccaagtatattcaggctcatggtgaaggccactggagatctctccccaagaaagctggtcttttgagatgtgggaagagttgcaggctgagatggatgaattatctaaggccggatatcaaaagaggaaacatcacgccggacgaagacgacctaattatcagactgcattcacttttgggaaatcggtggtctctcatcgcaggtaggcttccaggtcgaaccgataatgagatcaagaactactggaacacccatctgagtaagaagctaagaagtcaaggaacagaccccaatacccacaagaaaatgacagagcctcctgagcccaagaggaggaagaacacaagaacaagaaccaacaatggcggaggcagcaagagggtcaagatcagcaaggaccaagaaaattccaatcacaaagtccatctccccaaaccggttagagtcacctccttaatctccatgtcgaggaacaacagctttgaatctaatacagtcagcgggggctcgggctcgagttcaggaggaaatggagaaacgcttccatggcctagtttcagagacatccgggacgacaaggttattggggttgacggggttgacttcttcatcggagatgatcaaggtcaagacctggtcgccagctccgatccagaatcacaatcccacatgccaccaactgacaactctctggagaaactgtatgaagagtatctgcaactgcttgagcgagaagacactcaagttcagcttgactccttcgccgaatcactactcatttaa

SEQ ID NO: 1124 - protein, 286 aa, Vitis vinifera
MGRAPCCSKVGLHRGSWTAREDTLLTKYIQAHGEGHWRSLPKKAGLLRCGKSCRLRWMNYLRPDIKRGNITPDEDDLIIRLHSLLGNRWSLIAGRLPGRTDNEIKNYWNTHLSKKLRSQGTDPNTHKKMTEPPEPKRRKNTRTRTNNGGGSKRVKISKDQENSNHKVHLPKPVRVTSLISMSRNNSFESNTVSGGSGSSSGGNGETLPWPSFRDIRDDKVIGVDGVDFFIGDDQGQDLVASSDPESQSHMPPTDNSLEKLYEEYLQLLEREDTQVQLDSFAESLLI

SEQ ID NO: 1125 - DNA, 894 bp, Daucus carota
  CDS (1)..(894)
atggggaggagtccttgttgttcaaaagtggggttgaacaagggagcgtggaccagtggggaagacaagatcctcgccgattttattcacctccacggcgaggggcggtggcgaagtctccccaagagagcgggtttgaagaggtgcgggaagagctgcaggctgagatggctcaactatttgagaccggatatcaagagaggcaacatttccagtgatgaacaagacctcattattcgccttcaccgcctacttgggaacagatggtctctcatagctgggaggctccctggccgaacagacaatgaaatcaagaactactggaacacaactctcagaaaaaagactcatgtcaaccaaactacatctacttctgcatctcctactccaaagtcctccaggaccaaacaatgcagcacagagaagaaaaggaagaagaaagacaaaaaaaacgtggagtcaactcaccaaaatgtggcctcctcgcaagtcactcatcactcactaatcactccacccaaatcagatcaccatcccatattaatggacacaactagcccagagccactagccgcacaaaatttaatgccaaaacaggatagcagcagtaatggccagtcattggatctcgtgccagacgttgactccagtgacatgggattcaaggaacttcttgactttgatttctcgggtttattagacactaataatgatgatcagagggactctaagattgaaactacttcactcatttctttgaatgagaatcctttaatggatgttttggtggatgagttttggagtgcagttgaggagccaaatctggctgcttgtaatccttttaaccaatattttgcttctgaatcagactttttaggagattggttagcttaa

SEQ ID NO: 1126 - protein, 297 aa, Daucus carota
MGRSPCCSKVGLNKGAWTSGEDKILADFIHLHGEGRWRSLPKRAGLKRCGKSCRLRWLNYLRPDIKRGNISSDEQDLIIRLHRLLGNRWSLIAGRLPGRTDNEIKNYWNTTLRKKTHVNQTTSTSASPTPKSSRTKQCSTEKKRKKKDKKNVESTHQNVASSQVTHHSLITPPKSDHHPILMDTTSPEPLAAQNLMPKQDSSSNGQSLDLVPDVDSSDMGFKELLDFDFSGLLDTNNDDQRDSKIETTSLISLNENPLMDVLVDEFWSAVEEPNLAACNPFNQYFASESDFLGDWLA

SEQ ID NO: 1127 - DNA, 795 bp, Medicago truncatula
  CDS (1)..(795)
atgagaggtatggatattaaggttcagaaaggtgggtctgcaaaggaaaatgagacaggggtaagaaaaggtccttggacgttagaagaggacaccattctggttgattacattacaatacacggtgaaggtcactggaatacccttgcatcttctgcaggcatgagaagtggtaaaagttgtagattaaggtggttaaactacttgcgtcccgatttacgtcgtggaaatatcacacttcaagaacagatattgattcttgacctccactctcgctggggcaataggtggtcgaaaattgcacaacatctaccaggtagaacggacaatgaaataaaaaactattggagaacaagagtgatcaaacaagcaaagcaactcaaatgtgatgtaaacagcaaacagttcagagatgtattgcgtcacgtttggatgccccgattactcgaacaaattcaacccgcaccacaattccccgacacgaataatccaaacggatcacatatccttcttcaccaaaacacattgcaaagttcagtttcaggaatcagtggtatttcctcggactcttcatcagtagaattccaagttgcttcaaattcggaccaaaatgattcttcggagcttttgggccatgaaggttcaaaactatggtcaagtttcaataaccagcaggtttcagaacaggagaagagcggtgcttgtgatggtgactcgttgtggaacgatgagaacatgtggtttttgcaacaactttatgaagatgttgaaataaaatacaatttacttgcgtga

SEQ ID NO: 1128 - protein, 264 aa, Medicago truncatula
MRGMDIKVQKGGSAKENETGVRKGPWTLEEDTILVDYITIHGEGHWNTLASSAGMRSGKSCRLRWLNYLRPDLRRGNITLQEQILILDLHSRWGNRWSKIAQHLPGRTDNEIKNYWRTRVIKQAKQLKCDVNSKQFRDVLRHVWMPRLLEQIQPAPQFPDTNNPNGSHILLHQNTLQSSVSGISGISSDSSSVEFQVASNSDQNDSSELLGHEGSKLWSSFNNQQVSEQEKSGACDGDSLWNDENMWFLQQLYEDVEIKYNLLA

SEQ ID NO: 1129 - DNA, 735 bp, Solenostemon scutellarioides
  CDS (1)..(735)
atgatgggaaggtctccgtgctgtgagaaagctcacacaaacaaaggggcatggactaaagaagaagacgatcggctcatctcctacatccgcgctcacggcgagggatgctggcggtctcttcctaaggcagctggcctcctccgctgcggcaagagctgccgcctgcgctggatcaactacttgcgcccggatctcaagagaggcaacttcacagaagacgaagacgaactcatcatcaaactccacagccttctaggcaacaaatggtctcttatagccggaaggctgccggggcgaaccgacaacgagatcaagaactactggaacactcacatcagaagaaaactggtgagccaaggaatcgatccaacgacgcatcgccccatcaatgagcctgctgcagctgcagctgcaccacaggaggaagcagtatcgaaaaccatttccttctcccaatcggagagaatcgacaagtgcccggatttgaatcttgatctcagaatcagccccccatcatcatcccagcagcaaaatcaagaaccgttgaaaacaggtacgagtagtggtagtagtagtaccttgtgcttcgcatgtagcatcggcatccaaaacagcaaggattgcagctgcagagacggaatcatgatcagtgtgagtgggagcagctctggatatgattttctggggttgaaagcgggagttttggattacagaagcttggagatgaaatga

SEQ ID NO: 1130 - protein, 244 aa, Solenostemon scutellarioides
MMGRSPCCEKAHTNKGAWTKEEDDRLISYIRAHGEGCWRSLPKAAGLLRCGKSCRLRWINYLRPDLKRGNFTEDEDELIIKLHSLLGNKWSLIAGRLPGRTDNEIKNYWNTHIRRKLVSQGIDPTTHRPINEPAAAAAAPQEEAVSKTISFSQSERIDKCPDLNLDLRISPPSSSQQQNQEPLKTGTSSGSSSTLCFACSIGIQNSKDCSCRDGIMISVSGSSSGYDFLGLKAGVLDYRSLEMK

SEQ ID NO: 1131 - DNA, 750 bp, Vitis vinifera
  CDS (1)..(750)
atggccacagttgcaaagaggattaacaactctagtgaagaaattgagcttcgaagaggaccatggactcttgaagaagacactcttctcatccattacattgcttgccatggtgaaggccgttggaacctgttagctaaatgtgcaggattgaagaggactggaaagagttgcagattaagatggctgaactatttaaaaccagacatcaagcgtggaaaccttactccacaagagcagctcttgatccttgaactccattcgaagtggggtaataggtggtcaagaattgcacaacatcttcctggaagaactgacaacgagatcaagaactactggagaacaagggtgcaaaaacaggcaaggcaactcaagatcgagtctgatagcaagaggttcatcgatgcggttcggcgtttctggatgcccagattgctccaaaagatggagcaagcctctacttcttcaactgctgctgatactgtgactaccaacactactaacaccactaccgtgaattcccagagctcaactattcctgctctgctacccaaccagatcactgtctcatcatctcccccacaaagctcagtcactagcccaagtatttctacatcagattccatgaaaattccactgctgccagaaatttcggaacacccaacaagtccttctcaagctattggcaacactgtccacaacaaccccgttataaatgattgttcctatgtggaacagcagtgtctatga

SEQ ID NO: 1132 - protein, 249 aa, Vitis vinifera
MATVAKRINNSSEEIELRRGPWTLEEDTLLIHYIACHGEGRWNLLAKCAGLKRTGKSCRLRWLNYLKPDIKRGNLTPQEQLLILELHSKWGNRWSRIAQHLPGRTDNEIKNYWRTRVQKQARQLKIESDSKRFIDAVRRFWMPRLLQKMEQASTSSTAADTVTTNTTNTTTVNSQSSTIPALLPNQITVSSSPPQSSVTSPSISTSDSMKIPLLPEISEHPTSPSQAIGNTVHNNPVINDCSYVEQQCL

SEQ ID NO: 1133 - DNA, 921 bp, Vitis vinifera
  CDS (1)..(921)
  misc_feature (517)..(517): r is g or a
  misc_feature (549)..(549): k is g or t
atggatgttaatggtagaggtggtagctccaccgttttgagtgaagaagagatggacctgaggagaggcccatggactgtggaagaagatcttacactcgtcaattacattgctacccagggcgaaggccgctggaactctctcgctcgctgtgcaggcctgaaaagaactggaaaaagctgcagattgaggtggctgaactatctccgcccagatgttcgacgtggaaacatcactctcgaagaacaacttctgattcttgaacttcactcccgctggggaaatcggtggtcgaagatagcacagcacttgccgggcagaacagacaatgagattaaaaactactggagaacccgggttcagaagcatgccaagcagctgaaatgcgacgttaacagcaagcaattcaaggacaccatgcgttatctatggatgccaaggttggtggagaggattcaggctgcggcggcggccacatcaggatcatctccggccgccgtggccgcccaccagttcrgtggtagctgcgatatcgtcgccggaagtgckgcggttcctcagatggcagccgggggcgccgatttctacggtgggcaagtcagcaccggttacaccccggagaattctagcacagcggcttcatcggactcgtttggagcgcaggtttcacccgtctcggacctgacagagatttacaatttcccggtcagtgacaaccaaaacccggattttttccagaccggccaggttgggtacacagattcgctaatcagcccctcgggttacttcaaccaaggattggatttccaatccatggagccaaacacccagtggtacgaaggcggcgacacggccacggcggacaatttgtggaatgtggaagacatttggtccgtacagacgcagttcaccaacatctga

SEQ ID NO: 1134 - protein, 306 aa, Vitis vinifera
  misc_feature (173)..(173): The Xaa at location 173 stands for Gly, or Ser.
MDVNGRGGSSTVLSEEEMDLRRGPWTVEEDLTLVNYIATQGEGRWNSLARCAGLKRTGKSCRLRWLNYLRPDVRRGNITLEEQLLILELHSRWGNRWSKIAQHLPGRTDNEIKNYWRTRVQKHAKQLKCDVNSKQFKDTMRYLWMPRLVERIQAAAAATSGSSPAAVAAHQFXGSCDIVAGSAAVPQMAAGGADFYGGQVSTGYTPENSSTAASSDSFGAQVSPVSDLTEIYNFPVSDNQNPDFFQTGQVGYTDSLISPSGYFNQGLDFQSMEPNTQWYEGGDTATADNLWNVEDIWSVQTQFTNI

SEQ ID NO: 1135 - DNA, 771 bp, Vitis vinifera
  CDS (1)..(771)
atggcagggcacttgggttgggggatcatagaagaagggtggaggaagggcccttggactgctgaagaggacagattgctcactgagtatgttaaattgcatggtgaaggaagatggaattctgtggctagacttgcaggactgagaaggaatgggaagagctgcagactgaggtgggtgaattacttgaggccagacctcaagcgggggcagataaccccacatgaagagaacataattctagagctgcatgctaggtgggggaacagatggtcgaccattgctagaagcttgcccggaagaacagacaatgaaatcaagaactactggaggacccatttcaagaagaagggaaaactcccttccgacaagtctgagaaggcgaaaacccgcctcctaagaaagcaacaattttatcagcagcagcagcaacagcaacagcaacagcagcagcagcaacaacaacaactgaatcaactggacctgaaaaggatcatggctttactcgaccaacccgacattggagacacaccaatggcccaagcgaggcaagacttgggcagttgtatttacagtacacatcatgcagctgaagagcatggctatgtgcatcttcccatccccaacgcagatgtgtctacccaagaatcctcaagtgaggacatgctgtgggatggtctgtggaacttggatgatttccatggcaatctgagtgcagcctgtgcagcaagcaaaactagtttgcaccatctggttgctcccttttactga

SEQ ID NO: 1136 - protein, 256 aa, Vitis vinifera
MAGHLGWGIIEEGWRKGPWTAEEDRLLTEYVKLHGEGRWNSVARLAGLRRNGKSCRLRWVNYLRPDLKRGQITPHEENIILELHARWGNRWSTIARSLPGRTDNEIKNYWRTHFKKKGKLPSDKSEKAKTRLLRKQQFYQQQQQQQQQQQQQQQQQLNQLDLKRIMALLDQPDIGDTPMAQARQDLGSCIYSTHHAAEEHGYVHLPIPNADVSTQESSSEDMLWDGLWNLDDFHGNLSAACAASKTSLHHLVAPFY

SEQ ID NO: 1137 - DNA, 732 bp, Vitis vinifera
  CDS (1)..(732)
  misc_feature (595)..(595): m is a or c
atgaacatggacctgaggaaaggtccatggacggctgaagaggacacgctgctcaacaattacattaccatccacggcgaaggccgctggaactccctagctcgctgcgcaggtttgaagagaactgggaagagttgcaggctgagatggttgaactacttgcgacctaatgtcaagcgcggaaacattacgctgcaagaacagctgcttatcctcgagctccattcacgctatggaaacaggtggtccaaaatagcccaacacctgcctgggaggacagacaatgagatcaaaaactactggagaacaagggttcaaaagcaggcaaagcagctcaaatgcgatgttaacagcaagcaattcagagacaccatgcgctatgtgtggatgccacgcttggtcgagcgaatcaaagctgccggaggcgattccacccccaccgcccccgccacctacggtcaccatatgtcaagtcaaattctggacatgcccagaaacggcgagtttgggttggggtactcagacccagaggggtcggagacccaggtgtcgccggtatcagacatgacagactactacgatttctctggcgggmactgctcggacagtcagcaaaacggggggcttgagcagagcaatgggtggtcgttgggaggtggggactcactggagaatttgctgaatgatgaggatatttggttcttaaagcaacagttctttgacgacttctag

SEQ ID NO: 1138 - protein, 243 aa, Vitis vinifera
  misc_feature (199)..(199): The Xaa at location 199 stands for Asn, or His.
MNMDLRKGPWTAEEDTLLNNYITIHGEGRWNSLARCAGLKRTGKSCRLRWLNYLRPNVKRGNITLQEQLLILELHSRYGNRWSKIAQHLPGRTDNEIKNYWRTRVQKQAKQLKCDVNSKQFRDTMRYVWMPRLVERIKAAGGDSTPTAPATYGHHMSSQILDMPRNGEFGLGYSDPEGSETQVSPVSDMTDYYDFSGGXCSDSQQNGGLEQSNGWSLGGGDSLENLLNDEDIWFLKQQFFDDF

SEQ ID NO: 1139 - DNA, 1014 bp, Vitis vinifera
  CDS (1)..(1014)
atggtgagaccaccatgttgtgataaactgaatgtgaagaggggtctttggacagcagaggaggatgcaaagatacttgcccatgtatcaaaacatgggacgggcaactggacagcagttcccaaaaaagcaggactgagaagatgcgggaagagttgcaggctaaggtggactaattatttgaggcctgatctgaagcatgagagctttacaccccaagaagaggagttgattgttagacttcatgcaaccataggcagcaggtggtctataatagcccaacagcttcctgggagaacagataatgacgtaaagaactactggaacaccaagctgagaaagaagctctctgaaatggggattgatcccattacccataaacccttctctcagatccttgctgattatggaaacattggaggcctcccaaagaatggaacccgaattgggtctctcaccagagacttgaagaatgctctcatgttgaaatcagaccaatcatcagcaatcacttcagaagaattctcaaaaccagaagcagctcaagaaatcttcttgaccaacaatcgtaacagccacgataacccgtcaatgaatcttctcactcagcttaaagccataaaactggtcacagaagcctcaagttgcatccaccatggaaacatctcttcattgtcgtcaccatcatcatcttctacatgcttgaccccaaaagcaaagtcactccatacatttagctggagcgacttccttctagaggatgcatttttatcatctgatccgcaagagcaagaaaacatgtcaaagggtaacttggacctgcagagtgagccgaatgcagatggacaacggcaagttgacccaattgaagagatgaccaacacagtccttagcaatggcgcctctgaagcttcatcatcctatgatagttcatttctggaagccatgctagaccgagaaaacgatatgttattggagttccctagccttctggaggaacctttctactactga

SEQ ID NO: 1140 - protein, 337 aa, Vitis vinifera
MVRPPCCDKLNVKRGLWTAEEDAKILAHVSKHGTGNWTAVPKKAGLRRCGKSCRLRWTNYLRPDLKHESFTPQEEELIVRLHATIGSRWSIIAQQLPGRTDNDVKNYWNTKLRKKLSEMGIDPITHKPFSQILADYGNIGGLPKNGTRIGSLTRDLKNALMLKSDQSSAITSEEFSKPEAAQEIFLTNNRNSHDNPSMNLLTQLKAIKLVTEASSCIHHGNISSLSSPSSSSTCLTPKAKSLHTFSWSDFLLEDAFLSSDPQEQENMSKGNLDLQSEPNADGQRQVDPIEEMTNTVLSNGASEASSSYDSSFLEAMLDRENDMLLEFPSLLEEPFYY

SEQ ID NO: 1141 - DNA, 1320 bp, Vitis vinifera
  CDS (1)..(1320)
  misc_feature (571)..(571): y is t or c
atggggaggcactcttgctgctacaagcagaagctgaggaaaggcctgtggtctcccgaggaagatgagaaacttctgatgcatattaccaagtatggacatgggtgttggagctccgtccctaaactagcaggtttgcagaggtgtgggaagagctgcaggctaagatggattaactacttgaggcctgatttgaagaggggagcattctcacaacaggaagagagcctgataattgaactccatgcagttctaggcaacagatggtcgcagattgcagctcaattaccgggaagaacggataatgaaataaaaaatttgtggaactcctgcattaagaagaagcttagacaaaaaggcatcgaccccaacactcacaaaccgcttgtggaggctgagaacggacaagataagctgcctaattccgataaaagcaatgaaaaagccaatgaactgaaccttgttgaggccgagaatttaaagccactttcaactgctgcggagcagtatccagttgaagtttctcccagttccaagatcaacagcagcagcaatggaaacaatttgacaycaccccaacccacccaggaatttttcctagatagattcgttacctcccatgaaagctccaccaccagctgcaggccttctggcttggtggggcatttctcttttcagcagttgaattatgggcccaatattgggctctcagtgaaccctaatgccactctctccttcaatccaaactccaggtctcctgagatcatttctgaattcagttctagtatgacacccaccattctcccatccatgttgagcacaattctccccaccccaacaagcattaagccttccattagtcttccctccagtaatccttcaataggctcttttgatgtgaacggagtccagaactgggaagtcggcaccttcagtaataatgccagcagcagcaatgggagcaggaacagtattgaactgcaaagtaatagtgctttctttgagaacaacttcttctcattgggactggcagattgcggaaaatctgataaagaaaaccaaatccatatgttggaaggtgatcctgaagacatcaaatggtctgagtatctccataccccatttctattgggaaccacactacagaaccaaagccctcaacctatctatagtgagactaagccaggaatacatttcacaacagatgggtcaagtactggctggcatcagaaccagcaggaacaacccatacaagcttctgctgacatatataccaaggatctccagagacttggtgtggcttttggacagatttgttaa

SEQ ID NO: 1142 - protein, 439 aa, Vitis vinifera
  misc_feature (191)..(191): The Xaa at location 191 stands for Pro, or Ser.
MGRHSCCYKQKLRKGLWSPEEDEKLLMHITKYGHGCWSSVPKLAGLQRCGKSCRLRWINYLRPDLKRGAFSQQEESLIIELHAVLGNRWSQIAAQLPGRTDNEIKNLWNSCIKKKLRQKGIDPNTHKPLVEAENGQDKLPNSDKSNEKANELNLVEAENLKPLSTAAEQYPVEVSPSSKINSSSNGNNLTXPQPTQEFFLDRFVTSHESSTTSCRPSGLVGHFSFQQLNYGPNIGLSVNPNATLSFNPNSRSPEIISEFSSSMTPTILPSMLSTILPTPTSIKPSISLPSSNPSIGSFDVNGVQNWEVGTFSNNASSSNGSRNSIELQSNSAFFENNFFSLGLADCGKSDKENQIHMLEGDPEDIKWSEYLHTPFLLGTTLQNQSPQPIYSETKPGIHFTTDGSSTGWHQNQQEQPIQASADIYTKDLQRLGVAFGQIC

SEQ ID NO: 1143 - DNA, 909 bp, Vitis vinifera
  CDS (1)..(909)
  misc_feature (613)..(613): r is g or a
  misc_feature (783)..(783): r is g or a
atggggagaacaccttgttgtgataagagggggttgaagaaaggcccgtggactcctgaagaagatcaaatccttgttgattacatcaacaagaatggccatggaagctggcgttctcttcctaagaatgcaggtctcctccgctgtgggaaaagttgcagactccgatggaccaattatcttagaccagacattaagcgaggacccttcactactgatgaagagaagcttgttatacagcttcatggcatcctaggaaacaggtgggctgccattgcctctcaactgcccggaaggaccgataatgagatcaagaacctatggaacacccacttgaagaagcgcctgcttggaatggggcttgacccacaaacccatgagccctcggctacttcctgtgggccaatagcaaaaccaccttcgtccccttcaacccggcacatggcgcaatgggagagtgctagactagaagcggaggctcggctctcaagggagtcattactgtccaacccaccaccaccacctttgggaagaaataacgattcggactatttcctacgcctatggaattctgaggttggagaatcattccgcaacaagggacagaaacctrcatgtcaaagcccagtttctcaggcatcttcatcaacaaaatgtggctcagtttcaggcgttactacaatggagacatgccccacggtgagcaataaaattgaagatacccctcaaaatgcaatggcaggatcagattgctcaagcaccaacgagctggaggattcatcrgacacagcattacagctgctgtttgatttcccagttaataatgacatgagttttctagaaggaaacctcgacacctatcccacattccctgctatgttgtctgaaagctccttcatctccctctga

SEQ ID NO: 1144 - protein, 302 aa, Vitis vinifera
  misc_feature (205)..(205): The Xaa at location 205 stands for Ala, or Thr.
MGRTPCCDKRGLKKGPWTPEEDQILVDYINKNGHGSWRSLPKNAGLLRCGKSCRLRWTNYLRPDIKRGPFTTDEEKLVIQLHGILGNRWAAIASQLPGRTDNEIKNLWNTHLKKRLLGMGLDPQTHEPSATSCGPIAKPPSSPSTRHMAQWESARLEAEARLSRESLLSNPPPPPLGRNNDSDYFLRLWNSEVGESFRNKGQKPXCQSPVSQASSSTKCGSVSGVTTMETCPTVSNKIEDTPQNAMAGSDCSSTNELEDSSDTALQLLFDFPVNNDMSFLEGNLDTYPTFPAMLSESSFISL

SEQ ID NO: 1145 - DNA, 882 bp, Gossypium hirsutum
  CDS (1)..(882)
atgtttacaagagaggtttcatatctgaaacttcaagaagtgaagaagagatggaggctaaggaaaggtccatggactgaagaagaggactccatgcttagggcgtatgtcaatatccacggcgaaggtcgctggaacgctgttgctcgcttatcaggattgagaagaaccggtaaaagctgcagattgagatggctgaactatatgcgaccagaaatcaaacgaggaaacatcagcctcgaagagcagctattgattcttgaactccattctcgctgggggaacaggtggtcgaaaattgcacaacacttgcctggaagaacagacaatgaaataaagaattattggagaacaagagtccagaagcaggccaagcagcttaactgtgacgttaacagcaaacaattcaaggacgccatgcgttacgtttggatcccccgtttagttgaacggatccgtgcttcatccgagtctccctcgagtcaaccttctaccaccaccaacaccacctacaatgatcgtatcagcaacataagcagcagtcaaatgagctacgcaaatgcgagtgggtcggtccaggttgacccaagtcttctgcccgaattatcaggcacgtcatcagactcccttgacacccaagtctcttccgtttcggacctgaccgattgttacaatccacaaagcctttcaaactacttacacaaggggttaggtttggaaaaggagggagcggccacatggggcagagatgaagaattccaggcgacagaggagcatagcaatggttggttggttggtggtggggagtcatcgatggacactgtgtggaatgaagagaatgtttggtttttacagcagcagcttcatgatgatgggatctaa

SEQ ID NO: 1146 - protein, 293 aa, Gossypium hirsutum
MFTREVSYLKLQEVKKRWRLRKGPWTEEEDSMLRAYVNIHGEGRWNAVARLSGLRRTGKSCRLRWLNYMRPEIKRGNISLEEQLLILELHSRWGNRWSKIAQHLPGRTDNEIKNYWRTRVQKQAKQLNCDVNSKQFKDAMRYVWIPRLVERIRASSESPSSQPSTTTNTTYNDRISNISSSQMSYANASGSVQVDPSLLPELSGTSSDSLDTQVSSVSDLTDCYNPQSLSNYLHKGLGLEKEGAATWGRDEEFQATEEHSNGWLVGGGESSMDTVWNEENVWFLQQQLHDDGI

SEQ ID NO: 1147 - DNA, 837 bp, Arabidopsis thaliana
  CDS (1)..(837)
atggggagacaaccatgctgtgacaaagtagggttgaagaaaggaccatggactgcagaagaggataggaagctcataaacttcatccttaccaatggacaatgttgttggagagctgttcctaagctttctggtcttcttaggtgtggcaagagttgcagacttcgttggactaactatcttagaccagaccttaagagaggtcttctctctgattacgaagagaagatggtcattgatctccattcccagcttggaaacaggtggtcaaagatagcttctcatttaccaggaagaacagacaacgaaatcaagaatcattggaacactcacatcaagacgaagttgaggaaaatggggattgatcttcttacacataaaccactctctatcgtcgaaaaagaagacgaagaacccttaaagaagctacagaataatacagttccttttcaagaaacaatggagcgtcctttagagaacaacatcaagaacatatcaagacttgaagagtctttaggtgatgatcaattcatggagataaatcttgagtatggtgtcgaagatgtccctcttattgaaacagagtctttagaccttatctgcagcaattcaacaatgtcttcatccacgtccacatcttcgcattcttctaatgattcgagtttcttgaaggatttgcagttcccggagttcgagtggtccgactatggtagtagtaataatgataataataatggtgtggacaacattatagagaacaatatgatgagcctgtgggaaattagtgactttagcagtttggatttgctgcttaatgatgagagttcttccacttaa

SEQ ID NO: 1148 - protein, 278 aa, Arabidopsis thaliana
MGRQPCCDKVGLKKGPWTAEEDRKLINFILTNGQCCWRAVPKLSGLLRCGKSCRLRWTNYLRPDLKRGLLSDYEEKMVIDLHSQLGNRWSKIASHLPGRTDNEIKNHWNTHIKTKLRKMGIDLLTHKPLSIVEKEDEEPLKKLQNNTVPFQETMERPLENNIKNISRLEESLGDDQFMEINLEYGVEDVPLIETESLDLICSNSTMSSSTSTSSHSSNDSSFLKDLQFPEFEWSDYGSSNNDNNNGVDNIIENNMMSLWEISDFSSLDLLLNDESSST

SEQ ID NO: 1149 - DNA, 837 bp, Nicotiana tabacum
  CDS (1)..(837)
atggtgagagctccttgttgtgagaaaatggggctgaaaaaagggccatggattcctgaagaagatcagattctcatctctttcattcaaactaatggccatggcaactggcgagcccttcccaaacaggctggactattgagatgcgggaagagttgcagactgcggtggacgaattatttgcgaccagatataaagaggggaaatttcaccaaggaagaagaagaaacaattatccagttacatgaaatgcttggcaatagatggtctgcaatagcagcaaaattaccaggacgaacagacaatgaaataaaaaatgtttggcacacccacttgaagaagaagctcaaagattataagcctcctcagaactccaaaagacactccaagtccaagaatcatgattccaagggtcctactacttctgaatcatccaataattctgatcttactattattaatacacaaaaacacattgatagcccagtgctagctcctaactcaccccaaatttcatctagtactgaaatgtcaactgtgacactagtcgatgatcatcaaatggttgtgattaagcaagaagtaatggagtcgtccgagtattttccagagatcgatgagagtttttggacggacgaattaacaacggacaataactggagtagtactgatcatgttatggttgctgctaatcaagaattacaagttcaattaccattttccagttttaaggaagaaaatgtggacattttggctacaaaaatggaggatgacatggacttttggtacaatgttttcataaagactgatgatttgccagaattaccagaattttga

SEQ ID NO: 1150 - protein, 278 aa, Nicotiana tabacum
MVRAPCCEKMGLKKGPWIPEEDQILISFIQTNGHGNWRALPKQAGLLRCGKSCRLRWTNYLRPDIKRGNFTKEEEETIIQLHEMLGNRWSAIAAKLPGRTDNEIKNVWHTHLKKKLKDYKPPQNSKRHSKSKNHDSKGPTTSESSNNSDLTIINTQKHIDSPVLAPNSPQISSSTEMSTVTLVDDHQMVVIKQEVMESSEYFPEIDESFWTDELTTDNNWSSTDHVMVAANQELQVQLPFSSFKEENVDILATKMEDDMDFWYNVFIKTDDLPELPEF

SEQ ID NO: 1151 - DNA, 744 bp, Glycine max
  CDS (1)..(744)
atgggaaggtccccttgctgtgagaaagctcacacaaacaaaggtgcatggactaaagaagaagatgacagactcatatcttatattcgagctcacggcgaaggctgctggcgttcactccccaaagccgccggtcttctccggtgcggcaaaagctgccgtctccggtggatcaactacctccgccccgaccttaaaagaggtaactttaccgaagaagaagacgagctcatcatcaaactccacagtctcctcggtaacaagtggtctttgatagctggaagattgccggggagaacagacaatgaaataaagaactattggaatacgcacataagaaggaagcttttgaacagaggaatcgaccctgcaactcataggccactcaacgaagctgcaactgctgcaactgttacaactaatatatcttttggcaaacaagaacaacaagagacaagttcgagtaacggaagcgttgttaaaggttccatcttggaacgctgccctgacttgaaccttgagttaaccattagtcctcctcgccaacaacaacagactcagaagaatctttgtttcgtttgcagtttgggtttgcacaacagcaaagattgcagctgcaacgtttccaacgctgtcactgtcaacaacaccactccttcttctgctgctgctgctgctgcttatgatttcttgggcatgaaaaccagcggcgtttgggattgcacccgcttggaaatgaaatga

SEQ ID NO: 1152 - protein, 247 aa, Glycine max
MGRSPCCEKAHTNKGAWTKEEDDRLISYIRAHGEGCWRSLPKAAGLLRCGKSCRLRWINYLRPDLKRGNFTEEEDELIIKLHSLLGNKWSLIAGRLPGRTDNEIKNYWNTHIRRKLLNRGIDPATHRPLNEAATAATVTTNISFGKQEQQETSSSNGSVVKGSILERCPDLNLELTISPPRQQQQTQKNLCFVCSLGLHNSKDCSCNVSNAVTVNNTTPSSAAAAAAYDFLGMKTSGVWDCTRLEMK

SEQ ID NO: 1153 - DNA, 954 bp, Glycine max
  CDS (1)..(954)
atgtctacttcaaagagcgtcagcagttctagtgaagatgacaatgaacttagaagagggccttggactcttgaagaggataatttgctctcccaatatatttctagtcatggagaagggcgatggaatttgctagctaaacgttcaggattaaagcgaactgggaaaagttgcagattaaggtggctaaattatctaaagccagatgtaaaacggggaaatttaaccccacaagagcaacttataatcctcgaactccactcaaagtggggaaacaggtggtcaaaaattgcacaaaatttgccaggcagaacagacaatgaaatcaagaactattggagaactaggattcagaaacaagcaagacatttgaaaattgacactgacagcagagagtttcaggaacttgttaggcgtttctggatgcctagattgcttcaaaaagccaaagaatcatcttcttcagccatgtcaattcaaaaccaggcaactcctatgccttttgatggtgtttctcagcattcaactgttgggaccataccatcacattcacacaccccttggcagggaccttgtatgaatgaagctggtcccacttacatggaccaacatgagcagaactcagactctgaacacaacaatggttcatgcatctccttgtctgagtcagcaaattttccaaaagtgcctcagcattttggacgcaccaccatcacccaatatcatgccttgaataacaatgactttggcaccttcacatatgacggctacaatgtaagcaacaatgtctatgagatggacaacttcaaaacgcctactacaagggtggctgaggatgcgcaatacccaactggtgattgtcaaatggtaggaagcaattgggtaaacagcgattttgcatgtaacatgtggaacatggatgaattgtggcaatttagcaagttacaaaaataa

SEQ ID NO: 1154 - protein, 317 aa, Glycine max
MSTSKSVSSSSEDDNELRRGPWTLEEDNLLSQYISSHGEGRWNLLAKRSGLKRTGKSCRLRWLNYLKPDVKRGNLTPQEQLIILELHSKWGNRWSKIAQNLPGRTDNEIKNYWRTRIQKQARHLKIDTDSREFQELVRRFWMPRLLQKAKESSSSAMSIQNQATPMPFDGVSQHSTVGTIPSHSHTPWQGPCMNEAGPTYMDQHEQNSDSEHNNGSCISLSESANFPKVPQHFGRTTITQYHALNNNDFGTFTYDGYNVSNNVYEMDNFKTPTTRVAEDAQYPTGDCQMVGSNWVNSDFACNMWNMDELWQFSKLQK

SEQ ID NO: 1155 - DNA, 783 bp, Glycine max
  CDS (1)..(783)
atggagaccatgaatgttcaggtgatgagaagcttatcagatatggtaattaaaaaaggaccatggactgaggaagaagattctgttctgatcaactatgtcaacgtccacggcgaaggccactggaactccctcgctcgctcttcaggtttaaagagaacgggcaaaagctgcagactaagatggttcaactacttgcgcccaaatgttcgacgtgggaacatcacccttcaagaacagctcttgattctcgaactccattcccactggggcaatcggtgggccaaaatagcagaacaactgccagggagaacagacaatgagataaagaactattggaggactcgagtggtgaagcaggctaagcaactcaaatgtcatgtaaacagcaaacagttcagggacgccttgcgtttcgtttggatgccgcgccttatggagcagattcaggcttcttcttcttcctatggccttgatcaaaccacgttgtgcaacactcaaacccacagagacaactcaatggtttcatcgtactcatcagaggttgatcttcagcctccttctctttctgatacaagtataacttcatcatcttacaatttaattggtgatggaggcctgtcaacggaaagtgcagaaaaggggtccatatactctctttggcagcattgggactactctgacatacaagcatttgagccatgcaatggttttggtgatgcagacttgtggaccgatgaaaacatgtggttcttgcagcagcatcttgctgatgaattatga

SEQ ID NO: 1156 - protein, 260 aa, Glycine max
METMNVQVMRSLSDMVIKKGPWTEEEDSVLINYVNVHGEGHWNSLARSSGLKRTGKSCRLRWFNYLRPNVRRGNITLQEQLLILELHSHWGNRWAKIAEQLPGRTDNEIKNYWRTRVVKQAKQLKCHVNSKQFRDALRFVWMPRLMEQIQASSSSYGLDQTTLCNTQTHRDNSMVSSYSSEVDLQPPSLSDTSITSSSYNLIGDGGLSTESAEKGSIYSLWQHWDYSDIQAFEPCNGFGDADLWTDENMWFLQQHLADEL

SEQ ID NO: 1157 - DNA, 879 bp, Malus domestica
  CDS (1)..(879)
atgtccactaatactaaaaccctaagtagcaattattccggcgaagacgatagtgagcttaggagagggcaatggattcttgaagaagacagtcttcttattcagtacatagagcgccatggcgaaggccagtggaacttgcttgccaaacgttcaggattaaggagaactggcaaaagttgcagattgagatggttgaattatctgaaacccgacgttaagcgaggcaatcttagtcctgaagaacagctcttgattcttgacctccactcaaaaatgggcaataggtggtcgaaaatcgcacggtatttaccgggaagaacagacaatgaaatcaagaactattggagaacaagggtacacaaacaagcccggcatctcaacatcgacacgaaaagcagggagtttcaaaatatgataaggtgctattggatgcctaggttgaagcagaagataggacgagaaacctcgatttcttcagctgtgttaaaccaaaatcctacgatttctcagcctcgagaaaacaacactttccaacattttacggcaacaatatccccgccaccacaaatccttgtgcaggaagaaattaatatgagtggaacaatgtacaatttggatgtcgaaaagcaaaacacagaggcagattactgcagaagttcgttcattttcccctcagaaccaatggacatgtcgaagactgcgcaatttccggaatgccctcctttctattgtggtgacaacaatggctacgacatggaatccttcaatctgcaggaatctgtgtcagcagactcagcaccaaatttccctggaaattccgccggcgattgctacgtggcagaaaacaactggtttgacagtgattttttcatgtag

SEQ ID NO: 1158 - protein, 292 aa, Malus domestica
MSTNTKTLSSNYSGEDDSELRRGQWILEEDSLLIQYIERHGEGQWNLLAKRSGLRRTGKSCRLRWLNYLKPDVKRGNLSPEEQLLILDLHSKMGNRWSKIARYLPGRTDNEIKNYWRTRVHKQARHLNIDTKSREFQNMIRCYWMPRLKQKIGRETSISSAVLNQNPTISQPRENNTFQHFTATISPPPQILVQEEINMSGTMYNLDVEKQNTEADYCRSSFIFPSEPMDMSKTAQFPECPPFYCGDNNGYDMESFNLQESVSADSAPNFPGNSAGDCYVAENNWFDSDFFM

SEQ ID NO: 1159 - DNA, 768 bp, Medicago truncatula
  CDS (1)..(768)
atgagaggtatggatattaaggttcagaaaggtgggtctgcaaaggaaaatgagacaggggtaagaaaaggtccttggacgttagaagaggacaccattctggttgattacattacaatacacggtgaaggtttgaggagaagtggtaaaagttgtagattaaggtggttaaactacttgcgtcccgatttacgtcgtggaaatatcacacttcaagaacagatattgattcttgacctccactctcgctggggcaataggtggtcgaaaattgcacaacatctaccaggtagaacggacaatgaaataaaaaactattggagaacaagagtgatcaaacaagcaaagcaactcaaatgtgatgtaaacagcaaacagttcagagatgtattgcgtcacgtttggatgccccgattactcgaacaaattcaacccgcaccacaattccccgacacgaataatccaaacggatcacatatccttcttcaccaaaacacattgcaaagttcagtttcaggaatcagtggtatttcctcggactcttcatcagtagaattccaagttgcttcaaattcggaccaaaatgattcttcggagcttttgggccatgaaggttcaaaactatggtcaagtttcaataaccagcaggtttcagaacaggagaagagcggtgcttgtgatggtgactcgttgtggaacgatgagaacatgtggtttttgcaacaactttatgaagatgttgaaataaaatacaatttacttgcgtga

SEQ ID NO: 1160 - protein, 255 aa, Medicago truncatula
MRGMDIKVQKGGSAKENETGVRKGPWTLEEDTILVDYITIHGEGLRRSGKSCRLRWLNYLRPDLRRGNITLQEQILILDLHSRWGNRWSKIAQHLPGRTDNEIKNYWRTRVIKQAKQLKCDVNSKQFRDVLRHVWMPRLLEQIQPAPQFPDTNNPNGSHILLHQNTLQSSVSGISGISSDSSSVEFQVASNSDQNDSSELLGHEGSKLWSSFNNQQVSEQEKSGACDGDSLWNDENMWFLQQLYEDVEIKYNLLA

SEQ ID NO: 1161 - DNA, 768 bp, Medicago truncatula
  CDS (1)..(768)
atggttagggctccttgttgtgaaaagaaaggattgaagaaaggtccttggaccttagaggaagatgaaatcctcacatcatacatcaataaacatggacatagcaattggcgtgccctaccaaaacatgcaggtttattaagatgtggaaagagttgtagattgagatggattaactatttaaaacctgatattaagagaggaaattttacaaatgaagaagaggaaactatcatcaagatgcatgaatcactggggaacaggtggtcagccatagcagcaaaattacctggaagaacagacaatgaaataaaaaatgtatggcacactcacttgaagaaaagattattgaataccaataataaccaaccaaattcaaataccaaaaaaagagtgtcaaaacaaaaaatcaaaagatctgattccaattccagcactttaactacagcatcaaattgcactttttctagtgatttttcatcacaagaaaaaaatttggacaatagcatcatttgtgaagactcattggtgacaatgcctgaaattgatgaaagcttttggtcagagacagtaattgatgatgaaattagttccaccatgccatcaaattctatgacagtttcaaatgatttaccagatcaacaatgcatttttaataattccgtggaaaattttcaaaacccttttgataatgatgatgatggcatggatttttggtatgatgtgttcatcaaatcaggagaatcaacagaattgccagagttttag

SEQ ID NO: 1162 - protein, 255 aa, Medicago truncatula
MVRAPCCEKKGLKKGPWTLEEDEILTSYINKHGHSNWRALPKHAGLLRCGKSCRLRWINYLKPDIKRGNFTNEEEETIIKMHESLGNRWSAIAAKLPGRTDNEIKNVWHTHLKKRLLNTNNNQPNSNTKKRVSKQKIKRSDSNSSTLTTASNCTFSSDFSSQEKNLDNSIICEDSLVTMPEIDESFWSETVIDDEISSTMPSNSMTVSNDLPDQQCIFNNSVENFQNPFDNDDDGMDFWYDVFIKSGESTELPEF

SEQ ID NO: 1163 - DNA, 960 bp, Medicago truncatula
  CDS (1)..(960)
atgagaaagccagagatttgtagtactaaaaacaacatcaatattaataagaagaagcttagaaaaggtttgtggtcaccagaagaagatgagaaacttatgaactatatggttaggaatggacaaggatgttggagtgatgtggcaagaaatgctggattggaaagatgtggcaaaagttgtaggctaagatggatcaattacttgaggcctgatcttaaaagaggtgctttctcaacacaagaagaagaactcatcatccatttccattctctacttggaaacagatggtctcaaatagcagcacgattaccgggaagaaccgacaatgaaataaaaaacttttggaattcaactataaagaaaagacttaagaacttgtcttcttcaacctcaccaaatccaagtgatgagtcctcacctgaacctaacaaagatttcaatatacaacaagggtcctatatttctatacaacatgcaaattacaacagctacatgagtatgcctatgttcacttcatcatcaacatctccatcaccatcaatattgcaaaacacaattttcaataccatgaatattgacacgttgcctgtgatggatcatagtggatacttcaacaatacagttactacaatgccatgcttttcgtcacaaaatcacgaagttgaaattaaaggttcttatttagaaaatggtgtgtttgggagtgtaaatattggagtagaaggggatatggagaataagtgcaacatagaaactaaccctaaccattctgattattattttgatgacataaagataaacaatatgcttagtaactgcaatattattgaaagcaataataataaaattgaaagtaggggtgaagtagtggagaatttatttcaagaacaattcaacttgggagaatgggattttgaggagttgatgaaagatgtttcctcctttttattttcttga

SEQ ID NO: 1164 - protein, 319 aa, Medicago truncatula
MRKPEICSTKNNININKKKLRKGLWSPEEDEKLMNYMVRNGQGCWSDVARNAGLERCGKSCRLRWINYLRPDLKRGAFSTQEEELIIHFHSLLGNRWSQIAARLPGRTDNEIKNFWNSTIKKRLKNLSSSTSPNPSDESSPEPNKDFNIQQGSYISIQHANYNSYMSMPMFTSSSTSPSPSILQNTIFNTMNIDTLPVMDHSGYFNNTVTTMPCFSSQNHEVEIKGSYLENGVFGSVNIGVEGDMENKCNIETNPNHSDYYFDDIKINNMLSNCNIIESNNNKIESRGEVVENLFQEQFNLGEWDFEELMKDVSSFLFS

SEQ ID NO: 1165 - DNA, 921 bp, Medicago truncatula
  CDS (1)..(921)
atgatgagaacaccaagcaatgatgaaagtggtttgaagaagggtccatggagtccagaagaagataaaatattagtggatcacattcagaaacatggccatggaagttggagagctcttccaaagcttgcaggattgaatagatgtggaaagagttgtagacttagatggaataattatctaaggcctgatattagaagaggaaaattctctgatgaagaagaaaatctcatcatcaatttacattcagttcttggaaataagtgggcagctatagcaacacatcttccaggaaggacagataatgagataaagaatttttggaacacacatttaaagaaaaagctaatgcaaatggggttagatccagtgacacacaggccaagaacagatcacctagaccttcttagtaatctacagcaaataatattgaatgctgcaaacattgtcacaagttgtgacataaacaataatgctctaaggctacaatattcattgctaccacaaagtttggtaaatgatgttttaggatttaataataacatacaaagtttttatgatggttccaatattggtatttcttctcaaacaattcaacctaatttgcaaaactttgaagcccctcttcagcaattactaccacaagaatttgagtgctctcagaaatttggtgaacaaattggtaacacaaattttgcttcaacagtattatcaaattctcttccaaagttggtttcagtttcacctcaacgttcaggaacggttaaggtaggagaagaaaacatgatgataaatgcaaaagagtgttgtaacacttcttcctccaacagctttgaaacttggggagatttcataaatgatgatgcaaatgatgcttattggaaagatttcatagaacaacaatattcaagccaaccatag

SEQ ID NO: 1166 - protein, 306 aa, Medicago truncatula
MMRTPSNDESGLKKGPWSPEEDKILVDHIQKHGHGSWRALPKLAGLNRCGKSCRLRWNNYLRPDIRRGKFSDEEENLIINLHSVLGNKWAAIATHLPGRTDNEIKNFWNTHLKKKLMQMGLDPVTHRPRTDHLDLLSNLQQIILNAANIVTSCDINNNALRLQYSLLPQSLVNDVLGFNNNIQSFYDGSNIGISSQTIQPNLQNFEAPLQQLLPQEFECSQKFGEQIGNTNFASTVLSNSLPKLVSVSPQRSGTVKVGEENMMINAKECCNTSSSNSFETWGDFINDDANDAYWKDFIEQQYSSQP

SEQ ID NO: 1167 - DNA, 828 bp, Nicotiana tabacum
  CDS (1)..(828)
atgggcagagctccttgctgtgaaaagcttggattaaagagaggtccgtggagcaaagaggaagatgacttactcatcaattacattaataaacatggccaccctaattggcgtgcacttcccaaacttgcaggtttgttaaggtgcggaaaaagttgtcgtctccgatggactaattatttgcgacctgatattaagagaggaaactttactcctgaagaggaaaacaccattatcaagttgcaccaagttcttggaaataggtggtctggaattgcagcaaggttaccaggacgaacagataatgaaataaaaaacatttggcatactcgtttgaagaagagagtggatgataaatctcaacctcaagaaactcaggacatacaagatcaacaacccatggaaataacgtcaaaatccgaggaaaattttgaaacacattcatctgaacctgaaaattctaaggataattctgaagaaatatcaagtcctaaaacaaacttccagattcaagaacacccaaattcttcgtcgtcaacatcatctagtagagattcatgttcaaacacaactgctacgagtacgagttctcttgctgatgaatcaagagatcaaataatgttggacaatttgattgaagttgacgacaatttttggtccgaggtactatgggcaccagctgaaactaatgactataatgtttcagatttgtcattatcttcattggaggaaaattacgagcttaattccagcttgaatgattactggttttgggatgatcttttttcaacagccaatgagttgatgttagaattgcctgaattatga

SEQ ID NO: 1168 - protein, 275 aa, Nicotiana tabacum
MGRAPCCEKLGLKRGPWSKEEDDLLINYINKHGHPNWRALPKLAGLLRCGKSCRLRWTNYLRPDIKRGNFTPEEENTIIKLHQVLGNRWSGIAARLPGRTDNEIKNIWHTRLKKRVDDKSQPQETQDIQDQQPMEITSKSEENFETHSSEPENSKDNSEEISSPKTNFQIQEHPNSSSSTSSSRDSCSNTTATSTSSLADESRDQIMLDNLIEVDDNFWSEVLWAPAETNDYNVSDLSLSSLEENYELNSSLNDYWFWDDLFSTANELMLELPEL

SEQ ID NO: 1169 - DNA, 1146 bp, Medicago truncatula
  CDS (1)..(1146)
atgggaagacattcttgttgctacaagcagaagcttcgtaaaggtctttggtccccagaagaagatgaaaagcttttgaattatatcaccaaacatggtcatggatgttggagctcagttccaaaattagctggtttgcagaggtgtgggaagagttgtagattgagatggataaattatctaaggcctgatttgaagagaggagcattctcagagcaagaagagaattccataattgaacttcatgcactcctaggcaacaggtggtcgcagattgcagctcagttacctggaagaacagacaatgagataaaaaatctatggaattcaagtctgaaaaagaagctaaagcaaaaaggaattgatccaaacacacaccaaccattctctgagaacaatgacaatgacacaccaaatattcagattcaaaaaacctctgtgggatccaatgaagtgaagaatctatttgatgatacaccaaatccaaattctattccaatggataattgtaattatccccttgaaattaattcaaaaatcaacaactcggttaattgcttcataccttgtgataatatggttggattaggaggaggatcatatctcaattttcaacaacttaactatggaatcaataacatgactctatctcctccaaattccaacagcaacacttcactttgcttcataccaagtactagtggttccacttctacttgctctcaaatgatgtcagaattaaattcttccaccatgttccattctatgtacacaaatcatccttcaaattctatatcctctggtgaagttgatgggattcaaaactgggaatttggtgcaagcaaaagcagcaatggaagcagcattaataattaccttgatcatcaagtagtagaagatattaaatggtctgattatataaactctactccattttttcttggaaacaacaacacatttcagcaaactacaacatcaacacactcttctatctatgaggttaaacaagaaatgggagggttcattaatacaaatgaatctattcaatcaagtagcagtacatggcatcctcattttgaagcagatatatatagcaacaaagatcttcaaagattttcactggcttttggacaaacacttaattag

SEQ ID NO: 1170 - protein, 381 aa, Medicago truncatula
MGRHSCCYKQKLRKGLWSPEEDEKLLNYITKHGHGCWSSVPKLAGLQRCGKSCRLRWINYLRPDLKRGAFSEQEENSIIELHALLGNRWSQIAAQLPGRTDNEIKNLWNSSLKKKLKQKGIDPNTHQPFSENNDNDTPNIQIQKTSVGSNEVKNLFDDTPNPNSIPMDNCNYPLEINSKINNSVNCFIPCDNMVGLGGGSYLNFQQLNYGINNMTLSPPNSNSNTSLCFIPSTSGSTSTCSQMMSELNSSTMFHSMYTNHPSNSISSGEVDGIQNWEFGASKSSNGSSINNYLDHQVVEDIKWSDYINSTPFFLGNNNTFQQTTTSTHSSIYEVKQEMGGFINTNESIQSSSSTWHPHFEADIYSNKDLQRFSLAFGQTLN

SEQ ID NO: 1171 - DNA, 813 bp, Malus domestica
  CDS (1)..(813)
atggggagagctccttgctgtgagaagatgggactgaagaaggggccatggacctctgaagaagatcaaattcttacatccttcatccacaaatatggccatggaaattggcgtgccctgccaaagcaagctgggttgttgagatgtggaaagagctgccgactccggtggataaactatttgaggccggatattaagagaggaaacttcacaagagaagaagaggaagctatcattaagttgcatgaaatgctgggtaacaggtggtcagcaattgcagcaagattaccaggacgcaccgataacgaaataaaaaatgtatggcacacccacttgaaaaaaagactcaaagatcatactacaacaacatcatcaacaacatcaacaagaagtagtagtaacagtacttccaatgtaaaaagccaatttgttgatgaacctgaaaatttgaattatccacaaccatcttctagtgatgtttcctcctcagtcacaaaagtctcagctgcattgagtaccgatcaggacacaatcgtcgtcaagggcgaaaacatggagttgtcggaaaccttccccgatattgatgatgacagcttctggtcagaggcactttcaactgataattccagcgtcccattacaatttccaaaggcctcaaatgatgaaccaatatcggagtttcccatcaccaaaaacgattcggaggaatttggttttagttttggtctaaacatggatgatggcatggaattttggtatgatcttttcattagaactggtcatgggggaacgccagaattaccagaattttga

SEQ ID NO: 1172 - protein, 270 aa, Malus domestica
MGRAPCCEKMGLKKGPWTSEEDQILTSFIHKYGHGNWRALPKQAGLLRCGKSCRLRWINYLRPDIKRGNFTREEEEAIIKLHEMLGNRWSAIAARLPGRTDNEIKNVWHTHLKKRLKDHTTTTSSTTSTRSSSNSTSNVKSQFVDEPENLNYPQPSSSDVSSSVTKVSAALSTDQDTIVVKGENMELSETFPDIDDDSFWSEALSTDNSSVPLQFPKASNDEPISEFPITKNDSEEFGFSFGLNMDDGMEFWYDLFIRTGHGGTPELPEF

SEQ ID NO: 1173 - DNA, 756 bp, Malus domestica
  CDS (1)..(756)
atgggcaggcaaccttgttgcgacaagcttggagtgaagaaagggccatggactgccgaggaggacaagaaattggtgaattttctcctcacacatggccaatgttgttggcgggccgtccccaagcttgccggcctccgccgctgcggcaagagctgccgcctccggtggattaattacctccgccccgacttgaaaagaggcctccttaatgatgctgaagaacaacttgttattgacctccacgcccgccttggcaataggtggtcgaaaattgcagcaagattgccgggaagaactgacaatgagatcaagaatcactggaacacgcacatcaagaagaagcttgtcaagatggggattgatccaattactcatgagcctctccacaaacaagtcaccaccccacaagaaatgccttgtgaagcaagtaatcaacctgcaaactcagacatgagtattcagcagatgaatacaaacatcccagaacatggaatcagcaccaacagtgacggtaactctacaagtgaaaattccccaagcaatgactcagagccagctgagccaaaccctaattacagtgaggaagaagacccgttggtgagtttcatattatccgatacatttcttgaggatttaacatgggatttttcgacctcgtcagaatacagctcagctgataatccaacggaggagaatagcttagcatggttcatggactgtaatgattttggagttgaagatttcgagctttga

SEQ ID NO: 1174 - protein, 251 aa, Malus domestica
MGRQPCCDKLGVKKGPWTAEEDKKLVNFLLTHGQCCWRAVPKLAGLRRCGKSCRLRWINYLRPDLKRGLLNDAEEQLVIDLHARLGNRWSKIAARLPGRTDNEIKNHWNTHIKKKLVKMGIDPITHEPLHKQVTTPQEMPCEASNQPANSDMSIQQMNTNIPEHGISTNSDGNSTSENSPSNDSEPAEPNPNYSEEEDPLVSFILSDTFLEDLTWDFSTSSEYSSADNPTEENSLAWFMDCNDFGVEDFEL

SEQ ID NO: 1175 - DNA, 861 bp, Malus domestica
  CDS (1)..(861)
atgggaaggagtccttgttgttcaaaggatgaggggttgaatagaggagcatggacagctatggaagacaaagtactgactgaatatatcggaaatcatggtgaagggaaatggagaaaccttcccaaaagagcagggctcaagagatgtggcaaaagttgcaggctgcgatggttgaactacctaagacctgacatcaagagaggaaacatcactcgtgatgaagaagagctcatcatcaggcttcacaagctcctgggcaacagatggtctttgatagctggaaggcttccaggccgaacagacaatgaaatcaagaattattggaacactacaattggaaagagaattcaagttgaaggtcgctcatgttctgatggaaatcgtagaccaacccaagaaaaaccaaaacctacgctgtcacctaaacctagtacaaatatttcatgcaccaaagtggtcagaaccaaagcatcaaggtgcacaaaagtggtcttgccccatgagtcccaaaagtttggttacagtactgaacaagtggtcaatgcagcaccaacactagaccaggcggtgaataatccaatggtggggattgatgaccctttgttaccaatgtcatttttggacgatgaaaacaataattcgtgtgagtttttggtggattttaagatggacgagaattttctatccgattttctaaatgtcgatttctctgtgctctataacaatgagggagctggtaaagctgctgctgctgctaccactgaagacacgagtaataagttgcatggcccagatctccgatcatccaaggctcctatcattgaatctgaattggactgctggctcgtagataattaa

SEQ ID NO: 1176 - protein, 286 aa, Malus domestica
MGRSPCCSKDEGLNRGAWTAMEDKVLTEYIGNHGEGKWRNLPKRAGLKRCGKSCRLRWLNYLRPDIKRGNITRDEEELIIRLHKLLGNRWSLIAGRLPGRTDNEIKNYWNTTIGKRIQVEGRSCSDGNRRPTQEKPKPTLSPKPSTNISCTKVVRTKASRCTKVVLPHESQKFGYSTEQVVNAAPTLDQAVNNPMVGIDDPLLPMSFLDDENNNSCEFLVDFKMDENFLSDFLNVDFSVLYNNEGAGKAAAAATTEDTSNKLHGPDLRSSKAPIIESELDCWLVDN

SEQ ID NO: 1177 - DNA, 897 bp, Malus domestica
  CDS (1)..(897)
atggctgctcctacaaccccaaatgaagaaaatgagttcagaagagggccatggactcttgaggaagacaatctgcttatacattacatcgtgaaccacggcgaaggccattggaattctgtagcaaaacttgcaggattgaagaggaccggaaaaagctgcagattgagatggctaaattacttaaaacccgacattaagcgcgggaaccttactccgcaagaacagctcatgatccttgaactccactccaagtggggtaacaggtggtctaaaattgcgcagcatttgccgggaagaacaggcaatgagataaagaactattggagaacaagggtgcaaaaacaggcgcgccaactgaacatcgagtcgaacagcgagcaatttctcgatgcagttcggggtttctgggtgccgactctgctgcaaaaaatggagcaatcttcttcttcttgttcttcaaccttgagcacttctcagaactccgcatctccttgtctgtcaccaaatcacgcagctccttccgtgccactctcaacctctccacctagcaatgcgacaaacgtgttggacaattatcacattagtggaaattccaatcttgccaccgtcccaagtaatatcctttcggcggattcttttgtttcacacgtgcctcaaatggcagaaccgtccacgagttttccccctgcatattaccgacttggctacagcagcttaagtccagatggcagtcactacgtggacagcagtagctatgacgtggagggtctcagcctggaccctgtttcgccaatgggcaatcttggcaattcacagtttgattgccagatggggggaaatgattggatgttggacaatgtgactgacagtttatggaacatggatgggccgtga

SEQ ID NO: 1178 - protein, 298 aa, Malus domestica
MAAPTTPNEENEFRRGPWTLEEDNLLIHYIVNHGEGHWNSVAKLAGLKRTGKSCRLRWLNYLKPDIKRGNLTPQEQLMILELHSKWGNRWSKIAQHLPGRTGNEIKNYWRTRVQKQARQLNIESNSEQFLDAVRGFWVPTLLQKMEQSSSSCSSTLSTSQNSASPCLSPNHAAPSVPLSTSPPSNATNVLDNYHISGNSNLATVPSNILSADSFVSHVPQMAEPSTSFPPAYYRLGYSSLSPDGSHYVDSSSYDVEGLSLDPVSPMGNLGNSQFDCQMGGNDWMLDNVTDSLWNMDGP

SEQ ID NO: 1179 - DNA, 924 bp, Gossypium hirsutum
  CDS (1)..(924)
atgggaagacaaccttgttgtgacaaagttggtgtcaagaaagggccatggactcctgaagaagatctcatcttggtgtcttatattcaacaacatggtcctgggaattggagggctgttcccaccaaaacaggtttgcttagatgtagtaagagttgcaggcttaggtgggctaattacttaaggcctgggattagaaggggtaacttcacagaaaatgaagagaaaatgataatccaccttcaagccctcttaggcaacagatgggctgcaatagcatcttacctccctgaaagaacagacaatgacattaaaaattattggaacactcatttgaagaggaagctgaagaagctacaaggcaatgaaagttcttctagatacgggtttccatcatcatcatcgtcataccagatttgtagaggtcagtgggagagaaagttgcagacagatatccatatggctaaaaaggatttatctgacgcattatcacctgagaaatcaagtgacttagttgaaatgaaaccctttaatgaccacacatcttatccaaaaccaagtggatatgcttcaagcactgaaaacatagctaagttgttgaaagggtggatgagaaataatccatggaaaatggctgattctgcagattatagtgaagaagggactgttccaatgaaggaagacaagaacagcaaggaaatggcagaggcatttcaatcacatttagggtttgaatctttagattcttcactttctgatatctcaccatctatgtcacctgagacaagcctttcacaatatgaaagtaagccacacctcaatgctcaaagccaactttcactgcttgagaaatggctttttgatgaaggcaaggattaccaactttgtgacattacattagaccaaaatcttcattttttctaa

SEQ ID NO: 1180 - protein, 307 aa, Gossypium hirsutum
MGRQPCCDKVGVKKGPWTPEEDLILVSYIQQHGPGNWRAVPTKTGLLRCSKSCRLRWANYLRPGIRRGNFTENEEKMIIHLQALLGNRWAAIASYLPERTDNDIKNYWNTHLKRKLKKLQGNESSSRYGFPSSSSSYQICRGQWERKLQTDIHMAKKDLSDALSPEKSSDLVEMKPFNDHTSYPKPSGYASSTENIAKLLKGWMRNNPWKMADSADYSEEGTVPMKEDKNSKEMAEAFQSHLGFESLDSSLSDISPSMSPETSLSQYESKPHLNAQSQLSLLEKWLFDEGKDYQLCDITLDQNLHFF

SEQ ID NO: 1181 - DNA, 702 bp, Daucus carota
  CDS (1)..(702)
atggggagagctccttgctgtgagaagatgggactgaagaaaggcccatggagtagtgaagaagaccaaattctcatctcttttattcaacaaaatggtcatggaaactggagggctcttcctaaactagctgggctgttaaggtgtgggaagagttgcaggctgagatggatcaactatttgcgaccagatattaaaaggggaaattttagcaaagaagaggaagagaccatcattgaactgcatcagaagcttggtaacaaatgggcagcaattgctgcgaaactaccggggagaacagacaatgaaattaaaaatgtctggcatactcacttgaagaaaaagctcaaaaactatgatcaggtcaaaaatgagtcgaatgttaaaatgcaagtggaatctgagaatcggaggaatagcccacaacattcgactagtgaactatcctcggtcacagactcatcagccaaggctaagtgtgtcattaagtcggaacaaaatacagagttgtcagagagctcaaaaattccagaaatcgacgcaagtttttggtccgaagaattcaccataaataatcaagataaaggggtcccggggattatcgaggagtttcaggaaagtggcaatgtagatgctgaaatggacttttggtgcaatcttttcagtggagctgaggattttaaagacttgccagagttttaa

SEQ ID NO: 1182 - protein, 233 aa, Daucus carota
MGRAPCCEKMGLKKGPWSSEEDQILISFIQQNGHGNWRALPKLAGLLRCGKSCRLRWINYLRPDIKRGNFSKEEEETIIELHQKLGNKWAAIAAKLPGRTDNEIKNVWHTHLKKKLKNYDQVKNESNVKMQVESENRRNSPQHSTSELSSVTDSSAKAKCVIKSEQNTELSESSKIPEIDASFWSEEFTINNQDKGVPGIIEEFQESGNVDAEMDFWCNLFSGAEDFKDLPEF

SEQ ID NO: 1183 - DNA, 1002 bp, Craterostigma plantagineum
  CDS (1)..(1002)
atgaaccaacagcaggttaaagtttccaagaacaacaagcaagttaataactgtgaagacgatgatgattcttcggacctcagaagaggaccttggactgttgatgaagacttcacactcatcaactacatcgctcaccatggcgaaggaagatggaactctcttgcacgtttcgctggcctgaaacgaactggaaagagctgcagattgagatggttgaactacttgagacccgacgttcgtcgaggaaatatcacactcgaagaacagcttctcattcttgaactccattcacgttggggcaataggtggtcgaagattgcccaacatttgcctggaaggacggacaatgagataaagaactactggagaacaagggtccaaaaacatgccaaacagctaaagtgcgacgtcaacagcaaacagttcaaagacaccatgagatacctttggatgccaagattggtcgagaggatccaagcttccgccaccaccgacgacggagcaccgccggcggtggcctcctcgccgtcgtccgccatgaatacagcctgctacagcgctgccatggctgcaggcgatcaccgtcgtcagtttatgctgatgccacagtattacgcgacgacgacgacgacccacaataattcgatgatcgcccaagaaaattcgagcaccgtggcctcgtcggaatcttttggcagtctttcttctgaactaacggcggaggccaactacgctaactatcaccgagtaatcaacggcgccgatcaccaacagattgactcctcgacgacttcctatgattggcagaactgcgcggtcggaaataatggaaattccgaccaattagggatgggttttgcggatgatcggcggagcaatgaacagtggatgatgatgacggacgacgtcgtcgataatggtggatcgtcggatcaagacaacaacttgtggaatgtggatgacgtgtggttcttacaacagttcagcagctgcttttag

SEQ ID NO: 1184 - protein, 333 aa, Craterostigma plantagineum
MNQQQVKVSKNNKQVNNCEDDDDSSDLRRGPWTVDEDFTLINYIAHHGEGRWNSLARFAGLKRTGKSCRLRWLNYLRPDVRRGNITLEEQLLILELHSRWGNRWSKIAQHLPGRTDNEIKNYWRTRVQKHAKQLKCDVNSKQFKDTMRYLWMPRLVERIQASATTDDGAPPAVASSPSSAMNTACYSAAMAAGDHRRQFMLMPQYYATTTTTHNNSMIAQENSSTVASSESFGSLSSELTAEANYANYHRVINGADHQQIDSSTTSYDWQNCAVGNNGNSDQLGMGFADDRRSNEQWMMMTDDVVDNGGSSDQDNNLWNVDDVWFLQQFSSCF

SEQ ID NO: 1185 - DNA, 1002 bp, Craterostigma plantagineum
  CDS (1)..(1002)
atgaaccaacagcaggttaaagtttccaagaacaacaagcaagttaataactgtgaagacgatgatgattcttcggacctcagaagaggaccttggactgttgatgaagacttcacactcatcaactacatcgctcaccatggcgaaggaagatggaactctcttgcacgtttcgctggcctgaaacgaactggaaagagctgcagattgagatggttaaactacttgagacccgacgttcgtcgaggaaatatcacactcgaagaacagcttctcattcttgaactccattctcgctggggcaataggtggtcgaagattgcccaacatttgcctggaaggacggacaatgagataaagaactactggagaacaagggtccaaaaacatgccaaacagctaaagtgcgacgtcaacagcaaacagttcaaagacaccatgagatacctttggatgccaagattggtcgagaggatccaagcttccgccaccaccgacgacggagcaccgccggcggtggtctcctcgccgtcgtccgccatgaatacagcctgctacaccactgccatggctgcaggcgatcaccgtcgtcagtttatgctgatgccacagtattacgcgacgacgacgacgacccacaataattcgatgatcgcccaagaaaattcgagcaccgtggcctcgtcggaatcttttggcagtctttcttctgaactaacggcggaggccaactacgctaactatcaccgagtaatcaacggcgccgatcaccaacagattgactcctcgacgacttcctatggttggcagaactgcgcagtcggaaataatggaaattccgaccaattagggatgggttttgcggatgatcggcggagcaatgaacagtggatgatgatgacggacgacgtcgtcgataatggtggatcgtcggatcaagacaacaacttgtggaatgtggatgacgtgtggttcttacaacagttcagcagctgcttttag

SEQ ID NO: 1186 - protein, 333 aa, Craterostigma plantagineum
MNQQQVKVSKNNKQVNNCEDDDDSSDLRRGPWTVDEDFTLINYIAHHGEGRWNSLARFAGLKRTGKSCRLRWLNYLRPDVRRGNITLEEQLLILELHSRWGNRWSKIAQHLPGRTDNEIKNYWRTRVQKHAKQLKCDVNSKQFKDTMRYLWMPRLVERIQASATTDDGAPPAVVSSPSSAMNTACYTTAMAAGDHRRQFMLMPQYYATTTTTHNNSMIAQENSSTVASSESFGSLSSELTAEANYANYHRVINGADHQQIDSSTTSYGWQNCAVGNNGNSDQLGMGFADDRRSNEQWMMMTDDVVDNGGSSDQDNNLWNVDDVWFLQQFSSCF

SEQ ID NO: 1187 - DNA, 1008 bp, Craterostigma plantagineum
  CDS (1)..(1008)
atgaaccaacagcaggttgttaaagtttccaagaacaagcaaattaacagtgaagacgatgatgattcttcggacctcagaagaggaccgtggactgttgatgaagacttcacactcatcaactacatcgctcaccatggcgaaggaagatggaactctcttgcacgtttcgctggcctgaaacgaactggaaagagctgcagattgagatggttaaactacttgagacccgatgttcgtcgaggaaatatcacactcgaagaacagcttctcattcttgaactccattctcgttggggcaataggtggtcgaagattgcccaacatttgcctggaaggacagacaatgagataaagaactactggagaacgagggtccaaaaacatgccaaacagctaaagtgcgacgtcaacagcaaacagttcaaagacaccatgagatacctttggatgccaagattggtcgagaggatccaacgtgccgccaccaccgacgacggcgcaccccctctcgcgtcctccgcctcctcgccgtcatccgccatgaatacagcctgctacagcactgccatggctgcaggcgatcaccgtcgtcagtttatgctgatgccacagtattatgcgatgacgacccacagtaatttgatgatcgcccaagaaaattcgagcaccgtagcctcgtcggaatcttttggcagtctttcttctgaactcacggaggccaactacgctaactatcaccaagtaatcaacggcgccgatcatcaacagattgactcctcgacgacgacttcctatggttggcagaacgacttcgcaattaatactgtcggaaataatggaaattccgaccaattagggatgggctctgtagatgatcggcggagcaatgaacagtggatgatgatggacgacgtcgataatggtggatcgtcggataaagacaacaacttgctgtggaatgtggatgacgtgtggttcttacaacagttcagcagctgcttttag

SEQ ID NO: 1188 - protein, 335 aa, Craterostigma plantagineum
MNQQQVVKVSKNKQINSEDDDDSSDLRRGPWTVDEDFTLINYIAHHGEGRWNSLARFAGLKRTGKSCRLRWLNYLRPDVRRGNITLEEQLLILELHSRWGNRWSKIAQHLPGRTDNEIKNYWRTRVQKHAKQLKCDVNSKQFKDTMRYLWMPRLVERIQRAATTDDGAPPLASSASSPSSAMNTACYSTAMAAGDHRRQFMLMPQYYAMTTHSNLMIAQENSSTVASSESFGSLSSELTEANYANYHQVINGADHQQIDSSTTTSYGWQNDFAINTVGNNGNSDQLGMGSVDDRRSNEQWMMMDDVDNGGSSDKDNNLLWNVDDVWFLQQFSSCF

SEQ ID NO: 1189 - DNA, 825 bp, Solanum lycopersicum
  CDS (1)..(825)
atggggagacaaccttgttgtgacaaagttggattgaagaaaggtccatggacagctgaggaagacaagaaactcattaacttcattctcaataatggacaatgttgttggagagctgtccctaaattagcagggttattgagatgtggaaagagttgtagattaagatggacaaattatttaagaccagatttgaagagaggacttttatcagaatatgaagaaaaaatggttattgatcttcatgctcagcttggaaataggtggtcaaaaattgcctctcatttacctggaagaacagataacgaaataaaaaatcactggaatacacacatcaagaagaagttgaagaaaatggggattgatccaatcactcacaagccactctccactatcactattgaccatacaaacacattagaacaagaaaatcaaccaattgaagaagaaaaaaatcaagatatattattggcacaaatggatatcgaaagtagttcaattgatcaatcaactgttgcaaagatcaaatcagaagacgataacaacaacagtaataataacaccatggcaacgaattgcacgaataattttgactcaaccatagtggaagtcaacaataatggcttttgtattgatgaagttccattgattgaacctcatgagattttagtccaagaatcaactccatcaacatcatcatcttcattttcatcatcatcatcatccaacattcttgaagatttgaagtttttatcaagcttcgatgaatggccattaatggaaaataataataacaacaatgttgggatttggatgggaaattaa

SEQ ID NO: 1190 - protein, 274 aa, Solanum lycopersicum
MGRQPCCDKVGLKKGPWTAEEDKKLINFILNNGQCCWRAVPKLAGLLRCGKSCRLRWTNYLRPDLKRGLLSEYEEKMVIDLHAQLGNRWSKIASHLPGRTDNEIKNHWNTHIKKKLKKMGIDPITHKPLSTITIDHTNTLEQENQPIEEEKNQDILLAQMDIESSSIDQSTVAKIKSEDDNNNSNNNTMATNCTNNFDSTIVEVNNNGFCIDEVPLIEPHEILVQESTPSTSSSSFSSSSSSNILEDLKFLSSFDEWPLMENNNNNNVGIWMGN

SEQ ID NO: 1191 - DNA, 1044 bp, Solanum lycopersicum
  CDS (1)..(1044)
atgggtagagtcccttgttgtgataaaatgggagtgaagaaagggccatggactcctgaagaagatataatgttagtctcttatgtgcaacaacatggtccaggcaattggagggcacttcccactaaaacagggttgcgtaggtgtagcaagagctgcaggctaagatggacaaactaccttaggccagggataaagaggggtaacttcacagatcaagaagaaaaaatgattatccagcttcaagcacttttaggaaacaaatgggctgcaatagcttcgtatctgccagagagaacagataacgacataaaaaactactggaatactcatctaaagaaaaagatgaaaaggcttgaccaatgtcatggatcaaatgatctattttctttagaaaatgggcttactcacttatcatcttcaaattcatcaacttctaggggacaatgggaaaggacacttcaagctgatattaacatggctaaaaaggctttacataatgctttgtcacttgaaaatccaacaagctcacacaataataatattaaacaagaaaatacacaagtttcttctacttctactatttatgcatcaagtactgaaaatatagctagattgctacaaggatggataggatcaagtacttcttccacaaataattctgaaagttcaaaaacttcatcaaacaacattgcaacaactgattcatcttcatgtgatgggactccaaatgctgaaaccaaaggtggaatggggttgatggaagcatttgagtcactatttggtttggaatcatttgaatcatcaagttcagatgagttgtctcaaacaacaactcctgaggctattaaaattgaaataaagaaggaagaaaatgaacatgatgttgaagtgccactatctattatcttagagaattggttgcttgatgaaaatacactcaatattcaaccaaaaaatgacttgactaccttgatatcttttgatgaaactccacaacttttctacaagtttttttttttgttgattcttttgatggaataa

SEQ ID NO: 1192 - protein, 347 aa, Solanum lycopersicum
MGRVPCCDKMGVKKGPWTPEEDIMLVSYVQQHGPGNWRALPTKTGLRRCSKSCRLRWTNYLRPGIKRGNFTDQEEKMIIQLQALLGNKWAAIASYLPERTDNDIKNYWNTHLKKKMKRLDQCHGSNDLFSLENGLTHLSSSNSSTSRGQWERTLQADINMAKKALHNALSLENPTSSHNNNIKQENTQVSSTSTIYASSTENIARLLQGWIGSSTSSTNNSESSKTSSNNIATTDSSSCDGTPNAETKGGMGLMEAFESLFGLESFESSSSDELSQTTTPEAIKIEIKKEENEHDVEVPLSIILENWLLDENTLNIQPKNDLTTLISFDETPQLFYKFFFLLILLME

SEQ ID NO: 1193 - DNA, 885 bp, Gossypium hirsutum
  CDS (1)..(885)
atgggacgatcaccttgttgtgaaaaggctcataccaacaaaggtgcctggaccaaagaggaagatcaacgcctcatcaactacatccgtgtccatggtgaaggctgctggcgttccctccccaaagctgctgggctgcttagatgtggtaagagttgcagattaagatggataaactacttgaggcctgatcttaagagaggaaatttcactgaagaagaagatgagcttatcatcaagcttcacagtttacttggaaacaaatggtcattgattgctggaagattaccaggaagaacagataatgagataaagaactactggaacacacacatcaaaagaaagcttataagcagaggaattgatccacaaactcatcgtcctctcaatcaaacggccaataccaacacagtcacagcccccaccgaattggatttcagaaactcgcccacatccgtttccaaatccagttccatcaaaaacccgtctctggatttcaattacaatgaatttcaattcaagtccaacacagattcccttgaagaacccaactgtacagccagcagtggcatgactacagatgaagagcaacaagaacagctgcacaagaagcagcaatacggtccgagcaatgggcaagacataaatttggagctgtcgattgggattgtttcagctgactcatctcgggtatcaaatgccaactcggccgagtcgaaaccaaaggtagataacaacaatttccagtttcttgaacaagctatggtggctaaggcggtatgtttgtgttggcaattaggttttggaacaagtgaaatttgtaggaactgtcaaaattcaaattcaaatggcttctatagttattgtagacccttggattcatag

SEQ ID NO: 1194 - protein, 294 aa, Gossypium hirsutum
MGRSPCCEKAHTNKGAWTKEEDQRLINYIRVHGEGCWRSLPKAAGLLRCGKSCRLRWINYLRPDLKRGNFTEEEDELIIKLHSLLGNKWSLIAGRLPGRTDNEIKNYWNTHIKRKLISRGIDPQTHRPLNQTANTNTVTAPTELDFRNSPTSVSKSSSIKNPSLDFNYNEFQFKSNTDSLEEPNCTASSGMTTDEEQQEQLHKKQQYGPSNGQDINLELSIGIVSADSSRVSNANSAESKPKVDNNNFQFLEQAMVAKAVCLCWQLGFGTSEICRNCQNSNSNGFYSYCRPLDS

SEQ ID NO: 1195 - DNA, 1152 bp, Sorghum bicolor
  CDS (1)..(1152)
atggggagggcgccgtgctgcgacaaggtggggctcaagcgcgggaggtggacggcggaggaggaccagatactcgccaactacattgcagagcacggcgagggatcctggaggtcgctgcccaagaatgcagggctgctccggtgcggcaagagctgccggctgcggtggatcaactaccttcgggccgacgtcaagagagggaacatctccaaggaggaagaggacatcatcatcaagctccacgccaccctcggcaacaggtggtccctgatcgccagccacttccccggccgaacagacaacgagatcaagaactactggaattcgcacctcagccggcagatccacacgtaccgccgcaaatacaccgccgcgccggacaccaccgtcatcatcgacatgagcaagctgcacagcgccgagaagcgccgcggcggcaggaccccgggatggtcgccaaagagcagcagcgccaacaccaccaccaacaccacctccagcaagacgaacaagagcaaggagacggaccctgggcccggactgaagtcggcctgcgacgcgaaaggcgcgtccagcccgcccaccgccgcgacgacgacgtcggcggcgtcgagcccgcggcacagcgacggggcgcgaagcgccgtggtggacccggatccgaaccagcccaacagcagcagcggcagcacggccgaggggccctgcagcggcgaggacgccaccgggccgtgggagctggacccgattgacctcggggatctctgggaggccgagagtgagatagacgccctgatgtcgatggacgcacctctggaaggatttgacgcggtcgtcggtgaggctcaggctcaggtggacgacctgttcgacatggacatggactgggatggcttcgcggcgcatctatggggcgggccggagcagaacgaccacatcgcggagctgcagcaggccgccgagccgcaggctactgctgcggcctgcaccccgaacgaacacgagccgcaggtcgctgctgctgctgcggcctgcaccccggacgaacacgagccgcaggccgctgctgctgcggcggctgcgacctgcaccccggatgaacacgggctggaggcgttcgagacttggctcctgtccgactcgttctga

SEQ ID NO: 1196 - protein, 383 aa, Sorghum bicolor
MGRAPCCDKVGLKRGRWTAEEDQILANYIAEHGEGSWRSLPKNAGLLRCGKSCRLRWINYLRADVKRGNISKEEEDIIIKLHATLGNRWSLIASHFPGRTDNEIKNYWNSHLSRQIHTYRRKYTAAPDTTVIIDMSKLHSAEKRRGGRTPGWSPKSSSANTTTNTTSSKTNKSKETDPGPGLKSACDAKGASSPPTAATTTSAASSPRHSDGARSAVVDPDPNQPNSSSGSTAEGPCSGEDATGPWELDPIDLGDLWEAESEIDALMSMDAPLEGFDAVVGEAQAQVDDLFDMDMDWDGFAAHLWGGPEQNDHIAELQQAAEPQATAAACTPNEHEPQVAAAAAACTPDEHEPQAAAAAAAATCTPDEHGLEAFETWLLSDSF

SEQ ID NO: 1197 - DNA, 1032 bp, Arabidopsis thaliana
  CDS (1)..(1032)
atgatgatgaggaaaccggacattactacgatcagagacaaaggcaagccaaatcatgcatgtggtggtaataacaacaaaccgaagctaagaaaaggactttggtcgcctgatgaagatgagaagctgataagatacatgttgactaatggacaaggatgttggagtgacatcgctagaaatgctggtcttttacgttgtggtaaaagttgtcgccttcgctggatcaattacttgaggcctgatcttaaacgtggatccttctctcctcaggaggaggatctcatcttccatttgcattccattcttggtaacaggtggtctcaaatagctactcggcttccaggtagaacagacaacgagatcaaaaacttttggaactcgacattgaagaagcggcttaagaacaacagcaacaacaatacttcatcaggatcatcacctaacaatagtaatagtaattccttggacccaagagatcaacatgtggatatgggaggcaactcaacttcattgatggatgactatcatcatgatgaaaacatgatgacagtggggaacaccatgcgcatggactcttcctccccattcaatgttggaccaatggttaatagtgtgggcttaaaccaactttatgatcccttgatgatatcagtgccggataacggatatcaccaaatgggaaacacagtgaatgtgttcagcgttaatggtttaggagattatggaaacacagttcttgatccaattagcaagagagtatcagtagaaggtgatgattggttcattcccccctcggagaataccaacgtcattgcttgtagtacaagcaacaacctaaacttacaggcccttgatccttgcttcaatagcaaaaatctttgtcattcagaaagcttcaaggtagggaatgtgttggggatagagaatggttcttgggaaatagaaaaccctaaaatcggagattgggatttggatggtctcatcgataacaactcttcttttcccttccttgatttccaagtcgattga

SEQ ID NO: 1198 - protein, 343 aa, Arabidopsis thaliana
MMMRKPDITTIRDKGKPNHACGGNNNKPKLRKGLWSPDEDEKLIRYMLTNGQGCWSDIARNAGLLRCGKSCRLRWINYLRPDLKRGSFSPQEEDLIFHLHSILGNRWSQIATRLPGRTDNEIKNFWNSTLKKRLKNNSNNNTSSGSSPNNSNSNSLDPRDQHVDMGGNSTSLMDDYHHDENMMTVGNTMRMDSSSPFNVGPMVNSVGLNQLYDPLMISVPDNGYHQMGNTVNVFSVNGLGDYGNTVLDPISKRVSVEGDDWFIPPSENTNVIACSTSNNLNLQALDPCFNSKNLCHSESFKVGNVLGIENGSWEIENPKIGDWDLDGLIDNNSSFPFLDFQVD

SEQ ID NO: 1199 - DNA, 810 bp, Arabidopsis thaliana
  CDS (1)..(810)
atgagtttgtggggagggatgggaggaggatggggaatggtagaagaaggttggagaaaagggccttggactgctgaagaagaccgccttttgatcgattatgtgcagcttcacggtgaagggcgatggaactctgttgcgaggctcgcggggttgaagagaaatgggaaaagctgcaggttaagatgggttaactacctaagaccagacctcaagagaggacaaatcactcctcatgaagaaaccattatccttgagttacatgctaagtggggcaataggtggtccacgattgcacgtagtttaccgggaagaacagacaacgaaatcaagaactattggcgaacccatttcaagaagaagacgaagtctccaactaacagtgcggagaagacaaagaaccgaatcttgaagaggcaacaatttcagcagcaaagacaaatggagttgcagcaagaacaacagttgcttcaattcaatcaaatcgacatgaaaaagatcatgtcgttactagatgacgacaacaacaatggtgataacaccttcagcagtagtagtagtggcgaaagtggagcattatatgtacctcatcagatcacacattcaacaacaacttctggttgtgaaccaaatagtaacgggtattacccggtgattccggtaacaatacctgaggctaatgtgaatgaagataacgctatttgggacggtttatggaatctggattttgaaggacaaggaagttttggtggcgctgcttgtgccccaaggaagcactatttccagaacatggtcattcccttctgttaa

SEQ ID NO: 1200 - protein, 269 aa, Arabidopsis thaliana
MSLWGGMGGGWGMVEEGWRKGPWTAEEDRLLIDYVQLHGEGRWNSVARLAGLKRNGKSCRLRWVNYLRPDLKRGQITPHEETIILELHAKWGNRWSTIARSLPGRTDNEIKNYWRTHFKKKTKSPTNSAEKTKNRILKRQQFQQQRQMELQQEQQLLQFNQIDMKKIMSLLDDDNNNGDNTFSSSSSGESGALYVPHQITHSTTTSGCEPNSNGYYPVIPVTIPEANVNEDNAIWDGLWNLDFEGQGSFGGAACAPRKHYFQNMVIPFC

SEQ ID NO: 1201 - DNA, 924 bp, Arabidopsis thaliana
  CDS (1)..(924)
atgagagagaagtgggaaataaaaagagatgaaatgggacatcgatgtcgtggaaaacacaaagtgaagagaggtctttggtctccagaggaagacgagaagcttcttcgttatatcaccactcatggtcatcctagttggagttccgttccaaagcttgccgggttgcagagatgtgggaagagttgcagattaaggtggataaactatctaaggcctgatctgaggagaggttcgtttaatgaggaagaagagcagattatcatcgacgtacatcgtattcttggtaacaaatgggctcagattgctaagcacttacctggacgcactgataatgaagtcaagaacttttggaactcatgcattaagaagaaacttctttctcaaggcttagatccttctacacataatcttatgccttcacacaaaagatcttcttcttcaaacaataataatatccccaagccaaacaaaacgacgtccatcatgaagaaccctactgatcttgatcaatcaaccactgctttttcaatcacaaacatcaatccacccacttccactaaaccaaacaaacttaaatctcctaaccagactacaatcccatctcaaaccgtgatccctatcaatgataacatgtcaagtactcaaaccatgatccctatcaatgatcccatgtcaagtcttttagatgatgagaatatgattcctcactggtcagatgttgatggaatggcgatccacgaagctccgatgttgcctagtgataaggcagtagtgggagtggatgatgatgatctcaacatggacattttgtttaacactccttcttcttctgcttttgatcctgattttgcttccattttctcctctgcaatgtctatcgatttcaatcccatggatgatcttggcagctggaccttttag

SEQ ID NO: 1202 - protein, 307 aa, Arabidopsis thaliana
MREKWEIKRDEMGHRCRGKHKVKRGLWSPEEDEKLLRYITTHGHPSWSSVPKLAGLQRCGKSCRLRWINYLRPDLRRGSFNEEEEQIIIDVHRILGNKWAQIAKHLPGRTDNEVKNFWNSCIKKKLLSQGLDPSTHNLMPSHKRSSSSNNNNIPKPNKTTSIMKNPTDLDQSTTAFSITNINPPTSTKPNKLKSPNQTTIPSQTVIPINDNMSSTQTMIPINDPMSSLLDDENMIPHWSDVDGMAIHEAPMLPSDKAVVGVDDDDLNMDILFNTPSSSAFDPDFASIFSSAMSIDFNPMDDLGSWTF

SEQ ID NO: 1203 - DNA, 1032 bp, Arabidopsis thaliana
  CDS (1)..(1032)
atgatgatgaggaaaccggacattactacgatcagagacaaaggcaagccaaatcatgcatgtggtggtaataacaacaaaccgaagctaagaaaaggactttggtcgcctgatgaagatgagaagctgataagatacatgttgactaatggacaaggatgttggagtgacatcgctagaaatgctggtcctttacgttgtggtaaaagttgtcgccttcgctggatcaattacttgaggcctgatcttaaacgtggatccttctctcctcaggaggaggatctcatcttccatttgcattccattcttggtaacaggtggtctcaaatagctactcggcttccaggtagaacagacaacgagatcaaaaacttttggaactcgacattgaagaagcggcttaagaacaacagcaacaacaatacttcatcaggatcatcacctaacaatagtaatagtaattccttggacccaagagatcaacatgtggatatgggaggcaactcaacttcattgatggatgactatcatcatgatgaaaacatgatgacagtggggaacaccatgcgcatggactcttcctccccattcaatgttggaccaatggttaatagtgtgggcttaaaccaactttatgatcccttgatgatatcagtgccggataacggatatcaccaaatgggaaacacagtgaatgtgttcagcgttaatggtttaggagattatggaaacacaattcttgatccaattagcaagagagtatcagtagaaggtgatgattggttcattcccccctcggagaataccaacgtcattgcttgtagtacaagcaacaacctaaacttacaggcccttgatccttgcttcaatagcaaaaatctttgtcattcagaaagcttcaaggtagggaatgtgttggggatagagaatggttcttgggaaatagaaaaccctaaaatcggagattgggatttggatggtctcatcgataacaactcttcttttcccttccttgatttccaagtcgattga

SEQ ID NO: 1204 - protein, 343 aa, Arabidopsis thaliana
MMMRKPDITTIRDKGKPNHACGGNNNKPKLRKGLWSPDEDEKLIRYMLTNGQGCWSDIARNAGPLRCGKSCRLRWINYLRPDLKRGSFSPQEEDLIFHLHSILGNRWSQIATRLPGRTDNEIKNFWNSTLKKRLKNNSNNNTSSGSSPNNSNSNSLDPRDQHVDMGGNSTSLMDDYHHDENMMTVGNTMRMDSSSPFNVGPMVNSVGLNQLYDPLMISVPDNGYHQMGNTVNVFSVNGLGDYGNTILDPISKRVSVEGDDWFIPPSENTNVIACSTSNNLNLQALDPCFNSKNLCHSESFKVGNVLGIENGSWEIENPKIGDWDLDGLIDNNSSFPFLDFQVD

SEQ ID NO: 1205 - DNA, 960 bp, Arabidopsis thaliana
  CDS (1)..(960)
atgggaaaatcttcaagctcggaggaaagtgaagtgaagaaagggccatggactccggaggaagacgagaagctcgtaggctatattcaaacgcacggtcccggcaaatggcgtacccttcccaagaacgccgggttaaaaagatgcgggaagagttgtagattgcgatggacgaattatctaagacccgatatcaagagaggagagttctctcttcaagaggaagaaaccatcattcaacttcatcgtcttcttggaaacaaatggtccgcaattgctattcacttaccaggaagaacagataatgaaatcaaaaactattggaacacacatattaaaaagaaactcttacgaatggggattgatccggtgactcattgtccccgcattaatcttctccagctctcttcgtttcttacctcatcattgtttaaatctatgtcacaaccgatgaatactccatctgatctcactacttcaaatattaatcctgatatcttgaatcatctcactgcctctctcaacaacgttcagaccgaatcataccaaccaaaccaacagcttcaaaacgacctaaacactgaccaaaccactttcaccggtttgctcaactcaacaccacccgttcaatggcaaaacaatggagaatacttgggagattatcacagttataccggtacaggtgatccatctaataacaaagtccctcaagccggaaactactcatcagccgcatttgtatccgaccacattaatgatggtgagaattttaaggccggatggaatttcagttcatcaatgctagcgggaacttcatcgagcagctcgacaccgttgaattcgtcttcgactttttatgtcaatggtggaagcgaagatgatagagagagttttggtagcgacatgttgatgtttcatcatcatcatgatcataataataatgctttgaatctatcataa

SEQ ID NO: 1206 - protein, 319 aa, Arabidopsis thaliana
MGKSSSSEESEVKKGPWTPEEDEKLVGYIQTHGPGKWRTLPKNAGLKRCGKSCRLRWTNYLRPDIKRGEFSLQEEETIIQLHRLLGNKWSAIAIHLPGRTDNEIKNYWNTHIKKKLLRMGIDPVTHCPRINLLQLSSFLTSSLFKSMSQPMNTPSDLTTSNINPDILNHLTASLNNVQTESYQPNQQLQNDLNTDQTTFTGLLNSTPPVQWQNNGEYLGDYHSYTGTGDPSNNKVPQAGNYSSAAFVSDHINDGENFKAGWNFSSSMLAGTSSSSSTPLNSSSTFYVNGGSEDDRESFGSDMLMFHHHHDHNNNALNLS

SEQ ID NO: 1207 - DNA, 972 bp, Arabidopsis thaliana
  CDS (1)..(972)
atggatgaaaaaggaagaagcttgaagaacaacaacatggaagacgagatggacctaaagagaggtccgtggactgctgaagaagattttaagctcatgaattacattgctactaatggagaaggtcgctggaactctctttctcgttgcgccggcctccaacgcaccggtaaaagctgtagactaaggtggttaaactatctccgccctgacgtccgccgtggaaacattacacttgaagaacaactcttgatcctcgaacttcattcccgttggggaaatagatggtcaaaaatcgcacaatatttaccgggaagaacggacaacgagatcaagaactactggaggacgcgggtgcaaaagcatgcgaaacagttgaaatgtgatgtgaatagccaacaattcaaagacacaatgaagtacttgtggatgcctcgactagtcgagaggattcagtcagcctcggcctcatccgcagcagcagccaccaccacaaccaccaccaccacaggatcagccggcacgtcatcttgcatcacaacctctaacaatcaattcatgaattacgactacaacaacaacaacatgggacaacagtttggtgtaatgagcaacaatgattatatcacgcctgaaaatttcagcgtggcagtgtctccggcgtcagacttaacggagtactacagcgctccaaaccctaacccggaatactattcgggtcaaatggggaatagttattatccagatcagaatttagtgagttcacaattattaccggataattatttcgactatagtggattattagacgaagatctaacggctatgcaagagcagagtaacctcagctggtttgaaaacattaatggtgctgtttcttcttcagacagtttatggaacattggagaaactgatgaagaattctggttcttacagcagcaacaacagttcaacaataatggtagcttctga

SEQ ID NO: 1208 - protein, 323 aa, Arabidopsis thaliana
MDEKGRSLKNNNMEDEMDLKRGPWTAEEDFKLMNYIATNGEGRWNSLSRCAGLQRTGKSCRLRWLNYLRPDVRRGNITLEEQLLILELHSRWGNRWSKIAQYLPGRTDNEIKNYWRTRVQKHAKQLKCDVNSQQFKDTMKYLWMPRLVERIQSASASSAAAATTTTTTTTGSAGTSSCITTSNNQFMNYDYNNNNMGQQFGVMSNNDYITPENFSVAVSPASDLTEYYSAPNPNPEYYSGQMGNSYYPDQNLVSSQLLPDNYFDYSGLLDEDLTAMQEQSNLSWFENINGAVSSSDSLWNIGETDEEFWFLQQQQQFNNNGSF

SEQ ID NO: 1209 - DNA, 1023 bp, Pinus taeda
  CDS (1)..(1023)
atggggaggcaaccgtgctgtgacaaagtgggattgaagaagggtccatggactgcagaggaagacagaaaactggtgaattttatcaccctgcatggccatggatgctggcgcgaagtacccaaacttgctggtctgcttagatgtggcaagagttgtagattgcgttggacaaattacttgcgcccggatttgaagcgtggattattgtctgaatcagaggagaagctcatcattgatctacatgctgccatagggaataggtggtcacgaatcgctgcgcaattgccagggagaactgataacgagatcaagaattactggaacacgaggatcaagaagaaactgcgccagatgggaatcgatcctgtgacccacaagcctctcacccaaatgcaaatgcagagcacccctgcccagactctgctgctgcaagaaaatgatacagagcagaagcagcaggagcaacataatgagcctgatcctgatcagaatcagagcagcaatggcactgtggagacattggtctcgagggcgagagaaccccacgacgacatagagcctctgcagaatttcaacatggaggattcgaattttaacatggaggattcgatgcaattgttcaatgtctgttcgcccaccagcgggataagcctgtctgggagaaccgaggaggtcgattcagatgattctgatcaggtctccaagagcttcggcaatggcagcagtacccattctcagtacattgggcgagaaagctctggtgtcaaggccgaatgtggtttgtctggttgggatcagatggctggcgttttgggcgatcccctttctgagtggaatgtcgatttggagtcctgggctgctggattggatgccactgcggcctctgcctctgcatggattcagcagctccctgactgccaatggaacgacttccaaggcgattttgagatctgcagcagcaagtcatgtccggagactctgcagagactggggccctttcttgatgacgatgaattgtga

SEQ ID NO: 1210 - protein, 340 aa, Pinus taeda
MGRQPCCDKVGLKKGPWTAEEDRKLVNFITLHGHGCWREVPKLAGLLRCGKSCRLRWTNYLRPDLKRGLLSESEEKLIIDLHAAIGNRWSRIAAQLPGRTDNEIKNYWNTRIKKKLRQMGIDPVTHKPLTQMQMQSTPAQTLLLQENDTEQKQQEQHNEPDPDQNQSSNGTVETLVSRAREPHDDIEPLQNFNMEDSNFNMEDSMQLFNVCSPTSGISLSGRTEEVDSDDSDQVSKSFGNGSSTHSQYIGRESSGVKAECGLSGWDQMAGVLGDPLSEWNVDLESWAAGLDATAASASAWIQQLPDCQWNDFQGDFEICSSKSCPETLQRLGPFLDDDEL

SEQ ID NO: 1211 - DNA, 945 bp, Pinus taeda
  CDS (1)..(945)
atgagctgcacaacaggaggactctcctctcccgtctccaaacccaagctaaggaaaggcctctggtcgcctgaggaggatgataaactcatcaactacatgatgaaaaacggccagggttgctggagcgatgtcgccaagcaagctggtctgcagagatgcggaaaaagctgtaggctgaggtggattaactatttaaggcccgacctcaaacgcggtgcattttcaccccaggaagaacattggatcatacacttgcattccattctcggcaacaggtggtctcagattgcagcccggttgcccggacgtacggacaacgagatcaagaatttctggaactcctgcataaagaagaagttgaaacacctttcggcctccaccaacaacagtaaatctatctctgcacctaatcgtaccagtaccatgaattcatcgatcacgcccttttctgaatcgtctgccgagccattggaggtcatggcaacaaggtatcagccatcgaatgcttttaatcatgaagtgcccactgcagaaaatcagttttgtattccggatgtattggcgttaagacatgagcaagtacagagtcagaatcaattttcaattgatcaggactcggccaccaacaacctcatttcccacctgtggaattccaattctacagctgtttcttctcatgagagcttctcccatgccttcatgtctccgggtctgcaaacgcaaggccatgttgtaaagactccaattaaaccatgcgatcaaatctcgtggagtacaccactgactcgtgaagctgctgggtctcatgcctgcaattactctcttggctgcaacatccctgctcttgttgagagcgagacactgaaagaaaaattcaagaatgatgcaggcgatcagattaatgaaaatgagatcatgtatcttccacggcatcttctgtga

SEQ ID NO: 1212 - protein, 314 aa, Pinus taeda
MSCTTGGLSSPVSKPKLRKGLWSPEEDDKLINYMMKNGQGCWSDVAKQAGLQRCGKSCRLRWINYLRPDLKRGAFSPQEEHWIIHLHSILGNRWSQIAARLPGRTDNEIKNFWNSCIKKKLKHLSASTNNSKSISAPNRTSTMNSSITPFSESSAEPLEVMATRYQPSNAFNHEVPTAENQFCIPDVLALRHEQVQSQNQFSIDQDSATNNLISHLWNSNSTAVSSHESFSHAFMSPGLQTQGHVVKTPIKPCDQISWSTPLTREAAGSHACNYSLGCNIPALVESETLKEKFKNDAGDQINENEIMYLPRHLL

SEQ ID NO: 1213 - DNA, 858 bp, Oryza sativa
  CDS (1)..(858)
atggggaggcagccgtgctcggacaagctgggggtgaagagggggccgtggacggcggaggaggacaagaagctgatgagcttcatcctgaccaacggccattgctgctggcgcgccgtgccgaagctcgccgggctgctccgctgcggcaagagctgccgcctccggtggacaaactacctccgccccgacctcaagcgcggcctcctcaccgacgccgaggagcagctcgtcatcgacctccacgccaagctcggcaacagatggtccaagattgctgccaagctaccgggcaggacggacaacgagatcaagaaccactggaacacgcacatcaagaagaagctcatcaagatgggcatcgacccggtgacgcacgagcccctcgaccggaagcaggagagcccggccaccacctcgcagtccaccgtcacggcggagtcgtccaagtccggcgaggcgaccaggcagcaaagccggcagcttgacgacgccgtcgtcagggacatgtccgtgtctgccggtggcgacagcccgccggagtcgagcactaacaccgccagcaccgccggtggcagtagcagcagcagcagtagccatcaccaggaccctctggtgaagtggctgctggaagaggacctgctgcccaccggtgacgagccatggctcaatttcacggccagcaacgacgtcgacgagttcagtagcatcgccgccaccggcgccacgccggcgctgccgtgggacgtcggcatgacgacggactggctgctcgactaccaagattttgggatgggagactcgagcttggtggtcgatgcctccatggtcaacagctcaaatgggtccaacttctag

SEQ ID NO: 1214 - protein, 285 aa, Oryza sativa
MGRQPCSDKLGVKRGPWTAEEDKKLMSFILTNGHCCWRAVPKLAGLLRCGKSCRLRWTNYLRPDLKRGLLTDAEEQLVIDLHAKLGNRWSKIAAKLPGRTDNEIKNHWNTHIKKKLIKMGIDPVTHEPLDRKQESPATTSQSTVTAESSKSGEATRQQSRQLDDAVVRDMSVSAGGDSPPESSTNTASTAGGSSSSSSSHHQDPLVKWLLEEDLLPTGDEPWLNFTASNDVDEFSSIAATGATPALPWDVGMTTDWLLDYQDFGMGDSSLVVDASMVNSSNGSNF

SEQ ID NO: 1215 - DNA, 885 bp, Gossypium hirsutum
  CDS (1)..(885)
atgggacgatcaccttgttgtgaaaaggctcataccaacaaaggtgcctggaccaaagaggaagatcaacgcctcatcaactacatccgtgtccatggtgaaggctgctggcgttccctccccaaagctgctgggctgcttagatgtggtaagagttgcagattaagatggataaactacttgaggcctgatcttaagagaggaaatttcactgaggaagaagatgagcttatcatcaagcttcacagtttacttggaaacaaatggtcattgattgctggaagattaccaggaagaacagataatgagataaagaactactggaacacacacatcaaaagaaagcttataagcagaggaattgatccacaaactcatcgtcctctcaatcaaaccgccaataccaacacggtcacagcccccaccgaattggatttcagaaacacgcctacatccgtttccaaatccagttccatcaaaaacccatctctggatttcaattacaatgaatttcaattcaagtccaacacagattcccttgaagaacccaactgtacaaccagcagtggaatgactacagatgaagaacaacaagaacagctgcacaagcagcagcaatacgatccaagcaatgggcaagacttaaatttggagctgtcgattgggattgtttcagctgactcatctcgggtatcaagtgccaactcggccgagtcgaaaccaaaggtagataacaacaatttccagtttcttgaacaagctatggtggctaaggcggtatgtttgtgttggcaattaggttttggaacaagtgaaatttgtaggaactgtcaaaattcaaattcaaatggcttctatagttattgtagacccttggattcatag

SEQ ID NO: 1216 - protein, 294 aa, Gossypium hirsutum
MGRSPCCEKAHTNKGAWTKEEDQRLINYIRVHGEGCWRSLPKAAGLLRCGKSCRLRWINYLRPDLKRGNFTEEEDELIIKLHSLLGNKWSLIAGRLPGRTDNEIKNYWNTHIKRKLISRGIDPQTHRPLNQTANTNTVTAPTELDFRNTPTSVSKSSSIKNPSLDFNYNEFQFKSNTDSLEEPNCTTSSGMTTDEEQQEQLHKQQQYDPSNGQDLNLELSIGIVSADSSRVSSANSAESKPKVDNNNFQFLEQAMVAKAVCLCWQLGFGTSEICRNCQNSNSNGFYSYCRPLDS

SEQ ID NO: 1217 - DNA, 762 bp, Vitis labrusca x Vitis vinifera
  CDS (1)..(762)
atggtaagagctccttgttgtgataaggtgggattgaagaaggggccatggacgactcaggaagatcaaaatttgacggcctacgttctacaacatggccatggaaactggcgagcccttccaaaacaagccggattactaagatgtgggaagagttgcagactccgatggataaactacttgcgacctgatatcaagagaggaaatttcagcagagaagaagaggataccatcattgagttacatgaaaagcttggcaataaatggtcggccatagcagccagcctaccgggtcggaccgacaacgagataaaaaatgtctggcacacacacctgaagaagaggctcaagaaaaaattggccactccggattccaaaggccactttactccagcagcttccgcatgtgactcggattcttttaattcctccggaaaaatgtcccctcaaccgtcctccagtgaattctcttcatttacagactcctcaacaaggaccatggaaacacacagcactggcgtcaagaatgaacagatggaggagtactcaccggaatcatttcctgaaatcgatgaaagtttttggtcagacgcgctgtcctctgataattcaagcatggcatcagatttcccagcagtcgcagacgaattacagcttcagacaccggaactcgcctgtggacaaatttcaaacatgatggatgatggcatggagttttggtatgacgttttcattagagctggcggcttgcaggagctttga

SEQ ID NO: 1218 - protein, 253 aa, Vitis labrusca x Vitis vinifera
MVRAPCCDKVGLKKGPWTTQEDQNLTAYVLQHGHGNWRALPKQAGLLRCGKSCRLRWINYLRPDIKRGNFSREEEDTIIELHEKLGNKWSAIAASLPGRTDNEIKNVWHTHLKKRLKKKLATPDSKGHFTPAASACDSDSFNSSGKMSPQPSSSEFSSFTDSSTRTMETHSTGVKNEQMEEYSPESFPEIDESFWSDALSSDNSSMASDFPAVADELQLQTPELACGQISNMMDDGMEFWYDVFIRAGGLQEL

SEQ ID NO: 1219 - DNA, 645 bp, Arabidopsis thaliana
  CDS (1)..(645)
atggagaaaagagaaagtagtggtggttctggatcaggagatgcagaggtgagaaaagggccatggacgatggaagaagatttgattctcatcaattatatcgccaatcatggtgaaggtgtttggaactctctcgccaaatctgcaggactaaaacgcaccgggaaaagttgccggctccggtggctgaactacctccgacctgatgtgcgacggggaaatatcacaccagaagaacagctcaccatcatggaacttcatgcaaaatggggaaataggtggtcaaaaattgcaaagcatttaccaggaaggaccgacaatgagataaagaacttttggaggactaagatccagaaatacatcatcaagagcggagaaacgacgaccgttggatcacaaagctccgagtttataaaccatcatgcgacaacgagccatgtcatgaatgatactcaagaaaccatggatatgtattctccaacgacgtcgtatcaacatgccagcaatattaatcagcagcttaattatggtaattatgtgcctgaatccagttcgatcatgatgccattatctgttgatcaatccgaacaaaactattggagcgtcgatgatctttggcccatgaatatatataatggtaattaa

SEQ ID NO: 1220 - protein, 214 aa, Arabidopsis thaliana
MEKRESSGGSGSGDAEVRKGPWTMEEDLILINYIANHGEGVWNSLAKSAGLKRTGKSCRLRWLNYLRPDVRRGNITPEEQLTIMELHAKWGNRWSKIAKHLPGRTDNEIKNFWRTKIQKYIIKSGETTTVGSQSSEFINHHATTSHVMNDTQETMDMYSPTTSYQHASNINQQLNYGNYVPESSSIMMPLSVDQSEQNYWSVDDLWPMNIYNGN

SEQ ID NO: 1221 - DNA, 819 bp, Arabidopsis thaliana
  CDS (1)..(819)
atgggcaaaggaagagcaccatgttgtgacaaaaccaaagtgaagagaggaccatggagccatgatgaagacttgaaactcatctctttcattcacaagaatggtcatgagaattggagatctctcccaaagcaagctggattgttgaggtgtggcaagagttgtcgtctgcgatggattaattacctcagacctgatgtgaaacgtggcaatttcagtgcagaggaagaagacaccatcatcaaacttcaccagagctttggtaacaagtggtcgaagattgcttctaagctgcctggaagaacagacaatgagatcaagaatgtgtggcatacacatctcaagaaaagattgagctcggaaactaaccttaatgccgatgaggcgggttcaaaaggttctttgaacgaagaagagaactctcaagagtcatctccaaatgcttcaatgtcttttgctggttccaacatttcaagcaaagacgatgatgcacagataagtcaaatgtttgagcacattctaacttatagcgagtttacggggatgttacaagaggtagacaaaccagagctgctggagatgccttttgatttagatcctgacatttggagtttcatagatggttcagactcattccaacaaccagagaacagagctcttcaagagtctgaagacgatgaagttgataaatggtttaagcacctggaaagcgaactcgggttagaagaaaacgataaccaacaacaacagcataaacagggaacagaagatgaacattcatcatcactcttggagagttacgagctcctcatacattaa

SEQ ID NO: 1222 - protein, 272 aa, Arabidopsis thaliana
MGKGRAPCCDKTKVKRGPWSHDEDLKLISFIHKNGHENWRSLPKQAGLLRCGKSCRLRWINYLRPDVKRGNFSAEEEDTIIKLHQSFGNKWSKIASKLPGRTDNEIKNVWHTHLKKRLSSETNLNADEAGSKGSLNEEENSQESSPNASMSFAGSNISSKDDDAQISQMFEHILTYSEFTGMLQEVDKPELLEMPFDLDPDIWSFIDGSDSFQQPENRALQESEDDEVDKWFKHLESELGLEENDNQQQQHKQGTEDEHSSSLLESYELLIH

SEQ ID NO: 1223 - DNA, 882 bp, Gossypium hirsutum
  CDS (1)..(882)
atggatgtttacaagagaggtttcatatctgaaacttcaagaaatgaagaagagatggagctaaggaaaggtccatggactgaagaagaggactccatgcttaaggcgcatgtcaatatccacggcgaaggtcgctggaacgctgttgctcgcttatcaggattgagaagaaccggaaaaagctgcagattgagatggctgaactatatgcgaccagaaatcaaacgaggaaacatcagcctcgaagagcagctattgattcttgaactccattctcgctggggcaacaggtggtcgaaaattgcacaacacttgcctggaagaacagacaatgaaataaagaattattggagaacaagagtccagaagcaggccaagcagcttaactgtgacgttaatagcaaacaattcaaggacgccatgcgttacgtttggatcccccgtttagttgaacggatccgtgcttcatccgagtctccctcgagtcaaccttctaccaccaccaaaaccacctacaatgattgtatcagcaacataagcagcagtcaaatgagctacgcaaatgcgagtgggtcggtccaggttgacccaagtcttctgcccgaattatcaggcacgtcatcagactcccttgacacccaagtctcttccgtttcggacctgaccgattgttacaatccacagagcctttcaaactacttacacaaggggttaggtttggaaaaggagggagcggccacatggggcagagatgaagaattccaggcgacagaggagcatggcaatggtttgttggttggtggtggggagtcatcgatggacactgtgtggaatgaagagaatgtttggtttttacagcagcagcttcgtgatgggatctaa

SEQ ID NO: 1224 - protein, 293 aa, Gossypium hirsutum
MDVYKRGFISETSRNEEEMELRKGPWTEEEDSMLKAHVNIHGEGRWNAVARLSGLRRTGKSCRLRWLNYMRPEIKRGNISLEEQLLILELHSRWGNRWSKIAQHLPGRTDNEIKNYWRTRVQKQAKQLNCDVNSKQFKDAMRYVWIPRLVERIRASSESPSSQPSTTTKTTYNDCISNISSSQMSYANASGSVQVDPSLLPELSGTSSDSLDTQVSSVSDLTDCYNPQSLSNYLHKGLGLEKEGAATWGRDEEFQATEEHGNGLLVGGGESSMDTVWNEENVWFLQQQLRDGI

SEQ ID NO: 1225 - DNA, 882 bp, Gossypium hirsutum
  CDS (1)..(882)
atggatgtttacaagagaggtttcatatctgaaacttcaagaagtgaagaagagatggagctaaggaaaggtccatggactgaagaagaggactccatgcttagggcgtatgtcaatatccacggcgaaggtcgctggaacgctgttgctcgcttatcaggattgagaagaaccggtaaaagctgcagattgagatggctgaactatatgcgaccagaaatcaaacgaggaaacatcagcctcgaagagcagctattgattcttgaactccattctcgctgggggaacaggtggtcgaaaattgcacaacacttgcctggaagaacagacaatgaaataaagaattattggagaacaagagtccagaagcaggccaagcagcttaactgtgacgttaacagcaaacaattcaaggacgccatgcgttacgtttggatcccccgtttagttgaacggatccgtgcttcatccgagtctccctcgagtcaaccttctaccaccaccaacaccacctacaatgatcgtatcagcaacataagcagcagtcaaatgagctacgcaaatgcgagtgggtcggtccaggttgacccaagtcttctgcccgaattatcaggcacgtcatcagactcccttgacacccaagtctcttccgtttcggacctgaccgattgttacaatccacaaagcctttcaaactacttacacaaggggttaggtttggaaaaggagggagcggccacatggggcagagatgaagaattccaggcgacagaggagcatagcaatggttggttggttggtggtggggagtcatcgatggacactgtgtggaatgaagagaatgtttggtttttacagcagcagcttcatgatgggatctaa

SEQ ID NO: 1226 - protein, 293 aa, Gossypium hirsutum
MDVYKRGFISETSRSEEEMELRKGPWTEEEDSMLRAYVNIHGEGRWNAVARLSGLRRTGKSCRLRWLNYMRPEIKRGNISLEEQLLILELHSRWGNRWSKIAQHLPGRTDNEIKNYWRTRVQKQAKQLNCDVNSKQFKDAMRYVWIPRLVERIRASSESPSSQPSTTTNTTYNDRISNISSSQMSYANASGSVQVDPSLLPELSGTSSDSLDTQVSSVSDLTDCYNPQSLSNYLHKGLGLEKEGAATWGRDEEFQATEEHSNGWLVGGGESSMDTVWNEENVWFLQQQLHDGI

SEQ ID NO: 1227 - DNA, 816 bp, Gossypium hirsutum
  CDS (1)..(816)
atgggaagaagtccatgttgctccaaggaaggactcaacaaaggagcttggactgctttagaagataaaatacttgcatcatatattcatgttcatggtgaaggcaaatggagaaacctccccaagagagctggtttgaagagatgtggcaaaagttgcagacttagatggctgaattatcttagaccagatattaaaagaggcaacatctctcatgatgaagaagaactcattataagactccataatcttcttggcaacagatggtctttaatagctggaaggctacccgggcgaacagacaatgaaatcaagaactactggaacactactttaggtaagagagctaaagctcaagcatccattgatgctaaaacgataccaaccgagtctaggctcaatgaaccctcgaaaagttcaactaaaatcgaagtgattcgaactaaagctattaggtgtagcagcaaggtgatggtcccattacaaccacctgcaactcatcaacatggtcaacatcactgtacaaataataatgaagaaatgggtggtggtattgcaacaattgaagctcacaatggaattcaaatgctcgagtcattgtacagtgatggcggctcaaatttgttgagcttcgagatcaatgaactgttgaaatcacacgatggtggagaatttgaggagaatcctatgcagcagcactttccgttgggtgaggcaatgcttaaggattggtctacatgtcattgtcttgatgacaatggtgccactgatttggaatcattggcctttttgcttgacactgatgaatggccatga

SEQ ID NO: 1228 - protein, 271 aa, Gossypium hirsutum
MGRSPCCSKEGLNKGAWTALEDKILASYIHVHGEGKWRNLPKRAGLKRCGKSCRLRWLNYLRPDIKRGNISHDEEELIIRLHNLLGNRWSLIAGRLPGRTDNEIKNYWNTTLGKRAKAQASIDAKTIPTESRLNEPSKSSTKIEVIRTKAIRCSSKVMVPLQPPATHQHGQHHCTNNNEEMGGGIATIEAHNGIQMLESLYSDGGSNLLSFEINELLKSHDGGEFEENPMQQHFPLGEAMLKDWSTCHCLDDNGATDLESLAFLLDTDEWP

SEQ ID NO: 1229 - DNA, 1026 bp, Oryza sativa subsp
  CDS (1)..(1026)
atgggagtgatgagcaagcagcagcaggaggccatggcagaggagatgatggagctgaggcgaggaccatggaccctcgaggaagacaacctcctcatgaactacattgcctgccatggcgaaggccgctggaatctcctcgcccgctgctccgggttgaagaggacgggcaagagctgcaggctaagatggctcaactacctcaagcctgacataaagcgcgggaatctgacgccggaggagcagctgctcattcttgagctccattccaggtggggaaacaggtggtcgaggatagcgcagcatctgccggggaggacggacaacgagatcaagaactactggaggacgagggtgcagaagcaggccaggcagctcaaggtcgacgccaacagcaccgtcttccgcgacgccgtccgctgctattggatgcctcgcctcctcgagaagatggccggagcagccaccgaccccactccgccgccgccaccgccactccaccaccacgccgccatggccaccgcctcctcctcgccgttcgacttcgacacccacctgcagcaagcagaagcagcaacggcgtgcgtcgtcccgaacaacgtgtaccaccaccacatcgacccgagcccgagcacgtcgacgtcggccggctcgacggcggccgcggcggcgttccagccgctgccctgcttctccgagctgagatgggaccagcagatgcagtcctccggcgagctcgacgacggcgccgccggcgtgttcgtcgactcggcgtcggcgctgggaagcctcagcctcgacgggctggaccttggtccggccgagtactactccgactcgacgctcctcgactacctcaactccagctgcaccggcagcgccatgatgacgatgatgaccgcctccggcaacgccggcagctacaactactgcggcggcgccatggacggcggcgacacgtggaggtccgacgaggtgtgccaagcggcggcgagaaagctcggcgagtggggaggaggaatctag

SEQ ID NO: 1230 - protein, 341 aa, Oryza sativa subsp
MGVMSKQQQEAMAEEMMELRRGPWTLEEDNLLMNYIACHGEGRWNLLARCSGLKRTGKSCRLRWLNYLKPDIKRGNLTPEEQLLILELHSRWGNRWSRIAQHLPGRTDNEIKNYWRTRVQKQARQLKVDANSTVFRDAVRCYWMPRLLEKMAGAATDPTPPPPPPLHHHAAMATASSSPFDFDTHLQQAEAATACVVPNNVYHHHIDPSPSTSTSAGSTAAAAAFQPLPCFSELRWDQQMQSSGELDDGAAGVFVDSASALGSLSLDGLDLGPAEYYSDSTLLDYLNSSCTGSAMMTMMTASGNAGSYNYCGGAMDGGDTWRSDEVCQAAARKLGEWGGGI

SEQ ID NO: 1231 - DNA, 846 bp, Nicotiana tabacum
  CDS (1)..(846)
atggtgagagctccttgttgtgagaagatggggttgaaaaaaggaccatggactcctgaagaagatcaagttcttgtttcttatattcaaacaaatggccatggcaattggagagcccttcctaaattagctggacttttgagatgtgggaagagttgcagattacgttggactaactatttgcgtccagatataaagaggggaaactttactagagaagaagaagactccattattcagttacatgaaatgcttggcaatagatggtctgcaatagcagcgagattaccaggacgaacggacaatgaaattaaaaatgtatggcacacccacttgaaaaagaggcttaaaaattatcagcctcctcaaaactccaaaaaacactccaaaaacaatcttgattccaaagctcctagtacttctcaaaccttcaataattcagacaattttagcaacattcaagaagatattaatgggccagtgaccggcccgaactcgccacaacgatcgtctagcgagatgtcgactgtcacagccgattcaacggccatgacgaccatcacaatcgatgatcagaatatgtttaagcaattagatgagatgaactcgtctgaaagttttattccagagattgatgagagtttttggacgaatgatttatccacgggcgataactcgaattttgatatggagggtaccggtgaagaattacaagtccaatttccattttcttccgtgaagcaagaaagtatggacatggttggaacaaaattagaggacgacatggacttttggtacaatgttttcataaagtctggggacttactagatttaccggaattttga

SEQ ID NO: 1232 - protein, 281 aa, Nicotiana tabacum
MVRAPCCEKMGLKKGPWTPEEDQVLVSYIQTNGHGNWRALPKLAGLLRCGKSCRLRWTNYLRPDIKRGNFTREEEDSIIQLHEMLGNRWSAIAARLPGRTDNEIKNVWHTHLKKRLKNYQPPQNSKKHSKNNLDSKAPSTSQTFNNSDNFSNIQEDINGPVTGPNSPQRSSSEMSTVTADSTAMTTITIDDQNMFKQLDEMNSSESFIPEIDESFWTNDLSTGDNSNFDMEGTGEELQVQFPFSSVKQESMDMVGTKLEDDMDFWYNVFIKSGDLLDLPEF

SEQ ID NO: 1233 - DNA, 834 bp, Nicotiana tabacum
  CDS (1)..(834)
atggggagagctccttgttgtgagaaaatggggctgaaaaaagggccatggactcctgaagaagatcagatcctcatctctttcattcaacaaaatggccatggcaactggcgagcccttcctaaacaagctggactattgagatgcgggaaaagttgcagactgcggtggacgaattatttgcgaccagatataaagaggggaaatttcacaaaggaagaagaagatacaattatccagttacatgaaatgcttggcaatagatggtcagcaatagcagcaaaattaccgggacgaacagacaatgaaataaaaaatgtttggcacacccacttgaagaagaagctcaaagattataagcctcctcagaaccccaaaagacactccaaaaatcatgattccaagggtcctactacttctgagtcatccaataattctcatcttacttttatttacacacaaaaacacattattgatagctcagtgccagctcctaactcaccccaaatttcatctagtactgaaatgtcaactgtgacactagtcgatgatcatcaaatggtgattaagcaagaagaaatggagtcgtcggagtattttccagagatcgatgagagtttttggacggacaaattatcaacggacaataactggagtaatactcatgatcatgttatggttactgctgatcaagaattacaagttcaattaccattttccagtttgaaggaagaaaatgtggacatgttgactacaaaaatggaggatgacatggacttttggtacaatgttttcatcaagactgatgacttgccagaattaccagaattttga

SEQ ID NO: 1234 - protein, 277 aa, Nicotiana tabacum
MGRAPCCEKMGLKKGPWTPEEDQILISFIQQNGHGNWRALPKQAGLLRCGKSCRLRWTNYLRPDIKRGNFTKEEEDTIIQLHEMLGNRWSAIAAKLPGRTDNEIKNVWHTHLKKKLKDYKPPQNPKRHSKNHDSKGPTTSESSNNSHLTFIYTQKHIIDSSVPAPNSPQISSSTEMSTVTLVDDHQMVIKQEEMESSEYFPEIDESFWTDKLSTDNNWSNTHDHVMVTADQELQVQLPFSSLKEENVDMLTTKMEDDMDFWYNVFIKTDDLPELPEF

SEQ ID NO: 1235 - DNA, 846 bp, Nicotiana tabacum
  CDS (1)..(846)
atggtgagagctccttgttgtgagaagatggggttgaaaaaaggaccatggactcctgaagaagatcaaattcttgtttcttatattcaaacaaatggccatggcaattggagagccctccctaaactagctggacttttgagatgtgggaagagttgcagattgcgttggactaactatttgcgtccagatataaagaggggaaactttactagagaagaagaagactccattattcagttacatgaaatgcttggcaatagatggtctgcaatagcagcgagattaccgggacgaacggacaatgaaattaaaaatgtatggcacacccacttgaaaaagaggcttaaaaattaccagcctcctcaaaactccaaaagacactccaaaaacaaccttgattccaaagctcctagtacttctcaaaccttcaataattcagacaattttagcaatatccaagaagatattaatgggcccgtgaccggcccgaactcgccacaacgatcgtctagtgagatgtcgactgtcacggttgattcaacagccatgacgaccatcacaatcgatgatcagaatatgtttaagcaattagatgagatggactcgtctgaaaattttattccagagattgatgagagtttttggacggatgatttatccacaagcgataactcgacttttggtatggagggtaccggtggagaattacaagtccaatttccattttcttcggtgaagcaagaaagtatggacatggttggagcaaaattagaggacgacatggacttttggtacaatgttttcataaagtccggggacttactagatttaccggaattttga

SEQ ID NO: 1236 - protein, 281 aa, Nicotiana tabacum
MVRAPCCEKMGLKKGPWTPEEDQILVSYIQTNGHGNWRALPKLAGLLRCGKSCRLRWTNYLRPDIKRGNFTREEEDSIIQLHEMLGNRWSAIAARLPGRTDNEIKNVWHTHLKKRLKNYQPPQNSKRHSKNNLDSKAPSTSQTFNNSDNFSNIQEDINGPVTGPNSPQRSSSEMSTVTVDSTAMTTITIDDQNMFKQLDEMDSSENFIPEIDESFWTDDLSTSDNSTFGMEGTGGELQVQFPFSSVKQESMDMVGAKLEDDMDFWYNVFIKSGDLLDLPEF

SEQ ID NO: 1237 - DNA, 819 bp, Glycine max
  CDS (1)..(819)
atggtgagagctccttgttgtgaaaagatgggtttgaagaagggtccttgggctaccgaggaagatcaaattctcacatcttacatccaaaaacatggccatggcaattggcgtgccctcccaaagcaagcaggccttctaaggtgtgggaaaagctgcagactccgctggattaactatttgaggcctgatatcaagagagggaatttcacaattgaagaagaagaaactatcattaagctgcatgagatgttgggaaacaggtggtcagcaattgcagccaaattgccaggaagaactgacaatgagataaaaaatgtttggcacaccaatttgaagaagaggctgctgaaatcagaccagtccaagccaagttccaaaagagccactaagccaaaaattaaacgttctgattccaattccagcatcataactcaatcagaacctgctcatcttagattcagagaaatggacacaacatcaacagcatgcaatacttctagtagtgatttttcatcagtcacggttggtgacagcaaaaatattatcaagagtgaagacatagagtctatggaaacaatgcctgtgatagatgagagcttttggtcagaagctgcaattgatgatgaaacccccaccatgtcatcacaatctttgatcacaatctcaaatgacatgccacttcaatacccttttgctaactatgaggaaactttccaacagagtcatgcttatgattcaaactttgatgatggcatggatttctggtatgacatattcaccaggaccaatgattcaatagaattgtcagagttctga

SEQ ID NO: 1238 - protein, 272 aa, Glycine max
MVRAPCCEKMGLKKGPWATEEDQILTSYIQKHGHGNWRALPKQAGLLRCGKSCRLRWINYLRPDIKRGNFTIEEEETIIKLHEMLGNRWSAIAAKLPGRTDNEIKNVWHTNLKKRLLKSDQSKPSSKRATKPKIKRSDSNSSIITQSEPAHLRFREMDTTSTACNTSSSDFSSVTVGDSKNIIKSEDIESMETMPVIDESFWSEAAIDDETPTMSSQSLITISNDMPLQYPFANYEETFQQSHAYDSNFDDGMDFWYDIFTRTNDSIELSEF

SEQ ID NO: 1239 - DNA, 795 bp, Glycine max
  CDS (1)..(795)
atggttagagctccttgttgtgaaaagatgggattgaagaagggtccttggaccccagaggaagatcaaatcctcatgtcatacatccaaaaacatggccatggaaattggcgtgccctcccaaagcttgcagggttattaaggtgtggcaagagctgcaggctaaggtggattaactatttaaggccagatatcaagagaggaaatttttcaagcgaagaagaggaaattatcattaagatgcatgagttgctggggaacaggtggtcagcaattgcagcaaaattaccaggaagaactgacaatgaaataaaaaatgtgtggcacacccacttgaagaagaggctactgaattcagatatccaaaaaagggtttccaagccaagaatcaaacgatctgattccaattccagcacactaactcaattagaacctacatcatcagcatgcactacttctttaagtgacttttcatcatttagtgaagggactaaaaacatggacaacatgatcaagagtgaagacatagagtctgtggagacaataatgcctccaattgatgaaagcttttggtcagaggcaacagtggattatgaaagctccaccatgatgacatcaaattcttggacaatttcaaatgaattagcaccccctcaataccaatttaattcagtggaaagcttccaacaacaaagtgttgattataatggttcaaacgatgatcatgatggcatggatttctggtatgacatattcatcaaatcaggggagtcaatcgaattgccagggttctga

SEQ ID NO: 1240 - protein, 264 aa, Glycine max
MVRAPCCEKMGLKKGPWTPEEDQILMSYIQKHGHGNWRALPKLAGLLRCGKSCRLRWINYLRPDIKRGNFSSEEEEIIIKMHELLGNRWSAIAAKLPGRTDNEIKNVWHTHLKKRLLNSDIQKRVSKPRIKRSDSNSSTLTQLEPTSSACTTSLSDFSSFSEGTKNMDNMIKSEDIESVETIMPPIDESFWSEATVDYESSTMMTSNSWTISNELAPPQYQFNSVESFQQQSVDYNGSNDDHDGMDFWYDIFIKSGESIELPGF

SEQ ID NO: 1241 - DNA, 1008 bp, Arabidopsis thaliana
  CDS (1)..(1008)
atgggaagaccaccatgctgtgacaagattggagtgaagaaaggaccatggacaccagaggaagatatcatcttggtttcttacatccaagaacatggtcctgggaactggagatctgtgcctactcacacaggtttgaggagatgtagcaaaagctgtagattgaggtggactaattatcttcgacctgggatcaagcgtggaaatttcaccgagcatgaagagaagatgattctccatcttcaagctcttttgggaaacaggtgggcagctatagcatcatatcttccagaaaggacagacaatgatataaagaactattggaacactcatttgaagaaaaagctcaagaagatgaatgattcttgtgatagtactatcaacaatggccttgataataaagacttctccatatcaaacaaaaacactacctcacatcaaagcagcaactccagtaaaggtcaatgggagagaaggcttcagacagatatcaacatggctaaacaagctctttgtgatgccttgtctattgacaaaccacaaaacccaactaatttttctattcccgatcttggttatggtccatcatcttcttcgtcctctaccaccaccaccaccaccaccaccaccacgagaaacactaatccatacccatctggggtctatgcttcaagtgctgagaacattgctcgtttgcttcagaattttatgaaagacacaccaaagacctcggtgcccttgccggttgcagccaccgagatggctatcaccacggcagcttcgagccctagcacaaccgaaggagacggagaagggattgaccattctttgttcagcttcaactccatagatgaagctgaagagaagcctaaactaatagaccatgacattaatggtctaattacacaaggctctctttctttgttcgagaaatggctctttgatgagcaaagccacgatatgatcatcaataacatgtcactagagggtcaggaagtgttgttctag

SEQ ID NO: 1242 - protein, 335 aa, Arabidopsis thaliana
MGRPPCCDKIGVKKGPWTPEEDIILVSYIQEHGPGNWRSVPTHTGLRRCSKSCRLRWTNYLRPGIKRGNFTEHEEKMILHLQALLGNRWAAIASYLPERTDNDIKNYWNTHLKKKLKKMNDSCDSTINNGLDNKDFSISNKNTTSHQSSNSSKGQWERRLQTDINMAKQALCDALSIDKPQNPTNFSIPDLGYGPSSSSSSTTTTTTTTTTRNTNPYPSGVYASSAENIARLLQNFMKDTPKTSVPLPVAATEMAITTAASSPSTTEGDGEGIDHSLFSFNSIDEAEEKPKLIDHDINGLITQGSLSLFEKWLFDEQSHDMIINNMSLEGQEVLF

SEQ ID NO: 1243 - DNA, 1662 bp, Oryza sativa
  CDS (1)..(1662)
atgtatcgggtgaagagcgagagcgactgcgatatgatccatcaggagcagatggactcgccggtggccgacgacggcagcagcggggggtcgccgcaccgcggcggcgggcccccgctgaagaaggggccatggacgtcggcggaggacgccatcctggtggactacgtgaagaagcacggcgaggggaactggaacgcggtgcagaagaacaccgggctgttccggtgcggcaagagctgccgcctccggtgggcgaaccacctgaggcccaacctcaagaagggggccttcaccgccgaggaggagaggctcatcatccagctccactccaagatggggaacaagtgggctcggatggccgctcatttgccagggcgcactgataatgaaataaagaattactggaatactcgaataaagagatgccagcgagctggcctacccatctatcctaccagcgtatgcaatcaatcctcaaatgaagatcagcagtgctccagtgattttgactgtggcgagaatttgtcaaacgatcttctgaatgcaaatggtctttacctaccagattttacctgtgacaatttcattgctaattcagaggctttaccttatgcaccacatctttcagccgtttctataagcaatctccttggccagagctttgcatcaaaaagctgtagcttcatggatcaggtaaaccagacagggatgctaaaacagtctgatggtgtgcttcctggattgagcgataccatcaacggtgtgatttcctcggtggatcaattctcaaatgactctgagaagctcaagcaggctgtgggttttgactatctccatgaagccaactctaccagcaagattattgcacctttcgggggtgcacttaatggcagccatgcctttttaaatggcaatttctctgcttctaggcccacaagtggtcctttgaagatggagctcccttcactccaagatactgaatctgatccaaacagctggctcaagtacactgtagctcctgcgttgcagcctactgagttagttgatccctacctgcagtctccagcagcaaccccttcagtgaaatcagagtgcgcgtcgccaaggaatagtggccttttggaagagttgattcatgaagctcagaccctaagatccgggaagaaccaacagacatctgtgataagttctagttcttctgtcggtacgccatgtaatactacggttcttagcccagagtttgatatgtgtcaggaatactgggaagaacaacatcctggtccattcctcaatgactgtgctcctttcagtggcaattcattcactgaatccacccctcctgttagcgctgcatcgcctgacatctttcagctctccaaagtttccccagcacaaagcacttcaatgggatctggagagcaagtaatggggcctaaatatgaacctggggacacttcacctcatcctgaaaacttcaggccagatgcattgttttctgggaatacagctgatccatcagttttcaacaatgccatagcaatgcttctgggcaatgacttgagtatcgattgcagacctgttcttggcgacggtatcatgttcaattcttcctcgtggagcaacatgccacacgcctgtgaaatgtcagaattcaaatga

SEQ ID NO: 1244 - protein, 553 aa, Oryza sativa
MYRVKSESDCDMIHQEQMDSPVADDGSSGGSPHRGGGPPLKKGPWTSAEDAILVDYVKKHGEGNWNAVQKNTGLFRCGKSCRLRWANHLRPNLKKGAFTAEEERLIIQLHSKMGNKWARMAAHLPGRTDNEIKNYWNTRIKRCQRAGLPIYPTSVCNQSSNEDQQCSSDFDCGENLSNDLLNANGLYLPDFTCDNFIANSEALPYAPHLSAVSISNLLGQSFASKSCSFMDQVNQTGMLKQSDGVLPGLSDTINGVISSVDQFSNDSEKLKQAVGFDYLHEANSTSKIIAPFGGALNGSHAFLNGNFSASRPTSGPLKMELPSLQDTESDPNSWLKYTVAPALQPTELVDPYLQSPAATPSVKSECASPRNSGLLEELIHEAQTLRSGKNQQTSVISSSSSVGTPCNTTVLSPEFDMCQEYWEEQHPGPFLNDCAPFSGNSFTESTPPVSAASPDIFQLSKVSPAQSTSMGSGEQVMGPKYEPGDTSPHPENFRPDALFSGNTADPSVFNNAIAMLLGNDLSIDCRPVLGDGIMFNSSSWSNMPHACEMSEFK

SEQ ID NO: 1245 - DNA, 1053 bp, Oryza sativa
  CDS (1)..(1053)
atgtcgcagaggagagttgcagggcccatgggagtgatgagcaagcagcagcaggaggccatggcagaggagatgatggagctgaggcgaggaccatggaccctcgaggaagacaacctcctcatgaactacattgcctgccatggcgaaggccgctggaatctcctcgcccgctgctccgggttgaagaggacgggcaagagctgcaggctaagatggctcaactacctcaagcctgacataaagcgcgggaatctgacgccggaggagcagctgctcattcttgagctccattccaggtggggaaacaggtggtcgaggatagcgcagcatctgccggggaggacggacaacgagatcaagaactactggaggacgagggtgcagaagcaggccaggcagctcaaggtcgacgccaacagcaccgtcttccgcgacgccgtccgctgctattggatgcctcgcctcctcgagaagatggccggagcagccaccgaccccactccgccgccgccaccgccactccaccaccacgccgccatggccaccgcctcctcctcgccgttcgacttcgacacccacctgcagcaagcagaagcagcaacggcgtgcgtcgtcccgaacaacgtgtaccaccaccacatcgacccgagcccgagcacgtcgacgtcggccggctcgacggcggccgcggcggcgttccagccgctgccctgcttctccgagctgagatgggaccagcagatgcagtcctccggcgagctcgacgacggcgccgccggcgtgttcgtcgactcggcgtcggcgctgggaagcctcagcctcgacgggctggaccttggtccggccgagtactactccgactcgacgctcctcgactacctcaactccagctgcaccggcagcgccatgatgacgatgatgaccgcctccggcaacgccggcagctacaactactgcggcggcgccatggacggcggcgacacgtggaggtccgacgaggtgtgccaagcggcggcgagaaagctcggcgagtggggaggaggaatctag

SEQ ID NO: 1246 - protein, 350 aa, Oryza sativa
MSQRRVAGPMGVMSKQQQEAMAEEMMELRRGPWTLEEDNLLMNYIACHGEGRWNLLARCSGLKRTGKSCRLRWLNYLKPDIKRGNLTPEEQLLILELHSRWGNRWSRIAQHLPGRTDNEIKNYWRTRVQKQARQLKVDANSTVFRDAVRCYWMPRLLEKMAGAATDPTPPPPPPLHHHAAMATASSSPFDFDTHLQQAEAATACVVPNNVYHHHIDPSPSTSTSAGSTAAAAAFQPLPCFSELRWDQQMQSSGELDDGAAGVFVDSASALGSLSLDGLDLGPAEYYSDSTLLDYLNSSCTGSAMMTMMTASGNAGSYNYCGGAMDGGDTWRSDEVCQAAARKLGEWGGGI

SEQ ID NO: 1247 - DNA, 933 bp, Oryza sativa
  CDS (1)..(933)
atggagatgatgaggatggcgatgagcccggcgatgtcgtcggcgacggcggcggcggcgagcgaggacgagggcgacctgaggagggggccatggacggtggaggaggacatgctgctcgtcgactacatcgccaaccacggcgagggtcgctggaactcgcttgctcgctgtgcagggctgaggcgcaccggcaagagctgccgtctccggtggctgaactacctccgccccgacgtccgccgcggcaacatcaccgccgacgagcagctcctcatcctcgacctccactctcgctggggcaaccggtggtctaagatcgcgcagtatttgccggggaggactgataacgaaataaagaattattggaggaccagagtgcaaaagcacgcgaagcagctgaggtgcgacgtcaacagcaaggagttccgcgacgtcgtccgccacgtctggatgccgcgcctcatcgagcggatccaggccgacgccgccgccgccggcgaagttgcggcaccggcgccggtgtcggcggcggcgacgaggtcgatgagctcgccggctggcgcgatgtacctccaccaccagcagattccgctcgccgccggcgccatggtggtggcgccggcggtgagtagcgaagcgtaccaccaccacggctgcggcggcggcggcgacacgagctgcagcgagccgagccaggcggcggtgaccatgagccccgacgacgcatccagcacgctccggtcgtcgtcggcggcggcggagaacgacacgatccacggcgacgtgcttagcggcagctggtcggagcttcttgccaccaccaccaccaccatcgccgccaccgccggcttgccggacttcgatgagctcggagatttcgaggacaacttatggagccttgaggacatttggctgcaccagcagtgttga

SEQ ID NO: 1248 - protein, 310 aa, Oryza sativa
MEMMRMAMSPAMSSATAAAASEDEGDLRRGPWTVEEDMLLVDYIANHGEGRWNSLARCAGLRRTGKSCRLRWLNYLRPDVRRGNITADEQLLILDLHSRWGNRWSKIAQYLPGRTDNEIKNYWRTRVQKHAKQLRCDVNSKEFRDVVRHVWMPRLIERIQADAAAAGEVAAPAPVSAAATRSMSSPAGAMYLHHQQIPLAAGAMVVAPAVSSEAYHHHGCGGGGDTSCSEPSQAAVTMSPDDASSTLRSSSAAAENDTIHGDVLSGSWSELLATTTTTIAATAGLPDFDELGDFEDNLWSLEDIWLHQQC

SEQ ID NO: 1249 - DNA, 858 bp, Oryza sativa
  CDS (1)..(858)
atggagatggtgctgcagaggacgagccaccacccggtgcccggggagcagcaggaggcggcggcggagctgtcgtcggctgagctccggcgagggccgtggaccgtcgatgaggacctcaccctcatcaattacatctctgatcacggcgagggccgctggaacgcactcgcacgcgccgccggtctgaagaggactgggaagagctgccggctccggtggctgaactatctccggccggatgtgaagcgcggcaacttcaccgcagaggagcagctgctcatcctcgacctccactcccgatggggcaaccgatggtccaagatagcacaacatttgcctgggaggaccgacaacgagatcaagaactactggaggaccagagtgcaaaagcatgccaagcaactcaattgtgatgtcaacagcaagaggttcaaggatgccatgaagtacctatggatgcctcgccttgccgagcgcatccatgccagggctggcgctgttgatgatagcggagactacagcaacaacgacttatcatgtgtatctggtgtaacaatggccactgttgctaattgttttgatggctctccgagcatggtgactagctcatcttccgattcgttcacgtcggagtcacaagatttgaagaagattaacttacatgtgcatggtgatgatgagaagatgaactctgaagactggatgcaggaggtggaccatgagttttggtctacagagattcagcctaataatgaacagtttcaggaccaacagcttaacggttgggtgcaaggtttttctgagggtttgtccgaaactctatggagtctagaggacatatggaagatgcaataa

SEQ ID NO: 1250 - protein, 285 aa, Oryza sativa
MEMVLQRTSHHPVPGEQQEAAAELSSAELRRGPWTVDEDLTLINYISDHGEGRWNALARAAGLKRTGKSCRLRWLNYLRPDVKRGNFTAEEQLLILDLHSRWGNRWSKIAQHLPGRTDNEIKNYWRTRVQKHAKQLNCDVNSKRFKDAMKYLWMPRLAERIHARAGAVDDSGDYSNNDLSCVSGVTMATVANCFDGSPSMVTSSSSDSFTSESQDLKKINLHVHGDDEKMNSEDWMQEVDHEFWSTEIQPNNEQFQDQQLNGWVQGFSEGLSETLWSLEDIWKMQ

SEQ ID NO: 1251 - DNA, 903 bp, Oryza sativa
  CDS (1)..(903)
atggcagcatcgcagaggagcaggagcacggcggcgcagctcgacgtcgacgaccaggcggcggccgatcagctgatgacgatgatgcggcggccagcggcggtactacaggatgaggccgccgccgaggaggaggcctccgcggcggcagcggacctgcagctggagctccggcgagggccgtggaccgtcgacgaggacctcaccctcgtcaactacatcgccgaccacggcgagggacgctggaactccctcgcccgcgccgccgggttgaagaggacggggaagagctgcaggctgcggtggctgaactacctccggcccgacgtgaagcgcggcaacttcaccgccgacgagcagctgctcatcctcgacctccactcccgatggggcaaccggtggtcaaagatagcgcagcatttgccagggaggaccgacaacgagatcaagaactactggaggacccgagtgcaaaagcatgccaagcagctgaactgcgatgccaacagtgctaggttcaaggatgctatgagatatctatggatgcctcgcctcgccgatgcaagccagctcggtgatcaccatgggtataatagtaccactgccatgggcgatgctcatgggatgccagtgatgacatcgtcgtcgtcggactcgttcgcgacatcagagtcatacgatgggggcctttatgcaaatgtgcaggacaatgagatggtgaatggtggggactactggatgcagggagcaaataaagggttttgtagtaattatgagtcagagcaacttcatcctcatgagcatagccagtttcaggatccagatcttgttggttgggttcagggcttttctgagggcatttccgagaatttttggagcttggaggacatttggaagatgtag

SEQ ID NO: 1252 - protein, 300 aa, Oryza sativa
MAASQRSRSTAAQLDVDDQAAADQLMTMMRRPAAVLQDEAAAEEEASAAAADLQLELRRGPWTVDEDLTLVNYIADHGEGRWNSLARAAGLKRTGKSCRLRWLNYLRPDVKRGNFTADEQLLILDLHSRWGNRWSKIAQHLPGRTDNEIKNYWRTRVQKHAKQLNCDANSARFKDAMRYLWMPRLADASQLGDHHGYNSTTAMGDAHGMPVMTSSSSDSFATSESYDGGLYANVQDNEMVNGGDYWMQGANKGFCSNYESEQLHPHEHSQFQDPDLVGWVQGFSEGISENFWSLEDIWKM

SEQ ID NO: 1253 - DNA, 699 bp, Brassica napus
  CDS (1)..(699)
atggagaaaataggaggaataagtagtggaggtacgggatcatcaggagaagcagaagtgcgaaaaggaccgtggacgatggaagaagatcttattcttatcaattatatcgccaaccacggcgatggcgtttggaactctctcgccaaatctgcaggtctaaaacgcaccggaaaaagttgccgccttcggtggctcaactatctccgccctgacgtacgacgtggaaacatcacgccggaggaacaacttaccatcatggaacttcatgctaagtggggaaacaggtggtccaaaatcgctaaacaccttccaggaagaaccgacaatgagataaagaatttctggaggacaagaatccaaaaatacatcaaacaaaccgatgtgacagcaacaacgacgtcctccgttggatctcatcacagctcagaaattaacgatcaagttgcaagtacgtcgaaccataatgtcttttgtacacaagatcaagcgatggagacatattctcctacaactacgtcctatcaacataccaatatggatttcaactatggtaacttctctgcggctgcggcaactgtgactgcgactacaacggcagattattcaattccaatgactgttgatgatcaaaacggtgaaaactattggggcatggatgatatttggtcatcaatgcatttactcaatggtaattga

SEQ ID NO: 1254 - protein, 232 aa, Brassica napus
MEKIGGISSGGTGSSGEAEVRKGPWTMEEDLILINYIANHGDGVWNSLAKSAGLKRTGKSCRLRWLNYLRPDVRRGNITPEEQLTIMELHAKWGNRWSKIAKHLPGRTDNEIKNFWRTRIQKYIKQTDVTATTTSSVGSHHSSEINDQVASTSNHNVFCTQDQAMETYSPTTTSYQHTNMDFNYGNFSAAAATVTATTTADYSIPMTVDDQNGENYWGMDDIWSSMHLLNGN

SEQ ID NO: 1255 - DNA, 699 bp, Brassica napus
  CDS (1)..(699)
atggagacattaggaggaataagtagtggaggtacgggatcatcaggagaagcagaggtgcgaaaaggaccgtggacgatggaagaagatcttattcttatcaattatatcgccaaccacggcgatggcgtttggaactctctcgccaaatctgcaggtctaaaacgcaccggaaaaagttgccgccttcggtggctcaactatctccgccctgacgtacgacgtggaaacatcacgcctgaggaacaacttaccatcatggaacttcatgctaagtggggaaacaggtggtccaaaatcgctaaacaccttccaggaagaaccgacaatgagatcaagaatttctggaggacaagaatccaaaaatacatcaaacaaaccgatgtgacagcaacaacaacgtcctccgttggatctcatcacagctcagaaatcaacgatcaagttgcaagtacgtcgaaccataatgtcttttgtacacaagatcaagcgatggagacatattctcctacaactacgtcctatcaacataccaatatggatttcaactatggtaactactctgcggctgcggctactgcgactgcgactacaacggcagattattcaattccaatgactgttgatgatcaaaccggtgaaaactattggggcatggatgatatttggtcatcaatgcatttactcaatggtaattga

SEQ ID NO: 1256 - protein, 232 aa, Brassica napus
METLGGISSGGTGSSGEAEVRKGPWTMEEDLILINYIANHGDGVWNSLAKSAGLKRTGKSCRLRWLNYLRPDVRRGNITPEEQLTIMELHAKWGNRWSKIAKHLPGRTDNEIKNFWRTRIQKYIKQTDVTATTTSSVGSHHSSEINDQVASTSNHNVFCTQDQAMETYSPTTTSYQHTNMDFNYGNYSAAAATATATTTADYSIPMTVDDQTGENYWGMDDIWSSMHLLNGN

SEQ ID NO: 1257 - DNA, 918 bp, Glycine max
  CDS (1)..(918)
atggtgagaaccccatcttgtgacaaaagtggaacgaggaaaggtacttggactccggaggaagatagaaagttaattgcttatgtcactagatatggctcctggaattggcgccaacttcccaggtttgctggtctggcaagatgtggcaaaagttgtagactgagatggatgaattatctaaggccaaatgtcaaaagagggaacttcactcaacaagaagatgaatgcatcattagaatgcacaaaaaacttggtaacaaatggtctgctattgcagctgagttacctggaagaacagataatgaaataaaaaaccattggcacaccacactcaagaagtggtctcaacaaaacgcaatcacaaatgaagaagctagaacctcaaaatcaaaagataaggttcccaacaagggtgtaactgttactcttccagctaattcttctctgatgtcagataattcatcatcatctccagtttcatccacctgcagcgagttttcatctataacatcagataattccactgctgccagtatggaaaatttggtgtttgaagatgatgacttcggttttctggattcatacaatgaaagtttctggacggaactaaatcttgatgacatttcctttgatgccccatgtgaaatggatttaggagatactaatgtctcttttgaaagtacaagttgtagcaatagcaacacccttgattctctgcatggatcaaccagtgaaagtattgttgtggataatgactttggcggctttctcgatgcatacacaaaggcagccgttgataacttttggacacaaccatatgtggctgacatgtcccacgttccaagcgaactacttgttccctctatggcagaatctgaatattttactccaatatatgatgatctgtggggttaa

SEQ ID NO: 1258 - protein, 305 aa, Glycine max
MVRTPSCDKSGTRKGTWTPEEDRKLIAYVTRYGSWNWRQLPRFAGLARCGKSCRLRWMNYLRPNVKRGNFTQQEDECIIRMHKKLGNKWSAIAAELPGRTDNEIKNHWHTTLKKWSQQNAITNEEARTSKSKDKVPNKGVTVTLPANSSLMSDNSSSSPVSSTCSEFSSITSDNSTAASMENLVFEDDDFGFLDSYNESFWTELNLDDISFDAPCEMDLGDTNVSFESTSCSNSNTLDSLHGSTSESIVVDNDFGGFLDAYTKAAVDNFWTQPYVADMSHVPSELLVPSMAESEYFTPIYDDLWG

SEQ ID NO: 1259 - DNA, 978 bp, Glycine max
  CDS (1)..(978)
atggatggaaaaggagcaagaagtagcaacacccttttaagtagtgaggacgagatggaccttcgaagaggcccttggaccgtcgatgaagacctcactcttatcaattacgttgccactcatggcgaaggtcgctggaataccctcgccctctctgctgggctgaaacgaacggggaagagttgcagattgaggtggctgaattatctgcgtcctgatgttcgacgtggaaacatcacgcttgaagaacaacttttgattctggagctccattctcgctggggaaaccgatggtcgaaaattgctcaatatttgcctggtagaaccgacaatgagataaagaactattggagaacccgtgtccaaaagcatgccaagcaactcaaatgcgacgtgaatagcaagcaattcaaggacaccatgcgttacatttggatgccaaggctcgtggaacgcattcaagccaccgctgccgcctccgccaccacaaccgttaccgctaccaccgcgaccaacaatgcatacacctacggaagcaaccttaataacaacaaattcgaggttcacgatcacaagggcaaaatggggttaaccgatccttcagttatgaacaatgacttagtgggttcacatgtcacgcaaagttacacccctgagaatagtagcaccggtgcgtcatcatcagactcgtttgggactcaagtctcagcaatttctgatttgactgaatattacactgtcactgttagtggtaacaataacaatactaattctgcggattattatcaaccctctcaaattagttactcggatagttgcatcacaagcccatctgggttgttccctcaagggctagattttcaatccatggatccaaacaccccgtggaacatgcaaagtggggactcctctgacagtttttggaacgttgaaagcatgttgttcttagagcagcaactcatgaatgacaacatgtga

SEQ ID NO: 1260 - protein, 325 aa, Glycine max
MDGKGARSSNTLLSSEDEMDLRRGPWTVDEDLTLINYVATHGEGRWNTLALSAGLKRTGKSCRLRWLNYLRPDVRRGNITLEEQLLILELHSRWGNRWSKIAQYLPGRTDNEIKNYWRTRVQKHAKQLKCDVNSKQFKDTMRYIWMPRLVERIQATAAASATTTVTATTATNNAYTYGSNLNNNKFEVHDHKGKMGLTDPSVMNNDLVGSHVTQSYTPENSSTGASSSDSFGTQVSAISDLTEYYTVTVSGNNNNTNSADYYQPSQISYSDSCITSPSGLFPQGLDFQSMDPNTPWNMQSGDSSDSFWNVESMLFLEQQLMNDNM

SEQ ID NO: 1261 - DNA, 774 bp, Triticum aestivum
  CDS (1)..(774)
atggggagggctccttgctgcgagaagatggggctcaagaggggcccgtggacggcggaggaggacatgaccctggtcgctcatatcgagcagcacggccacagcaactggcgggcgctgcccaagcaggccggcctgctgcgctgcggcaagagctgccgcctccggtggatcaactacctgcgccccgacatcaagcgcggcaacttcacctgtgaggaggaagaagccatcatccaactccacgccatgctcggcaacagatggtccaccatggcggccaggctgcctggcaggacggacaacgagatcaagaacgtctggcacacacacctcaagaagcgactcgaatcctcgtccaagacgtccggccaggcagcgcctaagcgcaaagccaagaagcctgctgtggctgcgactgcgagcgcgctcgagggaccgacctccgagcctgcgtcgtcgtcaccggggcagtccctctcgatgtcgccggagcagtcgctctcgacgtcgtcggccaccggctactcgatggcctcgtcgttggagaacacgggaagctcttcctcggagtccgaggagttccagattgacgacagcttctggtccgagacagtggcgatgtcggtggacagctccggttccgggatggaaaccggcgacaccttcggcgtagatagtgcttcgacgtcgtcgtcgagcaacgatgagatggacttctgggtcacactgttcatgcaggctagtgacatagagagtttgtcacagatttaa

SEQ ID NO: 1262 - protein, 257 aa, Triticum aestivum
MGRAPCCEKMGLKRGPWTAEEDMTLVAHIEQHGHSNWRALPKQAGLLRCGKSCRLRWINYLRPDIKRGNFTCEEEEAIIQLHAMLGNRWSTMAARLPGRTDNEIKNVWHTHLKKRLESSSKTSGQAAPKRKAKKPAVAATASALEGPTSEPASSSPGQSLSMSPEQSLSTSSATGYSMASSLENTGSSSSESEEFQIDDSFWSETVAMSVDSSGSGMETGDTFGVDSASTSSSSNDEMDFWVTLFMQASDIESLSQI

SEQ ID NO: 1263 - DNA, 714 bp, Linum usitatissimum
  CDS (1)..(714)
atgggaaggcagccctgttgcgacaagctaggagtgaagaagggaccgtggacggcggaggaagaccgcaagttggtcaacttcatagtaacccacggccaatgctgctggcgcgccgtacccaagctcgctggactctgccgctgcgggaagagctgccgcctccggtggactaactacctccgtcccgacttgaaacgcggcgttttgaacgagtccgaggaacgcctcgtcatcgatcttcactcccgtctcggcaatcgatggtccaagattgcggctgagttgccaggaagaacagacaacgaaatcaagaatcactggaacacccacatcaagaagaagctgatcaagatggggatcgatcccgtgacccacaagcctcttgacgacaaagtagaggaaactactgacgaccatgatgttgattgtcaagagccacagagaggcagttgcatcagcgacaacgattcttttgacgaatctcgacagttcgattccaaaccgatgagtactcttggttggtcatcagaactactctcggccgacgaccacattgactccacgtggcgaccatggtcggactccgagttcaaggagcttggatcggtgggcgatcatcatcttgacgatcatcacttgagtctcctaaatgggttcaattgcttcggtgagatcgacttgttatccgacatgagtgaacatattaggtag

SEQ ID NO: 1264 - protein, 237 aa, Linum usitatissimum
MGRQPCCDKLGVKKGPWTAEEDRKLVNFIVTHGQCCWRAVPKLAGLCRCGKSCRLRWTNYLRPDLKRGVLNESEERLVIDLHSRLGNRWSKIAAELPGRTDNEIKNHWNTHIKKKLIKMGIDPVTHKPLDDKVEETTDDHDVDCQEPQRGSCISDNDSFDESRQFDSKPMSTLGWSSELLSADDHIDSTWRPWSDSEFKELGSVGDHHLDDHHLSLLNGFNCFGEIDLLSDMSEHIR

SEQ ID NO: 1265 - DNA, 882 bp, Hordeum vulgare
  CDS (1)..(882)
atggatgtggtgctgcaaagtcgtagcagcaacaacatggcggccgagcaggaggaggaggcggagctccggcgggggccgtggacggtggacgaggaccttacgctgatcaactacatctcggatcacggcgagggccgctggaacgcgctggcgcgggccgccggcctgaggcgcacggggaagagctgccggctgcggtggctgaactacctccgccccgacgtgaagcgcggcaacttcaccgccgacgagcagctcctcatcctcgacctccactctcgctggggtaaccggtggtcgaagatcgcgcagcacctcccgggtcggacggacaacgagatcaagaactactggaggaccagggtgcagaagcacgcaaagcagctcaactgcgatgtcggcagccccaccttcaaggatgccatgaggtacctctggatgccccgcctcgtcgagcgcatccacgccgccgccaccaccgccactggcggcgagccctcaatcggcgacacgtcctgcgcgtcaggagtcacgttgatggctaccgccgtcgccaccgccaccgcatgccccgagaacaactctccggccagcgcggtcaccagcagatcggcatcgtcgggttcgatcacgtcggagctctgcggcgacgagaagaacctgcatgtccatggcaacgacgataagacaaccagcggcggggactggccgatgcaggacgtggaccaagagttctgggccatgcatatgcagatccagcctgacgacggtggtcttttccaagaccatgagcttagtggatgggtgcagggcttctccgacgtcggcgtttcggctgataacctctggagcctcgaggacatatggaagatgcaatga

SEQ ID NO: 1266 - protein, 293 aa, Hordeum vulgare
MDVVLQSRSSNNMAAEQEEEAELRRGPWTVDEDLTLINYISDHGEGRWNALARAAGLRRTGKSCRLRWLNYLRPDVKRGNFTADEQLLILDLHSRWGNRWSKIAQHLPGRTDNEIKNYWRTRVQKHAKQLNCDVGSPTFKDAMRYLWMPRLVERIHAAATTATGGEPSIGDTSCASGVTLMATAVATATACPENNSPASAVTSRSASSGSITSELCGDEKNLHVHGNDDKTTSGGDWPMQDVDQEFWAMHMQIQPDDGGLFQDHELSGWVQGFSDVGVSADNLWSLEDIWKMQ

SEQ ID NO: 1267 - DNA, 843 bp, Brassica napus
  CDS (1)..(843)
atgatgaggaaaccagaggtagcaaatgcagccactcatcaagtaaagaagatgaagaagggactttggtctccagaggaagactcaaagctgatgcaatatatgataaccaatgggcaaggatgctggagcgatgtagccaaaaacgcaggccttcaacgatgtggcaaaagctgccgtcttcgttggatcaactatcttcgtcctgacctcaagcgtggcgctttctctcctcaagaagaggaactcatcattcgttttcattccattctcggcaacaggtggtctcagattgcagcacgattgcctggtcggacggacaacgagatcaagaacttttggaactcaacaataaagaaaaggctaaagaagatgtccgatacatccaacctcgtcaacaactcatcctcatcaccggacacaagtgatttgtctaataataccacatcttctttggagcttaaagacattataggaagcttcatgtccttacaggaacaaggattcatcaacccctctttcaccaacacaccaataaccaacaacaatccattcccagcgccacacatgatcagccacccttgtattgacgattttaccccttatgtagatggtttatatggagtaaacacagggctacaaggggaactctactttccacctttggaatgtcaagaaggtgactggtacaaggcagatattaacaaccacctagacgacatgaacactaatggagctggaaacgtacctgagagtatgagaatggaagaatattgggaccttgaccagttgatgaacactgaggttccttcgttttacttcaacttcaaacaaagcacatga

SEQ ID NO: 1268 - protein, 280 aa, Brassica napus
MMRKPEVANAATHQVKKMKKGLWSPEEDSKLMQYMITNGQGCWSDVAKNAGLQRCGKSCRLRWINYLRPDLKRGAFSPQEEELIIRFHSILGNRWSQIAARLPGRTDNEIKNFWNSTIKKRLKKMSDTSNLVNNSSSSPDTSDLSNNTTSSLELKDIIGSFMSLQEQGFINPSFTNTPITNNNPFPAPHMISHPCIDDFTPYVDGLYGVNTGLQGELYFPPLECQEGDWYKADINNHLDDMNTNGAGNVPESMRMEEYWDLDQLMNTEVPSFYFNFKQST

SEQ ID NO: 1269 - DNA, 837 bp, Brassica napus
  CDS (1)..(837)
atggcggatcgtgtgaaaggtccatggagccaagaagaagacgagcagctgaggctgatggtggagaagtacggaccgagaaactggtcggcgattagcaagtcaattccaggtcggtctggtaaatcgtgtcgattacggtggtgcaatcagctatctccggaggttgagcatcgaccgttctcaccggaggaagacgagacgattgtctctgctcgcgccaagttcggtaacaaatgggccacgatcgctcgtcttctcaacggccgcacggacaacgccgtgaagaaccactggaactcgacgctcaagcggaaatgtttagatggtaatccgacgacggaggaggatcaagatcgggcgaagaagaggagatcgatgagctctgaatctgtccctccggtggacactggattgtacatgagccctgagagtcccacccacgttgctagcgactccagcgcggttcctcctcagctttttaaaccaatgccagtttccggcggattcacggtgccgtcgccggtggaaatgacgtcatcgtcggaggaagatccggcaaccacgttgagtctgtcactgtcgcttcccgtaagccaggagtcgaggaacacgggttcgagcgacaactcgttgccgtttccgaagtttgagagtcagatgaagattaatgtagaggagagaggagaagcgcgtagagctgagtttatgacggtggtgcatgagatggttaaggcggaagtgaggagttacatggccgagatgcagagaaacaacggtggtggattcgtcgtcggaggtttctatgatagtggaatcacacctaaggttgagtag

SEQ ID NO: 1270 - protein, 278 aa, Brassica napus
MADRVKGPWSQEEDEQLRLMVEKYGPRNWSAISKSIPGRSGKSCRLRWCNQLSPEVEHRPFSPEEDETIVSARAKFGNKWATIARLLNGRTDNAVKNHWNSTLKRKCLDGNPTTEEDQDRAKKRRSMSSESVPPVDTGLYMSPESPTHVASDSSAVPPQLFKPMPVSGGFTVPSPVEMTSSSEEDPATTLSLSLSLPVSQESRNTGSSDNSLPFPKFESQMKINVEERGEARRAEFMTVVHEMVKAEVRSYMAEMQRNNGGGFVVGGFYDSGITPKVE

SEQ ID NO: 1271 - DNA, 702 bp, Brassica napus
  CDS (1)..(702)
atggacaaaagaggaggaataagtagtggaggtacgggatcatcaggagaagcagaggtgcgaaaaggaccgtggacgatggaagaagatcttattcttatcaattatatcgccaaccacggcgatggcgtttggaactctctcgccaaatctgcaggtctaaaacgcaccggaaaaagttgccgccttcggtggctcaactatctccgccctgacgtacgacgtggaaacatcacgccggaggaacaacttaccatcatggaacttcatgctaagtggggaaacaggtggtccaaaatcgctaaacaccttccaggaagaaccgacaatgagatcaagaatttctggaggacaagaatccaaaaatacatcaaacaaaccgatgtaacagcaacaacaacgtcctccgttggatctcagcacagctcagaaatcaacgatcaagctgcaagcacgtcgaaccataatgtcttttgtacacaagatcaagcgatggagacatattctcctacaacaacgtcctatcaacataccaatatggaattcaactatggtaactactctgcgcctgcggcaacggtgactacgactgcgacaacagcagattattcaataccaatgaccgttgatgatcaaaacggtgaaaactattggggcatggatgatatctggtcatcaatgcatttactcaatggtaattga

SEQ ID NO: 1272 - protein, 233 aa, Brassica napus
MDKRGGISSGGTGSSGEAEVRKGPWTMEEDLILINYIANHGDGVWNSLAKSAGLKRTGKSCRLRWLNYLRPDVRRGNITPEEQLTIMELHAKWGNRWSKIAKHLPGRTDNEIKNFWRTRIQKYIKQTDVTATTTSSVGSQHSSEINDQAASTSNHNVFCTQDQAMETYSPTTTSYQHTNMEFNYGNYSAPAATVTTTATTADYSIPMTVDDQNGENYWGMDDIWSSMHLLNGN

SEQ ID NO: 1273 - DNA, 963 bp, Brassica napus
  CDS (1)..(963)
atggatgagagaggaagaagcttgaagaacaacaacatggaagacgatatggacctgaaaagaggtccatggaccgcagaagaagattgtaagctcataaattacattgctactaatggagaaggtcgatggaactcgctttctcgttgcgctggactccaacgcactggtaaaagctgtaggctacggtggttaaactatctccgccctgacgtccgccgtggaaacattaccctcgaagaacaactcttgatcctcgaacttcattcccgttggggcaatcgatggtcaaaaatcgcacaatatctaccaggaagaacagacaatgagattaaaaactactggagaacacgagtgcaaaaacatgcaaagcagcttaaatgcgatgtaaacagtcaacaattcaaagacacaatgaagtatttgtggatgcctaggctcgttgagaggatccaatccgcctcagcctccgccgcagccctaaccaacactaccacaacaggctcagctgccacgtcatcttgcatcacaacctctaacaatcaattcatgacgtatgattacaacaacaatagcatgggacaacaatttggtgtaatgaacaacaacgattatatcacgccggagaattccagcgtggcattgtctcctgtgtcagacttgactgattactacaacgctccaaacccgaacccggaatactactcgggtcaaatggggaatagctactacccggatcagaatttggtgggtccacaaatgttaccggataattatttcgattattctaggttactagacgaagatgtaccggctatgcaggagcagagtaaccttaactggtttgaaaacattaatggagctgcttcttcttcggacagtttatgggatattggagaaagtgatgaagacttctggttcttacagcagcaacaacagttcaacaataatggcaacttctga

SEQ ID NO: 1274 - protein, 320 aa, Brassica napus
MDERGRSLKNNNMEDDMDLKRGPWTAEEDCKLINYIATNGEGRWNSLSRCAGLQRTGKSCRLRWLNYLRPDVRRGNITLEEQLLILELHSRWGNRWSKIAQYLPGRTDNEIKNYWRTRVQKHAKQLKCDVNSQQFKDTMKYLWMPRLVERIQSASASAAALTNTTTTGSAATSSCITTSNNQFMTYDYNNNSMGQQFGVMNNNDYITPENSSVALSPVSDLTDYYNAPNPNPEYYSGQMGNSYYPDQNLVGPQMLPDNYFDYSRLLDEDVPAMQEQSNLNWFENINGAASSSDSLWDIGESDEDFWFLQQQQQFNNNGNF

SEQ ID NO: 1275 - DNA, 1074 bp, Glycine max
  CDS (1)..(1074)
atgaaggagaggcaacgttggagagctgaagaggatgctttattacgttcttatgtcaaacagtatggtcctagggaatggaatcttgtgtctcagcgcatgaacacatatcttaacagggatgctaagtcgtgcttggagaggtggaagaactacctcaagcctggcatcaaaaaaggctctcttactgaagaagagcagcgccttgtcatccaccttcaagcaaaatatggaaacaaatggaagaaaatcgctgctgaagtcccagggcgcactgctaagcggttaggcaagtggtgggaagtcttcaaagagaagcagcagagagagaaaaaggatgtcaatagaatctccgacccaattaacaatagtaagtacgagcacatacttgagagttttgcagagaaactagtgaaggaacgcccttcaccatcatttttaatggctgcttccaatggggcatttctgcacaccgatacaccagcacctgcatcatccttgcttccttcttggctttctaattctagtagtcctgccgctgatgggccaagttccctttcggtgacactaagtctttcttcctcaatggtgatcgcgcctccattttcatggttgccacccaagagaggaccagacaatgctccttttgttttggggaatgcagcagcacttcagggagttattccaactctaagtgataacatgcttatgtctcagatggtggagcaccgtaaagagttggaagaggggcatcgtgctttggccacgcacaagaaggaggcagcttggaggttaagtcgggtggagttacagttggagtcagagaaggccaaccgaagaagggagaagattgaagaatttgaagcaaagattaaagctcttcaggaagaggagaaagctgctttaggtagaattgaagcagaatacagagaacagttagctgcattgaggagagatgctgaaaacaaggagcaaaagttggcagaacaatgggatgcaaagcatttacggtttactaggttactagagcaattaggatgcagagcagggctccttgagccaaatgcaagatga

SEQ ID NO: 1276 - protein, 357 aa, Glycine max
MKERQRWRAEEDALLRSYVKQYGPREWNLVSQRMNTYLNRDAKSCLERWKNYLKPGIKKGSLTEEEQRLVIHLQAKYGNKWKKIAAEVPGRTAKRLGKWWEVFKEKQQREKKDVNRISDPINNSKYEHILESFAEKLVKERPSPSFLMAASNGAFLHTDTPAPASSLLPSWLSNSSSPAADGPSSLSVTLSLSSSMVIAPPFSWLPPKRGPDNAPFVLGNAAALQGVIPTLSDNMLMSQMVEHRKELEEGHRALATHKKEAAWRLSRVELQLESEKANRRREKIEEFEAKIKALQEEEKAALGRIEAEYREQLAALRRDAENKEQKLAEQWDAKHLRFTRLLEQLGCRAGLLEPNAR

SEQ ID NO: 1277 - DNA, 957 bp, Glycine max
  CDS (1)..(957)
atggtgagaaccccatcttgtgacaaaagtggaatgaggaaaggtacttggacactggaggaagataggaagttaattgcatatgttactaggtatggctcctggaattggcgccaacttcccaggtttgcaggtctggcaagatgtgggaaaagttgtagattgagatggatcaaatatctaaggcctgatgtcaaaagagggaacttcactcaacaagaagaagaattcatcatcagaatgcacaaaaaacttggtaacagatggtctaccattgcggctgagttaccaggaagaacagataacgaaataaagaaccattggcacaccacactcaagaagaggtctcaacaaaacacactcacaaaggaagaagctagagcctccaaatcaaaggataaggtacttcccaacaagggtgttactgttactcttccagctacttcttcccagatttcagataattcatcattatcgccagcttcatccaccagcagcgagttttccaacataacttcagatccttccactgctgccagcatgcaaaatttggtgtttgaagatgatgatgagttcggttttctggattcatacattgatcctatgaataatgaaagtttctggaaagagctaactctggatgacatttcctttaataatgtaccaatagtttcagaagataccaatggctgttttcaaagtacaagttctagcaatagcaacacccttgattctctgcataaatcaaccagcgaaagtattgttgcggataatgactttggcggctttttcgatgcatacgcagaagcaaccgttgacaacttttggacacaaccatatgtggctggcatgtcctcccacgttccaactgaactacttgctccctccgttgcagaatctgaatattttactccaatatatgatgatctgtggggccaaactcatttgtattattag

SEQ ID NO: 1278 - protein, 318 aa, Glycine max
MVRTPSCDKSGMRKGTWTLEEDRKLIAYVTRYGSWNWRQLPRFAGLARCGKSCRLRWIKYLRPDVKRGNFTQQEEEFIIRMHKKLGNRWSTIAAELPGRTDNEIKNHWHTTLKKRSQQNTLTKEEARASKSKDKVLPNKGVTVTLPATSSQISDNSSLSPASSTSSEFSNITSDPSTAASMQNLVFEDDDEFGFLDSYIDPMNNESFWKELTLDDISFNNVPIVSEDTNGCFQSTSSSNSNTLDSLHKSTSESIVADNDFGGFFDAYAEATVDNFWTQPYVAGMSSHVPTELLAPSVAESEYFTPIYDDLWGQTHLYY

SEQ ID NO: 1279 - DNA, 1023 bp, Glycine max
  CDS (1)..(1023)
atggaagtgaaaggaataagggcaagcaactccaccaccaccaccaccacaatccaaagtgaggatgagatggaccttcgaagaggtccttggaccgtcgatgaggaccttgctctcatcaattacattgccaatcacggtgaaggtcgatggaactctcttgctcgttcagctggactcaaacgaactggcaagagctgcagattgagatggttgaattatttgcgtcctgatgttcgacgtggaaacatcacacttgaagaacagcttcttattcttgaactccacggtcgctggggaaaccgttggtctaaaattgctcaatatttgccgggaagaaccgataatgagattaaaaactattggagaacccgtgtccaaaagcatgccaagcaactcaaatgtgacgtgaatagcaagcaattcaaggatgccatgcgctatctttggatgccgaggctggtggagcgcattcaagccgccgcggctgccaccaccaccgtggcggctgcgggttctccaacggcatctgccagtgctaccacaaccatcaccaccaacaacaacaccaccacatacaactactacgataacaacaaccttaacaacagttttgaggtgcacagtgggaacatgatggtgagaaatccaacaatcatgaacaacaataacttttgtggttcacatagttacactcccgagaatagtagcacgggtgcatcatcggattcgtttggtacacaggtttcacctgtctcggacttgactcaggattattacaataatgtcacggctgggaataataacaacaataaccctaatcctgatcagtattaccaacaagcacatgatcaactgagtttcttagactgcatcacaagcccatcagggttgttcgatttccaacccatggaaccaaacaccccgtggattaatctgagtaatgttggggacacgtccaacggtttctggaatgttgaaaacatgttgctctttcaacaattctctgacaacaacatgtga

SEQ ID NO: 1280 - protein, 340 aa, Glycine max
MEVKGIRASNSTTTTTTIQSEDEMDLRRGPWTVDEDLALINYIANHGEGRWNSLARSAGLKRTGKSCRLRWLNYLRPDVRRGNITLEEQLLILELHGRWGNRWSKIAQYLPGRTDNEIKNYWRTRVQKHAKQLKCDVNSKQFKDAMRYLWMPRLVERIQAAAAATTTVAAAGSPTASASATTTITTNNNTTTYNYYDNNNLNNSFEVHSGNMMVRNPTIMNNNNFCGSHSYTPENSSTGASSDSFGTQVSPVSDLTQDYYNNVTAGNNNNNNPNPDQYYQQAHDQLSFLDCITSPSGLFDFQPMEPNTPWINLSNVGDTSNGFWNVENMLLFQQFSDNNM

SEQ ID NO: 1281 - DNA, 975 bp, Glycine max
  CDS (1)..(975)
atggtgagaaccccgtcttgtgacaaaagtggaatgaggaaaggtacttggactccagaggaagatatgaagttaattgcttatgtcactaggtatggctgctggaattggcgccaactccccaagtttgcaggtcttgcaagatgtgggaaaagttgtagattgagatggatgaattatctaaggcctaatatcaaaagagggaacttcactcaacaggaagaagaatgcatcatcagaatgcacaaaaaacttggtaacagatggtctgctattgcggttgagttaccaggaagaacagataacgaaataaaaaatcattggcacaccgcactcaagaagaggtctcaacaaaacacactcataaatgaagaaaccaaagccatcaaatcaaagaataaagaatcagttcacaacaacggtgtatttgttactcttccagcaacttctcagatttcagataattcatcattatcgccagtttcatccacctgcagcgagttttcctccataacttctgatctttccactgctgccagctgtatggaaaatttggtgtttgaagatgatgacttgggttttctggatttatacaatattgatcctatgaatggaaatttgtggacagaactaaatctcgatggcatttccttcaatacaccatgtgaaatagtttcaggagatactaatagcactttccaaagctcaagttctagcaatagcaacacccttgattctccgcatcaatcaaccagcgaaagtattgttgtgaataatgactttggtcgctttctcgattcatacgaagaggcaacagtcgataacttttggacacagtcatatgtagctgacatgtcccacgttccaagcgaactatttgttccctccgtggcagaatctgaatattttactccattatatgatgatctgtggggtcaaactcatttgtaccatgaaaatcattgcttattctga

SEQ ID NO: 1282 - protein, 324 aa, Glycine max
MVRTPSCDKSGMRKGTWTPEEDMKLIAYVTRYGCWNWRQLPKFAGLARCGKSCRLRWMNYLRPNIKRGNFTQQEEECIIRMHKKLGNRWSAIAVELPGRTDNEIKNHWHTALKKRSQQNTLINEETKAIKSKNKESVHNNGVFVTLPATSQISDNSSLSPVSSTCSEFSSITSDLSTAASCMENLVFEDDDLGFLDLYNIDPMNGNLWTELNLDGISFNTPCEIVSGDTNSTFQSSSSSNSNTLDSPHQSTSESIVVNNDFGRFLDSYEEATVDNFWTQSYVADMSHVPSELFVPSVAESEYFTPLYDDLWGQTHLYHENHCLF

SEQ ID NO: 1283 - DNA, 1080 bp, Glycine max
  CDS (1)..(1080)
atgggtcgccattcctgttgtttaaagcaaaaattaaggaaaggcttatggtcccccgaagaagatgagaagcttttcaactacataaccagatttggcgttggctgctggagctccgttcccaaacaagccggactccaaagatgtggaaagagttgcagattgagatggataaactacttgaggcctgatttgaagagaggaatgttctctcaacaagaggaggatcttataattagtcttcatgaagttctaggaaataggtgggctcaaattgcagctcaattaccagggagaacagataatgagattaagaacttttggaattcatgtttgaagaagaagctaatgaagcaagggattgaccctgcaacacacaagcctctcctcagtgctcaagaacacataattataaaggaagagaaggaaaccattttggagacaccaccacctatgttattaccaatgtctcaagggattttagcttcctcacaagagtcaccacttgtagtgaacaattcaagttactgtgatggtggattaaatgtaacagaagctgcttcaagggaagttttcatgagcaagaatgctgctttagaccctttgtcctactttgaattccaaatgggttacaacccaataagacaatttgatcagaaccatgtggggaccaactcaagctatggattctcctcattgccgtgtctgaatagttcttctgatcacgggaacgtgtcggtggcggcggagttttcagataacaactcagcttcaaaaatcagttctttgatgaaggaaagttccagcaatagctcaagtatgagtgtttatccagctgggggagggtgtcaaatgatggaaaatgcagggttctcatgggatggtgagaacaataatactaagatcgatcctttgttacagttccatgtcaatgtgctaaaatctgaagagttcaagacaagttcgtggcaagaagagcagattctgactcagaatttgatagatttcactaactatccgttaatgtcactgtctgaggatctaaccggagcaaattttgatgtgttccagcagatgtga

SEQ ID NO: 1284 - protein, 359 aa, Glycine max
MGRHSCCLKQKLRKGLWSPEEDEKLFNYITRFGVGCWSSVPKQAGLQRCGKSCRLRWINYLRPDLKRGMFSQQEEDLIISLHEVLGNRWAQIAAQLPGRTDNEIKNFWNSCLKKKLMKQGIDPATHKPLLSAQEHIIIKEEKETILETPPPMLLPMSQGILASSQESPLVVNNSSYCDGGLNVTEAASREVFMSKNAALDPLSYFEFQMGYNPIRQFDQNHVGTNSSYGFSSLPCLNSSSDHGNVSVAAEFSDNNSASKISSLMKESSSNSSSMSVYPAGGGCQMMENAGFSWDGENNNTKIDPLLQFHVNVLKSEEFKTSSWQEEQILTQNLIDFTNYPLMSLSEDLTGANFDVFQQM

SEQ ID NO: 1285 - DNA, 1074 bp, Glycine max
  CDS (1)..(1074)
atgaaggagaggcaacgttggagagctgaagaggatgctttattacgttcttatgtcaaacagtatggtcctagggaatggaatcttgtgtctcagcgcatgaacacatatcttaacagggatgctaagtcgtgcttggagaggtggaagaactacctcaagcctggcatcaaaaaaggctctcttactgaagaagagcagcgccttgtcatccaccttcaagcaaaatatggaaacaaatggaagaaaatcgctgctgaagtcccagggcgcactgctaagcggttaggcaagtggtgggaagtcttcaaagagaagcagcagagagagaaaaaggagatcaatagaattgccgacccaattaacaatagtaagtacgagcacatactcgagagttttgcagagaaactagttaaggaacgcccttcaccatcatttgtcatggctgcttccgatggggcatttctgctcactgatacaccagcacctgcatcttccttgcgtccttcttggctttccaattctagtagtgctgcagccatcggcccaagttccctttctgtgaaactaagtctttcttcctcaacggtggccacacctccattttcatggttgccacccgagagaggaccagacaatgctccttttgttttggggaatgtatcagcgcttcatggagctattccaactctaagtgatagcatgcatatgtctcagatggtggagcactgtaaagagttgggagaggggcatcgtgctttggccacgcacaagaaggaggcagcttggaggttaagtcgggtggagttacagttggagtcagagaaggccaaccgaagaagggagaagattgaagaatttgaagcaaagattaaagctcttcaggaagaggagaaagctgctttaggtagaattgaagcagaatacagagaacagttagctgcattgaggagagatgctgaaaacaaggagcaaaagttggcagaacaatgggatgcaaagcatttacggtttactaggttactagagcaattaggatgcagagcagggctccttgagccaaatgcaagatga

SEQ ID NO: 1286 - protein, 357 aa, Glycine max
MKERQRWRAEEDALLRSYVKQYGPREWNLVSQRMNTYLNRDAKSCLERWKNYLKPGIKKGSLTEEEQRLVIHLQAKYGNKWKKIAAEVPGRTAKRLGKWWEVFKEKQQREKKEINRIADPINNSKYEHILESFAEKLVKERPSPSFVMAASDGAFLLTDTPAPASSLRPSWLSNSSSAAAIGPSSLSVKLSLSSSTVATPPFSWLPPERGPDNAPFVLGNVSALHGAIPTLSDSMHMSQMVEHCKELGEGHRALATHKKEAAWRLSRVELQLESEKANRRREKIEEFEAKIKALQEEEKAALGRIEAEYREQLAALRRDAENKEQKLAEQWDAKHLRFTRLLEQLGCRAGLLEPNAR

SEQ ID NO: 1287 - DNA, 1284 bp, Zea mays
  CDS (1)..(1284)
atggggaggcactcctgctgttacaagcagaagctgaggaaggggctctggtctcctgaggaagatgagaagctcatgaaccacataaccaagcacgggcatggctgctggagcactgtccccaagcttgcagggcttcagaggtgtggcaagagctgcaggctgaggtggataaattacctgaggcctgaccttaaaagaggcgcattctctgaggaggaggaagacctcatcgtcgaacttcatgctgtactggggaacaggtggtctcagattgcaacaaggttgcctggaagaactgacaacgagatcaagaatctctggaactcgagcatcaagaagaagctccggcagaaaggcattgaccccaacacccacaagccgctccttgtcgaggttgaacgcagcaaagcagctccaacgaccagtaccgagaggacctctgagtccaatgatgttgacccttcaagtggcggcgcacttggcaactcgagccatcttcttctcagcgagacagcacaatcaccacagctgccagcgctcggtaagcatcgcagagaaactactagcctcgcacatctaagggtgccgcccaaggagttgttccttgaccagctggcttctggtcatgagaacctcactggctgccgcacagcaggcccagttccaaatttccctttccaacagctgatgtgctacaacaatgaatttggcaacaagaatggtgctagtaacaattcactctggtttaaccacaatgagacaagtggcagcaccatttccactgtgatgccaccagtttcgccatcaactctctcaacatcaacagggctcaataggtcaccagacaacccacactcgggaggcactgccattcagagcacccagttctactgggacactgctaatcctagcagctgcagcagtagaggaagcagcggaagcaacggcttgggatttgagctgcaaagcacaagctcgcttctggagagtagtgttttcccatggacagaattaacaccagataagaatagccaagttcaccttggggaagaactcaagtggcccgacttgctccacggaacattcacagacacacctgcaaccatgcagaatcttagccagtcactgtacgaagatgttatcaaagccgagagccaattcaacatagagggcctctgtgcagcctggtctcaaaatctgcagccacagcaacatctgcaggtatcagatttgtatgacaaggatttgcaaaggatgtccttgtcttttgagaatatctag

SEQ ID NO: 1288 - protein, 427 aa, Zea mays
MGRHSCCYKQKLRKGLWSPEEDEKLMNHITKHGHGCWSTVPKLAGLQRCGKSCRLRWINYLRPDLKRGAFSEEEEDLIVELHAVLGNRWSQIATRLPGRTDNEIKNLWNSSIKKKLRQKGIDPNTHKPLLVEVERSKAAPTTSTERTSESNDVDPSSGGALGNSSHLLLSETAQSPQLPALGKHRRETTSLAHLRVPPKELFLDQLASGHENLTGCRTAGPVPNFPFQQLMCYNNEFGNKNGASNNSLWFNHNETSGSTISTVMPPVSPSTLSTSTGLNRSPDNPHSGGTAIQSTQFYWDTANPSSCSSRGSSGSNGLGFELQSTSSLLESSVFPWTELTPDKNSQVHLGEELKWPDLLHGTFTDTPATMQNLSQSLYEDVIKAESQFNIEGLCAAWSQNLQPQQHLQVSDLYDKDLQRMSLSFENI

SEQ ID NO: 1289 - DNA, 1089 bp, Zea mays
  CDS (1)..(1089)
atggggcgcgaggcggcagcgacgaggccgcccaagctaaggaggggcctgtggtcgccggaggaggacgagaagctgtacaatcacatcatccgatatggcgtcggctgctggagctcagtcccaaagctcgctggcttggagagatgcggcaagagctgcaggctgagatggatcaactacctgcggcctgacctcaagaggggcagcttctcccagcaggaggaggatctcatcgtcagcctccacaagatactaggcaacaggtggtcccagatcgcgtcgcagctaccggggaggacggacaacgagatcaaaaacttctggaactcgtgcatcaagaagaagctccggcagcagggcatcgaccccgccacccacaagccgctcaacgacgacaacaacgctgatgctgctgctgctgcggacaacgacgccgccgtgacgccgcaccaccatcgtcgtcatcaggacgaccactgcggcgccgccaatattgataataataataataacaacaacaacaacaacaatcggcagctcccctcagccgacgaccactgcttcgccatgagcagcgacgaccctctcgcgccacactccccgaccgtcagcttcgacccactgtccgtcaccaacgtccccacggcaatgcagcagggctcctacggctcgttccgctccgacaacgaccacctctgcgactacggcggcggcggcgtcgacgtggtctcggacgccgccacggcgtacagcgccccctacacaggcggcggcggcggcggcggagacagctccagcaacagcaacggcaacggcacctgggcctgcagcggcggcgagccgatgccgccgcacgtggccatgttcggccgcgatgctgcccaggcggcggcgtaccatcagttcgtcgacccggccaagtacagcccctggcagcagcacccggcggcgaggctccatgatcacaacgtcggcggcgctgctgcgggcttcccgatacggtccatgtcgcgggacctgccgggttcctgcttcgacctcgcccgcagcgcgctggaggacgagttcagcgtcgacttactctga

SEQ ID NO: 1290 - protein, 362 aa, Zea mays
MGREAAATRPPKLRRGLWSPEEDEKLYNHIIRYGVGCWSSVPKLAGLERCGKSCRLRWINYLRPDLKRGSFSQQEEDLIVSLHKILGNRWSQIASQLPGRTDNEIKNFWNSCIKKKLRQQGIDPATHKPLNDDNNADAAAAADNDAAVTPHHHRRHQDDHCGAANIDNNNNNNNNNNNRQLPSADDHCFAMSSDDPLAPHSPTVSFDPLSVTNVPTAMQQGSYGSFRSDNDHLCDYGGGGVDVVSDAATAYSAPYTGGGGGGGDSSSNSNGNGTWACSGGEPMPPHVAMFGRDAAQAAAYHQFVDPAKYSPWQQHPAARLHDHNVGGAAAGFPIRSMSRDLPGSCFDLARSALEDEFSVDLL

SEQ ID NO: 1291 - DNA, 1089 bp, Zea mays
  CDS (1)..(1089)
atgtcccagaggaaaggcgccatggcggctgcagtgacggccagcaagcatcgcgaggaccaggaggcgatgatggtggagctcaggagaggcccctggacgctcgaggaagacaacctcctcatgaactacattgcttgccacggcgagggccgctggaatctcctcgcccgctgctccgggttgaagaggaccggcaagagctgccggctcaggtggctcaactacctgaagcccgacatcaagcgcggcaacctgacgcctgaggagcagctgctcatcctcgagctccactccaagtgggggaacaggtggtcgaggatagcgcagcacctgccggggcgcaccgacaacgagatcaagaactactggcggacgcgcgtgcagaagcaggcgcggcagctgcgggtggacgccaacagcgccgtcttccgcgacgccgtccgctgctactggatgccgcgcctgctggagaagatggccgcgcaccaccacggcgacggcgagctgccgccgccactgcacccctcgcacaacatcgccggcacggcctcctcgcgctcgccgccggcccacggcagccagcaggaggacccgagtagtagcgcgccggcggccagcggccactacctgcagcaggtcgacccgagcccgagcacgtcgacgacgtccgggtcgacgacctcggccgcgctcccgccggtgccctgcttctccgaatccgaactaaggtgggtcgtggaccagtacggcgccgcttacggttacaccgacgacctcgacctcgacggcggcgccggcgtggtcgacgacgactcggctgccgccgccgcgctggacagcctcgggctggacgggctggacctggggccggccgacggcggcgtgtactcggacgcgacgctgctggactacctcaacgccacgtgcgccggcggcaccaccgtgatgacaatgatgggcggcgtccacggcgccgcgggcggtggcgacggccactacgggccggcgccgtggcggacggacgagctcggccaggcggcgaggaagctcggcgatcctcagcatcaatggagaggaggtatctag

SEQ ID NO: 1292 - protein, 362 aa, Zea mays
MSQRKGAMAAAVTASKHREDQEAMMVELRRGPWTLEEDNLLMNYIACHGEGRWNLLARCSGLKRTGKSCRLRWLNYLKPDIKRGNLTPEEQLLILELHSKWGNRWSRIAQHLPGRTDNEIKNYWRTRVQKQARQLRVDANSAVFRDAVRCYWMPRLLEKMAAHHHGDGELPPPLHPSHNIAGTASSRSPPAHGSQQEDPSSSAPAASGHYLQQVDPSPSTSTTSGSTTSAALPPVPCFSESELRWVVDQYGAAYGYTDDLDLDGGAGVVDDDSAAAAALDSLGLDGLDLGPADGGVYSDATLLDYLNATCAGGTTVMTMMGGVHGAAGGGDGHYGPAPWRTDELGQAARKLGDPQHQWRGGI

SEQ ID NO: 1293 - DNA, 21 bp, Artificial sequence
  primer
atggaaaattcgatgaagaag

SEQ ID NO: 1294 - DNA, 22 bp, Artificial sequence
  primer
ttactccctaaactgccaaatg

SEQ ID NO: 1295 - protein, 161 aa, Artificial sequence
  consensus sequence
  Variant (2)..(7): Xaa in position 2 to 7 is any amino acid
  Variant (8)..(59): Xaa in position 8 to 59 is any or no amino acid
  Variant (61)..(61): Xaa in position 61 is any amino acid
  Variant (63)..(64): Xaa in position 63 to 64 is any amino acid
  Variant (68)..(69): Xaa in position 68 to 69 is any amino acid
  Variant (71)..(77): Xaa in position 71 to 77 is any amino acid
  Variant (79)..(81): Xaa in position 79 to 81 is any amino acid
  Variant (83)..(89): Xaa in position 83 to 89 is any amino acid
  Variant (91)..(92): Xaa in position 91 to 92 is any amino acid
  Variant (94)..(94): Xaa in position 94 is any amino acid
  Variant (96)..(96): Xaa in position 96 is any amino acid
  Variant (105)..(105): Xaa in position 105 is any amino acid
  Variant (112)..(113): Xaa in position 112 to 113 is any amino acid
  Variant (116)..(120): Xaa in position 116 to 120 is any amino acid
  Variant (122)..(124): Xaa in position 122 to 124 is any amino acid
  Variant (126)..(127): Xaa in position 126 to 127 is any amino acid
  Variant (130)..(132): Xaa in position 130 to 132 is any amino acid
  Variant (135)..(135): Xaa in position 135 is any amino acid
  Variant (138)..(138): Xaa in position 138 is any amino acid
  Variant (141)..(142): Xaa in position 141 to 142 is any amino acid
  Variant (154)..(154): Xaa in position 154 is any amino acid
  Variant (156)..(156): Xaa in position 156 is any amino acid
  Variant (158)..(160): Xaa in position 158 to 160 is any amino acid
MXXXXXXXXXXXXXXXXXXXXXXXXXXXXXXXXXXXXXXXXXXXXXXXXXXXXXXXXXXGXWXXEEDXXLXXXXXXXGXXXWXXXXXXXGXXLXRXGKSCRLRWXNYLRPDXXRGXXXXXEXXXIXXLHXXXGNXWSXIAXXLPGRTDNEIKNXWXTXXXK

SEQ ID NO: 1296 - protein, 58 aa, Artificial sequence
  protein pattern
  Variant (2)..(2): Xaa in position 2 is any amino acid
  Variant (8)..(8): Xaa in position 8 is any amino acid
  Variant (12)..(12): Xaa in position 12 is Lys or Arg
  Variant (15)..(15): Xaa in position 15 is Ile, Leu or Val
  Variant (16)..(16): Xaa in position 16 is Lys or Arg
  Variant (19)..(19): Xaa in position 19 is any amino acid
  Variant (20)..(20): Xaa in position 20 is Phe, Ile or Leu
  Variant (21)..(21): Xaa in position 21 is Asn, Ser or Thr
  Variant (22)..(23): Xaa in position 22 to 23 is any amino acid
  Variant (25)..(25): Xaa in position 25 is Asp, Glu or Gln
  Variant (26)..(27): Xaa in position 26 to 27 is any amino acid
  Variant (28)..(28): Xaa in position 28 is Ile or Val
  Variant (29)..(29): Xaa in position 29 is Phe, Ile, Leu, Met or Val
  Variant (30)..(30): Xaa in position 30 is any amino acid
  Variant (31)..(31): Xaa in position 31 is Phe, Leu, Met or Val
  Variant (33)..(35): Xaa in position 33 to 35 is any amino acid
  Variant (38)..(38): Xaa in position 38 is Lys or Arg
  Variant (40)..(40): Xaa in position 40 is Ala or Ser
  Variant (41)..(41): Xaa in position 41 is any amino acid
  Variant (44)..(45): Xaa in position 44 to 45 is any amino acid
  Variant (47)..(47): Xaa in position 47 is Ala or Pro
  Variant (51)..(51): Xaa in position 51 is Asp or Gly
  Variant (54)..(54): Xaa in position 54 is Ile or Val
  Variant (57)..(57): Xaa in position 57 is any amino acid
KXCRLRWXNYLXPDXXRGXXXXXEXXXXXXXHXXXGNXWXXIAXXLXGRTXNEXKNXW

SEQ ID NO: 1297 - protein, 28 aa, Artificial sequence
  protein pattern
  Variant (2)..(2): Xaa in position 2 is Leu or Pro
  Variant (4)..(4): Xaa in position 4 is Ser or Thr
  Variant (5)..(5): Xaa in position 5 is any amino acid
  Variant (6)..(6): Xaa in position 6 is Ala, Asp, Glu or Gln
  Variant (9)..(10): Xaa in position 9 to 10 is any or no amino acid
  Variant (12)..(18): Xaa in position 12 to 18 is any amino acid
  Variant (19)..(20): Xaa in position 19 to 20 is any or no amino acid
  Variant (22)..(24): Xaa in position 22 to 24 is any amino acid
  Variant (26)..(26): Xaa in position 26 is Asn, Arg or Ser
  Variant (27)..(27): Xaa in position 27 is any amino acid
  Variant (28)..(28): Xaa in position 28 is Ile, Leu or Val
GXWXXXEDXXLXXXXXXXXXGXXXWXXX

SEQ ID NO: 1298 - DNA, 1068 bp, Arabidopsis thaliana; identical to SEQ ID NO: 850
  CDS (1)..(1068)

SEQ ID NO: 1299 - protein, 355 aa, Arabidopsis thaliana; identical to SEQ ID NO: 851

SEQ ID NO: 1300 - DNA, 1672 bp, Glycine max
  CDS (197)..(1282)
  misc_feature (1642)..(1642): n is a, g, c or t
tacggctgcgagaagaagacagaaaggtagagaaacaagaagaaagagatgagaacaaacaagaatcaagagagagaggtgttactacgttagtctatgaacagtcaccccgagagactgaaatttccagaccctcaaatcaaactcttctattcctctcatcaatcaatcaatccagttcccctctcggataggaatgggaatatatctcagcactccaaaaactgaaaagttttctgaagatggtgaaaatgactgtcttagatatggtttatcatccatgcaagggtggcgtgcaacaatggaagatgctcatgctgcatatactgatctggatgagtccacttcattttttggtgtctatgatggtcatggaggtaaggtggttgcaaagttttgtgccaagtttcttcatcaacaggtgctcaaaagtgagacatacttaactggagatataggaacctcccttcagaaagcctttttgagaatggatgaaatgatgcgtggtcaaaagggatggagggaattatcaatattgggggataagataaacaagtttactgggatgatagaagggttgatttggtctccacgaagcagtgatggtaattgccatgttgatgattgggcttttgaggaggggcctcattctgattttgctggaccaacttcgggaagcactgcctgtgttgcagttattagaaacaaccaacttgttgttgcaaatgctggtgattcgcgttgtgtgatatctaggaagggccaggcatacaatttgtctagagaccacaaacctgatcttgagattgagaaggaaagaatcttaaaagctggtggttttattcatgcaggacgagttaatggaagtttaaatcttgcaagagctattggtgacatggaatttaaacagaataagtttctttctgctgaaaaacaaattgtaactgccaatccagacataaacactgttgagctttgtgacgaagatgaatttgtggtgttagcttgtgatggcatatgggattgcatgtcaagtcaacaactggtagattttgttcgtgaacaattgcacttgaaaacgaaactttctgcagtgtgcgaaagcgtacttgaccggtgtttggcaccatcaactgctggtggtgaaggatgtgacaatatgaccatgatcgtggtgcagttcaaaagacctgctcagtccagtgcaccagcagaagagcaatcctcttcttcaaacggacaagctgaacctgaaacaaaactagagagaagtgaaagttagtattattcctcagtgacagttcaaatattgatcatatgtatgtagtgtgcaacagtgattagaatgcgtccgcatggtcattttcctttcatcccacattatacaccactgctatattccaattaccataaagaataccagtttttctcccgtttcttctctctcgtgtctacttttgactcttaaaaagtctgttctgcatattcaacatgcggctccaaatatcagtaattgtagttataatcaacaatctgcaagaatgctactagctcagtaaagagtgtttatgctaaagaggaacataacctaaaatgggtgatgtcttcttgacatagacaaatatttgtagcacactccttntgaaactcaaaaaaaaaaaaccaagggcgg

SEQ ID NO: 1301 - protein, 361 aa, Glycine max
MGIYLSTPKTEKFSEDGENDCLRYGLSSMQGWRATMEDAHAAYTDLDESTSFFGVYDGHGGKVVAKFCAKFLHQQVLKSETYLTGDIGTSLQKAFLRMDEMMRGQKGWRELSILGDKINKFTGMIEGLIWSPRSSDGNCHVDDWAFEEGPHSDFAGPTSGSTACVAVIRNNQLVVANAGDSRCVISRKGQAYNLSRDHKPDLEIEKERILKAGGFIHAGRVNGSLNLARAIGDMEFKQNKFLSAEKQIVTANPDINTVELCDEDEFVVLACDGIWDCMSSQQLVDFVREQLHLKTKLSAVCESVLDRCLAPSTAGGEGCDNMTMIVVQFKRPAQSSAPAEEQSSSSNGQAEPETKLERSES

SEQ ID NO: 1302 - DNA, 1080 bp, Zea mays; identical to SEQ ID NO: 1038
  CDS (1)..(1080)

SEQ ID NO: 1303 - protein, 359 aa, Zea mays; identical to SEQ ID NO: 1039

SEQ ID NO: 1304 - DNA, 1510 bp, Glycine max
  CDS (256)..(1293)
aagagaaacaacaagaaagagatgagaacaaacaagaatcaagagagagaggtgttactacgttagtctatgaacagtcaccccgagagactgaaatttccagaccctcaaatcaaactcttctattctctcatcaatcaatcaatccagttccctctcggttccttcctacagttgaataatgaaatttctggaaaagtgctcgagtgaagaggcattcagcagcatctcaatttataatcgtttcagataggaatgggaatatatctcagcactccaaaaactgaaaagttttctgaagatggtgaaaatgactgtcttagatatggtttatcatccatgcaagggtggcgtgcaacaatggaagatgctcatgctgcatatactgatctggatgagtccacttcattttttggtgtctatgatggccatggaggtaaggtggttgcaaagttttgtgccaagtttcttcatcaacagttgttcaaaagtgagacatacttaactggagatataggagcctcccttcagaaagcctttttgagaatggatgaaatgatgcgtggtcaaaggggatggagggaattatcaatattgggggataagataaacaagtttactgggatgatagaagggttgatttggtctccacgaagcagtgatgggaattgccatgttgatgattgggcttttgaggaggggcctcattctgattttgctggaccaacttcaggaagcactgcctgtgttgcagttattagaaacaaccaacttgttgttgcaaatgctggtgattcgcgttgtgtgatatccaggaagggccaggcatacaatttgtctagagaccacaaacctgatcttgagattgagaaggaaagaatcttaaaagctggtggtttcattcacgtaggacgagtcaatggaagtttaaatcttgcaagagctattggtgacatggaatttaaacagaataagtttctttctgctgaaaaacaaattgtaactgccaatccagacatcaacactgttgagctttgtgacgaagatgagtttgtggtgttagcttgtgatggcatatgggattgcatgtcaagtcaacaactggttgattttgttcatgaacaattgcactcggaaacaaaactttctgccgtgtgtgaaagagtacttgatcggtgtttggcaccatcaactgccagtggtgaaggatgtgacaacatgaccatgattgtggtgcagttcaaaagacctgctcagtccagtgtaccagcagaagagtcctcttcaaactgacaagctgaacctgaaacaaaactagagagaagtgagagttagcattattcctcagtgacagttcaaatattgtatcatatatatatatataatatatatgtgtgtgtttagtgtgcaacagtgattagaatgcgtccgcatggtcatcttcctttcatcccacattatacacaactgctattccaattaccgtaaagaatagtaccagtttttctcc

SEQ ID NO: 1305 - protein, 345 aa, Glycine max; identical to SEQ ID NO: 1003

SEQ ID NO: 1306 - DNA, 1047 bp, Oryza sativa (japonica cultivar-group); identical to SEQ ID NO: 822
  CDS (1)..(1047)

SEQ ID NO: 1307 - protein, 348 aa, Oryza sativa (japonica cultivar-group); identical to SEQ ID NO: 823

SEQ ID NO: 1308 - DNA, 1089 bp, Oryza sativa (japonica cultivar-group)
  CDS (1)..(1089)
atgggaatctacctcagtacccccaaaaccgataagttctctgaagacggggaaaatgataagcttaaacttggtctttcgtctatgcaaggatggcgtgcaaacatggaagatgctcattcagcattgctaaatcttgacaatgagacatcgttctttggtgtttttgatggccatggaggaagagtggttgccaaattctgtgcaaaatatttacactctcaagttctcagaagtgaagcctattcagctggtgacttaggcactgctgttcatagagctttcttcaggatggacgaaatgatgcgaggacagagaggctggagagaactatctgcacttggagataagataaacaagattggtggtatgattgaagggttgatttggtctccgagaggcagtgattcgaataatggacaagatgattggtctttcgaagagggaccccactccgattttgctgggccaacatgcggatgcacagcatgtgtagcgctaataagaaataaccaacttgttgtggcgaacgctggtgattcccgttgtgttatttctagggctggccaggcatacaatttgtcaagagaccacaagccagagcttgaagctgagagagacagaatagtaaaagcagggggtttcattcatatgggacgaataaatggaagtttaaacttgacaagagcaattggagatatggaatttaaacagaacaaattcttgcctcctgagaagcaaatcgtgactgcaaatcctgacatcaacgttgttgagctttgcgacgacgacgactttcttgttttagcatgtgacggcatttgggactgcatgtcaagccaacagctggtggatttcatccacgagcatatacagaaggagagcagtctttctgcagtgtgcgaaagagtgctcgacagatgcctagctccatcaacaattggtggagagggatgtgacaacatgaccatggttctggtgcagttcaaaaagcctattactcagaataaaaaagccgacgtaggggagcaatctgtgaaaggtgtggaagaggctgagatcaatgctgctgaggagaatggttcttga

SEQ ID NO: 1309 - protein, 362 aa, Oryza sativa (japonica cultivar-group)
MGIYLSTPKTDKFSEDGENDKLKLGLSSMQGWRANMEDAHSALLNLDNETSFFGVFDGHGGRVVAKFCAKYLHSQVLRSEAYSAGDLGTAVHRAFFRMDEMMRGQRGWRELSALGDKINKIGGMIEGLIWSPRGSDSNNGQDDWSFEEGPHSDFAGPTCGCTACVALIRNNQLVVANAGDSRCVISRAGQAYNLSRDHKPELEAERDRIVKAGGFIHMGRINGSLNLTRAIGDMEFKQNKFLPPEKQIVTANPDINVVELCDDDDFLVLACDGIWDCMSSQQLVDFIHEHIQKESSLSAVCERVLDRCLAPSTIGGEGCDNMTMVLVQFKKPITQNKKADVGEQSVKGVEEAEINAAEENGS

SEQ ID NO: 1310 - DNA, 1092 bp, Oryza sativa (japonica cultivar-group)
  CDS (1)..(1092)
atggtatgcttcgctagcctgaggagggctctgcctctgctgctgcgcgccaccaccaccaccaccccccgcttccttctccccagggccctctccggcggcgttggcggcggggcggcggtggatgcgcgcgcgcttctccgtgggcacagcgggtggcgcgggctccgggtggccgccaggatgatgctcgactcctccgactccgccgccgctgcggggcagatgcagccgcagcagcgtgcggcgggggccgtcgcctgcagcgcgcaggacggtggtgccgcagggtacgccagcggcgggtgggcgagagaagatggtaaactgaaatgtggatattcaagttttagagggaagagagccaccatggaggatttctatgatgtaaagttaactgaaatcgatggacaggctgttagcctatttggtgtatttgatggtcatggaggaccacgtgctgctgagtatttgaaggaaaatttgttcgaaaatcttctgaaacaccctgagttcctgacagatacaaagcttgccataagtgaaacatatcagaaaacagatacagatttcttagaatcagaatccaatgccttcagggatgatggttcaacagcttccactgcagttttggtgggtggccatctatatgtagcaaatgttggtgattcccgtgctgttgtttcaaaagctggtaaagctatggcactgtcagaagatcacaaacctaacaggagtgatgagcggaagagaattgaaaatgcaggaggagttgtcatttgggctggtacttggagggtaggaggtgtactggcaatgtcgcgtgcatttggcaatcgtctactgaagccatttgtggtggcagagcctgaaattcaggaagaacttgtcaatgaagacttggaatgcctcgttcttgctagcgatggactttgggatgtcgtggaaaatgaggaagctgtttcccttgcgaaaacagaagacctgcctgagtcggtggctaggaaactcacggaaatagcctattctcgaggcagcgctgacaacattacatgcatcgtggtgcaatttcaccatgataaaactgaataa

SEQ ID NO: 1311 - protein, 363 aa, Oryza sativa (japonica cultivar-group)
MVCFASLRRALPLLLRATTTTTPRFLLPRALSGGVGGGAAVDARALLRGHSGWRGLRVAARMMLDSSDSAAAAGQMQPQQRAAGAVACSAQDGGAAGYASGGWAREDGKLKCGYSSFRGKRATMEDFYDVKLTEIDGQAVSLFGVFDGHGGPRAAEYLKENLFENLLKHPEFLTDTKLAISETYQKTDTDFLESESNAFRDDGSTASTAVLVGGHLYVANVGDSRAVVSKAGKAMALSEDHKPNRSDERKRIENAGGVVIWAGTWRVGGVLAMSRAFGNRLLKPFVVAEPEIQEELVNEDLECLVLASDGLWDVVENEEAVSLAKTEDLPESVARKLTEIAYSRGSADNITCIVVQFHHDKTE

SEQ ID NO: 1312 - DNA, 1566 bp, Oryza sativa (japonica cultivar-group)
  CDS (1)..(1566)
atgggtaacagccttcctgtagaatcgaagttcacttttgaagaagagaatgacagaattaagtatgttgtgtcgtctatgcaaggatggggtgagaaaatggaagatgctcatgcagctattctaaatcttgatgatgccacgtccacgtctttctttggtgtttatgatggccatggaggagctgaagtagcattgtattgcgcaaaacaatttcacattgagctatgcaatcatgaagactatcacaacgatctgattaatgcactggacaatgtgtttttaagcatggatgagaacctgcaacagtccgatgcttggagagagttagttattcctcatgataatggatgtatgtattttctcaaggctggtgtctgtgctaagcctttcccacaggcgacatatactgggccagcgtatgaagggagcacagcatgtgtggttgtcatcagaggtaaccaaatgattgttggacatgttggtgattctcgttgcgtactctcaagacagggtggcctggctattgatttatccttcgatcacaaaccatgcacaagaactgagtctgaaagagagagagttcaaaatgcaggagggagatctcttggacttaggtgtgaacaagtaatggggaattatgtagtcaaggaacaatgggtcctcggtgattttgggggaggtgtaacaatctcaagatcaattggtgactttgctttcaagaagaacaaagatttagatcgtgaaaaacaaatgctggtatgtgatccggacatcctcgctgatgacataactgatgacatggagtttcttgttattgcaagtcaaggtctctggtcttgcgtggacagtgcggacgtggtttcttacatacatgaccgtttatcggtggagggtgcagagctgcgtgtcatctgtgaggaggttgttgagttcggcttggcatcgggcgagaacactaccgtcatcctggttcagttcaagcccggcgccttccagtaccagctggtggatcccgctggatttggcactgccgtctctaacattgccagcaccagtgctgcgccggctggtgccagcgacacaagcgacgagggcgtcatggccgactccagcgccacggctgacaccagcggcagtgccagggctgagagcggcgagctcgtccccactcccagcgccaacaacaccgtcacggatgaggtcgatcccactggcactgtcgcagccgacgacaaggtcgatcccaactccagcgccaatgccgacgctgacgacggcgctcccaaaccttctctcggcgcagtcatcgagtccgacgaggtcgccctcgatgccactgcaacgggccatcaggtggccgtgcgtcagcaggaggaattcgacccaaagaagtgttggatctgcggaaaaggctacaagaagattcttcttgaaccttcttcggccagggcgagaaacccacttctggctcacgctaagacgtgtgagtcggaagacaagaaggcgaagaagaagataaccaagtatatgatgaaagccaacgtcaccaaccagtatcattga

SEQ ID NO: 1313 - protein, 521 aa, Oryza sativa (japonica cultivar-group)
MGNSLPVESKFTFEEENDRIKYVVSSMQGWGEKMEDAHAAILNLDDATSTSFFGVYDGHGGAEVALYCAKQFHIELCNHEDYHNDLINALDNVFLSMDENLQQSDAWRELVIPHDNGCMYFLKAGVCAKPFPQATYTGPAYEGSTACVVVIRGNQMIVGHVGDSRCVLSRQGGLAIDLSFDHKPCTRTESERERVQNAGGRSLGLRCEQVMGNYVVKEQWVLGDFGGGVTISRSIGDFAFKKNKDLDREKQMLVCDPDILADDITDDMEFLVIASQGLWSCVDSADVVSYIHDRLSVEGAELRVICEEVVEFGLASGENTTVILVQFKPGAFQYQLVDPAGFGTAVSNIASTSAAPAGASDTSDEGVMADSSATADTSGSARAESGELVPTPSANNTVTDEVDPTGTVAADDKVDPNSSANADADDGAPKPSLGAVIESDEVALDATATGHQVAVRQQEEFDPKKCWICGKGYKKILLEPSSARARNPLLAHAKTCESEDKKAKKKITKYMMKANVTNQYH

SEQ ID NO: 1314 - DNA, 1065 bp, Oryza sativa (japonica cultivar-group); identical to SEQ ID NO: 824
  CDS (1)..(1065)

SEQ ID NO: 1315 - protein, 354 aa, Oryza sativa (japonica cultivar-group); identical to SEQ ID NO: 825

SEQ ID NO: 1316 - DNA, 1176 bp, Oryza sativa (japonica cultivar-group); identical to SEQ ID NO: 828
  CDS (1)..(1176)

SEQ ID NO: 1317 - protein, 391 aa, Oryza sativa (japonica cultivar-group); identical to SEQ ID NO: 829

SEQ ID NO: 1318 - DNA, 1476 bp, Oryza sativa (japonica cultivar-group); identical to SEQ ID NO: 834
  CDS (1)..(1476)

SEQ ID NO: 1319 - protein, 491 aa, Oryza sativa (japonica cultivar-group); identical to SEQ ID NO: 835

SEQ ID NO: 1320 - DNA, 1083 bp, Oryza sativa (japonica cultivar-group); identical to SEQ ID NO: 836
  CDS (1)..(1083)

SEQ ID NO: 1321 - protein, 360 aa, Oryza sativa (japonica cultivar-group); identical to SEQ ID NO: 837

SEQ ID NO: 1322 - DNA, 1104 bp, Oryza sativa (japonica cultivar-group); identical to SEQ ID NO: 838
  CDS (1)..(1104)

SEQ ID NO: 1323 - protein, 367 aa, Oryza sativa (japonica cultivar-group); identical to SEQ ID NO: 839

SEQ ID NO: 1324 - DNA, 1107 bp, Oryza sativa (japonica cultivar-group); identical to SEQ ID NO: 840
  CDS (1)..(1107)

SEQ ID NO: 1325 - protein, 368 aa, Oryza sativa (japonica cultivar-group); identical to SEQ ID NO: 841

SEQ ID NO: 1326 - DNA, 864 bp, Oryza sativa (japonica cultivar-group); identical to SEQ ID NO: 842
  CDS (1)..(864)

SEQ ID NO: 1327 - protein, 287 aa, Oryza sativa (japonica cultivar-group); identical to SEQ ID NO: 843

SEQ ID NO: 1328 - DNA, 1059 bp, Oryza sativa (japonica cultivar-group); identical to SEQ ID NO: 844
  CDS (1)..(1059)

SEQ ID NO: 1329 - protein, 352 aa, Oryza sativa (japonica cultivar-group); identical to SEQ ID NO: 845

SEQ ID NO: 1330 - DNA, 1116 bp, Arabidopsis thaliana
  CDS (1)..(1116)
atgaagaaaactagaaatgttgcttcttctcctattgaatgtgtccacctccagaccaaacccaccaccactcttgttcggtctttcttcttcttcctcttcaactctcaaacaatctcttcctttatcatcttctatctcttcctctgttccttcttctggttttgccaatcaccaaacctgactaacccttctcctcctcctctctccgtcgctccccttcgcggggatgccaattctccaccgccggaatcttcttcttctccggcgacgaaatcttctttaatgatttcttctagagatcccaatgccctctttagcggcggtggaatcagctttttagcaggagttagaactgtgaagtttagttatggttattctagtcttaaaggtaaaagagcaacaatggaggattacttcgaaactagaatctctgatgttaatggacaaatggttgctttctttggtgtctttgatggtcatggtggagcaagaactgcagaatatcttaaaaacaatcttttcaagaatttagttagtcatgatgattttatctcagacactaagaaagctattgttgaagtttttaagcagacagatgaagagtatcttattgaagaggcaggacaaccgaagaatgctggctcgactgctgcgactgcttttcttataggtgataagttgattgttgctaacgttggtgattctagagttgtagcgtcaagaaatggttcagctgttccactctctgatgatcataaacctgatagatcagatgagcgacaacggattgaagatgctggtggctttattatttgggctggaacatggcgagttggtggaattcttgcggtctctcgggcttttggagataagcaacttaagccatatgtgattgcggagccagaaattcaggaggaggatataagcacattggagtttattgttgttgctagtgatggactgtggaatgtgttgtcaaacaaggatgccgtggcaatagtacgagacatttcagatgcggaaacagcagcaagaaagcttgtgcaagaaggttacgcacggggtagctgcgacaatatcacttgcattgttgtacgattcgaggtttcttga

SEQ ID NO: 1331 - protein, 371 aa, Arabidopsis thaliana
MKKTRNVASSPIECVHLQTKPTTTLVRSFFFFLFNSQTISSFIIFYLFLCSFFWFCQSPNLTNPSPPPLSVAPLRGDANSPPPESSSSPATKSSLMISSRDPNALFSGGGISFLAGVRTVKFSYGYSSLKGKRATMEDYFETRISDVNGQMVAFFGVFDGHGGARTAEYLKNNLFKNLVSHDDFISDTKKAIVEVFKQTDEEYLIEEAGQPKNAGSTAATAFLIGDKLIVANVGDSRVVASRNGSAVPLSDDHKPDRSDERQRIEDAGGFIIWAGTWRVGGILAVSRAFGDKQLKPYVIAEPEIQEEDISTLEFIVVASDGLWNVLSNKDAVAIVRDISDAETAARKLVQEGYARGSCDNITCIVVRFEVS

SEQ ID NO: 1332 - DNA, 1152 bp, Arabidopsis thaliana; identical to SEQ ID NO: 848
  CDS (1)..(1152)

SEQ ID NO: 1333 - protein, 383 aa, Arabidopsis thaliana; identical to SEQ ID NO: 849

SEQ ID NO: 1334 - DNA, 1191 bp, Arabidopsis thaliana
  CDS (1)..(1191)
atgtcttgctccgtcgccgtatgtaattctccggtgttttcaccgtcgtcttctctattctgcaacaaatcttcgattctctcgtcaccgcaagaatctctttctctaacgctttctcatcgcaaacctcagacctcttctccttcctctccatccaccaccgtttcttctcctaaatctccatttcgtctccgtttccagaaacctccgtccggattcgctcctggtccattatcttttggatctgaatctgtttctgcatcctctcctccgggaggtgttttaaagaggaaacgacctacaaggcttgatataccgattggtgttgctggatttgtagctccgatttcttcatcggccgctgtggctgcgacgccgagagaggagtgtagagaggttgagagagaaggtgatggttattctgtttattgtaagagaggaagaagagaagctatggaggatcgtttctctgctatcaccaatcttcatggagatcgtaaacaggcgattttcggagtctatgatggtcatggaggagttaaagcggctgagtttgcagctaagaacttagataagaacattgtagaagaagtagttggtaagagagacgagtctgagatagctgaagcggtgaaacatggttacttggcaacagacgcgtcgtttcttaaggaggaagacgttaagggtggttcatgctgtgtcacggctctggttaacgaagggaaccttgttgtgtctaacgccggtgactgtcgtgctgttatgagtgtaggaggtgtagctaaggctttatcttctgatcaccgcccgtctagagacgatgaacggaaaagaattgaaaccacgggaggatatgttgatacgtttcacggtgtttggagaatccagggatctttagctgtgtcaagaggaattggagatgctcaacttaagaaatgggttatagctgaaccagagacaaagatttcgagaatcgagcatgaccatgagtttttgatcttggcatctgatggtttatgggataaagtgagtaaccaagaagcagtagacattgctcgtcctctctgcttaggaaccgagaagccattgttgttagctgcctgtaagaagcttgtcgatttatctgcttcacgaggctcgtctgatgatatcagtgtgatgttgatccctttacgccagttcatatag

SEQ ID NO: 1335 - protein, 396 aa, Arabidopsis thaliana
MSCSVAVCNSPVFSPSSSLFCNKSSILSSPQESLSLTLSHRKPQTSSPSSPSTTVSSPKSPFRLRFQKPPSGFAPGPLSFGSESVSASSPPGGVLKRKRPTRLDIPIGVAGFVAPISSSAAVAATPREECREVEREGDGYSVYCKRGRREAMEDRFSAITNLHGDRKQAIFGVYDGHGGVKAAEFAAKNLDKNIVEEVVGKRDESEIAEAVKHGYLATDASFLKEEDVKGGSCCVTALVNEGNLVVSNAGDCRAVMSVGGVAKALSSDHRPSRDDERKRIETTGGYVDTFHGVWRIQGSLAVSRGIGDAQLKKWVIAEPETKISRIEHDHEFLILASDGLWDKVSNQEAVDIARPLCLGTEKPLLLAACKKLVDLSASRGSSDDISVMLIPLRQFI

SEQ ID NO: 1336 - DNA, 1143 bp, Arabidopsis thaliana; identical to SEQ ID NO: 854
  CDS (1)..(1143)

SEQ ID NO: 1337 - protein, 380 aa, Arabidopsis thaliana; identical to SEQ ID NO: 855

SEQ ID NO: 1338 - DNA, 1086 bp, Arabidopsis thaliana; identical to SEQ ID NO: 860
  CDS (1)..(1086)

SEQ ID NO: 1339 - protein, 361 aa, Arabidopsis thaliana; identical to SEQ ID NO: 861

SEQ ID NO: 1340 - DNA, 1152 bp, Arabidopsis thaliana; identical to SEQ ID NO: 862
  CDS (1)..(1152)

SEQ ID NO: 1341 - protein, 383 aa, Arabidopsis thaliana; identical to SEQ ID NO: 863

SEQ ID NO: 1342 - DNA, 1074 bp, Arabidopsis thaliana
  CDS (1)..(1074)
atgggtatatatctaagtactccaaaaacagacaagttctcagaagatggcgaaaatcataaactcagatatggtttatcctctatgcaaggttggcgtgcgtccatggaagatgctcatgctgcaatacttgatctcgatgataacacttccttcttgggtgtctatgatggtcatggaggtaaagttgtttctaagttctgtgccaagtatctacaccagcaggttcttagtgatgaggcgtatgcagctggagacgtagggacttctcttcaaaaagcatttttcagaatggatgagatgatgcaaggacaaagagggtggcgagagttagcagtacttggtgacaaaatcaataagttcagtgggatgattgaagggcttatatggtcaccaagaagtggggacagtgctaataaacctgatgcttgggcgtttgaggaaggtcctcattctgattttgctggacctaattctgggagcacggcatgcgtagctgttgttagagacaagcagctatttgttgcaaatgcaggtgactcacgttgtgtgatatccagaaagaatcaggcttataatctttctagagatcacaaaccagatcttgaagctgagaaagaaaggatattgaaagctggtggctttatacatgcagggcgagtcaatggaagcttaaatctatcacgagctatcggtgacatggaattcaagcagaataagtttttgccatctgaaaagcaaatagttaccgctagtccagatgttaacactgttgaactctgtgatgatgatgatttccttgttcttgcctgcgatggaatttgggattgcatgacaagccaacaactcgttgatttcatacatgaacaattgaattcagagaccaaactctcggtggtatgtgaaaaagttctcgatagatgtctggctccaaacacttcaggtggtgaaggctgtgataacatgaccatgatattggttcgattcaagaaccctactccatcagagaccgaactaaaaccagaagcaagccaggcagaaggaaaccacgatgagccgagctcatcaaactag

SEQ ID NO: 1343 - protein, 357 aa, Arabidopsis thaliana
MGIYLSTPKTDKFSEDGENHKLRYGLSSMQGWRASMEDAHAAILDLDDNTSFLGVYDGHGGKVVSKFCAKYLHQQVLSDEAYAAGDVGTSLQKAFFRMDEMMQGQRGWRELAVLGDKINKFSGMIEGLIWSPRSGDSANKPDAWAFEEGPHSDFAGPNSGSTACVAVVRDKQLFVANAGDSRCVISRKNQAYNLSRDHKPDLEAEKERILKAGGFIHAGRVNGSLNLSRAIGDMEFKQNKFLPSEKQIVTASPDVNTVELCDDDDFLVLACDGIWDCMTSQQLVDFIHEQLNSETKLSVVCEKVLDRCLAPNTSGGEGCDNMTMILVRFKNPTPSETELKPEASQAEGNHDEPSSSN

SEQ ID NO: 1344 - DNA, 1065 bp, Arabidopsis thaliana
  CDS (1)..(1065)
atgggatacttggacttggccttgtcgtattccaaccagccgcagactgttgaagctccagcgagcggaggaggtctcagccagaatggaaaatttagctatggatatgcaagctccgctggcaagagatcatctatggaagacttttttgaaactaggatcgacggtatcaatggagaaatagttggtctatttggagtttttgatggccatggtggagccagagcagctgagtacgtgaagcgccatcttttcagtaatctgatcacccacccaaagtttatctctgacaccaaatcagctataactgatgcttataaccatacagactccgaacttctcaagtcagaaaatagtcacaatagagacgctggttctactgcgtctacagctattcttgttggtgaccgtttagttgttgcaaatgttggtgattctagagctgttatcagcagaggcggaaaagccattgctgtgtcaagggaccataaaccggaccaaagtgatgaacgtgaaaggattgagaatgctggtggatttgtgatgtgggcaggaacttggagggtaggaggagttcttgcagtttctcgtgcgtttggtgatcggcttctgaagcaatatgttgttgctgatccagaaatccaggaagaaaagattgatgatactcttgagtttttgattctagcaagtgatggactgtgggatgttttctctaatgaggcagcagttgcaatggtaaaggaagttgaagatcccgaggactcagcgaaaaaactggtgggtgaagcaataaagagaggaagtgcagataacatcacatgtgttgtcgttcgtttcttggagaagaagtcagcttcatcaagccacattagctcttcctcctccaaggaagccaaggaaatgcctccacttggagaccttgctatctcatcgaatgaagctaagcaagtccagatcggctcagggaacaaaccagagaatgtaacgaatcgaaaaccggacactgcaagtcgctcaactgatacactgacccttgagaggaattcagtgaccgacaaggtataa

SEQ ID NO: 1345 - protein, 354 aa, Arabidopsis thaliana
MGYLDLALSYSNQPQTVEAPASGGGLSQNGKFSYGYASSAGKRSSMEDFFETRIDGINGEIVGLFGVFDGHGGARAAEYVKRHLFSNLITHPKFISDTKSAITDAYNHTDSELLKSENSHNRDAGSTASTAILVGDRLVVANVGDSRAVISRGGKAIAVSRDHKPDQSDERERIENAGGFVMWAGTWRVGGVLAVSRAFGDRLLKQYVVADPEIQEEKIDDTLEFLILASDGLWDVFSNEAAVAMVKEVEDPEDSAKKLVGEAIKRGSADNITCVVVRFLEKKSASSSHISSSSSKEAKEMPPLGDLAISSNEAKQVQIGSGNKPENVTNRKPDTASRSTDTLTLERNSVTDKV

SEQ ID NO: 1346 - DNA, 1989 bp, Drosophila melanogaster
  CDS (1)..(1989)
atgggtgcctatttgtcccatccgaaaacggataaaacatccacagatcagtttaatgaattgctagccgttggagctagctctatgcaaggatggcggaacagccaagaggatgcacataattctattttaaattttgacaacaacacatcgttttttgctgtgtatgatggtcacggcggagctgaggtagcgcaatattgtgctgacaagttaccacattttcttaaaaaccttgaaacctacaaaaatggacaatttgaagtggcactcaaggaagcatttttgggatttgacaaaacgctgcttgatccatcgatagtcagcatactaaaaatattggctggggaacacaacttcgtggatgccgaagcggacgattacgaagaagaagatttagctgaattgcaagaggaaagcaatttaccactaaatgaagttctggaaaaatacaaaggtcttccgcaaaaaaaagacttggatcttaagagttctgaccataaagaaaatttcaaaatgcgctctccatattttcgcgggcgccgagctgcagcattagctgctgaagctactaataaagctgtaatggacccctctgcaaagccagatggttcttccacctccgcagcagcggctgcagcagcgctatccgccgatggtgtagctaattcccgtaatccgagcaatgttgtaaatcctatggctggggctgatagcaataccactaccagtatcaacgatttatccaccaagaatgctgcattaaaagatgattctgttaatgaccaaaatgagggctcaaatggaaccgatttcaagcatacgttggtttcttctagtaataaaaaattattcgctactggttctaacgacatgaccgaattaaatcagtcctcgaaaaacgagttcacaaactcatctacaagcaaagagtttgaaaggaatataaacagctcccaagacgatgagttcacagacgatgatgcggactatgaagaaaatgataatgtcaagagtcctgatacttcatccgcagaaagctctgactgcactgaaaatgatgacgacggtgacgaagatggtaatgaggatagtgatgaagaagagactgatgaagatcagatggctaatgataatttttgtgcaaatatgattgaggaacctggaaaagatagtggatgtactgcagttgtatgtttgttgcaaggtcgggacctttacgtggcaaacgcaggggactcgcgatgtgttatatcacgcagtggacaagccattgaaatgagcatcgaccacaagcccgaagatgacgaagaagcctcgcgcataataaaggcaggtggtcgggttacacttgatggacgcgtaaatggaggccttaatttgtctcgagcccttggagaccatgcctataaaacgaacgtaaccctaccagctgaggaacaaatgatatctgccctacctgacataaagaagctaattatcacgccagaggacgagtttatggtactggcctgtgatggtatatggaattatatgtctagtgaggaagttgtagaatttgtacgttgcagactaaaagataacaaaaaattgtcaacgatttgtgaagagctttttgataactgtttagctccgaatacaatgggtgatgggactggatgcgacaacatgactgccgtaatcgtccagtttaagaaaaagctgcaagagctgcagtccaccattcctccaaatcaaactgaagataagttacttaagacatctgaaaatgtttcacatagtttaaatgatcaaagtgcgtctaagcgatgcgcatcacaaaatgctgatgctgacgacgaaattcttgaaaaaaacaactctaaacgattaaaaactgatctggaacaagaaaacattaaagacagaaccccatcaccgagcaatcagaatgaagaccctacccagaaggccattaaggaagttactataattgtttcttcatcgtaa

SEQ ID NO: 1347 - protein, 662 aa, Drosophila melanogaster
MGAYLSHPKTDKTSTDQFNELLAVGASSMQGWRNSQEDAHNSILNFDNNTSFFAVYDGHGGAEVAQYCADKLPHFLKNLETYKNGQFEVALKEAFLGFDKTLLDPSIVSILKILAGEHNFVDAEADDYEEEDLAELQEESNLPLNEVLEKYKGLPQKKDLDLKSSDHKENFKMRSPYFRGRRAAALAAEATNKAVMDPSAKPDGSSTSAAAAAAALSADGVANSRNPSNVVNPMAGADSNTTTSINDLSTKNAALKDDSVNDQNEGSNGTDFKHTLVSSSNKKLFATGSNDMTELNQSSKNEFTNSSTSKEFERNINSSQDDEFTDDDADYEENDNVKSPDTSSAESSDCTENDDDGDEDGNEDSDEEETDEDQMANDNFCANMIEEPGKDSGCTAVVCLLQGRDLYVANAGDSRCVISRSGQAIEMSIDHKPEDDEEASRIIKAGGRVTLDGRVNGGLNLSRALGDHAYKTNVTLPAEEQMISALPDIKKLIITPEDEFMVLACDGIWNYMSSEEVVEFVRCRLKDNKKLSTICEELFDNCLAPNTMGDGTGCDNMTAVIVQFKKKLQELQSTIPPNQTEDKLLKTSENVSHSLNDQSASKRCASQNADADDEILEKNNSKRLKTDLEQENIKDRTPSPSNQNEDPTQKAIKEVTIIVSSS

SEQ ID NO: 1348 - DNA, 1059 bp, Drosophila melanogaster
  CDS (1)..(1059)
atgggacagacactgtcggaaccagtgaccaccaaggacaccgcttgctgtgccaatgcaagctatcgcgtgggctcatcatgcatgcaaggatggcgcgtggatatggaggacgcccacacccacattctttccctgccggatgacccgcaggcggccttcttcgccgtttacgacggacacggtggagcttcagtggccaagtacgctggtaagcatttgcacaagttcattacgaagcggccggagtatcgggacaatagcattgaggtggccttgaaaaaggccttcctcgacttcgatcgggagatgctgcaaaatggctcccttgatgagcaaacggccggctgcactgccattgtggtgctcattagggagcgtcgcctgtactgtgccaatgcgggcgattcgcgggccatcgcctgcatttctggaatggttcacgccctgtccgtcgaccacaagccgaatgacgcgaaggagtccaaacggatcatggccagcggtggttgggtggagtttaatcgggtcaatggcaatctggccctttcccgcgccctcggcgactttatctacaagaagaacttactaaagactccagaagagcaaatcgtgacggcctatcccgacgtggaggttcttgacatcaccgaagacttggagtttgtcctgctggcctgcgacgggatctgggatgtgatgagcaacttcgaagtctgccagttcgtgcacaagcgcatacgcgatggcatggagccggaactcatttgcgaggaactgatgaacagctgcttgtctccggatggccacacgggcaatgtgggcggcgacaacatgaccgtcatcctggtgtgcctgctgcacaacaagagctacgaggatctggcggtgcgctgcggaggcaaacgaaagacccccgttgaaaccgtaggcgacatccaggatcagtcggtgaaggtcgtaactccctgttctcagggatcttcggggtcgtcgacttctcgattgggcctgggcttcggacttcgcgaaagcgaaactcccgaggctaatctttaa

SEQ ID NO: 1349 - protein, 352 aa, Drosophila melanogaster
MGQTLSEPVTTKDTACCANASYRVGSSCMQGWRVDMEDAHTHILSLPDDPQAAFFAVYDGHGGASVAKYAGKHLHKFITKRPEYRDNSIEVALKKAFLDFDREMLQNGSLDEQTAGCTAIVVLIRERRLYCANAGDSRAIACISGMVHALSVDHKPNDAKESKRIMASGGWVEFNRVNGNLALSRALGDFIYKKNLLKTPEEQIVTAYPDVEVLDITEDLEFVLLACDGIWDVMSNFEVCQFVHKRIRDGMEPELICEELMNSCLSPDGHTGNVGGDNMTVILVCLLHNKSYEDLAVRCGGKRKTPVETVGDIQDQSVKVVTPCSQGSSGSSTSRLGLGFGLRESETPEANL

SEQ ID NO: 1350 - DNA, 1116 bp, Drosophila melanogaster
  CDS (1)..(1116)
atgggtcagactctatcggaaccggtgaccgccaaggagtcagcgtactgccagaacgccgcctaccgcgtgggcagctcctgcatgcaggggtggcgcatcaacatggaggactcgcacacccacatcctctcgctgccggacgatccgggagcggcattcttcgccgtctacgacgggcacggaggcgccacggtggcccagtacgccggcaagcacctgcacaagtacgttctcaagcggccggagtacaacgacaacatcgaacaggcgctgcagcagggctttctggacatcgactacgttatgctacgcaacaagacatgtggtgaccagatggccggctcgactgccgtagttgttttggtaaaggacaacaagctttattgcgccaacgcaggcgactcgcgcgccattgcctgcgtgaacggacaactggaggtcctgtcgctggaccacaagcccaataacgaggcggagtccaagcggatcatccaaggcggcggctgggttgagttcaatcgcgtcaacggcaatcttgcgctttcccgcgccctcggtgactatgtattcaagcatgagaacaaaaaaccggaagatcaaatcgtcacagccttcccggacgtggagacgcggaaaatcatggacgattgggaattcatcgtgctggcctgcgatggcatttgggatgtaatgagcaacgcggaagtgctcgagttctgtcgcacgcgcatcggcatgggcatgtttccggaggagatctgcgaagagctgatgaatcactgcctagcacccgactgccaaatgggaggcctcggcggcgacaatatgaccgtggtgctggtgtgcctgctgcacggccgtccctacagcgatctgatagcccgctgccgaaatggcagccaggcgactaacaatgatcaagaggaagccggcgacgcgacgaaggatgaagtcgcaaaggacgaagcggaggcggaaaccgataccgaaacggaaacgcaaaccaaaccctgccagaagcaatccaattccggtcccatggacgacgaggtgaagatggcgtcgcatctaaacaagatggcagcgatcgaaagccactatatatacgattaa

SEQ ID NO: 1351 - protein, 371 aa, Drosophila melanogaster
MGQTLSEPVTAKESAYCQNAAYRVGSSCMQGWRINMEDSHTHILSLPDDPGAAFFAVYDGHGGATVAQYAGKHLHKYVLKRPEYNDNIEQALQQGFLDIDYVMLRNKTCGDQMAGSTAVVVLVKDNKLYCANAGDSRAIACVNGQLEVLSLDHKPNNEAESKRIIQGGGWVEFNRVNGNLALSRALGDYVFKHENKKPEDQIVTAFPDVETRKIMDDWEFIVLACDGIWDVMSNAEVLEFCRTRIGMGMFPEEICEELMNHCLAPDCQMGGLGGDNMTVVLVCLLHGRPYSDLIARCRNGSQATNNDQEEAGDATKDEVAKDEAEAETDTETETQTKPCQKQSNSGPMDDEVKMASHLNKMAAIESHYIYD

SEQ ID NO: 1352 - DNA, 1125 bp, Drosophila melanogaster
  CDS (1)..(1125)
atgggcggattcctggataagccgaaaaccgccaagcacaatgacgagggtgagggcaacaagctgctcttcggggtcagctcgatgcagggatggcggtcggagatggaggacgcctactacgctcgtgccgggctgggggatgccctgccggactggagcttctttgccgtgttcgacgggcatgccggatgcaaggtgtcggagcactgtgccaagcaccttctggagagcattattagcaccgaggaattcattggaggcgaccacgtgaagggcattcgcaccggcttcctgcgcatcgacgaggttatgcgggaactgccggaattcacccgggagtcggagaaatgcggcggaactaccgccgtgtgcgcctttgtcggcctcacgcaagtgtacatcgccaattgtggtgattcgagggccgtcttgtgccgccagggtgttccggtgttcgccacgcaggatcacaaacccattctgccggaggagaaagagcgcatctataatgcgggtggcagtgttatgataaagcgcgtaaatggtaccctggcagtgtcgagagcccttggggattacgactttaagaacgtcaaggagaagggacagtgcgagcagttggtatcgccggaaccggagatattctgtcagagccgccaggatagcgatgagttcctggtgctcgcttgcgatggaatctgggatgtgatgtccaacgaggacgtgtgcagcttcatccactcgcgaatgcgggtgaccagtaacctagtgagcatcgccaaccaggtcgtggacacctgcctgcacaagggtagccgcgacaacatgagcatcatcatcattgccttccccggagctccgaagcccaccgaggaggcgatagaggctgaacatcgtctggaaaagcaaatcgagaagatcacaagagacgagatagagtctagcaagataaccgactacgtggatctgctgaagtgtctgcagaacagagacgacatcgaaggtcttccacccggaggaggtctacagtccaaatatcacgttatcgagcgcacattcaagcaagagtttccggatcgaccatgtgaaggcaatggaatctcatattttattccattctag

SEQ ID NO: 1353 - protein, 374 aa, Drosophila melanogaster
MGGFLDKPKTAKHNDEGEGNKLLFGVSSMQGWRSEMEDAYYARAGLGDALPDWSFFAVFDGHAGCKVSEHCAKHLLESIISTEEFIGGDHVKGIRTGFLRIDEVMRELPEFTRESEKCGGTTAVCAFVGLTQVYIANCGDSRAVLCRQGVPVFATQDHKPILPEEKERIYNAGGSVMIKRVNGTLAVSRALGDYDFKNVKEKGQCEQLVSPEPEIFCQSRQDSDEFLVLACDGIWDVMSNEDVCSFIHSRMRVTSNLVSIANQVVDTCLHKGSRDNMSIIIIAFPGAPKPTEEAIEAEHRLEKQIEKITRDEIESSKITDYVDLLKCLQNRDDIEGLPPGGGLQSKYHVIERTFKQEFPDRPCEGNGISYFIPF

SEQ ID NO: 1354 - DNA, 1107 bp, Drosophila melanogaster
  CDS (1)..(1107)
atgggcggattcctggataagccgaaaaccgccaagcacaatgacgagggtgagggcaacaagctgctcttcggggtcagctcgatgcagggatggcggtcggagatggaggacgcctactacgctcgtgccgggctgggggatgccctgccggactggagcttctttgccgtgttcgacgggcatgccggatgcaaggtgtcggagcactgtgccaagcaccttctggagagcattattagcaccgaggaattcattggaggcgaccacgtgaagggcattcgcaccggcttcctgcgcatcgacgaggttatgcgggaactgccggaattcacccgggagtcggagaaatgcggcggaactaccgccgtgtgcgcctttgtcggcctcacgcaagtgtacatcgccaattgtggtgattcgagggccgtcttgtgccgccagggtgttccggtgttcgccacgcaggatcacaaacccattctgccggaggagaaagagcgcatctataatgcgggtggcagtgttatgataaagcgcgtaaatggtaccctggcagtgtcgagagcccttggggattacgactttaagaacgtcaaggagaagggacagtgcgagcagttggtatcgccggaaccggagatattctgtcagagccgccaggatagcgatgagttcctggtgctcgcttgcgatggaatctgggatgtgatgtccaacgaggacgtgtgcagcttcatccactcgcgaatgcgggtgaccagtaacctagtgagcatcgccaaccaggtcgtggacacctgcctgcacaagggtagccgcgacaacatgagcatcatcatcattgccttccccggagctccgaagcccaccgaggaggcgatagaggctgaacatcgtctggaaaagcaaatcgagaagatcacaagagacgagatagagtctagcaagataaccgactacgtggatctgctgaagtgtctgcagaacagagacgacatcgaaggtcttccacccggaggaggtctacagtccaaatatcacgttatcgagcgcacattcaagcaagagtttccggatcgaccatgtgaaagtccaacgcattag

SEQ ID NO: 1355 - protein, 368 aa, Drosophila melanogaster
MGGFLDKPKTAKHNDEGEGNKLLFGVSSMQGWRSEMEDAYYARAGLGDALPDWSFFAVFDGHAGCKVSEHCAKHLLESIISTEEFIGGDHVKGIRTGFLRIDEVMRELPEFTRESEKCGGTTAVCAFVGLTQVYIANCGDSRAVLCRQGVPVFATQDHKPILPEEKERIYNAGGSVMIKRVNGTLAVSRALGDYDFKNVKEKGQCEQLVSPEPEIFCQSRQDSDEFLVLACDGIWDVMSNEDVCSFIHSRMRVTSNLVSIANQVVDTCLHKGSRDNMSIIIIAFPGAPKPTEEAIEAEHRLEKQIEKITRDEIESSKITDYVDLLKCLQNRDDIEGLPPGGGLQSKYHVIERTFKQEFPDRPCESPTH

SEQ ID NO: 1356 - DNA, 1116 bp, Drosophila melanogaster
  CDS (1)..(1116)
atgggcggattcctggataagccgaaaaccgccaagcacaatgacgagggtgagggcaacaagctgctcttcggggtcagctcgatgcagggatggcggtcggagatggaggacgcctactacgctcgtgccgggctgggggatgccctgccggactggagcttctttgccgtgttcgacgggcatgccggatgcaaggtgtcggagcactgtgccaagcaccttctggagagcattattagcaccgaggaattcattggaggcgaccacgtgaagggcattcgcaccggcttcctgcgcatcgacgaggttatgcgggaactgccggaattcacccgggagtcggagaaatgcggcggaactaccgccgtgtgcgcctttgtcggcctcacgcaagtgtacatcgccaattgtggtgattcgagggccgtcttgtgccgccagggtgttccggtgttcgccacgcaggatcacaaacccattctgccggaggagaaagagcgcatctataatgcgggtggcagtgttatgataaagcgcgtaaatggtaccctggcagtgtcgagagcccttggggattacgactttaagaacgtcaaggagaagggacagtgcgagcagttggtatcgccggaaccggagatattctgtcagagccgccaggatagcgatgagttcctggtgctcgcttgcgatggaatctgggatgtgatgtccaacgaggacgtgtgcagcttcatccactcgcgaatgcgggtgaccagtaacctagtgagcatcgccaaccaggtcgtggacacctgcctgcacaagggtagccgcgacaacatgagcatcatcatcattgccttccccggagctccgaagcccaccgaggaggcgatagaggctgaacatcgtctggaaaagcaaatcgagaagatcacaagagacgagatagagtctagcaagataaccgactacgtggatctgctgaagtgtctgcagaacagagacgacatcgaaggtcttccacccggaggaggtctacagtccaaatatcacgttatcgagcgcacattcaagcaagagtttccggatcgaccatgtgaactgtatgcatatgatgatatatga

SEQ ID NO: 1357 - protein, 371 aa, Drosophila melanogaster
MGGFLDKPKTAKHNDEGEGNKLLFGVSSMQGWRSEMEDAYYARAGLGDALPDWSFFAVFDGHAGCKVSEHCAKHLLESIISTEEFIGGDHVKGIRTGFLRIDEVMRELPEFTRESEKCGGTTAVCAFVGLTQVYIANCGDSRAVLCRQGVPVFATQDHKPILPEEKERIYNAGGSVMIKRVNGTLAVSRALGDYDFKNVKEKGQCEQLVSPEPEIFCQSRQDSDEFLVLACDGIWDVMSNEDVCSFIHSRMRVTSNLVSIANQVVDTCLHKGSRDNMSIIIIAFPGAPKPTEEAIEAEHRLEKQIEKITRDEIESSKITDYVDLLKCLQNRDDIEGLPPGGGLQSKYHVIERTFKQEFPDRPCELYAYDDI

SEQ ID NO: 1358 - DNA, 1155 bp, Arabidopsis thaliana; identical to SEQ ID NO: 868
  CDS (1)..(1155)

SEQ ID NO: 1359 - protein, 384 aa, Arabidopsis thaliana; identical to SEQ ID NO: 869

SEQ ID NO: 1360 - DNA, 951 bp, Strongylocentrotus purpuratus
  CDS (1)..(951)
atgggtcagacgttatccgagcctgtcactgccaaagagacgtcgggatgtgagaaccatctgtgcaaggtcggtgcctcctgcatgcagggatggcgaatcaacatggaagatgcacacacacagatccttgctattgatgatgacaaggattctgctttctttgcagtctatgatggccatggaggagccaaagtagctcagtacgcaggtcaacatctgcaccgtaagctagccaaccagtcaacgtacaagagaggagaaatcagcacagctattagagaatcattcttaaaaatagatgaagatatgctcaaagatgaagcgatgaaagacgaactagccggtaccacagctctaattactgtgatgaaaaataataaaatttattgtggtaacgtaggagactcgcgtggtgtaatgagtatcagtgggcatgcaaagccactatcatttgaccataaaccaagcaatgagaatgagagtaagaggataatagcagctggaggatgggtagaattcaatagagtaaatggaaaccttgcattatcaagagcattaggagattttgtcttcaaacgaaacctgagtaaaggacctgaggagcagatagtgacagctgtacctgatgtaacggagacagaaatcatccctgattcagagttcttattattagcatgtgatggtatctgggatgtgctcacaaatcaggaagtagtggactttgtacgaagcaggatagggaataaaatggatccagaaaagatatgtgaagacttgatgacaagatgtcttgctccagactgtcagatgggagggctcgggtgtgataacatgaccgtcgtcctcgtctgcttgctccaaggaaaatcatatgatgaactcaatgcaaaatgtgcaaaaccaaagtctgataagtgtccgtttgagatcgctcctgtgcagctgtag

SEQ ID NO: 1361 - protein, 316 aa, Strongylocentrotus purpuratus
MGQTLSEPVTAKETSGCENHLCKVGASCMQGWRINMEDAHTQILAIDDDKDSAFFAVYDGHGGAKVAQYAGQHLHRKLANQSTYKRGEISTAIRESFLKIDEDMLKDEAMKDELAGTTALITVMKNNKIYCGNVGDSRGVMSISGHAKPLSFDHKPSNENESKRIIAAGGWVEFNRVNGNLALSRALGDFVFKRNLSKGPEEQIVTAVPDVTETEIIPDSEFLLLACDGIWDVLTNQEVVDFVRSRIGNKMDPEKICEDLMTRCLAPDCQMGGLGCDNMTVVLVCLLQGKSYDELNAKCAKPKSDKCPFEIAPVQL

SEQ ID NO: 1362 - DNA, 1134 bp, Nasonia vitripennis; identical to SEQ ID NO: 870
  CDS (1)..(1134)

SEQ ID NO: 1363 - protein, 377 aa, Nasonia vitripennis; identical to SEQ ID NO: 871

SEQ ID NO: 1364 - DNA, 1830 bp, Nasonia vitripennis
  CDS (1)..(1830)
atgcgctcgggcagtcgtagtatgaacggccaaaaaagcaggtccaaggaggatgctcacaactgttgcatagactttgacgaagattgttcactgtttgccgtttatgatgggcacggagggtctgaagtggcgacgtattgctctaataatctaccagattttattaaaaatacagaggcatacaaatggggtgatattaagcaagctttaattgatgctttcttgggattcgacgccacgcttacaaaacctgaaataattagcatcttgaaagatatagctagaagtcaattatctgataatgaagcagaaaaaggaaaagattctgatgtcgaagaaaatgtcaacaaccttcgaatagaagcagcaatgccattggatcaagtaatggccaaatattcagcaaagtttggaaacctgaagttcaaaccactcgtcagtgaaagttgtgctagtccatcgaatttccagagtccatatttacgtagtggaaggagtaaagacaaaggggcttgttcatcgtctggtgcgggctgttcaacatcatcaacatcatggaacagcaacgaaacagatgtaagtagttcgagtcagccttgtgagttgtcctcttcgactgcagaccataaacctgctgagactgctggcagtagcgaagcagatcaagtactagattctactacaagcaatggtgatgttcctcgttcgtcccaggtgggctcctctgcagattcaggttctgctaaatcatccgaaatgccagacagttctgaggatgtcagcgatacagtatcacctagtaaagccaccaattcaacgatcacaccaaacgaggcagaaacaaatggagaacaactaagcaagagctttgaggatgcagatagcagtaaaaatacaggtgataatgaatgcagcagttcctgtacaccagtggagaatggtgaagctgagcagcaagaaaaaatcagtagcagtggccgcatgaagaatgatgatgaaggagatgtagaaaacgatgatagcaatgaggaagaagatgatactgaagatgacgacgaagaagatgaggaggatgaggaagaagaggaagatgaacctatgtcatcactcgacgaagagcctggttcggacagtggatgtacagcagtagttgctattctcaaaggaaatgaattatatgtagccaatgcaggggattctcggtgtgtactgtgccgagatggaaaagcagttgaattgagttttgatcacaaacctgaggatcagccagaaatgcagcgcattgtaaaagctggtggaaaagttaccgctgatggcagagtaaatggtggacttaatttgtcgagagcacttggtgatcacgcttacaagaaaaacaaggatctaccaccagaagagcaaatgatatcagctttgccagatattaaaacggttacgttagatctagaaaaagatgaatttatggtactcgcatgcgacggcatttggaactttatgtcaagtcaaaacgtaatcgactacatacgctctgctttcgcccgagggtatgacaatgtctcaaaaatttgcgaagagttatttgattattgcttagccccaaatactctcggtgatggtaccggatgtgacaatatgacagcgataatcgtgaaattcaaatcgtccaagacaggaaacggagaaggtactgcggcagaggttacaacggttaccaagaaaaggcctgtttcaccaagtacatccgccgaagggaccgaatgtaactctgaaaagaccgaagataatgtgatagatgaatgtaagcgttttaaagcagaaacgtgctga

SEQ ID NO: 1365 - protein, 609 aa, Nasonia vitripennis
MRSGSRSMNGQKSRSKEDAHNCCIDFDEDCSLFAVYDGHGGSEVATYCSNNLPDFIKNTEAYKWGDIKQALIDAFLGFDATLTKPEIISILKDIARSQLSDNEAEKGKDSDVEENVNNLRIEAAMPLDQVMAKYSAKFGNLKFKPLVSESCASPSNFQSPYLRSGRSKDKGACSSSGAGCSTSSTSWNSNETDVSSSSQPCELSSSTADHKPAETAGSSEADQVLDSTTSNGDVPRSSQVGSSADSGSAKSSEMPDSSEDVSDTVSPSKATNSTITPNEAETNGEQLSKSFEDADSSKNTGDNECSSSCTPVENGEAEQQEKISSSGRMKNDDEGDVENDDSNEEEDDTEDDDEEDEEDEEEEEDEPMSSLDEEPGSDSGCTAVVAILKGNELYVANAGDSRCVLCRDGKAVELSFDHKPEDQPEMQRIVKAGGKVTADGRVNGGLNLSRALGDHAYKKNKDLPPEEQMISALPDIKTVTLDLEKDEFMVLACDGIWNFMSSQNVIDYIRSAFARGYDNVSKICEELFDYCLAPNTLGDGTGCDNMTAIIVKFKSSKTGNGEGTAAEVTTVTKKRPVSPSTSAEGTECNSEKTEDNVIDECKRFKAETC

SEQ ID NO: 1366 - DNA, 1245 bp, Magnaporthe grisea 70-15
  CDS (1)..(1245)
atgggtcaaaccctttcggagccggttgtcgaaaaggcatcggctcgcggcgaagatgatcggtttctctacggagtgtcggccatgcagggctggcgaatcagcatggaagacgcgcacacgaccgtgcttgacctgcttgccaatgatgccgaggccgcaaaacaacacaagggcaagcttgcctttttcggagtgtttgacggccatggaggcgacaaagtagctcttttctcaggcgacaatatacacaagattgtccagaaccaggacactttcaagtctgggaactacgagcaggccctcaaagacggatttctcgccaccgatcgtgcaatcctcaacgacccgaagtatgaagacgaagtgtcaggttgcacagcttgcgttggcctattgaccgacgacaagatttacattgccaatgccggtgactcgaggagtgtcttgggcgttaagggacgtgcgaagcccctatcattcgatcacaagccacaaaacgagggcgagaaagcaagaatcaccgccgctggcggtttcgttgactttggccgagtgaacggaaacctggctctgtcgcgtgctattggcgatttcgaattcaagaagagcgccgagcttgcgcctgagcagcaaatagtgactgcctaccccgatgttgtggtccacgacatgggtgatgatgatgagttcttggtcattgcatgtgatggtatctgggattgccaatcctcacaagcagtcgttgagtttgtcaggcgaggaattgcagccaagcaagctttggagaagatttgcgaaaacatgatggacaactgcctggcctccaactcggagactggtggcgtcggctgcgacaacatgacgatgataatcatcggtttcctgcgtggccgcaccaaggaggagtgcggttacgacgtcgacatggaccagagcaagggcaagacttttggaattggcgggtacaagggacgcgtcatattcctcggcgacggcactgaagtcctcaccgatgcggacgataatgccatgtttgagtcggaaaaacaggaccttgacagtcaggttgccaagacgggctcgtccgaagatgacggaacgacagaggaccagacaaataaaaaggagggcacaacagacggcaaggctgacaaagggaccaaagatgctagcgaggaggccgaggccaaggcagagaacattgacgctgctgtgaaaaaggacgaggatatcaaggtctga

SEQ ID NO: 1367 - protein, 414 aa, Magnaporthe grisea 70-15
MGQTLSEPVVEKASARGEDDRFLYGVSAMQGWRISMEDAHTTVLDLLANDAEAAKQHKGKLAFFGVFDGHGGDKVALFSGDNIHKIVQNQDTFKSGNYEQALKDGFLATDRAILNDPKYEDEVSGCTACVGLLTDDKIYIANAGDSRSVLGVKGRAKPLSFDHKPQNEGEKARITAAGGFVDFGRVNGNLALSRAIGDFEFKKSAELAPEQQIVTAYPDVVVHDMGDDDEFLVIACDGIWDCQSSQAVVEFVRRGIAAKQALEKICENMMDNCLASNSETGGVGCDNMTMIIIGFLRGRTKEECGYDVDMDQSKGKTFGIGGYKGRVIFLGDGTEVLTDADDNAMFESEKQDLDSQVAKTGSSEDDGTTEDQTNKKEGTTDGKADKGTKDASEEAEAKAENIDAAVKKDEDIKV

SEQ ID NO: 1368 - DNA, 1293 bp, Gibberella zeae PH-1
  CDS (1)..(1293)
atgggtcagacactgtcagagcccgtcgtcgagaagacttcggagaagggtgaggatgagcgcctcatctacggtgtatcggctatgcagggctggcgtatcagcatggaggatgcccacactacagttctcgacctcgacacggccaaaactcatgacagcaagctgtctttctttggtgtctttgacggccacggtggtgacaaggtggcgttgtttactggacaaaacattcacaacatcatcttcaagcaggacacttttaagtcgggtgactatgctcagggattgaaggacggtttccttgcgacagaccgcgctattctcaacgaccccaagtacgaagaagaagtttctggctgcacagcctgtgtcagcttgattgctggcaacaaactctatgttgccaacgcgggtgattcgagaggtgtacttggtatcaagggccgtgccaagcctttgtcacaggaccacaagccccaactcgagaacgagaagaaccgaatcacagccgccggtggtttcgtcgattttggccgagtgaacggcaaccttgctctctcacgtgctattggtgactttgaattcaagaagagcgctgaactatctcctgagaaccagattgtcactgcctaccccgatgtagagcagcatgatctcacagacgaggacgagttccttgtccttgcttgcgacggtatctgggattgccaatcctcccaagccgtggttgagttcgttcgacgaggcatcgctgccaagcaggaactcgaaaagatttgcgagaacatgatggacaactgcctggcctccaactctgagaccggcggtgtcggctgcgacaacatgaccatgtgcatcattggcttcctcaacggaaagtccaaggatgagtggtacgaggagatcgcccgccgagtcgctaacggcgatggcccatgtgctccccctgagtacgccgaattccgaggacctggtgtccaccacaatttcgaggatagcgacagtggttatgagatggatcctgaaaacaagggacgaagttttggagttggtgggtaccgaggccggatcattttcctcggcgatggcactgaggttcttacggattcagatgatacagagatgtttgacaacgccgacgaagacaaagacctcgccagccaggtctccaagaacccgacgtccgccgagaaggacaccgctcctgtagccgcccccggtgcggccgagaacgcttccgccgacacgaaacccgccgattccgccaagaccgaagtgaagaaggagtag

SEQ ID NO: 1369 - protein, 430 aa, Gibberella zeae PH-1
MGQTLSEPVVEKTSEKGEDERLIYGVSAMQGWRISMEDAHTTVLDLDTAKTHDSKLSFFGVFDGHGGDKVALFTGQNIHNIIFKQDTFKSGDYAQGLKDGFLATDRAILNDPKYEEEVSGCTACVSLIAGNKLYVANAGDSRGVLGIKGRAKPLSQDHKPQLENEKNRITAAGGFVDFGRVNGNLALSRAIGDFEFKKSAELSPENQIVTAYPDVEQHDLTDEDEFLVLACDGIWDCQSSQAVVEFVRRGIAAKQELEKICENMMDNCLASNSETGGVGCDNMTMCIIGFLNGKSKDEWYEEIARRVANGDGPCAPPEYAEFRGPGVHHNFEDSDSGYEMDPENKGRSFGVGGYRGRIIFLGDGTEVLTDSDDTEMFDNADEDKDLASQVSKNPTSAEKDTAPVAAPGAAENASADTKPADSAKTEVKKE

SEQ ID NO: 1370 - DNA, 1359 bp, Candida glabrata CBS 138
  CDS (1)..(1359)
atggggcaaattctttcgaacccagtcattgataaagagacagagtctggtagcgacaaatggacagcatatgctgtctgtgctatgcaaggatggcgtatgtcgatggaggatacgcatatcgcccaattaaacttgaacgccgatgaatcatctggccatgtggctctatacagtgtgtttgacggccatgggggttcctacgtggctaacttctgcggtgaacgtatggagaagatagtcaagtctcagaagagctatgaaactggtgatcttgctcaggttttaacggatgcctacttggctgctgatgaacagctggcaacgcagtcttccattagtgatgaccatagtggctgtaccgccacctctgttctaatctcaaaggaaaagggtgtaattatctgcggtaatgctggtgacagtagaacagtgttatcgtctggtggtcttgcaaaagcattatcatttgatcacaaacctactcttccgggtgaaactgcaagaattacagcagctaatggtttcgttcaaatgagtagagtaaacggtaacttggcattatcgcgtgccattggtgactttgaatacaagtccaatccaaagcttttacctcatgagcaaatggtcacatgtgtcccagatgtaattgaacacaagctagactttgagaatgatgagttcgttattttggcttgtgatggtatctgggattgtctgtcctctcaagagtgtgtcgatatggtacactatggtattcaaaaaacggagttatccttgctagagattacatcgcgaatcgtcgacatttgttgtgcgccaagcacagaaggctctggtattggttgtgacaatatgagtattattgttgtagctttattgaaagactctgaaacattggagcaatggtttgagcgcatgcgggcaaagaattactcttattcgactacttttgaacaaaagagaaaggaggttttctcattctataatttcgcaaagaatcaagaaacaggtgatgaagatgtttttgctattacggctcctagatcagcacctggttcaaaattgaatggaaaccaagagagaggggtaacagctaagggaccagtggatacgtcaaaaaatggcaagtcacctggagtcatagactttacctcgctggaatcgttactcgaggcaggtatcaaaatcagccaaagtccaaataatgttcagcattttcaaggctctgcacttgcggatatgttagcatcgttgagcgaagctgctgctggagaaaccagtccaagtgaaaagaacgatgatattgagtttacggaaagcacacatgccaaccctgaagaatcaattggccactaa

SEQ ID NO: 1371 - protein, 452 aa, Candida glabrata CBS 138
MGQILSNPVIDKETESGSDKWTAYAVCAMQGWRMSMEDTHIAQLNLNADESSGHVALYSVFDGHGGSYVANFCGERMEKIVKSQKSYETGDLAQVLTDAYLAADEQLATQSSISDDHSGCTATSVLISKEKGVIICGNAGDSRTVLSSGGLAKALSFDHKPTLPGETARITAANGFVQMSRVNGNLALSRAIGDFEYKSNPKLLPHEQMVTCVPDVIEHKLDFENDEFVILACDGIWDCLSSQECVDMVHYGIQKTELSLLEITSRIVDICCAPSTEGSGIGCDNMSIIVVALLKDSETLEQWFERMRAKNYSYSTTFEQKRKEVFSFYNFAKNQETGDEDVFAITAPRSAPGSKLNGNQERGVTAKGPVDTSKNGKSPGVIDFTSLESLLEAGIKISQSPNNVQHFQGSALADMLASLSEAAAGETSPSEKNDDIEFTESTHANPEESIGH

SEQ ID NO: 1372 - DNA, 1203 bp, Kluyveromyces lactis NRRL Y-1140
  CDS (1)..(1203)
atgggccaattactttctcatccattaacagaaaagacgattatctacaatgattaccaaacgagcgggcacaagttaagccttcgtcatgatacacatcaggaagttgagattcctaggttttacaattgtgttggctctatgcaaggttatagattaactcaagaagatgcccatctggttaaaacgggttcagaatccctaattgtatcatttcatgatccgtttattggtaaagtggtaaagtatcagatatcgatttttgctgtttttgacggacatggagataacaattgttccaattatctagctggatcgttgtatgaacacacacatccacaagcccactcgaccactgatagaattttgacagaacatgatggtttaatatacttcatcaagttagcatttgaatcgcataaatacacttcgtttagcagaccggatgggaacaagaggcaatttagaactttggaagggttgatctgtcaagtcattaaagattccttcaaggcgtgtgatgctgcattccataaacactttgcgaacgaagcatcagggtcaacagcaatcgttgccctactcataaacggatcaatgctctatgtggcgaatactggtgattctcgttgcatactttctaaaaagaataaagctataaagccaatgtcatatgatcacaaaccacagcatataggagaactgataagaataaacgatgacgggggaacggtttcacttggaagagtgggaggcgtgcttgcactcagtcgagctttcggagatttccagttcaaaaggaatgtgaaatatcagaacctcaatacccttgccgtcagcagcaagaggaaatacatcccggcagaggaggctcaggttacagtagaaccggatgtgcttccgcacgccatcgatctgtcacaagatgaatttttagtcttagcatgcgatggaatatgggatgtatactcgaacaaagcattggtgaatttcatcaaatatcatttgacactcggtctaaagttggataatatcctcgcaaagatattagaccatggaataagctgcgcagattcgaatacaggggtcggatttgataacttcacattgatcgtggttgttttacagcaaccaggagagactttagatgagtggtatgcaagaatcaaatccagactggaaagagaaaaaggtctgttatag

SEQ ID NO: 1373 - protein, 400 aa, Kluyveromyces lactis NRRL Y-1140
MGQLLSHPLTEKTIIYNDYQTSGHKLSLRHDTHQEVEIPRFYNCVGSMQGYRLTQEDAHLVKTGSESLIVSFHDPFIGKVVKYQISIFAVFDGHGDNNCSNYLAGSLYEHTHPQAHSTTDRILTEHDGLIYFIKLAFESHKYTSFSRPDGNKRQFRTLEGLICQVIKDSFKACDAAFHKHFANEASGSTAIVALLINGSMLYVANTGDSRCILSKKNKAIKPMSYDHKPQHIGELIRINDDGGTVSLGRVGGVLALSRAFGDFQFKRNVKYQNLNTLAVSSKRKYIPAEEAQVTVEPDVLPHAIDLSQDEFLVLACDGIWDVYSNKALVNFIKYHLTLGLKLDNILAKILDHGISCADSNTGVGFDNFTLIVVVLQQPGETLDEWYARIKSRLEREKGLL

SEQ ID NO: 1374 - DNA, 1548 bp, Debaryomyces hansenii CBS767
  CDS (1)..(1548)
atgggtcaaatactttcacaaccagttactgaaaaaatatcggaacatggtatcgacaaacatttagcatacggtatatcgtgtatgcaaggatggagagtaaatatggaagatgcacacgctacgatattgaacttgtatgacttgaaaaatgagggaaaaggagcagtttcagacaaggcacaagataattcatcttctggtaagagtggtaccgacaatgacacgactgaagaacatacttcgtttttcggtgtctacgatgggcacgggggtgaaaaggtagctatttttacgggacagcatttgcatgagataatcaagtcgacaaaggcattccaagagaaagattacgtcaatgcattcaaagaaggttttttaaattgtgaccaagctattttaaatgatgatgaaatgaaagaagacgacagtggatgtgctgctgtttctgttatcattacaccaagacaagtcatatgtggtaatgccggtgattcgcgaagtattatgtcgattaatgggtttgctaaggcattgtcttatgatcataagccatctaacgaaggtgagaagagccgtatttgttcggctggtggttatgttgacatgggtagagtcaatggtaacttagctttatcgcgtggtattggtgattttgaatttaagaagaatattgatttaccacctgaagaacagacagtcacatgttacccagatgttatacagcacaacttggatttcactaaggatgagttcgtcgtgttagcatgtgacggtatttgggattgtctttcgtctcaacagtgtattgaatgtgttagtagaggcctttatgaacgtaaacctttgcaagatatttgtgaagagatcatggaattatgttgtgcaccaacaagtgatggttctggtatcggatgtgataatatgtctatgtctattgttgctttattagatgaatcaaggaatgaatcattggaccaatggtatgacagggtcatcaagagaattgaactttctcaatcggaagatgaagaaagtcaattctatggtaatatctctggtgaatacaatgatatgtataagcaaatgtatggtgaatattttgaaattggtcaacaatcccagaattctaacaccaagagtgctggcaacaattcaagttactactctatgtttggcggattgccaggtttacgtaatggcccaggactcaaccaaaatgaagacgaagaagagaatgaactttctaacgagcctactgaagaaattcaggaagacggcactgcggctgacttggctggtaacggagctatctccttgcagaaattattggccagtaatgcgattacgaacgaaaatggtgttatctatttagacacatcttctgcgcaatcacttttagcccattttggtatgtctggtgaagacgatgaatacgaaggaaatgatgttcacgacaaacatattgaggaggaagaagtcgaggaggacgatgatcaagagtctaaatccaagatcgaagaggagccacaagatgatgaagaataa

SEQ ID NO: 1375 - protein, 515 aa, Debaryomyces hansenii CBS767
MGQILSQPVTEKISEHGIDKHLAYGISCMQGWRVNMEDAHATILNLYDLKNEGKGAVSDKAQDNSSSGKSGTDNDTTEEHTSFFGVYDGHGGEKVAIFTGQHLHEIIKSTKAFQEKDYVNAFKEGFLNCDQAILNDDEMKEDDSGCAAVSVIITPRQVICGNAGDSRSIMSINGFAKALSYDHKPSNEGEKSRICSAGGYVDMGRVNGNLALSRGIGDFEFKKNIDLPPEEQTVTCYPDVIQHNLDFTKDEFVVLACDGIWDCLSSQQCIECVSRGLYERKPLQDICEEIMELCCAPTSDGSGIGCDNMSMSIVALLDESRNESLDQWYDRVIKRIELSQSEDEESQFYGNISGEYNDMYKQMYGEYFEIGQQSQNSNTKSAGNNSSYYSMFGGLPGLRNGPGLNQNEDEEENELSNEPTEEIQEDGTAADLAGNGAISLQKLLASNAITNENGVIYLDTSSAQSLLAHFGMSGEDDEYEGNDVHDKHIEEEEVEEDDDQESKSKIEEEPQDDEE

SEQ ID NO: 1376 - DNA, 1167 bp, Yarrowia lipolytica CLIB122
  CDS (1)..(1167)
atgcagggctggcgagtaaccatggaggacgcccacgccaccgtgctggagctcaaggacgccaagggacagcccgagaagaaaaaggtggccttcttcggtgtctacgacggacacggaggtgataaggttgccatctacaccggcgacaacctgcaccacattgtcgcacggcaggaggcctttgccaagggagattacggtcaggcactcaaggacggtttcctcagcacagaccgagccattctcgaggacgccgccctcaagcacgactcatctggatgcaccgccaccaccgccattgtttccgacggcaaggtcatctgtgccaacgccggagactcccgaaccgtgctcggtgtcaagggtattgccaagcccatgtcctttgaccacaagccccaacacgagggtgagcgaacgcgaatctgtgccgcaggaggatttgtggaggctggacgagtcaacggaaaccttgctctgtcgcgagccattggtgactttgatttcaagcggtcaccgtactttcctcccgaggagcagattgtcactgcctatcccgacgtgattgagcatcagctgactgccgacgacgagttcctgattctcgcctgtgacggtatctgggactgcttcctgtcgcaggaggttgtggagtttgtgcgacgaggtattgccgagaagcagacccttgtggacatttgcgaaaacctgattgacaactgtctggcccccacctctgaccttagtggtgttggttgtgacaacatgaccgtcatggttgtggccctgttgcagggtaagaccgaggaggagtggtacaacatggttgccgagcgagtgaagaacggcgagggtcctgccgctagccgagaggcagtggagcgagttgccggagaggagcgagaggtgactgcccagcagttgcagcagaatgcccaggcccagcaggctaactcggcatcgctggctcttcagcagttgctttcttccggtgccaccatcacagacgagaacggcatggttgtgctcaaggctgagaatgctgccgagctgcttgccaaagtgggatttgctcccgaggacgttggacaacttgtggagagtggagatctggtcgaggaggatgtcgaggtcggcggtgacagaatcaccgaggagcagtga

SEQ ID NO: 1377 - protein, 388 aa, Yarrowia lipolytica CLIB122
MQGWRVTMEDAHATVLELKDAKGQPEKKKVAFFGVYDGHGGDKVAIYTGDNLHHIVARQEAFAKGDYGQALKDGFLSTDRAILEDAALKHDSSGCTATTAIVSDGKVICANAGDSRTVLGVKGIAKPMSFDHKPQHEGERTRICAAGGFVEAGRVNGNLALSRAIGDFDFKRSPYFPPEEQIVTAYPDVIEHQLTADDEFLILACDGIWDCFLSQEVVEFVRRGIAEKQTLVDICENLIDNCLAPTSDLSGVGCDNMTVMVVALLQGKTEEEWYNMVAERVKNGEGPAASREAVERVAGEEREVTAQQLQQNAQAQQANSASLALQQLLSSGATITDENGMVVLKAENAAELLAKVGFAPEDVGQLVESGDLVEEDVEVGGDRITEEQ

SEQ ID NO: 1378 - DNA, 951 bp, Apis mellifera; identical to SEQ ID NO: 874
  CDS (1)..(951)

SEQ ID NO: 1379 - protein, 316 aa, Apis mellifera; identical to SEQ ID NO: 875

SEQ ID NO: 1380 - DNA, 1791 bp, Apis mellifera
  CDS (1)..(1791)
atgggtgcatacttgtcagaaccgattacgaagaaagtgtcgagcgatgaagtgggcaagaatgtcgcattcggcgcgagttccatgcaaggctggcgaattagtcaagaggatgcacataattgttgcatagattttgatgaaaatgtttcattatttgctgtatatgatggccatggtggtcatgaagtagcaacttattgtgcaaataatttaccagattttattaaacaaactgatgcatataaaaagggagatataagacaagctttaattgatgcctttctaggctttgatgctacacttgaaaaatctgaggtagttagtattctcaaagaacttgcaggaacatctacttcagataagaaaaaagaagaattaaacgaatctgatgaagaagaaaatgttaataatctatgtatggaggcaacaatgccattggaagaagtaatagcaaaatatcaatcagaatcaaatcctaatgtaaaaaatgaaaaatgtaataaacgagtatgttctgcaagtccttatctacgtggtcgaagaggtaaagaaaaagcaagttcttcatcatctggtgcaggatgttcatcatcttcgtcttcgtggaatacaaatgaaactgatgtgagtagttccagtcaaccatgtggatcaactttatccagcacaatggaaagaaaagaatcagaatgtcctggaaacaatgaagctgaacaagttcttgattcaactaccagtaatggaaatgcacatgcatctacacctgtaggatctacagcagatgtagagacaacaaaaagtgcagatatgccagatagttctgaagatgtaaacaaggaagtaacaagtcctggtaaaattacatctatagaatcaaatgcaaatgaagtagaaataaatggtgcagaatcaaagcaaattggagatgcagatagtagtaagggtggaggagataatgtttcaagtaaagatattgatgaggatgaaagtgatgaagatgaagatgaggaagatgaagatggagatggtaatattgatgatgatgatgatgatgatgatagtgaaagtcttatgatggatacagaagagccaggttatgatagtggatgtactgcagtagttgcaattttaaaggacaatgaattatacgtggcaaatgctggagactcccgttgtgttttatgtagagatggtcaggctattgaacttagtttagatcataaacctgaagatgagccagaaatggaacgtatagtaaaagctggtggaaaagttacggctgatggtagagtaaatggtggccttaatttatcaagagcacttggggaccatgcttacaaacaaaatgcagacttgccaccacaagagcaaatgatttctgctcttcctgatgtgaggcatattacaattgaaccagaaagagatgagtttatggtgcttgcttgtgatggtatttggaatttcatgtcaagtcaagatgttgtacaatttattcgcgctcgtttaactcaaaattatgaaaaattatcaaaaatctgtgaagagctatttgaccattgtcttgcacctgatacctgtggagatggtacaggatgtgacaatatgacagctgtaatagtacaatttaattcatcgactaatgctgtaatgaatagcactattactgatgtatgtactgttaaaagatcactatcgccatctatatcgacagaagaaaataatgattgtatcatgcaagatgatacaatgaaatcttgtaaacgacttaaaactgaagcaactatatga

SEQ ID NO: 1381 - protein, 596 aa, Apis mellifera
MGAYLSEPITKKVSSDEVGKNVAFGASSMQGWRISQEDAHNCCIDFDENVSLFAVYDGHGGHEVATYCANNLPDFIKQTDAYKKGDIRQALIDAFLGFDATLEKSEVVSILKELAGTSTSDKKKEELNESDEEENVNNLCMEATMPLEEVIAKYQSESNPNVKNEKCNKRVCSASPYLRGRRGKEKASSSSSGAGCSSSSSSWNTNETDVSSSSQPCGSTLSSTMERKESECPGNNEAEQVLDSTTSNGNAHASTPVGSTADVETTKSADMPDSSEDVNKEVTSPGKITSIESNANEVEINGAESKQIGDADSSKGGGDNVSSKDIDEDESDEDEDEEDEDGDGNIDDDDDDDDSESLMMDTEEPGYDSGCTAVVAILKDNELYVANAGDSRCVLCRDGQAIELSLDHKPEDEPEMERIVKAGGKVTADGRVNGGLNLSRALGDHAYKQNADLPPQEQMISALPDVRHITIEPERDEFMVLACDGIWNFMSSQDVVQFIRARLTQNYEKLSKICEELFDHCLAPDTCGDGTGCDNMTAVIVQFNSSTNAVMNSTITDVCTVKRSLSPSISTEENNDCIMQDDTMKSCKRLKTEATI

SEQ ID NO: 1382 - DNA, 918 bp, Aspergillus nidulans FGSC A4
  CDS (1)..(918)
atggaagatgcccacgctgccgttctagatctccaagcgaaacaatcaggctctaacgaccaaccgaccgatcccgacaggcgccttgctttcttcggagtatacgatggccacggtggagacaaagttgctctgttcgcgggggagaatgtccataagattgtcgcgaagcaggagacctttttaaaaggcgatattgaacaggccctgaaggatggatttctcgctactgatcgggctatcctagaagatcctaagtatgaggaggaagtttccggctgcactgccgctgtcagtatcatctcgaagaaaaagatctgggtggcaaatgctggtgattcacgttccgttttgggtgtcaagggtcgtgcaaagcctctctcgtttgaccacaagccacagaatgaaggcgagaaggctcgtatcagcgctgcgggcggcttcgtcgactttggccgggttaatggcaacctcgccctgtcgcgtgccattggagattttgagtttaagaagagccctgaactatcgcctgaacagcagatcgttactgcctacccagacgttacagtccacgagctcacggaggacgatgaattcttagtaatcgcttgcgatggaatctgggattgccagtcttcccaagccgtggtcgaattcgttcgccgcggtatcgcggccaagcaggatctctatcggatttgtgaaaacatgatggacaactgtctcgcttccaacagtgagactggtggagttggctgtgacaacatgacaatggtcattataggtctcctcaatggaaaaactaaggaagagtggtacaaccagatcgcggagcgggttgctaacggcgacggcccttgtgctccgcccgaatacggcaagtctctcgaggaacccacggcctccaatccctactga

SEQ ID NO: 1383 - protein, 305 aa, Aspergillus nidulans FGSC A4
MEDAHAAVLDLQAKQSGSNDQPTDPDRRLAFFGVYDGHGGDKVALFAGENVHKIVAKQETFLKGDIEQALKDGFLATDRAILEDPKYEEEVSGCTAAVSIISKKKIWVANAGDSRSVLGVKGRAKPLSFDHKPQNEGEKARISAAGGFVDFGRVNGNLALSRAIGDFEFKKSPELSPEQQIVTAYPDVTVHELTEDDEFLVIACDGIWDCQSSQAVVEFVRRGIAAKQDLYRICENMMDNCLASNSETGGVGCDNMTMVIIGLLNGKTKEEWYNQIAERVANGDGPCAPPEYGKSLEEPTASNPY

SEQ ID NO: 1384 - DNA, 1455 bp, Ustilago maydis 521
  CDS (1)..(1455)
atgggtcagactctctcggagcccgtcgtgaagaagaccacgtcttccggcggcaacgactcggttctttatgcgatctctgagatgcaaggttggcgaatcagtatggaagattcgcacaccaccattctcgacatcaagaacgaggatggagacattgtcggcaactttttcggtgtttttgatggccatggaggcgcaacagtcgctcagtactgcggccgcaatttgcacaacaccctgctgtcggaggacaaattcaagcagggagactacactgaagcacttcaacagactttcttggacgttgacgaggaactgaagaaagatccgaactacacaagcgacccttctggctgcaccgctgtcacggcgttcatcaagacaacggccaaggacccgaagcgggtcgaaaaaatctttgttgcaaatgcaggcgactccagatgtgttctctctcaagccggcaactgcatcgagatgagcaatgaccacaagcccacgctggactcggagcgggaacgtatcgagtacgctggtggttacgttagttggggccgcgtcaatggtaatctggctctcagtcgagccattggcgactttgagttcaagcgcacattcgatcttccagtagaaagacagattgtcactgccttccccgaggttctcgacagagaggttctcgaagccgaagacgagtttctcgtcctcgcatgcgatggtatctgggattgtctcagcagtgtcaaggtggtggacattgtgcgaagatctattgccaacggcaaggaactcgccgatatctgtgaagatctcatggatcgctgtcttgctcctgactcggacacgggtggaattggctgcgacaacatgaccgtctgcattgttgccttgctcaacggacgaagcaaggacgaatggtatagctggatcaaggacaacattgaggtgcccaaatttgggcgcaccacacccaaagaggtgcctcccgttttcagcaacacgcagacatctacacgcggtcaggagaccggaatggagggcgcagttagcatccaatcgcttctttccgggggattggcacgcggcgagaatggtgagcaaggagcagcaggtgcgctccaattgcctggcggattggccggcgcgctcagcggagccggcatcgtgttccgtcctggtggacgctccgacgagggcgaggtggtctacgaagcacacgtcgtcgatgaggaggatagcggagatgagcaaccggatcagagcagcagcgagtctgctcccaaggcatccacaacggaaaaggcaactgacggcgatgctgcagagccaaggctggtcgagtcgcctcacacggatgccaagccagccagctcgaaccaagagtcggacaagatggaggtggacgacgacactaacacgtctgccaagtcgcaagacgcatcgaacgcctaa

SEQ ID NO: 1385 - protein, 484 aa, Ustilago maydis 521
MGQTLSEPVVKKTTSSGGNDSVLYAISEMQGWRISMEDSHTTILDIKNEDGDIVGNFFGVFDGHGGATVAQYCGRNLHNTLLSEDKFKQGDYTEALQQTFLDVDEELKKDPNYTSDPSGCTAVTAFIKTTAKDPKRVEKIFVANAGDSRCVLSQAGNCIEMSNDHKPTLDSERERIEYAGGYVSWGRVNGNLALSRAIGDFEFKRTFDLPVERQIVTAFPEVLDREVLEAEDEFLVLACDGIWDCLSSVKVVDIVRRSIANGKELADICEDLMDRCLAPDSDTGGIGCDNMTVCIVALLNGRSKDEWYSWIKDNIEVPKFGRTTPKEVPPVFSNTQTSTRGQETGMEGAVSIQSLLSGGLARGENGEQGAAGALQLPGGLAGALSGAGIVFRPGGRSDEGEVVYEAHVVDEEDSGDEQPDQSSSESAPKASTTEKATDGDAAEPRLVESPHTDAKPASSNQESDKMEVDDDTNTSAKSQDASNA

SEQ ID NO: 1386 - DNA, 1659 bp, Cryptococcus neoformans var. neoformans B-3501A
  CDS (1)..(1659)
atgggtcaaacactctctgagcctatgactgaaaagcacaccacggatgtggttcgaggaaagcaattctgggtgggcttgtcagacatgcaagggtggcgtatcagcatggaggacgcccattccgtccacctttaccttcccccgagctccgacgattccaaacctcatagcccagcaagtgacgttccggctcaacctgagggttctaccgtcacgaaccacaacgaacccgaagtcgctaatgcgatgtttggtgtgtttgacggacacggtggccagacagtagccaagtttgcgggcacgactttgcattcccgattgtcagctttggatgcttataagtccggagattacataactgcccttacccaggccttcatcaaaaccgatgaagatctccgagcagacccatcattcttgaacgacccttctggatgtaccgccgtcgtgggtctcatcacgaccgacggccgtatcattgtcgcgaactctggtgattctaggtcagtcctcggctaccaaggacaagccaaggctttgtccaatgaccacaagcctaccaatgaagaggagacagcgcgaataactgccgctggcggatttgtcgagtttggccgagtgaacggtaatcttgccctttctcgagccatgggcgattttgagtttaagcaaaacttttctcttgcccccgaaaagcaaattgtaaccgtcgtccccgaaattattacccacgaacttgatggcgaagaagagttccttgtgctagcttgtgatggtatctgggactgtcttacctctcagcaggtcattgactttactcgacgtgctattgccaatggtgaccccttgggtaaaatctgtgagaacatgatggtcaaatgtttggccaaggactctagcactggtggaattggttgcgataacatgactgtggtcattgtcgctttgttgaatggtaggacaccagaggaatggcaagcttgggtcaaggagcgtgtcgagcaaaaggttggccacgatacccccgaatccattcctgacgtcttcccccagaattcgggtccttccaatagcggcttcgctggctcaggcttccgcgtcgcaggcggcgctggcggtctcgcaaacattgccagcatactgggagcctctggtatcaccttcagacccgcttacgacagcgatgatgatgatgatggtattcaactaatgggagatggtcccgtttcgcccgataagctctcatcacccggtctcattgataatgaggctgtcgaaggggggaccaagccgaaggatgtcaccggtcagcttgagaaggaggaagaagagaccatgtttggcggagaaggcaagaagggcagtgtgagattgctggacgaagatggagattctagcatggactctgatgattccgactctaccacaacgggcaatgaccccgctcctcaacctattccatcatcatctcaccaagccacccactcccccatccctcccaatttttcgtccatcggttctcctacggtgcctaccccgcaagaacttcaggggctgcaagcgtccaacaggagtgagccccagggggatgcgtattccgatgccgtcaaggttgaggggctgatggacaagagcgagagtcctctgaatctttag

SEQ ID NO: 1387 - protein, 552 aa, Cryptococcus neoformans var. neoformans B-3501A
MGQTLSEPMTEKHTTDVVRGKQFWVGLSDMQGWRISMEDAHSVHLYLPPSSDDSKPHSPASDVPAQPEGSTVTNHNEPEVANAMFGVFDGHGGQTVAKFAGTTLHSRLSALDAYKSGDYITALTQAFIKTDEDLRADPSFLNDPSGCTAVVGLITTDGRIIVANSGDSRSVLGYQGQAKALSNDHKPTNEEETARITAAGGFVEFGRVNGNLALSRAMGDFEFKQNFSLAPEKQIVTVVPEIITHELDGEEEFLVLACDGIWDCLTSQQVIDFTRRAIANGDPLGKICENMMVKCLAKDSSTGGIGCDNMTVVIVALLNGRTPEEWQAWVKERVEQKVGHDTPESIPDVFPQNSGPSNSGFAGSGFRVAGGAGGLANIASILGASGITFRPAYDSDDDDDGIQLMGDGPVSPDKLSSPGLIDNEAVEGGTKPKDVTGQLEKEEEETMFGGEGKKGSVRLLDEDGDSSMDSDDSDSTTTGNDPAPQPIPSSSHQATHSPIPPNFSSIGSPTVPTPQELQGLQASNRSEPQGDAYSDAVKVEGLMDKSESPLNL

SEQ ID NO: 1388 - DNA, 1158 bp, Strongylocentrotus purpuratus
  CDS (1)..(1158)
atgggggcatttctagagaagccaaacactgagaaagagaatgaacgtgggtctgggaatgggctacgctacggccttagtagcatgcaaggttggagggtagagatggaagatgcccattcggcagtcacaggtctaccacatggactcaaggactggtccttttttgcagtgtttgatggtcatgcaggatcaaaggtcgccaagcattgctcagagcacatacttcatgaaattacttccaatcctgagtttctaggatccccaaaggtagatggtaaattgaatccctctactgatgcagttaaagagggtattaggactggattcctttcaatagactcaaagatgagaactgactttgcaaggacagatagttcagataagagtggatcaactgctgtgggagttattatatcgccaaagcatttattctttgccaactgcggggattcaaggtcggtcctatcgaggaaaggcgaggataagccaacctttagcacggaagaccacaaacctgggaagcccaaggaaatgaagaggatagaggatgctggtggaagtgtaatgatcgagcgtgtgaatggatctttagcggtttcaagagccctgggtgattacgactacaagaataacccagacaaaccacctacggaacagctcgtttcaccagaacctgaagtaacggtctttgaaagaacagatgaagaagagttcattattttggcgtgtgatggaatatgggatgtgatgtcgaatgaagaactctgccagtttatacgttcaagattagccataacagacaacttggaagagatctgcaaccaagtcattgagacctgtttacagaagggaagtcgtgataacatgagcatcgtgatcgtgttattccagaatgctcctgaggtatcccaggatgctctcacaaaagagaaagagcttgatgtcttgcttgaagagaaagtcaaagaggtaatggaaaactttggagaccagacccagctggacctagtgatgcatgtgcttagaatggcagatattccaggtcttccccccggcggaggcctttcagccaagaaaggaaccatcgaagaaattctgaacaggctcatccctaacaggaagcatgatgaggattcagcggatgaaaaatggtag

SEQ ID NO: 1389 - protein, 385 aa, Strongylocentrotus purpuratus
MGAFLEKPNTEKENERGSGNGLRYGLSSMQGWRVEMEDAHSAVTGLPHGLKDWSFFAVFDGHAGSKVAKHCSEHILHEITSNPEFLGSPKVDGKLNPSTDAVKEGIRTGFLSIDSKMRTDFARTDSSDKSGSTAVGVIISPKHLFFANCGDSRSVLSRKGEDKPTFSTEDHKPGKPKEMKRIEDAGGSVMIERVNGSLAVSRALGDYDYKNNPDKPPTEQLVSPEPEVTVFERTDEEEFIILACDGIWDVMSNEELCQFIRSRLAITDNLEEICNQVIETCLQKGSRDNMSIVIVLFQNAPEVSQDALTKEKELDVLLEEKVKEVMENFGDQTQLDLVMHVLRMADIPGLPPGGGLSAKKGTIEEILNRLIPNRKHDEDSADEKW

SEQ ID NO: 1390 - DNA, 1107 bp, Tribolium castaneum
  CDS (1)..(1107)
atgggagcatttcttgacaagccaaagacagataaattccaagagtgtggagaaggcaacgggctgcgctatggggtcgccagcatgcagggctggagggtcgagatggaggacgcacacatggccaagacgaacctgggggacgccctcaaagactggtcttacttcgccgttttcgatggccatgctggggccaaggtgtcagcccactgcgccgagcacctcctcgacgccatcatgcaaacggaggagttccaaaaggacgtgatgaaaggcatccacaacggttttctagagttagataataaaatgcgctcgttacctgaaatgacgtccggcgaagacaagagcggcacaacggccgtctgtgcattcgtttcacctagacttatctatgtagcgaattgcggggattcccgcgccgttttatgtcgcggtggcagccccgttttcaccacacaagaccacaagcccgggttgccttcggaaagggagcgcattgttaaagcaggaggcaatgttatgatccagagagtgaacggaagtttggccgtatcgagggctctaggcgattacgagtacaaaaatgtcgaaggaagggggccctgtgagcagttggtttcgcccgaaccggaaatcttcgtcagggatagagatgataaagaggatgagtttctggtgttggcttgcgatggaatttgggacgtgatgagcaacgaggatctctgccagtatatacataatcgccttttagtcaccgataatttacaggaagttaccagtcaagttatcgatacgtgtttgaacaaaggtagccgcgataacatgagtattgtgttagttgtgtttcctggcgctccgacccccactcaggaagcaatcgatgccgaaaaggaattcgatgcgactctggaaaggcgtataaaagaaattgtggaacaaaacgaaatcactgaattctccacggtgctgcataagcttgcatcactcaacattgaagggtttcctccaggtggtggactagctgcaaaacgtacactgattgagaaaattttcaaagaactgtgtccggatctagctgaaactgatttggaccctttcaactaa

SEQ ID NO: 1391 - protein, 368 aa, Tribolium castaneum
MGAFLDKPKTDKFQECGEGNGLRYGVASMQGWRVEMEDAHMAKTNLGDALKDWSYFAVFDGHAGAKVSAHCAEHLLDAIMQTEEFQKDVMKGIHNGFLELDNKMRSLPEMTSGEDKSGTTAVCAFVSPRLIYVANCGDSRAVLCRGGSPVFTTQDHKPGLPSERERIVKAGGNVMIQRVNGSLAVSRALGDYEYKNVEGRGPCEQLVSPEPEIFVRDRDDKEDEFLVLACDGIWDVMSNEDLCQYIHNRLLVTDNLQEVTSQVIDTCLNKGSRDNMSIVLVVFPGAPTPTQEAIDAEKEFDATLERRIKEIVEQNEITEFSTVLHKLASLNIEGFPPGGGLAAKRTLIEKIFKELCPDLAETDLDPFN

SEQ ID NO: 1392 - DNA, 1686 bp, Tribolium castaneum
  CDS (1)..(1686)
atgggctcgtatttatcagaaccggccaccgagaaagagtccaccgacgacaccaacggcaaattaacttatggggcaagctctatgcagggctggcgtatgacccaagaggacgcacataactgtatcttaaactacgacgaggacacttcgtttttcgccgtctacgacggacatgggggccaggaagtggcccagtattgctcggacaagctcccggacttcatcaagaacacgcccgagtacaaggagggaaacatcgaggaggcgctcgtttcgggctttttgaggtttgacgcgctcattgccacgccagaagttgtggaggaattgaggaaaatcgccgatgataaggacgagaacgagagcgacgaagaggaaaatgttaacaatttgtacgaagaggcggccatgcccattgagcaagttattgaaaagtacacctctaacttgtctaatccggcggtgaaaagtttaaaaagggacattaaatcgccctttttgaccgccaaaacagacagtgaccccacggtaggcacctcctcagcgggctcctgctcgagctccacgagccaaggcggcgacggcgtcagcagctccagcgaggcgggacttaaggacgaacttccaccccaaaacggtgaaattgcgccttccgattccgaggcccaggctaagagtgacgtcacgagttcatcaacacctgttgaaaatggcacgccgtcaaaaaagggtaaaggaaaggcagtcattaaaccagaacctgtaaaaacaccaacaaacacacgaccaaaacggacggcacaacagttgtataaaaactggttgaattgtggagaggaagagagtgacagcagcgacgaagaagaccaaacatttgagggtccaaatgaggagagctcggaggacgaaaatgagggcgttaacatcgcaattgacgcggagggctctgaggaagagagttcggaagaagaggaggaggaagatgaggacgaggaagacgatgacagtgaagatgcagatgtcagaacctttaaagaagagccagggtctgacagtggctgcacggcagttgtggcgttgttaaaaggcaaccagttgtacgtagccaacgccggggattcccgttgcatagtgtgtcggaatggcaaaccaatagagatgagtatagaccacaagccggaggacaagcccgagagaaaaaggatacagaaagcagggggcgaagtgacatgggagggccgtgtcaacggcggcctaaacctctcacgggccattggagaccacgcatacaagcaaaacaagaacctatcagaccgtgaacaaatgatcacagctttgcccgacatcaagactttaacgattaatccagaggaagacgagttcatgtttcttgcgtgcgacggaatctggaatgcgatgtcaaacgagaaggtcgtagccttcatcaggccacgtcttcaagacaatacgaagaaattatcccaaatctgcgaagagatgttcgaccatattctggcacctgacacggtgtgggacaatgccgggagtgacaacatgaccgcaattatcgtaaaattcaagtcacacaaaagaccaatttcgccttcacagacggaagaaagcgcagcgaaacggacaaagagcgaagccgaaagtgaggcgcaagtcgatacaacggtttag

SEQ ID NO: 1393 - protein, 561 aa, Tribolium castaneum
MGSYLSEPATEKESTDDTNGKLTYGASSMQGWRMTQEDAHNCILNYDEDTSFFAVYDGHGGQEVAQYCSDKLPDFIKNTPEYKEGNIEEALVSGFLRFDALIATPEVVEELRKIADDKDENESDEEENVNNLYEEAAMPIEQVIEKYTSNLSNPAVKSLKRDIKSPFLTAKTDSDPTVGTSSAGSCSSSTSQGGDGVSSSSEAGLKDELPPQNGEIAPSDSEAQAKSDVTSSSTPVENGTPSKKGKGKAVIKPEPVKTPTNTRPKRTAQQLYKNWLNCGEEESDSSDEEDQTFEGPNEESSEDENEGVNIAIDAEGSEEESSEEEEEEDEDEEDDDSEDADVRTFKEEPGSDSGCTAVVALLKGNQLYVANAGDSRCIVCRNGKPIEMSIDHKPEDKPERKRIQKAGGEVTWEGRVNGGLNLSRAIGDHAYKQNKNLSDREQMITALPDIKTLTINPEEDEFMFLACDGIWNAMSNEKVVAFIRPRLQDNTKKLSQICEEMFDHILAPDTVWDNAGSDNMTAIIVKFKSHKRPISPSQTEESAAKRTKSEAESEAQVDTTV

SEQ ID NO: 1394 - DNA, 945 bp, Tribolium castaneum
  CDS (1)..(945)
atgggtcaaactttgtccgaaccggtgactgccaagaacacagcatgctgccaaaacgccaatttccaagtgggctcaagttcgatgcagggctggcgcatcaacatggaggactcccatacgcacatcttgtccctgccggacgaccccgaggccgcgtttttcgcggtctacgacgggcatgggggctccaagatctcggagtacgcgggcaagcacctgcacaagtttatcacgaaccgggaggagtacaagaacggccagatcgaggaggggctgaagcaggccttcttggagatcgaccgggtcatgctggaggatgagtcgttgagaaacgagcagtcgggctccacagccgtcactattattatcaaaaatggcacgttgtactgcgccaacgtgggggactctagagctgtggcgagcattgggggcaaggcggagccgctttcgaacgaccacaagccgaacaacaaggaggagtacgacaggatcgtagcggcgggagggtttgttgattacaacagggttaacgggaacttggccctttccagggccctcggtgattttattttcaaaagaaacgaggataaaccccaggaggaacaaatcgttacagcgtatccggaggtgcagtcgtacgagataacccccgagtgggagtttgtggtggtggcgtgtgacggcatctgggatgtgatgagtaacgaagaggtggtctcgtttgtgcggacccggatagcgtcaggaatggaaccggaagagatatgtgaaagcctaatgatgatttgtttagcacccgattgtcaaatggcaggtctaggatgtgataatatgactgttgttattattggacttctacaaggtgaatcgtacgaacagctttcggcgaaatgtgctagaacttatatttcggatgataaggaagagaacttcctcctgtga

SEQ ID NO: 1395 - protein, 314 aa, Tribolium castaneum
MGQTLSEPVTAKNTACCQNANFQVGSSSMQGWRINMEDSHTHILSLPDDPEAAFFAVYDGHGGSKISEYAGKHLHKFITNREEYKNGQIEEGLKQAFLEIDRVMLEDESLRNEQSGSTAVTIIIKNGTLYCANVGDSRAVASIGGKAEPLSNDHKPNNKEEYDRIVAAGGFVDYNRVNGNLALSRALGDFIFKRNEDKPQEEQIVTAYPEVQSYEITPEWEFVVVACDGIWDVMSNEEVVSFVRTRIASGMEPEEICESLMMICLAPDCQMAGLGCDNMTVVIIGLLQGESYEQLSAKCARTYISDDKEENFLL

SEQ ID NO: 1396 - DNA, 1116 bp, Drosophila melanogaster
  CDS (1)..(1116)
atgggtcataaaatgggtggcttcttggaaaaaccagaaactgaaaagcaggctcaagagggtcacggaaatgggctgcgatactgcgtaagttctatgcaaggttggcgattggaaatggaggacagccactcggctgcttgccggctgaaagatcccttcgcaacgtggtcatattttgcggtgttcgatggtcacgctggcagtcaaatatcactgcattgcgctgaacatctaatgagtactatattggaatccgaatctttttcgaagcacaaatacgaggctggcatacgagagggcttcctgcagttggatgaggatatgaggaagctgtatcacgaccagcaaggcggctcgacggccatttgtgtttttgtatcaccggacaaaatatatctggtcaattgtggtgactcgcgtgcagtgatatcgcgaaatggagcagctgtcatcagtacaattgatcacaagccgttttctcccaaagaacaagaacgcattcaaaatgccggaggcagtgtaatgattaaaaggataaatggcactctggcagtttcccgggccttcggtgactatgatttcaagaatgatggctcaaagtctcctgtcgatcagatggtgtctccggaacctgatataatagtttgcaatcggtccgaacacgatgaattcatagttgtagcctgcgatggcatttgggatgtgatgactagcagcgaggtttgtgaatttattaggtcacggcttttggtgacctatgacctgccgatgattgttgacagcgtattggatatttgcctgcataaaggcagcagggacaatatgacactgctcctcctacttttgcctggagcaccaaaggtcgatatggatgctgttaaggccgaaaggagtcttgatcaaactattgtgcaaataaccaaggaagtgattgagaagcacgaaatacacgactttgaaacacttattcgactgatgaaaagaatggccattaacattccaaatctaccacctggcggtggtctgtatgcaaaatattacattatagagcaagctttccacgagaaatttccagatactccggctgaaatatatgattatttttccatgtag

SEQ ID NO: 1397 - protein, 371 aa, Drosophila melanogaster
MGHKMGGFLEKPETEKQAQEGHGNGLRYCVSSMQGWRLEMEDSHSAACRLKDPFATWSYFAVFDGHAGSQISLHCAEHLMSTILESESFSKHKYEAGIREGFLQLDEDMRKLYHDQQGGSTAICVFVSPDKIYLVNCGDSRAVISRNGAAVISTIDHKPFSPKEQERIQNAGGSVMIKRINGTLAVSRAFGDYDFKNDGSKSPVDQMVSPEPDIIVCNRSEHDEFIVVACDGIWDVMTSSEVCEFIRSRLLVTYDLPMIVDSVLDICLHKGSRDNMTLLLLLLPGAPKVDMDAVKAERSLDQTIVQITKEVIEKHEIHDFETLIRLMKRMAINIPNLPPGGGLYAKYYIIEQAFHEKFPDTPAEIYDYFSM

SEQ ID NO: 1398 - DNA, 1635 bp, Oryza sativa subsp
  CDS (1)..(1635)
atggccgcggctcggcttccttctcctgcgccggtggctcatcctcctgctctccgcgcgcgccctctagctccgcatctatacgccgccctgccgcgcgctccctatccggcatggcagtggcgcggtgctcgggcggcaagcccggcgaggagggaggctgtggtcaggggggcagccgtagcagaggacgaaggagtggagctagccgatgacgacgacggcgagcgcggggtggggggcggcgacggcggttcagagtcctttcgaaccccggctaggcatcctcccgcagttgctttcgctattggcgtgggatcccatggtatcatggtaatctgttggattggaggaggggctaacgagcacccgcaaccccatggtgatctccgttttgtctccctctcgatatttccatttatagatgtaacttatttgtacaacgttgtgttcactttagtctttttcaggaaagcaagtcttgcgatgggtgcatctgccagcagttcagtaacgtcgaagcttactaacgatggagagaatcagagagttaagtatgcctcatcaactatgcaaggatactgtccgacaatgcaagatgctcttgcagttgaactagatctagatgcattaaggaacacatcattctttggtgtttatgatggcgatggaggagctgaagtagcaatgtactgtgcaaaacgatttcatgctatgctttgcgaggatgaaaactatctcaacaatctgcccaatgcaattacatctgtgtgctccagacttgatgatgatttgcaacgatcaaatgaatggaaggagtcactttatccccgtggtaatggtgaatgtttccagttccttaagactggcgtttgtgctaacctctggcattccgaagagttgggatttatgctccctcagcaggcttacagggcgccgttatacgaaggaagcacagcatgtgtggtaatcattagaggaaatcagatcactgttggaaatgttggtgattctcgttgcgtagtttcacataatggccaggcaattgatttgtccattgatcacaaaccaaccgttggaagtgaacgcgagagaattctaagagcaggaggacgagtattggtaaaaagaattcctgtcatgggctcagatggaagactcatgcgaggatggggttattttgaattaaagaagaaccaaaatattcctgcttcacagcagatggtgacatgtgatcctgagtttaccattgtggacataactgctgatactgaatttcttgtcatagcaactgacggcatctggggtcacatgtcaagtcaggacgtggttgatttcatacgcaaggaattacactcgggggaggaaaatctgcgcgccatttgtgagaagcttcttgatcattgcttgacctcgagggacaacgtgacggtcatactggttcggttcaagcccggcgccgcggttatccctatcctgtccgacatcgatgaggagcctgtcctctccgacgttgaggaggagccccatgaacctcaacaaaatcccggggatggcggcggcggcggcggcggccagcaagacatcggtggcgaatcagaggagctcccattggcccattttcctcaggaatag

SEQ ID NO: 1399 - protein, 544 aa, Oryza sativa subsp
MAAARLPSPAPVAHPPALRARPLAPHLYAALPRAPYPAWQWRGARAASPARREAVVRGAAVAEDEGVELADDDDGERGVGGGDGGSESFRTPARHPPAVAFAIGVGSHGIMVICWIGGGANEHPQPHGDLRFVSLSIFPFIDVTYLYNVVFTLVFFRKASLAMGASASSSVTSKLTNDGENQRVKYASSTMQGYCPTMQDALAVELDLDALRNTSFFGVYDGDGGAEVAMYCAKRFHAMLCEDENYLNNLPNAITSVCSRLDDDLQRSNEWKESLYPRGNGECFQFLKTGVCANLWHSEELGFMLPQQAYRAPLYEGSTACVVIIRGNQITVGNVGDSRCVVSHNGQAIDLSIDHKPTVGSERERILRAGGRVLVKRIPVMGSDGRLMRGWGYFELKKNQNIPASQQMVTCDPEFTIVDITADTEFLVIATDGIWGHMSSQDVVDFIRKELHSGEENLRAICEKLLDHCLTSRDNVTVILVRFKPGAAVIPILSDIDEEPVLSDVEEEPHEPQQNPGDGGGGGGGQQDIGGESEELPLAHFPQE

SEQ ID NO: 1400 - DNA, 1083 bp, Oryza sativa; identical to SEQ ID NO: 918
  CDS (1)..(1083)

SEQ ID NO: 1401 - protein, 360 aa, Oryza sativa; identical to SEQ ID NO: 919

SEQ ID NO: 1402 - DNA, 1254 bp, Phaeosphaeria nodorum
  CDS (1)..(1254)
atgggtcaaaccctctcagagcccgtcgtcgacaagaaatcagaaagcggcgatggcgactcactcatcttcggcacctcgtccatgcagggctggcggatcagcatggaagacgcccacgcatgtctgctagatctccaggccacgaccgagggcggcaagcccaccgaggccgataagcgactcgccttcttcggtgtctacgacggccacggcggcgacaagcctacaagttcgggagaccttaagaaggccctgcaagacggcttcctggctgccgacagggccattctgagtgatcccaagtacgaagaggaagtgtctggctgcaccgccacagtcgctgttgtgtcaaaagacaagatctactgcgccaacgctggcgactcaagaaccgtcctcggagttaagggaagagcgaagcctctctcctttgaccacaagccgcaaaacgaagccgagaaggcccgtattcaagcagccggcggttttgtcgacttcggccgtgtcaatggcaacctcgccttgtcgcgtgccatcggcgatttcgagttcaagaagagcgcagatctccctcccgagcagcaaatagtcactgccttccccgacgtcgagatacacgacatcagcgaagatgacgaatttctggtggttgcgtgcgacggtatctgggattgccaatcttcgcaagctgtcatcgagtttgtcaggcgcggaattgtcgccaagcagcctctccagtctatttgcgagaacatgatggacaactgtctggcttcgaacagtgatactggcggtgttggttgtgacaacatgaccatcactgttattggtcttctgcatggaaagacgaaggagcagtggtacgaggatattgcgaagcgggtggctaatggagagggtccatctgagttccgtggccctggtgtacatcatcgcattgacgacgaccctgatgacatcgacatggagcttgatcagcgcttccagccgaaccgcggtatgggcggtcgcatcattcttcttggagacggcacagagatctcgactgatgcgcctgacagtgacatgtttgatcacgaggacgaagacaaggatctcgactcgcaggtcgacaaatacaacaaggagtcgaacagccacgctcaagtcaccgagtcgccatcttctgttcagacggaaaagtccgacggccccggtgaagcgctgaaagaagctcagggcgacaaaaagcctgtcgcagacaagatatag

SEQ ID NO: 1403 - protein, 417 aa, Phaeosphaeria nodorum
MGQTLSEPVVDKKSESGDGDSLIFGTSSMQGWRISMEDAHACLLDLQATTEGGKPTEADKRLAFFGVYDGHGGDKPTSSGDLKKALQDGFLAADRAILSDPKYEEEVSGCTATVAVVSKDKIYCANAGDSRTVLGVKGRAKPLSFDHKPQNEAEKARIQAAGGFVDFGRVNGNLALSRAIGDFEFKKSADLPPEQQIVTAFPDVEIHDISEDDEFLVVACDGIWDCQSSQAVIEFVRRGIVAKQPLQSICENMMDNCLASNSDTGGVGCDNMTITVIGLLHGKTKEQWYEDIAKRVANGEGPSEFRGPGVHHRIDDDPDDIDMELDQRFQPNRGMGGRIILLGDGTEISTDAPDSDMFDHEDEDKDLDSQVDKYNKESNSHAQVTESPSSVQTEKSDGPGEALKEAQGDKKPVADKI

SEQ ID NO: 1404 - DNA, 1077 bp, Medicago truncatula
  CDS (1)..(1077)
atgggaacaactctcagcattcctaaaactgaaaagttctcagaagatggtgaaaatgacaatcttagatatggtttatcatctatgcaaggttggcgtgcaacaatggaagatgcacatgcggcgcatcttgatgtggattcatccacttcgtttttcggtgtatatgatggtcatggaggtaaggcggttgcaaagttttgtgccaagcaccttcaccaacaggtgctcaagagtgaagaatacatagctggagatgttggaacatctcttacgaaagcatttttgagaatggatgagatgatgcgtggtcaaaggggatggagggaattagcagtcttaggtgataaggtaaaagggttcaatggaataattgaaggattgattcggtctccaagaagcaatgataataaggaccaaagtgatgattgggcctttgagaaggggcctcattcagactttgatggaccaaattcaggaagcactgcttgtgttgcaatcattagaaacaacctactttttgttgcgaatgctggtgattcacgctgcgtaatatctaggaatggtcaggcatacaatttatctagagatcacaaacctgagcttgtgattgagaaggaaagaatctataaagctggtggttttattcatgcaggacgaattaatgggagtttaaatcttgcaagagctataggtgacgtggacttcaaaaataatagatttctttctgctgaaaaacaagttgtgaccgccaatccagacataaacattgtcgaccttcacgacgaagatgagtttatagtgatagcttgtgatggcatatgggattgcctatcaagccaacaattggtagattttgtacgtcaagaacttctcttggaaaccaaactctctgaggtttgtgaaagagtgctagaccggtgtttagcgccatctttggctgttggtgatggatgcgataacatgacaatgatcttggtgcagttcaaaaaaccgctacaaaccagtgcaccagctcaagaacaatcatcttcaaatgaacaagatgcatctgaaccaactttggagaacagttga

SEQ ID NO: 1405 - protein, 358 aa, Medicago truncatula
MGTTLSIPKTEKFSEDGENDNLRYGLSSMQGWRATMEDAHAAHLDVDSSTSFFGVYDGHGGKAVAKFCAKHLHQQVLKSEEYIAGDVGTSLTKAFLRMDEMMRGQRGWRELAVLGDKVKGFNGIIEGLIRSPRSNDNKDQSDDWAFEKGPHSDFDGPNSGSTACVAIIRNNLLFVANAGDSRCVISRNGQAYNLSRDHKPELVIEKERIYKAGGFIHAGRINGSLNLARAIGDVDFKNNRFLSAEKQVVTANPDINIVDLHDEDEFIVIACDGIWDCLSSQQLVDFVRQELLLETKLSEVCERVLDRCLAPSLAVGDGCDNMTMILVQFKKPLQTSAPAQEQSSSNEQDASEPTLENS

SEQ ID NO: 1406 - DNA, 1023 bp, Aspergillus oryzae
  CDS (1)..(1023)
atgggtcagactttgtcagaaccagtagtcgataagacttcgtccgagggcgaagatgattgctgcatctacggcgtctcagccatgcagggctggcgaatcagcatggaggatgctcatgctgccgtcctagacctccacgcgaaatatacgagtccagaagagacatcaacggatcctgccaaacgcctagctttctttggagtatacgatggacacggcggagacaaagtcgcactgtttgctggagaaaatgtgcacaagatcgtcgcaaaacaggattcattcgcaaagggcgacattgaacaggccctgaaagatggtttcttagctaccgatcgggctatcttagaagacccgaaatacgaagaggaagtctccggctgcacagcagctgtcagtgtaatctcaaaacataagatctgggtggccaatgcgggtgattctcgctctgtgcttggagtcaagggccgcgcaaagcctctctcttttgatcataaaccccagaatgaaggcgagaaggctcgtatcagtgccgcaggtggctttgtcgatttcggccgtgtgaacggaaacctggccctgtcacgagccattggtgatttcgagttcaagaaaagccccgagcttgcgcccgaacagcagatcgtgaccgcttatccggatgtgacagtccatgagctcagtgatgacgatgaattccttgtcatagcctgtgacggtatctgggactgccagtcttcccaggctgtggttgagtttgtccgccgcggtatcgccgcgaagcaagaactttaccggatttgtgagaacatgatggacaactgcttggcttcaaacagcgaaactggtggggttggatgtgacaacatgactatgataatcattggcctcctgaacggcaggactaaagaggagtggtataatcagatagctgagcgggtggccaaaggcgacggcccttgcgctcctcccgaatacggcaagtctcttgaggattctacggcctccaacccctactga

SEQ ID NO: 1407 - protein, 340 aa, Aspergillus oryzae
MGQTLSEPVVDKTSSEGEDDCCIYGVSAMQGWRISMEDAHAAVLDLHAKYTSPEETSTDPAKRLAFFGVYDGHGGDKVALFAGENVHKIVAKQDSFAKGDIEQALKDGFLATDRAILEDPKYEEEVSGCTAAVSVISKHKIWVANAGDSRSVLGVKGRAKPLSFDHKPQNEGEKARISAAGGFVDFGRVNGNLALSRAIGDFEFKKSPELAPEQQIVTAYPDVTVHELSDDDEFLVIACDGIWDCQSSQAVVEFVRRGIAAKQELYRICENMMDNCLASNSETGGVGCDNMTMIIIGLLNGRTKEEWYNQIAERVAKGDGPCAPPEYGKSLEDSTASNPY

SEQ ID NO: 1408 - DNA, 1089 bp, Oryza sativa subsp; identical to SEQ ID NO: 932
  CDS (1)..(1089)

SEQ ID NO: 1409 - protein, 362 aa, Oryza sativa subsp; identical to SEQ ID NO: 933

SEQ ID NO: 1410 - DNA, 1152 bp, Arabidopsis thaliana; identical to SEQ ID NO: 934
  CDS (1)..(1152)

SEQ ID NO: 1411 - protein, 383 aa, Arabidopsis thaliana; identical to SEQ ID NO: 935

SEQ ID NO: 1412 - DNA, 873 bp, Zea mays
  CDS (1)..(873)
atggggctcgccggggacgggtcggcggacaccgccaacctcagtaatagtgaaaatggtcggttcagttatggagttgcaagttctcccgggaaaagagcatcgatggaggacttctatgaggcaaggatagacgacgttgacggagagaaagttggaatgtttggtgtgtatgatggtcatggaggagtcagagcagctgagtacgttaagcagcatcttttcagcaatttaatcaaacacccaaagttcatcactgataccaaggccgctattgctgaaacttacaaccgcacagattcagaatttctgaaagctgatagcactcaaactcgagatgctggctcaactgcctcaacagctattattgtaggtgatcgtttgcttgttgcaaatgttggagattctagagctgttatttctaaaggaggacagggtattgcggtttcaagggatcacaaacctgatcagacagatgagaggcaaagaattgaggatgcagggggctttgttatgtgggctgggacatggagagtgggtggtgttctcgctgtctctcgagcatttggtgataaactcttgaagccgtatgttgttgctgaccctgaaatcaaggaggaggtggtcgacagctccctcgaattcctcatccttgctagcgacggactctgggatgttgtcactaatgaggaagctgttgccatggtcaagcctatccaggacccccaggaagcagcaaacaagcttctcgaagaagcttcccgaaggggaagctccgataacatcacagttatcatcgtccgcttcatagacggaactaccggtgagaaatcaggcgacgacaaagagaccaccaacgaccaacactcctag

SEQ ID NO: 1413 - protein, 290 aa, Zea mays
MGLAGDGSADTANLSNSENGRFSYGVASSPGKRASMEDFYEARIDDVDGEKVGMFGVYDGHGGVRAAEYVKQHLFSNLIKHPKFITDTKAAIAETYNRTDSEFLKADSTQTRDAGSTASTAIIVGDRLLVANVGDSRAVISKGGQGIAVSRDHKPDQTDERQRIEDAGGFVMWAGTWRVGGVLAVSRAFGDKLLKPYVVADPEIKEEVVDSSLEFLILASDGLWDVVTNEEAVAMVKPIQDPQEAANKLLEEASRRGSSDNITVIIVRFIDGTTGEKSGDDKETTNDQHS

SEQ ID NO: 1414 - DNA, 1824 bp, Trichoderma reesei
  CDS (237)..(1553)
gacgagcctcgatccgcctcgacgccgctggtttcccccttctttctccccccttcagccacgtcctcgtgtcctataacctttcgcagcctacggtcccgcctccagaggtctcgcgtccctgagtaccaaacgatagaaacaagactgctatctttgtcgtgctgcctcctcccctcctcgacgcttttcctccccctcgatcgctttcccggccctcgtgagacgtcgcagccatgggccaaaccctctcggagcccgttgtcgaaaagacttccgaaaagggcgaggatgacagactcatctacggcgtgtccgccatgcagggctggcgcatcagcatggaggacgctcacacggctgagctgaatctccccccacctgacaacgacaccaagacgcaccccgacaggctgtcctttttcggagtcttcgacggacacggaggagacaaagtagcgttattcgcaggcgagaacattcacaacattgttttcaagcaggagagcttcaaatccggtgattacgctcagggtctcaaggacggctttctcgctacggatcgggctattctcaacgaccccaaatacgaagaggaagtctctggctgcactgcctgcgtcaccctgattgccggaaacaaactatatgtcgccaacgccggtgattctcgaagcgtgctgggcatcaagggacgggccaaacccctatccaacgaccacaagcctcagcttgaaacggagaagaaccgaatcacagccgctggcggtttcgtcgactttggccgagtcaacggcaatctggctctgtcgcgtgccattggcgactttgaattcaagaagagcgccgagctgtcccccgaaaaccagatcgttaccgcctttcccgatgtcgaggtgcacgagcttacagaggaggacgagttcctggtgattgcctgtgacggtatctgggattgccaatcttcccaggctgttgttgagtttgtgcgacgaggcatcgccgccaagcaggaccttgacaagatctgcgagaacatgatggacaactgccttgcgtccaactcagaaacgggtggcgtcggctgcgacaacatgaccatggtcatcatcggcttcctgcacggcaagaccaaggaggagtggtatgacgaaattgccaagagagtggccaacggagacggcccctgtgcccccccggaatatgccgagttccgcggtcccggcgttcaccacaactacgaagacagcgacagcggctacgacgtcgacgccgacagcggcggcaagtttagccttgccggatcccggggtcgcatcatcttcctgggcgacggcaccgaagtcctgacgggctccgacgacacggagatgtttgacaatgctgacgaggacaaggaccttgcgagccaggtgcccaagagctccggcaagaccgatgcaaaggaggagacagaggccaagccggcaccagaggcggagtcgtccaaacccgcggatgggtcggagaagaagcaagacgaaaagacacccgaggagagtaagaaggattaggtggtcctcttgaattctttgggctcgtctccttgaagccccgcgctggtgttgttgatggcgtgtgtttgtgtgtacgtgtggcataattcttttttcttcccatcaccgctactcaaaaaaccccaggcgtgagggcatttttaaatcgcatagggagtgggggagagacgggagaggctctggaacgaaacattctgggagacaaggcagagagcgtaggggcggtttagacattgagtgttgctcgttaaaaaaaaaaaaaaaaaaa

SEQ ID NO: 1415 - protein, 438 aa, Trichoderma reesei; identical to SEQ ID NO: 943

SEQ ID NO: 1416 - DNA, 1107 bp, Zea mays; identical to SEQ ID NO: 950
  CDS (1)..(1101)

SEQ ID NO: 1417 - protein, 366 aa, Zea mays; identical to SEQ ID NO: 951

SEQ ID NO: 1418 - DNA, 1113 bp, Schizosaccharomyces pombe; identical to SEQ ID NO: 962
  CDS (1)..(1113)

SEQ ID NO: 1419 - protein, 370 aa, Schizosaccharomyces pombe; identical to SEQ ID NO: 963

SEQ ID NO: 1420 - DNA, 1395 bp, Saccharomyces cerevisiae
  CDS (1)..(1395)
atgggacaaattctatcaaacccggtaattgataaagagagccactccggtgctgactccttgaccgcgtttggactgtgtgcaatgcaagggtggcggatgtcaatggaggattcacacattctagagcctaatgttttgacaaagtccgataaggaccatattgcattttacggtatattcgatggtcatggtggcgctaaagtagcagaatactgtggtaataaaatagtggagatcctgcaagagcagaaatcgttccatgaaggaaatttaccaagggctttgattgatactttcataaacacagacgtgaaactgttacaagatcctgtgatgaaagaagaccatagcggatgtacggctacatccatattagtatcaaagtcccagaacttgttagtatgtggtaacgctggtgacagtagaaccgtactcgccaccgacgggaacgcaaaggcattatcatacgatcacaagcccactctagcaagcgaaaaatcacgtattgtggcagctgatggcttcgtagaaatggatagggtcaacggtaacttggcgctctctcgtgccattggtgattttgagttcaaatccaaccccaaattgggccccgaggagcaaatagtgacatgtgttccggacattctcgagcattctctagattacgatagggacgagtttgtaatcttagcctgtgatggtatctgggattgtttgacttcccaagattgtgtggacttggttcatctcggccttcgcgaaggcaagacattgaatgaaatttcttcgcggatcatcgatgtctgttgtgctcccaccacagaggggacgggtattggatgcgacaacatgagtatagtggttgtcgcgctgctgaaagaaggtgaagacgtcgctcaatggagcgaccgtatgaagtccaaggcccaccgcacatcagtgcgttcttttgcagacaagagaagaagggtgtttagttactacgatttttccaaatgtaacgacgaacaggtgttcgctatcactacgaagaaacctcaggacaaattcactcgcgaccacgaagccgctgtggcctcggtgactgccgccgataacgacgatccaatggacatagacgacacggacgctgacacagatgcagaaaatcttgacccttccagccaatccaagagcaagacctccggccccattgatctagcatccttggaggcgctacttggtgctacaggaggagtgaagacagacagcaacgggaacaaagtcacctacactcttccccagtctgccttggcccaactgctccaaaccatgggccatgacccggcttcctcccatcccgagaatgacagtaacactgaccacaaggccggccgttcccacttgcaatga

SEQ ID NO: 1421 - protein, 464 aa, Saccharomyces cerevisiae
MGQILSNPVIDKESHSGADSLTAFGLCAMQGWRMSMEDSHILEPNVLTKSDKDHIAFYGIFDGHGGAKVAEYCGNKIVEILQEQKSFHEGNLPRALIDTFINTDVKLLQDPVMKEDHSGCTATSILVSKSQNLLVCGNAGDSRTVLATDGNAKALSYDHKPTLASEKSRIVAADGFVEMDRVNGNLALSRAIGDFEFKSNPKLGPEEQIVTCVPDILEHSLDYDRDEFVILACDGIWDCLTSQDCVDLVHLGLREGKTLNEISSRIIDVCCAPTTEGTGIGCDNMSIVVVALLKEGEDVAQWSDRMKSKAHRTSVRSFADKRRRVFSYYDFSKCNDEQVFAITTKKPQDKFTRDHEAAVASVTAADNDDPMDIDDTDADTDAENLDPSSQSKSKTSGPIDLASLEALLGATGGVKTDSNGNKVTYTLPQSALAQLLQTMGHDPASSHPENDSNTDHKAGRSHLQ

SEQ ID NO: 1422 - DNA, 1245 bp, Schizosaccharomyces pombe
  CDS (1)..(1245)
atgggtcagacattatcagagccagtcaccgagaagcactcggtgaacgggagcaatgagttcgtcctttatggactttcaagcatgcaaggatggcgtatctcaatggaagatgctcattctgctatactttcaatggagtgctctgcagtaaaagacccggtcgacttttttgcggtttatgacggccacggtggagacaaagtcgcgaaatggtgtggaagcaatcttcctcagattcttgaaaagaatcctgattttcagaaaggcgattttgttaatgctttgaaatcttcatttttaaatgctgataaagctattttggatgatgatcaatttcatacggatccatcaggttgcacggccactgttgttcttcgtgttggaaataaactttattgtgctaatgccggtgactcaagaactgtccttggcagtaagggaattgcaaaacctctatcagcagaccataagccttcaaatgaagccgaaaaagcccgtatttgtgcggctggtggctttgtagactttggccgtgtaaatggaaatttggctttgtcaagagctatcggtgattttgagttcaaaaacagtaatttagaaccagaaaaacaaatagttactgccttaccggatgttgttgtacatgagattactgacgatgatgaattcgtcgtactcgcttgtgatggtatttgggattgcaagacttcgcagcaagtgatcgagtttgttagacgtggcatagttgctggaacctctcttgagaagattgctgaaaatttaatggataactgcatagccagtgacaccgaaactaccggccttggttgtgacaacatgactgtttgtatagttgccttattgcaagaaaacgataaatcagcatggtataagaagattgcagatagagttgccgctaacgacggaccctgcgctcctcctgagtatgccgaaaatcatggcccaggatggcgtagtggcgataacaataagaaagttattgtcccacctaattttcatcaagtaaagttaaatggatctgatggatatgacaaagatgcgaatgaaaattctaaggaagatgattccaccaacggatcccttgcagctgggttcagatggaaagaacactttttccctcataaagccgaggaggaaaattcttcaagtgaaaccgatatcgtaaattctaacaaagatgttgcggatgatcataaggaggctgtgtctgcagcagattga

SEQ ID NO: 1423 - protein, 414 aa, Schizosaccharomyces pombe
MGQTLSEPVTEKHSVNGSNEFVLYGLSSMQGWRISMEDAHSAILSMECSAVKDPVDFFAVYDGHGGDKVAKWCGSNLPQILEKNPDFQKGDFVNALKSSFLNADKAILDDDQFHTDPSGCTATVVLRVGNKLYCANAGDSRTVLGSKGIAKPLSADHKPSNEAEKARICAAGGFVDFGRVNGNLALSRAIGDFEFKNSNLEPEKQIVTALPDVVVHEITDDDEFVVLACDGIWDCKTSQQVIEFVRRGIVAGTSLEKIAENLMDNCIASDTETTGLGCDNMTVCIVALLQENDKSAWYKKIADRVAANDGPCAPPEYAENHGPGWRSGDNNKKVIVPPNFHQVKLNGSDGYDKDANENSKEDDSTNGSLAAGFRWKEHFFPHKAEEENSSSETDIVNSNKDVADDHKEAVSAAD

SEQ ID NO: 1424 - DNA, 1407 bp, Saccharomyces cerevisiae
  CDS (1)..(1407)
atgggtcaaatattgtccaatccaattatcgacaaagagcatcattctggtacggactgtttgacagcgtttggactatgtgccatgcaaggctggcgtatgtccatggaagatgcccatattgttgagccgaaccttttggctgagtctgacgaggaacatctcgcattttatggtatatttgacggtcatggtggttcttctgtagcggagttttgtggctctaaaatgatatctatactgaaaaaacaggagagcttcaagagcggtatgttagagcagtgcttaatagatacctttttagctacagatgttgagttgttgaaagatgaaaaattaaaagatgaccatagtggttgtacagcaactgtgatattggtatctcaattgaaaaagctactaatttgcgccaattccggtgatagtagaacagttctatctactggtggtaatagtaaagcaatgtcatttgatcataagcccacattgttaagtgaaaaatctcgtattgtagctgctgatggttttgttgagatggaccgtgttaatggaaatttagcgttatcaagagccataggtgattttgaattcaaatctaacacaaaattgggacctcatgagcaagtcgttacatgtgttcctgatatcatttgtcacaatttgaattatgatgaggatgaatttgttattttagcatgtgatggtatttgggattgtttaacttctcaagagtgtgttgacttggttcactacggtataagtcaaggtaatatgacgttgagcgacatttcatctagaatcgtagatgtttgttgttcacccacaactgaaggctcaggaattggctgtgataatatgagtatttccattgttgctttactaaaggaaaatgaatctgagtcacaatggtttgagcgtatgagatcaaaaaattacaatatccaaacgtcttttgtccaaagaaggaaaagtatttttgatttccatgatttttcggatgatgataacgaagtgttcgcaataaccaccaaaaaattacaagaccgcttgaatcgtagtaaagataatgacgacatggaaattgatgatcttgataccgaattggacagcagtgctactccctcaaagttatcaggtgaggatagaactggccctattgacttgttttcgttggaggctctattagaagccgggattcaaataaggcagaggcccagctccgacagtgacggcaacacttcttatttccatggtgcttctttatcagatatgttggcatctttaagcaatgcggctgcaggagaaacagaacctaatgatgctgatgataacgatgataacgacggcgaagaaaacggcaagaatgaaaatgcgaagaagggttccaagattgaagaaattgaataa

SEQ ID NO: 1425 - protein, 468 aa, Saccharomyces cerevisiae
MGQILSNPIIDKEHHSGTDCLTAFGLCAMQGWRMSMEDAHIVEPNLLAESDEEHLAFYGIFDGHGGSSVAEFCGSKMISILKKQESFKSGMLEQCLIDTFLATDVELLKDEKLKDDHSGCTATVILVSQLKKLLICANSGDSRTVLSTGGNSKAMSFDHKPTLLSEKSRIVAADGFVEMDRVNGNLALSRAIGDFEFKSNTKLGPHEQVVTCVPDIICHNLNYDEDEFVILACDGIWDCLTSQECVDLVHYGISQGNMTLSDISSRIVDVCCSPTTEGSGIGCDNMSISIVALLKENESESQWFERMRSKNYNIQTSFVQRRKSIFDFHDFSDDDNEVFAITTKKLQDRLNRSKDNDDMEIDDLDTELDSSATPSKLSGEDRTGPIDLFSLEALLEAGIQIRQRPSSDSDGNTSYFHGASLSDMLASLSNAAAGETEPNDADDNDDNDGEENGKNENAKKGSKIEEIE

SEQ ID NO: 1426 - DNA, 1182 bp, Saccharomyces cerevisiae
  CDS (1)..(1182)
atgggtcaattgctttcccatccgttgacggagaagaccatagaatataatgaatataaaaacaaccaggcgtcaactggtattgttccacgattttacaattgtgtggggtccatgcaaggctatcgtttgactcaggaagatgcacatctaattagaaatgaaaactctgttgtgtacgtacgatttttcaacccattcatagacaaatacgaaaccctgtcattgaacgtcttcgcagtattcgatggtcatggtggagatgattgttcgaaatttctaagcggcggccgccaccatcgcgatggtaacggcagtagcaacggtaatggtgaacccaacgctggcctgatcaaatggattgcgtatagtttcgaaaaccaccattacacatctacaactaataacgactcatcaaaatttaaaagatccttcaatacgttggaaggacttgtttctcaaatttttaaagacgctttcatattgcaagatgaagagttatatcgacattttgccaacagttcgtgtggatctacagcagtagtagcatgcatcataaacgaggaatcactgtatgtggctaactgtggtgattcgcgatgtattctttcctccaaatcgaatggcataaagacgatgtctttcgatcataagccacaacacataggagaattgatacgtataaacgataatggtggtactgtctctcttggaagagtgggtggagtactggctctcagtagggcatttagtgatttccaattcaagagaggtgtcacttatccacatagaaggacaaaactaacaaatattacccagaatttaacttatggaaccccaccacaagaagcacaagttaccgttgaaccagacgtattgatgcacaagattgactattctaaagatgagtttttagtactggcttgcgacggtatatgggatatttataacaacaaacagttaattcactttataaagtatcacctggtatcagggacgaagttggatacaataataacaaaattgttggaccacgggatagcgcaggcaaatagcaatactggtgtcggctttgacaatatgactgccatcattgtagtgctaaaccggaaaggcgaaacattgcaagactggtttaataaaatgaagacccgtttggaaagagaaaggggcctagtgtaa

SEQ ID NO: 1427 - protein, 393 aa, Saccharomyces cerevisiae
MGQLLSHPLTEKTIEYNEYKNNQASTGIVPRFYNCVGSMQGYRLTQEDAHLIRNENSVVYVRFFNPFIDKYETLSLNVFAVFDGHGGDDCSKFLSGGRHHRDGNGSSNGNGEPNAGLIKWIAYSFENHHYTSTTNNDSSKFKRSFNTLEGLVSQIFKDAFILQDEELYRHFANSSCGSTAVVACIINEESLYVANCGDSRCILSSKSNGIKTMSFDHKPQHIGELIRINDNGGTVSLGRVGGVLALSRAFSDFQFKRGVTYPHRRTKLTNITQNLTYGTPPQEAQVTVEPDVLMHKIDYSKDEFLVLACDGIWDIYNNKQLIHFIKYHLVSGTKLDTIITKLLDHGIAQANSNTGVGFDNMTAIIVVLNRKGETLQDWFNKMKTRLERERGLV

SEQ ID NO: 1428 - DNA, 1566 bp, Oryza sativa
  CDS (1)..(1566)
atgggtaacagccttcctgtagaatcgaagttcacttttgaagaagagaatgacagaattaagtatgttgtgtcgtctatgcaaggatggggtgagaaaatggaagatgctcatgcagctattctaaatcttgatgatgccacgtccacgtctttctttggtgtttatgatggccatggaggagctgaagtagcattgtattgcgcaaaacaatttcacattgagctatgcaatcatgaagactatcacaacgatctgattaatgcactggacaatgtgtttttaagcatggatgagaacctgcaacagtccgatgcttggagagagttagttattcctcatgataatggatgtatgtattttctcaaggctggtgtctgtgctaagcctttcccacaggcgacatatactgggccagcgtatgaagggagcacagcatgtgtggttgtcatcagaggtaaccaaatgattgttggacatgttggtgattctcgttgcgtactctcaagacagggtggcctggctattgatttatccttcgatcacaaaccatgcacaagaactgagtctgaaagagagagagttcaaaatgcaggagggagatctcttggacttaggtgtgaacaagtaatggggaattatgtagtcaaggaacaatgggtcctcggtgattttgggggaggtgtaacaatctcaagatcaattggtgactttgctttcaagaagaacaaagatttagatcgtgaaaaacaaatgctggtatgtgatccggacatcctcgctgatgacataactgatgacatggagtttcttgttattgcaagtcaaggtctctggtcttgcgtggacagtgcggacgtggtttcttacatacatgaccgtttatcggtggagggtgcagagctgcgtgtcatctgtgaggaggttgttgagttcggcttggcatcgggcgagaacactaccgtcatcctggttcagttcaagcccggcgccttccagtaccagctggtggatcccgctggatttggcactgccgtctctaacattgccagcaccagtgctgcgccggctggtgccagcgacacaagcgacgagggcgtcatggccgactcctgcgccacggctgacaccagcggcagtgccagggctgagagcggcgagctcgtccccactcccagcgccaacaacaccgtcacggatgaggtcgatcccactggcactgtcgcagccgacgacaaggtcgatcccaactccagcgccaatgccgacgctgacgacggcgctcccaaaccttctctcggcgcagtcatcgagtccgacgaggtcgccctcgatgccactgcaacgggccatcaggtggccgtgcgtcagcaggaggaattcgacccaaagaagtgttggatctgcggaaaaggctacaagaagattcttcttgaaccttcttcggccagggcgagaaacccacttctggctcacgctaagacgtgtgagtcggaagacaagaaggcgaagaagaagataaccaagtatatgatgaaagccaacgtcaccaaccagtatcattga

SEQ ID NO: 1429 - protein, 521 aa, Oryza sativa
MGNSLPVESKFTFEEENDRIKYVVSSMQGWGEKMEDAHAAILNLDDATSTSFFGVYDGHGGAEVALYCAKQFHIELCNHEDYHNDLINALDNVFLSMDENLQQSDAWRELVIPHDNGCMYFLKAGVCAKPFPQATYTGPAYEGSTACVVVIRGNQMIVGHVGDSRCVLSRQGGLAIDLSFDHKPCTRTESERERVQNAGGRSLGLRCEQVMGNYVVKEQWVLGDFGGGVTISRSIGDFAFKKNKDLDREKQMLVCDPDILADDITDDMEFLVIASQGLWSCVDSADVVSYIHDRLSVEGAELRVICEEVVEFGLASGENTTVILVQFKPGAFQYQLVDPAGFGTAVSNIASTSAAPAGASDTSDEGVMADSCATADTSGSARAESGELVPTPSANNTVTDEVDPTGTVAADDKVDPNSSANADADDGAPKPSLGAVIESDEVALDATATGHQVAVRQQEEFDPKKCWICGKGYKKILLEPSSARARNPLLAHAKTCESEDKKAKKKITKYMMKANVTNQYH

SEQ ID NO: 1430 - DNA, 1023 bp, Oryza sativa
  CDS (1)..(1023)
atgggtgcatctcccagccgtccactagaacaatcaccatcatctagtgaaggagagaatcacagagttaagtatgcctcatatactacgcaaggatttcgcccgcacatggaagatgcacttgcagttgaactagatctagatgcgaccacgtcattctttggtgtttatgatggccatggaggagctgaagtagcaatgtactgtgcaaaacgatttcatactatgcttcttgaggatgtagactatatcaacaatctgcccaatgcaattacgtctgtatgcttcagacttgatgatgatttgcaacgatcaaatgaatggagggagtcacttaatccctgtgctaatcgcaattgtctcactaacatttgtgctaatctccaccatttcacagaggattacgttccgccgtcatatgaaggtagcacagcatgtgtggtaatcattagaggaaatcagatcattgttgggaatgttggtgattctcgttgcgtgctttcaaagaatggtcaggcaattagtttatcctttgatcacaaaccacaccatgaagctgaacgcgaaagaattcaaagagcaggaggacatgtatttttgcaaagaattctaggaatgttagccacgtccagagcgattggtgattttgcatataagcagaacagaaatatgcctccttcacagcaaatggtgacatgtgttcctgacattcgcgtcgaaaacataactgatgatactgaatttcttgtcatagcaagtgatggtgtctgggatggcatgagaaataacaatgttgttcagtttgtgcgtcaggaattacgtccgggggaggaaaatctacgcgagacttgtgagaagcttgttggtcattgcttgcactcaaatgacaacgcgactgccatactggttaagttcaagcccattgaggaggaccccgatgaagttgccagtgccagggatgaacatcaacacaaccccgagggcggtgatgaaaaacttgacatcaacaatgacaatgactaa

SEQ ID NO: 1431 - protein, 340 aa, Oryza sativa
MGASPSRPLEQSPSSSEGENHRVKYASYTTQGFRPHMEDALAVELDLDATTSFFGVYDGHGGAEVAMYCAKRFHTMLLEDVDYINNLPNAITSVCFRLDDDLQRSNEWRESLNPCANRNCLTNICANLHHFTEDYVPPSYEGSTACVVIIRGNQIIVGNVGDSRCVLSKNGQAISLSFDHKPHHEAERERIQRAGGHVFLQRILGMLATSRAIGDFAYKQNRNMPPSQQMVTCVPDIRVENITDDTEFLVIASDGVWDGMRNNNVVQFVRQELRPGEENLRETCEKLVGHCLHSNDNATAILVKFKPIEEDPDEVASARDEHQHNPEGGDEKLDINNDND

SEQ ID NO: 1432 - DNA, 1059 bp, Oryza sativa
  CDS (1)..(1059)
atggctcaacctcaacgtcccctccaagttcctgacataacaaagtctactcattctggagggaacactgtacttgcttatgcttcatcagctatgcaaggataccgtagcaccatggaagatgcccatgcgactattgaaaatcttgatgctctcactaacacgtcattctttggtgtttatgatggccatggaggttctgctgtagcaaggtattgcgcaaatcacttgcacaataaggttttggagcaagaagattttagcagtaaccttgctaatgcattgaggcaatcctttttcagaatggatgagatgttgagaaatcaggcggcaagcaaggaattaactgagtatggtagtggcaacgagtattggagaacagctgggcggtcttggctcagatgtgctccttgtgtgctgggacctgtctattgtggaccattagcagaaggatgtacagcatgtgtggttctcattagaaatacgcagatcgttgttggaaatgctggtgatgctcgttgtgtaatctcaaggaatggtcaggcaatcgctttatccaatgatcacaaaccaaattttccggaggaaactcagagaatagtagctgcaggaggttccgtatctttttctaggggttcccaccgtgttaataatggaattgcagtatcaagagcaatcggggatttatcttacaagaacaacaaaaagttgcgtcctgaacaacaattgctgacttgttctcctgaaattcgagctgaccaattaactgatgataccgagtttcttgttatagcatgtgatggagtctgggatgtcttggcaaaccaggctgtggttgattttgtacgccttcacttaaacaatggggtggagctgtcggtaatctgcgagagccttcttcaggaggccattacacgagacccaccatcgacggacaacatgagcgtcatactggttcggttcctgcacccagagggcaacaggggggcgagggcggctacttccagcaccagtaccggcaccgtccccagccgccacagcaaaagcatatcgctttga

SEQ ID NO: 1433 - protein, 352 aa, Oryza sativa
MAQPQRPLQVPDITKSTHSGGNTVLAYASSAMQGYRSTMEDAHATIENLDALTNTSFFGVYDGHGGSAVARYCANHLHNKVLEQEDFSSNLANALRQSFFRMDEMLRNQAASKELTEYGSGNEYWRTAGRSWLRCAPCVLGPVYCGPLAEGCTACVVLIRNTQIVVGNAGDARCVISRNGQAIALSNDHKPNFPEETQRIVAAGGSVSFSRGSHRVNNGIAVSRAIGDLSYKNNKKLRPEQQLLTCSPEIRADQLTDDTEFLVIACDGVWDVLANQAVVDFVRLHLNNGVELSVICESLLQEAITRDPPSTDNMSVILVRFLHPEGNRGARAATSSTSTGTVPSRHSKSISL

SEQ ID NO: 1434 - DNA, 828 bp, Oryza sativa
  CDS (1)..(828)
atgggagtttaccttagtacccccaaaaccgagaagctatctgaagatggcgaaaatgataagcttaaatttggactctcatctatgcaaggatggcgtgcaactatggaggatgctcattcagctttgctagatatcgataatgacacatcattctttggtgttttcgatggacatggaggaagagtggttgctaaattctgtgcaaaatatctgcacagagaagttctcagaagtgaggcctattcagcaggtgacctgggcaatgcagcccataaagctttctttagaatggatgagatgatgcgaggtcaaagaggctggcgagaactacaagcacttggagataagataaaccagattagtggcatgatagaaggcttgatctggtctccaagaggcagtgattcaaatgatcaacacgatgattgggcttttgaagaggggccacactctgactttgctgggccaacctgtgggagcacagcttgtgttgcaatagtaagaaatagccaacttgttgtcgcaaatgctggtgattcccgctgtgttatctcaaggaatggtcaggcatacaatttatcaagagaccacaaaccagagcttgaagcagagagagaaagaatactaaaagcaggagggtacatacagatgggacgagtaaatggaactataaacttgtcaagggcaattggtgacattgaatttaaacagaacaagttcttgtctcctgataagcaaatgttaactgcaaaccctgacatcaacacagtggagctttgtgatgatgatgactttcttgttttagcatgtgatggcatctggtaa

SEQ ID NO: 1435 - protein, 275 aa, Oryza sativa
MGVYLSTPKTEKLSEDGENDKLKFGLSSMQGWRATMEDAHSALLDIDNDTSFFGVFDGHGGRVVAKFCAKYLHREVLRSEAYSAGDLGNAAHKAFFRMDEMMRGQRGWRELQALGDKINQISGMIEGLIWSPRGSDSNDQHDDWAFEEGPHSDFAGPTCGSTACVAIVRNSQLVVANAGDSRCVISRNGQAYNLSRDHKPELEAERERILKAGGYIQMGRVNGTINLSRAIGDIEFKQNKFLSPDKQMLTANPDINTVELCDDDDFLVLACDGIW

SEQ ID NO: 1436 - DNA, 1086 bp, Oryza sativa; identical to SEQ ID NO: 966
  CDS (1)..(1086)

SEQ ID NO: 1437 - protein, 361 aa, Oryza sativa; identical to SEQ ID NO: 967

SEQ ID NO: 1438 - DNA, 1272 bp, Brassica napus
  CDS (1)..(1272)
atgggaggttgtgtgtccaagagcaatgaagagactatctatcgtccgcgtctcgggatgggatgctgtgggagcaaaatggggaggagaacgctctcaggccgcatcgtttcacttcatgacttggtctctattcctaataggatcaccagcagcggaaagagcaagagttcttgcgttttcactcaacagggacgcaagggagttaatcaggactccatgatcgtctggcaagattttatgtcgaaagatatgacattctgcggtgtttttgatgggcacggtcctaacggtcaccttgtttctcgtaaagtgagagagtcattgcctgtaaggttgctctctttcatgcactcgattcagtctaagcaaaacggatccacaagcaaatctgatagccaagaagctagtgaggaggataaactgaagctcctgtgggaagaagctttcttgaaatcattcaatgctatggataaggaacttcgatcacatcctaatgtagaatgcttctgcagcggcagcactgccgttacagtcattaagcaggggtcacatctgttcatgggaaacattggggactctcgggcgatacttggatccaaagacagcaatgattcaatggttgcagttcagctaacagttgacttgaagcctgacttaccaagggaagaagagaggatcaagcagtgtaaaggtcgtgtgtttgcgctcgaagacgagccagaggtgccacgagtctggctaccatttgataacgctcctggactagccatggctagggcgtttggtgatttctgtgtgaaggactacggtgtaatatcaatacccgacttctctcaccgtcttcttactgatagagatcagttcattgtcttggcatcagatggagtatgggatgtgctaagcaacgaagaagtggttgaagtcgtggcgtcagcttcaagcagagcatcagcagctaggctagtggtggattcagcttcacgcgaatggaaacttaagtacccgacttcgaaaatggacgattgtgcagttgtgtgtttgtttcttgacgggaagatggactcagagtcgtcagattacgaagaacaaagatcctcttcagtagaatcagatgaaagccagagaggagagccgtgtcttcagagaaacgctacggtcaggtcatcatcagtagataacaacagatgcggtaatgtgaatgcagaggagaaagggacggaaggagaacagaactcacttgttcagctccccagattctctggagactaa

SEQ ID NO: 1439 - protein, 423 aa, Brassica napus
MGGCVSKSNEETIYRPRLGMGCCGSKMGRRTLSGRIVSLHDLVSIPNRITSSGKSKSSCVFTQQGRKGVNQDSMIVWQDFMSKDMTFCGVFDGHGPNGHLVSRKVRESLPVRLLSFMHSIQSKQNGSTSKSDSQEASEEDKLKLLWEEAFLKSFNAMDKELRSHPNVECFCSGSTAVTVIKQGSHLFMGNIGDSRAILGSKDSNDSMVAVQLTVDLKPDLPREEERIKQCKGRVFALEDEPEVPRVWLPFDNAPGLAMARAFGDFCVKDYGVISIPDFSHRLLTDRDQFIVLASDGVWDVLSNEEVVEVVASASSRASAARLVVDSASREWKLKYPTSKMDDCAVVCLFLDGKMDSESSDYEEQRSSSVESDESQRGEPCLQRNATVRSSSVDNNRCGNVNAEEKGTEGEQNSLVQLPRFSGD

SEQ ID NO: 1440 - DNA, 1269 bp, Brassica napus; identical to SEQ ID NO: 972
  CDS (1)..(1269)

SEQ ID NO: 1441 - protein, 422 aa, Brassica napus; identical to SEQ ID NO: 973

SEQ ID NO: 1442 - DNA, 927 bp, Brassica napus
  CDS (1)..(927)
atgggatatctgaattctgttttgtcgtcttcgagccaagtccacgccggcgacggacctgttagcggcggcggcctcagtcacaacgggaagttcagctatggatatgcaagctctcctggtaaaagatcttcaatggaggacttctatgaaactagaatcgatggcgttgatggggaaatcgttggtctttttggagtctttgatggacatggaggtgcacgtgcagctgaatatgtgaagcaaaatctgttcagtaacctcatcaggcatccaaagttcatctctgacactacagccgcaatagctgatgcatacaaacaaacagactcagagtttcttaactcagaaaatagtcagaacagagatgctggttcgaccgcgtcaacagccattttagttggtgaccgtttacttgttgcaaatgtaggagactctagagctgttatatgcagaggtggaaatgctattgctgtatcccgagatcacaagcctgatcaaagtgatgagcgccaaagaattgaggatgctggaggatttgtcatgtgggctggtacatggagagttggaggagttcttgctgtttctcgtgcatttggcgataggttactgaagcagtacgttgttgctgatcccgagatacaggaggaaaaagttgatagctctctcgagtttctcattcttgcaagtgatggtctctgggacgttgtatctaacgaggaagccgtaggcatgatcaaggtaatagaagatcccgaggaaggtgcaagaagactgatgacggaagcttaccaaagaggtagtgcagacaacattacttgcgtcgttgtacgtttcttttcagaccaaacaggaggagtaggttccagcagcaacatcgatcacagtattataccagatacaaggcccggtgactcatcaacgtag

SEQ ID NO: 1443 - protein, 308 aa, Brassica napus
MGYLNSVLSSSSQVHAGDGPVSGGGLSHNGKFSYGYASSPGKRSSMEDFYETRIDGVDGEIVGLFGVFDGHGGARAAEYVKQNLFSNLIRHPKFISDTTAAIADAYKQTDSEFLNSENSQNRDAGSTASTAILVGDRLLVANVGDSRAVICRGGNAIAVSRDHKPDQSDERQRIEDAGGFVMWAGTWRVGGVLAVSRAFGDRLLKQYVVADPEIQEEKVDSSLEFLILASDGLWDVVSNEEAVGMIKVIEDPEEGARRLMTEAYQRGSADNITCVVVRFFSDQTGGVGSSSNIDHSIIPDTRPGDSST

SEQ ID NO: 1444 - DNA, 1206 bp, Brassica napus
  CDS (1)..(1206)
atggctgggatttgctgcggtgttgttggggagagcgaaccggcggttacggtcgattcgtctactcgagcttctcttagacggaggttagatctactcccttcgatcaaaatagttgctcctccgcttgagagctcacgtaagcggcagaaacgtgagacaccgtcgggaaatcaagatctggaatcgaatgtacgtagcgagaggaacgtggagaagaaggcgcgatcatcaccggttaagaattcaaatttgattccgagctccgcgacggaagcagagagctgtttcgtctccgatgcgcctaagatcggaacgacgtcggtttgcggcaggagaagagacatggaagacgccgtctcggttcaccactcgctgatccacaaaaactccgagaatctccacttctacggcgttttcgacggccacggctgctctcacgtcgcggagaagtgcagggagcgtttgcatgagattgtcaagcgggacgtcgaagctatggccgccggaggagaggacgagtggaaggagacgatggcgaagagcttccagaagatggatcgagaagtttgccagcgagactctaacaacggtgcggcgagtcggagcgtgaagagctcgtgcagatgcgaattgcagtctcctcagtgcgacgccgtcggatccaccgccgtcgtgtccgtagtcacgccggagaagatcgtcgtctctaactgcggagactctcgcgccgtgctttgccgtaacggagtggccatccctctctcttcggatcataagccggatcgacccgatgaattgattcggatccaacaagcgggcgggcgggttatctactgggacggcgccagggttctaggagttctcgctatgtcgagagctattggtgataactacttaaaaccgtatgtgattccggatccggaggtagccgtaacggatcgaaccgacgacgacgagtgcttgatcttagcgagtgatggactctgggacgttgtgacgaacgagactgcgtgcggcgttgctcgcatgtgccttcaaggtgctgctgcggcggatggaggagactctgatacggcgcacaacgcgtgttcggacgctgcgttgctgttgacgaagctggctctggcgagacagagctccgataacgttagtgtcgtggtggttgacttgaggaaaaggaggagtaataatcaagtgtcttga

SEQ ID NO: 1445 - protein, 401 aa, Brassica napus
MAGICCGVVGESEPAVTVDSSTRASLRRRLDLLPSIKIVAPPLESSRKRQKRETPSGNQDLESNVRSERNVEKKARSSPVKNSNLIPSSATEAESCFVSDAPKIGTTSVCGRRRDMEDAVSVHHSLIHKNSENLHFYGVFDGHGCSHVAEKCRERLHEIVKRDVEAMAAGGEDEWKETMAKSFQKMDREVCQRDSNNGAASRSVKSSCRCELQSPQCDAVGSTAVVSVVTPEKIVVSNCGDSRAVLCRNGVAIPLSSDHKPDRPDELIRIQQAGGRVIYWDGARVLGVLAMSRAIGDNYLKPYVIPDPEVAVTDRTDDDECLILASDGLWDVVTNETACGVARMCLQGAAAADGGDSDTAHNACSDAALLLTKLALARQSSDNVSVVVVDLRKRRSNNQVS

SEQ ID NO: 1446 - DNA, 1182 bp, Brassica napus
  CDS (1)..(1182)
atggcgcttctcaggcctcaccttcatcgcttccactccaacgctctccaccaatcagcccctcatactaaatcaaccgccgacgctggcggtggacttgtcgtctaccccacctatggtcgtcgtcgtcgtcaccgttgctccgcgattgcgatcgacgctccgtcgtctctcgccggcgtgacgcctatccgatgggggtacacgagcgttcaagggttcagggaggagatggaggacgacatcgtcatccgctcggaagcgctcgacagcttctccttcgccgcggttttcgacggccacgctggatcctcctctgttaagttcctcagggaggagctgtacaagggatgtgttgaggcgttgcaagttggatctttgttgaaaggtggtgactttggtgcgatcaagggagctttggtcaaggcctttgagagtgtggatcagagtttgcttaaatggctagaaacaaaaggtgaagaagatgagtctggttcaacggctactgtgatgctcattagaaatgatgtttcctactttgcacatattggggattcttgcgctgtcttatctcgatctggacaaatcgaggagttgactgattctcatcgtccatatggaagcagtaaggcagcggttcaggaaatgaagaggatcaaagatgcaggtggatggattgtcaatggaaggatttgtggagacatagctgtatctcgtgcttttggtgacatccggttcaagacaaagaagcatgagatgttgaagaagggtgtcgatgaaggaagatggtccgagaagtttgtctcgagaatcgagtttaaaggggacatggttgtcgcaactccggatatctaccaagtgcctcttacatcagatgtggagtttattattttagcttctgatggactgtgggactacatgaagagcaaagatgtggttagttttgtaagggaacagctccgagaacatggaaatgtccagcttgcttgtgaagctcttgcacaagttgctttggaccggagatcagaggacaacatcagcatcatcatagctgatctaggaagaacagagtggaagaagctcccggtgcagcgacaaaacatggtggttgaacttgttcaggccgcagccactgtgggtatagttacagttggcatatggatgacttctcttctctcttga

SEQ ID NO: 1447 - protein, 393 aa, Brassica napus
MALLRPHLHRFHSNALHQSAPHTKSTADAGGGLVVYPTYGRRRRHRCSAIAIDAPSSLAGVTPIRWGYTSVQGFREEMEDDIVIRSEALDSFSFAAVFDGHAGSSSVKFLREELYKGCVEALQVGSLLKGGDFGAIKGALVKAFESVDQSLLKWLETKGEEDESGSTATVMLIRNDVSYFAHIGDSCAVLSRSGQIEELTDSHRPYGSSKAAVQEMKRIKDAGGWIVNGRICGDIAVSRAFGDIRFKTKKHEMLKKGVDEGRWSEKFVSRIEFKGDMVVATPDIYQVPLTSDVEFIILASDGLWDYMKSKDVVSFVREQLREHGNVQLACEALAQVALDRRSEDNISIIIADLGRTEWKKLPVQRQNMVVELVQAAATVGIVTVGIWMTSLLS

SEQ ID NO: 1448 - DNA, 939 bp, Glycine max
  CDS (1)..(939)
atgggttatctcaattcagttttgtcatcttcaagccaggttcatgttgcagatgatgcaattgtgagcggcgggggtctaagtcacaatggaaaattcagctacgggtatgctagctctcctggcaagagatcttcaatggaagatttttatgagacaagaattgatggtgttgaaggtgaaattgttggccttttcggagtttttgatggtcatggtggtgctcgtgctgctgagtatgtcaagaaaaacctgtttagtaatttgatcagtcacccaaaattcatttctgacaccaaatcagcaataactgatgcatacaatcatactgacactgagttgctgaaatcagaaaatagccataacagagatgcaggatcaactgcttccactgctattttagttggtgaccgcttgcttgttgcaaatgttggggattccagagctgttatatgcaggggtggtaatgccattgctgtttctcgagatcacaaaccagaccaaactgatgagaggcaaaggattgaagaagcaggaggctttgttatgtgggcaggaacttggagagttggaggtgttcttgctgtttctcgtgcatttggtgatagactcctgaagcagtatgttgttgctgatccagaaattcaggaagaaaaagttgacagctcccttgagtttcttattctggccagtgacgggctatgggatgttgtctctaatgaggaagctgttgctatgataaagccaattgaggatgcagaggaggcagcaaagaggctgatgcaagaagcatatcagagaggtagtgctgacaatatcacatgtgttgttgttcgtttcttgatgaaccaaggtggatccaaagagttagtagcttatcctcataatagtagctctgcgggtaagaatccttcagtagaaggtttgtgtgatatatag

SEQ ID NO: 1449 - protein, 312 aa, Glycine max
MGYLNSVLSSSSQVHVADDAIVSGGGLSHNGKFSYGYASSPGKRSSMEDFYETRIDGVEGEIVGLFGVFDGHGGARAAEYVKKNLFSNLISHPKFISDTKSAITDAYNHTDTELLKSENSHNRDAGSTASTAILVGDRLLVANVGDSRAVICRGGNAIAVSRDHKPDQTDERQRIEEAGGFVMWAGTWRVGGVLAVSRAFGDRLLKQYVVADPEIQEEKVDSSLEFLILASDGLWDVVSNEEAVAMIKPIEDAEEAAKRLMQEAYQRGSADNITCVVVRFLMNQGGSKELVAYPHNSSSAGKNPSVEGLCDI

SEQ ID NO: 1450 - DNA, 1104 bp, Brassica napus
  CDS (1)..(1104)
atgtcgtgttccatcgccgtctgcaattctccggtgtcatctctcttctacaacaacaaagcttctatcctctcttcgccgcatgaaaccgtctctctcactgcttcttcccctaaatctctgtttcgtcttcgtttcaagaaaccaccgaccggactcgctcctgcgccgttagtcctcgggtcagactctgtttccacgcagtctcctcccggaggagttttaaagaggaaacggcccacgaggctcgatataccggtctccaccgcgtcggagatcgcggttacaacgcccaggaaggagagcagagaggtggagagggaaggagacggttactctgtttactgcaagagaggaaggagagaagctatggaggatcgcttctccgctataaccaatctcgaaggagatcgcaaacacgccatattcggagtttacgatggtcacggaggagtcaacgcgtctgagtttgcggccaagaacttagacaagaacgttttaaaagaagtggctggttgtaataagtctgacgtggcagacgcggtgaaacgcggttacttgaccacagacgcagcgtttctcaaggggaaagacgttaaaggcggttcttgctgcgtcacggctatgttcagagacgggaacctcgtggtcgccaatgctggtgactgtcgcgccgtcatgagcgcgggaggcgtcgcggaggctctttcttccgaccaccgtccctctagagatgatgagcggacaagaattgaaaccacgggcggatatgttgatacgtttcgtggtgtttggaggatacaaggatctttggctgtgtcgagagggataggtgatgctcaattcaagaaatgggtgatagcagaaccagagacgaagacgttaagaatcgatgaggagcacgagttcttgatcctggcatcggatggtctatgggacaaagtgagtaaccaagaagcagtagacattgctcgtcccttctgcttaggagatgagaagaagacattgttgttagcgtgtaagaagcttgtcgatctctccgtttcacgaggatcatcggatgatattagtgtgatgttgatccctttgcgccagttcatctag

SEQ ID NO: 1451 - protein, 367 aa, Brassica napus
MSCSIAVCNSPVSSLFYNNKASILSSPHETVSLTASSPKSLFRLRFKKPPTGLAPAPLVLGSDSVSTQSPPGGVLKRKRPTRLDIPVSTASEIAVTTPRKESREVEREGDGYSVYCKRGRREAMEDRFSAITNLEGDRKHAIFGVYDGHGGVNASEFAAKNLDKNVLKEVAGCNKSDVADAVKRGYLTTDAAFLKGKDVKGGSCCVTAMFRDGNLVVANAGDCRAVMSAGGVAEALSSDHRPSRDDERTRIETTGGYVDTFRGVWRIQGSLAVSRGIGDAQFKKWVIAEPETKTLRIDEEHEFLILASDGLWDKVSNQEAVDIARPFCLGDEKKTLLLACKKLVDLSVSRGSSDDISVMLIPLRQFI

SEQ ID NO: 1452 - DNA, 1236 bp, Brassica napus; identical to SEQ ID NO: 974
  CDS (1)..(1236)

SEQ ID NO: 1453 - protein, 411 aa, Brassica napus; identical to SEQ ID NO: 975

SEQ ID NO: 1454 - DNA, 1191 bp, Zea mays; identical to SEQ ID NO: 976
  CDS (1)..(1191)

SEQ ID NO: 1455 - protein, 396 aa, Zea mays; identical to SEQ ID NO: 977

SEQ ID NO: 1456 - DNA, 873 bp, Zea mays
  CDS (1)..(873)
atggctggcaaggaaatcctccacaaggtgaaggacaaggtgaaagatgcatttagttcatcaggaccagaaacagggaaaggcaagacaaagttatcaggcaagcgtgtcaagcatggttaccatctggtgaagggcaaatctaatcatccaatggaggattatctagtggcagagtaccggcaagttggtgaacatgatttgggattgtttgctatattcgatggtcacctgggccacactgttccagactttttgagctcccatcttttcaataacatcttgagtgagccagaattcttgagtgatccagaaactgctatccgaaacgcataccaacttacggatcagaagatattggaaaacacagcagagttgggaagaggtggctccacagctgttactgccatcttaataggaagtgacaagttcgtgaaactagttgttgcaaatgttggggattcacgggcagttattagcaagaacggtgtagcgaagcagctttcagttgaccatgaaccaaacatggagcgacaaacgatcgagcagaagggtggctttgtatcaaacctaccgggtgatgtgccacgtgttgatgggcagctggcagttgcaagggcatttggagaccggagcttgaagaagcacctcagctctgatccatatgtggtcgagcaaactatcgatgaaaatactgagtttttaattctagcaagtgatggcttgtggaaggtgatgtccaaccaggaggctgtcgacgagatcaaggattgcaaggacgcgcaggcagctgccaagcacctgacggagcaggccgtgaaccggaagagcaaagacgacatttcagttatcgtagtcaagttcatgtgctag

SEQ ID NO: 1457 - protein, 290 aa, Zea mays
MAGKEILHKVKDKVKDAFSSSGPETGKGKTKLSGKRVKHGYHLVKGKSNHPMEDYLVAEYRQVGEHDLGLFAIFDGHLGHTVPDFLSSHLFNNILSEPEFLSDPETAIRNAYQLTDQKILENTAELGRGGSTAVTAILIGSDKFVKLVVANVGDSRAVISKNGVAKQLSVDHEPNMERQTIEQKGGFVSNLPGDVPRVDGQLAVARAFGDRSLKKHLSSDPYVVEQTIDENTEFLILASDGLWKVMSNQEAVDEIKDCKDAQAAAKHLTEQAVNRKSKDDISVIVVKFMC

SEQ ID NO: 1458 - DNA, 1203 bp, Glycine max
  CDS (1)..(1203)
atggctggaatttgctgtggtgttgttggagaaggtgacactccggctccactcgagcccactcctcgcccctccaggcgccggagtttggacatcttacctttaaaatatatcgccgacatgcccatgccgccgccggaggctttacggaagcgtcccaagctcaacctcagggactgcgataacgcaattgaaaattgcgacgaatccactggacacaaggtgacgaagaaggaatccaaagtagactacgacgacgacgtcgtttcggaaactaagaacgtaactgtttcggaagttgaagaagaatctcccaagttcggcgtgacgtccgtttgcggcaggagaagagacatggaagattccgtctcggtgcggccttgcttcacccaaggcttccactacttcggcgtcttcgacggtcacggttgctctcatgttgcgactatgtgtaaggagcggctacacgagatcgtgaatgaagaaattgaaagcgcgcgcgagaatttggagtggaaactgacgatggagaacggattcgctcgcatggacgacgaggttcatcgccggagccagagcaaccagaccttcacctgcaggtgtgagctccagactcctcactgcgacgccgtcggatccaccgccgtcgtcgccgtcgtcaccccggacaaaatcgtcgtctctaactgcggcgactcccgcgccgtcctctgccgcaacggcgtcgccatccctctctcctccgatcacaagccggatcgacccgacgaattactccgagtccaatccaagggagggcgcgtgatttactgggacggtccgagagtgcttggtgtgttagcaatgtctcgagccataggtgacaattatctgaagccgtacgtgatttcagaaccggaggtgatggtgacggagcggacggaggaggacgagtgtttgatactggcgagtgatgggttgtgggatgtggtatcgaatgagaccgcatgtggggtggtgaggatgtgcctcaaggcgcagaagccgccggggtctccggggagtgacgtggcggctgacggttccgaccgtgcttgctccgatgcgtcgattctgttgaccaagttggcgctggcaaggcatagttcggataatgtgagcgtggtggtggttgatttgaggagggatcaacgacaatcatcaaactacaacgacgttaattaa

SEQ ID NO: 1459 - protein, 400 aa, Glycine max
MAGICCGVVGEGDTPAPLEPTPRPSRRRSLDILPLKYIADMPMPPPEALRKRPKLNLRDCDNAIENCDESTGHKVTKKESKVDYDDDVVSETKNVTVSEVEEESPKFGVTSVCGRRRDMEDSVSVRPCFTQGFHYFGVFDGHGCSHVATMCKERLHEIVNEEIESARENLEWKLTMENGFARMDDEVHRRSQSNQTFTCRCELQTPHCDAVGSTAVVAVVTPDKIVVSNCGDSRAVLCRNGVAIPLSSDHKPDRPDELLRVQSKGGRVIYWDGPRVLGVLAMSRAIGDNYLKPYVISEPEVMVTERTEEDECLILASDGLWDVVSNETACGVVRMCLKAQKPPGSPGSDVAADGSDRACSDASILLTKLALARHSSDNVSVVVVDLRRDQRQSSNYNDVN

SEQ ID NO: 1460 - DNA, 1059 bp, Triticum aestivum; identical to SEQ ID NO: 980
  CDS (1)..(1059)

SEQ ID NO: 1461 - protein, 352 aa, Triticum aestivum; identical to SEQ ID NO: 981

SEQ ID NO: 1462 - DNA, 1218 bp, Linum usitatissimum; identical to SEQ ID NO: 982
  CDS (1)..(1218)

SEQ ID NO: 1463 - protein, 405 aa, Linum usitatissimum; identical to SEQ ID NO: 983

SEQ ID NO: 1464 - DNA, 852 bp, Linum usitatissimum
  CDS (1)..(852)
atggagacgttttgctgtttcagtgcttcttactctcagatcgctggaggccgttcctcttctagctccggcagaggaaagaaccacgacggtctaatcaagtatggtttcagcttggtaaaagggaaagctaatcatcccatggaagattatcatgttgcgaaatttgtacggattcaagagaacgagttagggctttttgctatctatgatggccatttgggagatagtgtacctgcatacttacagaaacatctgtttcctaatatcttgaaggaggatgagttctgggcgtttccagacagatctatttcgaaagcctatgaaaggacagaccaggctatactctcccaagcttccaatctgggacgaggtggctcaacagctgttactgcaatcttgatgaacggccaaaggttattggtagctaatgttggagactcgagagcggttctatcaagaggaggtcaagcagtacaaatgagcatcgatcatgaacctagcaccgagagaagcagcatagaggataggggtggctttgtttccaacatgccaggagatgttcccagagtcaatggtcagctagcagtttctcgtgctttcggggacaaaagcctcaaatcacacctgagatcagatccagatgtccgagaaaccaacatcgacaacagtacagagtttcttatccttgcaagtgatggcctgtggaaggttatgtcgaatcaggaggcggttgatatagcgaaaaagagcagagacccacagaaagcagcaaggcagctgacaactgaggcagtctacagggagagcaaggacgatatatcatgtgttgttattagatttagggtgtga

SEQ ID NO: 1465 - protein, 283 aa, Linum usitatissimum
METFCCFSASYSQIAGGRSSSSSGRGKNHDGLIKYGFSLVKGKANHPMEDYHVAKFVRIQENELGLFAIYDGHLGDSVPAYLQKHLFPNILKEDEFWAFPDRSISKAYERTDQAILSQASNLGRGGSTAVTAILMNGQRLLVANVGDSRAVLSRGGQAVQMSIDHEPSTERSSIEDRGGFVSNMPGDVPRVNGQLAVSRAFGDKSLKSHLRSDPDVRETNIDNSTEFLILASDGLWKVMSNQEAVDIAKKSRDPQKAARQLTTEAVYRESKDDISCVVIRFRV

SEQ ID NO: 1466 - DNA, 1167 bp, Zea mays; identical to SEQ ID NO: 984
  CDS (1)..(1167)

SEQ ID NO: 1467 - protein, 388 aa, Zea mays; identical to SEQ ID NO: 985

SEQ ID NO: 1468 - DNA, 1083 bp, Zea mays; identical to SEQ ID NO: 986
  CDS (1)..(1083)

SEQ ID NO: 1469 - protein, 360 aa, Zea mays; identical to SEQ ID NO: 987

SEQ ID NO: 1470 - DNA, 1314 bp, Zea mays
  CDS (1)..(1314)
atggagatgcacgccgacgtcgatgggtccggtgtgcccctggccgtgctcctcaagcgggagctgtgcaaccagaaggtggagaggccggacatcctgttcggggaggccaacaagagcaagaaaggggaggacttgacgctcctcttgcccaggtgccaccgcaccacaggcgaaggtggcggcagtggcggcggcgagaatgcaggcgacgacgacgacgacaccatttccgtgtttgcgatttttgatggacacaatggctctttagctgccatatacacacgggagaatctaataaacaatgtgttggctgctattcctccaaatctcacaagtgaggagtggacagctgcgttgccaagggcactagttgctggttttgtaaaaacggataaagacttccaaacaaaagctgcacgttcagggaccactgtgacttttgttataatagatggatgggttgtcactgtagcatcagttggcgattcacgatgtattctagaatctgctgaaggttcagtatattttttatcagcagatcatcgcctggatgctaatgaagaggaggtggagcgtgttacagcaagtggtggtgaagttgggagaataaatattgctgggggtgctgggattggtccgctcagatgctggccaggcggattgtgtctatcaaggtcaataggtgacattgacgtcggggaatttatagttcctgtcccacatgtgaagcaagtaaagttgtccaatgctggtgggcggcttgtcattgccagtgatggtgtgtgggatgcgctgtgttttcaagaggctctgaactacatcaggggtctaccagccgaagctgctgctaatcgaattgttaaggaagctgtcacttcaaagggattaagagatgatactacttgcatagtagttgacatactacctccagaaaagttaagccccccactaaagcgacctggaaaaggagtcatcaaaactctgttccgtcggaggccctccgatgaaatgtctgaagatcagatggacagaggatgtttagaacctgatgtcgtggaggaaatatacgaggagggctctgcaatgcttgctcgaagattgaatataaattacccatcgggaaatatgttcaagctgcatgattgtgctgtctgccaattggagatgaaacctggtgagggcacctctgttcatggtaacatgcccaagcattcaagagttgacccctggggtggtccttttctctgttcctcctgtcaattgaaaaaggaggccatggaagggaagctacattcaagaacagcagagtga

SEQ ID NO: 1471 - protein, 437 aa, Zea mays
MEMHADVDGSGVPLAVLLKRELCNQKVERPDILFGEANKSKKGEDLTLLLPRCHRTTGEGGGSGGGENAGDDDDDTISVFAIFDGHNGSLAAIYTRENLINNVLAAIPPNLTSEEWTAALPRALVAGFVKTDKDFQTKAARSGTTVTFVIIDGWVVTVASVGDSRCILESAEGSVYFLSADHRLDANEEEVERVTASGGEVGRINIAGGAGIGPLRCWPGGLCLSRSIGDIDVGEFIVPVPHVKQVKLSNAGGRLVIASDGVWDALCFQEALNYIRGLPAEAAANRIVKEAVTSKGLRDDTTCIVVDILPPEKLSPPLKRPGKGVIKTLFRRRPSDEMSEDQMDRGCLEPDVVEEIYEEGSAMLARRLNINYPSGNMFKLHDCAVCQLEMKPGEGTSVHGNMPKHSRVDPWGGPFLCSSCQLKKEAMEGKLHSRTAE

SEQ ID NO: 1472 - DNA, 1119 bp, Zea mays; identical to SEQ ID NO: 988
  CDS (1)..(1119)

SEQ ID NO: 1473 - protein, 372 aa, Zea mays; identical to SEQ ID NO: 989

SEQ ID NO: 1474 - DNA, 897 bp, Brassica napus
  CDS (1)..(897)
atggatctttatctctctttaatctcttgtgtgcgttccggacaaactctttatgtttttgctttgattctctataagctgaaggctgggttctttggatcggctcctgacacgggcagaggtaaaagcaggatgtggaagaacatttcccacggttttcactttgtcaagggcaagtcaagccatcccatggaggactacgttgtgtctgagttcaagaaagtggacggtcatgatttgggtttgtttgccatctttgatggtcacttgggacatgacgtggccaagtacttgcagaccaatctctttgacaacattcttcaagagaaggagttttggactgatacggagaacgctataagaaacgcttacagatcaacagacgcagtgatacttcagcagtctctcaagcttggtaaaggcggatcaacggctgtaacggggattttaatcgatggtcagaagctagtggttgctaacgttggagactcgagggcggtgatgtctaagaatggcgttgcgcatcagctctcggttgatcatgagccaagcaaggagaggaaagatatagagaagcgaggtggctttgtatcaaacattccaggggatgttccacgtgtagatggacagttagcggttgcgagagcgtttggagataagagcttgaagatacatctgagctcagagccggatattacgcaccaggcaattgatgagcagactgagttcatcgttttcgcgagtgatggtatttggaaggtaatgtcgaaccaagaagcggttgatgtgatcaagagtgtcaaagatccgcaagcagcagcaaagcacttgatagaggtagctatatctaagaagagcaaagacgacatctcctgtatcgttgtcaagttccactag

SEQ ID NO: 1475 - protein, 298 aa, Brassica napus
MDLYLSLISCVRSGQTLYVFALILYKLKAGFFGSAPDTGRGKSRMWKNISHGFHFVKGKSSHPMEDYVVSEFKKVDGHDLGLFAIFDGHLGHDVAKYLQTNLFDNILQEKEFWTDTENAIRNAYRSTDAVILQQSLKLGKGGSTAVTGILIDGQKLVVANVGDSRAVMSKNGVAHQLSVDHEPSKERKDIEKRGGFVSNIPGDVPRVDGQLAVARAFGDKSLKIHLSSEPDITHQAIDEQTEFIVFASDGIWKVMSNQEAVDVIKSVKDPQAAAKHLIEVAISKKSKDDISCIVVKFH

SEQ ID NO: 1476 - DNA, 1182 bp, Brassica napus
  CDS (1)..(1182)
atggcgcttctcaggcctcaccttcatcgcttccactccaacgctctccaccaatcagcccctcatactaaatcaaccgccgacgctggcggtggacttgtcgtctaccccacctatggtcgtcgtcgtcgtcaccgttgctccgcgattgcgatcgacgctccgtcgtctctcgccggcgtgacgcctatccgatgggggtacacgagcgttcaagggttcagggaggagatggaggacgacatcgtcatccgctcggaagcgctcgacagcttctccttcgccgcggttttcgacggccacgctggatcctcctctgttaagttcctcagggaggagctgtacaagggatgcgttgaggcgttgcaagttggatctttgttgaaaggtggtgactttggtgcgatcaagggagctttggtcaaggcttttgagagcgtggatcagagtttgctcaaatggctagaaacaaaaggtgaagaagatgagtctggttcaacggctactgtgatgctcattagaaatgatgtttcctactttgcacatattggggattcttgcgctgtcttatctcgatctggacaaatagaggagttgactgattctcatcgtccatatggaagcagtaaggcagcggttcaggaaatgaagaggatcaaagatgcaggtggatggattgtcaatggaaggatttgtggagacatagctgtatctcgtgcttttggtgacatccggttcaagacaaagaagcatgagatgttgaagaagggtgtcgatgaaggaagatggtccgagaagtttgtatccagaatcgagtttaaaggggacatggttgtcgcaactccggatatctaccaagtacctctcacatcggacgtggagttcattattttagcttctgatggattatgggactacatgaagagcaaagacgtggttagtttcgtaagggaacagctccgagaacatggaaatgtccagcttgcttgtgaagctcttgcacaagttgctttggaccggagatcagaggacaacatcagcatcatcatagctgatctaggaagaacagagtggaagaagctcccggtgcagcgacaaaacatggtggttgaacttgctcaggccgcagccactgtgggtatagttacagttggcatatggatgacttctcttctctcttga

SEQ ID NO: 1477 - protein, 393 aa, Brassica napus
MALLRPHLHRFHSNALHQSAPHTKSTADAGGGLVVYPTYGRRRRHRCSAIAIDAPSSLAGVTPIRWGYTSVQGFREEMEDDIVIRSEALDSFSFAAVFDGHAGSSSVKFLREELYKGCVEALQVGSLLKGGDFGAIKGALVKAFESVDQSLLKWLETKGEEDESGSTATVMLIRNDVSYFAHIGDSCAVLSRSGQIEELTDSHRPYGSSKAAVQEMKRIKDAGGWIVNGRICGDIAVSRAFGDIRFKTKKHEMLKKGVDEGRWSEKFVSRIEFKGDMVVATPDIYQVPLTSDVEFIILASDGLWDYMKSKDVVSFVREQLREHGNVQLACEALAQVALDRRSEDNISIIIADLGRTEWKKLPVQRQNMVVELAQAAATVGIVTVGIWMTSLLS

SEQ ID NO: 1478 - DNA, 1209 bp, Brassica napus
  CDS (1)..(1209)
atggctgggatttgctgtggtgttgttggggagagtgaaccaacggttacggttgattcctctactcgagcttctctgagacggaggttagatctactcccttcgatcaaaatcgtcgctcctccactcgagagctcccgtaagcggcagaagtgtgagacaccgtcgggaaatcaagatctggaatcgaatgtacgtagtgagaggaacgtggagaagaaggcgcgatcatcaccaccggttaagaattcaaatttgattccgagctccgcgacggaagcagagagctgtttcgtctccgatgcgcctaagatcggaacgacgtcggtttgcgggaggagaagagacatggaagacgccgtctcggttcaccactcgctgatccacaaaaactccgagaatctccacttctacggcgttttcgacggccacggctgctctcacgtcgcggagaagtgcagggagcggttgcatgagatagtgaagcgggacgtcgaggctatggccgccggaggagaggacgagtggaaggagacgatggcgaagagcttccagaagatggatagagaagttagccagcgagactctaacaacggtgcggcgagtcggagcgtgaagagctcgtgcagatgcgaattgcagtctcctcaatgcgacgccgtcggatccaccgccgtcgtgtccgtagtcacgccggagaagatcgtcgtatctaactgcggagactctcgcgccgtgctttgccgtaacgttctcgccatccctctctcttcagatcataagccggatcgacccgatgaattgattcggatccaacaagcgggcgggcgggttatctactgggacggagctagggtcctaggagttctcgccatgtcgagagctattggtgataactacttgaaaccgtatgtgattccggatccggaagtaaccgtaacggatcgaacagacgacgacgagtgcttgatcctagcgagtgatggactctgggacgttgtgacgaacgagactgcgtgcggcgttgctcgcatgtgccttcaaggtgctgctgcggcggatggaggagactctgatacggcgcacaacgcgtgttcggacgctgcgttgctattgacgaagctggctctggcgagacagagctccgataacgtgagcgttgttgtggttgacttgaggaaaagaaggaataataatcaagtgtcttga

SEQ ID NO: 1479 - protein, 402 aa, Brassica napus
MAGICCGVVGESEPTVTVDSSTRASLRRRLDLLPSIKIVAPPLESSRKRQKCETPSGNQDLESNVRSERNVEKKARSSPPVKNSNLIPSSATEAESCFVSDAPKIGTTSVCGRRRDMEDAVSVHHSLIHKNSENLHFYGVFDGHGCSHVAEKCRERLHEIVKRDVEAMAAGGEDEWKETMAKSFQKMDREVSQRDSNNGAASRSVKSSCRCELQSPQCDAVGSTAVVSVVTPEKIVVSNCGDSRAVLCRNVLAIPLSSDHKPDRPDELIRIQQAGGRVIYWDGARVLGVLAMSRAIGDNYLKPYVIPDPEVTVTDRTDDDECLILASDGLWDVVTNETACGVARMCLQGAAAADGGDSDTAHNACSDAALLLTKLALARQSSDNVSVVVVDLRKRRNNNQVS

SEQ ID NO: 1480 - DNA, 1182 bp, Brassica napus
  CDS (1)..(1182)
atggcgcttctcaggcctcaccttcatcgcttccactccaacgctctccaccaatcagcccctcatactaaatcaaccgccgacgctggcggtggacttgtcgtctaccccacctatggtcgtcgtcgtcgtcaccgttgctccgcgattgcgatcgacgctccgtcgtctctcgcgggcgtgacgcctatccgatgggggtacacgagcgttcaagggtttagggaggagatggaggacgacatcgtcatccgctcggaagctctcgacagcttctccttcgccgcggttttcgacggccacgctggatcctcctctgttaagttcctcagggaggagctgtacaagggatgcgttgaggcgttgcaagttggatctttgttgaaaggtggtgactttggtgcgatcaagggagctttggtcgaggcttttgagagcgtggatcagagtttgctcaaatggctagaaacaaaaggtgaagaagatgagtctggttcaacggctactgtgatgctcattagaaatgatgtttcctactttgcacatattggggattcttgcgctgtcttatctcgatctggacaaatagaggagttgactgattctcatcgtccatatggaagcagtaaagcagctgttcaagaaatgaagaggatcaaagatgcaggtggctggattgtcaatggaaggatttgtggagacatagctgtatctcgtgcttttggtgacatccgtttcaagacaaagaagcatgagatgttgaagaagggtgtcgatgaaggaagatggtccgagaagtttgtatccagaatcgagtttaaaggggacatggttgtcgcaactccggatatctaccaagtacctctcacatcggacgtggagttcattattttagcttctgatggattatgggactacatgaagagcaaagacgtggttagtttcgtaagggaacagctccgagaacatggaaatgtccagcttgcttgtgaagctcttgctcaagttgctttggaccggagatcagaggacaacatcagcatcatcatagctgatctaggaagaacagagtggaagaagctcccggtgcagcgacaaaacatggtggttgaacttgttcaggccgcagccactgtgggtatagttacagttggcatatggatgacttctcttctctcttga

SEQ ID NO: 1481 - protein, 393 aa, Brassica napus
MALLRPHLHRFHSNALHQSAPHTKSTADAGGGLVVYPTYGRRRRHRCSAIAIDAPSSLAGVTPIRWGYTSVQGFREEMEDDIVIRSEALDSFSFAAVFDGHAGSSSVKFLREELYKGCVEALQVGSLLKGGDFGAIKGALVEAFESVDQSLLKWLETKGEEDESGSTATVMLIRNDVSYFAHIGDSCAVLSRSGQIEELTDSHRPYGSSKAAVQEMKRIKDAGGWIVNGRICGDIAVSRAFGDIRFKTKKHEMLKKGVDEGRWSEKFVSRIEFKGDMVVATPDIYQVPLTSDVEFIILASDGLWDYMKSKDVVSFVREQLREHGNVQLACEALAQVALDRRSEDNISIIIADLGRTEWKKLPVQRQNMVVELVQAAATVGIVTVGIWMTSLLS

SEQ ID NO: 1482 - DNA, 1131 bp, Brassica napus; identical to SEQ ID NO: 990
  CDS (1)..(1131)

SEQ ID NO: 1483 - protein, 376 aa, Brassica napus; identical to SEQ ID NO: 991

SEQ ID NO: 1484 - DNA, 846 bp, Brassica napus
  CDS (1)..(846)
atggcaggcagagatattctccataagatgaaggctgggttctttggatcggctcctgacacgggaagaggcaaaagcaagatgtggaagaacattacccacggttttcactttgtcaagggcaagtcaagccatcccatggaggactacgtagtctccgagttcaagaaagtcaacggccacgaactcggtttgtttgccatctttgacggtcacttgggacatgacgtggccaaatacttgcagaccaatctctttgacaacattcttcaagagaaggagttttggactgatacggagaacgctataagaaacgcttacagatcaacagacgcagtgatacttcagcagtctctcaagcttggtaaaggcggatcaacggctgtaacggggattttaatcgatggtcagaagctagtggttgctaacgttggagactcgagggcggtgatgtctaagaatggcgttgcgcatcagctctcggttgatcatgagccaagcaaggagaggaaagatatagagaagcgaggtggctttgtatcaaacattccaggggatgttccacgtgtagatggacagttagcggttgcgagagcgtttggagataagagcttgaagatacatctgagctcagagccggatattacgcaccaggcaattgatgagcagactgagttcatcgttttcgccagtgatggtatatggaaggtaatgtcgaaccaagaagcggttgatgtgatcaagagtgtcaaagatccgcaagcagcagcaaagcacttgatagaggtagctatatctaagaagagcaaagacgacatctcctgtatcgttgtcaagttccactag

SEQ ID NO: 1485 - protein, 281 aa, Brassica napus
MAGRDILHKMKAGFFGSAPDTGRGKSKMWKNITHGFHFVKGKSSHPMEDYVVSEFKKVNGHELGLFAIFDGHLGHDVAKYLQTNLFDNILQEKEFWTDTENAIRNAYRSTDAVILQQSLKLGKGGSTAVTGILIDGQKLVVANVGDSRAVMSKNGVAHQLSVDHEPSKERKDIEKRGGFVSNIPGDVPRVDGQLAVARAFGDKSLKIHLSSEPDITHQAIDEQTEFIVFASDGIWKVMSNQEAVDVIKSVKDPQAAAKHLIEVAISKKSKDDISCIVVKFH

SEQ ID NO: 1486 - DNA, 1206 bp, Brassica napus
  CDS (1)..(1206)
atggctgggatttgctgcggtgttgttggggagagcgaaccggcggttacggtcgattcgtctactcgagcttctcttagacggaggttagatctactcccttcgatcaaaatagttgctcctccgcttgagagctcacgtaagcggcagaaacgtgagacaccgtcgggaaatcaagatctggaatcgaatgtacgtagcgagaggaacgtggagaagaaggcgcgatcatcaccggttaagaattcaaatttgattccgagctccgcgacggaagcagagagctgtttcgtctccgatgcgcctaagatcggaacgacgtcggtttgcggcaggagaagagacatggaagacgccgtctcggttcaccactcgctgatccacaaaaactccgagaatctccacttctacggcgttttcgacggccacggctgctctcacgtcgcggagaagtgcagggagcgtttgcatgagattgtcaagcgggacgtcgaagctatggccgccggaggagaggacgagtggaaggagacgatggcgaagagcttccagaagatggatcgagaagtttgccagcgagactctaacaacggtgcggcgagtcggagcgcgaagagctcatgcagatgcgaattgcagtctcctcaatgcgacgccgtcggatccaccgccgtcgtgtccgtagtcacgccggagaagatcgtcgtctctaactgcggagactctcgcgccgtgctttgccgtaacggtctcgccatccctctctcttcagatcataagccggatcgacccgatgaattgattcggatccaacaagcgggcgggcgggttatctactgggacggagctagggttctaggagttctcgccatgtcgagagctattggtgataactacttaaaaccgtatgtgattccggatccggaggtgaccgtaacggatcgaaccgacgacgacgagtgcttgatcttagcgagtgatggactctgggacgttgtgacgaacgagactgcgtgcggcgttgctcgcatgtgccttcaaggtgctgctgcggcggatggaggagactctgatacggcgcacaacgcgtgttcggacgctgcgttgctgttgacgaagctggctctggcgagacagagctccgataacgttagtgtcgtggtggttgacttgaggaaaaggaggagtaataatcaagtgtcttga

SEQ ID NO: 1487 - protein, 401 aa, Brassica napus
MAGICCGVVGESEPAVTVDSSTRASLRRRLDLLPSIKIVAPPLESSRKRQKRETPSGNQDLESNVRSERNVEKKARSSPVKNSNLIPSSATEAESCFVSDAPKIGTTSVCGRRRDMEDAVSVHHSLIHKNSENLHFYGVFDGHGCSHVAEKCRERLHEIVKRDVEAMAAGGEDEWKETMAKSFQKMDREVCQRDSNNGAASRSAKSSCRCELQSPQCDAVGSTAVVSVVTPEKIVVSNCGDSRAVLCRNGLAIPLSSDHKPDRPDELIRIQQAGGRVIYWDGARVLGVLAMSRAIGDNYLKPYVIPDPEVTVTDRTDDDECLILASDGLWDVVTNETACGVARMCLQGAAAADGGDSDTAHNACSDAALLLTKLALARQSSDNVSVVVVDLRKRRSNNQVS

SEQ ID NO: 1488 - DNA, 1149 bp, Brassica napus; identical to SEQ ID NO: 998
  CDS (1)..(1149)

SEQ ID NO: 1489 - protein, 382 aa, Brassica napus; identical to SEQ ID NO: 999

SEQ ID NO: 1490 - DNA, 894 bp, Brassica napus
  CDS (1)..(894)
atgggatataaggacttggtactgtcgtattcgaataagatgcgggttgttgaagccccagcaagtggaggcggtatcagccagaacgaaaagtttagctatgggtatgcgagctccgttggaaagagatcatccatggaagactttttcgaaacaagaatcgacggtatcgatggagaaatcgttggtctctttggagtctttgatggacatggaggagccgcagcagctgagtatttgaagcgtcatcttttcagcaatcttatcactcatcctaacttcatttccgacaccaaatctgccatagctgatgcctataatcatacagactctgaacttctcaagtcagaaaataatcacactatagacgctggttcaaccgcgtctactgctattctcgttcgtgatcgcttacttgttgcaaacgttggtgattccagagctgttatctgtagagccggaactgcctttgctgtgtcaagagaccataaacctgatcaaagcgatgagcgtgaacgcattgagaatgctggtggttttgtcatgtgggctgggacttggagagttggaggagttcttgcagtttctcgttcctttggtgatcgacttctgaaagagtatgttattgctgaccctgagattcaggaagagaagattgatgactctcttgagtttctgatccttgccagcgatggactttgggatgttttctctaatgaggaagctgttgaagtggtgaaagaggttgaggatccagaggagtcagcgaagaaacttgtgggagaagcaataaagagaggaagtgcagacaacatcacatgtgtcatcgttcgtttcttggagacagcttcatcaagccacgtcagcttttcgtcatccatgaagccaatttaa

SEQ ID NO: 1491 - protein, 297 aa, Brassica napus
MGYKDLVLSYSNKMRVVEAPASGGGISQNEKFSYGYASSVGKRSSMEDFFETRIDGIDGEIVGLFGVFDGHGGAAAAEYLKRHLFSNLITHPNFISDTKSAIADAYNHTDSELLKSENNHTIDAGSTASTAILVRDRLLVANVGDSRAVICRAGTAFAVSRDHKPDQSDERERIENAGGFVMWAGTWRVGGVLAVSRSFGDRLLKEYVIADPEIQEEKIDDSLEFLILASDGLWDVFSNEEAVEVVKEVEDPEESAKKLVGEAIKRGSADNITCVIVRFLETASSSHVSFSSSMKPI

SEQ ID NO: 1492 - DNA, 924 bp, Brassica napus
  CDS (1)..(924)
atgggatatctgaattctgttttgtcgtcttcgagccaagtccacgccggcgacggacctgttagcggcggcggcctcagtcacaacgggaagttcagctatggatatgcaagctctcctggtaaaagatcttcaatggaggacttctatgagactcgaatcgatggcgttgatggcgaaattgttggtctttttggtgtctttgatggacatggaggtgcacgtgctgctgagtatgtgaagcaaaatctattcagtaatctgatcaggcatccaaagttcatctctgacactactgcagcaatagctgatgcatacaaccaaacggactcggagtttcttaaatcagaaaatagtcagaacagagatgctggttcgacggcgtcaacagccatcttagttggtgaccgtttacttgttgcaaatgtaggggactctagagccgtcatatgcagaggtggaaatgctattgctgtatcccgagatcacaagcctgatcaaagtgatgagcgccaacgaattgaggatgctggaggatttgtcatgtgggctggaacatggagagttggaggagttcttgctgtttctcgtgcatttggcgataggttattgaagcagtatgttgttgctgatccggagatacaggaggaaaaggttgatagctcacttgagtttctcattcttgcaagtgatggtctctgggacgttgtatctaacgatgaagccgtaggcatgatcaaggtgatagaagatcccgaggaaggtgcaagaagactgatgacggaagcttaccaaagaggtagtgcagacaacataacttgtgtcgttgtacgtttcttttcagaccaagcaggagtaggttccagcagggacatcgatcacggtattataccggacagaagctccggtgactcatcaacatag

SEQ ID NO: 1493 - protein, 307 aa, Brassica napus
MGYLNSVLSSSSQVHAGDGPVSGGGLSHNGKFSYGYASSPGKRSSMEDFYETRIDGVDGEIVGLFGVFDGHGGARAAEYVKQNLFSNLIRHPKFISDTTAAIADAYNQTDSEFLKSENSQNRDAGSTASTAILVGDRLLVANVGDSRAVICRGGNAIAVSRDHKPDQSDERQRIEDAGGFVMWAGTWRVGGVLAVSRAFGDRLLKQYVVADPEIQEEKVDSSLEFLILASDGLWDVVSNDEAVGMIKVIEDPEEGARRLMTEAYQRGSADNITCVVVRFFSDQAGVGSSRDIDHGIIPDRSSGDSST

SEQ ID NO: 1494 - DNA, 1167 bp, Brassica napus
  CDS (1)..(1167)
atgtcttgttccgtcgctgtctgcagctctccggtgttctccccgtcgtcgtctcttttctgcaacaaagcctctattctctcttcgcctcaagaaaccatctctctcactctctctcatctcaaaccctccgcgtcctctccctcctctccttccgccgcatcccctaaatctccgttccgtctccgtttccagaaaccgccgaccggattcgctcctgcgccgttagtgctaggaggatccgactctgtctccgccggctcctgtaccggtcaatctccttccgccttgaagaggaaacggccgacgaggcttgatataccgattggcaccgccggtttcgcatctccggcgtcggaggagagtagacaagtggagagggaaggcgatggttactctgtttactgcaagagagggaggagagaagctatggaggatcgtttctccgctatgaccaatcttcgaggagatcgcaagcaggcaatgttcggagtttacgatggccacggaggagtgaaggcggctgagtttgcggccaagaacttagataagaacgttttggaagaggtaagtggtaagagcggcgcgtctgagatagcagacgcggtgaaatgcggttatttaaccacagacgctgcgtttcttgacggggaagacgttaaaggcggttcctgctgcgtcacggctatggtcagagacgggaacctcgttgtgtccaatgccggtgattgtcgcgccgtcatgagcgtaggtggcgtcgcggaggctctctcttccgaccacaggccgtctagagacgatgaacgggaaagaattgaaaccacgggtggatatgtggatacgtttaacggtgtttggaggattcaaggttctttagctgtatcaagagggatcggcgatgctcatctcaagagatgggttatagccgaaccagagactaagatgttgagaattgatcaggaccacgagttcttgatcttggcatcggacggtctatgggacaaagtgagtaaccaagaagcagtagacattgctcgtcccttctgtgtaggaaccgagatgaagccgttgttgttagcatgtaagaagctggtcgaactatcggcttcacgaggctcatcggatgatattagtgtgatgttgatccctttgcgtcagtttatctag

SEQ ID NO: 1495 - protein, 388 aa, Brassica napus
MSCSVAVCSSPVFSPSSSLFCNKASILSSPQETISLTLSHLKPSASSPSSPSAASPKSPFRLRFQKPPTGFAPAPLVLGGSDSVSAGSCTGQSPSALKRKRPTRLDIPIGTAGFASPASEESRQVEREGDGYSVYCKRGRREAMEDRFSAMTNLRGDRKQAMFGVYDGHGGVKAAEFAAKNLDKNVLEEVSGKSGASEIADAVKCGYLTTDAAFLDGEDVKGGSCCVTAMVRDGNLVVSNAGDCRAVMSVGGVAEALSSDHRPSRDDERERIETTGGYVDTFNGVWRIQGSLAVSRGIGDAHLKRWVIAEPETKMLRIDQDHEFLILASDGLWDKVSNQEAVDIARPFCVGTEMKPLLLACKKLVELSASRGSSDDISVMLIPLRQFI

SEQ ID NO: 1496 - DNA, 1206 bp, Glycine max
  CDS (1)..(1206)
atggctggaatttgctgtggtgttgtcggagaaggtgacactccggctccactcgagccaactactcgcccctccaggcgccggagtttggacatcttacccttaaaatacatcgctgacatggcggtgccgccgtcggatggttcacggaaacgtcccaagctggatctcagggaccgcgataacgtagttcaaaattgcgacgaatccactggacacaaggtggtgaaaaaagaagccaaagtggaaatccacgacaatatttccgaaacgaaaaacgtaactgttgcggatgcttcggaagttgaagattctcctaagttcggcgtgacgtcagtttgcggcaggagaagagacatggaagattccgtttcggtgcggccttccttcacccaaggcttccactactttggcgttttcgacggtcacggttgctctcatgtcgcgactatgtgcaaggagcggttacacgagatcgtgaatgaagagattgacagcgcgcgcgagaatttggagtggaagctgacgatggagaacggattcgctcgcatggacgacgaggttaatcgcaggagccagagcaaccagaccttcacctgcaggtgcgagctccagactccccactgcgacgccgtcggatccaccgccgtcgtcgccatcgtcacgccggacaaactcgtcgtttccaactgcggcgactcccgcgccgtcctctgccggaaaggcgtagccatccctctctcctccgatcacaagccggatcgacccgacgaactgctccgagtccaatccaagggagggcgcgtgatttactgggacggtcccagagtgcttggtgtgttagccatgtctcgagccataggtgacaattatctgaagccgtacgtgatttctgaaccggaggtgacggtgacggagcggacggaggaggacgagtgtttgatactggcgagtgatgggttgtgggatgtggtgtcgaatgaaaccgcatgtggtgtggtgaggatgtgcctcaaggcgcagaagccgccgtcgccgccgggatctccggggagtgacgtggcggcggacggttccgaccgggcttgctccgatgcgtcgattttgttaaccaagttagcgttggcgaggcatagttcggataatgtgagcgtggtggtggttgatttgaggagagatcaacgacaatcatcaaactccaattaa

SEQ ID NO: 1497 - protein, 401 aa, Glycine max
MAGICCGVVGEGDTPAPLEPTTRPSRRRSLDILPLKYIADMAVPPSDGSRKRPKLDLRDRDNVVQNCDESTGHKVVKKEAKVEIHDNISETKNVTVADASEVEDSPKFGVTSVCGRRRDMEDSVSVRPSFTQGFHYFGVFDGHGCSHVATMCKERLHEIVNEEIDSARENLEWKLTMENGFARMDDEVNRRSQSNQTFTCRCELQTPHCDAVGSTAVVAIVTPDKLVVSNCGDSRAVLCRKGVAIPLSSDHKPDRPDELLRVQSKGGRVIYWDGPRVLGVLAMSRAIGDNYLKPYVISEPEVTVTERTEEDECLILASDGLWDVVSNETACGVVRMCLKAQKPPSPPGSPGSDVAADGSDRACSDASILLTKLALARHSSDNVSVVVVDLRRDQRQSSNSN

SEQ ID NO: 1498 - DNA, 1203 bp, Glycine max
  CDS (1)..(1203)
atggctgggatttgctgtggagttgttggagaagccgccgagacttcttctcccatcgaacccacctcacgcccttccgcacgccggagtttggaccttttgcccttgaaatacatagctgctgacgtgtcagtcccgccgctggagaacagccggaagcgccagaggctggataggcgcgcttctccggcaagggagtgcgataacgcggttcatagttccaaatcgaaggtagttgaggttgttccgaattattcttcgaagagtccaacgttggactccacaagtccaacagttgtcgaggagtatccgaggtatggggtaacgtccgtttgtggaaggaggagggacatggaagacgccgtttcggtccatccatcgttttgccaagaaactttatctcatgataaaaaattagggtttcatttcttcgctgttttcgacggccacggttgctcacatgttgcgacgatgtgcaaggagaggttacacgagatagtgaaggaagagattcaccaagcgaaggagaatttggaatgggaatcaacgatgaaaaagtgtttcgcgcgcatggacgaagaggttttaaggtggagtcagaacaacgagactccaagttgcaggtgcgagcttcagaccccgcactgcgacgctgtgggctccaccgcagttgtggccgtcgtcacgccggagaaaatcatcgtggcaaactgcggcgactcacgcgccgtgctttgccgcaacaacgtagccgtcccactctccgacgatcacaagccggaccgacccgacgagttgcttcggatccaagtagcgggagggcgcgtgatatattgggacggacctagagtgcttggggtgttggctatgtccagagccataggggacaattatctgaagccgtatgtaatttcggaaccggaggtaacggtaactgagcgtagtgaggaggatgagtgtttgatattagggagtgatgggctatgggacacagtgcaaaacgacatcgcatgcaaagtggtgcggatgtgtctgaacgcgcagaagccgccatcgccgccctcgtctccgaggagggagatggcggtggactgctccgacaaggcttgctccaacgcctccattctgctgaccaaattggcgttggttaggcagagttccgacaatgtgagcgtggtggtggttgatttgaggagaacctaa

SEQ ID NO: 1499 - protein, 400 aa, Glycine max
MAGICCGVVGEAAETSSPIEPTSRPSARRSLDLLPLKYIAADVSVPPLENSRKRQRLDRRASPARECDNAVHSSKSKVVEVVPNYSSKSPTLDSTSPTVVEEYPRYGVTSVCGRRRDMEDAVSVHPSFCQETLSHDKKLGFHFFAVFDGHGCSHVATMCKERLHEIVKEEIHQAKENLEWESTMKKCFARMDEEVLRWSQNNETPSCRCELQTPHCDAVGSTAVVAVVTPEKIIVANCGDSRAVLCRNNVAVPLSDDHKPDRPDELLRIQVAGGRVIYWDGPRVLGVLAMSRAIGDNYLKPYVISEPEVTVTERSEEDECLILGSDGLWDTVQNDIACKVVRMCLNAQKPPSPPSSPRREMAVDCSDKACSNASILLTKLALVRQSSDNVSVVVVDLRRT

SEQ ID NO: 1500 - DNA, 1071 bp, Glycine max; identical to SEQ ID NO: 1004
  CDS (1)..(1071)

SEQ ID NO: 1501 - protein, 356 aa, Glycine max; identical to SEQ ID NO: 1005

SEQ ID NO: 1502 - DNA, 1017 bp, Glycine max
  CDS (1)..(1017)
atgataacttggaaccttttgcacgcaagaataagctgtacacacgcaagaatagcgctattattatttcttcattttttgttgttgtgggtcaaagaagtagcacctggaagccctgaatattcagcctgtgatatggggtacctcaattcagttttgtcctcttcaagccaggttcatgctgcagaagattcacctgtcagtggagggggcctcagtcagaatggaaaattcagctatgggtatgctagctcccctggcaagagatcttcaatggaagatttttatgagacaaaaattgatggtgttgatggtgaaattgttggcctttttggagtttttgatggccatggtggtgctcgtgctgctgagtatgtcaagcaaaacctatttagcaatttgatcagtcatccaaaattcatttctgacaccaaatctgcaatagctgatgcatataaccataccgactctgaatttctgaaatctgaaaataatcaaaacagagatgctggatcaactgcttccactgccattcttgttggcgaccgtttgcttgttgcaaatgttggggactccagagctgttatatgcaggggtggaaatgccattgctgtttctcgggatcacaagccagatcaaactgatgagaggcgaaggattgaagatgcaggtggctttgttatgtgggctggaacttggagagttggtggagttcttgctgtttcacgtgcatttggtgatagactcctgaagcagtatgttgttgctgatccagaaatccaggaagaaaaggttgatagctctcttgagtttcttatattggctagtgatgggctatgggatgttgtctcaaatgaggaagctgttgctatgattaaaccaattgaggatgccgaggaggcagcaaagaggctaatgcaagaagcatatcagcgaggtagttctgacaacattacgtgcgttgtcgttcgttttttgtcaaaccaaggtgcatcttctcatagtaactctggctaa

SEQ ID NO: 1503 - protein, 338 aa, Glycine max
MITWNLLHARISCTHARIALLLFLHFLLLWVKEVAPGSPEYSACDMGYLNSVLSSSSQVHAAEDSPVSGGGLSQNGKFSYGYASSPGKRSSMEDFYETKIDGVDGEIVGLFGVFDGHGGARAAEYVKQNLFSNLISHPKFISDTKSAIADAYNHTDSEFLKSENNQNRDAGSTASTAILVGDRLLVANVGDSRAVICRGGNAIAVSRDHKPDQTDERRRIEDAGGFVMWAGTWRVGGVLAVSRAFGDRLLKQYVVADPEIQEEKVDSSLEFLILASDGLWDVVSNEEAVAMIKPIEDAEEAAKRLMQEAYQRGSSDNITCVVVRFLSNQGASSHSNSG

SEQ ID NO: 1504 - DNA, 1170 bp, Glycine max
  CDS (1)..(1170)
atgtcttgctccgtcgcggtttccaattcgccggtgttctctccttcttcttccctcttctgctcgaagccctccatcatctcttcttcgccggaatccctctcgctctctctctcgcatctcaaaccttccaactcttctacgacgtcgtcttgttcttcaccctctgctgctgcttcttcatcttcttctccttcttctccgtttcggcttcgccttcccaagcctcccaccgtgttctctgcttcttcttctgcttcgtctacctctccgaacggcaccgttttgaagaggaagcgacccgctaggttggacatacccgtttcctctctcacctttgcggttccgcccacgccctccgcggcggcgcgtgacgtggttgaggctgaggaagatgggtttggggtgtactgcaagagaggcaggagggagtacatggaggatcgttacaccgctggggataatcttcgcggagaacacaaactggctttttttggcatatttgatgggcacggtggtgcaaaagctgctgaatttgctgcaagtaacttagaaaagaatgtgttagatgaagtaatcgtgagagatgaagataatgttgaggaggcagtgaagcgagggtacctaaacaccgattcggatttcctaaaggaggatcttcatggtggctcttgctgtgtgacagcattgattaggaatggtaacctcattgtgtccaacgctggtgattgccgtgctgtcattagcagagggggtgttgctgaggctctaacatctgatcacaggccttcaagggaagatgaaagggacagaattgagagcctgggtggctatgtcgatttatgccgcggtgtttggaggatccagggatctctggctgtgtcaaggggaattggagatagacacctgaaacaatgggtgacagcagaacctgagaccaaagttctccgaattgaacctgaacatgacttgttaattttagcttcagatggattatgggataaggttggtaatcaggaagcagtagatattgctcgttcttttctcgtaggcaacaacaaatcacaaccattgctgcaggcttgtaaaaagcttgtagatttgtctgtttcacgaggctctttggatgatacaagtgtcatgctaatcaaattggagcactatatttaa

SEQ ID NO: 1505 - protein, 389 aa, Glycine max
MSCSVAVSNSPVFSPSSSLFCSKPSIISSSPESLSLSLSHLKPSNSSTTSSCSSPSAAASSSSSPSSPFRLRLPKPPTVFSASSSASSTSPNGTVLKRKRPARLDIPVSSLTFAVPPTPSAAARDVVEAEEDGFGVYCKRGRREYMEDRYTAGDNLRGEHKLAFFGIFDGHGGAKAAEFAASNLEKNVLDEVIVRDEDNVEEAVKRGYLNTDSDFLKEDLHGGSCCVTALIRNGNLIVSNAGDCRAVISRGGVAEALTSDHRPSREDERDRIESLGGYVDLCRGVWRIQGSLAVSRGIGDRHLKQWVTAEPETKVLRIEPEHDLLILASDGLWDKVGNQEAVDIARSFLVGNNKSQPLLQACKKLVDLSVSRGSLDDTSVMLIKLEHYI

SEQ ID NO: 1506 - DNA, 1134 bp, Glycine max; identical to SEQ ID NO: 1006
  CDS (1)..(1134)

SEQ ID NO: 1507 - protein, 377 aa, Glycine max; identical to SEQ ID NO: 1007

SEQ ID NO: 1508 - DNA, 1020 bp, Glycine max; identical to SEQ ID NO: 1008
  CDS (1)..(1020)

SEQ ID NO: 1509 - protein, 339 aa, Glycine max; identical to SEQ ID NO: 1009

SEQ ID NO: 1510 - DNA, 1017 bp, Glycine max
  CDS (1)..(1017)
atgataacttggaaccttttgcacgcaagaataagctgtacacacgcaagaatagcgctattattatttcttcattttttgttgttgtgggtcaaagaagtagcacctggaagccctgaatattcagcctgtgatatggggtacctcaattcagttttgtcctcttcaagccaggttcatgctgcagaagattcacctgtcagtggagggggcctcagtcagaatggaaaattcagctatgggtatgctagctcccctggcaagagatcttcaatggaagatttttatgagacaaaaattgatggtgtggatggtgaaattgttggcctttttggagtttttgatggccatggtggtgctcgtgctgctgagtatgtcaagcaaaacctatttagcaatttgatcaggcatccaaaattcatttctgacaccaaatctgcaatagctgatgcatataaccataccgactctgaatttctgaaatctgaaaataatcaaaacagagatgctggatcaactgcttccactgccattcttgttggtgaccgtttgcttgttgcaaatgttggggactccagagctgttatatgcaggggtggaaatgccattgctgtttctcgagatcacaagccagaccaaactgatgagaggcgaaggattgaagatgcaggtggttttgttatgtgggctggaacttggagagttggtggagttcttgctgtttcacgtgcatttggtgatagactcctgaagcagtatgttgttgctgatccagaaatccaggaagaaaaggttgatagctctcttgagtttcttatattggccagtgatgggctatgggatgtcgtctcaaatgaggaagctgttgctatgattaaaccaattgaggacgcagaggaggcagcaaagaggctgatgcaagaagcatatcagcgaggtagttctgacaacattacctgtgttgttgtgcgctttttgtcaaaccaaggtgcctcttctcatagtaactctggctaa

SEQ ID NO: 1511 - protein, 338 aa, Glycine max
MITWNLLHARISCTHARIALLLFLHFLLLWVKEVAPGSPEYSACDMGYLNSVLSSSSQVHAAEDSPVSGGGLSQNGKFSYGYASSPGKRSSMEDFYETKIDGVDGEIVGLFGVFDGHGGARAAEYVKQNLFSNLIRHPKFISDTKSAIADAYNHTDSEFLKSENNQNRDAGSTASTAILVGDRLLVANVGDSRAVICRGGNAIAVSRDHKPDQTDERRRIEDAGGFVMWAGTWRVGGVLAVSRAFGDRLLKQYVVADPEIQEEKVDSSLEFLILASDGLWDVVSNEEAVAMIKPIEDAEEAAKRLMQEAYQRGSSDNITCVVVRFLSNQGASSHSNSG

SEQ ID NO: 1512 - DNA, 1428 bp, Glycine max
  CDS (1)..(1428)
atgggttcttgcatctcaacaagcagtaggagtacttgtagcagcaagagcaatggagatatggtctctccatcttgcttagaaattggatgctgtggccaaaagagaacaaggagaacattctctgatcatgttatttctctccaccatttaccatccttacctagcagaattttctccaatggaaagagccgcggttcgtgcatatttacacagcagggccgcaagggtattaatcaggatgccatgattgtgtgggaagatttcatgtccgaagatactatcttttgtggtgtctttgatggccatggtccacacggtcatctagtcgcgcgcaaagtgagggatgcattgccaattaagctaatttcatctttgcattctaatgaatctaagcgaaatgggtcaggtaaaacttgcttcaaagggaatgtaaaacctgatagtggagaatctgagaaggattgctctgcggaggataaactgaactcaacatggagggaagctttcatgaaggcatacaaggctatggacaaagagctcaggtctcatccgaatctggattgcttctgtagtgggagcactgctgtgactatagtgaagcagggttcaaatctgttcatgggaaatatcggggattcccgagcaatcatgggatccaaggacagcaatgactccatggtggcaattcagttgaccattgatttgaagcctgatttgccaagggaagcagaaagaatcaaacagtgcaagggtagggtatttgcattacaagatgagccagaagttcatagggtatggttgccttttgatgatgcaccaggattagcaatggctagagcatttggagatttttgcttgaaggaatatggtgtgatttctataccagaattttctcatcggctgctaacagacaaagatcagttcattgttcttgcctcagatggggtctgggatgttttgagcaatgaagaggtggttaggatagtatcttcagcgccaactcgatcatcagcagcgaggactctggtggattccgcagctcgtgagtggaaacttaaatatcctacttcaaaaatggatgactgtgcagttgtgtgcctatttttggatggaaaaatggactcagaatctgattgtgatgagcaatgctcctcttctgcaaccatccagaagaaccattggggtaatccggttgagtcagatgacagtcaaaagcctgagccatctttgcgaaggaactttactgtgagatcctcagaagaaaatgaaacctatggaggaggaggagttgaagaggtatctgttggtgttgaagatagaacatcagcggctgaagatcaacactggtctggtctggagggtgtcacgcgagtaaactcactggttcaacttcctagattttctgaggaaaggccaaactcttga

SEQ ID NO: 1513 - protein, 475 aa, Glycine max
MGSCISTSSRSTCSSKSNGDMVSPSCLEIGCCGQKRTRRTFSDHVISLHHLPSLPSRIFSNGKSRGSCIFTQQGRKGINQDAMIVWEDFMSEDTIFCGVFDGHGPHGHLVARKVRDALPIKLISSLHSNESKRNGSGKTCFKGNVKPDSGESEKDCSAEDKLNSTWREAFMKAYKAMDKELRSHPNLDCFCSGSTAVTIVKQGSNLFMGNIGDSRAIMGSKDSNDSMVAIQLTIDLKPDLPREAERIKQCKGRVFALQDEPEVHRVWLPFDDAPGLAMARAFGDFCLKEYGVISIPEFSHRLLTDKDQFIVLASDGVWDVLSNEEVVRIVSSAPTRSSAARTLVDSAAREWKLKYPTSKMDDCAVVCLFLDGKMDSESDCDEQCSSSATIQKNHWGNPVESDDSQKPEPSLRRNFTVRSSEENETYGGGGVEEVSVGVEDRTSAAEDQHWSGLEGVTRVNSLVQLPRFSEERPNS

SEQ ID NO: 1514 - DNA, 849 bp, Glycine max
  CDS (1)..(849)
atggatagtctttgttgcttcagctctgtcagtcaggtggtcggagggcgttcttcatgtaactctggcaaaggcaagagcagtcagtcctcagtcaagtatggctatagcctagttaaagggaaagcaaaccatccgatggaggactaccacgtagcaaaatttgtgcagttcaaagggcgagagcttgggctttttgctatatatgatggacacctgggtgacagtgtaccagcctatttacaaaagcatctgttttctaacatcttgaaggacgaggacttctggaatgatccattcatgtccatttctaatgcgtatgagacaacagatcaggcaattctttctcacagtcctgatttggggcgaggaggatcaactgcagtgactgcaattctcataaataatcagaaattatgggtagccaatgttggagattcacgagctgttgtgtcgaggggaggggtggctggacagatgacaactgatcatgaacccaatactgagcggggaagcattgagaccagaggtggctttgtctcaaacatgccaggagatgttgcaagagtgaatgggcagcttgcagtttctcgtgccttcggagacagaaacctcaaaacacacttacgatctgatcctgacattcagtatactgacattaccccagatgttgagcttttgatacttgctagtgatggtctatggaaggtaatggcaaaccaagaagctgttgatattgcaagaaagataaaggatccacaaaaggcagcgaaacaactagccactgaggcattgaacagagacagtaaggatgatatttcctgcattgtagttcgtttcaagggttga

SEQ ID NO: 1515 - protein, 282 aa, Glycine max
MDSLCCFSSVSQVVGGRSSCNSGKGKSSQSSVKYGYSLVKGKANHPMEDYHVAKFVQFKGRELGLFAIYDGHLGDSVPAYLQKHLFSNILKDEDFWNDPFMSISNAYETTDQAILSHSPDLGRGGSTAVTAILINNQKLWVANVGDSRAVVSRGGVAGQMTTDHEPNTERGSIETRGGFVSNMPGDVARVNGQLAVSRAFGDRNLKTHLRSDPDIQYTDITPDVELLILASDGLWKVMANQEAVDIARKIKDPQKAAKQLATEALNRDSKDDISCIVVRFKG

SEQ ID NO: 1516 - DNA, 1173 bp, Glycine max
  CDS (1)..(1173)
atgtcttgctccgtcgcggtttccaattcgccggggttctctccttcttcttccctcttctgctcgaagccctccatcatctcttcttcgccggaatccctctccctctctctgtcgcatctcaaaccttcgaactcttctacgtcgtcgtcttgttcttcgccttctgctgctgctgcttcttcttctccttcttctccgtttcgacttcgccttcccaagcctcccaccgcgttctccgcgtcttctgctgcttctgcttcgtctacctctccgaactgcaccgttttgaagaggaagcgacccgctaggttggacatacccgtttcctccctcacctttgcggttccgcccacgccctccgtggcggcgcgtgacgtggttgaggctgaggaagatgggtttggggtgtcctgcaagagagggaggagggagtatatggaggatcgttacacagctggggataatcttcgcggagaacacaaactggctttttttggcatatttgatgggcacggtggtgcaaaagctgctgaatttgctgcaagtaacttagaaaagaatgtgctagatgcagtaatcgtgagagatgaagataatgttgaggaggcagtgaagcgagggtacctaaacaccgattcggatttcctaaaggaggatcttcatggtggctcttgctgtgtgacagcattgattaggaatggtaacctcattgtgtccaacgctggtgattgccgcgctgtcattagcagagggggtgttgctgaggctctaacatctgatcacaggccttcaagggaagatgaaagggacagaattgagaacctgggtggctatgttgatttatgccgtggtgtttggaggatccagggatctcttgctgtgtctaggggaattggagatagacacctgaaacaatgggtgacagcagagcctgagaccaaagttctcagaattgaacctgaacatgacttgttaattttagcttcagatggattatgggataaggttggtaatcaggaagcagtagatattgctcgttcttttctcgtaggcaacaacaaatcacaaccattgctgcaggcttgtaaaaagcttgtagatttgtctgtttcacgaggctctttggatgatacaagtgtcatgctaatcaaattggagcactatatttaa

SEQ ID NO: 1517 - protein, 390 aa, Glycine max
MSCSVAVSNSPGFSPSSSLFCSKPSIISSSPESLSLSLSHLKPSNSSTSSSCSSPSAAAASSSPSSPFRLRLPKPPTAFSASSAASASSTSPNCTVLKRKRPARLDIPVSSLTFAVPPTPSVAARDVVEAEEDGFGVSCKRGRREYMEDRYTAGDNLRGEHKLAFFGIFDGHGGAKAAEFAASNLEKNVLDAVIVRDEDNVEEAVKRGYLNTDSDFLKEDLHGGSCCVTALIRNGNLIVSNAGDCRAVISRGGVAEALTSDHRPSREDERDRIENLGGYVDLCRGVWRIQGSLAVSRGIGDRHLKQWVTAEPETKVLRIEPEHDLLILASDGLWDKVGNQEAVDIARSFLVGNNKSQPLLQACKKLVDLSVSRGSLDDTSVMLIKLEHYI

SEQ ID NO: 1518 - DNA, 1617 bp, Glycine max
  CDS (1)..(1617)
atggaggaaatatcttctagtgttgcagtaccttttacacttggtgttggaaatttgattcaaaaggagtccgcggtgacgactcacatggagataactgggctgaagctcatggcaaatacagcagcggctgctttaatgttaaatcctgcagtggagtgtttaaaggagaatcaagttggagctgctgctcttgtctcagaaatggttattgaacgtgagagtaattgggtcttgaatgaaagccataaccaggcaataaaggaagatgaattgatgttagcagtggattttcagtctctgcatagttcaagctctcaatctgtggctaatggcaaaagtgatccttgtagggaggaagctgcagcattgaagagtagtttttctgaaatagattcaccaatcatgatcaaggttgatgatgatgttgatggtaagtccggaataagcgagctgtgtccatcaatgaagccgccagtggaggaaacagtttctgttgctatggatattactagtgaggatcaaagtggatcagatgagtctgatcctaaaccatctgctgtgcttcttgatcagttgccaggggagagtaaaacatggagaacaggcaacccaaatgctttggaattgaatagtggacctctctggggttgttcatcaatttgtggaatgaggcaggagatggaagatgctatttctgttaagcctcgactttttcaagtttcttcacagatgctagtgaatgaccatgtgaatgagaacgaaaaacagtcactagcccacttttttgctgtctatgatggacatgggggccttcaggttgccaattactgccaggaacgtcttcattcaaaattgattgaggagatagagactgcacaatcaactccggctgaaacaaatgggagaggtgattggcaggaccaatggaagaaagcatttatcaattgttttcagaaaatggatgatgatgtgggaggaattggtgcaagtaacaggggaaacaacagtggtgggtctgagtctaatattaaaactgttgctcctgagactgctggctccactgcagtggttgccattttaagccaaacccacatcatagttgcaaactgtggagattcaagaactgtcttataccgtggaaaagaagccatgccattgtcttctgaccacaaaccaaatagagaggatgagcgggctcggatagaagctgcgggaggaagagtcatacattggaaaggatatcgagttcttggtgtcttggcaatgtcaaggtccataggtgatagatacctgaaaccatgggtaattccagaacccgaagtcaatattgtgcgtcgagagaaaaacgatgagtgtctcattctagcaagtgatggtttatgggatgtaatgacaaatgaagaagcatgtgaggttgcaaataagcgaatccttctttggcacaagaagtttggtgacaatggcccaacaggacgcagtgaaggagctgatcctgcagctcagtccgccgcagagtatctaactaagcttgccatccacaggggaagccaagataacatctctgtaattgtgatagacttaaaggctcaaagaaaaattaagagaaagccataa

SEQ ID NO: 1519 - protein, 538 aa, Glycine max
MEEISSSVAVPFTLGVGNLIQKESAVTTHMEITGLKLMANTAAAALMLNPAVECLKENQVGAAALVSEMVIERESNWVLNESHNQAIKEDELMLAVDFQSLHSSSSQSVANGKSDPCREEAAALKSSFSEIDSPIMIKVDDDVDGKSGISELCPSMKPPVEETVSVAMDITSEDQSGSDESDPKPSAVLLDQLPGESKTWRTGNPNALELNSGPLWGCSSICGMRQEMEDAISVKPRLFQVSSQMLVNDHVNENEKQSLAHFFAVYDGHGGLQVANYCQERLHSKLIEEIETAQSTPAETNGRGDWQDQWKKAFINCFQKMDDDVGGIGASNRGNNSGGSESNIKTVAPETAGSTAVVAILSQTHIIVANCGDSRTVLYRGKEAMPLSSDHKPNREDERARIEAAGGRVIHWKGYRVLGVLAMSRSIGDRYLKPWVIPEPEVNIVRREKNDECLILASDGLWDVMTNEEACEVANKRILLWHKKFGDNGPTGRSEGADPAAQSAAEYLTKLAIHRGSQDNISVIVIDLKAQRKIKRKP

SEQ ID NO: 1520 - DNA, 1134 bp, Glycine max; identical to SEQ ID NO: 1010
  CDS (1)..(1134)

SEQ ID NO: 1521 - protein, 377 aa, Glycine max; identical to SEQ ID NO: 1011

SEQ ID NO: 1522 - DNA, 1152 bp, Glycine max; identical to SEQ ID NO: 1012
  CDS (1)..(1152)

SEQ ID NO: 1523 - protein, 383 aa, Glycine max; identical to SEQ ID NO: 1013

SEQ ID NO: 1524 - DNA, 1569 bp, Glycine max
  CDS (1)..(1569)
atggaggaaataacttcgacggttgcagtgccattcacactagagaatttaatacaaaaagagccagcagtgacaacccacatggagataactggtctcaaactcagggcaaatacatcaccacctttgatattaaatccttcaattgaaattgaaaagcacacagatattggtccacaaccccaaattaaagcgtcttcagagggaacggagaatctggttggagctggccttgtctcagaaatggttagtcaaggagacaataatggtttgtattctgaaagtctaaagcaggcaagaaaagagaatgaatcattgcaagctaaggattttcagtgtggtggcaaaattggtccttgtagggaggaatcttctgttttgaggactaattgtgaaagaaattcacctattaccatcaaggttggtgataacataattgatggaaagtccggttcgaccaagccgccacgtgctagggaacatgagagtgataatggaagtggaccagatgagtctaataagaaaacatttgctgtgccttgtgcgatgccagagaagccaacatgcttggaattgagtggtggtactagtactaattgtactaccccactttggggttgttcatcggtttgtggaaggagagaggagatggaagatgctattgctgttaagcctcatctttttcaagtcacttcaaggatggtaagggatgatcatgtgagtgaaaacacaaaatactcaccaacccatttttttggtgtctatgatgggcatgggggcattcaggttgccaattactgccgggaacatcttcattcagtgttggttgatgagatagaagctgcaaaatcaagtttcgatggaaagaaagagagggacaggcactgggaggaccaatggaaaaaagcattctccaattgctttcacaaagtaaatgatgaggttggaggagttggtgaatgtaatggtgttattgttgaacctcttgcttctgagactgctggctccactgctgtagttgccattttgactcaaacacacataatagttgcaaactgtggagattcaagagctgtcttgtgtcgcggaaaacaagcactgcctttgtctgatgaccacaaaccaaatagagacgatgaatgggaaaggatagaagctgcaggaggaagggttatacaatggaatgggtaccgagttctaggtgttttggcagtgtcaagatccataggtgataggtacttgaagccatgggtaattccagagccagaagtgaagtgtgtccaaagagacaaaagcgacgagtgcctcattctagccagtgatggtttatgggatgtcatgacaaacgaagaagcctgcgaaattgcacgaaagcggatccttctttggcataagaagaatggcaacaactcagtatcatcagaacaaggccaagaaggagttgatcctgcagctcagtatgctgcagagtatctttctagacttgccctccaaagaggaaccaaagataacatctctgtcattgttatagacttgaagcctcagagaaaaatcaagaaaaaagaataa

SEQ ID NO: 1525 - protein, 522 aa, Glycine max
MEEITSTVAVPFTLENLIQKEPAVTTHMEITGLKLRANTSPPLILNPSIEIEKHTDIGPQPQIKASSEGTENLVGAGLVSEMVSQGDNNGLYSESLKQARKENESLQAKDFQCGGKIGPCREESSVLRTNCERNSPITIKVGDNIIDGKSGSTKPPRAREHESDNGSGPDESNKKTFAVPCAMPEKPTCLELSGGTSTNCTTPLWGCSSVCGRREEMEDAIAVKPHLFQVTSRMVRDDHVSENTKYSPTHFFGVYDGHGGIQVANYCREHLHSVLVDEIEAAKSSFDGKKERDRHWEDQWKKAFSNCFHKVNDEVGGVGECNGVIVEPLASETAGSTAVVAILTQTHIIVANCGDSRAVLCRGKQALPLSDDHKPNRDDEWERIEAAGGRVIQWNGYRVLGVLAVSRSIGDRYLKPWVIPEPEVKCVQRDKSDECLILASDGLWDVMTNEEACEIARKRILLWHKKNGNNSVSSEQGQEGVDPAAQYAAEYLSRLALQRGTKDNISVIVIDLKPQRKIKKKE

SEQ ID NO: 1526 - DNA, 1464 bp, Glycine max
  CDS (1)..(1464)
atggggtcctgcttctctgcggaaagcaggagccctcaccccaattcaccaaattcatcatctttcaggaagagcaagagcaactccaagaagaggcttggatcaagaacctcttcatttgagtattggaggaatgagcctctacataggatccctgggaggatcttcctcaatggctcatcccaagttgcatccttgttcactcaacaagggaagaaggctaccaaccaggatgccatggttgtttgggagaacttttgttctagacaagatactattttctgtggagtttttgatggccacggtccatatggtcacatggttgcgaaaagagtgagggattctcttcctctaaaactgaatgtccattgggaacaaagtgcatctggtgaagaagtcctcaaggagattagcgttaatactgcaggaagcatgaattcagaagaggctgcatttgcatctgctgatgatgaatccagggtatctgttgatgccgaggaaacagaaaaacacccagaaatctttcagacacttaaagattcctttttgaaggcattcaaagttatggatagagaactgaagacccaccaaagtattgattgcttctgtagtgggacaacagcagtaactctggttaagcagggacatgatcttattattggaaatgttggtgactctagagctgtgctgggtacaagagagaaagacaattctcttgttgccatccagttaactgtggatctaaaacccaatcttccagccgaagaagagagaattcgcaaatgtaaaggacgtgtttttgctcttcaggatgaacctgaagttgctcgagtctggttgccaaacaatgactcacctggccttgccatggcaagggcatttggagatttttgtcttaaagattttggcctgatatctgttcccgaagtgtcatacaggcgactcactgagaaggacgaatttgttgtcttggcaacagatgggatttgggatgttctctcaaacaaagaagtggtggacatcgtggcagccgcgccaaggcgtgcctcggccgcacgggcgctggtcgagtcagcggttcgctcatggaggtacaagtatccaacctccaaagtggacgactgtgccgtggtttgcctctttctggactcggattcgcacaaagtgtgtagtgcttccaatgtcatcaagtccaaggaacaacctagttcaggtatccaagtccacaatggcgacaacggagatgttcctgcacctactggtctggcaaggtcaggaacttgcagggaaaacaatgaagataacaacaacaaccacaaccacaaccataaggaagaggaaatagatactgatgcagaaatagagtggtctgctctcgaaggagtgtcgcgtgtgaacacattactaaacctcccaaggtttgaacctgacaacaaagacaaggggatgagaaaacacaaatga

SEQ ID NO: 1527 - protein, 487 aa, Glycine max
MGSCFSAESRSPHPNSPNSSSFRKSKSNSKKRLGSRTSSFEYWRNEPLHRIPGRIFLNGSSQVASLFTQQGKKATNQDAMVVWENFCSRQDTIFCGVFDGHGPYGHMVAKRVRDSLPLKLNVHWEQSASGEEVLKEISVNTAGSMNSEEAAFASADDESRVSVDAEETEKHPEIFQTLKDSFLKAFKVMDRELKTHQSIDCFCSGTTAVTLVKQGHDLIIGNVGDSRAVLGTREKDNSLVAIQLTVDLKPNLPAEEERIRKCKGRVFALQDEPEVARVWLPNNDSPGLAMARAFGDFCLKDFGLISVPEVSYRRLTEKDEFVVLATDGIWDVLSNKEVVDIVAAAPRRASAARALVESAVRSWRYKYPTSKVDDCAVVCLFLDSDSHKVCSASNVIKSKEQPSSGIQVHNGDNGDVPAPTGLARSGTCRENNEDNNNNHNHNHKEEEIDTDAEIEWSALEGVSRVNTLLNLPRFEPDNKDKGMRKHK

SEQ ID NO: 1528 - DNA, 1134 bp, Glycine max; identical to SEQ ID NO: 1014
  CDS (1)..(1134)

SEQ ID NO: 1529 - protein, 377 aa, Glycine max; identical to SEQ ID NO: 1015

SEQ ID NO: 1530 - DNA, 1416 bp, Glycine max
  CDS (1)..(1416)
atgggttcttgcatctcaacaagcagtaggagtacttgtagcagcaagagcaatggagatatggtctctccatcttgcttagaaattggatgctgtggccaaaagagaacaaggagaacattctctgatcatgttatttctctccaccatttaccatccttacctagcagaattttctccaatggaaagagccgcggttcgtgcatatttacacagcagggccgcaagggtattaatcaggatgccatgattgtgtgggaagatttcatgtccgaagatactatcttttgtggtgtctttgatggccatggtccacacggtcatctagtcgcgcgcaaagtgagggatgcattgccaattaagctaatttcatctttgcattctaatgaatctaagcgaaatgggtcaggtaaaacttgcttcaaagggaatgtaaaacctgatagtggagaatctgagaaggattgctctgcggaggataaactgaactcaacatggagggaagctttcatgaaggcatacaaggctatggacaaagagctcaggtctcatccgaatctggattgcttctgtagtgggagcactgctgtgactatagtgaagcagggttcaaatctgttcatgggctatatcggggattctcgagcaatcatgggatccaaggatagcaatgactccatggtggctattcagttgactgttgatttaaagcctgatttgccaagggaagcagagagaattaagaagtgcagaggtagggtatttgctttgcaagatgagcctgaagtgcctagggtgtggttgccttttgatgatgcgccaggattagccatggctagagcatttggagatttctgcttgaaggagtatggtgtgatttctatacctgaattttctcaccggcagcttacagacagagatcagttcattgttcttgcctcagatggggtgtgggatgttttaagcaacgaggaggtggttgagatagtatcttcagcgccaacgcgatcatcagcggcaaggattctggtagattctgctgctagggagtggaaacacaaataccctacatcaaagatggatgactgtgctgtagtatgcttatttttggatgggaaaatggactcggaatctgattacgaggaacaaggcttttcttctgcaaccatccaaagcaaccattcaggtaaccccattgagtcagatgatggacaaaaatctgagccatcattgcaaaggaacttcactgtgagatcctcagaggaaaatgagacaaatggagcactatctgttgatgttgttgaagatgcaacatcatcagctgatgatcaaaactggtcaggtttggaaggggtcactcgtgtaaactcacttgtccaacttcctagattttctgaggaaaggccaaaatcttga

SEQ ID NO: 1531 - protein, 471 aa, Glycine max
MGSCISTSSRSTCSSKSNGDMVSPSCLEIGCCGQKRTRRTFSDHVISLHHLPSLPSRIFSNGKSRGSCIFTQQGRKGINQDAMIVWEDFMSEDTIFCGVFDGHGPHGHLVARKVRDALPIKLISSLHSNESKRNGSGKTCFKGNVKPDSGESEKDCSAEDKLNSTWREAFMKAYKAMDKELRSHPNLDCFCSGSTAVTIVKQGSNLFMGYIGDSRAIMGSKDSNDSMVAIQLTVDLKPDLPREAERIKKCRGRVFALQDEPEVPRVWLPFDDAPGLAMARAFGDFCLKEYGVISIPEFSHRQLTDRDQFIVLASDGVWDVLSNEEVVEIVSSAPTRSSAARILVDSAAREWKHKYPTSKMDDCAVVCLFLDGKMDSESDYEEQGFSSATIQSNHSGNPIESDDGQKSEPSLQRNFTVRSSEENETNGALSVDVVEDATSSADDQNWSGLEGVTRVNSLVQLPRFSEERPKS

SEQ ID NO: 1532 - DNA, 1092 bp, Glycine max; identical to SEQ ID NO: 1018
  CDS (1)..(1092)

SEQ ID NO: 1533 - protein, 363 aa, Glycine max; identical to SEQ ID NO: 1019

SEQ ID NO: 1534 - DNA, 1191 bp, Glycine max; identical to SEQ ID NO: 1020
  CDS (1)..(1191)

SEQ ID NO: 1535 - protein, 396 aa, Glycine max; identical to SEQ ID NO: 1021

SEQ ID NO: 1536 - DNA, 849 bp, Glycine max
  CDS (1)..(849)
atgacgggcagggaaatttttcataagatgaaggaaaaagttttgggctcatctgatcctgattctggtaaaggaaagagcaagatgaagaagaacataactcatggctttcacttggtaaaggggagatcaggtcatgccatggaagactatcttgttgctcaattcaagcaagttgacgacaatgaattgggtttatttgcaatatttgatggccactcaggtcacagtgtacctgattacttgaagtctcatttgtttgataatatcttgaaagagcctaacttctggacagaacctgctgaggctgttaagagagcatatggtataactgattctactattttagacaaatcaggtgaattgggtagagggggttcaactgcggttactgcaatattgatcaactgtcaggagctgctagtggccaatattggggattcccgggctgtcttatgcaagaatggcgtggccaaacaactatcagtggatcatgaaccaagcatagaaagtgaagatataagaaacagaggtggttttgtgtcaaacttcccaggggatgttccacgtgtcgatggtcagttggcggtgtcaagggcatttggtgacaaaagcctgaagaaacacttgagctcagaaccatatgtgactgtggagatgatagaagatgatgcagagtttgttatattagccagtgatggattatggaaggtaatgtcaaatcaagaagcagctaattgtataaaaaatataaaggatgctcggtcttcagcaaagcgccttactgaagaagcagttaacaggaaaagcaccgatgatatctcctgcatcgttgtgaaatttcagtga

SEQ ID NO: 1537 - protein, 282 aa, Glycine max
MTGREIFHKMKEKVLGSSDPDSGKGKSKMKKNITHGFHLVKGRSGHAMEDYLVAQFKQVDDNELGLFAIFDGHSGHSVPDYLKSHLFDNILKEPNFWTEPAEAVKRAYGITDSTILDKSGELGRGGSTAVTAILINCQELLVANIGDSRAVLCKNGVAKQLSVDHEPSIESEDIRNRGGFVSNFPGDVPRVDGQLAVSRAFGDKSLKKHLSSEPYVTVEMIEDDAEFVILASDGLWKVMSNQEAANCIKNIKDARSSAKRLTEEAVNRKSTDDISCIVVKFQ

SEQ ID NO: 1538 - DNA, 1092 bp, Glycine max; identical to SEQ ID NO: 1022
  CDS (1)..(1092)

SEQ ID NO: 1539 - protein, 363 aa, Glycine max; identical to SEQ ID NO: 1023

SEQ ID NO: 1540 - DNA, 945 bp, Glycine max
  CDS (1)..(945)
atggggtacctcaattcagttttgtcctcttcaagccaggttcatgctgcagaagattcacctgtcagtggagggggcctcagtcagaatggaaaattcagctatgggtatgctagctcccctggcaagagatcttcaatggaagatttttatgagacaaaaattgatggtgtggatggtgaaattgttggcctttttggagtttttgatggccatggtggtgctcgtgctgctgagtatgtcaagaaaaacctatttagcaatttgatcaggcacccaaaattcatttctgacaccaaatcagcaataactgatgcatacaatcataccgactctgagttgctgaaatcagaaaatagccataacagagatgcaggatcaactgcttccactgctattttagttggtgaccgcttgcttgttgcaaatgttggggattccagagctgttatatgcaggggtggtaatgccattgctgtttctcgagatcacaaaccagaccaaactgatgagaggcaaaggattgaagaagcaggaggctttgttatgtgggctggaacttggagagttggaggtgttcttgctgtttctcgtgcgtttggtgatagactcctgaagcagtatgttgttgctgatccagaaattcaggaagaaaaaattgacagctcccttgagtttcttattctggccagtgacgggctatgggatgttgtcacaaatgaggaagctgttgctatgattaaatcaattgaggatgctgaggaggcagcaaagaggctgatgcaagaagcatatcagagaagtagtgctgacaatatcacatgtgttgtcgttcgtttcttgatgaaccaaggtggatccaaagacaaagaggtagtagctcctcctcataatagtagctctgccagtaggaatccttcagtagaaggtttgtgtgataggtga

SEQ ID NO: 1541 - protein, 314 aa, Glycine max
MGYLNSVLSSSSQVHAAEDSPVSGGGLSQNGKFSYGYASSPGKRSSMEDFYETKIDGVDGEIVGLFGVFDGHGGARAAEYVKKNLFSNLIRHPKFISDTKSAITDAYNHTDSELLKSENSHNRDAGSTASTAILVGDRLLVANVGDSRAVICRGGNAIAVSRDHKPDQTDERQRIEEAGGFVMWAGTWRVGGVLAVSRAFGDRLLKQYVVADPEIQEEKIDSSLEFLILASDGLWDVVTNEEAVAMIKSIEDAEEAAKRLMQEAYQRSSADNITCVVVRFLMNQGGSKDKEVVAPPHNSSSASRNPSVEGLCDR

SEQ ID NO: 1542 - DNA, 1044 bp, Glycine max; identical to SEQ ID NO: 1024
  CDS (1)..(1044)

SEQ ID NO: 1543 - protein, 347 aa, Glycine max; identical to SEQ ID NO: 1025

SEQ ID NO: 1544 - DNA, 1083 bp, Glycine max
  CDS (1)..(1083)
atgataacttggaaccttttgcacgcaagaataagctgtacacacgcaagaatagcgctattattatttcttcattttctattgttgttgtgggtcaaagaagtagcacctggaagccctgaatattcagcctgtgatatggggtacctcaattcagttttgtcctcttcaagccaggttcatgctgcagaagattcacctgtcagtggagggggcctcagtcagaatggaaaattcagctatgggtatgctagctcccctggcaagagatcttcaatggaagatttttatgagacaaaaattgatggtgttgatggtgaaattgttggcctttttggagtttttgatggccatggtggtgctcgtgctgctgagtatgtcaagaaaaacctgtttagcaatttgatcagtcacccaaaattcatttctgacaccaaatcagcaataactgatgcatacaatcataccgactctgagttgctgaaatcagaaaatagccataacagagatgcaggatcaactgcttccactgctattttagttggtgaccgcttgcttgttgcaaatgttggggattccagagctgttatatgcaggggtggtaatgccattgctgtttctcgagatcacaaaccagaccaaactgatgagaggcaaaggattgaagaagcaggaggctttgttatgtgggctggaacttggagagttggaggtgttcttgctgtttctcgtgcgtttggtgatagactcctgaagcagtatgttgttgctgatccagaaattcaggaagaaaaaattgacagctcccttgagtttcttattctggccagtgacgggctatgggatgttgtcacaaatgaggaagctgttgctatgattaaatcaattgaggatgctgaggaggcagcaaagaggctgatgcaagaagcatatcagagaagtagtgctgacaatatcacatgtgttgtcgttcgtttcttgatgaaccaaggtggatccaaagacaaagaggtagtagctcctcctcataatagtagctctgccagtaggaatccttcagtagaaggtttgtgtgataggtga

SEQ ID NO: 1545 - protein, 360 aa, Glycine max
MITWNLLHARISCTHARIALLLFLHFLLLLWVKEVAPGSPEYSACDMGYLNSVLSSSSQVHAAEDSPVSGGGLSQNGKFSYGYASSPGKRSSMEDFYETKIDGVDGEIVGLFGVFDGHGGARAAEYVKKNLFSNLISHPKFISDTKSAITDAYNHTDSELLKSENSHNRDAGSTASTAILVGDRLLVANVGDSRAVICRGGNAIAVSRDHKPDQTDERQRIEEAGGFVMWAGTWRVGGVLAVSRAFGDRLLKQYVVADPEIQEEKIDSSLEFLILASDGLWDVVTNEEAVAMIKSIEDAEEAAKRLMQEAYQRSSADNITCVVVRFLMNQGGSKDKEVVAPPHNSSSASRNPSVEGLCDR

SEQ ID NO: 1546 - DNA, 1191 bp, Glycine max; identical to SEQ ID NO: 1026
  CDS (1)..(1191)

SEQ ID NO: 1547 - protein, 396 aa, Glycine max; identical to SEQ ID NO: 1027

SEQ ID NO: 1548 - DNA, 1086 bp, Glycine max; identical to SEQ ID NO: 1028
  CDS (1)..(1086)

SEQ ID NO: 1549 - protein, 361 aa, Glycine max; identical to SEQ ID NO: 1029

SEQ ID NO: 1550 - DNA, 1092 bp, Glycine max; identical to SEQ ID NO: 1030
  CDS (1)..(1092)

SEQ ID NO: 1551 - protein, 363 aa, Glycine max; identical to SEQ ID NO: 1031

SEQ ID NO: 1552 - DNA, 849 bp, Glycine max
  CDS (1)..(849)
atggatagtctttgttgcttcagctctgtcagtcaggtggtcggagggcgttcttcatgtaactctggcaaaggcaagagcagtcagtcctcagtcaagtatggctatagcctagttaaagggaaagcaaaccacccgatggaggactaccacgtagcaaaatttgtgcagttcaaagggcgagagcttgggctttttgctatatatgatggacacctgggtgacagtgtaccagcctatttacaaaagcatctgttttctaacatcttgaaggacgaggacttctggaatgatccattcatgtccatttctaatgcatatgagacaacagatcaggcaattctttctcacagtcctgatttggggcgaggaggatcaactgcagtaactgcaattctcataaataatcagaaattatgggtagccaatgttggagattcacgagctgttgtttcaaggggaggggtggctggacagatgtcaactgatcatgaacccaatactgagcggggcagcattgagaccagaggtggctttgtctcaaacatgccaggagatgttgcaagagtgaatgggcagctagcagtttctcgagctttcggagacaaaaacctcaaaacgcacttgcgatctgatcctgacattcagtatactgacattaccccagatgttgagcttttgatacttgctagtgatggtctatggaaggtaatggcaaaccaagaagctgttgatgttgcaagaaggataaaggatccacaaaaggcagcgaaacaactagccactgaggcattgaacagagacagtaaggatgatatttcctgcattgtagttcgtttcaagggttga

SEQ ID NO: 1553 - protein, 282 aa, Glycine max
MDSLCCFSSVSQVVGGRSSCNSGKGKSSQSSVKYGYSLVKGKANHPMEDYHVAKFVQFKGRELGLFAIYDGHLGDSVPAYLQKHLFSNILKDEDFWNDPFMSISNAYETTDQAILSHSPDLGRGGSTAVTAILINNQKLWVANVGDSRAVVSRGGVAGQMSTDHEPNTERGSIETRGGFVSNMPGDVARVNGQLAVSRAFGDKNLKTHLRSDPDIQYTDITPDVELLILASDGLWKVMANQEAVDVARRIKDPQKAAKQLATEALNRDSKDDISCIVVRFKG

SEQ ID NO: 1554 - DNA, 945 bp, Glycine max
  CDS (1)..(945)
atgggttatctcaattcagttttgtcatcttcaagcgaggttcatgctgcaggtgatgcaattgcgagtggtggggggctaagtcacaatagaaaattcagctatgggtatgctagctctcctggcaagagatcttcaatgggagacttttatgagacaagaattgatggtgttgatggtgaagtcgttggccttttcggagtttttgatggtcatggtggtgctcgtgctgctgagtatgtcaagaaaaacctgtttagtaatttaatcagtcacccaaaattcatttctgacaccaaatcagcaataactgatgcatataatcataccgattctgagttgctgaaatcagaaaatatccataatagagatgctggatcaactgcttccactgctattttagttggtgaccgcttgcttgttgcaaatgttggggattccagagctgttatatgcagggttggtaatgccattgctgtttctcgagatcacaagcctgaccaaactgatgagaggcaaaggattgaagaagcaggaggctttgttatgtgggctggaacttggagagttggaggtgttcttgctgtttctcgtgcgtttggtgatagactcctgaagcagtatgttgttgctgatccagaaattcaggaagaaaaaattgacagctcccttgagtttcttattctggccagtgacgggctatgggatgttgtcacaaatgaggaagctgttgctatgattaaatcaattgaggatgctgaggaggcagcaaagaggctgatgcaagaagcatatcagagaggtagtgctgacaatatcacatgtgttgtcgttcgtttcttgatgaaccaaggtggatccaaagacaaagaggtagtagctcctcctcataatagtagctctgccagtaggaatccttcagtagaaggtttgtgtgataggtga

SEQ ID NO: 1555 - protein, 314 aa, Glycine max
MGYLNSVLSSSSEVHAAGDAIASGGGLSHNRKFSYGYASSPGKRSSMGDFYETRIDGVDGEVVGLFGVFDGHGGARAAEYVKKNLFSNLISHPKFISDTKSAITDAYNHTDSELLKSENIHNRDAGSTASTAILVGDRLLVANVGDSRAVICRVGNAIAVSRDHKPDQTDERQRIEEAGGFVMWAGTWRVGGVLAVSRAFGDRLLKQYVVADPEIQEEKIDSSLEFLILASDGLWDVVTNEEAVAMIKSIEDAEEAAKRLMQEAYQRGSADNITCVVVRFLMNQGGSKDKEVVAPPHNSSSASRNPSVEGLCDR

SEQ ID NO: 1556 - DNA, 1128 bp, Brassica napus
  CDS (1)..(1128)
atgtcttgttccgtctgtaactctccggttttttctccgtcgtcgtctcttttctgcagcaaaccttctatcattctctcttcgccgcaagaaaccatctctctcactctttctcatctcaaaccttcctctccttccgccgccgcggcgtccctcaacttgccgttccgtctccgtttacagaaacctccgaccggtttctctccggcgtcgtgtaccggccaatctcctcccggagaggttctgaaacgcaaacgccccacgaggcttgatataccgatcggtaccaccgggttcgttgctccggcgacgccgagggaggaaggtacagaggtggagagggaaggcgatggctattctgtttattgcaagagaggaaggagagaagctatggaggatcgcttctctgccgtaaccaatctccaaggagatcgcaaacatgccatcttcggtgtttacgatggtcacggaggagctaaagcggctgagtttgcggccaagaacttagacaagaacgttttggaagcggttgctggtaaaaacgacgagtcagcgatcgcagacgcggtgaaacgcggttacttgaccacagacgctgcgtttctcaacgagaatgacgttaaaggcggttcctgctgcgtcacggctatgttcagcgacgggaacctcgtggttgccaatgccggcgattgtcgcgccgtcatgagtgttggaggagtcgcggaggctctttcttccgaccaccgcccgtctagggacgatgaacggacaagaattgaaaccacgggtggatacgttgatacgtttcgaggtgtatggagagttgaaggatctttggctgtgtcaagagggatcggtgatgctcatctcaagaaatgggttatagccgaaccagagacaaagacgttgagaatcgagcaggaccatgagttcttgatcttggcatctgacggtctatgggacaaagtgagtaaccaagaagcagtagacattgctcgtcccttctgcctaggaaccgaggagaagccattgttgttgggctgtaagaagcttgtcgatctttcggcttcacgaggctcattggatgatattagtgtgatgctgatccctttggaccagttcatataa

SEQ ID NO: 1557 - protein, 375 aa, Brassica napus
MSCSVCNSPVFSPSSSLFCSKPSIILSSPQETISLTLSHLKPSSPSAAAASLNLPFRLRLQKPPTGFSPASCTGQSPPGEVLKRKRPTRLDIPIGTTGFVAPATPREEGTEVEREGDGYSVYCKRGRREAMEDRFSAVTNLQGDRKHAIFGVYDGHGGAKAAEFAAKNLDKNVLEAVAGKNDESAIADAVKRGYLTTDAAFLNENDVKGGSCCVTAMFSDGNLVVANAGDCRAVMSVGGVAEALSSDHRPSRDDERTRIETTGGYVDTFRGVWRVEGSLAVSRGIGDAHLKKWVIAEPETKTLRIEQDHEFLILASDGLWDKVSNQEAVDIARPFCLGTEEKPLLLGCKKLVDLSASRGSLDDISVMLIPLDQFI

SEQ ID NO: 1558 - DNA, 1674 bp, Glycine max
  CDS (1)..(1674)
atggaggagatgtcctttattgttgtggtgccattaagagtaggtaattgtaattgtaattcagtctgtgataacccaaccatagttccccacatggatgtatccagatttaagctgatggcggacacggggttgttatctaattctgtaactaaggttttcaccgagacagttgcaagtttggatgattgtcatgatagtggcaatttggaggatgaagttggtattgcggaagtcataccaccaatacaagatagggaaggagagagtcctatgttggatatgatatcccaaaatagaagcactttggttgctggtgatgaagagttaaccatggaaattgaggaggattcgttgtcgtttgaaggtgaccagtttgttgatagctcgtgttctctttcggtagtcagtgagaacagtagtgtgtgtggagaggagtcattctgttttgatgctacttcagatgttgggacaccgtgttccacagatgtagagaagagcatctgtgctgtcaatattgttgccgaggctgttgatttaggggagtcaaatgtcgacactgatattatgactgatcctcttgctgtggcagtgagccttgaagaagagtctggagttagatctggtccaaagtcttctgctgttgatcttcatcagttgcctcaggaaaaaggggtgagtggaacagttggtcggagtgtttttgaattggattataccccactttatggattcatatctttgtgtggaagaagacctgagatggaagatgcagttgcaactgtacctcggtttctgaaaattcctattcaaatgctaattggtgatcgggtaattgatggaataaacaagtgttttaatcagcagatgacccatttctttggagtctatgatggtcatggtggctctcaggttgcaaactattgtcgtgatcgtacccattgggccttgactgaggaaatagaatttgtgaaggaagttatgatcagtggaagtatgaaggatggttgtcaagatcagtgggaaaaatctttcaccaattgtttcttaaaggtcaatgctgaagttggagggcaatttaataatgaacctgttgccccggaaactgttggctccactgctgttgttgctgttatttgtgcatctcatatcatagttgcaaattgtggtgattcacgagcggttctatgtcgtggcaaagaacccatggcattatcagtggaccataaacctaaccgagacgatgaatatgcaagaattgaggcagctggaggaaaggtgattcaatggaatggccatcgtgtatttggtgttcttgcaatgtcaaggtctattggcgatagatatttgaagccatggattattccagaaccagaagttacgtttgttccccgtacaaaagatgacgagtgtctcattctggccagcgatggtctgtgggatgttatgacgaatgaggaggtgtgtgaccttgctcggaaacgaataattctctggtacaagaaaaatggcttggaacaaccctcatcaaaaaggggagagggaattgatcctgctgcacaagcagcagcagaatacctatcaaaccgtgcccttcagaaaggaagcaaagataacatcactgtgattgtggttgatttgaaaccctatagaaaatataagagcaagacatga

SEQ ID NO: 1559 - protein, 557 aa, Glycine max
MEEMSFIVVVPLRVGNCNCNSVCDNPTIVPHMDVSRFKLMADTGLLSNSVTKVFTETVASLDDCHDSGNLEDEVGIAEVIPPIQDREGESPMLDMISQNRSTLVAGDEELTMEIEEDSLSFEGDQFVDSSCSLSVVSENSSVCGEESFCFDATSDVGTPCSTDVEKSICAVNIVAEAVDLGESNVDTDIMTDPLAVAVSLEEESGVRSGPKSSAVDLHQLPQEKGVSGTVGRSVFELDYTPLYGFISLCGRRPEMEDAVATVPRFLKIPIQMLIGDRVIDGINKCFNQQMTHFFGVYDGHGGSQVANYCRDRTHWALTEEIEFVKEVMISGSMKDGCQDQWEKSFTNCFLKVNAEVGGQFNNEPVAPETVGSTAVVAVICASHIIVANCGDSRAVLCRGKEPMALSVDHKPNRDDEYARIEAAGGKVIQWNGHRVFGVLAMSRSIGDRYLKPWIIPEPEVTFVPRTKDDECLILASDGLWDVMTNEEVCDLARKRIILWYKKNGLEQPSSKRGEGIDPAAQAAAEYLSNRALQKGSKDNITVIVVDLKPYRKYKSKT

SEQ ID NO: 1560 - DNA, 1143 bp, Zea mays; identical to SEQ ID NO: 1032
  CDS (1)..(1143)

SEQ ID NO: 1561 - protein, 380 aa, Zea mays; identical to SEQ ID NO: 1033

SEQ ID NO: 1562 - DNA, 1113 bp, Zea mays; identical to SEQ ID NO: 1034
  CDS (1)..(1113)

SEQ ID NO: 1563 - protein, 370 aa, Zea mays; identical to SEQ ID NO: 1035

SEQ ID NO: 1564 - DNA, 1098 bp, Zea mays
  CDS (1)..(1098)
atggtatgcatcggtagcctcctgagggcgctggtgctgcgtgcggcgtcgtctgcgggcaggcgccgggggcccaggattctgtgtggccgcgcgacggatgtgcgcgtgacgccacggcacggacacggctggcgcgggttccgggcggtcacgggaaggatgatgctggactcctctgagtctgcctcttccgccgccgccgccgccgcggaggcgggagctggggcggtggcaggccaggcgcagccgcagcgccgcgcggtgggggccgtgccccaggcgcacgatggtggctacgccagcggcggatgggagagagaagatggtaaactgagttgtggatactcaagttttagagggaagagagctacaatggaggatttctatgatgtaaaactaactgaaattgatggacaagctattagcctgttcggtgtttttgacggtcatggtggatcacgtgctgctgagtatttgagggagcacttgtttgagaaccttctcaagcaccctgatttcttgacggatacaaagcttgctataagcgaaacatatcagaaaaccgatacagatttcttggaatcggaagcaagtgctttcagagatgatggttcaacagcttcaactgcaattttggtgggtgaccgtctgtatgttgcaaatgttggtgattctcgtgctgttatttcaaaagctggcaaagctatggcactttcagaagatcacaaacctaacaggattgatgagcgaaagagaatagaaaatgctggtggtattgtcatttgggctggtacttggagggtaggtggtgtattggcgatgtctcgtgcatttggcaatcgtttactgaagccatatgtggtggcggaacctgaaattcaggaagaacagttcagtgatgagctggaatgcctggttctcgctagtgacgggctttgggatgttgtggaaaatgaggaagccgtttcccttggcaaatcagaggacacgccagagtctgcagctcggaaattgacagagatcgcttattctcgtggcagcgctgacaatatcacgtgtatcgtggttcaatttcaccatgacaaaaccggatga

SEQ ID NO: 1565 - protein, 365 aa, Zea mays
MVCIGSLLRALVLRAASSAGRRRGPRILCGRATDVRVTPRHGHGWRGFRAVTGRMMLDSSESASSAAAAAAEAGAGAVAGQAQPQRRAVGAVPQAHDGGYASGGWEREDGKLSCGYSSFRGKRATMEDFYDVKLTEIDGQAISLFGVFDGHGGSRAAEYLREHLFENLLKHPDFLTDTKLAISETYQKTDTDFLESEASAFRDDGSTASTAILVGDRLYVANVGDSRAVISKAGKAMALSEDHKPNRIDERKRIENAGGIVIWAGTWRVGGVLAMSRAFGNRLLKPYVVAEPEIQEEQFSDELECLVLASDGLWDVVENEEAVSLGKSEDTPESAARKLTEIAYSRGSADNITCIVVQFHHDKTG

SEQ ID NO: 1566 - DNA, 1074 bp, Zea mays
  CDS (1)..(1074)
atggtatgcatcggtagcctcctgagggcgctggtcctgagtgcggcggcgtctgcgggcaggcgccgggggcccaggatcctgtgtggccacgaggcggatgtacgcgtgactcctcggcacggacacggctggcgcggattccgggcagtcacgggaaggatgatgctggactcctctgactgtgcctctgctgccgccgccgcggagacggggcaggtgcagccgcagcgccgcgcggtgggggccgtgcccctggcgcacgacggcggctacgccagcggcggatgggagagagaagatggcaaactgagttgtggatactcaagttttagaggcaagagagctacgatggaagatttctatgatgtaaaactaactgaaattgatggacaagctgttagcctgtttggtgttttcgacggtcatggaggatcacgtgctgctgagtatttgagggagcacttgtttgataaccttctcaagcaccctgatttcttgacagatacaaagcttgcgataagtgaaacatatcagaaaacagatacagatttcttggaatcagaagcaagcgctttcagggatgatggttcaacagcttcaactgcacttttggtgggtgaccatttatatgttgcaaatgttggtgattctcgtgccgttatttcaaaagctggcaaagctatggcgctttcagaagatcacaaacctaacagaattgatgagcgaaagagaattgaaaatgctggtggtattgtcatttgggctggcacttggagggtgggtggtgtattggcaatgtcccgtgcatttggcaatcgtttactgaagccatatgtggtggcagaacctgaaattcaggaagaacaggtcagtggtgggctggaatgcctggttcttgctagtgatgggctttgggatgttgtggaaaatgaggaagctgttttccttgggagatcggaggacacgccagagtctgcagctaggaaattgacagagattgcttactctcgcggcagcgctgacaatatcacatgcatcgtggtccaatttcaccatgacaaaaccggatga

SEQ ID NO: 1567 - protein, 357 aa, Zea mays
MVCIGSLLRALVLSAAASAGRRRGPRILCGHEADVRVTPRHGHGWRGFRAVTGRMMLDSSDCASAAAAAETGQVQPQRRAVGAVPLAHDGGYASGGWEREDGKLSCGYSSFRGKRATMEDFYDVKLTEIDGQAVSLFGVFDGHGGSRAAEYLREHLFDNLLKHPDFLTDTKLAISETYQKTDTDFLESEASAFRDDGSTASTALLVGDHLYVANVGDSRAVISKAGKAMALSEDHKPNRIDERKRIENAGGIVIWAGTWRVGGVLAMSRAFGNRLLKPYVVAEPEIQEEQVSGGLECLVLASDGLWDVVENEEAVFLGRSEDTPESAARKLTEIAYSRGSADNITCIVVQFHHDKTG

SEQ ID NO: 1568 - DNA, 1065 bp, Zea mays; identical to SEQ ID NO: 1036
  CDS (1)..(1065)

SEQ ID NO: 1569 - protein, 354 aa, Zea mays; identical to SEQ ID NO: 1037

SEQ ID NO: 1570 - DNA, 1194 bp, Zea mays
  CDS (1)..(1194)
atggccgagatctgctgtgaggcggcggcggcggcggcggggtcggaccagaagggggagtgcgccggcagccgcgcggcgcggcggcggaggatggagattcggcggctcagggtggtggccgaggaggcgtccgccaagaggcggaggctggaggcggatgaggaagacgcggttggggggcgagcgccgaggtacggcgtgacgtcggtctgcgggcggcggagagacatggaggacgcggtgaccgcccgtccggagttcatcaacggccaccacttcttcggggtgttcgacggccacggctgctcacatgtggcgacgtcgtgcggggagcggatgcaccagattgtggccgaggaggcgacagctgccgcaggctcgtcggtttcggacgagaccgcgcggtggaggggtgtcatggagaagagctacgcgaggatggacgccgaggccgtcgtctccagggagaccgccggcccggcgcccacctgccgttgcgagatgcagcttcccaagtgcgaccacgtgggctccactgccgtcgtggccgtggtggggcctcgcaacctcgtcgtcgccaactgcggcgactcccgcgcggtcctctccagcggaggcgccacgatccctctctcagctgaccacaagcctgaccgccccgacgagctcgaacggatccacgcagcgggagggcgcgtcatcttctgggacggcgcccgcgtcttcggcatgctcgccatgtcccgagccatcggtgacagctacctgaagccgttcgtgatctccgacccggaggtgctggtggtggagaggaaggacggcgaggacgagttcctgatcctggccagcgacgggctgtgggacgtggtgagcaacgaggtggcgtgcaaggtcgtgcgcacctgcctccggaacagggcgccacgcggtggccgggagcagtcgagcccgacctccaacctgagccctaggcagagcagcgccagcggcggcagcagcagcagcagcggggacgaggaggctggtgggcccagcggcgacggcgcggggtccgagagcgacggcgagagcgccgaggacagggcgtgcgccgaggcggccatcctgctgaccaagctagcgctggcgcggcagagcgccgacaacgtcagcgtcgtcgtcgtcaacctcaggcggcgcccgcgatcgtga

SEQ ID NO: 1571 - protein, 397 aa, Zea mays
MAEICCEAAAAAAGSDQKGECAGSRAARRRRMEIRRLRVVAEEASAKRRRLEADEEDAVGGRAPRYGVTSVCGRRRDMEDAVTARPEFINGHHFFGVFDGHGCSHVATSCGERMHQIVAEEATAAAGSSVSDETARWRGVMEKSYARMDAEAVVSRETAGPAPTCRCEMQLPKCDHVGSTAVVAVVGPRNLVVANCGDSRAVLSSGGATIPLSADHKPDRPDELERIHAAGGRVIFWDGARVFGMLAMSRAIGDSYLKPFVISDPEVLVVERKDGEDEFLILASDGLWDVVSNEVACKVVRTCLRNRAPRGGREQSSPTSNLSPRQSSASGGSSSSSGDEEAGGPSGDGAGSESDGESAEDRACAEAAILLTKLALARQSADNVSVVVVNLRRRPRS

SEQ ID NO: 1572 - DNA, 855 bp, Zea mays
  CDS (1)..(855)
atggggtacttgagctccgtgatcggccaccccaccgatggatcctccgtcagcggcggcggcctcagccagaatggtagatttagctatggctatgcaagctcccctggtaaaagggcatccatggaagacttctatgagacaaaaattgattgtgttgatggtcagatagttggtctttttggagtttttgatggtcatggtggtgctaaggtagcagagtatgttaaagaaaacctgttcaacaatcttgttagtcatccaaagttcatcagtgatactaaagtcgctatagatgatgcttataaaagcaccgacagtgaattcttagaatctgacagtagtcaaaatcaatgcgggtcaactgcatcaactgctgtacttgttggtgatcgtctcttcgtcgcaaatgttggtgactctagggctatcatatgcagggaaggaaatgctattgctgtttcaaaggatcacaagcctgatcaaactgatgagcggcagcgtattgaagatgctggaggttttgtgatgtgggcaggaacatggcgcgttggtggtgtacttgctgtttcgcgtgcttttggtgacaaactcttaaagcaatatgtggttgtggatccggagatccgagaggaagttgttgatgacacactcgagtttcttatccttgcaagtgatgggctgtgggatgtggtctctaacgaggaagctgttgcgatgactagatccattaaggacccagaagaggctgcaaagatgctcttgcaagaggcgtacaagagggagagcagtgacaacataacttgcgtcgtcgtgcacttcttgcatgggcaaggtagcagcggatacgcttaa

SEQ ID NO: 1573 - protein, 284 aa, Zea mays
MGYLSSVIGHPTDGSSVSGGGLSQNGRFSYGYASSPGKRASMEDFYETKIDCVDGQIVGLFGVFDGHGGAKVAEYVKENLFNNLVSHPKFISDTKVAIDDAYKSTDSEFLESDSSQNQCGSTASTAVLVGDRLFVANVGDSRAIICREGNAIAVSKDHKPDQTDERQRIEDAGGFVMWAGTWRVGGVLAVSRAFGDKLLKQYVVVDPEIREEVVDDTLEFLILASDGLWDVVSNEEAVAMTRSIKDPEEAAKMLLQEAYKRESSDNITCVVVHFLHGQGSSGYA

SEQ ID NO: 1574 - DNA, 873 bp, Zea mays
  CDS (1)..(873)
atggggctcgccggggacgggtcggcggacaccgccaacctcagtaatagtgaaaatggtcggttcagttatggagttgcaagttctcccgggaaaagagcatcgatggaggacttctatgaggcaaggatagacgacgttgacggagagaaagttggaatgtttggtgtgtatgatggtcatggaggagtcagagcagctgagtacgttaagcagcatcttttcagcaatttaatcaaacacccaaagttcatcactgataccaaggccgctattgctgaaacttacaaccgcacagattcagaatttctgaaagctgatagcactcaaactcgagatgctggctcaactgcctcaacagctattattgtaggtgatcgtttgcttgttgcaaatgttggagattctagagctgttatttctaaaggaggacaggcgattgcggtttcaagggatcacaaacctgatcagacagatgagaggcaaagaattgaggatgcagggggctttgttatgtgggctgggacatggagagtgggtggtgttctcgctgtctctcgagcatttggtgataaactcttgaagccgtatgttgttgctgaccctgaaatcaaggaggaggtggtcgacagctccctcgaattcctcatccttgctagcgacggactctgggatgttgtcactaatgaggaagctgttgccatggtcaagcctatccaggacccccaggaagcagcaaacaagcttctcgaagaagcttcccgaaggggaagctccgataacatcacagttatcatcgtccgcttcatagacggaactaccggtgagaaatcaggcgacgacaaagagaccaccaacgaccaacactcctag

SEQ ID NO: 1575 - protein, 290 aa, Zea mays
MGLAGDGSADTANLSNSENGRFSYGVASSPGKRASMEDFYEARIDDVDGEKVGMFGVYDGHGGVRAAEYVKQHLFSNLIKHPKFITDTKAAIAETYNRTDSEFLKADSTQTRDAGSTASTAIIVGDRLLVANVGDSRAVISKGGQAIAVSRDHKPDQTDERQRIEDAGGFVMWAGTWRVGGVLAVSRAFGDKLLKPYVVADPEIKEEVVDSSLEFLILASDGLWDVVTNEEAVAMVKPIQDPQEAANKLLEEASRRGSSDNITVIIVRFIDGTTGEKSGDDKETTNDQHS

SEQ ID NO: 1576 - DNA, 1098 bp, Zea mays
  CDS (1)..(1098)
atgggggtttaccttagcactccgaaaactgagaaggtatccgaagatggggaaaatgataaacttaaattcggagtttcatctatgcaagggtggcgtacaactatggaagatgctcactcggctttgctagatctcgacaatgacactgcgttttttggtgtttttgatggacatggaggaaaagtagtcgccaaattctgtgcaaaatatctacacagagaagttctcaagaccgaagcctatgcagctggtgacctgggtgctgctgtccacagagcttacttaagaatggatgaaatgatgcgaggtcaaagaggatggcgggaactccaagcacttggagataagataaatcagttcactggcataatagaaggcttaatttggtcccctaaagcaagtgattcaaatgatagacatgatgattgggctttcgaggagggaccacactctgactttactgggccaaattgtgggagtacagcatgtgtagcattaatcagaaataagcaactcgttgtggcaaatgctggtgactcccgctgtgtcatctcaaggaatggtcaggcatacaatttgtctagagaccataaaccagagctcgaggcagagagagagaggatacggagtgcaggcggtttcgttctaatggggcgtgtaaatggaaatctaaacttgtcaagagctatcggagacatgaagttcaaacaaaacaagttcttgccccccgataagcaaatcctgactgcgaaccccgacataaacattgtcgagctatgtgatgacgacgaattcattgttttggcatgcgatggcatctgggactgcatgtcaagccagcagttggtcgatttcatccgcgagcatatagacacagaggaaagcctctcggcagtatgcgagagagtgctcgatagatgcctggctccgtcgaccatgggcggcgagggatgcgataacatgacgatgatcctggtgcagttcaagaagccgattgctcaggtcgaggacgccagcggtgcagaaccagctggagacgctgggtgctgtgagacccatggggcccacgagaacggctctggtaagcaggtgtag

SEQ ID NO: 1577 - protein, 365 aa, Zea mays
MGVYLSTPKTEKVSEDGENDKLKFGVSSMQGWRTTMEDAHSALLDLDNDTAFFGVFDGHGGKVVAKFCAKYLHREVLKTEAYAAGDLGAAVHRAYLRMDEMMRGQRGWRELQALGDKINQFTGIIEGLIWSPKASDSNDRHDDWAFEEGPHSDFTGPNCGSTACVALIRNKQLVVANAGDSRCVISRNGQAYNLSRDHKPELEAERERIRSAGGFVLMGRVNGNLNLSRAIGDMKFKQNKFLPPDKQILTANPDINIVELCDDDEFIVLACDGIWDCMSSQQLVDFIREHIDTEESLSAVCERVLDRCLAPSTMGGEGCDNMTMILVQFKKPIAQVEDASGAEPAGDAGCCETHGAHENGSGKQV

SEQ ID NO: 1578 - DNA, 1101 bp, Zea mays
  CDS (1)..(1101)
atggggatttaccttagcacaccaaaaaccgacaaggtatccgaagatggggaaaacgataaacttaaattcggactttcatctatgcaagggtggcgtgcaactatggaagacgctcactcggctttgctagatcttgacaatgacactgcatcctttggtgtttttgatggacatggaggaaaagtagttgccaaattctgtgcaaaatatctacacagagaagttctccataccgaagcctatgctgctggtgacctgggtgctgctgtccacagagcttacttaagaatggatgaaatgatgcggggtcaaagaggatggcgggaactccaagcacttggagataagataaatcagttcactggcataacagaaggcttgatttggtcccctaaagcaagtgattcaaatgatagacatgatgattgggctttcgaggagggaccacactctgacttcactgggccaaattgtgggagtacagcatgtgtagcattagtcagaaataggcaactcgttgtggcaaatgctggtgactcccgctgcgtcatctcaaggaatggccaggcatacaatttgtcaagagaccataaaccagagcttgaggcagagagagaaaggatacaaagtgctgggggttacattaaaatggggcatgtaaatggaagtttaaacttgtcaagagctattggagacatggagcttaaacaaaacaagttcttgtcccctgataagcaaattttgaccgcaaaccctgacataaacattgtcgagctatgtgacgacgacgaattcattgttttagcatgtgatggcatttgggactgcatgtcaagccagcagttggttgatttcatccgtgaacatataaacacagaggaaagcctttctgcagtatgtgaaagagtgcttgatagatgcctggctccatcgaccatggctggcgagggatgcgataacatgacgatgatcctggtgcagttcaagaagccatttgctcaggtaaaggatgccagtgatgcggaacaactaactggagatgcgggatgctctgagacccatggggccgaggagaatggctctgacaagcagatatag

SEQ ID NO: 1579 - protein, 366 aa, Zea mays
MGIYLSTPKTDKVSEDGENDKLKFGLSSMQGWRATMEDAHSALLDLDNDTASFGVFDGHGGKVVAKFCAKYLHREVLHTEAYAAGDLGAAVHRAYLRMDEMMRGQRGWRELQALGDKINQFTGITEGLIWSPKASDSNDRHDDWAFEEGPHSDFTGPNCGSTACVALVRNRQLVVANAGDSRCVISRNGQAYNLSRDHKPELEAERERIQSAGGYIKMGHVNGSLNLSRAIGDMELKQNKFLSPDKQILTANPDINIVELCDDDEFIVLACDGIWDCMSSQQLVDFIREHINTEESLSAVCERVLDRCLAPSTMAGEGCDNMTMILVQFKKPFAQVKDASDAEQLTGDAGCSETHGAEENGSDKQI

SEQ ID NO: 1580 - DNA, 855 bp, Zea mays
  CDS (1)..(855)
atggcaaggttatgttgcttcggcgccggttgctccgatttcacggggcaagggtcaatagcatccggtaaagggaaaggctgtcaagggcaagtcaagatctgctatggatataaccttgtaagagggatgacgaatcatccaatggaggactatcattttgccgaacttgttgatgtcaaaggaaacgagcttggtctttttgctatttatgatggtcatttaggggataccgttcctatgtatttacagaagaatttatttacaaatattttgaatgaggaagagttttggacacacacagatagagcgattataaaagcgtatgaaaaaacagaccaagctattctgtcacatactccagatctgggacaaggtggctccactgctgtaaccgccattcttgtgaacggcaggaagttatgggtagctaatgttggcgattcaagagctgttcttttgaaaggtggtgagcccatacagatgtcgatagaccatgatccgaatgttgagcggagtgtaatcgaaaataggggtggttttgtttcaaatatgccaggagatgttccccgagtatgtggtcagttggctgtctccagagcttttggagacaggaatctaaaatcactattgagatcagagcctgatataaaaatcgaagacatagatcacactgccgagctacttgttcttgcgagtgacggtctttggaaggtgatgaacaatcaagaggttgtcgatttggccaaaaggtacaaggatccctatgctgctgccaagcaattaaccgtcgaagcacaaaaaagagatagtaaggatgatatatcatgcatcgttgttcggttcaaggcgtaa

SEQ ID NO: 1581 - protein, 284 aa, Zea mays
MARLCCFGAGCSDFTGQGSIASGKGKGCQGQVKICYGYNLVRGMTNHPMEDYHFAELVDVKGNELGLFAIYDGHLGDTVPMYLQKNLFTNILNEEEFWTHTDRAIIKAYEKTDQAILSHTPDLGQGGSTAVTAILVNGRKLWVANVGDSRAVLLKGGEPIQMSIDHDPNVERSVIENRGGFVSNMPGDVPRVCGQLAVSRAFGDRNLKSLLRSEPDIKIEDIDHTAELLVLASDGLWKVMNNQEVVDLAKRYKDPYAAAKQLTVEAQKRDSKDDISCIVVRFKA

SEQ ID NO: 1582 - DNA, 1185 bp, Zea mays
  CDS (1)..(1185)
atggccgagatctgctgtgaggcggcggcggcggggtcggaccagaagggggagtgcgccggcagccgcgcggcgcggcggcggaggatggagattcggcggctcagggtggtggccgaggaggcgtccgccaagaggcggaggctggaggcggatgaggaagacgcggttggggggcgagcgccgaggtacggcgtgacgtcggtctgcgggcggcggagagacatggaggacgcggtgaccgcccgtccggagttcatcaacggccaccacttcttcggggtgttcgacggccacggctgctcacatgtggcgacgtcgtgcggggagcggatgcaccagattgtggccgaggaggcgacagctgccgcaggctcgtcggtttcggacgagaccgcgcggtggaggggtgtcatggagaagagctacgcgaggatggacgccgaggccgtcgtctccagggagaccgccggcccggcgcccacctgccgttgcgagatgcagcttcccaagtgcgaccacgtgggctccactgccgtcgtggccgtggtggggcctcgccacctcgtcgtcgccaactgcggcgactcccgcgcggtcctctccagcggaggcgccacgatccctctctcagctgaccacaagcctgaccgccccgacgagctcgaacggatccacgcagcgggagggcgcgtcatcttctgggacggcgcccgcgtcttcggcatgctcgccatgtcccgagccatcggtgacagctacctgaagccgttcgtgatctccgacccggaggtgcgggtggtggagaggaaggacggcgaggacgagttcctgatcctggccagcgacgggctgtgggacgtggtgagcaacgaggtggcgtgcaaggtcgtgcgcacctgcctccggaacagggcgccacgtggtggccgggagcagtcgagcccgacctccaacctgagccccaggcagagcagcggcagcggcagcggcagcagcagcggggacgaggaggctggtgggcccagcggcgacggcgcggggtccgagagcgacggcgagagcgccgaggacagggcgtgcgccgaggcggccatcctgctgaccaagctagcgctggcgcggcagagcgccgacaacgtcagcgtcgtcgtcgtcaacctcaggcggcgcccgcgatcgtga

SEQ ID NO: 1583 - protein, 394 aa, Zea mays
MAEICCEAAAAGSDQKGECAGSRAARRRRMEIRRLRVVAEEASAKRRRLEADEEDAVGGRAPRYGVTSVCGRRRDMEDAVTARPEFINGHHFFGVFDGHGCSHVATSCGERMHQIVAEEATAAAGSSVSDETARWRGVMEKSYARMDAEAVVSRETAGPAPTCRCEMQLPKCDHVGSTAVVAVVGPRHLVVANCGDSRAVLSSGGATIPLSADHKPDRPDELERIHAAGGRVIFWDGARVFGMLAMSRAIGDSYLKPFVISDPEVRVVERKDGEDEFLILASDGLWDVVSNEVACKVVRTCLRNRAPRGGREQSSPTSNLSPRQSSGSGSGSSSGDEEAGGPSGDGAGSESDGESAEDRACAEAAILLTKLALARQSADNVSVVVVNLRRRPRS

SEQ ID NO: 1584 - DNA, 873 bp, Zea mays
  CDS (1)..(873)
atggggctcgccggggacgggtcggcggacaccgccaacctcagtaatagtgaaaatggtcggttcagttatggagttgcaagttctcccgggaaaagagcatcgatggaggacttctatgaggcaaggatagacgacgttgacggagagaaagttggaatgtttggtgtgtatgatggtcatggaggagtcagagcagctgagtacgttaagcagcatcttttcaacaatttaatcaaacacccaaagttcatcactgataccaaggccgctattgctgaaacttacaaccgcacagattcagaatttctgaaagctgatagcactcaaactcgagatgctggctcaactgcctcaacagctattattgtaggtgatcgtttgcttgttgcaaatgttggagattctagagctgttatttctaaaggaggacaggcgattgcggtttcaagggatcacaaacctgatcagacagatgagaggcaaagaattgaggatgcagggggctttgttatgtgggctgggacatggagagtgggtggtgttctcgctgtctctcgagcatttggtgataaactcttgaagccgtatgttgttgctgaccctgaaatcaaggaggaggtggtcgacagctcccccgaattcctcatccttgctagcgacggactctgggatgttgtcactaatgaggaagctgttgccatggtcaagcctatccaggacccccaggaagcagcaaacaagcttctcgaagaagcttcccgaaggggaagctccgataacatcacagttatcatcgtccgcttcatagacggaactaccagtgagaaatcaggcgacgacaaagagaccaccaacgaccaacactcctag

SEQ ID NO: 1585 - protein, 290 aa, Zea mays
MGLAGDGSADTANLSNSENGRFSYGVASSPGKRASMEDFYEARIDDVDGEKVGMFGVYDGHGGVRAAEYVKQHLFNNLIKHPKFITDTKAAIAETYNRTDSEFLKADSTQTRDAGSTASTAIIVGDRLLVANVGDSRAVISKGGQAIAVSRDHKPDQTDERQRIEDAGGFVMWAGTWRVGGVLAVSRAFGDKLLKPYVVADPEIKEEVVDSSPEFLILASDGLWDVVTNEEAVAMVKPIQDPQEAANKLLEEASRRGSSDNITVIIVRFIDGTTSEKSGDDKETTNDQHS

SEQ ID NO: 1586 - DNA, 1065 bp, Zea mays; identical to SEQ ID NO: 1042
  CDS (1)..(1065)

SEQ ID NO: 1587 - protein, 354 aa, Zea mays; identical to SEQ ID NO: 1043

SEQ ID NO: 1588 - DNA, 1092 bp, Zea mays
  CDS (1)..(1092)
atgggggtgtacctcagcacgcccaagacggacaagctctcagctgatggagagaacagccgcgtccggttcggcctctcctccatgcaggggtggcggaccaccatggaggacgcgcatgctgccttgccagaccttgatgaatgcacatccttttttggtgtttatgatggccatggtggaaaagctgtatcaaaattttgtgcgaggcatttgcataaacaagtgcttataaatgatgcaaattcatctggtgatttgccaacctctctccataaagctttcttaagaatggatgagatgatgaaagggcagaggggttggagagaactaactgagctgggagataagggaaacaaaatctcaggtatgatagacgacataatatggcctcccaagggtggtgattcagataagataagggaagattgggataccgaggagggtccaaattcgaactttcctggaccaacatctggaagcacagcttgtgtggctgtcataagaaatgacaaattaattgttgcaaatgctggggattctcggtgtgttatctcacggaagggtcaggcttacaatttgtcaacagatcacaaaccagatcttgaggaagagagggagaggattttgggtgctggtggatttgttgttgccggacgggtcaatgcaagtctgaacttatctagggcaataggtgacatggaactgaagcaaaatgacctcctgccagtggagaggcagatcgtgacagctgaacctgaattgaaaacagtccagctctcggaggatgatgaattcattgttttagcttgtgatggaatttgggattgcatgtcaagtcaagaagtagttgattttgtacataaacagctaaagaccgaggataagatatctagtgtgtgtgagaagttgctcaaccgctgtgtggcacctacatctggtggcaaaggatgtgataacatgacggttattgtggttcaattcgagaaaccagctttagctgttgctacttctagcgctgagcagtctgctaccactgcagaagggatgcggcccaacgaggtcgatggcccagattaccccccgaagtag

SEQ ID NO: 1589 - protein, 363 aa, Zea mays
MGVYLSTPKTDKLSADGENSRVRFGLSSMQGWRTTMEDAHAALPDLDECTSFFGVYDGHGGKAVSKFCARHLHKQVLINDANSSGDLPTSLHKAFLRMDEMMKGQRGWRELTELGDKGNKISGMIDDIIWPPKGGDSDKIREDWDTEEGPNSNFPGPTSGSTACVAVIRNDKLIVANAGDSRCVISRKGQAYNLSTDHKPDLEEERERILGAGGFVVAGRVNASLNLSRAIGDMELKQNDLLPVERQIVTAEPELKTVQLSEDDEFIVLACDGIWDCMSSQEVVDFVHKQLKTEDKISSVCEKLLNRCVAPTSGGKGCDNMTVIVVQFEKPALAVATSSAEQSATTAEGMRPNEVDGPDYPPK

SEQ ID NO: 1590 - DNA, 855 bp, Zea mays
  CDS (1)..(855)
atggcaaggttatgttgcttcggcgccggttgctccgatttcacggggcaagggtcaatagcatccggtaaagggaaaggctgtcaagggcaagtcaagatctgctatggatataaccttgtaagagggatgacgaatcatccaatggaggactatcattttgccgaacttgttgatgtcaaaggaaacgagcttggtctttttgctatttatgatggtcatttaggggacacagttcctatgtatttacagaagaatttatttacaaatattttgaatgaggaagagttttgtacacacacagatagagcgattataaaagcgtatgaaaaaacagaccaagctattctgtcacatactccagatctgggacaaggtggctccactgctgtaaccgccattcttgtgaacggcaggaagttatgggtagctaatgttggcgattcaagagctgttcttttgaaaggtggtgagcccatacagatgtcgatagaccatgatccgaatgttgagcggagtgtaatcgaaaataggggtggttttgtttcaaatatgccaggagatgttccccgagtatgtggtcagttggctgtctccagagcttttggagacaggaatctaaaatcactattgagatcagagcctgatataaaaatcgaagacatagatcacactgccgagctacttgttcttgcgagtgacggtctttggaaggtgatgaacaatcaagaggttgtcgatttggccaaaaggtacaaggatccctatgctgctgccaagcaattaaccgtcgaagcacaaaaaagagatagtaaggatgatatatcatgcatcgttgttcggttcaaggcgtaa

SEQ ID NO: 1591 - protein, 284 aa, Zea mays
MARLCCFGAGCSDFTGQGSIASGKGKGCQGQVKICYGYNLVRGMTNHPMEDYHFAELVDVKGNELGLFAIYDGHLGDTVPMYLQKNLFTNILNEEEFCTHTDRAIIKAYEKTDQAILSHTPDLGQGGSTAVTAILVNGRKLWVANVGDSRAVLLKGGEPIQMSIDHDPNVERSVIENRGGFVSNMPGDVPRVCGQLAVSRAFGDRNLKSLLRSEPDIKIEDIDHTAELLVLASDGLWKVMNNQEVVDLAKRYKDPYAAAKQLTVEAQKRDSKDDISCIVVRFKA

SEQ ID NO: 1592 - DNA, 1083 bp, Zea mays; identical to SEQ ID NO: 1044
  CDS (1)..(1083)

SEQ ID NO: 1593 - protein, 360 aa, Zea mays; identical to SEQ ID NO: 1045

SEQ ID NO: 1594 - DNA, 1455 bp, Zea mays
  CDS (1)..(1455)
atggaagacgtcgtagcagtcgtggcgtcactctccgcgccgccggcgccggcgtttagccccgccgcggcggggctcacgctgatcgccgcggcggtcgcggacccgatcgccgcggtggtcgtcggagccatggagggggtctccgtgcccgtgactgtgcccccggtcaggacggcgtccgcggtggacgacgacgcgctggcgccgggagaggaagggggagacgcctctttggccgggagcccgtgctcggtggtcagcgactgtagcagcgtggccagcgctgatttcgagggggtcgggctgtgtttcttcggcgcggcagcaggcgcggagggtggtcccatggtgttggaggactcgaccgcgtctgcagccacggtcgaggcggaggccagggtcgcggctggtgggaggagtgtcttcgccgtggactgcgtgccgctgtggggctacacttccatatgcgaccgccgtccggagatggaggatgccgttgctatagtgccgcgattctttgacttgccactctggttgctcaccggcaatgcgatggtcgatggcctcgatcccatgacgttccgcttacctgcacatttctttggtgtctatgacggacacggtggtgcacaggtagcaaattactgtcgggaacgcctccatgtggccctactggagcagctgagcaggatagaggagactgcgtgtgcagctaacttgggagacatggagttcaagaaacagtgggaaaaggtctttgtggattcttatgctagagtggatgacgaggttgggggaaacacgatgaggggaggtggtgaagaagcaggcacaagtgatgctgctatgacactcgtgccagaacctgtggcacctgagacggtgggttcgacggcggtcgtcgctgtcatctgctcctcacatatcattgtctccaactgtggagattcacgggcagtgctctgccgaggcaagcagcctgtgcctctgtcggtggatcataaacctaacagggaggatgagtatgcaaggattgaggcagagggtggcaaggtcatacaatggaacggttatcgagttttcggtgttcttgcaatgtcgcgatcaattggtgacagatatctgaagccatggataattccagtcccagaggtaacaatagttccgcgggctaaggatgacgagtgccttattcttgccagtgacggcctctgggatgtaatgtcaaatgaagaggtatgtgaaatcgctcgcaagcggatacttctgtggcacaaaaagaacagcacaagctcatcatcagccccacgggttggtgattccgcagactcagccgctcaagcggctgctgaatgcttgtcgaagtttgctcttcagaaggggagcaaagacaacattactgtcgtggtagttgatctgaaagcacagcgcaagttcaagagcaaaacttaa

SEQ ID NO: 1595 - protein, 484 aa, Zea mays
MEDVVAVVASLSAPPAPAFSPAAAGLTLIAAAVADPIAAVVVGAMEGVSVPVTVPPVRTASAVDDDALAPGEEGGDASLAGSPCSVVSDCSSVASADFEGVGLCFFGAAAGAEGGPMVLEDSTASAATVEAEARVAAGGRSVFAVDCVPLWGYTSICDRRPEMEDAVAIVPRFFDLPLWLLTGNAMVDGLDPMTFRLPAHFFGVYDGHGGAQVANYCRERLHVALLEQLSRIEETACAANLGDMEFKKQWEKVFVDSYARVDDEVGGNTMRGGGEEAGTSDAAMTLVPEPVAPETVGSTAVVAVICSSHIIVSNCGDSRAVLCRGKQPVPLSVDHKPNREDEYARIEAEGGKVIQWNGYRVFGVLAMSRSIGDRYLKPWIIPVPEVTIVPRAKDDECLILASDGLWDVMSNEEVCEIARKRILLWHKKNSTSSSSAPRVGDSADSAAQAAAECLSKFALQKGSKDNITVVVVDLKAQRKFKSKT

SEQ ID NO: 1596 - DNA, 1047 bp, Zea mays
  CDS (1)..(1047)
atgcgcgaggagggaccgtggggaccaccaccaccagcaccaccacctccatccgtgcgcctctcgctctcgctggtggtgctcctcctcctcctcctgctcccggggcgggcggcctccttttccacctcctgctggtgccagggccgggagggcgtcgcggaggtggcgcgcatggggctcgccggggacgggtcggcggacaccgcccacctcagtaataatgaaaatgggcggttcatttatggagttgcgagttctcctggtaaaagagcatcgatggaggacttctatgaggcaagaatagacgacgttgatggagagaaaattggaatgttcggtgtatatgatggtcatggaggagtccgagcagctgagtatgttaagcagcaccttttcagcaatttaatcaaacacccaaagttcatcactgataccaaggctgctatcgccgaaacttacaacctcacagattcagaatttctgaaagctgatagctgtcaaactcgagatgctggctcaactgcctcaacagctattattgtaggtgaccgtttgcttgttgcaaatgttggagattctagagccgttatttctaaaggaggacaagcgattgcggtttcaagggatcacaaacctgatcagacagatgagagacaaagaattgaggacgcagggggctttgttatgtgggctgggacatggcgagtgggtggtgttcttgctgtctctcgcgcatttggtgataaactcttgaagcagtatgttgtcgctgaccctgaaatcaaggaggaggtggtcgacagctcccttgaattcctcatccttgctagtgatggactctgggatgttgtcactaatgaggaagctgttgccatggtcaagcctattcaggacccccaggaagcagcaaacaagcttctcgaagaagcgtcccgaaggggaagctctgataacatcaccgttgtcatcgtccgcttcctatatggaactaccggtgataaatcaggcgcagacaaagagaccaccaatgaccaaaactcctaa

SEQ ID NO: 1597 - protein, 348 aa, Zea mays
MREEGPWGPPPPAPPPPSVRLSLSLVVLLLLLLLPGRAASFSTSCWCQGREGVAEVARMGLAGDGSADTAHLSNNENGRFIYGVASSPGKRASMEDFYEARIDDVDGEKIGMFGVYDGHGGVRAAEYVKQHLFSNLIKHPKFITDTKAAIAETYNLTDSEFLKADSCQTRDAGSTASTAIIVGDRLLVANVGDSRAVISKGGQAIAVSRDHKPDQTDERQRIEDAGGFVMWAGTWRVGGVLAVSRAFGDKLLKQYVVADPEIKEEVVDSSLEFLILASDGLWDVVTNEEAVAMVKPIQDPQEAANKLLEEASRRGSSDNITVVIVRFLYGTTGDKSGADKETTNDQNS

SEQ ID NO: 1598 - DNA, 1098 bp, Zea mays
  CDS (1)..(1098)
atgggggtttaccttagcactccgaaaactgagaaggtatccgaagatggggaaaatgataaacttaaattcggagtttcatctatgcaagggtggcgtacaactatggaagatgctcactcggctttgctagatctcgacaatgacactgcgttttttggtgtttttgatggacatggaggaaaagtagtcgccaaattctgtgcaaaatatctacacagagaagttctcaggagtgaagcctatgcagctggtgacctgggtgctgctgtccacagagcttacttcagaatggatgaaatgatgcgaggtcaaagaggatggcgggaacttcaagcacttggagataagataaatcagtttagtggcataatagaaggcttaatttggtctcctaaagcaagtgattcaaatgatagacatgatgattgggcttttgaggagggaccacactctgattttactgggccaaattgtgggagtacagcctgtgtagctttgatcagaaataagcaactcgttgtggcaaatgctggtgactcccgctgtgtcatctcaaggaatggtcaggcatacaatttgtctagagaccataaaccagagctcgaggcagagagagagaggatacggagtgcaggcggtttcgttctaatggggcgtgtaaatggaaatctaaacttgtcaagagctatcggagacatgaagttcaaacaaaacaagttcttgccccccgataagcaaatcctgactgcgaaccccgacataaacattgtcgagctatgtgatgacgacgaattcattgttttggcatgcgatggcatctgggactgcatgtcaagccagcagttggtcgatttcatccgcgagcatatagacacagaggaaagcctctcggcagtatgcgagagagtgctcgatagatgcctggctccgtcgaccatgggcggcgagggatgcgataacatgacgatgatcctggtgcagttcaagaagccgattgctcaggtcgaggacgccagcggtgcagaaccagctggagacgctgggtgctgtgagacccatggggcccacgagaacggctctggtaagcaggtgtag

SEQ ID NO: 1599 - protein, 365 aa, Zea mays
MGVYLSTPKTEKVSEDGENDKLKFGVSSMQGWRTTMEDAHSALLDLDNDTAFFGVFDGHGGKVVAKFCAKYLHREVLRSEAYAAGDLGAAVHRAYFRMDEMMRGQRGWRELQALGDKINQFSGIIEGLIWSPKASDSNDRHDDWAFEEGPHSDFTGPNCGSTACVALIRNKQLVVANAGDSRCVISRNGQAYNLSRDHKPELEAERERIRSAGGFVLMGRVNGNLNLSRAIGDMKFKQNKFLPPDKQILTANPDINIVELCDDDEFIVLACDGIWDCMSSQQLVDFIREHIDTEESLSAVCERVLDRCLAPSTMGGEGCDNMTMILVQFKKPIAQVEDASGAEPAGDAGCCETHGAHENGSGKQV

SEQ ID NO: 1600 - DNA, 1119 bp, Zea mays; identical to SEQ ID NO: 1046
  CDS (1)..(1119)

SEQ ID NO: 1601 - protein, 372 aa, Zea mays; identical to SEQ ID NO: 1047

SEQ ID NO: 1602 - DNA, 1074 bp, Zea mays
  CDS (1)..(1074)
atggtatgcatcggtagcctcctgagggcgctggtcctgagtgcggcggcgtctgcgggcaggcgccgggggcccaggatcctgtgtggccacgaggcggatgtacgcgtgactcctcggcacggacacggctggcgcggattccgggcagtcacgggaaggatgatgctggactcctctgactgtgcctctgctgccgccgccgcggaggcggggcaggtgcagccgcagcgccgcgcggtgggggccgtgcccctggcgcacgacggcggctacgccagcggcggatgggagagagaagatggcaaactgagttgtggatactcaagttttagaggcaagagagctacgatggaagatttctatgatgtaaaactaactgaaattgatggacaagctgttagcctgtttggtgttttcgacggtcatggaggatcacgtgctgctgagtatttgagggagcacttgtttgataaccttctcaagcaccctgatttcttgacagatacaaagcttgcgataagtgaaacatatcagaaaacagatacagatttcttggaatcagaagcaagcgctttcagggatgatggttcaacagcttcaactgcacttttggtgggtgaccatttatatgttgcaaatgttggtgattctcgtgccgttatttcaaaagctggcaaagctatggcgctttcagaagatcacaaacctaacagaattgatgagcgaaagagaattgaaaatgctggtggtattgtcatttgggctggcacttggagggtgggtggtgtattggcaatgtcccgtgcatttggcaatcgtttactgaagccatatgtggtggcagaacctgaaattcaggaagaacaggtcagtggtgggctggaatgcctggttcttgctagtgatgggctttgggatgttgtggaaaatgaggaagctgttttccttgggagatcggaggacacgccagagtctgcagctaggaaattgacagagattgcttactctcgcggcagcgctgacaatatcacatgcatcgtggtccaatttcaccatgacaaaaccggatga

SEQ ID NO: 1603 - protein, 357 aa, Zea mays
MVCIGSLLRALVLSAAASAGRRRGPRILCGHEADVRVTPRHGHGWRGFRAVTGRMMLDSSDCASAAAAAEAGQVQPQRRAVGAVPLAHDGGYASGGWEREDGKLSCGYSSFRGKRATMEDFYDVKLTEIDGQAVSLFGVFDGHGGSRAAEYLREHLFDNLLKHPDFLTDTKLAISETYQKTDTDFLESEASAFRDDGSTASTALLVGDHLYVANVGDSRAVISKAGKAMALSEDHKPNRIDERKRIENAGGIVIWAGTWRVGGVLAMSRAFGNRLLKPYVVAEPEIQEEQVSGGLECLVLASDGLWDVVENEEAVFLGRSEDTPESAARKLTEIAYSRGSADNITCIVVQFHHDKTG

SEQ ID NO: 1604 - DNA, 1341 bp, Zea mays
  CDS (1)..(1341)
atggaggtgcacgccgacgtcgatgggtccggtgtgcccctggccgtgctcctcaagcgggagctgtgcaaccagaaggtggagaggccggacattctgttcggggaggccaacaagagcaagaaaggggaggacttcacgctcctcttgcccaggtgccaccgcaccacaggcgaaggcggcggcagtggcggcggcgagaatgcaggcggcggcgacgacgacgacaccatttccgtgtttgcgatttttgatggacacaatggctctttagctgccatatacacacgggagaatctaataaacaatgtgctggctgctattcctccaaatctcacaagtgaggagtggacagctgcgttgccaagggcactagttgctggttttgtaaaaacggataaagacttccaaacaaaagctgcacgttcagggaccactgtgacttttgttataatagatggatgggttgtcactgtagcatcagttggcgattcacgatgtattctagaatctgctgaaggttcagtatattttttatcagcagatcatcgcctggatgctaatgaagaggaggtggagcgtgttacagcaagtggtggtgaagttgggagaataaatattgctgggggtgctgggattggtccgctcagatgctggccaggcggattgtgtctatcaaggtcaataggtgacattgacgtcggggaatttatagttcctgtcccacatgtgaagcaagtaaagttgtccaatgctggtgggcggcttgtcattgccagtgatggtgtgtgggatgcgctgtgttttcaagaggctctgaactacatcaggggtctaccagccgaagctgctgctaatcgaattgttaaggaagctgtcacttcaaagggattaagagatgatactacttgcatagtagttgacatactacctccagaaaagttaagccccccactaaagcgacctggaaaaggagtcatcaaaactctgttccgtcggaggccctccgatgaaatgtctgaagatcagatggacagaggatgtttagaacctgatgtcgtggaggaaatatacgaggagggctctgcaatgcttgctcgaaggttgaatataaattacccatcgggaaatatgttcaagctgcatgattgtgctgtctgccaattggagatgaaacctggtgagggcacctctgttcatggtaacatgcccaagcattcaagagttgacccctggggtggtccttttctctgttcctcctgtcaattgaaaaaggaggccatggaagggaagctacattcaagaaattcccaatttgatgttcgacctatgcctaagtag

SEQ ID NO: 1605 - protein, 446 aa, Zea mays
MEVHADVDGSGVPLAVLLKRELCNQKVERPDILFGEANKSKKGEDFTLLLPRCHRTTGEGGGSGGGENAGGGDDDDTISVFAIFDGHNGSLAAIYTRENLINNVLAAIPPNLTSEEWTAALPRALVAGFVKTDKDFQTKAARSGTTVTFVIIDGWVVTVASVGDSRCILESAEGSVYFLSADHRLDANEEEVERVTASGGEVGRINIAGGAGIGPLRCWPGGLCLSRSIGDIDVGEFIVPVPHVKQVKLSNAGGRLVIASDGVWDALCFQEALNYIRGLPAEAAANRIVKEAVTSKGLRDDTTCIVVDILPPEKLSPPLKRPGKGVIKTLFRRRPSDEMSEDQMDRGCLEPDVVEEIYEEGSAMLARRLNINYPSGNMFKLHDCAVCQLEMKPGEGTSVHGNMPKHSRVDPWGGPFLCSSCQLKKEAMEGKLHSRNSQFDVRPMPK

SEQ ID NO: 1606 - DNA, 1218 bp, Zea mays
  CDS (1)..(1218)
atggtggccgaggcggaagtcatgcatcagtcccccgttccggtgctggaggtgcagtaccaccggcgcgcgacgaccaagggggttgacgacgtcgtcgggatgtccgcgcccgcccccgcggaggttggggttggggttggggttgaggtcgaggtcgaggtcgaggtcgccgtggaggtgcctcgcatggggttggagcagcctgatgtcgcaccaagtttatccacggacatgatacagcagtttgtgcccaacatccgttctggtagcttcgccgacattgggcctcggaggtatatggaggacgagcacatccgaatagatgatctttccgcccatctcggctcgatgttggtctgccctctgcctagcgccttctacggggtctttgacggccatggcggcccggacgccgcagcctacatgaagaggcatgcgatgaggttcttgtttgaggaaagcgagttcccacaggcgtcgcaggtggatgaggtgtacctcgagtccgtggagagctgtgtccgcagagccttcctgcaggcggaccttgccctggctgatgatctggacatcagccggtcctctggaaccacggcgctcactgcattagtgtttggaaggcaactggtggtcgcgaacacgggggactgccgcgcggtgttgtgccggaaaggagtggcgatggagatgtcccgcgaccaccgcgcgaaccacgtggaggagcgcgagagggtggccgcgtcgggcgggtacatcgaggacgggtacctgaacggggtgctgtcggtgacgcgggcgctgggcgactgggacatgaaggcgcccggcgcgtcggcgtcggcggcgctgatcgcggagcccgagttccggcgggcgacgctgggtgaggacgacgagttcctcgtcatggggtgcgacgggatctgggacgtgatgacgagccagcacgcggtgagcctggtgcggcgcggcctgcggcagcacgacgaccccgcgcgctgcgcccgggagctggtgatggaggccaagcggctggagacggccgacaacctgacggtcgtcgtggtgtgcttcgcgccggagatggggtcgccgtttacaccgcagcaacagcaggaggaggagctgcccgcgaggcccaggagctgcaagaagggcctgtcgacggaggcgctgtgcagcctgaggagctggctggatacggaccaccggtag

SEQ ID NO: 1607 - protein, 405 aa, Zea mays; identical to SEQ ID NO: 817

SEQ ID NO: 1608 - DNA, 1065 bp, Zea mays; identical to SEQ ID NO: 1048
  CDS (1)..(1065)

SEQ ID NO: 1609 - protein, 354 aa, Zea mays; identical to SEQ ID NO: 1049

SEQ ID NO: 1610 - DNA, 1167 bp, Zea mays; identical to SEQ ID NO: 1050
  CDS (1)..(1167)

SEQ ID NO: 1611 - protein, 388 aa, Zea mays; identical to SEQ ID NO: 1051

SEQ ID NO: 1612 - DNA, 1314 bp, Zea mays
  CDS (1)..(1314)
atggaggtgcacgccgacgtcgatgggtccggtgtgcccctggccgtgctcctcaagcgggagctgtgcaaccagaaggtggagaggccggacattctgttcggggaggccaacaagagcaagaaaggggaggacttcacgctcctcttgcccaggtgccaccgcaccacaggcgaaggtggcggcagtggcggcggcgagaatgcaggcgacgacgacgacgacaccatttccgtgtttgcgatttttgatggacacaatggctctttagctgccatatacacacgggagaatctaataaacaatgtgttggctgctattcctccaaatctcacaagtgaggagtggacagctgcgttgccaagggcactagttgctggttttgtaaaaacggataaagacttccaaacaaaagctgcacgttcagggaccactgtgacttttgttataatagatggatgggttgtcactgtagcatcagttggcgattcacgatgtattctagaatctgctgaaggttcagtatattttttatcagcagatcatcgcctggatgctaatgaagaggaggtggagcgtgttacagcaagtggtggtgaagttgggagaataaatattgctgggggtgctgggattggtccgctcagatgctggccaggcggattgtgtctatcaaggtcaataggtgacattgacgtcggggaatttatagttcctgtcccacatgtgaagcaagtaaagttgtccaatgctggtgggcggcttgtcattgccagtgatggtgtgtgggatgcgctgtgttttcaagaggctctgaactacatcaggggtctaccagccgaagctgctgctaatcgaattgttaaggaagctgtcacttcaaagggattaagagatgatactacttgcatagtagttgacatactacctccagaaaagttaagccccccactaaagcgacctggaaaaggagtcatcaaaactctgttccgtcggaggccctccgatgaaatgtctgaagatcagatggacagaggatgtttagaacctgatgtcgtggaggaaatatacgaggagggctctgcaatgcttgctcgaagattgaatataaattacccatcgggaaatatgttcaagctgcatgattgtgctgtctgccaattggagatgaaacctggtgagggcacctctgttcatggtaacatgcccaagcattcaagagttgacccctggggtggtccttttctctgttcctcctgtcaattgaaaaaggaggccatggaagggaagctacattcaagaacagcagagtga

SEQ ID NO: 1613 - protein, 437 aa, Zea mays
MEVHADVDGSGVPLAVLLKRELCNQKVERPDILFGEANKSKKGEDFTLLLPRCHRTTGEGGGSGGGENAGDDDDDTISVFAIFDGHNGSLAAIYTRENLINNVLAAIPPNLTSEEWTAALPRALVAGFVKTDKDFQTKAARSGTTVTFVIIDGWVVTVASVGDSRCILESAEGSVYFLSADHRLDANEEEVERVTASGGEVGRINIAGGAGIGPLRCWPGGLCLSRSIGDIDVGEFIVPVPHVKQVKLSNAGGRLVIASDGVWDALCFQEALNYIRGLPAEAAANRIVKEAVTSKGLRDDTTCIVVDILPPEKLSPPLKRPGKGVIKTLFRRRPSDEMSEDQMDRGCLEPDVVEEIYEEGSAMLARRLNINYPSGNMFKLHDCAVCQLEMKPGEGTSVHGNMPKHSRVDPWGGPFLCSSCQLKKEAMEGKLHSRTAE

SEQ ID NO: 1614 - DNA, 1518 bp, Zea mays; identical to SEQ ID NO: 1052
  CDS (1)..(1518)

SEQ ID NO: 1615 - protein, 505 aa, Zea mays; identical to SEQ ID NO: 1053

SEQ ID NO: 1616 - DNA, 20 bp, Artificial sequence
  primer
atgggtacatacctaagttc

SEQ ID NO: 1617 - DNA, 21 bp, Artificial sequence
  primer
ctagcttgatgagctcggctc

SEQ ID NO: 1618 - protein, 725 aa, Artificial sequence
  consensus sequence
  Variant (2)..(2): Xaa in position 2 is any amino acid
  Variant (4)..(5): Xaa in position 4 to 5 is any amino acid
  Variant (6)..(6): Xaa in position 6 is any or no amino acid
  Variant (10)..(25): Xaa in position 10 to 25 is any amino acid
  Variant (26)..(56): Xaa in position 26 to 56 is any or no amino acid
  Variant (58)..(58): Xaa in position 58 is any amino acid
  Variant (63)..(64): Xaa in position 63 to 64 is any amino acid
  Variant (66)..(67): Xaa in position 66 to 67 is any amino acid
  Variant (68)..(68): Xaa in position 68 is any or no amino acid
  Variant (70)..(87): Xaa in position 70 to 87 is any amino acid
  Variant (88)..(149): Xaa in position 88 to 149 is any or no amino acid
  Variant (151)..(160): Xaa in position 151 to 160 is any amino acid
  Variant (161)..(450): Xaa in position 161 to 450 is any or no amino acid
  Variant (452)..(452): Xaa in position 452 is any amino acid
  Variant (455)..(463): Xaa in position 455 to 463 is any amino acid
  Variant (464)..(474): Xaa in position 464 to 474 is any or no amino acid
  Variant (477)..(477): Xaa in position 477 is any amino acid
  Variant (480)..(480): Xaa in position 480 is any amino acid
  Variant (482)..(482): Xaa in position 482 is any amino acid
  Variant (484)..(487): Xaa in position 484 to 487 is any amino acid
  Variant (489)..(489): Xaa in position 489 is any amino acid
  Variant (490)..(494): Xaa in position 490 to 494 is any or no amino acid
  Variant (496)..(498): Xaa in position 496 to 498 is any amino acid
  Variant (500)..(500): Xaa in position 500 is any amino acid
  Variant (503)..(503): Xaa in position 503 is any amino acid
  Variant (505)..(506): Xaa in position 505 to 506 is any amino acid
  Variant (507)..(513): Xaa in position 507 to 513 is any or no amino acid
  Variant (515)..(516): Xaa in position 515 to 516 is any amino acid
  Variant (519)..(521): Xaa in position 519 to 521 is any amino acid
  Variant (524)..(528): Xaa in position 524 to 528 is any amino acid
  Variant (529)..(536): Xaa in position 529 to 536 is any or no amino acid
  Variant (538)..(539): Xaa in position 538 to 539 is any amino acid
  Variant (540)..(563): Xaa in position 540 to 563 is any or no amino acid
  Variant (566)..(566): Xaa in position 566 is any amino acid
  Variant (568)..(578): Xaa in position 568 to 578 is any amino acid
  Variant (579)..(606): Xaa in position 579 to 606 is any or no amino acid
  Variant (608)..(617): Xaa in position 608 to 617 is any amino acid
  Variant (618)..(619): Xaa in position 618 to 619 is any or no amino acid
  Variant (622)..(624): Xaa in position 622 to 624 is any amino acid
  Variant (626)..(626): Xaa in position 626 is any amino acid
  Variant (629)..(629): Xaa in position 629 is any amino acid
  Variant (632)..(665): Xaa in position 632 to 665 is any amino acid
  Variant (666)..(723): Xaa in position 666 to 723 is any or no amino acid
GXRXXXMEDXXXXXXXXXXXXXXXXXXXXXXXXXXXXXXXXXXXXXXXXXXXXXXXVXDGHGXXGXXXAXXXXXXXXXXXXXXXXXXXXXXXXXXXXXXXXXXXXXXXXXXXXXXXXXXXXXXXXXXXXXXXXXXXXXXXXXXXXXXXXDXXXXXXXXXXXXXXXXXXXXXXXXXXXXXXXXXXXXXXXXXXXXXXXXXXXXXXXXXXXXXXXXXXXXXXXXXXXXXXXXXXXXXXXXXXXXXXXXXXXXXXXXXXXXXXXXXXXXXXXXXXXXXXXXXXXXXXXXXXXXXXXXXXXXXXXXXXXXXXXXXXXXXXXXXXXXXXXXXXXXXXXXXXXXXXXXXXXXXXXXXXXXXXXXXXXXXXXXXXXXXXXXXXXXXXXXXXXXXXXXXXXXXXXXXXXXXXXXXXXXXXXXXXXXXXXXXXXXXXXXXXXXXXXXXXXXXXXXXXXXGXTAXXXXXXXXXXXXXXXXXXXXANXGDXRXVXXXXGXXXXXXAXXXSXDHXPXXXXXXXXXEXXRIXXXGGXXXXXXXXXXXXXRXXXXXXXXXXXXXXXXXXXXXXXXXXRAXGXXXXXXXXXXXXXXXXXXXXXXXXXXXXXXXXXXXXXXXPXXXXXXXXXXXXEFXXXAXDGXWDXXXXXXXXXXXXXXXXXXXXXXXXXXXXXXXXXXXXXXXXXXXXXXXXXXXXXXXXXXXXXXXXXXXXXXXXXXXXXXXXXXXXXXXXXXXXDN

SEQ ID NO: 1619 - protein, 15 aa, Artificial sequence
  protein pattern
  Variant (2)..(2): Xaa in position 2 is Ile, Leu, Met or Val
  Variant (3)..(3): Xaa in position 3 is Ile, Leu or Val
  Variant (4)..(4): Xaa in position 4 is Phe, Ile, Leu, Met or Val
  Variant (5)..(5): Xaa in position 5 is Ala or Gly
  Variant (6)..(6): Xaa in position 6 is Cys, Ser or Thr
  Variant (7)..(7): Xaa in position 7 is Asp or Gln
  Variant (9)..(9): Xaa in position 9 is Ile, Leu or Val
  Variant (11)..(14): Xaa in position 11 to 14 is any amino acid
  Variant (15)..(15): Xaa in position 15 is Asn or Ser
FXXXXXXGXWXXXXX

SEQ ID NO: 1620 - protein, 13 aa, Artificial sequence
  protein pattern
  Variant (2)..(2): Xaa in position 2 is any amino acid
  Variant (3)..(5): Xaa in position 3 to 5 is any or no amino acid
  Variant (7)..(7): Xaa in position 7 is Ala, Cys, Thr or Val
  Variant (10)..(10): Xaa in position 10 is Ala, Cys or Ser
  Variant (12)..(12): Xaa in position 12 is Ala, Cys, Gly, Ser, Thr or Val
  Variant (13)..(13): Xaa in position 13 is Ile or Val
VXXXXNXGDXRXX

SEQ ID NO: 1621 - protein, 14 aa, Artificial sequence
  protein pattern
  Variant (2)..(2): Xaa in position 2 is any amino acid
  Variant (3)..(3): Xaa in position 3 is any or no amino acid
  Variant (5)..(5): Xaa in position 5 is Phe or Tyr
  Variant (9)..(9): Xaa in position 9 is any or no amino acid
  Variant (11)..(13): Xaa in position 11 to 13 is any amino acid
  Variant (14)..(14): Xaa in position 14 is Ala, Ser or Val
FXXVXDGHXGXXXX

SEQ ID NO: 1622 - protein, 13 aa, Artificial sequence
  protein pattern
  Variant (2)..(2): Xaa in position 2 is Ala, Asn or Ser
  Variant (3)..(3): Xaa in position 3 is Leu, Met or Val
  Variant (4)..(4): Xaa in position 4 is Ala, Ser or Thr
  Variant (6)..(6): Xaa in position 6 is Ala, Gly or Ser
  Variant (7)..(7): Xaa in position 7 is Phe, Ile or Leu
  Variant (10)..(12): Xaa in position 10 to 12 is any amino acid
  Variant (13)..(13): Xaa in position 13 is Asp, Glu or Lys
LXXXRXXGDXXXX

SEQ ID NO: 1623 - DNA, 789 bp, Arabidopsis thaliana
  CDS (1)..(789)
atgagcggtggtgggaacacaatcactgccgtgggaggcggaggtggtggttgtggtggaggaggcagcagtgggggaggaggaagtagtggcggtggtggtggtgggccatgtggtgcttgtaagtttctaaggaggaagtgtgtgccgggatgtatatttgcaccgtactttgactccgagcaaggatcggcttattttgcggcggtgcataaagtgttcggagccagtaacgtctcgaagcttctattacacataccggttcatcgaaggtccgatgctgtcgtaacaatttgctatgaagctcaggctaggataagggatcctatctacggttgcgtcgctcacatctttgctcttcagcaacaggtggtgaatctacaggcagaagtttcttacttacaagcccatttggcatcactagagctacctcaaccgcaaacgcggccacagcctatgccgcaaccgcaaccgctctttttcactcctcctccccctcttgccataaccgatttacctgcatcagtctcacccttgccctcaacctatgacctagcatccatcttcgatcaaacgacgtcttcttcggcatgggccacgcaacaacgaagattcattgatccacgtcaccaatacggtgtatcatcgtcttcctcttctgtcgccgtggggctcggtggtgaaaacagtcatgacctccaagcattagcacatgaactcctccatagacaaggatctcctcccccggcagctaccgaccactcgccgtctcgaactatgtctagatga

SEQ ID NO: 1624 - protein, 262 aa, Arabidopsis thaliana
MSGGGNTITAVGGGGGGCGGGGSSGGGGSSGGGGGGPCGACKFLRRKCVPGCIFAPYFDSEQGSAYFAAVHKVFGASNVSKLLLHIPVHRRSDAVVTICYEAQARIRDPIYGCVAHIFALQQQVVNLQAEVSYLQAHLASLELPQPQTRPQPMPQPQPLFFTPPPPLAITDLPASVSPLPSTYDLASIFDQTTSSSAWATQQRRFIDPRHQYGVSSSSSSVAVGLGGENSHDLQALAHELLHRQGSPPPAATDHSPSRTMSR

SEQ ID NO: 1625 - DNA, 783 bp, Zea mays
  CDS (1)..(783)
atgagcgctggcggaggcggcggcggcaccagcacgcttggcggcgggggcccgagcggcagcggcagcggaggccctggaggaagcggcggcggcgggccttgcggcgcgtgcaagttcctccggcgcaagtgcgtcagcggctgcatcttcgcgccctacttcgactcggagcagggcgcggcgcacttcgcggccgtgcacaaggtgttcggcgccagcaacgtgtccaagctgctgctccagatcccggcgcacaagcgcctcgacgccgtcgtcaccatctgctacgaggcccaggcgcggctccgcgaccccgtctacggctgcgtcgcccacatcttcgcgctccagcagcaggtggtgaatctccaggccgagctgacctacctgcaagcacacctcgccacgctcgagctgccggccccgcccccgctgccggccccgccgcagatgcccatgccaggcccgttctccatctcggacctgccgtcgtcgaccagcgtccccaccaccgtcgacctgtccgcgctcttcgacccgccgccaccgcagtgggcggcggcgcagcagccgcaccaccaccaccaacagccgccgcagcaccaccagctccggcaaccggcgccgtatggcgctggcgcgtccgtcaggcccggcggcggccccggcatggcagagagctcaggcggagacgagctgcagtcgctggcgagggagctccaggaccgccaccggtccggcggcgtgaagctcgagcacccgccgccacactcaagatga

SEQ ID NO: 1626 - protein, 260 aa, Zea mays
MSAGGGGGGTSTLGGGGPSGSGSGGPGGSGGGGPCGACKFLRRKCVSGCIFAPYFDSEQGAAHFAAVHKVFGASNVSKLLLQIPAHKRLDAVVTICYEAQARLRDPVYGCVAHIFALQQQVVNLQAELTYLQAHLATLELPAPPPLPAPPQMPMPGPFSISDLPSSTSVPTTVDLSALFDPPPPQWAAAQQPHHHHQQPPQHHQLRQPAPYGAGASVRPGGGPGMAESSGGDELQSLARELQDRHRSGGVKLEHPPPHSR

SEQ ID NO: 1627 - DNA, 968 bp, Unknown
  Unidentified
  CDS (69)..(830)
ccccgcgtccgccttgatcatgggagctattctactactttaagatcaaagtgttgcacggtttaatcatgagttcaaatcctagtaacagcggtggcagtgtaggcggtggttccggcagttgcagtggtagtgctgctgctgctgctgctggtggcggcggtggaggagggccttgtggcgcttgcaagtttttgaggaggaaatgtgtgcctggttgtatattcgcaccttatttcgactcggagcaaggtgcagcccatttcgcagcggttcataaggttttcggtgcaagcaatgtatcgaagctgcttcttcatatcccagttcacaaacgactcgatgcggtggtcaccatatgtttcgaggctcaagctcggcttcgagatccggtttatggctgcgttgctcatatctttgctcttcaacaacaggtggtgaatttgcaagcagaactatcctacttacaagctcatttaactacactagagcttccatcgcctcctccgccacctccgccaccgtcacaaactctagttgcagcacctcctctctcgatatcagacctcccatcagcctcttcagtgccggccacatacgacttatcatcactttttgatccaatggtagcgcaaacttcatgggccatgcagcaaaggcaaatcgatccacgccaatacggagggaccggctcagcctcatcgaccggttccggggatctccaagccttggctcgtgagctcctccagagacaagggtcaccacacctgccgtgcaccgatgcttcagtgtcaccggcaccatcaccctcgcgatcgctctctaaatgagactgacccctttcgtttatcatatgcttgccttgaattatgttatattgcatttaattttcatgttatatttcataaggcaagtaatcgtaataaaaaaaaaaaaaaaaggccagccgctcgcgatctagaactagg

SEQ ID NO: 1628 - protein, 253 aa, Unknown
  Unidentified
MSSNPSNSGGSVGGGSGSCSGSAAAAAAGGGGGGGPCGACKFLRRKCVPGCIFAPYFDSEQGAAHFAAVHKVFGASNVSKLLLHIPVHKRLDAVVTICFEAQARLRDPVYGCVAHIFALQQQVVNLQAELSYLQAHLTTLELPSPPPPPPPPSQTLVAAPPLSISDLPSASSVPATYDLSSLFDPMVAQTSWAMQQRQIDPRQYGGTGSASSTGSGDLQALARELLQRQGSPHLPCTDASVSPAPSPSRSLSK

SEQ ID NO: 1629 - DNA, 1262 bp, Zea mays
  CDS (81)..(857)
gcggcacgcacgcacgctcgcagggagagagatagataaaaggtcgcccccttgagggcagggcagggcagctgagggcaatgagcgctggcggcggcagcagcacgcttggcggcggggggccgagcggcagcagcagcggaggccctggaggaagcggcggcggcggcgggccttgcggcgcgtgcaagttcctccggcgcaagtgcgtcagcggctgcatcttcgcgccctacttcgactcggagcagggcgcggcgcacttcgcggccgtgcacaaggtgttcggcgccagcaacgtgtccaagctgctgctccagatcccggcgcacaagcgcctcgacgccgtcgtcaccatctgctacgaggcccaggcgcggctccgcgaccccgtctacggctgcgtcgcccacatcttcgcgctccagcagcaggtggtgaatctccaggccgagctgacctacctgcaagcacacctcgccacgctcgagctgccggccccgcccccgctgccggccccgccgcagatgcccatgccaggcccgttctccatctcggacctgccgttgtcgaccagcgtccccaccaccgtcgacctgtccgcgctcttcgacccgccaccaccgcagtgggcgacggcgcagcagccgcaccaccaccatcaacagccgccgcagcaccaccagctccggcaaccggcgccgtatggcgctggcgcgtccgtcaggcccggcggcggccccggcatggcagagagctcaggcggagacgagctgcagtcgctggcgagggagctcctggaccgccaccggtccggcggcgtgaagctcgagcacccgccgccacactcaagatgagctggatgggggagtagaaggatcaaaaacccgtgcagaacaaggtgagagttggcgcccggcagtatcgagggagataggggtcggtgacgggcgatgtccagcacagcaggagtaggtaagcagcattggccggttttcgcgtacccagcacccctgttgttaatcggctggggtgcaatggcggcgcccacttgcttgatatattctccagtttgatcatatttgctccaagacaaaagaaagagtgctggggatcgacgagagtattactagaattgacatgtattagtaacattattgttacctttgataccgttccattagttgcaagatttttattaagaaaagaatctcaacatggtttctaaaaaaaaaaaaaaaaaaaaaaaaaaaaaaaaaaaa

SEQ ID NO: 1630 - protein, 258 aa, Zea mays
MSAGGGSSTLGGGGPSGSSSGGPGGSGGGGGPCGACKFLRRKCVSGCIFAPYFDSEQGAAHFAAVHKVFGASNVSKLLLQIPAHKRLDAVVTICYEAQARLRDPVYGCVAHIFALQQQVVNLQAELTYLQAHLATLELPAPPPLPAPPQMPMPGPFSISDLPLSTSVPTTVDLSALFDPPPPQWATAQQPHHHHQQPPQHHQLRQPAPYGAGASVRPGGGPGMAESSGGDELQSLARELLDRHRSGGVKLEHPPPHSR

SEQ ID NO: 1631 - DNA, 1058 bp, Euphorbia lagascae
  CDS (71)..(826)
gcttcttcttcatattctgcgtctcataaaccctaattatgctctcttctctctccaaattcgatccgaaatgagttcgacggtgcatcctagcagcagcggcagcagcggcggagccggaggaggaggaagtggtggaagtggcggagggagtgggccgtgtggagcgtgtaaatttttgaggagaaaatgtgtgccggggtgtatatttgcgccgtactttgattccgagcagggagcggcgcattttgcggcggtgcataaggtttttggtgcgagtaacgtttcgaaacttcttctgcatattccggtacataaacgccttgatgcggtggttactatttgttatgaagctcaagctcggcttcgagatcctgtttatggctgcgttgctcatatattcgctctgcaacaacaggtggtgaacttacaggcagagctcacatatttgcaagcccatttagcaacactagagcttccgtcaccaccgccgcctcctctcccaccacaaacactattgacaccaccacctctatcaatatccgacctcccatcatcctcttctgctcccggttcatatgacttgcaatcgctttttgatccgatggcacaaaattcatggtcaatgcaacaaaggctaatagatccacgccatcaattcataggttcgactagtggttcatcgtcgttaaccaccacaggcagtgggagtggtgatcttcatacattggcacgtgagcttctccatagacatggttctccgtcacatggttcaatgccatgtagcggcgctttatcttcatctccgtcttctatctcaaaatgaaactgaccctattgatagaagttgttgcaacataatttgtactaattttcaatgggatgctagccgaaagagcttaagttttcatggtattttagtttagagatctagtgttttaataactggtcactaatttttttggccttctgtttattatattattcattttctcttaaaaaaaaaaaaaaaaaaaaaaaaaaaaaaaaaaaaaaaaaaaaaaaaaaaaaaaaaaaaa

SEQ ID NO: 1632 - protein, 251 aa, Euphorbia lagascae
MSSTVHPSSSGSSGGAGGGGSGGSGGGSGPCGACKFLRRKCVPGCIFAPYFDSEQGAAHFAAVHKVFGASNVSKLLLHIPVHKRLDAVVTICYEAQARLRDPVYGCVAHIFALQQQVVNLQAELTYLQAHLATLELPSPPPPPLPPQTLLTPPPLSISDLPSSSSAPGSYDLQSLFDPMAQNSWSMQQRLIDPRHQFIGSTSGSSSLTTTGSGSGDLHTLARELLHRHGSPSHGSMPCSGALSSSPSSISK

SEQ ID NO: 1633 - DNA, 756 bp, Oryza sativa (japonica cultivar-group)
  CDS (1)..(756)
atgtccacagagagggaaagactcgatgagatcggcaagaagatcaagcgagagccggacaccgccggcgtcgtagtcgccgccgtcgcaggcaccggcaccggtacagccacgccgatcgagcaccgcgtcccccatcgcctcggcctcggcggcgccgtgaacaccgtgaccccgtgcgccgcgtgcaagctcctccgccggcgctgcgcgcaggagtgccccttcgccccctacttctcgccgcacgagccccacaagttcgccgccgtccacaaggtcttcggcgccagcaacgtctccaagatgctcctggaggtcggcgaggcggagagagccgacgcggcgagcagcctggtgtacgaggcgaatctgcggctgcgcgaccccgtgtacggctgcatgggcgccatctcgatgctgcagcagcaggtgaacgcgctggaggccgagctggaagcggtcagggccgagatcttcaagcgcaggtaccggcaggccggcgccgccaccggcctcatggacgacgtccaagtccatatcaccgccggcttcgccgctcctcctcctcctccatcgatgcacgcgagggacgtggtgtcagtggcggacgccggcgggcaagggcaagagttggccggagcgccggtgatctcgtcggcgtctccgccggtgtatcctgccgggcagccatcaacaagtactactgactacagctccctcaacacaagtgagcatgctgcatactttggttga

SEQ ID NO: 1634 - protein, 251 aa, Oryza sativa (japonica cultivar-group)
MSTERERLDEIGKKIKREPDTAGVVVAAVAGTGTGTATPIEHRVPHRLGLGGAVNTVTPCAACKLLRRRCAQECPFAPYFSPHEPHKFAAVHKVFGASNVSKMLLEVGEAERADAASSLVYEANLRLRDPVYGCMGAISMLQQQVNALEAELEAVRAEIFKRRYRQAGAATGLMDDVQVHITAGFAAPPPPPSMHARDVVSVADAGGQGQELAGAPVISSASPPVYPAGQPSTSTTDYSSLNTSEHAAYFG

SEQ ID NO: 1635 - DNA, 651 bp, Oryza sativa (japonica cultivar-group)
  CDS (1)..(651)
atggctggtgctacggctgccggcgctgccgctgccgcggcggggacgggagccgggtcgccgtgcggcgcgtgcaagttcttgcggcggcggtgcgtgccggagtgcgtgttcgcgccctacttcagctcggagcaaggggcggcgaggttcgcggcgatccacaaggtgttcggcgccagcaacgcctccaagctcctctcccacctccccgtcgccgaccgctgcgaggccgtcgtcaccatcacctacgaggcccaggccaggctccgcgaccccgtctatggctgcgtcgcccaaatcttcgccctccagcagcaggtcgcgatcctgcaagcgcagctgatgcaggcgagggcgcagctggcgtgcggcatccagagcagctcgcactctccggtgagctggccggacagcggcagcatcagcgcgctactccggcaggacatggcgagaaggccgcccggcggcgccctcgacgactgcttcggcggcggcggcgcgctgctgccggagctcatggcggccggcttcaaggacgacgtcgccgccgtgcagatgcagcagcattgctccaaggcggtggacgccggcgagctccagtatctggcccaggcgatgatgagatcaacctccaactactctcagtag

SEQ ID NO: 1636 - protein, 216 aa, Oryza sativa (japonica cultivar-group)
MAGATAAGAAAAAAGTGAGSPCGACKFLRRRCVPECVFAPYFSSEQGAARFAAIHKVFGASNASKLLSHLPVADRCEAVVTITYEAQARLRDPVYGCVAQIFALQQQVAILQAQLMQARAQLACGIQSSSHSPVSWPDSGSISALLRQDMARRPPGGALDDCFGGGGALLPELMAAGFKDDVAAVQMQQHCSKAVDAGELQYLAQAMMRSTSNYSQ

SEQ ID NO: 1637 - DNA, 792 bp, Oryza sativa subsp
  CDS (1)..(792)
atgcaagaaaccctaaataccttcttcggccctttccaatttccgccaggggaaagactcgatgagatcggcaagaagatcaagcgagagccggacaccgccggcgtcgtagtcgccgccgtcgcaggcaccggcaccggtacagccacaccgatcgagcaccgcgtcccccatcgcctcggcctcggcggcgccgtgaacaccgtgaccccgtgcgccgcgtgcaagctcctccgccggcgctgcgcgcaggagtgccccttcgccccctacttctcgccgcacgagccccacaagttcgccgccgtccacaaggtcttcggcgccagcaacgtctccaagatgctcctggaggtcggcgaggcggagagagccgacgcggcgagcagcctggtgtacgaggcgaatctgcggctgcgcgaccccgtgtacggctgcatgggcgccatctcgatgctgcagcagcaggtgaacgcgctggaggccgagctggaagcggtcagggccgagatcttcaagcgcaggtaccggcaggccggcgccgccaccggcctcatggacgacgtccaagtccatatcaccgccggcttcgccgctcctcctcctcctccatcgatgcacgcgagggacgtggtgtcagtggcggacgccggcgggcaagggcaagagttggccggagcgccggtgatctcgtcggcgtctccgccggtgtatcctgccgggcagccatcaacaagtactactgactacagctccctcaacacaagtgagcatgctgcatactttggttga

SEQ ID NO: 1638 - protein, 263 aa, Oryza sativa subsp
MQETLNTFFGPFQFPPGERLDEIGKKIKREPDTAGVVVAAVAGTGTGTATPIEHRVPHRLGLGGAVNTVTPCAACKLLRRRCAQECPFAPYFSPHEPHKFAAVHKVFGASNVSKMLLEVGEAERADAASSLVYEANLRLRDPVYGCMGAISMLQQQVNALEAELEAVRAEIFKRRYRQAGAATGLMDDVQVHITAGFAAPPPPPSMHARDVVSVADAGGQGQELAGAPVISSASPPVYPAGQPSTSTTDYSSLNTSEHAAYFG

SEQ ID NO: 1639 - DNA, 831 bp, Oryza sativa subsp
  CDS (1)..(831)
atgagctcgggaggcggagccagcagcgcgctcggcggcggcggcggcggcggcggcggaagcggaggaggaggaggagggccgagcggcggcggcggtggaggaggcgggccgtgcggggcgtgcaagttcctgcggcgcaagtgcgtgagcgggtgcatcttcgcgccctacttcgactcggagcagggcgcggcgcacttcgcggcggtgcacaaggtgttcggcgccagcaacgtgtccaagctgctcctccagatcccggcgcacaagcgccccgacgccgtcgtcaccatctgctacgaggcccaggcccgcctccgcgaccccgtctacggctgcgtcgcccacatcttcgccctccagcagcaggtggtgaatctccaggccgagctgacctacttgcaagcccacctcgccacgctggagctgccgtccccgccgccgctgatgccggcgccgccgcagatgccgatgccggcgccgttctccatctcggacctcccgtcgtcgacgagcgtcccgaccaccgtcgacctctcagctctcttcgacccgccgccgcagccgcaatgggcatcgccgctccagcagcagcagcaccaccaccaccagcaccatcatcaccaacagcagcagcaccagctccggcagccctcatatgccacgctggccagggcgccgtccggcatgacggcggcggcggagagctcgggaggaggaggaggaggcggcggtggagaccttcaggcgctcgcaagggagctcctggatcgccacaggtccgcagtgaagctcgagcagccgccgccgccgcactctagatcatga

SEQ ID NO: 1640 - protein, 276 aa, Oryza sativa subsp
MSSGGGASSALGGGGGGGGGSGGGGGGPSGGGGGGGGPCGACKFLRRKCVSGCIFAPYFDSEQGAAHFAAVHKVFGASNVSKLLLQIPAHKRPDAVVTICYEAQARLRDPVYGCVAHIFALQQQVVNLQAELTYLQAHLATLELPSPPPLMPAPPQMPMPAPFSISDLPSSTSVPTTVDLSALFDPPPQPQWASPLQQQQHHHHQHHHHQQQQHQLRQPSYATLARAPSGMTAAAESSGGGGGGGGGDLQALARELLDRHRSAVKLEQPPPPHSRS

SEQ ID NO: 1641 - DNA, 645 bp, Oryza sativa subsp
  CDS (1)..(645)
atgagggacgtggtggtggcggttggcggcgggacgaaggcggcgagcaggcagcaggggcagggcggggtgacgttggcggcggcggcggcggggtcggggtcggggtcggcggcgtcgccatgcgcggcgtgcaagctgctgcggcggcggtgcgcggcggggtgcgtgttcgcgccctacttcccgccgggcgagccgcacaagttcgccaacgtccacaaggtcttcggcgccagcaatgtcagcaagctcctccaggagataccggtgcagcacaggggggacgccgtgagcagcctggtgtacgaggcgaacgcgcgggtgagggacccgatctacggctgcgtcggcgccatctcgtcgctgcagcagcaggtggaggcgctgcaggcgcagctggcgctggcgcaggcggagatggtcaggctgaggatgagcaacgactacatcggccgccgcctccgggcgcgcggctgcggcggcggcggcggaggcggaggcgggagcaccaccaccaccaccggctcgccgtcgtccatgtcgtcgccggccaagacggcggagccggagccgctctgcaagcccacgccggagctggacatggtggtggaccagccggacttcggcttctggtcctactag

SEQ ID NO: 1642 - protein, 214 aa, Oryza sativa subsp
MRDVVVAVGGGTKAASRQQGQGGVTLAAAAAGSGSGSAASPCAACKLLRRRCAAGCVFAPYFPPGEPHKFANVHKVFGASNVSKLLQEIPVQHRGDAVSSLVYEANARVRDPIYGCVGAISSLQQQVEALQAQLALAQAEMVRLRMSNDYIGRRLRARGCGGGGGGGGGSTTTTTGSPSSMSSPAKTAEPEPLCKPTPELDMVVDQPDFGFWSY

SEQ ID NO: 1643 - DNA, 810 bp, Oryza sativa subsp
  CDS (1)..(810)
atgagctcgtcggtggttgtgagcgcgagcggcagcggcagcggcggcggaggaggaggaggaggtggcggcgctggaggtggaggaggaggtgggccgtgcggggcgtgcaagttcttgcggcggaagtgcgtgcaggggtgcatcttcgcgccctacttcgactcggaggccggggcggcgcacttcgcggcggtgcacaaggtgttcggcgccagcaacgtgtccaagctgctgcagcagatcccggcgcaccgccgcctcgacgccgtcgtcaccatctgctacgaggcccaggcccgcctccgcgaccccgtctacggctgcgtcgcccacatcttccacctccaacaccaggtggcaggtctccagtccgagctgaactacctgcaaggtcacctctcgacgatggagctgccgtcgccgccgccctacgtcgccgggccgaccctggcgccgccacagccacagccactgatgccgatgaccgccgccgccaacttcaacttctccgacctgccatcgtcgtcggcggccaacattccggtcaccgccgacctgtccaccctctttgacccactgccggcggcgcagccgcagtggggactataccagcagcagcaacaccaccagcagcagctgcaccatcacccctatgaccggatgggcgacggctcgtcgagcagcagaggcggcgacgaagacggcagcgacggcggcgacttgcaagcgctggcgagggagcttcttgaccgccatggacggtcgtcgtcgagctccaagctggagccgccacctcacacacagtga

SEQ ID NO: 1644 - protein, 269 aa, Oryza sativa subsp
MSSSVVVSASGSGSGGGGGGGGGGAGGGGGGGPCGACKFLRRKCVQGCIFAPYFDSEAGAAHFAAVHKVFGASNVSKLLQQIPAHRRLDAVVTICYEAQARLRDPVYGCVAHIFHLQHQVAGLQSELNYLQGHLSTMELPSPPPYVAGPTLAPPQPQPLMPMTAAANFNFSDLPSSSAANIPVTADLSTLFDPLPAAQPQWGLYQQQQHHQQQLHHHPYDRMGDGSSSSRGGDEDGSDGGDLQALARELLDRHGRSSSSSKLEPPPHTQ

SEQ ID NO: 1645 - DNA, 651 bp, Oryza sativa subsp
  CDS (1)..(651)
atggctggtgctacggctgccggcgctgccgctgccgcggcggggacgggagccgggtcgccgtgcggcgcgtgcaagttcttgcggcggcggtgcgtgccggagtgcgtgttcgcgccctacttcagctcggagcaaggggcggcgaggttcgcggcgatccacaaggtgttcggcgccagcaacgcctccaagctcctctcccacctccccgtcgccgaccgctgcgaggcccttgtcaccatcacctacgaggcccaggccaggctccgcgaccccgtctatggctgcgtcgcccaaatcttcgccctccagcagcaggtcgcgatcctgcaagcgcagctgatgcaggcgagggcgcagctggcgtgcggcatccagagcagctcgcactctccggtgagctggccggacagcggcagcatcagcgcgctactccggcaggacatggcgagaaggccgcccggcggcgccctcgacgactgcttcggcggcggcggcgcgctgctgccggagctcatggcggccggcttcaaggacgacgtcgccgccgtgcagatgcagcagcattgctccaaggcggtggacgccggcgagctccagtatctggcccaggcgatgatgagatcaacctccaactactctcagtag

SEQ ID NO: 1646 - protein, 216 aa, Oryza sativa subsp
MAGATAAGAAAAAAGTGAGSPCGACKFLRRRCVPECVFAPYFSSEQGAARFAAIHKVFGASNASKLLSHLPVADRCEALVTITYEAQARLRDPVYGCVAQIFALQQQVAILQAQLMQARAQLACGIQSSSHSPVSWPDSGSISALLRQDMARRPPGGALDDCFGGGGALLPELMAAGFKDDVAAVQMQQHCSKAVDAGELQYLAQAMMRSTSNYSQ

SEQ ID NO: 1647 - DNA, 837 bp, Oryza sativa subsp
  CDS (1)..(837)
atgagctcgggaggcggagccagcagcgcgctcggcggcggcggcggcggcggcggaagcggaggaggaggaggagggccgagcggcggcggcggtggaggaggcgggccgtgcggggcgtgcaagttcctgcggcgcaagtgcgtgagcgggtgcatcttcgcgccctacttcgactcggagcagggcgcggcgcacttcgcggcggtgcacaaggtgttcggcgccagcaacgtgtccaagctgctcctccagatcccggcgcacaagcgccccgacgccgtcgtcaccatctgctacgaggcccaggcccgcctccgcgaccccgtctacggctgcgtcgcccacatcttcgccctccagcagcaggtggtgaatctccaggccgagctgacctacttgcaagcccacctcgccacgctggagctgccgtccccgccgccgctgatgccggcgccgccgcagatgccgatgccggcgccgttctccatctcggacctcccgtcgtcgacgagcgtcccgaccaccgtcgacctctcagctctcttcgacccgccgccgcagccgcaatgggcatcgccgctccagcagcagcagcaccaccaccaccagcaccatcatcaccaacagcagcagcaccagctccggcagccctcatatgccacgctggccagggcgccgtccggcatgacggcggcggcggagagctcgggaggaggaggaggaggcggcggtggagaccttcaggcgctcgcaagggagctcctggatcgccacaggctgcaggagaggaaggtggctgcaggagaggaaggtggtacgggggagcttcagtag

SEQ ID NO: 1648 - protein, 278 aa, Oryza sativa subsp
MSSGGGASSALGGGGGGGGSGGGGGGPSGGGGGGGGPCGACKFLRRKCVSGCIFAPYFDSEQGAAHFAAVHKVFGASNVSKLLLQIPAHKRPDAVVTICYEAQARLRDPVYGCVAHIFALQQQVVNLQAELTYLQAHLATLELPSPPPLMPAPPQMPMPAPFSISDLPSSTSVPTTVDLSALFDPPPQPQWASPLQQQQHHHHQHHHHQQQQHQLRQPSYATLARAPSGMTAAAESSGGGGGGGGGDLQALARELLDRHRLQERKVAAGEEGGTGELQ

SEQ ID NO: 1649 - DNA, 624 bp, Oryza sativa subsp
  CDS (1)..(624)
atggcgaggaggagctgcagcatgccggcggcgggcgccgggccggggtcggcggcggcggcggtgaacacgataacgccgtgcgcggcgtgcaagctgctccggcggcggtgcgcgcaggagtgccccttctcgccgtacttctcgccgctggagccgcacaagttcgcctccgtgcacaaggtcttcggcgccagcaacgtctccaagatgctcctggaggtgcacgagagccagcgcggcgacgcggcgaacagcctggtgtacgaggccaacctgcggctgcgcgacccggtgtacggctgcatgggcgccatcctcaccttgcagcagcaggtccaggccctcgaggccgagctcgccgccgtccgcgccgacatcgtcaggcacaagtaccgcctcccctccgccgccgccgtgctcccttcctcccaggcctcgcacctcctcgccgccgccgccgccgcacgccagctgccccttgctggcaccatgggggtagtgacgacggcgacgctgccggcatcggcgtcgtcgtcgtcgacgacggcggtttacgccgccgcgtcgagctccacggactatagctccatcaccaacgagaatgtcccctattttagctga

SEQ ID NO: 1650 - protein, 207 aa, Oryza sativa subsp
MARRSCSMPAAGAGPGSAAAAVNTITPCAACKLLRRRCAQECPFSPYFSPLEPHKFASVHKVFGASNVSKMLLEVHESQRGDAANSLVYEANLRLRDPVYGCMGAILTLQQQVQALEAELAAVRADIVRHKYRLPSAAAVLPSSQASHLLAAAAAARQLPLAGTMGVVTTATLPASASSSSTTAVYAAASSSTDYSSITNENVPYFS

SEQ ID NO: 1651 - DNA, 699 bp, Vitis vinifera
  CDS (1)..(699)
atgactggttctggttctccttgtggagcctgtaagtttttgaggagaaaatgtgtgaggggttgtgtttttgctccttatttctgccatgaacaaggcgctgcccactttgctgccattcataaggtttttggtgcaagcaatgtgtccaaactcctcggtcacctaccggtgagtgacaggtgtgaagctgcggttaccattgcttatgaagctcaagccagacttcaagatcccatctatggatgtgtctcacacatttttgccctccagcagcaggttgttaatctacaagcacagctagcttctctgaaggagcaagcagctcaaagccttttcaatgggtccagtgctggaaacctcaatgagaaattctttgggaaactcccttcttaccagcaagactttcagagttggtttcagttggagaatttgaacacagtgccacagtttgatccaaacctcgccagtaattcggaaaccatgccgtattcccaaagtgggttcgtggaccctagccctatggagaattataaaaattcaatgttcccggaggaaaatgtctccttcgccagtttcgaagaggcttctcattccatggcttctctggacatgcaaggaaacagaaggaaatgggcttaccaagatgatgctgacgaactccagtcagtggcctttggctatatccggcattcatga

SEQ ID NO: 1652 - protein, 232 aa, Vitis vinifera
MTGSGSPCGACKFLRRKCVRGCVFAPYFCHEQGAAHFAAIHKVFGASNVSKLLGHLPVSDRCEAAVTIAYEAQARLQDPIYGCVSHIFALQQQVVNLQAQLASLKEQAAQSLFNGSSAGNLNEKFFGKLPSYQQDFQSWFQLENLNTVPQFDPNLASNSETMPYSQSGFVDPSPMENYKNSMFPEENVSFASFEEASHSMASLDMQGNRRKWAYQDDADELQSVAFGYIRHS

SEQ ID NO: 1653 - DNA, 735 bp, Zea mays
  CDS (1)..(735)
atgacggggttcgggtcaccgtgcggggcgtgcaagttcctgcgccgcaagtgcgtgcgcggctgcgtcttcgcgccctacttctgccacgagcagggcgcggcgcacttcgccgccatccacaaggtgttcggcgccagcaacgtgtccaagctgctcgcgcacctgccgctcgccgaccgcgccgaggccgccgtcaccatctcctacgaggcgcaggcgaggctgcgggaccccatctatggctgcgtcgcccacatcttcgcgctacagcagcaggttatgaccctgcaggcgcagctggcgtcgctcaaggcgcaggcggcgcaggggcagcagggcgtgcacgaagacgccaagggctacgtgggcagcgccgccgcggagcagctagggtacggctacccctggtgcagcggcaatggaggcgccgcagcagcagcagcaggcgccgtgggcgcgcccgccgcgcagccgggcgcgtacggcaatggcgcgcacgagtccctgaccgcgctgctggggtcgtcggactacatgcagcagtcgctgtaccacgcgttcgagcaggccggcgcggacgacgacgacggccggcaggggtacgccttcgaggcagcggcggagtcctcgtcgctcggggcggaggagagcgggtggaggtcgtcgtcggggtaccaagactgcgaggacctgcagagcgtggcttacgcttacctgaaccatcgctcgtaa

SEQ ID NO: 1654 - protein, 244 aa, Zea mays
MTGFGSPCGACKFLRRKCVRGCVFAPYFCHEQGAAHFAAIHKVFGASNVSKLLAHLPLADRAEAAVTISYEAQARLRDPIYGCVAHIFALQQQVMTLQAQLASLKAQAAQGQQGVHEDAKGYVGSAAAEQLGYGYPWCSGNGGAAAAAAGAVGAPAAQPGAYGNGAHESLTALLGSSDYMQQSLYHAFEQAGADDDDGRQGYAFEAAAESSSLGAEESGWRSSSGYQDCEDLQSVAYAYLNHRS

SEQ ID NO: 1655 - DNA, 504 bp, Zea mays
  CDS (1)..(504)
atggcttcctccggcagcggtggcggctcgccggggtccccgtgtggcgcctgcaagttcctgcggcgcaagtgcgcggcggagtgcgtgttcgctccccacttctgcgccgaggacggggcggcgcagttcgcggccatccacaaggtgttcggcgccagcaacgcggccaagctgctgcagcaggtggcccccgccgaccggagcgaggcggcggccaccgtcacctacgaggcgcaggccaggctgcgcgaccccatctacggctgcgtcgcccacatcttcgcgctgcagcaacaggtggcgagcttgcagatgcaggtgctgcaggcgaaggcgcaggtggcgcagacgatggcggcggccgggccgcaggggggcagcagccctctcctgcagcggtggccgctggagcctgagtcgctgtcgacgcagagctccgggtgctacagcgacatgtactgcggcttcggcgaccaggaggaaggcagctacacgagatga

SEQ ID NO: 1656 - protein, 167 aa, Zea mays
MASSGSGGGSPGSPCGACKFLRRKCAAECVFAPHFCAEDGAAQFAAIHKVFGASNAAKLLQQVAPADRSEAAATVTYEAQARLRDPIYGCVAHIFALQQQVASLQMQVLQAKAQVAQTMAAAGPQGGSSPLLQRWPLEPESLSTQSSGCYSDMYCGFGDQEEGSYTR

SEQ ID NO: 1657 - DNA, 786 bp, Zea mays
  CDS (1)..(786)
atggcgtccccgtcgagcaccagcaacaactcggccttctcccctgtggcggcgtcggccgggacgacgatgcctggtgccggggcgccgtgcgcggcgtgcaagttcctgcggcgcaagtgcctgccggggtgcgtgttcgcgccctacttcccgccggaggagccgcagaagttcgccaacgtgcacaaggtgttcggcgccagcaacgtgaccaagctgctgaacgagctgctgccgcaccagcgggaggacgccgtgagctcgctcgcctacgaggccgaggcgcgcgtcaaggaccccgtctacggctgcgtcggcgccatctccgtgctgcagcgccaggtccaccgcctccagaaggagctggacgccgcgcacgccgagctcctccgctacgcctgcggcgacgtcgccgccggcatccccaccgcgctccccgtcgtcagcgccgcccccaggctctccacggcgccaatgacgacgacgagccccggccagttcgccgccggcatgtacggcagcggcaggaggcttggggtcgtcgacggactagcagcgccaccgctgcctccgtcgggcggcggcggcggctgctacttcatgcggaaccaccacaacaacgtcgtcattagtagctccccaggcgctgacgtggcgcccgtcctgccttacgcttccgtggctaattgggcggtgaatgccatcagcgcgtcgacgaccaccacctccggatcagagagcattgggttggatcacaaggaagggggagacagcagcatgtga

SEQ ID NO: 1658 - protein, 261 aa, Zea mays
MASPSSTSNNSAFSPVAASAGTTMPGAGAPCAACKFLRRKCLPGCVFAPYFPPEEPQKFANVHKVFGASNVTKLLNELLPHQREDAVSSLAYEAEARVKDPVYGCVGAISVLQRQVHRLQKELDAAHAELLRYACGDVAAGIPTALPVVSAAPRLSTAPMTTTSPGQFAAGMYGSGRRLGVVDGLAAPPLPPSGGGGGCYFMRNHHNNVVISSSPGADVAPVLPYASVANWAVNAISASTTTTSGSESIGLDHKEGGDSSM

SEQ ID NO: 1659 - DNA, 780 bp, Oryza sativa subsp
  CDS (1)..(780)
atgacgggatttggatcgccgtgcggcgcgtgcaagtttctgcggcgcaagtgcgtgcgcgggtgcgtgttcgcgccatacttctgccacgagcaaggggcggcgcacttcgccgccatccacaaggtgttcggcgccagcaacgtgtccaagctgctcgcccacctgccgctcgccgaccgccccgaggccgccgtcactatctcctacgaggcgcaggcccgcctccgcgaccccatctatggctgcgtcgcccacatcttcgccctccagcagcaggtgatgacgctgcaggcgcagctggcgtcgctcaaggcggcggcggcgcaagggatacaccaccaggacgtcggcgccaccaccaagggcggctacatgagcgccgccgccaccgccgccgacgaccaattagggtacggcggctacaaccagtggtgcggcagcaatgggggcggcgcgccggcggcgtcgcagccgggcgcgtatagcagcaatggcggcgccggccacggccacgactccatcaccgcgctgctggcggccgggtcggactacatgcagcactcgctgtaccacgcgttcgagcactcggagggcgccggcgccgtggacgacgggcacgcggccgccgcggccttcgaggcggcggcggagtcgtcgtcgtgcggcatggcggcgtcgttcgccgccgacgagagcgtgtggaggtcgtcgtcgtcgggataccaagattgcgaggatctccagagcgtcgcctacgcttaccttaaccgctcgtaa

SEQ ID NO: 1660 - protein, 259 aa, Oryza sativa subsp
MTGFGSPCGACKFLRRKCVRGCVFAPYFCHEQGAAHFAAIHKVFGASNVSKLLAHLPLADRPEAAVTISYEAQARLRDPIYGCVAHIFALQQQVMTLQAQLASLKAAAAQGIHHQDVGATTKGGYMSAAATAADDQLGYGGYNQWCGSNGGGAPAASQPGAYSSNGGAGHGHDSITALLAAGSDYMQHSLYHAFEHSEGAGAVDDGHAAAAAFEAAAESSSCGMAASFAADESVWRSSSSGYQDCEDLQSVAYAYLNRS

SEQ ID NO: 1661 - DNA, 807 bp, Arabidopsis thaliana
  CDS (1)..(807)
atgtcccgagaaagggaaggatttggagagtactacgagaccgtcaagaagataaagaaagatccagccttcgagacaacgacggatcatgccgtgatgggaatcaggagacatgtggcggtgcctccggggacaacgttgaacaccgtaacaccatgcgccgcttgtaagctcctccgccgtcgttgtgcggaggagtgtcctttctcgccttacttctcgccgcatgaacctcacaagttcgctgccgttcataaagtctttggtgcaagcaacgtctccaagatgcttctggaagtgggagagagccaaagaggagacgcagcaaatagtttagtatacgaagcaaacctaagacttagagatccaatctacggttgcatgggagcaatctcagctcttcaacaccacattcagtctcttcaatccgaactcacgaccgtccgtacggaaatcctacgccacaaataccaagaagccaccaccatcacttctctccaaaacaacttcaacagcactacaacaacttcatcagtgagttgtgatcagcatgctctcgcctcggcgattctcctcccaccaccaccgccaccacctcctactccacgaccaccaaggttgttgtcctctcagccagctccaccgcctacgccacccgtttctttgccatctccgtccatggttgtgtcgtcctcttcatcttctaattcatctgccaccaattctatgtataatcctcctccatcttcgacggctggatatagcaattctctgtccagtgataataatgttcattactttgattaa

SEQ ID NO: 1662 - protein, 268 aa, Arabidopsis thaliana
MSREREGFGEYYETVKKIKKDPAFETTTDHAVMGIRRHVAVPPGTTLNTVTPCAACKLLRRRCAEECPFSPYFSPHEPHKFAAVHKVFGASNVSKMLLEVGESQRGDAANSLVYEANLRLRDPIYGCMGAISALQHHIQSLQSELTTVRTEILRHKYQEATTITSLQNNFNSTTTTSSVSCDQHALASAILLPPPPPPPPTPRPPRLLSSQPAPPPTPPVSLPSPSMVVSSSSSSNSSATNSMYNPPPSSTAGYSNSLSSDNNVHYFD

SEQ ID NO: 1663 - DNA, 675 bp, Arabidopsis thaliana
  CDS (1)..(675)
atgtcaagagaaagggagagatttgaagagatagggaagaagatcaaaagagaagcagatgcttggcctcatcaaatggctggaattagaagaccaatgtcgggtcctcccggaaccctcaataccattacgccttgtgctgcctgcaagcttttgcgccgtagatgtgctcaagaatgtcccttttcgccatatttctccccacacgagcctcataagttcgcttccgtccacaaagtctttggagctagtaacgtctccaagatgctaatggaagtacctgagagccagagagcagatgccgcgaatagccttgtgtatgaagcaaacgtgaggctaagagatccggtgtacggatgcatgggagccatctcagctctacaacaacaagtccaagctttacaagccgagctcacggccgtaagatccgagattcttaagtacaagcaacgagaagctgtcgccactttgatcgtaccttccaactcccaagttgccggatttcacaactccggcggtgtttccgtgattgcaccaccaccacaaagaccaacaactccaccacaacctacaacggctcatcctccttctccatcttcttgtgttttctctcaaccaaccacaagagacttagaatacggcaacattgaaagtgagaacaactacttcggttaa

SEQ ID NO: 1664 - protein, 224 aa, Arabidopsis thaliana
MSRERERFEEIGKKIKREADAWPHQMAGIRRPMSGPPGTLNTITPCAACKLLRRRCAQECPFSPYFSPHEPHKFASVHKVFGASNVSKMLMEVPESQRADAANSLVYEANVRLRDPVYGCMGAISALQQQVQALQAELTAVRSEILKYKQREAVATLIVPSNSQVAGFHNSGGVSVIAPPPQRPTTPPQPTTAHPPSPSSCVFSQPTTRDLEYGNIESENNYFG

SEQ ID NO: 1665 - DNA, 738 bp, Arabidopsis thaliana
  CDS (1)..(738)
atggcatcttccggtaacggtacaacggcggggacaggttcaccatgcggtgcatgcaagttcttgaggaggaagtgcgcatccgattgtatatttgcaccgtacttctcatcggagcaaggagcagcaagattcgcagctattcacaaggtgtttggagcaagcaacgtttctaagctcttgcttaatgttccaatccatgatcgatgtgaagctgtcgtcaccatcgcctacgaagctcaggctcgtcttcatgaccctgtttatggatgtgtctctcatatctttgccctccaacaacaggtggctttcttgcaatcacaagtcatgcaaatgaaggcacagatagctggccaccagacgtcagccgccggagatctaagacacagctcggaaagtaccaaccagtttatgacgtggcaacaaactagtgtctctccgatcggtagtgcatactcaacaccgtataaccatcatcaaccttactacggtcatgtaaaccctaacaatccggtctcgccacagagctcgctagaagaatctttcagcaacacgagcagtgacgtcaccacaacagccaacgtgcgagagactcatcatcaaaccggaggaggagtatacggtcacgatggaatagggtttcacgaaggatatcctaacaagaagagatcagtgagttattgtagtagcgatttaggtgagcttcaggctttggctcttagaatgatgaagaactaa

SEQ ID NO: 1666 - protein, 245 aa, Arabidopsis thaliana
MASSGNGTTAGTGSPCGACKFLRRKCASDCIFAPYFSSEQGAARFAAIHKVFGASNVSKLLLNVPIHDRCEAVVTIAYEAQARLHDPVYGCVSHIFALQQQVAFLQSQVMQMKAQIAGHQTSAAGDLRHSSESTNQFMTWQQTSVSPIGSAYSTPYNHHQPYYGHVNPNNPVSPQSSLEESFSNTSSDVTTTANVRETHHQTGGGVYGHDGIGFHEGYPNKKRSVSYCSSDLGELQALALRMMKN

SEQ ID NO: 1667 - DNA, 576 bp, Arabidopsis thaliana
  CDS (1)..(576)
atgatgaccggaaacttgaacggcggtggaagaggaggagaaggaccatgcggggcttgcaagttcttgagaagaaagtgtgtgaaagggtgcgttttcgctccttatttcgatgcagagcaaggaactgcgagatttgcagcagttcacaaagtatttggggccagcaatgcctctaagatgttactgagattgcctctgcacaagagacttgatgcagtcgtcacgctctgttacgaggccatggcaaggattcgtgatcctgtctatggctctgttggccatctcttctctcttcaacaccaggtgatgaatctacaagcagagcttgctcatgttcaagctcgtctttcaacaattcagcggtttcctctacagtcgccacaacaaatgcagccaccgtcttttgatcctgcgcataacaatgaatatgcgatggaaccgagtaacttggatagtgtgtggggggaagaacatttacttcaagatggaactggagatggggatttccaagaactggcgtcgcagttcgtctcaaggtatttaccggcggtcaaacttccggcttgcacttag

SEQ ID NO: 1668 - protein, 191 aa, Arabidopsis thaliana
MMTGNLNGGGRGGEGPCGACKFLRRKCVKGCVFAPYFDAEQGTARFAAVHKVFGASNASKMLLRLPLHKRLDAVVTLCYEAMARIRDPVYGSVGHLFSLQHQVMNLQAELAHVQARLSTIQRFPLQSPQQMQPPSFDPAHNNEYAMEPSNLDSVWGEEHLLQDGTGDGDFQELASQFVSRYLPAVKLPACT

SEQ ID NO: 1669 - DNA, 822 bp, Arabidopsis thaliana
  CDS (1)..(822)
atggctgatcagcagcgaggccacaacacctcagattctcgccggaaatctctagccggaaaaagaacctcacagcaaactccgacgtcatcacttagttccggcggagtatccatggcagctgcaacgacggggacagggacggcttcgccttgtggggcttgcaagttcttgagaaggaagtgtgtgagtggatgcattttcgctccacattttgggtcagaccaaggagcggctaggttcgcggcggttcataaggttttcggagccagcaacgtgtcgaaactgttgcatcatattccggtgaaccgtcgtcatgatgcggtggttacgatctcatacgaggctcaagctaggctctctgatcctgtctatggctgcgtctcaaccatccttgctctccaacaacaggtggcctcgctacaggcggagttatcggtggtgcaatcacaactgataaacagtagagtcgcaatggccaacgttatgcaacaacaaactcatcaccaacaacagcaacaacaattagtcgttatgcaacaacccgaatactccaacaactcctccgcctccaccactctcgccggagccgccatgaacagcttcaccatgacggcagatgcagcagccgtcagctatgacgtcatggctccgactaacttagaacattcgttgcagccaatgccaccgcatcagcaaaggagaggagattatcagcatgaggatgaggaagagagcggtgctgatttttcggtggctgttggatcgacggcggtggcttcgaaggttatatttccggcggaggattttcaccggagatga

SEQ ID NO: 1670 - protein, 273 aa, Arabidopsis thaliana
MADQQRGHNTSDSRRKSLAGKRTSQQTPTSSLSSGGVSMAAATTGTGTASPCGACKFLRRKCVSGCIFAPHFGSDQGAARFAAVHKVFGASNVSKLLHHIPVNRRHDAVVTISYEAQARLSDPVYGCVSTILALQQQVASLQAELSVVQSQLINSRVAMANVMQQQTHHQQQQQQLVVMQQPEYSNNSSASTTLAGAAMNSFTMTADAAAVSYDVMAPTNLEHSLQPMPPHQQRRGDYQHEDEEESGADFSVAVGSTAVASKVIFPAEDFHRR

SEQ ID NO: 1671 - DNA, 687 bp, Arabidopsis thaliana
  CDS (1)..(687)
atgagcagtagcggaaaccctagcagcagcagcggtggaggaggaggaccgtgcggcgcgtgcaagttcttgagaaggaagtgtgtcgctggctgcatcttcgctccttactttgactccgagcaaggagcggcgcacttcgcggcggttcacaaggtgttcggagcgagcaacgtctccaaactcctccaccatgttcccgagcataaacgaccagacgccgtcgtttcaatctgctttgaggctcaagctcgtctcagagaccctatctacggctgcgtctctcacatcgtctctcttcagcaacaggtggtaagtttgcaaactgagctttcatatctacaagcacacttagcaactctagagctgccacaacctcaaccaccacaggttccggtgtcatcttcaggatctctacaggctctttccataacggacctcccaacaatatcaccgtcggtgtacgacctctcctccatcttcgagccggtcatgtcctccacttgggccatgcagcaacaaccacgaccgtctgatcatctcttcggcgtcccgtcatcgtccaatatgggcggaggcggtgagctccaagcactggcgcgtgagtttattcacggtgggcaaatgccagctcagccatcgccgggaaccagtggttctgcctcgtcagtgataaaacgagaatga

SEQ ID NO: 1672 - protein, 228 aa, Arabidopsis thaliana
MSSSGNPSSSSGGGGGPCGACKFLRRKCVAGCIFAPYFDSEQGAAHFAAVHKVFGASNVSKLLHHVPEHKRPDAVVSICFEAQARLRDPIYGCVSHIVSLQQQVVSLQTELSYLQAHLATLELPQPQPPQVPVSSSGSLQALSITDLPTISPSVYDLSSIFEPVMSSTWAMQQQPRPSDHLFGVPSSSNMGGGGELQALAREFIHGGQMPAQPSPGTSGSASSVIKRE

SEQ ID NO: 1673 - DNA, 648 bp, Arabidopsis thaliana
  CDS (1)..(648)
atgagcggaagcaccaccggttgtggaggtccatgcggcgcatgtaagtttctccgacggaaatgcgttgctgactgtgtcttcgctccctactttgattcggtggaagggacgtctcatttcacggccgtgcacaaggttttcggggcgagcaacgcctccaagctcctcatgatgattccagccagccggagactggacgctgtcgtcacgcttacttacgaggcattggctaggcttcgcgatcccgtctacggatgcgttggtcatatcttcgcccttcaacatcaggcggagttagcttacgtccaaactcaactctcaacattacaaggtcttcctccgccgaattctcaaaacaattcacggacagaagcagcctcttcatctaatgtgccactcatttcttctgtcgatagcaaagacaatatgtcttcctcgtcgtcacacattccttgtatgtcacaacaacaagaacaagaacagccaaaagaagctattgaggtcccaacagagtcagtggatcttagcacattctttggcctggaaaatccagtggatgaggacggtgatcttaacgctcttgcccgtgagttcttcactaagtatttgaccggaggcaaataccgaccatcttctttaatataa

SEQ ID NO: 1674 - protein, 215 aa, Arabidopsis thaliana
MSGSTTGCGGPCGACKFLRRKCVADCVFAPYFDSVEGTSHFTAVHKVFGASNASKLLMMIPASRRLDAVVTLTYEALARLRDPVYGCVGHIFALQHQAELAYVQTQLSTLQGLPPPNSQNNSRTEAASSSNVPLISSVDSKDNMSSSSSHIPCMSQQQEQEQPKEAIEVPTESVDLSTFFGLENPVDEDGDLNALAREFFTKYLTGGKYRPSSLI

SEQ ID NO: 1675 - DNA, 828 bp, Oryza sativa
  CDS (1)..(828)
atgagctcgggaggcggagccagcagcgcgctcggcggcggcggcggcggcggcggaagcggaggaggaggaggagggccgagcggcggcggcggtggaggaggcgggccgtgcggggcgtgcaagttcctgcggcgcaagtgcgtgagcgggtgcatcttcgcgccctacttcgactcggagcagggcgcggcgcacttcgcggcggtgcacaaggtgttcggcgccagcaacgtgtccaagctgctcctccagatcccggcgcacaagcgccccgacgccgtcgtcaccatctgctacgaggcccaggcccgcctccgcgaccccgtctacggctgcgtcgcccacatcttcgccctccagcagcaggtggtgaatctccaggccgagctgacctacttgcaagcccacctcgccacgctggagctgccgtccccgccgccgctgatgccggcgccgccgcagatgccgatgccggcgccgttctccatctcggacctcccgtcgtcgacgagcgtcccgaccaccgtcgacctctcagctctcttcgacccgccgccgcagccgcaatgggcatcgccgctccagcagcagcagcaccaccaccaccagcaccatcatcaccaacagcagcagcaccagctccggcagccctcatatgccacgctggccagggcgccgtccggcatgacggcggcggcggagagctcgggaggaggaggaggaggcggcggtggagaccttcaggcgctcgcaagggagctcctggatcgccacaggtccgcagtgaagctcgagcagccgccgccgccgcactctagatcatga

SEQ ID NO: 1676 - protein, 275 aa, Oryza sativa
MSSGGGASSALGGGGGGGGSGGGGGGPSGGGGGGGGPCGACKFLRRKCVSGCIFAPYFDSEQGAAHFAAVHKVFGASNVSKLLLQIPAHKRPDAVVTICYEAQARLRDPVYGCVAHIFALQQQVVNLQAELTYLQAHLATLELPSPPPLMPAPPQMPMPAPFSISDLPSSTSVPTTVDLSALFDPPPQPQWASPLQQQQHHHHQHHHHQQQQHQLRQPSYATLARAPSGMTAAAESSGGGGGGGGGDLQALARELLDRHRSAVKLEQPPPPHSRS

SEQ ID NO: 1677 - DNA, 810 bp, Oryza sativa
  CDS (1)..(810)
atgagctcgtcggtggttgtgagcgcgagcggcagcggcagcggcggcggaggaggaggaggaggtggcggcgccggaggtggaggaggaggtgggccgtgcggggcgtgcaagttcttgcggcggaagtgcgtgcaggggtgcatcttcgcgccctacttcgactcggaggccggggcggcgcacttcgcggcggtgcacaaggtgttcggcgccagcaacgtgtccaagctgctgcagcagatcccggcgcaccgccgcctcgacgccgtcgtcaccatctgctacgaggcccaggcccgcctccgcgaccccgtctacggctgcgtcgcccacatcttccacctccaacaccaggtggcaggtctccagtccgagctgaactacctgcaaggtcacctctcgacgatggagctgccgtcgccgccgccctacgtcgccgggccgaccctggcgccgccacagccacagccactgatgccgatgaccgccgccgccaacttcaacttctccgacctgccatcgtcgtcggcggccaacattccggtcaccgccgacctgtccaccctctttgacccactgccggcggcgcagccgcagtggggactataccagcagcagcaacaccaccaccagcagctgcatcatcacccctatgaccggatgggcgacggctcgtcgagcagcagaggcggcgacgacgatggcagcgacggcggcgacttgcaagcgctggcgagggagcttcttgaccgccatggacggtcgtcgtcgagctccaagctggagccgccacctcacacacagtga

SEQ ID NO: 1678 - protein, 269 aa, Oryza sativa
MSSSVVVSASGSGSGGGGGGGGGGAGGGGGGGPCGACKFLRRKCVQGCIFAPYFDSEAGAAHFAAVHKVFGASNVSKLLQQIPAHRRLDAVVTICYEAQARLRDPVYGCVAHIFHLQHQVAGLQSELNYLQGHLSTMELPSPPPYVAGPTLAPPQPQPLMPMTAAANFNFSDLPSSSAANIPVTADLSTLFDPLPAAQPQWGLYQQQQHHHQQLHHHPYDRMGDGSSSSRGGDDDGSDGGDLQALARELLDRHGRSSSSSKLEPPPHTQ

SEQ ID NO: 1679 - DNA, 828 bp, Brassica napus
  CDS (1)..(828)
atggctgatcagcagcgatctggccacaacacctcagattctcgccggaaatcagcagccgggagacgaacctcacaacacactacgacgtcatcattatcttccggtggaggagccatggcggcagctgcaacgacggggacaggaacggtctcgccttgtggggcttgcaagttcttgagaaggaagtgtgtgagtggatgcattttcgctccacatttcgggtcggaccaaggagcggctaggttcgcggcggtccataaggtatttggagccagcaacgtgtcgaaactgttgcatcatattccggtgaaccgtcgtcatgacgctgtagttacgatttcatatgaggctcaagctaggctctctgatcctgtgtatggctgcgtctcaactatccttgctctccaacaacaggtggcctcgctacaggcggagttatcactggtgcaatcacaactaataaacagtagagtcgcaatggccaacgttatgcaacaacaacaaaatcatcaccaacaacatcaacaactagtcgttatgcaacaacctgaatactccaacaactcatccgcctccaccactcttgccggagccgccatgaatagtttcaccgcgacggcagaagcagcagcagccgttagctatgacgtcatggccccggctaatttagagcattcgttgcagcatgtgccacggcatcaacaaggtagcggaaatcagcatgaggacgaggaagagagtggtactgagttttcggtggctgtgggctcgacggcgttggctgcggaggttatatatccggcggagggttttcaccggatatga

SEQ ID NO: 1680 - protein, 275 aa, Brassica napus
MADQQRSGHNTSDSRRKSAAGRRTSQHTTTSSLSSGGGAMAAAATTGTGTVSPCGACKFLRRKCVSGCIFAPHFGSDQGAARFAAVHKVFGASNVSKLLHHIPVNRRHDAVVTISYEAQARLSDPVYGCVSTILALQQQVASLQAELSLVQSQLINSRVAMANVMQQQQNHHQQHQQLVVMQQPEYSNNSSASTTLAGAAMNSFTATAEAAAAVSYDVMAPANLEHSLQHVPRHQQGSGNQHEDEEESGTEFSVAVGSTALAAEVIYPAEGFHRI

SEQ ID NO: 1681 - DNA, 804 bp, Brassica napus
  CDS (1)..(804)
atggctgatcagctacgaagccacaacacttcagattctcgtcgcaaatcatcagccgggaaacgaacctcactacgtactacaacgtcatcattttcttccggcggagccatggcggagactgcaacgacggggacaggaacggcgtcgccttgtggggcttgcaagttcttgagaaggaagtgtgctagtggatgcattttcgctccacatttcgggtcggaccaaggagcggctaggttcgcggcggtccataaggtgtttggagctagcaacgtgtctaaactgttgcatcacattccggtgaaccgtcgtcacgacgcggtggttacgatttcatacgaggctcaggctaggctctctgatcctgtgtatggctgcgtctcaactatccttgctctccaacaacaggtggctgcgctacaatcggagttatcgttggtgcaatcacaactagtaaacagtagagtcgcaatggccaacgttatgcaacaacaacaacaacaaagccaccaccaccaacaacaacaattagtcgttatgcaacaacccgaatactccaacaactcatccgcttccaccatgaaccgcttcaccgcgacggcagcagcggccatcggctatgacgtcatggctccggctaacttacaacattcgttgcagcctatgccacggcatcagcaggttacaagaaatcagcatgaggatgaggaagagagtggtgctgatttttcggtagctgttggttcgacggcggtggctgcggaggttatctttccggcggagggttttcaccggatatga

SEQ ID NO: 1682 - protein, 267 aa, Brassica napus
MADQLRSHNTSDSRRKSSAGKRTSLRTTTSSFSSGGAMAETATTGTGTASPCGACKFLRRKCASGCIFAPHFGSDQGAARFAAVHKVFGASNVSKLLHHIPVNRRHDAVVTISYEAQARLSDPVYGCVSTILALQQQVAALQSELSLVQSQLVNSRVAMANVMQQQQQQSHHHQQQQLVVMQQPEYSNNSSASTMNRFTATAAAAIGYDVMAPANLQHSLQPMPRHQQVTRNQHEDEEESGADFSVAVGSTAVAAEVIFPAEGFHRI

SEQ ID NO: 1683 - DNA, 675 bp, Brassica napus
  CDS (1)..(675)
atgagcagtagcggaagccctggcagcagctgtggaggaggaccgtgcggtgcgtgcaagttcttgagacgtaagtgcgttgccggctgcatattcgcgccctatttcgactccgagcaaggagcggcgcacttcgcggcggttcacaaggttttcggagcaagcaacgtttcgaaactcctccagcatgttcccgagcacaaacgagcagacgcagtcgtttcaatctgcttcgaagctcaggctcgtctccgagaccctatctacggctgcgtctctcacatcgtctctcttcagcaacaggtggtgagtctacaaactgagctttcatatgtacaagcacacttagcaactctagagctgccacaaccaccgccggctccggtgacttcttctggatctccgccgcctctgtccatatcagacctccccacaataacaccgtcgttgtacgagctctctcccatattcgaaccgatgtcttccacgtggaccatgcagcaacaacctcgaccttttgatcatctcttcggcgtcccgtcatcatccactatcggaggaagcagtgagctgcaagctctggcacgtgattttcttcacggtgggcaaattccagctgatctgccaccgccggggaccggtggttctgccccaactgtggtaaaacgagaatga

SEQ ID NO: 1684 - protein, 224 aa, Brassica napus
MSSSGSPGSSCGGGPCGACKFLRRKCVAGCIFAPYFDSEQGAAHFAAVHKVFGASNVSKLLQHVPEHKRADAVVSICFEAQARLRDPIYGCVSHIVSLQQQVVSLQTELSYVQAHLATLELPQPPPAPVTSSGSPPPLSISDLPTITPSLYELSPIFEPMSSTWTMQQQPRPFDHLFGVPSSSTIGGSSELQALARDFLHGGQIPADLPPPGTGGSAPTVVKRE

SEQ ID NO: 1685 - DNA, 753 bp, Helianthus annuus
  CDS (1)..(753)
atgagttcaaacccgagcactagtagcaccagcggctgcagcggtggtggcggaagtagcagtggtggtggtggtgggccgtgtggtgcgtgcaagttcttaaggaggaaatgtgttgcagggtgcatctttgcaccttattttgattctgatcaaggtgcagcccatttcgctgcggtccacaaagttttcggggcgagtaacgtgtcgaaactcctgtttcatcttccggttcagaggcgccatgacgcggtgatcactatttgctatgaagctcaggccaggcttagagatcctgtccttggttgtgtttctcatatctttgctcttcaacaacaggtgatcaacttacaagcggagctatcatactaccaaacccacctagtcacccgtgaaggaccagctccgccgccacctccgccagtagcgcaaccacaacctccgccgcaaggaatatccatcaacgacctcacaaccgcctcgccgttccttgctgcctatcatgacttgtcatcacttcttgaaccaatggtgccaccctcatggaccatgcaatcaccaatgaggcagatggatccccgccagttcatgagttttggtgccgcccgagcccccactgagttgccgccagctcctggggacaccggtgactttcaagggctggctagggagcttttgcacaggccaagtaatgaggggggttctggaccatctggggcttgcaaaaatgaaggctcatctttgcccccataa

SEQ ID NO: 1686 - protein, 250 aa, Helianthus annuus
MSSNPSTSSTSGCSGGGGSSSGGGGGPCGACKFLRRKCVAGCIFAPYFDSDQGAAHFAAVHKVFGASNVSKLLFHLPVQRRHDAVITICYEAQARLRDPVLGCVSHIFALQQQVINLQAELSYYQTHLVTREGPAPPPPPPVAQPQPPPQGISINDLTTASPFLAAYHDLSSLLEPMVPPSWTMQSPMRQMDPRQFMSFGAARAPTELPPAPGDTGDFQGLARELLHRPSNEGGSGPSGACKNEGSSLPP

SEQ ID NO: 1687 - DNA, 648 bp, Zea mays
  CDS (1)..(648)
atgacaggccttggctcaccatgtggtgcgtgcaagttcctacgcaggaagtgtgtgaaggggtgtgtcttcgctccatatttctgtcatgagcaaggggctgcgcactttgctgctatccacaaggtctttggggccagcaatgcctcaaagctcctaatgcatctgccaataagtgaccgttgcgaggctgcagtcactatgtcatatgaggcgcaagccaggcttcaagatccaatatatggctgtgttgctcacatcttttctctgcaacaacaggtggtcaggctgcaagcagaactagagtctttcaaagctctagcaatacaaggatgtggagatgggtccttgacatcaaaccctcagaaagaaaactgtgaaagattagcaccttatattcaagacgggcagctcttttaccaaccaacaatggcaaacaattcttcagtaaagagtgagaggcagttatactttgcaaacgattgcttcacatcaacgtcaactcaacattctgaaggttatgagccagatatatgcatgcctgactactacaacaacagcaatccttcttggaccacgcaagggagtgggtatcatgatattgatgagcttcaatcagtagcctttgcatatctggacaatgcttga

SEQ ID NO: 1688 - protein, 215 aa, Zea mays
MTGLGSPCGACKFLRRKCVKGCVFAPYFCHEQGAAHFAAIHKVFGASNASKLLMHLPISDRCEAAVTMSYEAQARLQDPIYGCVAHIFSLQQQVVRLQAELESFKALAIQGCGDGSLTSNPQKENCERLAPYIQDGQLFYQPTMANNSSVKSERQLYFANDCFTSTSTQHSEGYEPDICMPDYYNNSNPSWTTQGSGYHDIDELQSVAFAYLDNA

SEQ ID NO: 1689 - DNA, 798 bp, Zea mays
  CDS (1)..(798)
atgagcgctggaggcggcgccggcgccagcacgctcggcggtgggggcccgagcggcagcggcagcggcagcggaggctctggagctggagtaatcggcggcggcggcggcggcggcgccggcgggccctgcggcgcgtgcaagttcctccggcgcaagtgcgtcagcggctgcatcttcgcgccctacttcgactcggagcagggcgcggcgcacttcgcggccgtgcacaaggtgttcggcgccagcaacgtgtccaagctgctgctccagatcccgccgcacaagcgcctcgacgccgtcgtcaccatctgctacgaggcccaggcgcggctccgtgaccccgtctacggctgcgtcgcacacatcttcgcgctccagcagcaggtggtgaatctccaggccgagctgacctacctgcaagcgcacctcgcgacgctggagctgccgtccccgcctccgctgccggccccgccgcagatgccgatgccaggcccgttctccatcgccgaccttccgtcgtcgaccagcgtccccaccaccgtcgacctgtccacgctcttcgacccgccgccgcagtgggcggtccaccagccgcaccaccaccaccaacagctgcagcagcaccagctccggcaaccggcgccgtatggcgcgcccgtcaggccgggcggcggcatggccgcagagagctcaggcggcggcagcggggacctgcagtcgctggcgagggagctcctggaccgccaccgctcaggcggcgtcaagctcgagccgccgccgccgcactcgagatga

SEQ ID NO: 1690 - protein, 265 aa, Zea mays
MSAGGGAGASTLGGGGPSGSGSGSGGSGAGVIGGGGGGGAGGPCGACKFLRRKCVSGCIFAPYFDSEQGAAHFAAVHKVFGASNVSKLLLQIPPHKRLDAVVTICYEAQARLRDPVYGCVAHIFALQQQVVNLQAELTYLQAHLATLELPSPPPLPAPPQMPMPGPFSIADLPSSTSVPTTVDLSTLFDPPPQWAVHQPHHHHQQLQQHQLRQPAPYGAPVRPGGGMAAESSGGGSGDLQSLARELLDRHRSGGVKLEPPPPHSR

SEQ ID NO: 1691 - DNA, 20 bp, Artificial sequence
  primer
atgagcggtggtgggaacac

SEQ ID NO: 1692 - DNA, 20 bp, Artificial sequence
  primer
tcatctagacatagttcgag

SEQ ID NO: 1693 - protein, 95 aa, Artificial sequence
  consensus sequence
  Variant (3)..(3): Xaa in position 3 is any amino acid
  Variant (11)..(11): Xaa in position 11 is any amino acid
  Variant (13)..(15): Xaa in position 13 to 15 is any amino acid
  Variant (17)..(17): Xaa in position 17 is any amino acid
  Variant (23)..(29): Xaa in position 23 to 29 is any amino acid
  Variant (30)..(30): Xaa in position 30 is any or no amino acid
  Variant (34)..(34): Xaa in position 34 is any amino acid
  Variant (48)..(50): Xaa in position 48 to 50 is any amino acid
  Variant (52)..(54): Xaa in position 52 to 54 is any amino acid
  Variant (56)..(57): Xaa in position 56 to 57 is any amino acid
  Variant (59)..(63): Xaa in position 59 to 63 is any amino acid
  Variant (67)..(67): Xaa in position 67 is any amino acid
  Variant (71)..(71): Xaa in position 71 is any amino acid
  Variant (74)..(74): Xaa in position 74 is any amino acid
  Variant (79)..(80): Xaa in position 79 to 80 is any amino acid
  Variant (82)..(83): Xaa in position 82 to 83 is any amino acid
  Variant (89)..(90): Xaa in position 89 to 90 is any amino acid
  Variant (93)..(94): Xaa in position 93 to 94 is any amino acid
PCXACKFLRRXCXXXCXFAPYFXXXXXXXXFAAXHKVFGASNVSKLLXXXPXXXRXXAXXXXXYEAXARLXDPXYGCVXXIXXLQQQVXXLQXXL

SEQ ID NO: 1694 - protein, 59 aa, Artificial sequence
  protein pattern
  Variant (3)..(3): Xaa in position 3 is Ala, Asn or Ser
  Variant (4)..(4): Xaa in position 4 is Ile or Val
  Variant (14)..(14): Xaa in position 14 is Ser or Thr
  Variant (16)..(16): Xaa in position 16 is any or no amino acid
  Variant (18)..(24): Xaa in position 18 to 24 is any amino acid
  Variant (25)..(25): Xaa in position 25 is any or no amino acid
  Variant (27)..(27): Xaa in position 27 is any amino acid
  Variant (28)..(28): Xaa in position 28 is Asp or Glu
  Variant (30)..(30): Xaa in position 30 is Ala or Val
  Variant (31)..(31): Xaa in position 31 is any amino acid
  Variant (32)..(32): Xaa in position 32 is Ser or Thr
  Variant (33)..(33): Xaa in position 33 is Ile or Leu
  Variant (34)..(34): Xaa in position 34 is Ala, Cys, Ser or Val
  Variant (35)..(35): Xaa in position 35 is Phe or Tyr
  Variant (38)..(38): Xaa in position 38 is Glu, Asn or Gln
  Variant (39)..(39): Xaa in position 39 is Ala, Leu or Val
  Variant (41)..(41): Xaa in position 41 is Ile, Leu or Val
  Variant (42)..(42): Xaa in position 42 is any amino acid
  Variant (45)..(45): Xaa in position 45 is Ile or Val
  Variant (46)..(46): Xaa in position 46 is any amino acid
  Variant (49)..(49): Xaa in position 49 is Met or Val
  Variant (50)..(50): Xaa in position 50 is Ala, Gly or Ser
  Variant (51)..(51): Xaa in position 51 is any amino acid
  Variant (53)..(54): Xaa in position 53 to 54 is any amino acid
  Variant (57)..(58): Xaa in position 57 to 58 is any amino acid
  Variant (59)..(59): Xaa in position 59 is Ile or Val
FAXXHKVFGASNVXKXLXXXXXXXXRXXAXXXXXXEAXXRXXDPXXGCXXXIXXLQXXX

SEQ ID NO: 1695 - protein, 27 aa, Artificial sequence
  protein pattern
  Variant (3)..(3): Xaa in position 3 is Ala or Gly
  Variant (11)..(11): Xaa in position 11 is Lys or Arg
  Variant (13)..(13): Xaa in position 13 is Ala, Leu or Val
  Variant (14)..(14): Xaa in position 14 is any amino acid
  Variant (15)..(15): Xaa in position 15 is Asp, Glu or Gly
  Variant (17)..(17): Xaa in position 17 is Ile or Val
  Variant (21)..(21): Xaa in position 21 is His or Tyr
  Variant (23)..(25): Xaa in position 23 to 25 is any amino acid
  Variant (26)..(26): Xaa in position 26 is Ala, Asp, Glu or Gln
  Variant (27)..(27): Xaa in position 27 is Gly or Pro
PCXACKFLRRXCXXXCXFAPXFXXXXX

SEQ ID NO: 1696 - DNA, 1035 bp, Arabidopsis thaliana
  CDS (1)..(1035)
atggcttcctctgatttcgatggaatccttttgggaatgggaaacccactcctcgacgtctctgccgtcgtcgaccaacagtttctcgacaaatacgacatcaaattgaacaatgcgattctcgcagaggacaaacatttgcccatgtacgatgaaatgagccagaagttcaatgttgaatacattgctggaggtgctacccagaactcaatcaaagtggcccagtggatgcttcaagttcctggggcaaccagttacatgggatccattggaaaggacaaatacggagaggcaatgaagaaggatgctacagcagctggtgtctatgtccactattacgaagatgaggcaacacctaccggaacttgcggtgtctgtgttcttggtggagaaagatcgctcattgccaatctttctgctgctaattgctacaaggttgaacacttgaagaagcctgagaactgggctctggttgagaaggccaagttttattacattgctggattcttcctcacggtatcaccagaatccattcagttggtacgtgaacatgctgctgcaaacaacaaggtgttcacgatgaacctttctgctccattcatctgtgaattcttcaaagatgttcaggagaagtgcctgccgtacatggactatatttttggcaatgagaccgaggcaagaaccttctccagggttcacggctgggagactgatgatgttgagcaaatagccatcaagatgtcccagttacccaaagcctctggaacatacaagaggactactgtgattacacaaggcgcagatcctgtggttgtcgctgaggatggaaaagtgaagaagtacccagtcatccctctccccaaagagaagcttgttgacaccaacggtgcaggtgatgcatttgtgggagggtttctgtcccagctggtgcacggaaaggggattgaagagtgtgtgagggcaggatgctacgcgtcaaacgtagtgatccagaggtctggttgcacttaccctgagaaaccagacttcaactaa

SEQ ID NO: 1697 - protein, 344 aa, Arabidopsis thaliana
MASSDFDGILLGMGNPLLDVSAVVDQQFLDKYDIKLNNAILAEDKHLPMYDEMSQKFNVEYIAGGATQNSIKVAQWMLQVPGATSYMGSIGKDKYGEAMKKDATAAGVYVHYYEDEATPTGTCGVCVLGGERSLIANLSAANCYKVEHLKKPENWALVEKAKFYYIAGFFLTVSPESIQLVREHAAANNKVFTMNLSAPFICEFFKDVQEKCLPYMDYIFGNETEARTFSRVHGWETDDVEQIAIKMSQLPKASGTYKRTTVITQGADPVVVAEDGKVKKYPVIPLPKEKLVDTNGAGDAFVGGFLSQLVHGKGIEECVRAGCYASNVVIQRSGCTYPEKPDFN

SEQ ID NO: 1698 - DNA, 1398 bp, Oryza sativa
  CDS (106)..(1140)
tgagcctccttccccaactgttccacgcagaagcaaagcaacgccggtaatctctctccgccgcccccgccgccgccgcaccgttcgccggggatctagggaaggatggagagcggaagctacgagggcgtcctcctgggcatgggaaaccccctcctcgacatctccgccgtcgtcgacgaggccttcctcgcaaaatatgatatcaagccagggaatgcaattctagcagaggagaagcatttgcctatgtacaatgaattggctagcaaggtcaatgttgaatatatcgctggaggatccactcaaaattctattagggttgctcagtggatgctccagattcctggtgcaacaagttacatgggttgcattgggaaggacaagttcggtgaggagatgaagaaagacgcacaaaccgctggtgttaatgcccattattatgaggatgataatgctcctactggcacatgtgctgtctgcattgttggtggtgaaaggtcacttgttgcaaacttgtctgcagcgaactgctacaggtctgaacatctgaagaggccagagaactggacacttgttgagaaggcaaaatatatttacattgctggctttttcctcacggtatccccggattccattcaacttgttgctgagcatgctgctgcaactaacaaggtgtttatgatgaacctttctgctccctttatatgtgaattcttccgtgatgcccaagagaaggctcttccgtatgctgactatatttttggaaatgaaactgaagcaaggacctttgctaaagttcgtggttgggagactgagaatactgaggagattgctttgaagatctcgcaattgcctaaggcttcaggagcacacaagaggattactgtcattactcaaggctgtgacccagtagttgtggctgatgatggaaaggtcaaaacattccctgttatcgttttgcccgaggaaaagcttgttgacaccaatggtgcaggcgatgcctttgttgggggttttctctctcaattggttcaggagaagagcattgatgaatgtgtcagagctgcttgttatgctgcaaacgttatcatccaacgctcaggctgcacttaccctgagaagcctgacttcaactagagccatttcagcatattgagaaaggaataactataggcgacgagtgctttttgacatttccaccactactcaaggcacatttctagtgcaccctaggcatgtttggatagatgagtatagtgccttatctctttggcatggcaggaaagtgaactaaaaattcctaccgatatgaaaggatcatgccactcagtcaatacagagcaagacccttcagttgcaattccaccgtgccatctctttctgcatttacaaatc

SEQ ID NO: 1699 - protein, 344 aa, Oryza sativa
MESGSYEGVLLGMGNPLLDISAVVDEAFLAKYDIKPGNAILAEEKHLPMYNELASKVNVEYIAGGSTQNSIRVAQWMLQIPGATSYMGCIGKDKFGEEMKKDAQTAGVNAHYYEDDNAPTGTCAVCIVGGERSLVANLSAANCYRSEHLKRPENWTLVEKAKYIYIAGFFLTVSPDSIQLVAEHAAATNKVFMMNLSAPFICEFFRDAQEKALPYADYIFGNETEARTFAKVRGWETENTEEIALKISQLPKASGAHKRITVITQGCDPVVVADDGKVKTFPVIVLPEEKLVDTNGAGDAFVGGFLSQLVQEKSIDECVRAACYAANVIIQRSGCTYPEKPDFN

SEQ ID NO: 1700 - DNA, 1398 bp, Glycine max
  CDS (45)..(1070)
catgcagaagagatcggcgcgtttcatttgatcagatcataacaatggtgtccgaaggcactctcctgggcatgggtaaccctctcctcgacatctccgccgtcgtcgatgaagacttcttaaaaaaatatgatatcacctcgaacaatgcgattcttgcggaggacaagcacaagcctatgtatcaagaattggctgagaaatataatgtggagtacattgctggaggtgccactcagaattcaatcaaggttgctcaatggatgctccaagttcctggtgcaacaagttacatgggtggcataggaaaggataagtttggggaagagatgaagaagaactcaaagcttgctggtgtaaatgttcactattatgaagatgaaactacacctactggaacttgtgctgtttgtatagttggtggtgaaaggtctcttgtggcgaacttagcagctgccaattgctacaagtctgatcatttgaagagaccagaaaattgggcactagttgaaaaggccaagtatatttatattgccggctttttcctcactgtatcaccagattccatccagttagttgctgagcattctgctgcaaataacaagatcttctcaatgaacctttctgctccttttatctgtgagtttttcagggatgtacaggagaaagctctaccgtatacggactttgttttcggaaatgagactgaagcaagaacattttctaaagttcatggctgggagactgataatgtcgaggagatagctgtaaagatttcccaatggccaaaggcatcaggaacacacaaaaggataacagttatcacacagggtgcggatcctatttgtgttgctgaggatgggaaggtgaaaaagttccctgtgaaacttttgcctaaagagaaactagttgatacaaatggagcaggagatgcatttgttggaggatttctttctcaattggttcaggagaagcccattgaagaatgtgtgagagctggctgttatgcagcaaatgttatcatccaaaggtctggctgtacgtacccagagaagcctgattttcattgagtgtttctctcggttctgttcccattatgaagttttgattgttaggaaaccttttgttgtatttcgatagttgcagtataacaactgcatttggattttttcaatcccgactggggaaagcggggaaaaagtttcagtgaaaggaaacaaataattaatctgttatattatagtactaccattagagatttagagcatcgtttcatatttttgctgagtttgttattgagtcttttttattcgatattaaaccttgttattgtgcttagactgatgtctaacttgtcacttggagtatcatttaacgacctattggttaagcaaggtt

SEQ ID NO: 1701 - protein, 341 aa, Glycine max
MVSEGTLLGMGNPLLDISAVVDEDFLKKYDITSNNAILAEDKHKPMYQELAEKYNVEYIAGGATQNSIKVAQWMLQVPGATSYMGGIGKDKFGEEMKKNSKLAGVNVHYYEDETTPTGTCAVCIVGGERSLVANLAAANCYKSDHLKRPENWALVEKAKYIYIAGFFLTVSPDSIQLVAEHSAANNKIFSMNLSAPFICEFFRDVQEKALPYTDFVFGNETEARTFSKVHGWETDNVEEIAVKISQWPKASGTHKRITVITQGADPICVAEDGKVKKFPVKLLPKEKLVDTNGAGDAFVGGFLSQLVQEKPIEECVRAGCYAANVIIQRSGCTYPEKPDFH

SEQ ID NO: 1702 - DNA, 1445 bp, Zea mays subsp. mays
  CDS (170)..(1204)
ctttccttcctactttcccactgccgtgacgattttcacagcgaattctccggccggcgccgccccgtccgtccgtccgttcttccgataccgaactcgccagtcgccacagcgatctctctcgctcgctccgccgacgcagcgctcggcttcagctcgagaggaggaaatggccagcagcggctacgaagggatcctcctggggatggggaaccccctcctcgacatctccgctgtcgtcgacgagggcttcctcgccaagtatgatgtgaaaccgggcaatgtcattcttgctgaggacaagcatttgccaatgtatgacgaattggctagcaagagcaatgttgaatacattgctggaggagccactcaaaactctatcagggttgcccaatggatgcttcaaattcctggtgcatcaagttacataggttgcatcgggaaggataagtttggtgaggagatgaaaaaaaatgcacaagctgctggtattaatgcccattatcatgaggatgataatgctccaacgggcacatgtgctgtttgtgttgttggtggagaaaggtcacttattgctaacttgtctgcggcaaactgctataagtctgaacatctgaagaaacctgagaattgggcacttgttgagaaggcaaaatatatttacattgctggatttttccttacggtatccccggattctattcaacttgttgctgagcatgccgctgcaactaacaaggtgtttatgatgaacctttccgctccctttatctgcgaggttttccgtgatgcccaagagaaagctcttccgtacgtggattacatctttggaaatgaaactgaggcgaggacctttgctaaagttcgaggttgggagattgagaatgttgaggagatcgctttgaagatctcccaattaccgaaggcttcaggaacacacaagaggattactgttatcactcaaggttgcgatccggtagttgtggctgatgatggaaaggtgaaaactttccctgtgatcctcttgcctaaggagaagcttgttgacaccaatggtgcaggtgatgcgttcgttggaggcttcctgtcccagttggtacaagagaagagcatcgatgagtgtgtcagagctgcctgttacgccgccaatgttgtcatccaacgttctggctgcacttaccctgagaagcctgacttcaactagagccatttcagaatttagagtcttatggcatctggtctgtataattagtcgggttcgccttggtctgtttacggcacattctagtgtcaccgtacaggtcaaatgttcatgcgtgtaaggcgtgtcatactgtcatggcactctacaagtgcatgtgccagaaacgtgcatgcgtctctcggttacggactctttacagttgcatctaaaacaattcaaagcaccttgcggtgcatccttg

SEQ ID NO: 1703 - protein, 344 aa, Zea mays subsp. mays
MASSGYEGILLGMGNPLLDISAVVDEGFLAKYDVKPGNVILAEDKHLPMYDELASKSNVEYIAGGATQNSIRVAQWMLQIPGASSYIGCIGKDKFGEEMKKNAQAAGINAHYHEDDNAPTGTCAVCVVGGERSLIANLSAANCYKSEHLKKPENWALVEKAKYIYIAGFFLTVSPDSIQLVAEHAAATNKVFMMNLSAPFICEVFRDAQEKALPYVDYIFGNETEARTFAKVRGWEIENVEEIALKISQLPKASGTHKRITVITQGCDPVVVADDGKVKTFPVILLPKEKLVDTNGAGDAFVGGFLSQLVQEKSIDECVRAACYAANVVIQRSGCTYPEKPDFN

SEQ ID NO: 1704 - DNA, 1372 bp, Zea mays subsp. mays
  CDS (102)..(1130)
aaacgcactcgagctcgagccctcgcccgctcagtcacaaagcctcagatctcagtcacctgcgccgccgcttcgttcgtgtggaggggagaagacaggaaatggcggcgactgagggcgtgctcttggggatgggcaaccccctcctcgacatctccgccgtcgtcgatgacgccttcctgacaaagtatgacatcaagctgaacaatgccattctcgctgaggagaagcacttgcctatgtatgacgagttggctagcaagagcaatgttgaatatattgccggaggagccacccagaactctatcagggttgcccaatggatgcttcaaactcctggtgcaacaagttacatgggatgcattggaaaggacaagtttggtgaggaaatgaagaaaaacgctcaagctgcaggagttactgctcattactacgaggatgagactgctcctactggcacatgtgctgtatgtgttgttggtggtgaaaggtcattgattgcaaatctgtcagcggcaaactgttacaaatctgagcatctaaagagaccagagaactgggcactagttgaaaaggcaaaatacatctacattgctggatttttccttacagtgtcgcctgattctatccagctagtcgctgagcatgctgcagcaaataacaaggtgttcctgatgaacctctctgctcccttcatctgtgagttcttccgtgatgcccaagagaaggtcctcccgtatgctgactacatcttcggcaacgaaactgaggcaaagatctttgccaaagtcagaggatgggagactgagaatattgaggagattgctttgaagatctctcaacttcctttggcttcaggcaagcaaaagaggattgctgtgattactcaaggtgctgatccagtggttgttgctgaggatgggaaggtgaaaacgttccctgtgatcctattgcccaaggagaagcttgttgacaccaacggcgcaggtgatgctttcgttggaggcttcctctcacagttggttctaggcaagggcattgaagactgcgtgagggcaggttgctatgccgcaaacgttatcatccagcgcccgggctgtacttacccggagaagcctgacttcaactagtgcaaaaactgacgcacgtcatgagaggcactgttataggcacactttattgttaaccagtgcgtggttcggtgtctacacaccctgtattcttccgagccttctcttctgatccggccaatatttttgccgtgaaatttgtgttctgcgactatggacgtctcctttgtcgctgtataaggcatgatttgccatcattctgttgcttcggtgatgcttgcaatgcaatgagaatgtgttgg

SEQ ID NO: 1705 - protein, 342 aa, Zea mays subsp. mays
MAATEGVLLGMGNPLLDISAVVDDAFLTKYDIKLNNAILAEEKHLPMYDELASKSNVEYIAGGATQNSIRVAQWMLQTPGATSYMGCIGKDKFGEEMKKNAQAAGVTAHYYEDETAPTGTCAVCVVGGERSLIANLSAANCYKSEHLKRPENWALVEKAKYIYIAGFFLTVSPDSIQLVAEHAAANNKVFLMNLSAPFICEFFRDAQEKVLPYADYIFGNETEAKIFAKVRGWETENIEEIALKISQLPLASGKQKRIAVITQGADPVVVAEDGKVKTFPVILLPKEKLVDTNGAGDAFVGGFLSQLVLGKGIEDCVRAGCYAANVIIQRPGCTYPEKPDFN

SEQ ID NO: 1706 - DNA, 1050 bp, Bombyx mori
  CDS (1)..(1050)
atggacgtttctgattccatatgtgaccaagaaggattattagtgggcatagggaatcctttgttggacatatccgccagtgttgacgaggacttgctgaagaagtatgacctgcaccccgacgatgccattatggctgaagaaaaacacatgccactctactcggaactcgttgacaagtataatgcagagtatattgctggtggaagcgttcagaattcattaagagtagcacaatggattctaaagaaaccaaatatttgtacttactttggctgtgtgggaaatgatgaatatgctaaattattaaaggagagagcaattgcagatggagtccacgttcaatatcaagtatcaaatgaggtagcaactggtacatgtgcagtgctagtaactggtacacaccgctcactgtgcgccaatctcggtgctgcacaacacttcacaccagatcatttacagaaagaagaatgcaagaaaagcattgaagcagcgaagttcttttatgcttctggtttctttgtggcagtttctccagagtcgatattgttattggcccagcatgcgcacgataatggacatacgtttgttatgaacttgagtgcgccctttgtctcacagttctataaggaaccgctcgagaaacttctcccatatgtcgacgtgctcttcgggaatgaatcggaggcagacgctttcgcgaaggcattcaacataaattcgagcgatgtgcaggagatcgctttacggatcgccagcatgcccaaattgaacgcgaaccgtcagcgcgtcgtggtcatcacgcagggctgccaacccgtcgtgctggtacagagcggacgagtcaccctgataccggtcgaggctttgccgagggaacgtatcattgacacaaacggtgccggagatgcctttactggtgggtacttggcgcagctcgtgctgaaccgcgagccagccgcctgcgtgcggtgcgctgtctactgtgccacgcatgtcatccagcacccgggctgcacattcagcggacccagcgaatacaatgactga

SEQ ID NO: 1707 - protein, 349 aa, Bombyx mori
MDVSDSICDQEGLLVGIGNPLLDISASVDEDLLKKYDLHPDDAIMAEEKHMPLYSELVDKYNAEYIAGGSVQNSLRVAQWILKKPNICTYFGCVGNDEYAKLLKERAIADGVHVQYQVSNEVATGTCAVLVTGTHRSLCANLGAAQHFTPDHLQKEECKKSIEAAKFFYASGFFVAVSPESILLLAQHAHDNGHTFVMNLSAPFVSQFYKEPLEKLLPYVDVLFGNESEADAFAKAFNINSSDVQEIALRIASMPKLNANRQRVVVITQGCQPVVLVQSGRVTLIPVEALPRERIIDTNGAGDAFTGGYLAQLVLNREPAACVRCAVYCATHVIQHPGCTFSGPSEYND

SEQ ID NO: 1708 - DNA, 1026 bp, Oryza sativa (japonica cultivar-group)
  CDS (1)..(1026)
atggcgtccgagggcgtgctcctggggatgggcaaccccctcctcgacatctccgccgtcgtcgacgacgccttcctcaccaagtatgacgtcaagctgaacaatgcaattctcgctgaggaaaagcacttgcctatgtatgatgagttggccagcaagggcaatgttgaatatattgccggaggagccacccagaactctatcagggttgctcaatggatgcttcaaactcctggtgcaacaagttacatgggttgcattggaaaggataagtttggtgaggagatgaagaagaatgcccaagctgctggtgttactgctcattactacgaggatgaggctgctcccacgggcacatgtgctgtctgtgttgttggtggtgaaagatcactggttgcaaacttatcagcagcaaactgctacaaatctgagcatctgaagaaaccggagaactgggcactagtggagaaagcaaaatacatctacattgctggctttttccttacggtctccccagattctattcagcttgttgctgagcatgctgccgctaacaacaaggtgttcctgatgaacctctctgcaccctttatctgtgagtttttccgtgatgcccaggagaaggttcttccgtttgtggactacatcttcggtaacgaaacagaagcaagaatctttgctaaagtccgtggatgggagactgagaatgttgaggagatcgcgttgaagatttcccagcttccattggcctctggaaaacaaaagaggattgccgtgattactcaaggtgctgatccagtagttgtcgctgaggatggacaggtgaaaacattccctgtgatcctactgccaaaggagaagcttgttgacaccaatggcgctggtgatgcctttgttggaggcttcctctcacaattggttcaacaaaagagcattgaggactctgtgaaggctggttgctatgccgcaaatgttatcatccagcgttctggctgcacttaccctgagaagcctgatttcaactag

SEQ ID NO: 1709 - protein, 341 aa, Oryza sativa (japonica cultivar-group)
MASEGVLLGMGNPLLDISAVVDDAFLTKYDVKLNNAILAEEKHLPMYDELASKGNVEYIAGGATQNSIRVAQWMLQTPGATSYMGCIGKDKFGEEMKKNAQAAGVTAHYYEDEAAPTGTCAVCVVGGERSLVANLSAANCYKSEHLKKPENWALVEKAKYIYIAGFFLTVSPDSIQLVAEHAAANNKVFLMNLSAPFICEFFRDAQEKVLPFVDYIFGNETEARIFAKVRGWETENVEEIALKISQLPLASGKQKRIAVITQGADPVVVAEDGQVKTFPVILLPKEKLVDTNGAGDAFVGGFLSQLVQQKSIEDSVKAGCYAANVIIQRSGCTYPEKPDFN

SEQ ID NO: 1710 - DNA, 1035 bp, Oryza sativa (japonica cultivar-group)
  CDS (1)..(1035)
atggagagcggaagctacgagggcgtcctcctgggcatgggaaaccccctcctcgacatctccgccgtcgtcgacgaggccttcctcgcaaaatatgatatcaagccagggaatgcaattctagcagaggagaagcatttgcctatgtacaatgaattggctagcaaggtcaatgttgaatatatcgctggaggatccactcaaaattctattagggttgctcagtggatgctccagattcctggtgcaacaagttacatgggttgcattgggaaggacaagttcggtgaggagatgaagaaagacgcacaaaccgctggtgttaatgcccattattatgaggatgataatgctcctactggcacatgtgctgtctgcattgttggtggtgaaaggtcacttgttgcaaacttgtctgcagcgaactgctacaggtctgaacatctgaagaggccagagaactggacacttgttgagaaggcaaaatatatttacattgctggctttttcctcacggtatccccggattccattcaacttgttgctgagcatgctgctgcaactaacaaggtgtttatgatgaacctttctgctccctttatatgtgaattcttccgtgatgcccaagagaaggctcttccgtatgctgactatatttttggaaatgaaactgaagcaaggacctttgctaaagttcgtggttgggagactgagaatactgaggagattgctttgaagatctcgcaattgcctaaggcttcaggagcacacaagaggattactgtcattactcaaggctgtgacccagtagttgtggctgatgatggaaaggtcaaaacattccctgttatcgttttgcccaaggaaaagcttgttgacaccaatggtgcaggcgatgcctttgttgggggttttctctctcaattggttcaggagaagagcattgatgaatgtgtcagagctgcttgttatgctgcaaacgttatcatccaacgctcaggctgcacttaccctgagaagcctgacttcaactag

SEQ ID NO: 1711 - protein, 344 aa, Oryza sativa (japonica cultivar-group)
MESGSYEGVLLGMGNPLLDISAVVDEAFLAKYDIKPGNAILAEEKHLPMYNELASKVNVEYIAGGSTQNSIRVAQWMLQIPGATSYMGCIGKDKFGEEMKKDAQTAGVNAHYYEDDNAPTGTCAVCIVGGERSLVANLSAANCYRSEHLKRPENWTLVEKAKYIYIAGFFLTVSPDSIQLVAEHAAATNKVFMMNLSAPFICEFFRDAQEKALPYADYIFGNETEARTFAKVRGWETENTEEIALKISQLPKASGAHKRITVITQGCDPVVVADDGKVKTFPVIVLPKEKLVDTNGAGDAFVGGFLSQLVQEKSIDECVRAACYAANVIIQRSGCTYPEKPDFN

SEQ ID NO: 1712 - DNA, 993 bp, Agrobacterium tumefaciens str. C58
  CDS (1)..(993): transl_table=11
atgacgaaattcgacgtactgactgtcggcaatgccatcgtcgacatcatctcccgctgcgatgatcgctttctcaacgacaatgccatcaccaagggtgcgatgaacctgatcgacgcggaacgcgccgaactgctttattcgctgatgggaccggcgctcgaagcctccggcggcagcgcgggcaacacggcggcgggcgttgcgaatttcggcggcaaggccgcttatttcggcaaggtggccgaagaccagctcggcgaaatcttccagcacgatatccgcgcccagggcgtctatttcgaaaccaaaccggaaggcacattcccgccgacagcacgttcgatgatcttcgtgaccgaagacggcgaacgctcgatgaatacctatctcggtgcctgcgtcgatctcggcccggaagacgtagaagatgacgtggtggcgaagaccaaggtcacctatttcgaaggttacctgtgggatccgccgcgtgccaaggatgccattcgcgaatgcgcccgcattgcccatgaaaacggccgcgaagtctccatgacgctctccgacagcttctgcgtcggccgctaccgcgacgagtttctggacctgatgcggtctggcacggtggacatcgtcttcgccaacaagcaggaagcgctttcgctttacgaaaccgaggattttgagctggcgctgacgaaaatcgccgccgattgcaagatcgccgcggtgacgatgagcgaagaaggcgccgtcatcctgcgcggcacggaacgtgtgaaggtggaagcctatcccgtgcatgacgtggtcgatacgacgggtgcgggcgatcttttcgccgcaggtttcctcttcggttatacgcaggaccgttcgcttgaagattgcggcaaactcggctgccttgcggcggctgccgtcattcagcaggtcggaccacgccccatgtcatccctgaaggcgctgggcgaaaaacacggccttatttaa

SEQ ID NO: 1713 - protein, 330 aa, Agrobacterium tumefaciens str. C58
MTKFDVLTVGNAIVDIISRCDDRFLNDNAITKGAMNLIDAERAELLYSLMGPALEASGGSAGNTAAGVANFGGKAAYFGKVAEDQLGEIFQHDIRAQGVYFETKPEGTFPPTARSMIFVTEDGERSMNTYLGACVDLGPEDVEDDVVAKTKVTYFEGYLWDPPRAKDAIRECARIAHENGREVSMTLSDSFCVGRYRDEFLDLMRSGTVDIVFANKQEALSLYETEDFELALTKIAADCKIAAVTMSEEGAVILRGTERVKVEAYPVHDVVDTTGAGDLFAAGFLFGYTQDRSLEDCGKLGCLAAAAVIQQVGPRPMSSLKALGEKHGLI

SEQ ID NO: 1714 - DNA, 993 bp, Agrobacterium tumefaciens str. C58
  CDS (1)..(993): transl_table=11
atgacgaaattcgacgtactgactgtcggcaatgccatcgtcgacatcatctcccgctgcgatgatcgctttctcaacgacaatgccatcaccaagggtgcgatgaacctgatcgacgcggaacgcgccgaactgctttattcgctgatgggaccggcgctcgaagcctccggcggcagcgcgggcaacacggcggcgggcgttgcgaatttcggcggcaaggccgcttatttcggcaaggtggccgaagaccagctcggcgaaatcttccagcacgatatccgcgcccagggcgtctatttcgaaaccaaaccggaaggcacattcccgccgacagcacgttcgatgatcttcgtgaccgaagacggcgaacgctcgatgaatacctatctcggtgcctgcgtcgatctcggcccggaagacgtagaagatgacgtggtggcgaagaccaaggtcacctatttcgaaggttacctgtgggatccgccgcgtgccaaggatgccattcgcgaatgcgcccgcattgcccatgaaaacggccgcgaagtctccatgacgctctccgacagcttctgcgtcggccgctaccgcgacgagtttctggacctgatgcggtctggcacggtggacatcgtcttcgccaacaagcaggaagcgctttcgctttacgaaaccgaggattttgagctggcgctgacgaaaatcgccgccgattgcaagatcgccgcggtgacgatgagcgaagaaggcgccgtcatcctgcgcggcacggaacgtgtgaaggtggaagcctatcccgtgcatgacgtggtcgatacgacgggtgcgggcgatcttttcgccgcaggtttcctcttcggttatacgcaggaccgttcgcttgaagattgcggcaaactcggctgccttgcggcggctgccgtcattcagcaggtcggaccacgccccatgtcacccctgaaggcgctgggcgaaaaacacggccttatttaa

SEQ ID NO: 1715 - protein, 330 aa, Agrobacterium tumefaciens str. C58
MTKFDVLTVGNAIVDIISRCDDRFLNDNAITKGAMNLIDAERAELLYSLMGPALEASGGSAGNTAAGVANFGGKAAYFGKVAEDQLGEIFQHDIRAQGVYFETKPEGTFPPTARSMIFVTEDGERSMNTYLGACVDLGPEDVEDDVVAKTKVTYFEGYLWDPPRAKDAIRECARIAHENGREVSMTLSDSFCVGRYRDEFLDLMRSGTVDIVFANKQEALSLYETEDFELALTKIAADCKIAAVTMSEEGAVILRGTERVKVEAYPVHDVVDTTGAGDLFAAGFLFGYTQDRSLEDCGKLGCLAAAAVIQQVGPRPMSPLKALGEKHGLI

SEQ ID NO: 1716 - DNA, 1038 bp, Drosophila melanogaster
  CDS (1)..(1038)
atgacgagcacgctacaagaaggaatcctggtcggatgcggcaacccgctgctggacatctccgccgttgttccactgaacttcctgcagaagtactctatgaacgaggatgatgcgatccttgccgaggaccgacacatgcccatctacggggagctggtcgaaggctaccaggctgagtttctggctggcggatccgtgcaaaattctctgagaattgcccaatggattcttcgacagcccagggtggctgtgttcttcggctgcgtcggcgaggatcggtacgccaatatcttgaaggaaaaggcgcaagccgccggactggatgttcactaccaggtgaagaaggacgtgcccacgggaacctgtgccgttctgatcaccggcacccaccgatcgctctgcgctaatctggcggccgccaataacttcaccatcgatcacctggaggagcccagcaacaaggctctggtggataacgcccagtactactacatttcgggcttcttcctcactgtgaacccgccaagcattatgcaggtggcggccaccgcccacgccaaacagcgaccgttcctaatgaacctcagcgcaccattcatatcgcaattctacatggcaccgctgctggccgccctgccttacgtggacatcatctttggcaacgaggcggaggctcaggcgttcgccgaggcccagcagtggcctagcggggacctgcgcgagattggcaagcgactggtggcgatggagaagaaaaacccgacgcggccgcgcattgccattctcacgcagggctgcgatcctgtactgcttatacagcaggattcggtgcaggaattcccggtcacgaaattggcggtgcatgaaattgtcgataccaatggcgctggggatgcattcgttggaggtttcctatcgcagtttgtgcagggcaagtcgctggatgtctgcatcaggtgcggaaactatgcagccgggcacattatcaagaatccaggttgcacatactccggcgaaccggagttcgttgagtaa

SEQ ID NO: 1717 - protein, 345 aa, Drosophila melanogaster
MTSTLQEGILVGCGNPLLDISAVVPLNFLQKYSMNEDDAILAEDRHMPIYGELVEGYQAEFLAGGSVQNSLRIAQWILRQPRVAVFFGCVGEDRYANILKEKAQAAGLDVHYQVKKDVPTGTCAVLITGTHRSLCANLAAANNFTIDHLEEPSNKALVDNAQYYYISGFFLTVNPPSIMQVAATAHAKQRPFLMNLSAPFISQFYMAPLLAALPYVDIIFGNEAEAQAFAEAQQWPSGDLREIGKRLVAMEKKNPTRPRIAILTQGCDPVLLIQQDSVQEFPVTKLAVHEIVDTNGAGDAFVGGFLSQFVQGKSLDVCIRCGNYAAGHIIKNPGCTYSGEPEFVE

SEQ ID NO: 1718 - DNA, 1038 bp, Drosophila melanogaster
  CDS (1)..(1038)
atgtgcgatcgcgtcagagaaggaatcctggtcggatgcggcaacccgctgctggacatctccgccgttgttccactgaacttcctgcagaagtactctatgaacgaggatgatgcgatccttgccgaggaccgacacatgcccatctacggggagctggtcgaaggctaccaggctgagtttctggctggcggatccgtgcaaaattctctgagaattgcccaatggattcttcgacagcccagggtggctgtgttcttcggctgcgtcggcgaggatcggtacgccaatatcttgaaggaaaaggcgcaagccgccggactggatgttcactaccaggtgaagaaggacgtgcccacgggaacctgtgccgttctgatcaccggcacccaccgatcgctctgcgctaatctggcggccgccaataacttcaccatcgatcacctggaggagcccagcaacaaggctctggtggataacgcccagtactactacatttcgggcttcttcctcactgtgaacccgccaagcattatgcaggtggcggccaccgcccacgccaaacagcgaccgttcctaatgaacctcagcgcaccattcatatcgcaattctacatggcaccgctgctggccgccctgccttacgtggacatcatctttggcaacgaggcggaggctcaggcgttcgccgaggcccagcagtggcctagcggggacctgcgcgagattggcaagcgactggtggcgatggagaagaaaaacccgacgcggccgcgcattgccattctcacgcagggctgcgatcctgtactgcttatacagcaggattcggtgcaggaattcccggtcacgaaattggcggtgcatgaaattgtcgataccaatggcgctggggatgcattcgttggaggtttcctatcgcagtttgtgcagggcaagtcgctggatgtctgcatcaggtgcggaaactatgcagccgggcacattatcaagaatccaggttgcacatactccggcgaaccggagttcgttgagtaa

SEQ ID NO: 1719 - protein, 345 aa, Drosophila melanogaster
MCDRVREGILVGCGNPLLDISAVVPLNFLQKYSMNEDDAILAEDRHMPIYGELVEGYQAEFLAGGSVQNSLRIAQWILRQPRVAVFFGCVGEDRYANILKEKAQAAGLDVHYQVKKDVPTGTCAVLITGTHRSLCANLAAANNFTIDHLEEPSNKALVDNAQYYYISGFFLTVNPPSIMQVAATAHAKQRPFLMNLSAPFISQFYMAPLLAALPYVDIIFGNEAEAQAFAEAQQWPSGDLREIGKRLVAMEKKNPTRPRIAILTQGCDPVLLIQQDSVQEFPVTKLAVHEIVDTNGAGDAFVGGFLSQFVQGKSLDVCIRCGNYAAGHIIKNPGCTYSGEPEFVE

SEQ ID NO: 1720 - DNA, 1191 bp, Drosophila melanogaster
  CDS (1)..(1191)
atgtccaggcgggtttttggcctcagtataaaatcattccgattgttccgaagaactccgatccatcccccagcattccagcatttttctggtggcgtctttcgaacttcctttaggagtttctgcgattgtcaggaacaccgaagaatggatctaccagagggaatacttatgggctttggcaaccccctgctggacatcacctgcaccgttgaggataatgtgatcctggagaagtacggcctggaagcaaatgctgcgatcattgctgatgaaaagcacgatgccctgtttgatgagttgatgaacatggaaaatgtcatctattcggcgggtggagcctgtcagaactcgatgcggatcttccagtggatcgtgcagacaccatttcgagctgtgttcatagggtcagtgggcaaggataagctaggtgatcgcatcgaaaagagggccaaatccgatggcctgctaacactttatcagctgaaggaagagctgccgacaggctcttgtgctgtgatcatcaacggtccaaaccgctcattagtggccaacttgggcgctgcctctctcttcagcgacgactggattgacgaggatgataacatctgcgccttggatcgcgccgagtacttctactttacgggcttctttctggccgtttgtccacctgccgtggagcgggtagctaggatgtgctgcgagaccaatcgaattatgatcctcaacttcagcgccgtgtttgtgctgcagatgcaaaaggaagccttgggcaatatcctgcagtacgtggatataatcatctgcaataaggaagaggccattgcatttagcgacaccaacgactggaagacgaagaatatctttgagatcggatctaggctgcagcaaatgcccaaggaaaatacccgaccaagactagtaatgattacggatgcggtgtgtcctgttctcgtcttccaggataacgatcgcgttctggaataccccgttccacccgtaaagcagggcgagattttcgacaccaatggttgtggcgacgccttcgtcggcggattcctggccatgtacgtccaaaggatgcccctggattactgcatccgaacggggattttcgcatcccagcaggtcctacacgtggtcggtgttcagatcgataagctgccaaagtttagcgagaaatgcatatga

SEQ ID NO: 1721 - protein, 396 aa, Drosophila melanogaster
MSRRVFGLSIKSFRLFRRTPIHPPAFQHFSGGVFRTSFRSFCDCQEHRRMDLPEGILMGFGNPLLDITCTVEDNVILEKYGLEANAAIIADEKHDALFDELMNMENVIYSAGGACQNSMRIFQWIVQTPFRAVFIGSVGKDKLGDRIEKRAKSDGLLTLYQLKEELPTGSCAVIINGPNRSLVANLGAASLFSDDWIDEDDNICALDRAEYFYFTGFFLAVCPPAVERVARMCCETNRIMILNFSAVFVLQMQKEALGNILQYVDIIICNKEEAIAFSDTNDWKTKNIFEIGSRLQQMPKENTRPRLVMITDAVCPVLVFQDNDRVLEYPVPPVKQGEIFDTNGCGDAFVGGFLAMYVQRMPLDYCIRTGIFASQQVLHVVGVQIDKLPKFSEKCI

SEQ ID NO: 1722 - DNA, 1236 bp, Strongylocentrotus purpuratus
  CDS (1)..(1236)
atggcagctaacgataacggcgaaccagataccaagaaatcaagggtcactgttggtgaaggtgccctgtgtggaattggtaatcctctcctggatatatcagcaaatgcagatgcagagatccttgcaaaatatgacttgaaacctaatgacgctatcctgtcagaggagaaacatttacccctcttcaaggaattggccgacaagtatgaggtagagtacatcccaggtggagctacacagaacaccttcagggtagcacagtggatcctggaccagcctaaggtcagtaccttctttggttgtatcggcgatgatgagtatgggaaggagctggccaacgggatggagaaggcaggatgcgtcgctaggtacctcgtcgataaggaggtcggcacgggaacatgcgcttgcattatcacatcagggggcaagaacaggtcactcgctgcaaatttaagcgcagctaactgcttcaaagccagtcattttgatgataaagaaaattgggacttagttaagaagagcaaggtcatgtactcagcaggctttcatttaacagtagctcccgatgctatgttactaatggccaagcacgccaacgaagagaacaagatttactgcaccaatctctcggcgccattcctgtgtgacttcttctcggagccccaaatgaagctcatgccttacgttgactacctcttcggcaacgagactgaagctgccagcttttcaaagaagcaaaactttgggacagaagatctccaagagatagccttgaaagcagcggctcttcccaaagaaaacaagaacagagaaagggttgttgtgttcacccaaggtgataaacccaccattgtggtcaaaggtggcaaagtgacggtgtatgaggtcaacctcatcaaagaagaggagatcgtagacaccaatggagctggagatgcctttgttggagtggatgtgagtgatttccttgcctgccagccagctaccatagctatcccctgtgcagtttgccccagattttctggccttcctcctcccctgaacgcacccaggggcccagtgttttcacacagccatggctgcgatcaccgatcagcggtctttggtgacaaaatcggaagtgctccccagaaaccacaggcaagctgcactctagagcacacgggagaggtgtactattattggagcaaatgtgaggccagcggtgtgcatgctccgtatatcggttga

SEQ ID NO: 1723 - protein, 411 aa, Strongylocentrotus purpuratus
MAANDNGEPDTKKSRVTVGEGALCGIGNPLLDISANADAEILAKYDLKPNDAILSEEKHLPLFKELADKYEVEYIPGGATQNTFRVAQWILDQPKVSTFFGCIGDDEYGKELANGMEKAGCVARYLVDKEVGTGTCACIITSGGKNRSLAANLSAANCFKASHFDDKENWDLVKKSKVMYSAGFHLTVAPDAMLLMAKHANEENKIYCTNLSAPFLCDFFSEPQMKLMPYVDYLFGNETEAASFSKKQNFGTEDLQEIALKAAALPKENKNRERVVVFTQGDKPTIVVKGGKVTVYEVNLIKEEEIVDTNGAGDAFVGVDVSDFLACQPATIAIPCAVCPRFSGLPPPLNAPRGPVFSHSHGCDHRSAVFGDKIGSAPQKPQASCTLEHTGEVYYYWSKCEASGVHAPYIG

SEQ ID NO: 1724 - DNA, 1155 bp, Nasonia vitripennis
  CDS (1)..(1155)
atggtttacatacaggttaattctggaattatgtatctgtcggcaaccaccttgtctgtaaaagaaatatttgccaactttgaacatccagtagtgatggctttcggcaatccactattggatgtgattttgacagatgatgaaaataatctgttgtcaaaatacaatctcaagattgatggacagactgaacttgaggagaaagtaatggaacaactatttgctgatttaccagaggaatctaaacggacaactagtgctggagggtgtgctcaaaatacaatgagggtgttacaaaagctatgtggtaaaaaaaatggtcctaaaatatgtgtttactatggtggcctaggcaaagattctagaggagatatattagaggaattagtacgatcagcaaatgttgatgcaaggtatgcaatacatccaacccttccaaccggagtgtgtgtctcaataataaatgatggataccggagcttagcagcaactttgggagctgcttctatttacacactggaagatttaaaaactacagtgttacctttagatacagtaagagttatttatatagaaggattctttgttacgcacagcttggatgtggctaaagaagttgtaaagagagcacaaggcaaaaatattgttatagcgttaaacctcaatggaacgtatatttttgaggatcatcatgcagccttatgtgaaatggttggtctagccaaaatagtttttggcaatgttgaagaaatgaaagctttagcaaactcattaaatctcaaatttgacaatccaacagacattccatttcttttgaataatttaaaaggtgtatcagtaaatgcatccaattcatcaagtgggaattggttgatgagtgatggcatctttgttatgactcaaggtgacgtaaaccctgctattgtagtttggggtcaaggccagtctgctcaaatttcacccatcaaacctaaatcgccagtcatagatacaactggagctggtgattctctagttgctggtttcttagctggattacttactaaaaaagacccaaaaacttgtttagaatggggctgtaaggtagcctcagaagtagtaacaaacataggtgccactttatccaatgatcttcctgctgattttttacaatga

SEQ ID NO: 1725 - protein, 384 aa, Nasonia vitripennis
MVYIQVNSGIMYLSATTLSVKEIFANFEHPVVMAFGNPLLDVILTDDENNLLSKYNLKIDGQTELEEKVMEQLFADLPEESKRTTSAGGCAQNTMRVLQKLCGKKNGPKICVYYGGLGKDSRGDILEELVRSANVDARYAIHPTLPTGVCVSIINDGYRSLAATLGAASIYTLEDLKTTVLPLDTVRVIYIEGFFVTHSLDVAKEVVKRAQGKNIVIALNLNGTYIFEDHHAALCEMVGLAKIVFGNVEEMKALANSLNLKFDNPTDIPFLLNNLKGVSVNASNSSSGNWLMSDGIFVMTQGDVNPAIVVWGQGQSAQISPIKPKSPVIDTTGAGDSLVAGFLAGLLTKKDPKTCLEWGCKVASEVVTNIGATLSNDLPADFLQ

SEQ ID NO: 1726 - DNA, 1002 bp, Nasonia vitripennis
  CDS (1)..(1002)
atgtccaaggatatcagagaaggtattctgctggggattggtaacccgctgctagacatctcagcaacggtagacgatgacttcttgaagaagtacgagctcaaagccaacgatgctatacttgccaatgaaaagcacaaacccctatatgatgagcttattgaacagtacaatgcggacttcattgctggaggagcagtgcagaacacaatgcgagtggcacaatggttcttggagaagccaaaagttgctgtttacatggggtgcgttggaaaagataagtattccaaaatcctagaagaaaaagccaaagaaaatggtttgaacgtgaggtaccagtacacagataaagagccaacaggaacgtgtgctgtacttatcaccaatggtggaaagtatcgctcgctttgtgcaaatctagcagctgctaattgcttctcaccgtcgcacatagaaaaaaacaaaaaaatcatcgaggatgccagcttcttttacatatccggatttttcttgacagtcagtccagaaactatacaggctgtggctaaacatgcatttgaaaaaaacaaagtattcacgatgaatctgagtgctccatttttgtgtgaatttttcaaaaagcctatgagggctgctttgccttacgttgatgttctatttggtaatgaatccgaagcagaagccttctccaaggcaaatgacttgggaactacagatttgaaggagattgctctgaaaattttgaacatggaaaaaatcaacactaaaaggaaaagggttgttattattactcaaggtgccagtcctgtactgttggctaaggatggtagtataagtgaattcccagttcccaaattaccagaagagaaagtcattgataccaatggtgctggtgatgcatttgtaggaggtttcgtttcgagtaagaacgctccaaaggcaactttcttccttctaaagcctgaaaaacccagccatcgactctcgctcgccgggtcgtaa

SEQ ID NO: 1727 - protein, 333 aa, Nasonia vitripennis
MSKDIREGILLGIGNPLLDISATVDDDFLKKYELKANDAILANEKHKPLYDELIEQYNADFIAGGAVQNTMRVAQWFLEKPKVAVYMGCVGKDKYSKILEEKAKENGLNVRYQYTDKEPTGTCAVLITNGGKYRSLCANLAAANCFSPSHIEKNKKIIEDASFFYISGFFLTVSPETIQAVAKHAFEKNKVFTMNLSAPFLCEFFKKPMRAALPYVDVLFGNESEAEAFSKANDLGTTDLKEIALKILNMEKINTKRKRVVIITQGASPVLLAKDGSISEFPVPKLPEEKVIDTNGAGDAFVGGFVSSKNAPKATFFLLKPEKPSHRLSLAGS

SEQ ID NO: 1728 - DNA, 1056 bp, Magnaporthe grisea 70-15
  CDS (1)..(1056)
atgagctcccccaaggaattccgtcttttctgccttgagaaccctctcttggacatccaggccgttggagatgaggcgctcctgaacaaatacggcctcaaggccaacgatgccatcctggccgaggctaagcacgccggcatcttcgaggagcttctcaacaactacgacgccaagctgatccccggcggcgccgcccagaacacggcccgtggcgcccagtacatgctgccacccaacagcgtcgtctactcgggtggtgtcggtgatgacaagtactccgccatcctgcgcgatgccgtccagaaggtcggccttagggtcgagtaccgcgtcgaccctaaggagaccaccggccgctgcgccgtcgtcatcaccggccacaaccgctccatgtgcaccgagctgggtgccgctaaccactacgaggtcgagttcctgaagaagcccgaggtctgggagctggtcaagggtgctgaggtgtactacattggtggttatcacttcaccgtctgccctcctgccatcatggagctggccaaggaggccgccaccaacaacaagaccttcatcttgtccctgtcggcccccttcatcccgcagttcttcaaggaccccctggacgccgctctgccctattgcgactatgtcatcggcaacgagaccgaggccgccgcctttgccgagtcgcacgacatggctgacaagaaggatgacgtccgcgccatcgccaaggccatcgccaacctgcccaaggagaactcgcagcgcaagcgcgtcgccatcatcacccagggcaccctccccaccatcgtcgccgtccagggtgaggaagaggtcaaggagtacccagtgcacgagatcgccaaagagcagatcaacgacaccaacggtgccggtgacgcctttgccgccggtttctgcgccggagtcgtcgagaacaaggccctggctgagtgtgtcgacaggggccagtggctcgcccgcctcagcatccaggagctgggtccttcataccccttccccaagcagacctaccagcccaagtctgcttaa

SEQ ID NO: 1729 - protein, 351 aa, Magnaporthe grisea 70-15
MSSPKEFRLFCLENPLLDIQAVGDEALLNKYGLKANDAILAEAKHAGIFEELLNNYDAKLIPGGAAQNTARGAQYMLPPNSVVYSGGVGDDKYSAILRDAVQKVGLRVEYRVDPKETTGRCAVVITGHNRSMCTELGAANHYEVEFLKKPEVWELVKGAEVYYIGGYHFTVCPPAIMELAKEAATNNKTFILSLSAPFIPQFFKDPLDAALPYCDYVIGNETEAAAFAESHDMADKKDDVRAIAKAIANLPKENSQRKRVAIITQGTLPTIVAVQGEEEVKEYPVHEIAKEQINDTNGAGDAFAAGFCAGVVENKALAECVDRGQWLARLSIQELGPSYPFPKQTYQPKSA

SEQ ID NO: 1730 - DNA, 1287 bp, Gibberella zeae PH-1
  CDS (1)..(1287)
atgatgttgacaaaaccatcctcttccctcaagcttccctctctcactcccacctatcgcacgtggactcgcagctttgccagcgtcactcccgttcggctgccgaagaaacaagccccacgtctaaaccccaccggagcggttgacccctccattcgtctcaaactcttcccctccaaagctacacccttattcgtatctacctcaccataccgtgtataccagacgagacaattaagcacaatgtcttccgttaaagaatactctctcttctgtctggagaaccctctcctcgacatccaggctcagggtgaccaggctcttctggacaagtacggcctcaagcctaacgatgctatcctcgctgaggagaagcacatccctctctacgaggatctcctcaacaactacgatgccaagctcattgctggcggtgctgctcagaacagtgctcgaggcgcccagtacatccttcctcccaacagcgttgtctacgttggtggtgctggtgacgacaagtactctgccatccttcacgacgccgtcaaggctgctggcctccgcgtcgagtaccgtgtcgatcccaaggagaagactggccgttgcggtgccatcattaccggtcacaaccgaagcttgtgcactgacctcggtgctgccaaccactacgaccttgaccacctgaagaagcccgagatctggaagctcgttgagaacgccgaggtctactacgtcggtggtttccacttcactgtctgccctcctgccatcatggagctcgccaagcaggctgctaaggacaacaagccattcgtcctctcgctctctgctcccttcattccccaattcttcaaggaggttgtcgatgccagcgcccccttctgggattacatcattggtaatgagactgaggctgccgcctacgccgagtcccacgacctccccagcaaggagcccaaggatgtcgccaagcaccttgccaaccttcccaaggagaacagccagagaaagcgagttgccatcatcactcagggtaccgaccctaccctggttgctatccagggtgaggatgagatcaaggaattccccgttcacgccattgagacggagaagatcaacgataccaacggcgccggcgatgcctttgctggtggtctactggcaggtatcctccagggcaagcctctggagaccagcattgacatgggacaatggctcgctcgtctgagcatccaggagctcggaccttcgtaccccttccccaagcaaacctaccaggctgcttaa

SEQ ID NO: 1731 - protein, 428 aa, Gibberella zeae PH-1
MMLTKPSSSLKLPSLTPTYRTWTRSFASVTPVRLPKKQAPRLNPTGAVDPSIRLKLFPSKATPLFVSTSPYRVYQTRQLSTMSSVKEYSLFCLENPLLDIQAQGDQALLDKYGLKPNDAILAEEKHIPLYEDLLNNYDAKLIAGGAAQNSARGAQYILPPNSVVYVGGAGDDKYSAILHDAVKAAGLRVEYRVDPKEKTGRCGAIITGHNRSLCTDLGAANHYDLDHLKKPEIWKLVENAEVYYVGGFHFTVCPPAIMELAKQAAKDNKPFVLSLSAPFIPQFFKEVVDASAPFWDYIIGNETEAAAYAESHDLPSKEPKDVAKHLANLPKENSQRKRVAIITQGTDPTLVAIQGEDEIKEFPVHAIETEKINDTNGAGDAFAGGLLAGILQGKPLETSIDMGQWLARLSIQELGPSYPFPKQTYQAA

SEQ ID NO: 1732 - DNA, 1038 bp, Apis mellifera
  CDS (1)..(1038)
atggcgttagacttacgagagggtattctattaggcatgggtaatcctcttcttgatatctcagcaactgtagatagcaattttttaaaaaaatatgatttaaatgcaaatgatgcaattcttgctgaagaaaaacacaaacccatgtacgatgaattaattgaattgtataaagcagattttatcgctggtggttctgtacaaaatactatgcgagtagcacaatggttcttggggaaaccaaatattgcaacttacatgggctgtgttgggatggacaagtactcaaaaattttagaggatagagcacgtgcagatggcttaaatgttcgttatcaatatacgcaaaaagaacctactggtacttgtgcagttcttattacaggaaatgaacgttctttatgtgccaatttggctgcagctacatgtttttcactttcacacatagaagaaactgaaaataaaaatcttattgaaattgctgaatatatttatgtttctggttttttcttaactgtaagcccagaaacaattcaagtaattgctaaacatgcttttgaaaaaaataaaatttttataatgaatctcagtgcaccatttttatgtgaatattataaaaaaccaatgttggcagctcttccttatgttgatatcttatttggtaacgaagtggaagctgatgcatttgcaaaagcaaatgattttcaaactacaaatagaaaagaaattgctttaaaattatcacaaatggaaaaaattaatagaaaaagacaaagaattgttataataacccaaggtcctgacaatatattagttgtaaaagataatgttataaaggaatttgctgctatgagacttccagaagagaaagttgtagatactaatggagcaggtgatgcatttgttggaggttttttggctcaatttgttcaaggtagaagtatagaagtttgtgtgagatgtggaatttgggctgcaactcaaattttacagagatctggatgtacttacgaagggaaacctaattttactccttga

SEQ ID NO: 1733 - protein, 345 aa, Apis mellifera
MALDLREGILLGMGNPLLDISATVDSNFLKKYDLNANDAILAEEKHKPMYDELIELYKADFIAGGSVQNTMRVAQWFLGKPNIATYMGCVGMDKYSKILEDRARADGLNVRYQYTQKEPTGTCAVLITGNERSLCANLAAATCFSLSHIEETENKNLIEIAEYIYVSGFFLTVSPETIQVIAKHAFEKNKIFIMNLSAPFLCEYYKKPMLAALPYVDILFGNEVEADAFAKANDFQTTNRKEIALKLSQMEKINRKRQRIVIITQGPDNILVVKDNVIKEFAAMRLPEEKVVDTNGAGDAFVGGFLAQFVQGRSIEVCVRCGIWAATQILQRSGCTYEGKPNFTP

SEQ ID NO: 1734 - DNA, 1017 bp, Candida glabrata CBS 138
  CDS (1)..(1017)
atgtctccatctctaatttgcctttgtaacccattgcttgatattcaagccactgtcaatgatgactacttgaagaagtacaacttgaacgccaatgacgctgttctgttggagactggttccactgacccaagatttgccatttacgaagaactaccaactttcccagatgtcaagtacgttgctggtggtgctggtcaaaacaccgctagaggttcagcttatgtgctaggtaaaggccaagtaggttactttggctctgttggtgaggacaaatactccaagaagcttttggaagaaaacgaagcagctggtgtaatttcattgtaccaagttcaaaaggacatcagcaccggtaagtgtgctgctttgattactggtcacaacagatctttggttaccgacttgggtgctgctaaccatttcaagccagagcatttggacaagcactgggaccaagttactggtgctaagatgttctacatcggtggtttccatctgactgtttccccagatgccattgttaagatcggtcagcacgccaaggaaactggtaagccagttgttttgaacttgagtgccccattcattccacaattcttcaaggacgctcttgtcaaggttctaccatacgttaccattgttgttgctaatgaatctgaagctgcctcttacgctgaagcctttggtctaacttgtgacaagactgatttggttgccattgcaaaggaaatcattggtgactcttctgaaaagaaggttgtctttacccatggtcttgagccaaccgttctagtcaccaaggactctgacaagtcattcccagtcaagccacttgacagcagtaagatcgttgacaccaacggtgctggtgatgcttttgctggtggtttcatggccggtttggttcaaggtaagtctctagagcaatccattgacatgggtcaatggttggctgctctatccatccaagaggtcggtccatcttacccaaaggaaaagattgaatacgcttaa

SEQ ID NO: 1735 - protein, 338 aa, Candida glabrata CBS 138
MSPSLICLCNPLLDIQATVNDDYLKKYNLNANDAVLLETGSTDPRFAIYEELPTFPDVKYVAGGAGQNTARGSAYVLGKGQVGYFGSVGEDKYSKKLLEENEAAGVISLYQVQKDISTGKCAALITGHNRSLVTDLGAANHFKPEHLDKHWDQVTGAKMFYIGGFHLTVSPDAIVKIGQHAKETGKPVVLNLSAPFIPQFFKDALVKVLPYVTIVVANESEAASYAEAFGLTCDKTDLVAIAKEIIGDSSEKKVVFTHGLEPTVLVTKDSDKSFPVKPLDSSKIVDTNGAGDAFAGGFMAGLVQGKSLEQSIDMGQWLAALSIQEVGPSYPKEKIEYA

SEQ ID NO: 1736 - DNA, 1299 bp, Kluyveromyces lactis NRRL Y-1140
  CDS (1)..(1299)
atgagcgcactggtacggcactcaccgttgatagggttggggttccttcaaagcaccgtttaccctaaaaaggtcacgtgttatttttcgacttgcatgtggaaatgtcattcgagcattggaaaagttattggtataagaacgacgtcgatgaggacaacggtaccaacgagaaggatctgttcaagcggtagattgttgttacagtttggttctcgagcaagacagaagcaggaagatctagactaccagcaagcaatactacgtagaaacatggcacaacatcctaaggttatttgtcttggtaatccattattggatatccaagttgacgttacagagtcctatttggcaaagtacggtttgaagagcaacgacgcaatcttggtagaagctggttctggtgatgctaagttgaacattttcgatgagatcgtcgagatggaagatgtcaagtttgttgctggtggtgctgctcaaaacaccgctagaggtatcgcatatgtattgggtaaagatcaagttggttacttcggttctgttggtgaggacaagttctctgccagactattgaaggaaaacgatgctgctggtgtcatctctttgtaccaagtgcaaaaggatatcagcactggtaagtgtgcagcattgatcactggtcatgatagatctttggtcaccgacttggctgctgccaaccatttcactccagatcatttggacaagcactgggatttggttgaatctgcttctttgttctacattggtgggttccacttgaccgtgtctccagaagctattgtcaagttgggtaagcacgctcaagaaaacaacaaacctttcatcttgaacctgtctgctccattcattccagccttcttcaaatctgctttggaacaagtcttgccatacactacttacgttattgccaacgaatctgaagctgccgcttacgctgaatctttcggtgtcgaagctgacaaagaagacttagcagcaatcgctaagcatattgtcggtgattccaagacaagaaccgttatcttcactcacggtttggaacctactgtttctgtttctgctgaaggtaccaacacctacgatgttgtcccattggacccttccaagattgttgacactaacggtgctggtgacgccttcgctggtggtttcgtcgctggtttggctcaaggtaagtctttggaaactgccattgctcaaggtcaatggttagctgcgctatctattcaggaagttggtccatcttacccagctgaaaagaagcaattccaggcctaa

SEQ ID NO: 1737 - protein, 432 aa, Kluyveromyces lactis NRRL Y-1140
MSALVRHSPLIGLGFLQSTVYPKKVTCYFSTCMWKCHSSIGKVIGIRTTSMRTTVPTRRICSSGRLLLQFGSRARQKQEDLDYQQAILRRNMAQHPKVICLGNPLLDIQVDVTESYLAKYGLKSNDAILVEAGSGDAKLNIFDEIVEMEDVKFVAGGAAQNTARGIAYVLGKDQVGYFGSVGEDKFSARLLKENDAAGVISLYQVQKDISTGKCAALITGHDRSLVTDLAAANHFTPDHLDKHWDLVESASLFYIGGFHLTVSPEAIVKLGKHAQENNKPFILNLSAPFIPAFFKSALEQVLPYTTYVIANESEAAAYAESFGVEADKEDLAAIAKHIVGDSKTRTVIFTHGLEPTVSVSAEGTNTYDVVPLDPSKIVDTNGAGDAFAGGFVAGLAQGKSLETAIAQGQWLAALSIQEVGPSYPAEKKQFQA

SEQ ID NO: 1738 - DNA, 1047 bp, Debaryomyces hansenii CBS767
  CDS (1)..(1047)
atgtcgtacccattagtttgtttaggtaatccattattggatttacaagttgacgttgaaccagaatacttaagtaagtatggtttaaaggaaaacgatgctattttagccgaagaaaagcacttcccaatttatgaggaagttttgaagaagtctggattaaagaccgttgctggtggtgctgcccaaaacactgctagaggtgctcaatacatcttaccaccaaagtccgttgtttactttggatctgttggtaaggatgtctacgctgacaagttgaatgaggccaacgaacaatatggcttaagaaccgagtaccaaattcaagaagaaattgctaccggtaagtgtgcagctttgatcaatggtccacacagatcattggttactgacttggctgctgctaaccacttcaaggttgaccacttggaaaagccagaaaactgggctattgttgaaaatgctaaatattactacattggtggtttccacttgactgtctctccaccagctattgaaaaattaggtaaacatgctgctgaaaacaacaaggtctttgccttgaacttctctgctccattcattccacagtttttcaaggatccattggcctcatcgctcccatacgttgatttcgtcattgctaacgaatcggaagctgctgcttacgctgaaacccaaggtttatctgtcgattcaaaggatgttgttgccattgctaaggaagttgctaagttaccaaaggctaacaacaagagacaaagaactgttgttttcacccaaggtaccgacccaacggtcactgttacttacaacgaatccaccaaagagtttgacgtcaaggaatacgccgttagaaagttagaagaaaacaaaatcactgatactaatggtgctggtgacgcttttgctgctggtttcattgctgctcttgttgaaggtaaagatattgctcaagctgttcatgaaggtcaatgggctgcatctttatctatccaagaagttggtccatctttcccattccctaagcaaacctacactgcctag

SEQ ID NO: 1739 - protein, 348 aa, Debaryomyces hansenii CBS767
MSYPLVCLGNPLLDLQVDVEPEYLSKYGLKENDAILAEEKHFPIYEEVLKKSGLKTVAGGAAQNTARGAQYILPPKSVVYFGSVGKDVYADKLNEANEQYGLRTEYQIQEEIATGKCAALINGPHRSLVTDLAAANHFKVDHLEKPENWAIVENAKYYYIGGFHLTVSPPAIEKLGKHAAENNKVFALNFSAPFIPQFFKDPLASSLPYVDFVIANESEAAAYAETQGLSVDSKDVVAIAKEVAKLPKANNKRQRTVVFTQGTDPTVTVTYNESTKEFDVKEYAVRKLEENKITDTNGAGDAFAAGFIAALVEGKDIAQAVHEGQWAASLSIQEVGPSFPFPKQTYTA

SEQ ID NO: 1740 - DNA, 1044 bp, Yarrowia lipolytica CLIB122
  CDS (1)..(1044)
atgtccactcccgcttacccccttgtctgcctcggcaacccccttcttgacatccaggtcaacgtcgatgacgcctacctcaagaagtacgacctcaaggccaacgatgccattcttgttgaggataagcacatgcccattttcgatgaggttgtcaagctcgacaatgtcgcctacattgccggtggtgctgcccagaacgccgcccgaggagctgcctacgtcctccccgagaactctgtcgtctactttggctctgttgctgctgaccagtacatggacgagctcctcaaggagaacgacaaggctggagtcacttctaagtaccaggtccacggcaaggactccggtctggccactggtaagtgtgctgctctgatcaccggccaggaccgatctctggtcactgacctcaacgctgccaaccacttcgagcttgagcacctcaagaagcccgccaactgggacattgttgagaaggccaaggtctactacattggaggcttccacctcaccgtgtgccctcccgccatccaggccctcgttgagcacgccgctgagaccaacaagattgccatcatgaacttctctgctcccttcctgtgccaattcttcaaggaacctcttgacgctgctgtcccctacctcgactacgtcatctgcaacgagtccgaggccgaggcctacgccgagtcccacgacctcaagaccaaggatgtcgccgagatcgctcagcacatttccaacattgagaagaagaacacccagcgaaagcgaattgttctcgtcactcagggtctcgagcccaccattgttgctacccagggtgcctcccaggtccagaagttcaacgttgttgagctcgacaagtctaagatcaaggacaccaacggtgccggtgatgctttcgccggtggctttgtcggtgctctcgttgagggcaagtctctcgaggaggccatcaaggttggccagtggctcgccgctgagtccatccagctcctcggaccctctttcccctaccccaagaagtctccccagtaa

SEQ ID NO: 1741 - protein, 347 aa, Yarrowia lipolytica CLIB122
MSTPAYPLVCLGNPLLDIQVNVDDAYLKKYDLKANDAILVEDKHMPIFDEVVKLDNVAYIAGGAAQNAARGAAYVLPENSVVYFGSVAADQYMDELLKENDKAGVTSKYQVHGKDSGLATGKCAALITGQDRSLVTDLNAANHFELEHLKKPANWDIVEKAKVYYIGGFHLTVCPPAIQALVEHAAETNKIAIMNFSAPFLCQFFKEPLDAAVPYLDYVICNESEAEAYAESHDLKTKDVAEIAQHISNIEKKNTQRKRIVLVTQGLEPTIVATQGASQVQKFNVVELDKSKIKDTNGAGDAFAGGFVGALVEGKSLEEAIKVGQWLAAESIQLLGPSFPYPKKSPQ

SEQ ID NO: 1742 - DNA, 1119 bp, Apis mellifera
  CDS (1)..(1119)
atggttgaaaaagacaaaccattaagagaatctattaaaaatcttaatgctcctgcaattattgcttttggcaatcctttattagatatgtttgtaaaaataaaagataatgatttattaaaaaaatataatcttaatgtagatggagaagcagaattttctgaagataaaatgcaagaattattggcagatataccgcaagaatcaaaacaggtagtctatcctggaggatcagcacaaaatacaatgcgaattatacaatggctttatgatgaaacctttcaaaatcaatattgtattttttctggagcgattggtaatgattgtaaaggaataatgttacaaagtttagttcgatcaacaggtgtggatgctagatatgtaattcattcaaatttaaatacaggacaatgtataatattaataagtgaaccatatcgtagtcttgttgcaaatgtaggagctgctgctaaatatactttaaatgatcttaaagcatgcaatttatcatttgatagaataaaaataatatatattgaaggatttttcatacctcatagttttcctgtaataaaagaacttgttaaacaagcagaagaaagagatataattatagcttttaatataagtgggacatatatatttaatgattttcgtacagcagtttgcgaaatgataggacattcaaatattgtatttggtaattcaagagaaatggaagctttggctcaatcattaaatcttacatatgatgatgtatcagatataccatttttattaaatagtttaaaaagaattacaattaatgtctgtaatacggttaaaaaagattggttacgtcatggaggagtatttgttatgactcaaggtgcatctgctccagcaattgctgtttggggaaaaagtcaatctgctcaagtactcccaattaaatcaaaaattcctattattgatacaatagatactgatgatgctttggctgctggtttcctagcaggtgttttagctcgttggaaaccaaaacgttgtttagaatatggttgtaaaatagcatcttatataggaacaatatatgggattaaattaccagataatgtaccatcagatttattggaataa

SEQ ID NO: 1743 - protein, 372 aa, Apis mellifera
MVEKDKPLRESIKNLNAPAIIAFGNPLLDMFVKIKDNDLLKKYNLNVDGEAEFSEDKMQELLADIPQESKQVVYPGGSAQNTMRIIQWLYDETFQNQYCIFSGAIGNDCKGIMLQSLVRSTGVDARYVIHSNLNTGQCIILISEPYRSLVANVGAAAKYTLNDLKACNLSFDRIKIIYIEGFFIPHSFPVIKELVKQAEERDIIIAFNISGTYIFNDFRTAVCEMIGHSNIVFGNSREMEALAQSLNLTYDDVSDIPFLLNSLKRITINVCNTVKKDWLRHGGVFVMTQGASAPAIAVWGKSQSAQVLPIKSKIPIIDTIDTDDALAAGFLAGVLARWKPKRCLEYGCKIASYIGTIYGIKLPDNVPSDLLE

SEQ ID NO: 1744 - DNA, 1059 bp, Aspergillus nidulans FGSC A4
  CDS (1)..(1059)
atggctgctccccaaggctaccctctcctctgcttggagaacccccttctggatatccaagctgtcggtgacgactctctcctcgagaagtatggactcaaagccaacgatgctatccttgccgaagagaagcacatgggcctctacgaagaattgctccagcaccgtgatgccaagctgattgctggtggtgccgctcagaacactgctcgtggcgctcagtacatccttccggataactcgactctctacattggctgtgtcggtaaggacaagtacgccgacatcctccaggacgcctgcaagaaggctggtgtccacaccgagtaccgcgtcgatgatgctcagcccactggcaagtgcggtgtcattattaccggccacaaccgcagcatgtgcactcaccttgctgcagccaacgaatacaaggtggaccatctcaagcagcctcacatctggtcgcttgtcgagaaggcccagtactactatgttggtggctaccacttgacagtctgtgtccccgcgatccaggccctaggtgaagaggccgctgcgaagaacaaggtctttatgctgtctctctccgctcccttcattccccagttcttcaaggaccagcttgacagtgtcctcccctacaccgactacacattctgcaacgagacagaggctgttgcttacgccgagagccacgaatggggcaccaccgacattgtcgagattgcgaagaagctggctcagctgcccaagaagaacaccaaccgctcccgaattgccgttgtgacccagggcactctgcccaccatcaccgctactgttaccaccagcggtgaagtcgaagtcaaggagttccctgtgcacgaaatttcgaaggacgccattaatgacaccaacggtgctggtgatgcttttgccggtggtttcgtcgccggagttgtgcagggcaaatcccttgaagagagcgtcgacctcggccagtggctcgcgaagttgagcatccaagagttgggaccttcctaccccttccccaagcaaacctacacttctggacgctcataa

SEQ ID NO: 1745 - protein, 352 aa, Aspergillus nidulans FGSC A4
MAAPQGYPLLCLENPLLDIQAVGDDSLLEKYGLKANDAILAEEKHMGLYEELLQHRDAKLIAGGAAQNTARGAQYILPDNSTLYIGCVGKDKYADILQDACKKAGVHTEYRVDDAQPTGKCGVIITGHNRSMCTHLAAANEYKVDHLKQPHIWSLVEKAQYYYVGGYHLTVCVPAIQALGEEAAAKNKVFMLSLSAPFIPQFFKDQLDSVLPYTDYTFCNETEAVAYAESHEWGTTDIVEIAKKLAQLPKKNTNRSRIAVVTQGTLPTITATVTTSGEVEVKEFPVHEISKDAINDTNGAGDAFAGGFVAGVVQGKSLEESVDLGQWLAKLSIQELGPSYPFPKQTYTSGRS

SEQ ID NO: 1746 - DNA, 1131 bp, Candida albicans SC5314
  CDS (1)..(1131): transl_table=12
atgaatcgtttactactacttcaacaacaacaaatattgaaaacttttgtttctcattacttcaaacgtaactttactacatcaattatgtcatcttataaattagtttgcttaggtaacccattattggatttacaagccaaagttgaaaaagattatttacaaaaatatgatttaaaagataatgatgccatcttagctgatccaaaacatatgccaattttcgaagaattgattaaacgtgatgatttagttttggttgctggtggtgctgctcaaaacactgctagaggtgcccaatatattttaccaccaaattcagtcgtttattttggatcagttggaaaagatatctatgctgaaagattaaatcaagctaatgaagagtatggtttaactacaaaatatcaaattcaagacgatattgctactggtaaatgtgctgcattgattcataatcatgatagatcattagtcactgatttggccgctgctaatcatttcactcctgatcatttacaaaaaccagaaaattgggaaattgttgaaaaagctggattttactatattggtgggttccatttaactgtttctccaccagctatcaaattattaggtgaacatgctagtaaaaccaacaaaccattagttttgaacttttctgctcctttcattgcccaattcttcaaacaacaattggatgaagttttaccatacgttgattacgtcattgccaacgaaagtgaagctgctgcttatgcagaaagtcatgatttgaaaactactgatgttgttgaaattgctaaagaagttgctaaattacctaaagaaaataaacaaattcctagaactgttattttcactcaaggtttagaaccaactattactgtcacttatgatgccactaaggattcatttgatgttcaacaatatccagtcaaagaattggctaaagaaaaagttgttgacactaatggtgctggtgatgcctttgctgctgggtttgttgcttcattggttgaaggtaaagatttaccacaatctgttgatgttggtcaatgggctgctgctttgtctatccaagaagtcggtccatctttcccattcccaaaacaaacttactctaactaa

SEQ ID NO: 1747 - protein, 376 aa, Candida albicans SC5314
MNRLLLLQQQQILKTFVSHYFKRNFTTSIMSSYKLVCLGNPLLDLQAKVEKDYLQKYDLKDNDAILADPKHMPIFEELIKRDDLVLVAGGAAQNTARGAQYILPPNSVVYFGSVGKDIYAERLNQANEEYGLTTKYQIQDDIATGKCAALIHNHDRSLVTDLAAANHFTPDHLQKPENWEIVEKAGFYYIGGFHLTVSPPAIKLLGEHASKTNKPLVLNFSAPFIAQFFKQQLDEVLPYVDYVIANESEAAAYAESHDLKTTDVVEIAKEVAKLPKENKQIPRTVIFTQGLEPTITVTYDATKDSFDVQQYPVKELAKEKVVDTNGAGDAFAAGFVASLVEGKDLPQSVDVGQWAAALSIQEVGPSFPFPKQTYSN

SEQ ID NO: 1748 - DNA, 1131 bp, Candida albicans SC5314
  CDS (1)..(1131): transl_table=12
atgaatcgtttactactacttcaacaacaacaaatattgaaaacttttgtttctcattacttcaaacgtaactttattacatcaattatgtcatcttataaattagtttgcttaggtaatccattattggatttacaagctaaagttgaaaaagattatttacaaaaatatgatttaaaagacaatgatgccatcttagctgatccaaaacatatgccaattttcgaagaattgattaaacgtgatgatttagttttggttgctggtggtgctgctcaaaacactgctagaggtgcccaatatatcttaccaccaaattcagtcgtttatttcggatcagttggtaaagatatttatgctgaaagattgaatcaagctaatgaagagtatggtttaactacaaaatatcaaattcaagacgatattgctactggtaaatgtgctgcattgattcataatcatgatagatctttagtcactgatttggctgctgctaatcatttcactcctgatcatttacaaaaaccagaaaattgggaaattgttgaaaaagctggattttactatattggtggattccatttaactgtttctccaccagctatcaaattattaggtgaacatgctagtaaaaccaacaaaccattagttttgaacttttctgctcctttcattgcccaattcttcaaacaacaattggatgaagttttaccatacgttgattacgtcattgccaacgaaagtgaagctgctgcttatgcagaaagtcatgatttgaaaactactgatgttgttgaaattgctaaagaagttgctaaattacctaaagaaaataaacaaattccaagaactgttattttcactcaaggtttagaaccaactattactgtcacttatgatgccactaaggattcatttgatgttcaacaatatccagtcaaagaattggctaaagaaaaagttgttgacactaatggtgctggtgatgcctttgctgctgggtttgttgcttcattggttgaaggtaaagatttaccaaaatctgttgatgttggtcaatgggctgctgctttgtctatccaagaagtcggtccatctttcccattcccaaaacaaacttactctaactaa

SEQ ID NO: 1749 - protein, 376 aa, Candida albicans SC5314
MNRLLLLQQQQILKTFVSHYFKRNFITSIMSSYKLVCLGNPLLDLQAKVEKDYLQKYDLKDNDAILADPKHMPIFEELIKRDDLVLVAGGAAQNTARGAQYILPPNSVVYFGSVGKDIYAERLNQANEEYGLTTKYQIQDDIATGKCAALIHNHDRSLVTDLAAANHFTPDHLQKPENWEIVEKAGFYYIGGFHLTVSPPAIKLLGEHASKTNKPLVLNFSAPFIAQFFKQQLDEVLPYVDYVIANESEAAAYAESHDLKTTDVVEIAKEVAKLPKENKQIPRTVIFTQGLEPTITVTYDATKDSFDVQQYPVKELAKEKVVDTNGAGDAFAAGFVASLVEGKDLPKSVDVGQWAAALSIQEVGPSFPFPKQTYSN

SEQ ID NO: 1750 - DNA, 1038 bp, Ustilago maydis 521
  CDS (1)..(1038)
atggcaggcggaaactttgaactggttgctctcggcaatccactgctcgacatgcagatccgcaatggcgaggcgatgctcgagaagtacggtctcaaagcgaatgacgccgtgctggctgacgagaagcagcttgctatttacaaggacattgttgacaactacgacgttacctacgttgccggtggtgctgcgcagaatgctgctcgctgcgcgcagtacgttctgcctgccaactctaccgcttacctcggatgcgtcggcaaggatgacctcgctaagcaactgcaggcggccaacgacaaggaaggtctcaaatccatctaccagttttccgatgaccagcccaccggttcgtgcgctgttgtgattaccggacacaaccgttcgctgtgcaccaacctgggtgcggccgaaaagttcaccaagtcgcacctcgaaaccgctgaagctcagcaggcgatcaagaacgccaaaatcttctacctcggtggcttcttcctcacccacggcgtcgagtcggcgctggtgcttgccgaggaagccaaatcgcgcgatgtttcgttcaccatgaacctgtcggcgcctttcatcccgcagttcttcacctcgcaggtcgatcaggtggttccctatgctgatgtcgtgtttggaaacgagtccgaggccgaagcgtgggctgaggcacacaagctggaatccaaggatctcaagaccatcgcccaggccatcgccgactttgatgctgttaccactaaggcgcaaaagcgagtggtcatcatcacccagggctcgcagcccacgattgtcgctaagcgcggtgagaaggagcaaaaggttcacgagacacccaagatcaaccctgccgacattgtcgacaccaacggtgccggtgacgctttcgccggtggtgtcgtaggcgcgctcgtgcttggaaagtccatcgaccaagccatcgacgtcggacacaagctcggtggcatgtgcatcggtcaggtcggtcccatcctcaagttccctaaggaaaacgtcatctag

SEQ ID NO: 1751 - protein, 345 aa, Ustilago maydis 521
MAGGNFELVALGNPLLDMQIRNGEAMLEKYGLKANDAVLADEKQLAIYKDIVDNYDVTYVAGGAAQNAARCAQYVLPANSTAYLGCVGKDDLAKQLQAANDKEGLKSIYQFSDDQPTGSCAVVITGHNRSLCTNLGAAEKFTKSHLETAEAQQAIKNAKIFYLGGFFLTHGVESALVLAEEAKSRDVSFTMNLSAPFIPQFFTSQVDQVVPYADVVFGNESEAEAWAEAHKLESKDLKTIAQAIADFDAVTTKAQKRVVIITQGSQPTIVAKRGEKEQKVHETPKINPADIVDTNGAGDAFAGGVVGALVLGKSIDQAIDVGHKLGGMCIGQVGPILKFPKENVI

SEQ ID NO: 1752 - DNA, 987 bp, Tribolium castaneum
  CDS (1)..(987)
atgaaaattgttgcgtttgggaaccccctactggacacgatcgtgctgttaaaaagcgacgctcttttgaaaaaatattgtttggaaaaagacggccagaaagaagtgagtcagagcgaaatgaaggcattggtggccgatcttgaagagtacgaaaaaactttcgtggctggcggttgtgcacaaaacacgctcaaggtggttcagtggcttttggacaaaaaatgcgctgcaacaatgtttggctcgattgggggcgacagtgagggggaaattctgaagaaaattttacgggagcacggggtagacacgaattatgtcacacagcctgggtacattacgggatcaactgtgtctctggtaactggggaaagtcgatcgttggttgcttatctgggcgctgctgaagtgatgtctcctcaggatttttccccgaattcgcacataattgaagacgcgaatttggtgtacatggaggggtttttcattaccaagaggattcaagttgcttccgctatcgtaaactgctgtaatcggctcaacaaacagtttgtgtttaacttgtcggggcaatatttatgcacagactacacacaaaccgttgttgattttgtacaaaaatctagcattatctttggtaataagagggaattccaaactatttgtcccccaatgaacgaaagtagtgttgaaaatttgattaaaaacttgggaaaacagggtaaaattgtggttgttactgacggtgccaaatgtgtgaattgtgtgggagggggcgaaactttggaaatcaaagtgccagaattgagggccgaggaaattgttgatacgaccggggctggggacgcatttgtggcaggtttcctaagtgggtatctcctcaaaaagccgcttaaaacgtgctgtgaattgggaaattacgccgcgcaggaaattatcaaacgaaggggttgcacaatacccgactacccccctgtacttaaatag

SEQ ID NO: 1753 - protein, 328 aa, Tribolium castaneum
MKIVAFGNPLLDTIVLLKSDALLKKYCLEKDGQKEVSQSEMKALVADLEEYEKTFVAGGCAQNTLKVVQWLLDKKCAATMFGSIGGDSEGEILKKILREHGVDTNYVTQPGYITGSTVSLVTGESRSLVAYLGAAEVMSPQDFSPNSHIIEDANLVYMEGFFITKRIQVASAIVNCCNRLNKQFVFNLSGQYLCTDYTQTVVDFVQKSSIIFGNKREFQTICPPMNESSVENLIKNLGKQGKIVVVTDGAKCVNCVGGGETLEIKVPELRAEEIVDTTGAGDAFVAGFLSGYLLKKPLKTCCELGNYAAQEIIKRRGCTIPDYPPVLK

SEQ ID NO: 1754 - DNA, 1041 bp, Tribolium castaneum
  CDS (1)..(1041)
atgcaacgtgaaaatttacgggagaacatgttgctgggcatgggaaaccccttactggacatctccgccacggtggacaaggacttcctaaccaaatacaacatgaaagagaacaacgcgatcttggccgacgagtcgcacaaaaatctcaactcggaaatgatcgaaaagtacaaagcggagtttatagccggcggcagcgtccagaacagtctccgagtggcgcagtggctgctccagaagcccaaagtgaccacgtttttcgggtgcgtcgggactgataaatactcccagattttgaaagacaaggcgaaagccgacggtgttaacgtggtgtatcagtacaacgacaaggtccccacagggacctgtgccgtgcttatcacgggcacgaaccgctccttgtgtgccaacttagcagcggcgaactgcttcacaattgatcatatcagagacccggaaaatcgcaagttgttagagagtgcacaatatttttacatctcggggttcttcatcaccgtgagtccgcaaagcatactcgaagttgcgaaacatgccttggccaacgatcgcccctttattatgaatctcagcgcgccgttcatttcacaattctacaaggagcctctgatgcaagcgatgccttacgttgacctcttatttgggaacgaaacggaggcggagacgttcgccaacgagcagaacttcggcacgaaagacttaaaagagatcgctttgaaaatctgcaatcttccaaagcagaacgagaaccgatcgcgcgtctgcgtcatcaccacggggcacaacccggtgatcctcgcccgtgaggggaaaatcagcgagtttcccgtcgatgttctgagcaaggacaagctggttgacaccaacggagctggcgacgcgttcgctggcggcttcctctcgcagtacatccaagggcagagtctggacgtttgcgtgcgatgcggcatctgggcggcgtcgcagatcgtgcagaggagcgggtgcaccttcagcgggaaggccaatttccaaccttag

SEQ ID NO: 1755 - protein, 346 aa, Tribolium castaneum
MQRENLRENMLLGMGNPLLDISATVDKDFLTKYNMKENNAILADESHKNLNSEMIEKYKAEFIAGGSVQNSLRVAQWLLQKPKVTTFFGCVGTDKYSQILKDKAKADGVNVVYQYNDKVPTGTCAVLITGTNRSLCANLAAANCFTIDHIRDPENRKLLESAQYFYISGFFITVSPQSILEVAKHALANDRPFIMNLSAPFISQFYKEPLMQAMPYVDLLFGNETEAETFANEQNFGTKDLKEIALKICNLPKQNENRSRVCVITTGHNPVILAREGKISEFPVDVLSKDKLVDTNGAGDAFAGGFLSQYIQGQSLDVCVRCGIWAASQIVQRSGCTFSGKANFQP

SEQ ID NO: 1756 - DNA, 990 bp, Bacteroides fragilis NCTC 9343
  CDS (1)..(990): transl_table=11
atggataaaataattggattgggcaacgccctggtagacgtacttgcaaccctgaaagatgatacactccttgatgaaatgggattacccaagggaagcatgcaacttattgatgatgctaagttacagcagattaacgaacgatttagccgaatgaaaacccacttggcaaccggtggagcggctgcaaatacgatcctcggactcgcttgtttgggtgccgggaccggttttatcggaaaaatcggaaatgacgcttacggaaacttttttcgggcaaatctgcaaagaaatggcatcgaagataaattattagtgtctgatctgccatcgggagttgcttctacttttatttctccggacggagaacgtactttcggtacttatctcggtgctgcctctacgctgaaagccgaagatttaacgctggatatgttcaaagggtatgcatatctgcttatcgaggggtatctggtacaggatcatgatatgattcttcatgccatcgagttggcaaaagaggccggattgcaggtttgtctggatatggccagttataatatcgtagcgggtgatcttgaattcttcaccttattaataaataaatatgtagatattgtttttgccaatgaagaagaagcgaaagcgtttacgggcaaagaagatccgaaagaagctcttgagttgatcagtaagaaatgcagtattgccattgtaaaggtaggcggcaatggttcttatattcgtaagggtactgaagaaattaaggtagaagctattccggtgaaaaaagtgattgatacaacaggagcaggcgactatttcgcatccggatttctgtacggactgacttgcggatattctttggagaagtgtgctaagattggttcaattctctccggaaatgttatacagatagttggaaccacgattcccggtgagcgttgggatgaaataaagttaaatattaacgaagttctgtcagagtaa

SEQ ID NO: 1757 - protein, 329 aa, Bacteroides fragilis NCTC 9343
MDKIIGLGNALVDVLATLKDDTLLDEMGLPKGSMQLIDDAKLQQINERFSRMKTHLATGGAAANTILGLACLGAGTGFIGKIGNDAYGNFFRANLQRNGIEDKLLVSDLPSGVASTFISPDGERTFGTYLGAASTLKAEDLTLDMFKGYAYLLIEGYLVQDHDMILHAIELAKEAGLQVCLDMASYNIVAGDLEFFTLLINKYVDIVFANEEEAKAFTGKEDPKEALELISKKCSIAIVKVGGNGSYIRKGTEEIKVEAIPVKKVIDTTGAGDYFASGFLYGLTCGYSLEKCAKIGSILSGNVIQIVGTTIPGERWDEIKLNINEVLSE

SEQ ID NO: 1758 - DNA, 987 bp, Saccharophagus degradans 2-40
  CDS (1)..(987): transl_table=11
atgcccacataccaaatatacggcctaggcgcagcgctagtagatactgaaattgaagtaacagacctagacctaaaggatttacgcattgataagggtgtaatgaccttggttgatgaagccagacaagcgcagcttatacgcaccctttccaagcatgttgccgcatctaagcgcgcaagcggtggttcggctgccaacagcattattgcggcaagctattttggcgctaaaacgttttatagctgccgcgtcgccaatgacgagaacggcaagttttaccttaacgacttagccgaagccggtgtgagctattacgaaaagaatggtgaaccgagtggcaccaccggtaaatgcttagtgtttattaccccagacgccgagcgcactatgaacaccttcttgggcattagcgaaacactatcggtagatgatattgatgagcaggcactggctgagtctgagtgggcttatatagaaggttacctagtaacatcggcaaccggccgcccagccgcaatcaagctgcgcgaactcgccgaggccaaaggcgttaaaacagcactaagcctttccgaccccgccattgttaatttctttaaagatggactagtagagatgattggcgacggcgtagacatgctgttttgcaacgaagccgaagcgctgcaatacaccggctgcgataccgtagaaacagccgcagaagcgcttaagcaatgcgccaaggcctttgccattacccaaggcgccaaaggcgcactgctatttgatggcgagcagtttataacggttgcggcacacaaggttaccccagtggataccaacggagcaggcgatatgtttgccggtgcttttttatatggcttaaccaacaacatgagcttccaacaagctggcgaccttgctagcaaagcggcctcggtagttgtatctcaatttgggccgcgcctgcgcccagaacaacacaaagagctgctaggctaa

SEQ ID NO: 1759 - protein, 328 aa, Saccharophagus degradans 2-40
MPTYQIYGLGAALVDTEIEVTDLDLKDLRIDKGVMTLVDEARQAQLIRTLSKHVAASKRASGGSAANSIIAASYFGAKTFYSCRVANDENGKFYLNDLAEAGVSYYEKNGEPSGTTGKCLVFITPDAERTMNTFLGISETLSVDDIDEQALAESEWAYIEGYLVTSATGRPAAIKLRELAEAKGVKTALSLSDPAIVNFFKDGLVEMIGDGVDMLFCNEAEALQYTGCDTVETAAEALKQCAKAFAITQGAKGALLFDGEQFITVAAHKVTPVDTNGAGDMFAGAFLYGLTNNMSFQQAGDLASKAASVVVSQFGPRLRPEQHKELLG

SEQ ID NO: 1760 - DNA, 993 bp, Rhizobium leguminosarum bv. viciae 3841
  CDS (1)..(993): transl_table=11
atgacaagattcgatgttctgacagtcggcaacgcaatcgtggatatcattgcccgttgcgacgaccagttcctcattgacaaccagattaccaaggcggcgatgaacctgatcgatgccgaacgcgccgaactcttgtattcgcgcatgggaccggcgctcgaagcttccggcggcagcgccggcaacaccgcggcgggcgtggcgagcctcggcggcaaagctgcctatttcggcaatgtcgctcaagatcagctcggtgacatcttcgcgcatgacatccgcgcccagggcgtccactaccagacccggccgaagggcaccttcccgccgacggcgcgttcgatgatcttcgtcaccgaggacggcgagcgctcgatgaacacctatctcggcgcttgcgtcgagctcggcccggaagacgtcgagaccgacgtcgtggccgacgcaaaggttacctatttcgaaggttatctctgggatccgccacgcgccaaggaagcgatcctcgattgtgcccgcatcgcccatgaaaacggccgcgaaatgtcgatgacgctgtccgacagcttctgcgtcgaccgctatcgcggcgaattcctcgatctgatgcgctccggcaaggtcgatatcgtcttcgccaatcgccaggaagcgctgtcgctctacgagaccgacgatttcgaggaggcgctgaacaggatcgccgccgattgcaagatcgccgccgtgacgatgagcgaggatggcgccgtcatcctgaagggccgcgagcgtttttacgtcgatgcgatcaggatcagggaagtggtcgatacgaccggtgccggcgatctcttcgcctccggcttcctctatggttacacgcagggacgatctctcgaggattgcggcaagctcggttgcctggctgccggcatcgtcatccagcagatcggcccgcgcccgatgacctcgctttccgaggccgccaaacgggcagggcttatttga

SEQ ID NO: 1761 - protein, 330 aa, Rhizobium leguminosarum bv. viciae 3841
MTRFDVLTVGNAIVDIIARCDDQFLIDNQITKAAMNLIDAERAELLYSRMGPALEASGGSAGNTAAGVASLGGKAAYFGNVAQDQLGDIFAHDIRAQGVHYQTRPKGTFPPTARSMIFVTEDGERSMNTYLGACVELGPEDVETDVVADAKVTYFEGYLWDPPRAKEAILDCARIAHENGREMSMTLSDSFCVDRYRGEFLDLMRSGKVDIVFANRQEALSLYETDDFEEALNRIAADCKIAAVTMSEDGAVILKGRERFYVDAIRIREVVDTTGAGDLFASGFLYGYTQGRSLEDCGKLGCLAAGIVIQQIGPRPMTSLSEAAKRAGLI

SEQ ID NO: 1762 - DNA, 960 bp, Oryza sativa subsp
  CDS (1)..(960)
atggcgtccgagggcgtgctcctggggatgggcaaccccctcctcgacatctccgccgtcgtcgacgacgccttcctcaccaagtatgacgtcaagctgaacaatgcaattctcgctgaggaaaagcacttgcctatgtatgatgagttggccagcaagggcaatgttgaatatattgccggaggagccacccagaactctatcagggttgctcaatggatgcttcaaactcctggtgcaacaagttacatgggttgcattggaaaggataagtttggtgaggagatgaagaagaatgcccaagctgctggtgttactgctcattactacgaggatgaggctgctcccacgggcacatgtgctgtctgtgttgttggtggtgaaagatcactggttgcaaacttatcagcagcaaactgctacaaatctgagcatctgaagaaaccggagaactgggcactagtggagaaagcaaaatacatctacattgctggctttttccttacggtctccccagattctattcagcttgttgctgagcatgctgccgctaacaacaaggtgttcctgatgaacctctctgcaccctttatctgtgagtttttccgtgatgccccaggagaagttcttgccactgagaatgttgaggagatcgcgttgaagatttcccagcttccattggcctctggaaaacaaaagaggattgccgtgattactcaaggtgctgatccagtagttgtcgctgaggatggacaggtgaaaacattccctgtgatcctactgccaaaggagaagcttgttgacaccaacggcgctggtgatgcctttgttggaggcttcctctcacaattggttcaacaaaagagcattgaggactctgtgaaggctggttgctatgccgcaaatgttatcatccagcgttctggctgcacttaccctgagaagcctgatttcaactag

SEQ ID NO: 1763 - protein, 319 aa, Oryza sativa subsp
MASEGVLLGMGNPLLDISAVVDDAFLTKYDVKLNNAILAEEKHLPMYDELASKGNVEYIAGGATQNSIRVAQWMLQTPGATSYMGCIGKDKFGEEMKKNAQAAGVTAHYYEDEAAPTGTCAVCVVGGERSLVANLSAANCYKSEHLKKPENWALVEKAKYIYIAGFFLTVSPDSIQLVAEHAAANNKVFLMNLSAPFICEFFRDAPGEVLATENVEEIALKISQLPLASGKQKRIAVITQGADPVVVAEDGQVKTFPVILLPKEKLVDTNGAGDAFVGGFLSQLVQQKSIEDSVKAGCYAANVIIQRSGCTYPEKPDFN

SEQ ID NO: 1764 - DNA, 1206 bp, Oryza sativa subsp
  CDS (1)..(1206)
atggagagcggaagctacgagggcgtcctcctgggcatgggaaaccccctcctcgacatctccgccgtcgtcgacgaggccttcctcgcaaactcggtcctggaaaatgatgatattttccacttggggcctttgggggtttggaagggtggaggggtggagggggtgatatatgatatcaagccagggaatgcaattctagcagaggagaagcatttgcctatgtacaatgaattggctagcaaggtcaatgttgaatatatcgctggaggatccactcaaaattctattagggttgctcagtggatgctccagattcctggtgcaacaagttacatgggttgcattgggaaggacaagttcggtgaggagatgaagaaagacgcacaaaccgctggtttgcaccactgcacatactgccttgaccttaccatctttaaacaggcccattattatgaggatgataatgctcctactggcacatgtgctgtctgcattgttggtggtgaaaggtcacttgttgcaaacttgtctgcagcgaactgctacaggtctgaacatctgaagaggccagagaactggacacttgtttatgtgtttcatttgattgcttttctcacaataataaggtcattgattgtagttgagaaggcaaaatatatttacattgctggctttttcctcacggtatccccggattccattcaacttgttgctgagcatgctgctgcaactaacaaggtgtttatgatgaacctttctgctccctttatatgtgaattcttccgtgatgcccaagagaaggctcttccgtatgctgactatatttttggaaatgaaactgaagcaaggacctttgctaaagttcgtggttgggagactgagaatactgaggagattgctttgaagatctcgcaattgcctaaggcttcaggagcacacaagaggattactgtcattactcaaggctgtgacccagtagttgtggctgatgatggaaaggtcaaaacattccctgttatcgttttgcccaaggaaaagcttgttgacaccaatggtgcaggcgatgcctttgttgggggttttctctctcaattggttcaggagaagagcattgatgaatgtgtcagagctgcttgttatgctgcaaacgttatcatccaacgctcaggctgcacttaccctgagaagcctgacttcaactag

SEQ ID NO: 1765 - protein, 401 aa, Oryza sativa subsp
MESGSYEGVLLGMGNPLLDISAVVDEAFLANSVLENDDIFHLGPLGVWKGGGVEGVIYDIKPGNAILAEEKHLPMYNELASKVNVEYIAGGSTQNSIRVAQWMLQIPGATSYMGCIGKDKFGEEMKKDAQTAGLHHCTYCLDLTIFKQAHYYEDDNAPTGTCAVCIVGGERSLVANLSAANCYRSEHLKRPENWTLVYVFHLIAFLTIIRSLIVVEKAKYIYIAGFFLTVSPDSIQLVAEHAAATNKVFMMNLSAPFICEFFRDAQEKALPYADYIFGNETEARTFAKVRGWETENTEEIALKISQLPKASGAHKRITVITQGCDPVVVADDGKVKTFPVIVLPKEKLVDTNGAGDAFVGGFLSQLVQEKSIDECVRAACYAANVIIQRSGCTYPEKPDFN

SEQ ID NO: 1766 - DNA, 1041 bp, Ostreococcus tauri
  CDS (1)..(1041)
atggcgaacgatgcgttgaccctgctcgggatggggaatcccttgctcgatatctccgtcaccgtgcgcgacgacgcgctgttgacaaagtacgatctgaagatgaacaacgcgatcttagccgaggagaaacacgcggagttgtacgcggaaatggtggagaaatacgcggtggagtacatcgcgggaggggcgacgcagaactccatccgtgtcgcgcagtggatgctgcaaaagccgggcgcgacggcgtacatggggtgcgtgggcgaggacgcgttcgcgcagcagatgcgcgcgtcgtgcgccgaggacggcgtggtgacgaattatatggttgactcttcgacgcccacggggacgtgcgcggttatcgtgaaggatggcgagcgatcgctgtgcgcggcgctcaacgcggcgaacaactacaaggcggaacacctgaacgcgagcgaaaactttgcgctcgtggagaaggcttcgtactactacatggctggtttcttcatgacggtgagcccggagagcatcatgcgcgtcgccaagcacgcgtgcgaaaacaagaagacgttcatgatgaacctcagcgcaccattcttgatgcaagtgccgccgttcttggctacgctcatggaggcgcttccgtacatggattacttgtttggcaacgaatccgaggctttgacgttcgccgaatcgcaaaactgggacaccaaggacatcaaggaaatcgcactcaagattgccgcgatgccgaccgccgagggtaagggatcgcgcacggtcgtcatcacccaagggtgcgacccgactgtcgtcgctcgcgacggctccgcgagcgagtacgctgtcattccgctcgccaaggaagacttggtcgacaccaacggtgcgggcgacgccttcgtgggtggtttcatctctcagctcgttcaaggcggtgacgtcgcgaagtgctgcgccgcgggtaactacgccgcgaacaagatcatccaagtgtctggctgcaagtgcgagggaactccaacgttcactgcgtaa

SEQ ID NO: 1767 - protein, 346 aa, Ostreococcus tauri
MANDALTLLGMGNPLLDISVTVRDDALLTKYDLKMNNAILAEEKHAELYAEMVEKYAVEYIAGGATQNSIRVAQWMLQKPGATAYMGCVGEDAFAQQMRASCAEDGVVTNYMVDSSTPTGTCAVIVKDGERSLCAALNAANNYKAEHLNASENFALVEKASYYYMAGFFMTVSPESIMRVAKHACENKKTFMMNLSAPFLMQVPPFLATLMEALPYMDYLFGNESEALTFAESQNWDTKDIKEIALKIAAMPTAEGKGSRTVVITQGCDPTVVARDGSASEYAVIPLAKEDLVDTNGAGDAFVGGFISQLVQGGDVAKCCAAGNYAANKIIQVSGCKCEGTPTFTA

SEQ ID NO: 1768 - DNA, 1047 bp, Phaeosphaeria nodorum
  CDS (1)..(1047)
atggctggcaaatacgaactcctgtgcctcgagaaccctctgctggacatccagggtcaaggagaccaagcattgctcgacaagtacggcctcaaggccaacgatgccattcttgccgatcccgagaagcacatgggtctctatgaggacctgatccagaactacaacgccgtcctgattgccggaggtgctgcacagaacacggcaagaggcgctcagtacatcctcgctcccaactcgactgtctacattggctgcattggcaaggacaagtacggcgagacccttgagaagatctcgagcgacgctggcgtcaagaccgagtacctctacgacgagaagacccccactggtcgctgcggtgtcgtcattaccggccacaaccgctcgctttgcacagacctggcggctgccaacaactacaaggtcgagcacttgaagcaggagcacatctggaagcaggtcgagaacgcacaggtcttctacgtcggtggcttccacttgactgtctgcgtcccagccatcaaggcgcttgctgaggaggccgccgcaaagaacaagattttcattctcaacctctccgcgcctttcatctcccagttcttcaaggacccgctcgacgagatcctgccctacgtcgacatcctgatcggcaacgagaccgaggccgccgcatttgctgagtcgcataacatcgactccaaggatgttaagaagatcgccgagaccatcgcaaagggccccaagaagaacacccagcgcacaaggacagtcgtcattacgcaaggcaccgagccgaccgttgccgtcactgcaaaggatggcgacgtcgacgtcaaggaggtcaaggtacacgctctcgacgagggcaagatcaacgacaccaacggcgctggtgacgccttcgccggtggtttcgttgccggtatcgtccagggcaagcccctcgagaccgccatcgacatgggccagtggttggccaagctgagcatccaggagctgggcccttcatacccccagcccaagcagacctacacttccagctaa

SEQ ID NO: 1769 - protein, 348 aa, Phaeosphaeria nodorum
MAGKYELLCLENPLLDIQGQGDQALLDKYGLKANDAILADPEKHMGLYEDLIQNYNAVLIAGGAAQNTARGAQYILAPNSTVYIGCIGKDKYGETLEKISSDAGVKTEYLYDEKTPTGRCGVVITGHNRSLCTDLAAANNYKVEHLKQEHIWKQVENAQVFYVGGFHLTVCVPAIKALAEEAAAKNKIFILNLSAPFISQFFKDPLDEILPYVDILIGNETEAAAFAESHNIDSKDVKKIAETIAKGPKKNTQRTRTVVITQGTEPTVAVTAKDGDVDVKEVKVHALDEGKINDTNGAGDAFAGGFVAGIVQGKPLETAIDMGQWLAKLSIQELGPSYPQPKQTYTSS

SEQ ID NO: 1770 - DNA, 1155 bp, Aedes aegypti
  CDS (1)..(1155)
atgactaaagattcacaaataagcagctgcgatcgctgcccaaggctggtcgcgttcggaaatgtgctgctggacatcagcgtcgagctgcacgacaacaaaatcctcaaggagttcgacctgaaggaagatgaccagcgggaaattccggcggacaagttggcccggttgggggccgttgccgtggagacatgcggtaaaccgaaatacaatcctggcgggtctgcactgaacacgtgccgaattttgcgcgcacttggcgagaagaatgtgatgttttgcggtgccattggcgttgacgagaatggagaggttcttacgcagatactgaaggatagctcgttagccacgtgcatccaaaccttgccggagcactcgacgggcacttgcatctgccttatcagcggagataagcgcagcctcaacgcaaacatcggggcgtcgttgcacttcaagaaggaattcgttatgtcacgttggtgccagagcaagatcggaagctgcaattcagctgctcataccgacagcgatgaggaaattcgtatcttctacgttgagggatattttgtgccggaaaagtttgccatatgcaagtacatctacgaaaagtactgcaagggaacgccaaatctgttcgtaacgaacctcaatgccagctacatactgcagaacttcaccaaagaaatgcaacacctggtcgagcaggccgatttggtatttggcaatctgaccgagttcatctcgttggccgaaatctatgaatgccccaccgtagatgatctggccaggtgtctgattaggaagtacttaaaaatcaatcgggagaaaatcctggttgcgaccgatggttcccgaagtgtgcggttctaccacggcaacggcagtgcattctatgctgaatcctatcaggttccgattattcccaaaaaagcagtcatcgatacgaccggtgctggggactcgttcgttgccgggttcctgtacaagtacatgaatggtgaatgccccacgctgttggactgcgttcgatatggcagcaaggtggccgccaaagtcattcgtcaagtaggatgtaatctaccctcctctctacctacttctccggttagcgggctggttacacccgttgatgaggttgaatccaaacttgcctag

SEQ ID NO: 1771 - protein, 384 aa, Aedes aegypti
MTKDSQISSCDRCPRLVAFGNVLLDISVELHDNKILKEFDLKEDDQREIPADKLARLGAVAVETCGKPKYNPGGSALNTCRILRALGEKNVMFCGAIGVDENGEVLTQILKDSSLATCIQTLPEHSTGTCICLISGDKRSLNANIGASLHFKKEFVMSRWCQSKIGSCNSAAHTDSDEEIRIFYVEGYFVPEKFAICKYIYEKYCKGTPNLFVTNLNASYILQNFTKEMQHLVEQADLVFGNLTEFISLAEIYECPTVDDLARCLIRKYLKINREKILVATDGSRSVRFYHGNGSAFYAESYQVPIIPKKAVIDTTGAGDSFVAGFLYKYMNGECPTLLDCVRYGSKVAAKVIRQVGCNLPSSLPTSPVSGLVTPVDEVESKLA

SEQ ID NO: 1772 - DNA, 1035 bp, Aedes aegypti
  CDS (1)..(1035)
atgacaaatttgcgggacggactcttgctaggatgtggcaacccactgctggacatctcagcggctgtggatgagcaattccttgccaagtatgaaatgctgccaaataacgccattctcgccgaagacaagcacatgccaatctataaggaactggttgaggaatgcaacgctgaatacattgcaggcggaagcgtccagaattcgtttcgcgtggcccagtgggtgctccaaaggccgaacgtggcggttttcttcggatgtgtcggagaggacaagtattcggacattcttctggagaaggccacccaggatggcgtcaatgtgcagtatcagttctgcagggacacacccacgggcacgtgtgctgtgctgatcacaggaacgcaacggagcttgtgtgccaacttggccgcggccaacagcttcacagttgaccacctgaaaagtgcggaaaatgaaaagtaccttcagaacgcggagtacttctacatctctgggttcttcctgacggttagcttggagagtattctgaccgtggccaagcatgctctctctaaggatcggttattcatgatgaacctgagtgcaccattcattccacagtttttcaaagataatttggaccaagtgatgccatatattgatattttgtttggcaatgaaactgaagctctcgcctttgccgaggcacaaaagtttggcaccgaagatctgaaggaaatcggtctgaagatttccgcgttaccaaagcagaacgaatcgcgcaaacgagtcgcaatcattacccagggcagcgatccagtgctgctgatccgggacggcaccattacggagttccccgtcgagaaactcgctgcggatcaaattgtggacaccaacggcgcaggggatgccttcgtagggggttttctggcccagctggtccagaagcgaaactttgacacgtgtatcgagtgtggcatttgggccgcacgtaaaatcatccaaagatctggttgtaccttcgagggggtgcccgattttgaggcatag

SEQ ID NO: 1773 - protein, 344 aa, Aedes aegypti
MTNLRDGLLLGCGNPLLDISAAVDEQFLAKYEMLPNNAILAEDKHMPIYKELVEECNAEYIAGGSVQNSFRVAQWVLQRPNVAVFFGCVGEDKYSDILLEKATQDGVNVQYQFCRDTPTGTCAVLITGTQRSLCANLAAANSFTVDHLKSAENEKYLQNAEYFYISGFFLTVSLESILTVAKHALSKDRLFMMNLSAPFIPQFFKDNLDQVMPYIDILFGNETEALAFAEAQKFGTEDLKEIGLKISALPKQNESRKRVAIITQGSDPVLLIRDGTITEFPVEKLAADQIVDTNGAGDAFVGGFLAQLVQKRNFDTCIECGIWAARKIIQRSGCTFEGVPDFEA

SEQ ID NO: 1774 - DNA, 1026 bp, Medicago truncatula
  CDS (1)..(1026)
atggctttggaaggtgttcttctcggtatgggtaatccccttctcgacatctctgctgtcgtcgatgaagatttcttgaaaaagtttgatatccagttgaacaatgccattctcgctgaagataagcacaaatctatgtatgatgaaatggctgctaaatataatgtggagtacattgctggaggagctactcagaattcaatcagggttgctcagtggatgcttcaagttcccggggccactagttacattggttgcatcggaaaggacaagtttggtgaggagatgaccaagaactctaaacaagctggtgttaatgttcactattatgaagatgagaatacacctacaggaacttgtgctgtttgtgtggttggtggtgaaaggtcacttattgccaacttatcagctgcaaattgctacaaggtcgaccatttgaagcaacccgaaaattgggcattagttgagaaggccaaatatttctatattgctggctttttccttactgtatcccctgaatccattcaattagttgccgagcatgcagcagcaaataacaaggtcttcatgatgaacctttctgcaccatttatctgcgagttcttcaaggatccacaggagaaagctctgccgtatatggactatgtttttggaaatgagactgaagcaagaacattttccaaagttcatggctgggagactgaaaatgtcgaggagatagctttaaagatatcccagttgccaaaggcatcagaggcacgcaaaaggattactgttatcacacagggtgctgatcccgtatgtgttgctcaagatgggaaagtgacattgtaccctgttatactattacctaaagagaaattagttgataccaatggagcaggagatgcctttgttggaggatttctttcacaattggttcaggagaagcctattgaagaatgtgttagagctgggtgttatgcagcaaatgttatcatccaaaggtctggctgcacttacccagagaagcctgattttcattaa

SEQ ID NO: 1775 - protein, 341 aa, Medicago truncatula
MALEGVLLGMGNPLLDISAVVDEDFLKKFDIQLNNAILAEDKHKSMYDEMAAKYNVEYIAGGATQNSIRVAQWMLQVPGATSYIGCIGKDKFGEEMTKNSKQAGVNVHYYEDENTPTGTCAVCVVGGERSLIANLSAANCYKVDHLKQPENWALVEKAKYFYIAGFFLTVSPESIQLVAEHAAANNKVFMMNLSAPFICEFFKDPQEKALPYMDYVFGNETEARTFSKVHGWETENVEEIALKISQLPKASEARKRITVITQGADPVCVAQDGKVTLYPVILLPKEKLVDTNGAGDAFVGGFLSQLVQEKPIEECVRAGCYAANVIIQRSGCTYPEKPDFH

SEQ ID NO: 1776 - DNA, 1026 bp, Medicago truncatula
  CDS (1)..(1026)
atgggtttggaaggtgttcttctcggtatgggtaatcccctcctcgacatctctgctgtcgtcgatgaagatttcttgaaaaagtttgacatccagttgaacaatgctattctcgctgaagacaaacacaaatctatgtatgatgaaatgactgccaaatataatgtggagtacattgctggaggtgctactcagaattcaatcagggttgctcagtggttgcttcaagttcccggggccactagttacatcggttgcattgggaaggacaagtatggtgaggagatgaccaagaactctaaacaagctggtgtaaatgttcactattatgaagacgagaatacacctacaggaacttgtgctgtttgtgtggttggtggtgaaaggtcacttattgccaacttatcagctgcaaattgctacaagtctgagcatttgaagaaacccgaaaattgggcattagttgaaaaggccaaatatttctatattgctggatttttcctcactgtatcccccgaatccattcaattagttgctgaacatgcagctgcgaataacaaggttttcatgatgaacctttctgcaccctttatctgtgagttcttcaaggatccacaggagaaagctcttccgtatatggactatgtatttggaaatgagactgaagcacggacattttcgaaagttcatggctgggagaccgataatgtcgaggagatagctatcaagatatcccaattgccaaaggcatcaggaacacacaaaaggattaccgttatcacacagggtgctgatcccgtgtgtgttgctcaagatgggaaagtgacattgtaccctgtaattctattacctaaagagaaattagttgataccaatggagcaggagatgcctttgttggaggatttctttcacaattggtccaggagaaacctattgaagaatgtgtgagagctggatgttacgcagcaaatgttatcattcaaaggtccggctgcacttacccagagaagcctgattttcaataa

SEQ ID NO: 1777 - protein, 341 aa, Medicago truncatula
MGLEGVLLGMGNPLLDISAVVDEDFLKKFDIQLNNAILAEDKHKSMYDEMTAKYNVEYIAGGATQNSIRVAQWLLQVPGATSYIGCIGKDKYGEEMTKNSKQAGVNVHYYEDENTPTGTCAVCVVGGERSLIANLSAANCYKSEHLKKPENWALVEKAKYFYIAGFFLTVSPESIQLVAEHAAANNKVFMMNLSAPFICEFFKDPQEKALPYMDYVFGNETEARTFSKVHGWETDNVEEIAIKISQLPKASGTHKRITVITQGADPVCVAQDGKVTLYPVILLPKEKLVDTNGAGDAFVGGFLSQLVQEKPIEECVRAGCYAANVIIQRSGCTYPEKPDFQ

SEQ ID NO: 1778 - DNA, 1071 bp, Aspergillus oryzae
  CDS (1)..(1071)
atggctgccactcaaggatacccttttctttgcttggagaaccctctcctcgtacatgtactgacacagtactatagtgatgctgctcttcttcagaagtatggtctgaaggacaacgatgctatcctcgctgaggacaagcatatggggctctacgaggagcttctgcagaacgatgatgctaagttgattgccggtggtgccgcccagaacactgcccgtggcgctcagtacattctcccggacaactccgttctctacattggatgtgtcggccgtgacaagtacgccgatatcctgaaggacacctgcaccaaggctggtgtgcacaccgagtaccgtgtggacgatgcccagcctaccggcaagtgcggcgtgatcatcactggccacaaccgtagcatgtgcacccaccttgctgcggctaacgagtacaagttggagcaccttaagcagcctcagatctggtctcttgttgagaaggctcaggtgtactatgtcggtggctaccaccttaccgtgtgtgtgcccgctatccaggctcttggtgaagaggctgctgcaaagaacaagatcttcatgctctctctttcggcccctttcatccctgagttcttcaaggaccagttggacagtgtgctgccctacactgactacaccttctgtaatgagactgaggctcgtgcttactccaagagccaccaatgggatacggatgatgtcgttgagatcgccaagaaattggctcagctgcccaagaagaacaacagccgcccaagagttgccattgtgactcagggtactctccctactgtagctgctaccgttaagcccaacggcgaagttgaggttaaggagttcagcgttgttgagatccctaaggacagcatcaacgacaccaacggtgccggtgatgccttcgctggtggtttctgtgctggtgttgtgcaaggcaagtctcttgaagagagcatggacatgggccagtggctcgccagccttagcatccaagagttggggccttctttccccttccctaagaaggcttacactcccaccaaccggtcgtaa

SEQ ID NO: 1779 - protein, 356 aa, Aspergillus oryzae
MAATQGYPFLCLENPLLVHVLTQYYSDAALLQKYGLKDNDAILAEDKHMGLYEELLQNDDAKLIAGGAAQNTARGAQYILPDNSVLYIGCVGRDKYADILKDTCTKAGVHTEYRVDDAQPTGKCGVIITGHNRSMCTHLAAANEYKLEHLKQPQIWSLVEKAQVYYVGGYHLTVCVPAIQALGEEAAAKNKIFMLSLSAPFIPEFFKDQLDSVLPYTDYTFCNETEARAYSKSHQWDTDDVVEIAKKLAQLPKKNNSRPRVAIVTQGTLPTVAATVKPNGEVEVKEFSVVEIPKDSINDTNGAGDAFAGGFCAGVVQGKSLEESMDMGQWLASLSIQELGPSFPFPKKAYTPTNRS

SEQ ID NO: 1780 - DNA, 1026 bp, Solanum tuberosum
  CDS (1)..(1026)
atggagtacgatgggattcttttgggcatgggaaatccattactcgatatctcagctgttgtagatcaagatttcttgaacaagtatgaaatcaagccgaacaatgcaattctcgcagaggacaagcacttgcctatgtatgatgaaatggcagccaagcccactgttgaatacattgctggaggtgcaacacaaaactcaatcagagtggctcagtggatgctacaatttccaggtgcaacaagttacatgggctcagttgggaaggacaagtttggggaggaaatgaagaaaaatgcacaggatgctggcgtcaatgttcattactatgaggatgagactgctccaacagggacttgtgctgtttgtgtgctagatggcgagaggtcattggttgctaacttatcagcagcaaactgctacaaggttgaccatttgaaacgaccagagaactgggccttggttgagaaggccaaattttactatattgctggattctttctcaccgtttctccagaatctattcagcttgttgctgagcacgcagcagccaataacaagatcttctcaatgaacctttcagcaccattcatctgcgagttcttcagggatcctcaggagaaagctttgccgtatatggactttgtatttggaaatgagacagaagcaagaatcttctcaaaagtacacggctgggagacggataatgttgaagaaatagctttgaaaatctcccaatggccaaaggcatctggaacacacaagaggattactgttattacacagggtgctgatcctgttgttgtcgctgaggatgggaaggtgaagctgttccctgttataccgttgccaaaagagaaacttgttgacaccaatggtgctggggatgcatttgttggaggattcttgtcacaattggttcaagaaaaacctattgctgagtgtgtaagagcaggttgttatgcatcgaacgttatcatccagaggtcgggttgtacataccccgagaagacagatttcgcatga

SEQ ID NO: 1781 - protein, 341 aa, Solanum tuberosum
MEYDGILLGMGNPLLDISAVVDQDFLNKYEIKPNNAILAEDKHLPMYDEMAAKPTVEYIAGGATQNSIRVAQWMLQFPGATSYMGSVGKDKFGEEMKKNAQDAGVNVHYYEDETAPTGTCAVCVLDGERSLVANLSAANCYKVDHLKRPENWALVEKAKFYYIAGFFLTVSPESIQLVAEHAAANNKIFSMNLSAPFICEFFRDPQEKALPYMDFVFGNETEARIFSKVHGWETDNVEEIALKISQWPKASGTHKRITVITQGADPVVVAEDGKVKLFPVIPLPKEKLVDTNGAGDAFVGGFLSQLVQEKPIAECVRAGCYASNVIIQRSGCTYPEKTDFA

SEQ ID NO: 1782 - DNA, 1259 bp, Nicotiana tabacum
  CDS (50)..(1072)
ctgaacctccattttcaacaacaaaacaaatttacagaaatatcaaaaaatggattctgagggtattcttttgggtatgggcaatccattgctcgatatctcagctgttatcgatcaagatttcctcaacaagtacgacattaagccgaacaatgcaattcttgctgaggaaaagcacgtgtctatgtacgatgaaatgacatccaagtttagtgttgaatacattgctggaggtgcaactcaaaattcaatcagagtagctcagtggatgcttcaaattccaggtgcaacaagttacatgggctctattgggaaggacaagtatggggaggaaatgaagaaaaacgcaaaagatgccggtgttaatgttcactactatgaggatgagagtccaacgggtacttgtgctgtctgtgtgcttgatggcgaaaggtcgctggttgcaaacttatcagctgcaaactgctacaaggttgaccatttgaaacgaccagagaactgggctttggtggagaaggccaagtactattacattgctggattcttcctcacagtttctccagaatctattcagcttgttgctgagcatgcagctgccaaaaacaaggttttctcaatgaacctttcagcaccatttatctgtgagttcttcaaggatcaacaggagaaagtcttgccgtatatggactttgtctttggtaatgaaacagaagcaagaaccttctctagagtccacggctgggagactgataatgttgaggaaatagctttgaagatctcgcaatggccaaaggcatcaggaacacacaagagaatcacggtcattacacagggtgctgatccagttgttgttgctgaggatgggaaggtgaaattgttcccagttattcctttgccaaaagagaaacttgttgacaccaatggcgctggtgatgcatttgttggaggattccttgcacagttggtccaaggaaaacctattgaagattgtgtcaaagcaggttgttatgcatcaaatgttatcatccaaaggtctggttgcacataccctgagaagcccaattttgaatgagggattttctcttgtgatatgttcttctgttaagaagaaacctatccggttcttaatagtatttttgatctggttatgccaattgataatggtatatccacaccaattcccatcccatatgttgtaaggcattttaattaccttttcttcatcatttgagaataacattctattgttgtttattgca

SEQ ID NO: 1783 - protein, 340 aa, Nicotiana tabacum
MDSEGILLGMGNPLLDISAVIDQDFLNKYDIKPNNAILAEEKHVSMYDEMTSKFSVEYIAGGATQNSIRVAQWMLQIPGATSYMGSIGKDKYGEEMKKNAKDAGVNVHYYEDESPTGTCAVCVLDGERSLVANLSAANCYKVDHLKRPENWALVEKAKYYYIAGFFLTVSPESIQLVAEHAAAKNKVFSMNLSAPFICEFFKDQQEKVLPYMDFVFGNETEARTFSRVHGWETDNVEEIALKISQWPKASGTHKRITVITQGADPVVVAEDGKVKLFPVIPLPKEKLVDTNGAGDAFVGGFLAQLVQGKPIEDCVKAGCYASNVIIQRSGCTYPEKPNFE

SEQ ID NO: 1784 - DNA, 1308 bp, Nicotiana tabacum
  CDS (50)..(1072)
ctgaacctccattttcaacaacaaaacaaattcacagaaatatcaaaaaatggattttgagggtattcttttgggtatgggcaatccattgctcgatatctctgctgttatcgatcaagatttcctcaacaagtacgacattaagccgaacaatgcaattcttgctgaggaaaagcacttgtctatgtatgacgaaatgacatccaaatttaatgtcgaatacattgctggaggtgcaactcaaaattcaatcagagtagctcagtggatgcttcaaattccaggtgcaacaagttacatgggctctattgggaaggacaagtatggggaggaaatgaagaaaaatgcgaaagatgctggtatcaatgttcactactatgaggatgagagtccaacgggtacttgtgctgtctgtgtgcttgatggcgaaaggtcgcttgttgcaaacttatcagctgcaaactgctacaaggttgaccatttgaaaaaaccagagaactgggctttggtggagaaggccaagtactattacattgctggattttttctcactgtttctccagaatctattcagcttgttgctgagcatgcagctgccaaaaacaaggttttctcaatgaacctttcagcaccatttatctgtgagttcttcaaggatcaacaggagaaagtcttgccgtatatggactttgtctttggtaatgagacagaagcaagaaccttctctagagttcatggctgggagactgataatgttgaagaaatagcattgaagatctcacaatggccaaaggcatcaggaacacacaagagaatcactgtcattacacagggtgctgatccagttgttgttgctgaggatgggaaggtgaaattgttcccagttattcctttgccaaaagagaaacttgttgacaccaacggtgctggtgatgcatttgtgggaggattccttgcacagttagtccaaggaaaacctattgcagattgtgtcaaagcagggtgttatgcatcgaatgtcatcatccaaaggtctggttgtacataccctgagaagcccgattttgaatgagggattttcctcttgtgggctttccatgttcttctgttaagaagaaacctattctggttcttatagtatttttgatctggttatgccaattggtaatggtatatccacatcccacttcccatcccccatattgttgtaaggcattttaattaccttctcttcatcatttgagaataacattctgttgtagtaattctatttattgcaataaggatgattctttagttttcatgcta

SEQ ID NO: 1785 - protein, 340 aa, Nicotiana tabacum
MDFEGILLGMGNPLLDISAVIDQDFLNKYDIKPNNAILAEEKHLSMYDEMTSKFNVEYIAGGATQNSIRVAQWMLQIPGATSYMGSIGKDKYGEEMKKNAKDAGINVHYYEDESPTGTCAVCVLDGERSLVANLSAANCYKVDHLKKPENWALVEKAKYYYIAGFFLTVSPESIQLVAEHAAAKNKVFSMNLSAPFICEFFKDQQEKVLPYMDFVFGNETEARTFSRVHGWETDNVEEIALKISQWPKASGTHKRITVITQGADPVVVAEDGKVKLFPVIPLPKEKLVDTNGAGDAFVGGFLAQLVQGKPIADCVKAGCYASNVIIQRSGCTYPEKPDFE

SEQ ID NO: 1786 - DNA, 1378 bp, Nicotiana tabacum
  CDS (42)..(1064)
gaaatttttcctccgctgcagcaaaaaaatatatcaaaacaatggagtacgagggaattcttttgggcatgggcaatccattactcgacatctcagctgttgtagatcaagatttcttgaacaagtatgacatcaagccaaacaatgcaattcttgctgaggagaagcacttgcctatgtatgatgaactggcatccaagagcaatgttgaatacattgctggaggtgcaacacaaaattctatcagagtggctcagtggatgctaccattttcaggtgcaacaagttacatgggctcgattggaaaggacaagttcggggagaaaatgaagaacaatgcaaaggatgctggcgtcaatgttcattactatgaggatgatgctccaacagggacttgcgctgtttgtgtactagatggcgagaggtcattggtagccaacttatcagctgcaaactgctacaaggttgaccatttgaagcgaccagagaactgggccttggttgagaaggccaagttttactacattgctggattctttctcactgtttccccagaatctattcagcttgttgctgagcatgccgctgccaataacaagatcttctcgatgaacctttcagcaccattcatctgcgagttcttcagggatccccaagagaaagccttgccgtatatggactttgtatttggaaatgagaccgaagcaagaaccttctcaaaagtacatggatgggagactgataatgttgaagaaatagctctgaaaatctctgaatggccaaaggcatctgaaacacacaaaaggatcactgttattacacaaggtgctgatcctgttgttgttgctgagaatgggaaggtgaagttgttccctgtaataccgttgccaaaagagaaacttgttgacaccaatggtgctggggatgcatttgttgggggtttcttgtcacaattggttcaaggaaaacctgttgaagattgtgtaagagcaggatgttacgcgtcaaatgttatcatccaaaggtcgggttgcacataccctgagaaaccagattttgcataagataagttcttattcttggtttctagtgttatcttgacagaacatattcgacttctagtatttagtacttggtcgagtaattccaattgttgggctattgttcccaaaattctacccatgttgtgaggaattttgattgccttttcatcatttgagatttgagaataatattgtactagaaaatttaaaataattcttccaatttctgggctattgttcccatatttctagcgtgttgtaaggaattttgactgttttttcatgtcattcgagaataacattgtattaggaaaatagaaatgtgtcttttccca

SEQ ID NO: 1787 - protein, 340 aa, Nicotiana tabacum
MEYEGILLGMGNPLLDISAVVDQDFLNKYDIKPNNAILAEEKHLPMYDELASKSNVEYIAGGATQNSIRVAQWMLPFSGATSYMGSIGKDKFGEKMKNNAKDAGVNVHYYEDDAPTGTCAVCVLDGERSLVANLSAANCYKVDHLKRPENWALVEKAKFYYIAGFFLTVSPESIQLVAEHAAANNKIFSMNLSAPFICEFFRDPQEKALPYMDFVFGNETEARTFSKVHGWETDNVEEIALKISEWPKASETHKRITVITQGADPVVVAENGKVKLFPVIPLPKEKLVDTNGAGDAFVGGFLSQLVQGKPVEDCVRAGCYASNVIIQRSGCTYPEKPDFA

SEQ ID NO: 1788 - DNA, 1311 bp, Nicotiana tabacum
  CDS (60)..(1082)
attgcacttaccttagatctgaaaattttcctcagctgcagaaaaaaaatatcaaaacaatggagtacgatggaattcttttgggcatgggcaatccattactcgatatctcagctgttgtagatcaagatttcttgaacaagtatgacatcaagccgaacaatgcaattcttgccgaggagaagcacttgcctatgtatgacgaactggcatccaagaacattgttgaatacattgctggaggtgctacgcaaaattcaataagagtggctcagtggatgctaccatttccaggtgcaacaagttacatgggctcgattggaaaggacaagtttggagagaaaatgaagaaaaatgcaaaggatgctggcgtcaatgttcattactatgaggatgaggcaccaacgggaacttgcgctgtttgtgtgctagatggcgagaggtcactggtagccaacttatcagctgcaaactgctacaaggttgaccatctgaagcgaccagagaactgggccttggttgagaaggccaaattttactatattgctggattctttctcactgtttccccagaatccattcagcttgttgctgagcatgccgctgccaataacaagattttctcgatgaacctttcagcaccattcatctgcgagttctttagagatcctcaagagaaagccttgccgtatatggactttgtatttggaaatgagaccgaagcaagaaccttctcaaaagtacatggatgggagactgataatgttgaagaaatagctctgaaaatctctgaatggccaaaggcatctgaaacacacaaaaggatcaccgttattacacaaggtgctgatcctgttgttgtagctgcggatgggaaggtgaagttgttccctgtaataccattgccaaaagagaaacttgttgacaccaatggtgccggggatgcatttgttggcggattcttgtcacaattggttcaaggaaaacccgttgaagattgtgtaagagcaggatgttacgcgtcaaatgttatcatccaaaggtcgggttgcacataccctgacaagccagattttgcataagatgcctaattcttatttcttggtttccggtgttatgccttaattaggggaggacttattctgagttctaatatttacttctcgattgttgggctattataaggaattttgattgccttttcatcatttgagatttgagaataacattgtattaggaaaattaacttttgttcctgccaattgttcccaaatttctagcgtgttgtaaggaattttgactgctttttca

SEQ ID NO: 1789 - protein, 340 aa, Nicotiana tabacum
MEYDGILLGMGNPLLDISAVVDQDFLNKYDIKPNNAILAEEKHLPMYDELASKNIVEYIAGGATQNSIRVAQWMLPFPGATSYMGSIGKDKFGEKMKKNAKDAGVNVHYYEDEAPTGTCAVCVLDGERSLVANLSAANCYKVDHLKRPENWALVEKAKFYYIAGFFLTVSPESIQLVAEHAAANNKIFSMNLSAPFICEFFRDPQEKALPYMDFVFGNETEARTFSKVHGWETDNVEEIALKISEWPKASETHKRITVITQGADPVVVAADGKVKLFPVIPLPKEKLVDTNGAGDAFVGGFLSQLVQGKPVEDCVRAGCYASNVIIQRSGCTYPDKPDFA

SEQ ID NO: 1790 - DNA, 1090 bp, Arabidopsis thaliana
  CDS (1)..(1038)
atggcttcttcttctaactacgatggaatccttctcggtatgggtaacccactcctcgatatctctgccgtcgtcgacgacgaatttctcaccaaatacgacatcaagttgaacaatgcgattctcgcggaagacaaacatttgcccatgtatgatgagatgagtagcaagttcaatgttgaatacattgccggaggtgctactcagaactcaatcaaagtggctcagtggatgcttcaaattcctggggcaaccagttacatgggatccattggaaaggacaaatatggagaggccatgaagaaggatgctacagcagctggtgttaatgttcactattatgaagatgagtcggcacctactggaacttgtggtgtctgtgttgttggtggagaaaggtctcttattgcgaatctttcagctgcaaactgctacaaggttgatcaccttaagaagcctgaaaactgggcattggttgagaaggccaagttctactacattgctggattcttcctcacagtatcgcctgaatccattcagttggtatctgagcacgctgctgcaaacaacaaggtgttcacaatgaacctttctgctccattcatctgtgaattcttcaaagatgtgcaggagaagttcttgccatacatggacttcgttttcggcaatgagacagaggcaagaaccttctctagggttcatggctgggagactgaagatgtcgaacaaatagccatcaagatttcacagcttcccaaggccacaggaacatacaagaggaccactgtgattacacagggcgctgatccagtggttgttgctgaagatggaaaggtgaagaaatatccagtcatccctctcccaaaggagaagctggttgacaccaacggtgcaggtgatgcatttgtgggaggatttatgtcacagttggtgaaagagaaatcgattgaggaatgcgtgaaggctggatgctatgcgtcgaacgtggtgatccaaagatctggctgcacttaccctgagaagcccgactttaactaaacaattgggttaccctcagttttgtgatatcttccaaataaaacaacctttg

SEQ ID NO: 1791 - protein, 345 aa, Arabidopsis thaliana
MASSSNYDGILLGMGNPLLDISAVVDDEFLTKYDIKLNNAILAEDKHLPMYDEMSSKFNVEYIAGGATQNSIKVAQWMLQIPGATSYMGSIGKDKYGEAMKKDATAAGVNVHYYEDESAPTGTCGVCVVGGERSLIANLSAANCYKVDHLKKPENWALVEKAKFYYIAGFFLTVSPESIQLVSEHAAANNKVFTMNLSAPFICEFFKDVQEKFLPYMDFVFGNETEARTFSRVHGWETEDVEQIAIKISQLPKATGTYKRTTVITQGADPVVVAEDGKVKKYPVIPLPKEKLVDTNGAGDAFVGGFMSQLVKEKSIEECVKAGCYASNVVIQRSGCTYPEKPDFN

SEQ ID NO: 1792 - DNA, 1175 bp, Physcomitrella patens
  CDS (49)..(1080)
cgcgctagatccctcgctcttattcgaccacgcattctctctctcgcaatggcgtccgagggtgtgcttttgggcatgggaaaccccctgctcgacatctcctgcgtggtcgacgacgcattcctcgagaagtacgggctgacgctaaacaacgctattcttgctgaggacaagcaccttcccatgtacaaggaactggctgccaatcccgatgtagagtacattgcaggaggtgctactcagaacaccatcaggattgcccagtggatgctaggtgaatcgaacgcaactagctactttggctgtgttggcaaggatgagtatggcgaccgtatgttcaagctcgcctctgagggaggtgtcaatatccgatacgatgtggacgaggatcttcccactggaacatgcggcgtgctcgtggtgaagggagagaggtccttggtagccaatctttcagccgccaacaaatacaagatcgaccacttgaagaagccagaaaactgggctttcgtggagaaggcaaagtacatctacagcgccggtttcttcctgactgtttcaccggaatctatgatgaccgtggccaaacatgctgccgagaccggaaaatactacatgatcaacttagccgctccgttcatctgccagttctttaaggaccctcttatggagcttttcccttacgtggatttcattttcggcaacgagagcgaggccagagcatttgcgcaagttcaaggctgggagacagaggacaccaaggtgatagccgtaaagttggctgcgttaccgaaagctggcggcacccacaagcgtgtcgctgtcatcacccagggaactgaccccacaattgttgctgaagatggaaaggtgactgaattccccgtcacccctattcctaaggagaagttggtcgacactaatgcagctggtgactcttttgtcggagggttcttgtctcagctggtgttgggtaaagacatcgcacagtgcgtcagagcaggaaactacgcagccagcgtcatcatccagcgctctggatgcactttcccttccaaaccatccttcgaaagtcagtagaaaattgttagggtaggggtgaggaaatttgccgccccttttttttgtcacagcatctatcatgcaatacaactgggttgccatatcaaaaaaaa

SEQ ID NO: 1793 - protein, 343 aa, Physcomitrella patens
MASEGVLLGMGNPLLDISCVVDDAFLEKYGLTLNNAILAEDKHLPMYKELAANPDVEYIAGGATQNTIRIAQWMLGESNATSYFGCVGKDEYGDRMFKLASEGGVNIRYDVDEDLPTGTCGVLVVKGERSLVANLSAANKYKIDHLKKPENWAFVEKAKYIYSAGFFLTVSPESMMTVAKHAAETGKYYMINLAAPFICQFFKDPLMELFPYVDFIFGNESEARAFAQVQGWETEDTKVIAVKLAALPKAGGTHKRVAVITQGTDPTIVAEDGKVTEFPVTPIPKEKLVDTNAAGDSFVGGFLSQLVLGKDIAQCVRAGNYAASVIIQRSGCTFPSKPSFESQ

SEQ ID NO: 1794 - DNA, 1212 bp, Schizophyllum commune
  CDS (30)..(1064)
cacgctccttccgcccctcacaccgcacgatgtcgtcctacaagctcttctgcatggggaacccgctcctcgacctccaggtccgcgacggggagaagctcttggagaagtacggcctgaagtcgaacgatgcgattttggcagaggagaagcatctgctgctgtacgacgagatcgtaaaggagcacgaggtcacgtacgtcgctggcggtgcggcgcagaacgcggcgcgtggggctgcgtactgcctgcccccgaagtctgtggtgtacacgggctgcgttggcgatgacgatcttgcggagcagctcaaggcggcgaacaagcgtgaggggctcgatgaggcgtacctcgtgaagaaaggcgagaagacgggcgcatgcgcggttattatcactggccacgatcgctccctcgtcaccaccctccgtgcggcggagaagttcgagcagtcgcacctttcgtccgaggcggttgcgccgctcgtcgacgccgtccagttctactacatggagggctacttcgtgacccacggcctcgcctccgcgctcgagctcgcgggcaagtcggccgccaagtccaagtgcttcgtcctcaacttctccgcgcccttcatcccccagttcttcatgcccgcgatccagcaactcctcccctacgtcgacatcgtcatcgcgaacgagtccgaggcggaggcctgggcgtctgcgagcgggcaccccgcgccgaccgacctcgccgccgtcgccaagtcgctcgcaatgcagccgaagacgaacccggcccgcccgcgcgttgtcatcttcacgcacggtgcggaggaaaccgtcgtggtgaactccgcggagccgggccgcgtgcgcacgtttaaggtcgacaagctcgcggagggcgaaatcgtcgacaccaacggtgctggtgacgccttcgcgggcggcttcctgggtgcgctcgttgctggccgcgagctcgacgactctgtcgaggcgggccacaagcttgcgaagattagcatccagcagatcggcccgcagttcaagtggccgaaggtccagatcctctagataactcacgtacttacccagcattgataccaaaacgctctcaacagcgtccccacctgtactctcatctgcaacttgctttcctcagcgtgtacccaatagtattgttttgcaatgtgcttccgctaaaaaaaaaaaaaaaaaaaaa

SEQ ID NO: 1795 - protein, 344 aa, Schizophyllum commune
MSSYKLFCMGNPLLDLQVRDGEKLLEKYGLKSNDAILAEEKHLLLYDEIVKEHEVTYVAGGAAQNAARGAAYCLPPKSVVYTGCVGDDDLAEQLKAANKREGLDEAYLVKKGEKTGACAVIITGHDRSLVTTLRAAEKFEQSHLSSEAVAPLVDAVQFYYMEGYFVTHGLASALELAGKSAAKSKCFVLNFSAPFIPQFFMPAIQQLLPYVDIVIANESEAEAWASASGHPAPTDLAAVAKSLAMQPKTNPARPRVVIFTHGAEETVVVNSAEPGRVRTFKVDKLAEGEIVDTNGAGDAFAGGFLGALVAGRELDDSVEAGHKLAKISIQQIGPQFKWPKVQIL

SEQ ID NO: 1796 - DNA, 1023 bp, Schizosaccharomyces pombe
  CDS (1)..(1023)
atgtcttcatacatcttgtttggtttggaaaaccctctgttggattactatgttggtggtgaaactgcaactcttgaaaagtatggcttgaagagcaacgacgccgtcttagcttctgagagccagatgggtatctacaaggagccatgcgttagctacagtgccggtggtgcagctcaaaacagctgccgtgctgctcaatacgtacttcctcctaactctactgttttcgccggctgcgttggtcaagataagtttgctgatatgcttcttgaatcgaacgaaaaagctggattacgatctgagttttctgttgatcccactacacctactggtgtttgtgctgtcgtcttgagcaacaacaataaaaatcgctccctttgtaccaacttgggagctgctaacaactacaagctcaaggacttgcaacagccgaatgtatggaagttcgttgaggaagcaaaggttatttacgtcggtggttttcacttgaccgtcagtcccgaatccatgttatgtttagctcaacatgctaatgagaataacaagccctatatcatgaatcttagcgctcctttcctctctcaatttttcaaggagcaaatggattccgttatcccatattgtgattatgttattggcaacgaagctgaaatccttagctacggggagaatcatggaatcaaaagtaccgacgtccaggagattgcgctggccttgtcttctgttgagaaggttaacaagaaacgcacccgtgttgttgtcattactcaaggagccgatgccacgatcgttgctaaagacggtaaagtaaccacttacaagcccaaccgcgtcccatctgaggaaatcgtcgataccaatggtgccggagatgcctttgctggtggatttattgctgctctttctcaaggccaaggaatcgattatgctgttactctcggtcattggcttggacaagaatgcatcaaggttagcggcactactcttcctcttcccaaaaagcagttccctttaccttag

SEQ ID NO: 1797 - protein, 340 aa, Schizosaccharomyces pombe
MSSYILFGLENPLLDYYVGGETATLEKYGLKSNDAVLASESQMGIYKEPCVSYSAGGAAQNSCRAAQYVLPPNSTVFAGCVGQDKFADMLLESNEKAGLRSEFSVDPTTPTGVCAVVLSNNNKNRSLCTNLGAANNYKLKDLQQPNVWKFVEEAKVIYVGGFHLTVSPESMLCLAQHANENNKPYIMNLSAPFLSQFFKEQMDSVIPYCDYVIGNEAEILSYGENHGIKSTDVQEIALALSSVEKVNKKRTRVVVITQGADATIVAKDGKVTTYKPNRVPSEEIVDTNGAGDAFAGGFIAALSQGQGIDYAVTLGHWLGQECIKVSGTTLPLPKKQFPLP

SEQ ID NO: 1798 - DNA, 1023 bp, Saccharomyces cerevisiae
  CDS (1)..(1023)
atgaccgcaccattggtagtattgggtaacccacttttagatttccaagccgacgtcacggctgaatacctggccaagtattctctaaaggaaaacgacgcaattttggtcgatgccaaatcaggcgatgctaagatggctatttttgacgagctcttacagatgccagaaacaaagcttgttgcaggtggtgctgctcaaaacactgctagaggggcagcatacgttttgggcgccggccaggtggtgtacttcggttccgtcggtaaggacaagttcagcgagagattgcttaacgaaaacgaaaaagctggtgtcaagtctatgtaccaagttcaaaatgatattggtaccggtaagtgtgccgcattaatcactggccataaccggtccttggtcactgacttgggtgctgccaatttctttactccagaccacttggacaagcattgggacttggtcgaagcagctaagctcttctacatcggtggtttccacttgaccgtgtctccagacgctatcgttaagttgggccaacatgctaaagagaacagcaaacctttcgtgttgaactttagtgctcctttcattcctcatgtcttcaaagacgcattggccagagttttgccttatgctaccgtcatcatcgctaacgaatcggaggccgaagccttttgcgacgccttccaattagactgtgccaacactgatttggaagctattgctcaaagaattgtcaaggactctccagttgaaaagactgtcatcttcacccacggtgtcgaaccaacagtggtcgtgtcctccaagggtaccagcacatatccagtcaaacctttggactcttctaagatcgtcgacaccaacggtgctggtgacgccttcgctggtggctttatggctgggttgactaaaggtgaagatttggaaacctctattgacatgggtcaatggctagctgctttgtctattcaagaagttggtccctcttacccttccgaaaaaatatcttactctaaatag

SEQ ID NO: 1799 - protein, 340 aa, Saccharomyces cerevisiae
MTAPLVVLGNPLLDFQADVTAEYLAKYSLKENDAILVDAKSGDAKMAIFDELLQMPETKLVAGGAAQNTARGAAYVLGAGQVVYFGSVGKDKFSERLLNENEKAGVKSMYQVQNDIGTGKCAALITGHNRSLVTDLGAANFFTPDHLDKHWDLVEAAKLFYIGGFHLTVSPDAIVKLGQHAKENSKPFVLNFSAPFIPHVFKDALARVLPYATVIIANESEAEAFCDAFQLDCANTDLEAIAQRIVKDSPVEKTVIFTHGVEPTVVVSSKGTSTYPVKPLDSSKIVDTNGAGDAFAGGFMAGLTKGEDLETSIDMGQWLAALSIQEVGPSYPSEKISYSK

SEQ ID NO: 1800 - DNA, 1029 bp, Zea mays
  CDS (1)..(1029)
atggcggcgagcgagggcgtgctcctggggatgggcaaccccctcctcgacatctccgccgttgtcgatgacgccttcctggcaaagtatgacatcaagctgaacaatgccattctcgctgaggagaagcactcgcctatgtatgatgagttggctagcaacagcaatgttgaatatattgctggaggagccacccagaactctatcagggttgcccaatggatgcttcaaactcctggtgcaacaagttacatgggatgcattgggaaggacaagtttggtgaggagatgaagaaaaatgctcaagctgcaggagttactgctcattactatgaggatgagactgctcctactggcacatgtgctgtatgtgttgttggtggcgaaaggtcattgattgcaaatctgtcggcggcaaactgttacaaatctgagcatctcaagagaccagagaactgggcactagttgagaaggcaaaatacatctacattgctggatttttcctcacggtgtcacctgattctatccagttagttgctgagcatgctgcggcaaataacaaggtgttcctgatgaacctctctgctcccttcatctgtgagtttttctatgatgcccaagagaaggtcctcccgtatgctgacttcatcttcggcaatgaaaccgaggcaaaaatcttcgccaaagttcgaggatgggagactgagaatgtcgaggagattgctttgaagatctctcagcttcctttggcttcaggcaagcaaaagaggattgctgtgattactcaaggtgctgatccagtggttgttgctgaggacgggaaggtgaaaacgttccctgtgatcctattgcccaaggagaagcttgttgacaccaacggcgcaggtgacgctttcgtcggaggctttctctctcggctggtccagggcaagagcatcgaggactgcgtgacggctggttgctacgccgccaatgttgtcatccagcgcccaggctgtacctacccagagaagcctgacttcaactag

SEQ ID NO: 1801 - protein, 342 aa, Zea mays
MAASEGVLLGMGNPLLDISAVVDDAFLAKYDIKLNNAILAEEKHSPMYDELASNSNVEYIAGGATQNSIRVAQWMLQTPGATSYMGCIGKDKFGEEMKKNAQAAGVTAHYYEDETAPTGTCAVCVVGGERSLIANLSAANCYKSEHLKRPENWALVEKAKYIYIAGFFLTVSPDSIQLVAEHAAANNKVFLMNLSAPFICEFFYDAQEKVLPYADFIFGNETEAKIFAKVRGWETENVEEIALKISQLPLASGKQKRIAVITQGADPVVVAEDGKVKTFPVILLPKEKLVDTNGAGDAFVGGFLSRLVQGKSIEDCVTAGCYAANVVIQRPGCTYPEKPDFN

SEQ ID NO: 1802 - DNA, 1035 bp, Brassica napus
  CDS (1)..(1035)
atgtcatcctctaactacgatggaatccttctcggaatgggcaacccactcctcgacatctattcccgggtcgacgaggactttctcaccaaatacgacgtcaagctgaacaatgcgattctcgccgaggaaaaacatttgcccatgtatgatgagatgagtagcaagttcaatgttgaatacattgccggaggtgctactcagaactctatcaaagtggctcagtggatgcttcaaattcctggggcaaccagttacatgggttccattggaaaggacaaatacggtgaggctatgaagaaggatgctacagctgctggtgtcaatgttcactactatgaggatgagtcagcacctactggaacttgcggtgtctgtgttgttggtggagagaggtcgcttattgccaatctttcagctgctaactgctacaaggttgagcaccttaagaagcctgaaaactgggcattggttgagaaggccaagttctactacattgctggattcttcctgacggtatctcctgaatccattcagttggtatctgagcacgctgctgctaacaacaaggtgttcacaatgaacctctctgctccattcatctgtgaattcttcaaagatgcgcaggagaagttcttgccgtacatggactttgtttttggcaatgagacagaggcaagaaccttctccaaggttcatggctgggagaccgaagatgtggaacaaatagccatcaagatttcacagcttcccaaggccacaggaacgtacaagaggaccaccgtgattacacagggggcagacccagtggtcgttgctgaagatggaaaggtgacgaaataccctgtgatccctctcccaaaggagaagcttgttgacaccaacggtgcaggtgatgcatttgtgggaggattcatgtcacagttggtgaaagagaaatcgattgaggagtgcgtgaaggcaggatgctacgcatcgaacgtggtgatccaaagatctggctgcacttaccctgagaagccagacttcaactaa

SEQ ID NO: 1803 - protein, 344 aa, Brassica napus
MSSSNYDGILLGMGNPLLDIYSRVDEDFLTKYDVKLNNAILAEEKHLPMYDEMSSKFNVEYIAGGATQNSIKVAQWMLQIPGATSYMGSIGKDKYGEAMKKDATAAGVNVHYYEDESAPTGTCGVCVVGGERSLIANLSAANCYKVEHLKKPENWALVEKAKFYYIAGFFLTVSPESIQLVSEHAAANNKVFTMNLSAPFICEFFKDAQEKFLPYMDFVFGNETEARTFSKVHGWETEDVEQIAIKISQLPKATGTYKRTTVITQGADPVVVAEDGKVTKYPVIPLPKEKLVDTNGAGDAFVGGFMSQLVKEKSIEECVKAGCYASNVVIQRSGCTYPEKPDFN

SEQ ID NO: 1804 - DNA, 1026 bp, Glycine max
  CDS (1)..(1026)
atggagttggacggcgttctcctcggcatgtgcaaccctctcctcgacatctctgccgtcgtcgacgacgctttcttgcaaaaatacggtatcaagttgaacgatgcgattctcgctgaggataagcacaaacctatgtatgaagaattggctaacaatcctaatgtggagtacattgctggaggtgctactcagaattcaatcagggttgctcagtggatgcttcaagcaccaggtgccacaagttacataggttgcataggaaaggacaaatttggagaggagatgaagaagaaatgtacacttgatggtgtaaaggttaactattatgaaatcgacaatacacctactggaacttgtgctgtttgtgtggttggcggtgaaaggtcccttgttgccaacttatcagctgcaaattgctataagtctgagcatttgacgagaccggaaaattgggcattagttgaaaaggccaagtattactacatttctggctttttcctcactgtatctcctgattccatacaattggttgctgaacatgcagctgcaaataacaagatcttcatgatgaacctttctgctccctttatatgtgagttctttaagggtgcactggacaaagttctgccatatatggattatgtttttggaaatgaaactgaagcaagaacattttctaaagctcaaggctgggagactgataatgttgaagaaatagctttaaagatttctcaattgccaaaagcatcagaaaaacataaaaggattactgttatcacccaaggtgcagatcctgtttgtgtcacggaggatggaaaagtaaaattgtatcctgtgatactattacctaaagagaaattaattgatacaaatggagcaggagatgcttttgtgggaggatttctttcgcaattggttaagcagaagcccattgaagaatgtgtgagagctgggtgttatgcagccaatgttatcatccaaaggcctggctgcacatacccagagaagcctgattttcattaa

SEQ ID NO: 1805 - protein, 341 aa, Glycine max
MELDGVLLGMCNPLLDISAVVDDAFLQKYGIKLNDAILAEDKHKPMYEELANNPNVEYIAGGATQNSIRVAQWMLQAPGATSYIGCIGKDKFGEEMKKKCTLDGVKVNYYEIDNTPTGTCAVCVVGGERSLVANLSAANCYKSEHLTRPENWALVEKAKYYYISGFFLTVSPDSIQLVAEHAAANNKIFMMNLSAPFICEFFKGALDKVLPYMDYVFGNETEARTFSKAQGWETDNVEEIALKISQLPKASEKHKRITVITQGADPVCVTEDGKVKLYPVILLPKEKLIDTNGAGDAFVGGFLSQLVKQKPIEECVRAGCYAANVIIQRPGCTYPEKPDFH

SEQ ID NO: 1806 - DNA, 1029 bp, Zea mays
  CDS (1)..(1029)
atggcggcgagcgagggcgtgctcctggggatgggcaaccccctcctcgacatctccgccgttgtcgatgacgccttcctggcaaagtatgacatcaagctgaacaatgccattctcgctgaggagaagcactcgcctatgtatgatgagttggctagcaacagcaatgttgaatatattgctggaggagccacccagaactctatcagggttgcccaatggatgcttcaaactcctggtgcaacaagttacatgggatgcattgggaaggacaagtttggtgaggagatgaagaaaaatgctcaagctgcaggagttactgctcattactatgaggatgagactgctcctactggcacatgtgctgtatgtgttgttggtggcgaaaggtcattgattgcaaatctgtcggcggcaaactgttacaaatctgagcatctcaagagaccagagaactgggcactagttgagaaggcaaaatacatctacattgctggatttttcctcacggtgtcacctgattctatccagttagttgctgagcatgctgcggcaaataacaaggtgttcctgatgaacctctctgctcccttcatctgtgagtttttctatgatgcccaagagaaggtcctcccgtatgctgacttcatcttcggcaatgaaaccgaggcaaaaatcttcgccaaagttcgaggatgggagacagagaatgtcgaggagattgctttgaagatctctcagcttcctttggcttcaggcaagcaaaagaggactgctgtgattactcaaggcgctgatccagtggttgttgctgaggacgggaaggtgaaaacgttccctgtgatcctattgcccaaggagaagcttgttgacaccaacggcgcaggtgacgctttcgtcggaggctttctctctcggctggtccagggcaagagcatcgaggactgcgtgacggctggttgctacgccgccaatgttgtcatccagcgcccaggctgtacctacccagagaagcctgacttcaactag

SEQ ID NO: 1807 - protein, 342 aa, Zea mays
MAASEGVLLGMGNPLLDISAVVDDAFLAKYDIKLNNAILAEEKHSPMYDELASNSNVEYIAGGATQNSIRVAQWMLQTPGATSYMGCIGKDKFGEEMKKNAQAAGVTAHYYEDETAPTGTCAVCVVGGERSLIANLSAANCYKSEHLKRPENWALVEKAKYIYIAGFFLTVSPDSIQLVAEHAAANNKVFLMNLSAPFICEFFYDAQEKVLPYADFIFGNETEAKIFAKVRGWETENVEEIALKISQLPLASGKQKRTAVITQGADPVVVAEDGKVKTFPVILLPKEKLVDTNGAGDAFVGGFLSRLVQGKSIEDCVTAGCYAANVVIQRPGCTYPEKPDFN

SEQ ID NO: 1808 - DNA, 22 bp, Artificial sequence
  primer
atggcttcctctgatttcgatg

SEQ ID NO: 1809 - DNA, 23 bp, Artificial sequence
  primer
ttagttgaagtctggtttctcag

SEQ ID NO: 1810 - protein, 434 aa, Artificial sequence
  consensus sequence
  Variant (2)..(4): Xaa in position 2 to 4 is any amino acid
  Variant (11)..(19): Xaa in position 11 to 19 is any amino acid
  Variant (20)..(22): Xaa in position 20 to 22 is any or no amino acid
  Variant (24)..(24): Xaa in position 24 is any amino acid
  Variant (26)..(51): Xaa in position 26 to 51 is any amino acid
  Variant (53)..(58): Xaa in position 53 to 58 is any amino acid
  Variant (60)..(60): Xaa in position 60 is any amino acid
  Variant (62)..(78): Xaa in position 62 to 78 is any amino acid
  Variant (79)..(86): Xaa in position 79 to 86 is any or no amino acid
  Variant (88)..(88): Xaa in position 88 is any amino acid
  Variant (91)..(92): Xaa in position 91 to 92 is any amino acid
  Variant (95)..(96): Xaa in position 95 to 96 is any amino acid
  Variant (98)..(98): Xaa in position 98 is any amino acid
  Variant (101)..(102): Xaa in position 101 to 102 is any amino acid
  Variant (104)..(110): Xaa in position 104 to 110 is any amino acid
  Variant (111)..(115): Xaa in position 111 to 115 is any or no amino acid
  Variant (117)..(118): Xaa in position 117 to 118 is any amino acid
  Variant (120)..(120): Xaa in position 120 is any amino acid
  Variant (122)..(134): Xaa in position 122 to 134 is any amino acid
  Variant (136)..(137): Xaa in position 136 to 137 is any amino acid
  Variant (138)..(152): Xaa in position 138 to 152 is any or no amino acid
  Variant (154)..(159): Xaa in position 154 to 159 is any amino acid
  Variant (160)..(163): Xaa in position 160 to 163 is any or no amino acid
  Variant (166)..(166): Xaa in position 166 is any amino acid
  Variant (168)..(175): Xaa in position 168 to 175 is any amino acid
  Variant (176)..(177): Xaa in position 176 to 177 is any or no amino acid
  Variant (181)..(183): Xaa in position 181 to 183 is any amino acid
  Variant (185)..(185): Xaa in position 185 is any amino acid
  Variant (188)..(194): Xaa in position 188 to 194 is any amino acid
  Variant (196)..(204): Xaa in position 196 to 204 is any amino acid
  Variant (205)..(224): Xaa in position 205 to 224 is any or no amino acid
  Variant (226)..(227): Xaa in position 226 to 227 is any amino acid
  Variant (228)..(228): Xaa in position 228 is any or no amino acid
  Variant (230)..(231): Xaa in position 230 to 231 is any amino acid
  Variant (234)..(235): Xaa in position 234 to 235 is any amino acid
  Variant (238)..(240): Xaa in position 238 to 240 is any amino acid
  Variant (241)..(243): Xaa in position 241 to 243 is any or no amino acid
  Variant (245)..(250): Xaa in position 245 to 250 is any amino acid
  Variant (252)..(260): Xaa in position 252 to 260 is any amino acid
  Variant (267)..(279): Xaa in position 267 to 279 is any amino acid
  Variant (280)..(281): Xaa in position 280 to 281 is any or no amino acid
  Variant (284)..(284): Xaa in position 284 is any amino acid
  Variant (286)..(289): Xaa in position 286 to 289 is any amino acid
  Variant (292)..(292): Xaa in position 292 is any amino acid
  Variant (295)..(301): Xaa in position 295 to 301 is any amino acid
  Variant (302)..(313): Xaa in position 302 to 313 is any or no amino acid
  Variant (316)..(319): Xaa in position 316 to 319 is any amino acid
  Variant (320)..(337): Xaa in position 320 to 337 is any or no amino acid
  Variant (339)..(342): Xaa in position 339 to 342 is any amino acid
  Variant (344)..(344): Xaa in position 344 is any amino acid
  Variant (346)..(359): Xaa in position 346 to 359 is any amino acid
  Variant (360)..(367): Xaa in position 360 to 367 is any or no amino acid
  Variant (369)..(376): Xaa in position 369 to 376 is any amino acid
  Variant (377)..(377): Xaa in position 377 is any or no amino acid
  Variant (387)..(388): Xaa in position 387 to 388 is any amino acid
  Variant (391)..(406): Xaa in position 391 to 406 is any amino acid
  Variant (407)..(408): Xaa in position 407 to 408 is any or no amino acid
  Variant (410)..(415): Xaa in position 410 to 415 is any amino acid
  Variant (416)..(429): Xaa in position 416 to 429 is any or no amino acid
  Variant (431)..(433): Xaa in position 431 to 433 is any amino acid
LXXXGNPLLDXXXXXXXXXXXXLXKXXXXXXXXXXXXXXXXXXXXXXXXXXYXXXXXXAXLXXXXXXXXXXXXXXXXXXXXXXXXXAXGGXXQNXXRXAQXXLXXXXXXXXXXXXGXXGXDXXXXXXXXXXXXXGXXXXXXXXXXXXXXXXXYXXXXXXXXXXTGXCXXXXXXXXXXRSLXXXLXAAXXXXXXXLXXXXXXXXXXXXXXXXXXXXXXXXXXXXXAXXXYXXGFXXTVXXXXXXIXXXXXXAXXXXXXXXXNLSAPFXXXXXXXXXXXXXXXPYXDXXXXNEXEAXXXXXXXXXXXXXXXXXXXIAXXXXXXXXXXXXXXXXXXXXXXRXXXXTXGXXXXXXXXXXXXXXXXXXXXXXVXXXXXXXXXDTNGAGDAFXXGFXXXXXXXXXXXXXXXXXXGXXXXXXXXXXXXXXXXXXXXIXXXG

SEQ ID NO: 1811 - protein, 16 aa, Artificial sequence
  protein pattern
  Variant (10)..(10): Xaa in position 10 is any amino acid
  Variant (11)..(11): Xaa in position 11 is any or no amino acid
  Variant (13)..(15): Xaa in position 13 to 15 is any amino acid
  Variant (16)..(16): Xaa in position 16 is Ala, Gly, Gln or Ser
DTNGAGDAFXXGXXXX

SEQ ID NO: 1812 - protein, 16 aa, Artificial sequence
  protein pattern
  Variant (4)..(4): Xaa in position 4 is Ala, Cys or Ser
  Variant (5)..(5): Xaa in position 5 is Ala, Gly, Thr or Val
  Variant (8)..(8): Xaa in position 8 is Ala, Ser or Thr
  Variant (9)..(9): Xaa in position 9 is any amino acid
  Variant (10)..(10): Xaa in position 10 is Lys or Arg
  Variant (11)..(12): Xaa in position 11 to 12 is any amino acid
  Variant (13)..(13): Xaa in position 13 is Ala or Gln
  Variant (14)..(14): Xaa in position 14 is Trp or Tyr
  Variant (15)..(15): Xaa in position 15 is any amino acid
AGGXXQNXXXXXXXXL

SEQ ID NO: 1813 - protein, 16 aa, Artificial sequence
  protein pattern
  Variant (2)..(2): Xaa in position 2 is any amino acid
  Variant (3)..(3): Xaa in position 3 is Ala or Thr
  Variant (4)..(4): Xaa in position 4 is Ala, Asp, Asn or Thr
  Variant (6)..(6): Xaa in position 6 is any amino acid
  Variant (9)..(9): Xaa in position 9 is Glu, Asn, Gln, Ser or Thr
  Variant (10)..(10): Xaa in position 10 is any amino acid
  Variant (11)..(11): Xaa in position 11 is Phe or Tyr
  Variant (12)..(15): Xaa in position 12 to 15 is any amino acid
  Variant (16)..(16): Xaa in position 16 is Phe, Ile or Leu
LXXXLXAAXXXXXXXX

SEQ ID NO: 1814 - protein, 17 aa, Artificial sequence
  protein pattern
  Variant (2)..(2): Xaa in position 2 is Phe or Tyr
  Variant (3)..(3): Xaa in position 3 is any amino acid
  Variant (4)..(4): Xaa in position 4 is Asp or Thr
  Variant (5)..(6): Xaa in position 5 to 6 is any amino acid
  Variant (7)..(7): Xaa in position 7 is Phe, Ile or Val
  Variant (8)..(8): Xaa in position 8 is Ala, Cys or Gly
  Variant (11)..(11): Xaa in position 11 is Ala, Ser, Thr or Val
  Variant (13)..(13): Xaa in position 13 is Ala or Ile
  Variant (14)..(15): Xaa in position 14 to 15 is any amino acid
  Variant (16)..(16): Xaa in position 16 is Phe, Trp or Tyr
  Variant (17)..(17): Xaa in position 17 is Ala, Cys, Gly or Ser
PXXXXXXXNEXEXXXXX

SEQ ID NO: 1815 - DNA, 1290 bp, Arabidopsis thaliana
  CDS (1)..(1290)
atggaatcacttccccagccgcaaaaccaatcatctccggcaacaactccggcgaagatcctccttgggaaatacgaactcggtcgtcgtctcggtagcggaagcttcgcgaaagtccatttagctcgatcaatcgaatccgacgagctcgtcgccgttaaaatcatcgagaagaagaaaacaatcgaatccggtatggaaccaagaataatcagagagatcgatgcgatgcgtcgtcttcgtcatcatccaaacatactcaagatccatgaagttatggcaaccaaatctaagatctatctcgtaatggaactcgcttccggtggtgaacttttctcaaaagtcctccgtcgtggacgtcttcctgaatcaacggcgcgtcgttactttcaacaactcgcctccgctcttcgtttctctcaccaagacggtgtcgctcaccgtgatgtgaaacctcagaatctactcttagatgagcaaggtaacctcaaggtctctgactttggtttatcagctttaccggagcatctacaaaacggattgcttcacacggcgtgtggtactccggcttatacagctccggaggttatttcacggaggggatacgacggagcaaaagctgatgcgtggtcttgtggtgtgattttgtttgttttattggttggcgatgttccatttgatgattcgaatatcgctgcgatgtatcggaagattcatcggagagattatcggtttccgagctggatttcgaaacaagctaaatcgataatctatcagatgttagatccgaatccagtaacgaggatgagtattgaaacagtgatgaaaacgaattggttcaagaagtctctagagacttctgagtttcatcgtaacgtctttgattcggaagtagagatgaaatcgagtgttaattcgattactgcttttgatttgatctcgttatcgtcgggattagatctttctggattgtttgaggctaagaagaagaaggagaggagattcacggcgaaggtttcgggtgttgaagtggaggagaaggcgaagatgattggggagaagttaggttatgtagtgaagaagaagatgatgaagaaggaaggagaagtgaaggttgttggattagggagaggaagaactgtgattgtggtggaagcagtggagttaacggtggatgttgtggtggttgaagtgaaagttgttgaaggtgaagaagatgattcacggtggtctgatttgattactgagcttgaagatatagttctttcatggcacaatgacatcatgtaa

SEQ ID NO: 1816 - protein, 429 aa, Arabidopsis thaliana
MESLPQPQNQSSPATTPAKILLGKYELGRRLGSGSFAKVHLARSIESDELVAVKIIEKKKTIESGMEPRIIREIDAMRRLRHHPNILKIHEVMATKSKIYLVMELASGGELFSKVLRRGRLPESTARRYFQQLASALRFSHQDGVAHRDVKPQNLLLDEQGNLKVSDFGLSALPEHLQNGLLHTACGTPAYTAPEVISRRGYDGAKADAWSCGVILFVLLVGDVPFDDSNIAAMYRKIHRRDYRFPSWISKQAKSIIYQMLDPNPVTRMSIETVMKTNWFKKSLETSEFHRNVFDSEVEMKSSVNSITAFDLISLSSGLDLSGLFEAKKKKERRFTAKVSGVEVEEKAKMIGEKLGYVVKKKMMKKEGEVKVVGLGRGRTVIVVEAVELTVDVVVVEVKVVEGEEDDSRWSDLITELEDIVLSWHNDIM

SEQ ID NO: 1817 - DNA, 1618 bp, Glycine max
  CDS (78)..(1373)
gctcgaggacggcgggccgggaactctctgtgtccgttggctggcattgttgcgattcatttccatttcccacaacaatggaagcatcgccgccgccgtcaccgtcgccgtcaccacggaccaccatcctggccaagtaccagctcacgcgtttcctcggccgcggcaacttcgctaaggtctaccaggcgcgctccctcctcgacggcgccacggtagccgtgaaggccatcgacaagtccaagacggtggacgccgccatggagccccgcatcgtgcgtgagatcgacgccatgcgccgcctccaccaccaccccaacatcctcaaaatccacgaggtcctcgccaccaagaccaagatctacctcatcgtcgacttcgccggtggcggcgagctcttctccaagctcacccgccgcggccgcctcccggagcccctcgcccgccgctacttcgcgcagctcgtctccgctctccgcttctgccaccgccatggcgtcgcccaccgagacctcaagccacagaacctcctcctcgacgccgccggcaacctcaaggtctccgacttcggcctctccgccctcccggaacacctccacgacggtctcctccacaccgcctgcggcacgccggccttcaccgcgccagagatcctccgccgcgtcggctacgacggctcaaaagccgacgcctggtcctgcggcgtcatcctctacaacctcctcgccggccacctccccttcgacgactccaacatccccgccatgtgccggcgcatctcccgccgcgactaccagttcccggcatggatctcgaaatccgcacggagcctcatttaccaattgctcgacccaaaccctataacacgaatttcgttagaaaaagtttgcgataacaataaatggttcaagaataattcaatggtggaagtgaaagagagtgtttgggagtctgatttgtataacaagtgctgcgacggtggttataaatcggggatgaacgcatttgacataatatcgatgtcgtcggggttggatttgcgagggttgttcgaaacgacgtcgcagaaggggagaaggagggagaagaggttcacttcggataaaaaagtggaaacagtggaagcgaaggtgaaggaagttggagagaaattagggtttaggattgagatagggaagaacggtgctattgggttgggaaaggggaaggtgggtgttgtggttgaggtgtttgagattgtggctgacttgttgcttgtggcggtcaaagtggtggatggtgggctggagtttgaggagcttcattgggatgattggagaattggccttcaagatcttgttctctcatggcatgatgttggattggagctttagagaatacagtctaaggttttgtacagatggtcctagtagtcctttatgtttatgtgtttggttccttttgaatcagtaaaacagttttatgtcctctttttgttcatatttatatttatactagcctctgtgtgtgagagaatgagaaggaagaagccaattcttaactcgttaagaatgaataagatgtttcataatgaaaaaattagtaattggtttgatgaacaaaaaaaaaaaaaaaaata

SEQ ID NO: 1818 - protein, 431 aa, Glycine max
MEASPPPSPSPSPRTTILAKYQLTRFLGRGNFAKVYQARSLLDGATVAVKAIDKSKTVDAAMEPRIVREIDAMRRLHHHPNILKIHEVLATKTKIYLIVDFAGGGELFSKLTRRGRLPEPLARRYFAQLVSALRFCHRHGVAHRDLKPQNLLLDAAGNLKVSDFGLSALPEHLHDGLLHTACGTPAFTAPEILRRVGYDGSKADAWSCGVILYNLLAGHLPFDDSNIPAMCRRISRRDYQFPAWISKSARSLIYQLLDPNPITRISLEKVCDNNKWFKNNSMVEVKESVWESDLYNKCCDGGYKSGMNAFDIISMSSGLDLRGLFETTSQKGRRREKRFTSDKKVETVEAKVKEVGEKLGFRIEIGKNGAIGLGKGKVGVVVEVFEIVADLLLVAVKVVDGGLEFEELHWDDWRIGLQDLVLSWHDVGLEL

SEQ ID NO: 1819 - DNA, 1698 bp, Glycine max
  CDS (34)..(1347)
ggtccggactttcagtcgttccacggttaaatcatggaaccgccattgcagcaaaaatcgccgcaaccgccaccacgaaccgccaccatcctcgggaagtaccagctgacgcgcttcctcggccgcggaagcttcgccaaggtctaccaggggagatccctcgtcgacggttccgccgtcgccgtgaaaataatcgacaaatcgaaaaccgtggacgccggcatggagccacgtataatccgcgagatcgacgccatgcgccgcctccaccaccaccctaacatcctcaaaatccacgaggtgctcgccaccaaaaccaagatccacctcgtcgtggagctcgccgccggcggcgagctcttcgccaaaatctcccgccgcggaaagctaccggagtccaccgcgcgccgctacttccagcagctcgtctcggcgctccggttctgccaccgcaacggcgtggcgcaccgcgacctgaagccgcagaacctcctcctcgacggcgacggaaacctcaaggtctccgacttcgggctctccgcactgccggagcagctcaagaacggcctcctccacaccgcctgcggcacgccggcgtacaccgcgccggagatactccgccggagcggcggctacgacgggtccaaggccgacgcctggtcctgcggcctcatcctcttcgtcttccttgccggacacctcccgttcgacgacaccaacattccggcgatgtgcaaaaaaatttcccgacgagattaccagttcccggagtggatttcaaaaccagcccgttttgttatccacaaattactcgacccgaatccggaaacccgaattagcctggagtccctgtttgggaacgcgtggtttaagaaatcactaaacccggaaacggcggaagaaaacgcgttggggctgagttatgtgaagagtagttataattacgaagggagtaaaaaaagttcgggagtgacagcgtttgacataatatcgatgtcttcgggtttggatttgacgaggttgttcgaaacgacgtcggatttggggagtaaaagagagaagaggtttagttcgagtgcgagagttgaggtggtggaagagaaagttaaggaagtgggtggggtattggggtttaagattgaggttgggaagagtaacggtgcaattgctttggtgaaagggaaggtggctttggtgtttgaggtgcttgagattgtgcctcatgaacttctttttgtggcggttaaggtggtggagggtgcgttggagtttgaggaacatcattggggggattggaaagatgcgttgcaagatctcgtgctctcttggcacaaccaagaatcgtgatcatcagttaatgataggtatagttagttcttctcaagtgaaggatctacatgaggtttgatgttgaaggactaattgcagaacatgacatgcacactcacatcgtgctcgtcctgatgagaagaaacaaacaaggttgatgatgcttgttttgtgatttgattttgattttgtgttgaagcttagttataggtgtattaatttatatatgatggtttgaaaaataaaagttgttgttatgtatacatgagaatggtggctaaatgtattcaattctccgtttttgagttcatagaaaaaaattgtgtttccggggggaggaaagggggaaaactaattatggacccctcc

SEQ ID NO: 1820 - protein, 437 aa, Glycine max
MEPPLQQKSPQPPPRTATILGKYQLTRFLGRGSFAKVYQGRSLVDGSAVAVKIIDKSKTVDAGMEPRIIREIDAMRRLHHHPNILKIHEVLATKTKIHLVVELAAGGELFAKISRRGKLPESTARRYFQQLVSALRFCHRNGVAHRDLKPQNLLLDGDGNLKVSDFGLSALPEQLKNGLLHTACGTPAYTAPEILRRSGGYDGSKADAWSCGLILFVFLAGHLPFDDTNIPAMCKKISRRDYQFPEWISKPARFVIHKLLDPNPETRISLESLFGNAWFKKSLNPETAEENALGLSYVKSSYNYEGSKKSSGVTAFDIISMSSGLDLTRLFETTSDLGSKREKRFSSSARVEVVEEKVKEVGGVLGFKIEVGKSNGAIALVKGKVALVFEVLEIVPHELLFVAVKVVEGALEFEEHHWGDWKDALQDLVLSWHNQES

SEQ ID NO: 1821 - DNA, 1449 bp, Arabidopsis thaliana
  CDS (1)..(1449)
atggcttctcgaacaacgccttcacgatcgactccttcacgatcaacgccttctggtagttcttctggtggtaggacacgagttggtaagtatgagcttggacgaactttgggtgaaggaactttcgctaaggtcaaattcgctagaaatgttgagaatggtgataatgtcgctattaaggttattgataaagagaaagttctgaaaaataagatgatcgctcagatcaagcgtgagatttcgacgatgaaattgatcaagcacccgaatgtcattcgtatgtttgaggtgatggctagcaaaactaagatctacttcgttttggaattcgtcactggtggggagcttttcgataaaatttcaagcaatgggagattgaaggaagatgaggcgaggaagtatttccaacagctgattaatgcggttgattattgtcatagcaggggagtttatcatagagaccttaagccagaaaatttgcttttggatgctaatggtgctttgaaagtgtctgactttggattgagcgctctacctcagcaagttcgagaggatgggttacttcacacaacctgtggaacacccaattatgttgctccggaggtaatcaacaacaaaggttatgatggagcgaaggctgatttgtggtcttgtggagtaattctctttgttttaatggctggttatttaccttttgaagattctaacctgacgtcgttatataaaaagatattcaaagcagaatttacttgccctccctggttctctgcaagtgctaagaagttaatcaaaagaattctggatcccaatccagcaacgaggattacatttgctgaggtcattgaaaatgagtggtttaaaaaagggtataaagcacctaaatttgagaatgctgatgtcagccttgatgatgttgatgcaatctttgatgactcaggggagtctaagaatcttgttgtggagaggcgagaagaaggactcaaaacaccagtaacgatgaatgcttttgagctcatctcgacatcccagggtctcaatctcggttcacttttcgaaaaacaaatggggctggtgaaacgaaaaactcgatttacttccaaatcttcggctaatgagatagttacaaaaattgaggctgcggcagcacctatggggtttgatgtcaagacaaataactacaagatgaagctgacaggagagaaatcaggccgcaagggtcagttggcagttgccactgaggtttttcaagttgctccatctctttacatggttgaaatgcgaaaatcagggggtgacacattggaattccacaagttttacaagaaccttaccacgggacttaaggacattgtttggaaaaccatcgacgaagagaaagaggaaggaaccgatggtggtggtactaatggtgccatggctaaccggacaattgcaaaacagtcgacataa

SEQ ID NO: 1822 - protein, 482 aa, Arabidopsis thaliana
MASRTTPSRSTPSRSTPSGSSSGGRTRVGKYELGRTLGEGTFAKVKFARNVENGDNVAIKVIDKEKVLKNKMIAQIKREISTMKLIKHPNVIRMFEVMASKTKIYFVLEFVTGGELFDKISSNGRLKEDEARKYFQQLINAVDYCHSRGVYHRDLKPENLLLDANGALKVSDFGLSALPQQVREDGLLHTTCGTPNYVAPEVINNKGYDGAKADLWSCGVILFVLMAGYLPFEDSNLTSLYKKIFKAEFTCPPWFSASAKKLIKRILDPNPATRITFAEVIENEWFKKGYKAPKFENADVSLDDVDAIFDDSGESKNLVVERREEGLKTPVTMNAFELISTSQGLNLGSLFEKQMGLVKRKTRFTSKSSANEIVTKIEAAAAPMGFDVKTNNYKMKLTGEKSGRKGQLAVATEVFQVAPSLYMVEMRKSGGDTLEFHKFYKNLTTGLKDIVWKTIDEEKEEGTDGGGTNGAMANRTIAKQST

SEQ ID NO: 1823 - DNA, 1278 bp, Arabidopsis thaliana
  CDS (1)..(1278)
atgaatcggagacagcaagtgaaacgtagagtaggtaaatatgaagttggaagaacaattggagaaggaacgtttgctaaagttaagtttgctagaaactctgaaactggagaacctgttgctctcaagattcttgataaagagaaagttctcaagcataaaatggctgaacagattagaagagagatagctactatgaagttgataaaacatccaaatgttgttcaattatatgaggtgatggcaagtaagacgaaaatatttatcatcttggagtatgttacaggaggagaactctttgataagattgtaaatgatgggcggatgaaagaagatgaggcgcggagatatttccaacagcttatacatgctgtggactactgtcatagcagaggggtctaccatagagacctcaagcctgaaaatttactattggactcctatggaaacctcaagatctcagattttggattaagtgctttgtcccaacaagtcagggatgatggactcttgcatacatcgtgtggaacaccaaactacgttgctcctgaggttctcaatgatagaggctatgatggagcaacagctgacatgtggtcatgcggtgttgtactctatgtcctgcttgcaggttacttaccttttgatgattctaatctaatgaatctttataaaaaaatatcatctggtgaattcaactgtcctccgtggctctcactcggtgccatgaaactcatcactagaatcttagatccgaatccgatgactcgtgtaacaccgcaagaggttttcgaagatgaatggttcaagaaagattacaagccacctgttttcgaggagagggatgattcaaacatggacgatattgatgctgttttcaaggactctgaggaacatcttgttactgagaagagagaagaacagccagcggcgatcaatgccttcgagatcatttcaatgtcaaggggacttaacctagagaatctgtttgatccagaacaggaatttaagagggaaacaaggataacattgagaggaggcgcgaatgagatcatcgagaagatagaagaagctgcaaagcctctcggtttcgatgttcaaaagaagaactacaagatgaggcttgagaatgtgaaggctggaagaaaggggaatctcaatgtagcgacagaggtatgttatatgagactggacattcaagaaagtgttggtgatggtttattgaatcagtgtgttttttgtttgtatggtgtgacaacaagcagatattccaagtag

SEQ ID NO: 1824 - protein, 425 aa, Arabidopsis thaliana
MNRRQQVKRRVGKYEVGRTIGEGTFAKVKFARNSETGEPVALKILDKEKVLKHKMAEQIRREIATMKLIKHPNVVQLYEVMASKTKIFIILEYVTGGELFDKIVNDGRMKEDEARRYFQQLIHAVDYCHSRGVYHRDLKPENLLLDSYGNLKISDFGLSALSQQVRDDGLLHTSCGTPNYVAPEVLNDRGYDGATADMWSCGVVLYVLLAGYLPFDDSNLMNLYKKISSGEFNCPPWLSLGAMKLITRILDPNPMTRVTPQEVFEDEWFKKDYKPPVFEERDDSNMDDIDAVFKDSEEHLVTEKREEQPAAINAFEIISMSRGLNLENLFDPEQEFKRETRITLRGGANEIIEKIEEAAKPLGFDVQKKNYKMRLENVKAGRKGNLNVATEVCYMRLDIQESVGDGLLNQCVFCLYGVTTSRYSK

SEQ ID NO: 1825 - DNA, 1629 bp, Oryza sativa (japonica cultivar-group)
  CDS (1)..(1629)
atggcggaggcggaggcggaggcggcgggggcgggggcgggggcggggccggcgaggaggacgacgagggtggggcgctacgagctcggcaagacgatcggggaggggagcttcgccaaggtcaaggtcgcccgcgacacgcgcaccggcgacaccctcgccatcaaggtgctcgaccgcaaccatgtgcttcgccacaagatggtcgagcagatcaaacgggagatttccacaatgaagctaataaaacatccaaatgtggtccagttgcatgaggtcatggctagcaaatcaaagatatacatggttcttgaatatgttgatggaggcgagctttttgataagattgtcaattctgggagactaggagaagatgaagcaagaagatacttccatcaacttataaatgcagtagattattgccacagcagaggagtgtaccatagagatctgaagccagagaatctgcttcttgattcacatggagctcttaaagtttcagattttggccttagtgcgtttgctccacaaacaaaagaggatggacttctgcatactgcttgcggaacaccaaattatgttgcacctgaggtgcttgctgataaaggttatgatggtatggctgctgatgtatggtcctgcggcataatcttatttgtcctcatggctggatatttacctttcgatgaccccaacctaatgaccctttacaaactgatctgcaaggcaaaagtttcttgtccacattggttttcttcaggtgcgaagaagttcattaagcgcatacttgatcctaatccctgcacaagaataacaattgcacaaattttggaagatgattggttcaaaaaggattacaaaccaccactttttgagcaaggtgaagatgtgagccttgatgatgttgatgctgcattcgattgttcagaggagaatctcgtggcagagaagagagaaaagcctgaatccatgaatgcatttgctctaatttcaaggtcacagggattcaaccttggaaatttatttgagaaggaaatgatgggaatggtgaagcgggaaacttccttcacatctcaatgtacaccacaggagatcatgtctaaaatagaggaagcttgtggacctcttggtttcaatgtgcggaaacaaaattataagatgaagttaaaaggtgataagactggaagaaaaggctatttatctgtagcaacggaggttttcgaggttgctccatcactccacatggttgagcttcgtaaaactggaggggacacgctggagtttcacaatttctacaacaatttctcgtcagagttaaaagacatagtgtggaaatctgaatctgacgcaaaagcagcaaagaagagggagtacaaaaatgcagagtcatatgacatagactcgtgctggagaaaacaaagatgggatgcaaaatggatctgcaaatgcaaatgggaattgggacatcacaaccacagctgctgccaatattcttctgctagttttttcgtcatgttggaaatgaaaatctacccaccttttgaagccccggtgattctgccgtctttctttgcctcctcagtcctcagtgctagtataatctatggtcatggtgtgcggtatttttaa

SEQ ID NO: 1826 - protein, 542 aa, Oryza sativa (japonica cultivar-group)
MAEAEAEAAGAGAGAGPARRTTRVGRYELGKTIGEGSFAKVKVARDTRTGDTLAIKVLDRNHVLRHKMVEQIKREISTMKLIKHPNVVQLHEVMASKSKIYMVLEYVDGGELFDKIVNSGRLGEDEARRYFHQLINAVDYCHSRGVYHRDLKPENLLLDSHGALKVSDFGLSAFAPQTKEDGLLHTACGTPNYVAPEVLADKGYDGMAADVWSCGIILFVLMAGYLPFDDPNLMTLYKLICKAKVSCPHWFSSGAKKFIKRILDPNPCTRITIAQILEDDWFKKDYKPPLFEQGEDVSLDDVDAAFDCSEENLVAEKREKPESMNAFALISRSQGFNLGNLFEKEMMGMVKRETSFTSQCTPQEIMSKIEEACGPLGFNVRKQNYKMKLKGDKTGRKGYLSVATEVFEVAPSLHMVELRKTGGDTLEFHNFYNNFSSELKDIVWKSESDAKAAKKREYKNAESYDIDSCWRKQRWDAKWICKCKWELGHHNHSCCQYSSASFFVMLEMKIYPPFEAPVILPSFFASSVLSASIIYGHGVRYF

SEQ ID NO: 1827 - DNA, 1344 bp, Oryza sativa (japonica cultivar-group)
  CDS (1)..(1344)
atggctgccatggacgcgaggaagaagaagagcggcggcggcggcggcgagccgcttctcggcaagtatgagcttgggcggatgcttgggcgagggacgttcgccaaggtgtacctggcgcgcgcggtggccggcggcgaggcggtggcggtgaaggtgatcgacaaggcggaggtgatgggcacggcgggcatggcgccgcgcgtgctccgggaggtggcggcgatgcggcggctgcgccacccgcacgtgctgcgcctccacgaggtgctcgccacgcgcgccaggatctacctcgtcatggagctcgccaccggcggcgacctcctgtcgaggctggcggcgctgccgcggcggcgcctgcccgagagcgcggcgcgccgggtgttcgtccagctcgtcgacgcgctgtcctactgccacgcgcgcggcgtggcgcaccgtgacgtgaagccgcagaacgtcctcctcgacggcgacggcaacctcaaggtctccgacttcggcctcgccgcgctcccgggacacgctccgcgacgacggccgcctccacaccgcgtgcggcacgccggcgtgctccgccgcagggcctacgacggcgccaaggccgacgcgtggtcgtgcggcgtcatcctcttcgtcctcctcgccggccacctccccttcgacgactccaacatcgccgacatgtgccggaaggcgcaccgccgcgagtacgagctcccgcggtgggtgtcccagccggcgcgccgcctggtgagccgcctgctcgacccgaacccggacacccgcgtcgccgtcgagtcgctggcggcgcaccacccgtggttcaagcgctcgctcagcgtcgactcccagctcgacggcctcctcaacggcgagccagagcgcgccgtggcgttccaggcggcgccgccgccgccgctgaacgcgttcgacatcatctccatgtctcccgggctcgacctgtccgggctgttcggcgaacacgacaagagcctaagggagaagcggttcacgacgacggcgtcgccggagaagacgctggagcagctcggcctcgccggcgggaagctcgggtacgtggtggtggtggggaagaaaggggtggagtgcttgccgctggcgggggggcggctgtcgtcggggatcgccgcgatgtcggtggagatgtcggaggtggcgccgccgctgttgctcgtcgagctgaggctggaggtcgccgccggcgacgtcgacggcggcgacggcgaggtgaaggggtttgggtgggagcagctgagaatggagctaggtgatgtagttagggcttggcatagttgtgaggatttgtgtgaaatttag

SEQ ID NO: 1828 - protein, 447 aa, Oryza sativa (japonica cultivar-group)
MAAMDARKKKSGGGGGEPLLGKYELGRMLGRGTFAKVYLARAVAGGEAVAVKVIDKAEVMGTAGMAPRVLREVAAMRRLRHPHVLRLHEVLATRARIYLVMELATGGDLLSRLAALPRRRLPESAARRVFVQLVDALSYCHARGVAHRDVKPQNVLLDGDGNLKVSDFGLAALPGHAPRRRPPPHRVRHAGVLRRRAYDGAKADAWSCGVILFVLLAGHLPFDDSNIADMCRKAHRREYELPRWVSQPARRLVSRLLDPNPDTRVAVESLAAHHPWFKRSLSVDSQLDGLLNGEPERAVAFQAAPPPPLNAFDIISMSPGLDLSGLFGEHDKSLREKRFTTTASPEKTLEQLGLAGGKLGYVVVVGKKGVECLPLAGGRLSSGIAAMSVEMSEVAPPLLLVELRLEVAAGDVDGGDGEVKGFGWEQLRMELGDVVRAWHSCEDLCEI

SEQ ID NO: 1829 - DNA, 1251 bp, Arabidopsis thaliana
  CDS (1)..(1251)
atggtggtaaggaaggtgggcaagtatgaattaggtagaacaatcggcgaaggtactttcgctaaagtcaagttcgctcagaatacagagaccggtgagagcgtcgccatgaaaatcgtggatcgtagcacaatcatcaagcgcaagatggtggatcagattaagagagagatctcgattatgaagcttgttcgtcatccttgtgttgttcgtctttatgaggttctagcaagccgtacaaagatttatatcatcctggagtacattactggtggtgaactgtttgataagattgttcgtaatggacgacttagtgagtcagaagctaggaaatactttcaccagcttattgatggagttgattactgtcatagtaaaggtgtttaccacagagatctaaagccggaaaatcttctgttggattctcaaggaaatctcaagatatctgattttggcctcagtgcattacctgaacaaggagttaccatcctaaagacaacatgtggaactcccaattacgttgctcctgaggttctcagtcacaagggttacaatggtgccgttgcagatatttggtcctgtggggtcatcctttatgttcttatggcaggatatcttccatttgatgaaatggatctaccaactttatatagtaagatcgacaaagctgagttctcttgcccctcatattttgccctgggggcaaagtccttgattaatagaattttggatccaaatccagaaactcggattacaattgcagaaatcaggaaagatgagtggtttctaaaggattacactcctgtacaacttatcgattacgaacatgtaaacctggatgatgtatatgctgcttttgatgatccggaggaacaaacatatgcacaggatggaacaagagacacaggtccactaactctaaatgcgtttgacctaattattctatctcagggcctgaacctcgcaactctttttgaccgtggaaaggactccatgaagcaccagacaaggttcatctcacacaagccagcaaacgtggttctctcaagcatggaagttgtgtcacagtctatgggctttaagacacacattcgtaattacaagatgagagtggaaggattatctgcaaataagacatctcatttctccgtcatactagaacaggagacgcagaagaataccttaagttctacaagactttttgtagtaagcttgatgacatcatttggaagccgccagatgcatctatga

SEQ ID NO: 1830 - protein, 416 aa, Arabidopsis thaliana
MVVRKVGKYELGRTIGEGTFAKVKFAQNTETGESVAMKIVDRSTIIKRKMVDQIKREISIMKLVRHPCVVRLYEVLASRTKIYIILEYITGGELFDKIVRNGRLSESEARKYFHQLIDGVDYCHSKGVYHRDLKPENLLLDSQGNLKISDFGLSALPEQGVTILKTTCGTPNYVAPEVLSHKGYNGAVADIWSCGVILYVLMAGYLPFDEMDLPTLYSKIDKAEFSCPSYFALGAKSLINRILDPNPETRITIAEIRKDEWFLKDYTPVQLIDYEHVNLDDVYAAFDDPEEQTYAQDGTRDTGPLTLNAFDLIILSQGLNLATLFDRGKDSMKHQTRFISHKPANVVLSSMEVVSQSMGFKTHIRNYKMRVEGLSANKTSHFSVILEQETQKNTLSSTRLFVVSLMTSFGSRQMHL

SEQ ID NO: 1831 - DNA, 1344 bp, Arabidopsis thaliana
  CDS (1)..(1344)
atgagtggaagcagaaggaaggcgacgccggcgagtaggacgcgagtagggaattacgagatgggacgaactctcggagaaggaagcttcgctaaggtgaaatacgccaagaacaccgtcaccggagatcaagccgctatcaaaatcctcgaccgagaaaaggtcttccgtcacaaaatggtcgaacagcttaaaagagaaatatctacaatgaaactgattaaacatccaaatgtggttgaaatcattgaggttatggcgagcaaaacgaagatctatatcgttcttgagcttgtcaatggaggtgaactctttgataaaatcgcgcaacaagggaggcttaaggaggatgaagctcggagatattttcagcagctcatcaatgctgtggattactgccacagtcgaggtgtctaccacagagatctcaagcctgaaaatctgatccttgacgcaaatggggttttgaaagtctctgattttgggttaagcgccttctcacgacaagttcgggaagatggtttgcttcatacagcttgtggaacgccaaactacgttgcccctgaggttttgtcggacaaaggctatgacggtgcagcagcagatgtctggtcttgtggtgtcattctctttgtgcttatggctggttacttgccttttgatgagccgaatctcatgacattatacaaacgtatatgcaaggctgagtttagctgcccaccatggttctcgcaaggtgccaagagagtcatcaagcgtattctcgaacccaaccctattaccagaataagtattgcagagttgctcgaagatgaatggttcaagaaagggtacaagccgccatcatttgaccaagatgacgaggacataaccatagatgatgttgatgctgcttttagtaactccaaggaatgtcttgtaactgagaagaaggagaaacctgtatccatgaacgctttcgaacttatctctagctcaagcgagttcagtcttgaaaacttgttcgagaagcaagcgcaacttgtgaagaaagaaacgcggtttacttctcaacgatctgcgagtgaaataatgtcgaaaatggaagaaaccgcaaagccattaggctttaatgtccgtaaagacaactacaagataaaaatgaaaggagacaaaagtggtcgtaaaggtcagctctccgtagctacagaggtgtttgaagtggcgccatcattgcatgtggtagagcttaggaaaaccggtggtgataccctcgagtttcacaagttctacaaaaacttctcatctggattaaaggatgtagtctggaatactgatgcagccgctgaagaacaaaagcaataa

SEQ ID NO: 1832 - protein, 447 aa, Arabidopsis thaliana
MSGSRRKATPASRTRVGNYEMGRTLGEGSFAKVKYAKNTVTGDQAAIKILDREKVFRHKMVEQLKREISTMKLIKHPNVVEIIEVMASKTKIYIVLELVNGGELFDKIAQQGRLKEDEARRYFQQLINAVDYCHSRGVYHRDLKPENLILDANGVLKVSDFGLSAFSRQVREDGLLHTACGTPNYVAPEVLSDKGYDGAAADVWSCGVILFVLMAGYLPFDEPNLMTLYKRICKAEFSCPPWFSQGAKRVIKRILEPNPITRISIAELLEDEWFKKGYKPPSFDQDDEDITIDDVDAAFSNSKECLVTEKKEKPVSMNAFELISSSSEFSLENLFEKQAQLVKKETRFTSQRSASEIMSKMEETAKPLGFNVRKDNYKIKMKGDKSGRKGQLSVATEVFEVAPSLHVVELRKTGGDTLEFHKFYKNFSSGLKDVVWNTDAAAEEQKQ

SEQ ID NO: 1833 - DNA, 1563 bp, Arabidopsis thaliana
  CDS (1)..(1563)
atggctcaagccttggctcaaccaccactggtggtcaccaccgtcgtcccagacccgccgccgccgccaccaccaccgcacccaaagccgtatgctctacgatacatggcggatcttcttggccggattggtataatggatacagacaaagatggtaacatcagcccacagagtccgaggagtcctaggagcccaagaaacaacattctcatggggaagtacgagcttgggaagcttctcggccacggaacctttgcaaaggtttatttagctcaaaacatcaaatctggagataaagtcgccattaaagtcatcgacaaggagaagattatgaagagtggtttggttgctcacatcaaacgggaaatctctatcctccgccgtgtccgtcacccttacatcgttcatctattcgaggttatggcgacgaagtccaagatttactttgtgatggagtacgttggaggcggcgagttgttcaacacggttgctaaaggtcgattgcccgaggaaactgctcggagatatttccagcagctgatctcctctgtttcgttctgccatggccgcggtgtttaccaccgtgaccttaaaccagagaatctgcttttagacaacaaagggaaccttaaagtatctgactttggtctcagcgcggtggcagagcagcttcgtcaagacgggctctgccacacgttttgcgggactccagcgtatattgcacccgaggttttgactagaaaagggtacgatgcagcgaaagccgatgtttggtcatgtggagtgatcttattcgtgttgatggctggtcacattccgttctacgacaagaacataatggttatgtacaagaagatttacaaaggggaatttaggtgtcctcgttggttttcatcggatcttgttcggttattgactcggcttcttgatacgaatccggatactcggattacaatacccgagatcatgaagaacagatggttcaagaaaggattcaaacatgttaaattctacatcgaagatgataaactgtgtagggaagatgaagatgaggaggaagaggcatcatcatcaggccgctcttcgacagtttcagagagcgatgcagagttcgatgtaaaacggatgggaataggttcaatgccaagaccctcgagcttaaacgcgtttgacattatatctttctcttcagggtttgatctgtctggtttgtttgaggaagaaggaggagaagggacgaggtttgtgtcaggtgctcctgtttcaaagatcatatcgaagctggaagagattgcgaaaatcgtgagctttactgtgaggaagaaagaatggagtttgagattagaaggttgtagagaaggagcaaaaggaccgttgacaattgcggctgagatatttgagctgactccatctctagtggtggtggaggtgaagaagaaaggaggagacagagaagagtatgaagagttttgcaacaaggaactcagaccagagctggagaaactaatccatgaagaagttgtagtagaagaagcattgtatttgccatctgatactgaatag

SEQ ID NO: 1834 - protein, 520 aa, Arabidopsis thaliana
MAQALAQPPLVVTTVVPDPPPPPPPPHPKPYALRYMADLLGRIGIMDTDKDGNISPQSPRSPRSPRNNILMGKYELGKLLGHGTFAKVYLAQNIKSGDKVAIKVIDKEKIMKSGLVAHIKREISILRRVRHPYIVHLFEVMATKSKIYFVMEYVGGGELFNTVAKGRLPEETARRYFQQLISSVSFCHGRGVYHRDLKPENLLLDNKGNLKVSDFGLSAVAEQLRQDGLCHTFCGTPAYIAPEVLTRKGYDAAKADVWSCGVILFVLMAGHIPFYDKNIMVMYKKIYKGEFRCPRWFSSDLVRLLTRLLDTNPDTRITIPEIMKNRWFKKGFKHVKFYIEDDKLCREDEDEEEEASSSGRSSTVSESDAEFDVKRMGIGSMPRPSSLNAFDIISFSSGFDLSGLFEEEGGEGTRFVSGAPVSKIISKLEEIAKIVSFTVRKKEWSLRLEGCREGAKGPLTIAAEIFELTPSLVVVEVKKKGGDREEYEEFCNKELRPELEKLIHEEVVVEEALYLPSDTE

SEQ ID NO: 1835 - DNA, 1299 bp, Arabidopsis thaliana
  CDS (1)..(1299)
atggtgataaagggaatgcgtgttggtaagtacgagcttgggaggacactcggagagggaaattccgcaaaagttaaatttgctatagatactcttaccggcgaatcattcgccatcaaaatcatcgagaagtcgtgtatcacacgtcttaacgtctcttttcagattaagagagagattcgaacactcaaagttttgaagcatccaaacattgtccgattacatgaggtcttggctagcaaaaccaagatttacatggttctggaatgtgtcactggaggagacttatttgacagaattgtctcgaaaggaaagctttcggaaacacaaggacgaaaaatgtttcagcagttgattgatggagtcagctattgtcataacaagggcgtttttcacagggatctcaagctagagaatgttcttcttgatgcaaagggtcacattaagatcactgattttggccttagtgctctgtctcaacattatagggaagatgggttgctacatacaacttgtggtagtcctaactatgtcgcgcctgaggttctagctaatgagggctatgatggtgcagcatcagatatatggtcatgtggagtaatcttgtatgttattcttacgggatgtctcccttttgatgatgcaaaccttgcagttatttgccggaagatattcaaaggggatcccccaatacctagatggatatcactgggagctaaaactatgatcaagagaatgcttgatcctaatccagtcacgagggtgacaatcgcaggtataaaggctcatgattggtttaaacatgactacactccttcaaactacgatgacgacgatgatgtatacttgatccaagaagatgtttttatgatgaaggaatatgaagaagagaagagccctgattctccaaccattatcaacgcttttcagttgattggaatgtcctcgtttctcgacctctcaggtttctttgagacagagaaattatcagagaggcagataagattcacgtcaaatagtttagctaaagatttgttggagaacatcgaaacgattttcacggagatgggcttttgtttacagaagaaacatgcaaagttaaaagcaatcaaagaagaaagcactcaaaaaaggcaatgcggtttatcggtaacggctgaggttttcgagataagtccgtccctgaatgtggttgaactaagaaaatcacatggcgattcgtctctatataaacagttgtacgagcgattattgaatgagctgggctcatcatcacaagtacaggagcttttagcgtag

SEQ ID NO: 1836 - protein, 432 aa, Arabidopsis thaliana
MVIKGMRVGKYELGRTLGEGNSAKVKFAIDTLTGESFAIKIIEKSCITRLNVSFQIKREIRTLKVLKHPNIVRLHEVLASKTKIYMVLECVTGGDLFDRIVSKGKLSETQGRKMFQQLIDGVSYCHNKGVFHRDLKLENVLLDAKGHIKITDFGLSALSQHYREDGLLHTTCGSPNYVAPEVLANEGYDGAASDIWSCGVILYVILTGCLPFDDANLAVICRKIFKGDPPIPRWISLGAKTMIKRMLDPNPVTRVTIAGIKAHDWFKHDYTPSNYDDDDDVYLIQEDVFMMKEYEEEKSPDSPTIINAFQLIGMSSFLDLSGFFETEKLSERQIRFTSNSLAKDLLENIETIFTEMGFCLQKKHAKLKAIKEESTQKRQCGLSVTAEVFEISPSLNVVELRKSHGDSSLYKQLYERLLNELGSSSQVQELLA

SEQ ID NO: 1837 - DNA, 1566 bp, Arabidopsis thaliana
  CDS (1)..(1566)
atggggaattgcttagccaagaaatacggattggtgatgaaaccacaacaaaatggtgaaagatcagttgagatcgagaacagaagaaggagcacccaccaagatccgtctaaaatatccaccggaacgaatcaaccaccaccttggcggaatccagcgaaacacagtggtgctgcagctatactcgagaagccgtacgaagacgtgaaactgttctacactttgagcaaagaattgggtcgaggccagtttggagtaacgtatctgtgcacagagaagtcgacggggaagagattcgcttgcaagtcgatttccaagaagaaacttgtgacgaaaggtgataaagaagatatgaggagagagattcagattatgcagcatttgagtggacaacctaacattgttgagtttaaaggagcttatgaagatgagaaagctgtgaatttggttatggagctttgtgctggtggtgaattgttcgataggattttagcaaagggacattacagtgagagagcagctgcttctgtttgtagacagattgttaatgttgtcaatatttgtcatttcatgggtgtgatgcatagagacttaaagcctgagaatttcttgttatctagcaaagatgagaaggctcttatcaaagccactgatttcggattatcagtctttatcgaagaagggagagtgtataaagatatagttgggagtgcatattatgttgctcctgaagttttgaagcggagatatggtaaagaaatcgatatatggagtgctggaattatactatacattctacttagtggtgtgcctccgttttgggctgaaacggagaaagggatatttgatgctatattggaaggtgaaatcgactttgaatcccaaccttggccctcaatttccaatagtgctaaagatttggtacgtagaatgttgacacaagatccgaaaagacggatttctgctgctgaagttcttaagcatccatggctaagagaaggtggagaagcatcggataagcctattgatagtgctgttctctcaaggatgaagcaatttagagcgatgaataaactaaagaaacttgctttaaaggtcattgcggagaacattgacacggaagaaatacaaggcttaaaggcgatgtttgctaatatagatacagacaatagtggtactatcacatacgaagaattgaaagaaggattagccaaactgggatcaagactcactgaagctgaagtgaaacagctcatggatgctgctgacgttgatggaaatgggtcaatagattacattgagtttattactgcaacaatgcatagacataggcttgaaagtaatgagaacgtttacaaagccttccaacattttgacaaagatgggagtggatacattacgacagacgagctagaggctgctttgaaggaatatggaatgggagatgatgctactatcaaagagattttgtctgatgtcgacgctgataatgacggtagaatcaactatgacgagttttgtgctatgatgagaagtgggaatccacaacaaccaagattgttctaa

SEQ ID NO: 1838 - protein, 521 aa, Arabidopsis thaliana
MGNCLAKKYGLVMKPQQNGERSVEIENRRRSTHQDPSKISTGTNQPPPWRNPAKHSGAAAILEKPYEDVKLFYTLSKELGRGQFGVTYLCTEKSTGKRFACKSISKKKLVTKGDKEDMRREIQIMQHLSGQPNIVEFKGAYEDEKAVNLVMELCAGGELFDRILAKGHYSERAAASVCRQIVNVVNICHFMGVMHRDLKPENFLLSSKDEKALIKATDFGLSVFIEEGRVYKDIVGSAYYVAPEVLKRRYGKEIDIWSAGIILYILLSGVPPFWAETEKGIFDAILEGEIDFESQPWPSISNSAKDLVRRMLTQDPKRRISAAEVLKHPWLREGGEASDKPIDSAVLSRMKQFRAMNKLKKLALKVIAENIDTEEIQGLKAMFANIDTDNSGTITYEELKEGLAKLGSRLTEAEVKQLMDAADVDGNGSIDYIEFITATMHRHRLESNENVYKAFQHFDKDGSGYITTDELEAALKEYGMGDDATIKEILSDVDADNDGRINYDEFCAMMRSGNPQQPRLF

SEQ ID NO: 1839 - DNA, 1410 bp, Arabidopsis thaliana
  CDS (1)..(1410)
atggaagaatcaaaccgtagtagtactgtcttgttcgacaaatacaacatcggaagacttctcggaaccggtaacttcgccaaagtgtatcacggaacagagatctccaccggcgatgacgtggcaatcaaagtcatcaaaaaagaccacgttttcaaacgtcgtggcatgatggagcaaatcgaacgagagatcgccgtcatgcgtctcctccgtcatccaaacgtggtcgagctccgcgaagtaatggctacaaagaagaagattttcttcgtcatggagtacgtcaacggcggagagcttttcgaaatgatcgatagagatgggaagctcccggaggatctagccagaaagtatttccaacaattgatatccgcggtggatttttgccacagccgcggtgttttccaccgcgatattaaacccgagaatctgttgcttgacggagaaggtgatcttaaggtaacggatttcggactttccgcattgatgatgccagaagggctaggtggcaggcgtggtagcagcgatgatcttttacatacgcggtgcgggacaccggcttacgtggcgccggaggttttacggaataaaggatacgacggagctatggctgatatttggtcgtgcgggattgttttgtatgcactccttgctggcttcttgccgtttatcgacgaaaacgtcatgacattgtacacgaagatcttcaaggcggaatgcgagttcccaccgtggttttccttagaatccaaggaactactctcaagattgcttgtgccggatcctgaacaaagaatttcaatgtcagagatcaaaatgattccatggttccgaaagaactttacaccatcagtagccttttcgatagacgaaacgatcccatctccaccggagccaccaacaaagaaaaagaagaaagacctaaacgagaaagaagacgacggagcttcaccaagatccttcaacgccttccaattcatcacatcaatgtcttcaggtttcgatctctctaacctattcgagataaaacgaaagccaaagcggatgttcacatcgaagttcccggcgaaatctgttaaagagaggctggagacggcggcgcgtgagatggatatgagagtgaaacatgtaaaagactgcaagatgaagctgcaaagaagaacagaaggtcgtaaaggaaggctctcggtgacggcggaagtattcgaagtcgctcctgaagtctctgtcgtggagttctgcaaaacctcgggggatacgttggagtattacctcttctgtgaggatgacgtcagaccagctcttaaagacattgtatggtcatggcaaggtgatgatgatgaagacgatgttaccactaatgataatgttgacacaaatgataacaaaataaataatgtttcatga

SEQ ID NO: 1840 - protein, 469 aa, Arabidopsis thaliana
MEESNRSSTVLFDKYNIGRLLGTGNFAKVYHGTEISTGDDVAIKVIKKDHVFKRRGMMEQIEREIAVMRLLRHPNVVELREVMATKKKIFFVMEYVNGGELFEMIDRDGKLPEDLARKYFQQLISAVDFCHSRGVFHRDIKPENLLLDGEGDLKVTDFGLSALMMPEGLGGRRGSSDDLLHTRCGTPAYVAPEVLRNKGYDGAMADIWSCGIVLYALLAGFLPFIDENVMTLYTKIFKAECEFPPWFSLESKELLSRLLVPDPEQRISMSEIKMIPWFRKNFTPSVAFSIDETIPSPPEPPTKKKKKDLNEKEDDGASPRSFNAFQFITSMSSGFDLSNLFEIKRKPKRMFTSKFPAKSVKERLETAAREMDMRVKHVKDCKMKLQRRTEGRKGRLSVTAEVFEVAPEVSVVEFCKTSGDTLEYYLFCEDDVRPALKDIVWSWQGDDDEDDVTTNDNVDTNDNKINNVS

SEQ ID NO: 1841 - DNA, 1509 bp, Arabidopsis thaliana
  CDS (1)..(1509)
atggctcaagtactatctacaccgttggccatccccggcccaacgccaatacaattcatggcgggtcttcttgctcgaatcgttacaaaaaatacgaacaaagagaccagtactccagagagcccgaggagtccgcggactccacaaggctctattctcatggacaagtacgaaataggaaagcttcttggccacggaagcttcgctaaggtctatttagcacggaacattcattctggcgaggatgttgccatcaaagtcattgacaaggagaagatagtgaagagtggattggccggtcatattaaacgggagatttcaatcctccgccgtgtccgccacccttacattgtacacctactcgaggttatggctacgaagacaaagatttacattgtgatggagtacgttcgaggcggagagctttataatacggtggctagaggacggcttcgagaaggaaccgcgaggagatatttccagcagttgatctcatccgttgctttctgccacagccgcggtgtttaccaccgcgatctcaagcttgagaatctgcttttggacgacaaggggaacgtgaaagtctctgactttgggctcagcgttgtctcggagcagctcaagcaagaaggaatctgtcaaacgttttgcgggacaccagcttatttggcgcctgaggttttgacaaggaaaggttatgaaggtgcaaaagccgatatttggtcttgtggagtgatcttgtttgtattgatggctggttatcttccatttgatgacaagaacatattggttatgtatacaaagatatataaagggcagtttaagtgtcctaaatggttttctcctgagcttgcaaggcttgtgacccggatgctagacacgaatccagatacccgaatcacaataccggagatcatgaagcatagatggttcaagaaagggttcaaacatgtcaaattctatattgaaaacgataagttatgtagggaggatgatgacaatgatgatgacgattcatcatcattgtcatcaggccgatcatcgactgcttcagaaggagatgcagagtttgatattaaaagggttgattcaatgccgagacccgcgagtctaaacgcatttgacatcttatcgttctcagatctttcgggtttgtttgaagaaggtggacaaggagcaaggtttgtatctgctgctcctatgacaaagatcatatcgaaattggaagagattgccaaagaggtgaaatttatggtgaggaagaaggattggagcgtgaggctagaaggttgtagagaaggagctaaaggaccgttgacaattagagtcgagatctttgagctgacgccatctcttgtggtggttgaagtgaagaagaaaggaggaaatatagaagagtatgaagagttttgcaacaaggaacttagaccacagctggagaaactgatgcattaccaagcagatgaagttgaagaagtaatgtgtttgccacctgaaattgaacagtga

SEQ ID NO: 1842 - protein, 502 aa, Arabidopsis thaliana
MAQVLSTPLAIPGPTPIQFMAGLLARIVTKNTNKETSTPESPRSPRTPQGSILMDKYEIGKLLGHGSFAKVYLARNIHSGEDVAIKVIDKEKIVKSGLAGHIKREISILRRVRHPYIVHLLEVMATKTKIYIVMEYVRGGELYNTVARGRLREGTARRYFQQLISSVAFCHSRGVYHRDLKLENLLLDDKGNVKVSDFGLSVVSEQLKQEGICQTFCGTPAYLAPEVLTRKGYEGAKADIWSCGVILFVLMAGYLPFDDKNILVMYTKIYKGQFKCPKWFSPELARLVTRMLDTNPDTRITIPEIMKHRWFKKGFKHVKFYIENDKLCREDDDNDDDDSSSLSSGRSSTASEGDAEFDIKRVDSMPRPASLNAFDILSFSDLSGLFEEGGQGARFVSAAPMTKIISKLEEIAKEVKFMVRKKDWSVRLEGCREGAKGPLTIRVEIFELTPSLVVVEVKKKGGNIEEYEEFCNKELRPQLEKLMHYQADEVEEVMCLPPEIEQ

SEQ ID NO: 1843 - DNA, 1368 bp, Arabidopsis thaliana
  CDS (1)..(1368)
atgtcttttacaattcctagactgtttctctttactctgtttttttgctctgttttttttgtttgtttgttaatggccgaagactctaattcttccgaatcaatcattgttaacgtcaccggagatgataataagtcggctttgttcggtaagtacgatctcggtaagctcctcggtagcggcgcgtttgccaaagtctaccaagcggaggatcttcaaaacggcggcgaaagcgttgcgatcaaagtcgtacaaaaaaaacgtttgaaagacggtttaacggcgcacgttaagagagaaatatctgtcatgcgccgcctccgtcatcctcatatcgtgctcctctccgaagtcctcgccacaaagacgaagatctacttcgtcatggagctagccaaaggtggtgagctcttctcaagagtcaccagcaaccgtttcacagagagtcttagccggaaatatttccggcaattgatctccgccgtgagatactgccacgcaagaggagttttccaccgtgatttgaagccggagaatctcctcctcgacgagaatcgagatctgaaggtttcagacttcggtctcagtgcgatgaaggagcagatccaccccgacggaatgctacatacgctctgtggaactccggcttacgtagcaccggagcttcttttgaagaaaggctacgacggttctaaagctgatatttggtcatgcggcgtcgttttgtttcttctcaacgcaggctacttgccgtttcgtgatccaaacatcatgggactctaccggaaaatccacaaggctcaatacaagttaccggattggacatcttcagatctgcggaaactcctccgccgtctcttggagccaaatccggaactgcgaatcaccgtggaggagattctaaaggatccgtggttcaatcatggagtagatccaagcgaaatcatcggaatccaagccgatgattacgatctggaagaaaacggtaaaattctaaacgcgttcgatttgatttcttcggcgtcgagctcgaatctctccggtttgtttggaaatttcgtgacgccggatcattgcgaccagtttgtatccgatgagagtacggccgttattatgaggaaggtcgaggaagttgcgaagcagttaaatttgagaatcgcgaagaagaaggagagagcgataaagcttgaaggtccacatggagtagctaatgtcgtcgttaaagttcgccggctaacaaatgaactagtgatggtggagatgaagaacaagcaaagagacgtgggcttggtttgggccgatgctcttagacaaaagttacgtcgtttgattaaccaaccggtttataaagttcctgacaaaccgtaa

SEQ ID NO: 1844 - protein, 455 aa, Arabidopsis thaliana
MSFTIPRLFLFTLFFCSVFFVCLLMAEDSNSSESIIVNVTGDDNKSALFGKYDLGKLLGSGAFAKVYQAEDLQNGGESVAIKVVQKKRLKDGLTAHVKREISVMRRLRHPHIVLLSEVLATKTKIYFVMELAKGGELFSRVTSNRFTESLSRKYFRQLISAVRYCHARGVFHRDLKPENLLLDENRDLKVSDFGLSAMKEQIHPDGMLHTLCGTPAYVAPELLLKKGYDGSKADIWSCGVVLFLLNAGYLPFRDPNIMGLYRKIHKAQYKLPDWTSSDLRKLLRRLLEPNPELRITVEEILKDPWFNHGVDPSEIIGIQADDYDLEENGKILNAFDLISSASSSNLSGLFGNFVTPDHCDQFVSDESTAVIMRKVEEVAKQLNLRIAKKKERAIKLEGPHGVANVVVKVRRLTNELVMVEMKNKQRDVGLVWADALRQKLRRLINQPVYKVPDKP

SEQ ID NO: 1845 - DNA, 1281 bp, Arabidopsis thaliana
  CDS (1)..(1281)
atggaatctccatatccaaaatcaccggaaaaaatcacagggacagttcttctcggaaaatacgaactcggtcgtcgactaggaagcggaagcttcgctaaagtccatgtagctcgttccatctccaccggcgaactcgtagctatcaaaatcatcgacaagcaaaaaaccatagattccggtatggagccgagaataatccgagagatcgaagcgatgcgccgcctccacaaccacccaaacgtcctcaaaatccacgaagtcatggccactaaatccaagatctacctcgtcgtcgaatacgccgccggaggagaactcttcaccaaactcatccgattcggccgccttaacgaatcggcggcgcgtcgttatttccaacaactcgcctccgcgctcagtttctgccaccgcgacggaatcgctcatcgcgacgtgaagccacagaatctcctccttgataagcaaggaaacctcaaggtctccgactttggtctatcggctttaccggagcatcgaagtaataacggattgcttcacacggcatgtggcacaccggcttatacagcaccggaagtaattgctcagagaggttacgacggtgctaaagctgatgcgtggtcgtgtggtgtgtttctctttgttcttcttgctggttacgttcctttcgatgatgccaacattgttgctatgtataggaagattcataaaagagattaccggtttccgagctggatctcgaaaccggctcgatctattatatataagttgcttgatccgaatccggagacgaggatgagtatagaagctgtgatgggaacggtttggtttcaaaaatctctagagatttcggagtttcagtctagtgtgtttgagttggatcggtttcttgagaaagaagcgaagtcgagcaatgcgattactgcgtttgatttgatctcgttgtcatcgggattggatctttcggggttgtttgagaggaggaagaggaaagagaagaggtttacggcgagagtgtcggcggaaagagtggtggagaaggcggggatgataggggaaaagttagggtttagagtggagaagaaggaagagactaaggtggtgggattgggaaaaggaagaactgcggtggtggttgaggtggtggagtttgcggaagggttggttgtggcggatgtgaaggttgtggtggaaggtgaagaggaggaggaggaggtggagtctcattggtcggagctaattgtagagcttgaggagattgtgctctcatggcacaattga

SEQ ID NO: 1846 - protein, 426 aa, Arabidopsis thaliana
MESPYPKSPEKITGTVLLGKYELGRRLGSGSFAKVHVARSISTGELVAIKIIDKQKTIDSGMEPRIIREIEAMRRLHNHPNVLKIHEVMATKSKIYLVVEYAAGGELFTKLIRFGRLNESAARRYFQQLASALSFCHRDGIAHRDVKPQNLLLDKQGNLKVSDFGLSALPEHRSNNGLLHTACGTPAYTAPEVIAQRGYDGAKADAWSCGVFLFVLLAGYVPFDDANIVAMYRKIHKRDYRFPSWISKPARSIIYKLLDPNPETRMSIEAVMGTVWFQKSLEISEFQSSVFELDRFLEKEAKSSNAITAFDLISLSSGLDLSGLFERRKRKEKRFTARVSAERVVEKAGMIGEKLGFRVEKKEETKVVGLGKGRTAVVVEVVEFAEGLVVADVKVVVEGEEEEEEVESHWSELIVELEEIVLSWHN

SEQ ID NO: 1847 - DNA, 1470 bp, Arabidopsis thaliana
  CDS (1)..(1470)
atggcggagaaaatcacgagagagacgtcgttacctaaagagagaagcagcccacaagctctaatcctgggacgatacgaaatgggtaagcttctcggccatggtaccttcgctaaagtttacctcgcacgtaacgtgaaaacaaacgaaagcgtagcaatcaaagtaatcgacaaggagaaagttctcaaaggaggtttaatcgcacacatcaaacgcgagatctcgattcttcgacgtgttcgtcacccaaacatcgttcagctattcgaagtcatggcgacgaaagctaagatctatttcgtgatggagtatgttcgtggaggtgagttattcaataaagtagctaaaggtcgtcttaaagaagaagtagctcgcaaatatttccagcaattgatctctgctgttactttctgtcacgcgagaggtgtttatcatagagatctgaaacctgagaatcttttgttagatgagaatggtaatcttaaagtctctgactttggacttagtgctgtctctgatcagattcgtcaagatgggctttttcatacgttttgtggtactcctgcttatgttgctcctgaggttttagctaggaaaggttatgatgctgctaaagttgatatttggtcttgtggtgttatcttgtttgtgttgatggctggttatttgccgtttcatgatcggaatgttatggctatgtataagaagatttacagaggggagtttaggtgtcctaggtggttttctactgagcttaccaggttgttgtcgaagcttttggagacgaatccggagaaacggttcactttccctgagattatggagaattcttggtttaagaaagggtttaagcatattaagttttatgtggaggatgataagttgtgtaatgttgttgatgatgatgaactggagtctgactcggtggagtcggatagagattccgcggcttctgagtcggagattgagtatttggagcctaggaggagagttggagggttgcctagacctgcgagtttgaatgctttcgatattatatcgttttcgcaaggttttgatttatcgggtttgtttgatgacgatggggagggttctaggtttgtttcgggagctccggtttcgaagattatatcgaagttggaagagattgctaaagttgtgagctttactgtgaggaagaaggattgtagggtaagtcttgaaggttcaagacaaggagtgaaaggtccattgacgattgcagcagagatattcgaattgacaccatcgttggttgttgtggaagtcaagaagaaaggaggagataaaacagagtatgaagatttctgtaacaatgaattgaaacccaagttgcaaaacttgacagctgatgatgtagtagctgagcctgtcgcggtttcagcggttgatgaaaccgctatcccgaattctccaaccatttctttcttgccgtctgacactgaatag

SEQ ID NO: 1848 - protein, 489 aa, Arabidopsis thaliana
MAEKITRETSLPKERSSPQALILGRYEMGKLLGHGTFAKVYLARNVKTNESVAIKVIDKEKVLKGGLIAHIKREISILRRVRHPNIVQLFEVMATKAKIYFVMEYVRGGELFNKVAKGRLKEEVARKYFQQLISAVTFCHARGVYHRDLKPENLLLDENGNLKVSDFGLSAVSDQIRQDGLFHTFCGTPAYVAPEVLARKGYDAAKVDIWSCGVILFVLMAGYLPFHDRNVMAMYKKIYRGEFRCPRWFSTELTRLLSKLLETNPEKRFTFPEIMENSWFKKGFKHIKFYVEDDKLCNVVDDDELESDSVESDRDSAASESEIEYLEPRRRVGGLPRPASLNAFDIISFSQGFDLSGLFDDDGEGSRFVSGAPVSKIISKLEEIAKVVSFTVRKKDCRVSLEGSRQGVKGPLTIAAEIFELTPSLVVVEVKKKGGDKTEYEDFCNNELKPKLQNLTADDVVAEPVAVSAVDETAIPNSPTISFLPSDTE

SEQ ID NO: 1849 - DNA, 1338 bp, Arabidopsis thaliana
  CDS (1)..(1338)
atggtggtaaggaaggtgggcaagtatgaattaggtagaacaatcggcgaaggtactttcgctaaagtcaagttcgctcagaatacagagaccggtgagagcgtcgccatgaaaatcgtggatcgtagcacaatcatcaagcgcaagatggtggatcagattaagagagagatctcgattatgaagcttgttcgtcatccttgtgttgttcgtctttatgaggttctagcaagccgtacaaagatttatatcatcctggagtacattactggtggtgaactgtttgataagattgttcgtaatggacgacttagtgagtcagaagctaggaaatactttcaccagcttattgatggagttgattactgtcatagtaaaggtgtttaccacagagatctaaagccggaaaatcttctgttggattctcaaggaaatctcaagatatctgattttggcctcagtgcattacctgaacaaggagttaccatcctaaagacaacatgtggaactcccaattacgttgctcctgaggttctcagtcacaagggttacaatggtgccgttgcagatatttggtcctgtggggtcatcctttatgttcttatggcaggatatcttccatttgatgaaatggatctaccaactttatatagtaagatcgacaaagctgagttctcttgcccctcatattttgccctgggggcaaagtccttgattaatagaattttggatccaaatccagaaactcggattacaattgcagaaatcaggaaagatgagtggtttctaaaggattacactcctgtacaacttatcgattacgaacatgtaaacctggatgatgtatatgctgcttttgatgatccggaggaacaaacatatgcacaggatggaacaagagacacaggtccactaactctaaatgcgtttgacctaattattctatctcagggcctgaacctcgcaactctttttgaccgtggaaaggactccatgaagcaccagacaaggttcatctcacacaagccagcaaacgtggttctctcaagcatggaagttgtgtcacagtctatgggctttaagacacacattcgtaattacaagatgagagtggaaggattatctgcaaataagacatctcatttctccgtcatactagaagtcttcaaagttgcaccatcaattctcatggtagacattcaaaatgcagcaggagacgcagaagaataccttaagttctacaagactttttgtagtaagcttgatgacatcatttggaagccgccagatgcatctatgagaaatcgagtcaccaaggccaagagtaaaagacgttga

SEQ ID NO: 1850 - protein, 445 aa, Arabidopsis thaliana
MVVRKVGKYELGRTIGEGTFAKVKFAQNTETGESVAMKIVDRSTIIKRKMVDQIKREISIMKLVRHPCVVRLYEVLASRTKIYIILEYITGGELFDKIVRNGRLSESEARKYFHQLIDGVDYCHSKGVYHRDLKPENLLLDSQGNLKISDFGLSALPEQGVTILKTTCGTPNYVAPEVLSHKGYNGAVADIWSCGVILYVLMAGYLPFDEMDLPTLYSKIDKAEFSCPSYFALGAKSLINRILDPNPETRITIAEIRKDEWFLKDYTPVQLIDYEHVNLDDVYAAFDDPEEQTYAQDGTRDTGPLTLNAFDLIILSQGLNLATLFDRGKDSMKHQTRFISHKPANVVLSSMEVVSQSMGFKTHIRNYKMRVEGLSANKTSHFSVILEVFKVAPSILMVDIQNAAGDAEEYLKFYKTFCSKLDDIIWKPPDASMRNRVTKAKSKRR

SEQ ID NO: 1851 - DNA, 1326 bp, Arabidopsis thaliana
  CDS (1)..(1326)
atggtcggagcaaaaccggtggagaatggatctgacggtggtagtagtacggggctgcttcacggccgttacgagctagggcgtcttctaggtcacggaacattcgcgaaggtgtaccacgctcgtaacatacaaaccggaaaaagcgtggcgatgaaagtcgtcggaaaagagaaagtggtgaaagttggtatggttgatcagatcaaacgagagatctctgtgatgaggatggtgaaacatccaaacatcgtcgagcttcacgaagtcatggcgagtaaatccaagatctatttcgccatggagcttgtacgaggcggtgagttattcgctaaggtggctaaaggaagactacgtgaagacgtagctcgtgtttatttccagcaattgatctcagccgttgatttctgtcatagccgtggtgtttatcaccgagatctgaaaccggagaatctcttgttagatgaagaaggtaatctcaaggtgactgattttggtctctctgctttcactgagcatttgaaacaagacggacttcttcatacaacttgtggaactccggcttatgttgcgccggaggttatattgaagaaaggatacgacggagctaaggcggatctgtggtcttgtggtgttatactttttgtgcttcttgctggttatttgccgtttcaagatgataatcttgtgaatatgtataggaagatttacagaggagatttcaaatgtcctggttggctttcttctgatgctagacggcttgtgactaagcttcttgatccgaatccgaatacgaggattactattgagaaggttatggattcgccttggttcaagaaacaagcaacgagatcaagaaacgaaccagtggctgccacaatcacaaccacggaagaggatgttgatttcttggtgcacaagtcgaaggaagagacggagacgttaaacgcgtttcatataatcgcgttatcggaagggtttgatttgtcgccgttgtttgaggagaagaagaaagaggagaaaagagagatgagattcgcgacgtctcggccagcgagtagcgtgatttcgagtttggaagaagcggcgagagttgggaataagtttgatgtgaggaagagtgagagtagagtaaggattgaaggtaaacagaatggtcggaaagggaaattggcggtggaagcggagatattcgcggtggctccgtcgtttgttgtcgtggaagtgaagaaagatcatggagatacgcttgagtacaacaacttctgcagtactgctcttagaccagctctcaaggacattttctggacctctacacctgcttga

SEQ ID NO: 1852 - protein, 441 aa, Arabidopsis thaliana [sequence omitted]

SEQ ID NO: 1853 - DNA, 1329 bp, Arabidopsis thaliana
  CDS (1)..(1329)
atggtagattctgacccggtggaatttccgccggagaaccgccgtggacagctcttcggcaaatacgaggtcggaaaattggtgggatgcggcgccttcgcgaaagtgtaccacgggaggagcacagcgacgggtcagagcgttgcgatcaaagtggtgagcaagcaacggctgcagaaaggaggactcaatggcaacattcagagagagatcgctatcatgcaccgtctgcgccacccttctatcgtgcgcctgttcgaggtcctcgccaccaaatccaagatcttcttcgtcatggaattcgccaagggcggtgagctattcgccaaagtctccaagggcaggttctgcgaggatcttagccgtcgttatttccagcagctcatctccgccgtcggatattgccactcccgcggcatctttcaccgtgatctcaaaccggagaatctcctcctcgacgagaagctcgatttgaagatctctgatttcggactcagcgctcttaccgatcagatccgacccgacggcctcctccacacactctgtggtacgccggcgtacgtggcgcctgaggttttggcgaagaaagggtacgacggtgctaaaatcgacatatggtcatgtggaatcatactgttcgtcctcaacgccggttatctccctttcaacgaccataatctcatggttatgtaccggaaaatctacaagggagaatttcgcattcccaagtggacctcaccggatctccggcgactgctgactcggcttttagacacgaatccgcagacgaggatcactatcgaagagatcatccacgatccatggttcaaacagggctacgacgatcggatgtctaaattccatctagaggactccgatatgaaactcccggcggacgagaccgacagcgagatgggagcaaggaggatgaacgcattcgacatcatctcaggatctccagggttcaatctctccggtcttttcggagacgccagaaagtacgaccgagtggaacggttcgtgtcggcgtggacggcggagagggtggtggagaggctggaggagatcgtgtcggcggagaatctgacggtggcgaagaaggaaacatgggggatgaagatcgaggggcaaaaaggtaacttcgcaatggtggttgagataaaccagctaacggacgagctggttatgatagaggtgaggaagagacaaagagccgctgcatctggacgagatttatggacagatacactcaggcctttcttcgtcgagcttgtgcacgaatcagaccaaacggacccagaaccaactcaagtacatacgacgtcgtag

SEQ ID NO: 1854 - protein, 442 aa, Arabidopsis thaliana
MVDSDPVEFPPENRRGQLFGKYEVGKLVGCGAFAKVYHGRSTATGQSVAIKVVSKQRLQKGGLNGNIQREIAIMHRLRHPSIVRLFEVLATKSKIFFVMEFAKGGELFAKVSKGRFCEDLSRRYFQQLISAVGYCHSRGIFHRDLKPENLLLDEKLDLKISDFGLSALTDQIRPDGLLHTLCGTPAYVAPEVLAKKGYDGAKIDIWSCGIILFVLNAGYLPFNDHNLMVMYRKIYKGEFRIPKWTSPDLRRLLTRLLDTNPQTRITIEEIIHDPWFKQGYDDRMSKFHLEDSDMKLPADETDSEMGARRMNAFDIISGSPGFNLSGLFGDARKYDRVERFVSAWTAERVVERLEEIVSAENLTVAKKETWGMKIEGQKGNFAMVVEINQLTDELVMIEVRKRQRAAASGRDLWTDTLRPFFVELVHESDQTDPEPTQVHTTS

SEQ ID NO: 1855 - DNA, 1371 bp, Arabidopsis thaliana
  CDS (1)..(1371)
atggagaacaaaccaagtgtattaactgaaagatatgaagttgggaggttattgggtcaaggtacttttgctaaagtgtattttggaaggagtaatcataccaacgagagtgtagctatcaagatgattgacaaggacaaagttatgagagtcgggcttagccagcaaatcaagcgagagatctctgtaatgaggatcgctaaacacccgaatgtcgttgagttatacgaggttatggctacaaagtcaaggatttactttgttattgagtattgtaaaggtggtgagcttttcaacaaggttgcaaaaggaaaacttaaagaagatgttgcttggaagtatttttatcagcttattagtgcggttgatttttgtcacagccgcggagtttatcaccgcgacattaagccggaaaatcttttgttggatgacaatgataatcttaaggtatctgattttggtttaagtgcgcttgctgattgcaagcggcaagatggtcttctacatacaacttgtggtacacctgcttatgttgcgcccgaggttattaaccgaaaaggatacgagggtacgaaagcggatatttggtcttgtggtgttgttttgtttgttcttttggctggttatcttcctttccatgacactaatcttatggagatgtataggaagataggtaaagcagacttcaagtgtcccagctggtttgctcctgaggtaaagagactattgtgtaagatgttggaccctaaccatgagactagaatcactattgcaaaaatcaaggagagttcttggttcagaaagggtttgcatttgaagcaaaaaaagatggaaaagatggagaaacaacaagtcagagaggctactaatcccatggaagctggaggttcaggccaaaatgaaaacggagaaaaccacgagccgcctcgacttgctaccttgaatgctttcgatatcatcgccttgtctacggggtttggtctggcaggactttttggggatgtatatgacaagcgagaatctaggttcgcgtcgcaaaaacctgcttcagagatcatttctaagctagtagaggttgccaagtgcctgaagctgaagataagaaagcaaggcgcaggcttgttcaaactggaaagagtaaaggaaggaaaaaacggaattttgacgatggatgcagagatattccaagtgacgccgacgtttcacctggtggaagtgaagaaatgtaatggagatacaatggagtatcagaagttagtggaggaggatcttaggcctgctttggcagatattgtttgggtttggcaaggcgagaaggagaaagaggagcagttactgcaggatgaacaaggagagcaagaaccatcatag

SEQ ID NO: 1856 - protein, 456 aa, Arabidopsis thaliana
MENKPSVLTERYEVGRLLGQGTFAKVYFGRSNHTNESVAIKMIDKDKVMRVGLSQQIKREISVMRIAKHPNVVELYEVMATKSRIYFVIEYCKGGELFNKVAKGKLKEDVAWKYFYQLISAVDFCHSRGVYHRDIKPENLLLDDNDNLKVSDFGLSALADCKRQDGLLHTTCGTPAYVAPEVINRKGYEGTKADIWSCGVVLFVLLAGYLPFHDTNLMEMYRKIGKADFKCPSWFAPEVKRLLCKMLDPNHETRITIAKIKESSWFRKGLHLKQKKMEKMEKQQVREATNPMEAGGSGQNENGENHEPPRLATLNAFDIIALSTGFGLAGLFGDVYDKRESRFASQKPASEIISKLVEVAKCLKLKIRKQGAGLFKLERVKEGKNGILTMDAEIFQVTPTFHLVEVKKCNGDTMEYQKLVEEDLRPALADIVWVWQGEKEKEEQLLQDEQGEQEPS

SEQ ID NO: 1857 - DNA, 1452 bp, Arabidopsis thaliana
  CDS (1)..(1452)
atggcggatttgttaagaaaagtgaaatcgataaagaagaagcaggatcagagcaatcatcaagctctgatccttggcaaatacgaaatgggtaggcttcttggccacggaaccttcgctaaagtctatctcgcacgaaacgctcaatctggagaaagcgtagcgatcaaggtaattgacaaagagaaagttctcaaatccggtttaatcgcacacatcaaacgcgagatctcgatcttgcgccgtgttcgtcatcctaacatcgttcagctattcgaagtcatggcgacgaaatctaagatctatttcgtaatggaatatgttaaaggaggtgaattgttcaacaaggtagctaaaggaaggttaaaagaagaaatggcacgtaaatattttcaacagttgatctcagccgtatcgttttgtcacttccgtggtgtttatcatcgagatttgaaaccggagaatcttcttttagacgaaaatggaaacctaaaagtctctgattttggtcttagtgctgtttctgatcagattcgacaagatgggttatttcatactttttgtgggacccctgcttacgtggcaccggaggttcttgctcggaaaggctacgatggagctaaagtcgatatttggtcttgtggagtgatcttgtttgtgttaatggcagggtttcttccttttcatgatcggaatgttatggctatgtataagaagatttacagaggagattttaggtgtccgagatggtttccggttgagattaaccggttattgattcgaatgttggagactaaaccggagagacggtttacaatgccggatattatggagactagttggttcaagaaaggttttaagcatattaagttttatgttgaagatgatcatcagctttgtaacgttgctgatgatgatgagatcgaatcgattgaatcggtttcggggaggtcttctacggtttctgaaccggaagacttcgagtcttttgatgggaggagaagaggtggttcgatgcctagaccggcaagtttgaatgctttcgatctcatttcgttttcgccaggttttgatctttcgggtttgtttgaggatgatggtgaaggatctaggtttgtgtctggtgctcctgttggtcagatcatttctaagttggaggaaatcgcgaggattgtgagttttactgtgcgaaagaaggattgtaaagtgagtcttgaaggttcaagagaaggaagtatgaaaggtccattgtcaattgctgctgagatatttgaactgacaccagctttggttgttgttgaagtgaagaagaaaggaggtgataaaatggagtatgatgagttttgtaataaggagttgaaacctaagttgcagaatttgtcttccgaaaatggccaacgggtttctggttcgcgttctttgccatcgtttttactttctgatactgattag

SEQ ID NO: 1858 - protein, 483 aa, Arabidopsis thaliana
MADLLRKVKSIKKKQDQSNHQALILGKYEMGRLLGHGTFAKVYLARNAQSGESVAIKVIDKEKVLKSGLIAHIKREISILRRVRHPNIVQLFEVMATKSKIYFVMEYVKGGELFNKVAKGRLKEEMARKYFQQLISAVSFCHFRGVYHRDLKPENLLLDENGNLKVSDFGLSAVSDQIRQDGLFHTFCGTPAYVAPEVLARKGYDGAKVDIWSCGVILFVLMAGFLPFHDRNVMAMYKKIYRGDFRCPRWFPVEINRLLIRMLETKPERRFTMPDIMETSWFKKGFKHIKFYVEDDHQLCNVADDDEIESIESVSGRSSTVSEPEDFESFDGRRRGGSMPRPASLNAFDLISFSPGFDLSGLFEDDGEGSRFVSGAPVGQIISKLEEIARIVSFTVRKKDCKVSLEGSREGSMKGPLSIAAEIFELTPALVVVEVKKKGGDKMEYDEFCNKELKPKLQNLSSENGQRVSGSRSLPSFLLSDTD

SEQ ID NO: 1859 - DNA, 1320 bp, Arabidopsis thaliana
  CDS (1)..(1320)
atggataaaaacggcatagttttgatgcgaaaatatgaattaggtcgtcttctaggtcaaggcacattcgcaaaagtgtaccacgcacgcaacataaaaacaggagaaagcgtagcgatcaaggtgatcgacaaacagaaagttgcgaaagtcggattaatcgatcaaatcaaacgagaaatatcagtgatgcgtctcgttcgtcacccccacgtcgtcttcctccatgaagtaatggcgagcaagacaaagatctatttcgctatggaatacgttaaaggcggtgagctttttgataaagtctctaaaggaaagcttaaagaaaacattgctcgaaaatatttccagcaattgatcggagcaatcgattattgccatagccgcggagtttaccaccgcgatctcaaaccggagaatcttcttctagacgaaaacggcgatttgaaaatatcggattttggccttagcgcgttgagggagtcgaagcagcaagatggcttgcttcacacgacatgtggaacacctgcttacgtggcacctgaagtgataggcaagaaaggttatgatggagctaaagccgatgtttggtcttgcggggttgtgttgtacgtgctattggctggatttcttccgtttcacgagcaaaatcttgtggaaatgtatcggaaaatcacgaaaggcgaattcaaatgtccgaattggtttcctcccgaggtcaagaagttgttgtctcggattcttgaccctaaccctaattcaagaatcaagattgaaaaaatcatggagaattcctggtttcaaaagggtttcaagaagatcgaaacgcctaaatctcccgaaagtcatcagatcgactcactgatcagcgatgtccacgcagctttttccgtaaaaccgatgtcttacaacgcgtttgacttgatctcttcgctgtctcaaggattcgatctctcgggtttgtttgagaaagaagagagatcagaatcgaagtttacaacgaagaaagatgcaaaagagatagtgtcgaaattcgaggagatagcaacaagtagtgagagattcaatttgacgaagagcgatgtaggagtgaagatggaagataagagagaaggaagaaaaggacatcttgcgattgatgttgagatatttgaagtgacaaatagttttcatatggttgagtttaagaaaagtggaggtgatacaatggagtataagcaattttgtgatcgtgagcttaggccttctttgaaagatattgtttggaaatggcaaggaaacaacaacaatagcaacaatgagaagattgaagtgatacattaa

SEQ ID NO: 1860 - protein, 439 aa, Arabidopsis thaliana
MDKNGIVLMRKYELGRLLGQGTFAKVYHARNIKTGESVAIKVIDKQKVAKVGLIDQIKREISVMRLVRHPHVVFLHEVMASKTKIYFAMEYVKGGELFDKVSKGKLKENIARKYFQQLIGAIDYCHSRGVYHRDLKPENLLLDENGDLKISDFGLSALRESKQQDGLLHTTCGTPAYVAPEVIGKKGYDGAKADVWSCGVVLYVLLAGFLPFHEQNLVEMYRKITKGEFKCPNWFPPEVKKLLSRILDPNPNSRIKIEKIMENSWFQKGFKKIETPKSPESHQIDSLISDVHAAFSVKPMSYNAFDLISSLSQGFDLSGLFEKEERSESKFTTKKDAKEIVSKFEEIATSSERFNLTKSDVGVKMEDKREGRKGHLAIDVEIFEVTNSFHMVEFKKSGGDTMEYKQFCDRELRPSLKDIVWKWQGNNNNSNNEKIEVIH

SEQ ID NO: 1861 - DNA, 1338 bp, Arabidopsis thaliana
  CDS (1)..(1338)
atggaggaagaacggcgagttctgttcggaaagtacgagatgggaaggttattaggcaaaggaaccttcgccaaagtctattacggcaaagagatcatcggcggcgagtgcgtcgcaatcaaagtcatcaacaaggatcaagtaatgaagagacctggaatgatggaacaaatcaaacgcgagatttcaatcatgaagctcgttcgtcatcccaacatagttgaattgaaagaagtcatggctacgaagaccaagatcttcttcgtcatggagttcgttaaaggcggcgagcttttctgcaaaatctctaaaggtaagttacacgaagacgctgctcgtagatatttccagcaattgatctcagccgttgattattgccatagtagaggcgtttctcatcgcgatctgaaacctgagaatcttcttttagatgagaatggagatttgaaaatctccgatttcggattatctgcgttaccggaacagattcttcaagacggattgcttcatacgcagtgtggaactccggcgtatgttgcgccggaggtattaaagaagaaaggatacgacggcgcgaaagctgatatctggtcgtgcggcgtcgttttgtatgttcttctcgccggatgtttgccgtttcaagatgagaatctgatgaatatgtatcggaagattttcagagcggattttgaatttccgccgtggttttctccggaagcgaggaggttgatttcgaaactcctcgttgtagatccagatcgacggatctcgattccggcgattatgagaacgccttggctccggaaaaacttcactccgccgttagctttcaaaatcgacgaaccgatttgttctcaaagcagcaaaaacaacgaagaagaagaagaagacggagattgtgaaaatcaaacagagccgatatcgccgaaattcttcaacgctttcgaattcatatcctcgatgtcttccggatttgacttatcgagcttgttcgagagcaagaggaaagtgcaatcggtgtttacgtcacggtcgtcggcgacggaggtaatggagaagatagaaacggttacgaaggagatgaacatgaaagtgaagagaacgaaggattttaaagtgaagatggaagggaaaacggaagggagaaaaggacggttgtcgatgacggcggaagtgtttgaagtagcgccggagatatcggtggtggagttttgcaaatcggcgggagatactttggagtacgataggttatacgaagaagaagtacggccggcgttaaacgacatcgtctggtcatggcacggtgataataataacacttcttccgaggattgttga

SEQ ID NO: 1862 - protein, 445 aa, Arabidopsis thaliana
MEEERRVLFGKYEMGRLLGKGTFAKVYYGKEIIGGECVAIKVINKDQVMKRPGMMEQIKREISIMKLVRHPNIVELKEVMATKTKIFFVMEFVKGGELFCKISKGKLHEDAARRYFQQLISAVDYCHSRGVSHRDLKPENLLLDENGDLKISDFGLSALPEQILQDGLLHTQCGTPAYVAPEVLKKKGYDGAKADIWSCGVVLYVLLAGCLPFQDENLMNMYRKIFRADFEFPPWFSPEARRLISKLLVVDPDRRISIPAIMRTPWLRKNFTPPLAFKIDEPICSQSSKNNEEEEEDGDCENQTEPISPKFFNAFEFISSMSSGFDLSSLFESKRKVQSVFTSRSSATEVMEKIETVTKEMNMKVKRTKDFKVKMEGKTEGRKGRLSMTAEVFEVAPEISVVEFCKSAGDTLEYDRLYEEEVRPALNDIVWSWHGDNNNTSSEDC

SEQ ID NO: 1863 - DNA, 1467 bp, Arabidopsis thaliana
  CDS (1)..(1467)
atgggatccaaacttaaactttaccctctcttaaatcactcatccgtttttcacccagacagtcgttaccaatcggcccctacaatggaggaagagcaacaacaacttcgtgttctcttcgcgaaatacgagatgggaaggttactaggcaaaggaacattcggaaaagtttattacggcaaagagataacaaccggagaaagcgttgcaatcaaaatcatcaacaaagatcaagtcaaacgtgaaggtatgatggaacaaatcaaacgagagatctcaatcatgagacttgttcgtcatccaaacatcgttgagttaaaagaagtcatggctacaaaaacaaagatcttctttatcatggaatacgttaaaggcggtgaacttttctccaagatcgttaaaggaaagcttaaagaagactctgctcgtaagtatttccaacaattaatctcagccgttgatttttgtcatagtagaggcgtttctcaccgagatctaaaaccggagaatctcttagttgacgagaacggagatcttaaggtttcagattttggtctctctgctttaccggaacagattttacaagacggtttgcttcatactcagtgtggaactccggcgtatgttgcaccggaggttttgaggaagaaaggttacgacggagctaaaggtgatatttggtcgtgtggtattatcttgtacgtgcttctcgctggattcttaccgtttcaagatgagaacctaatgaaaatgtatcggaagatcttcaaatcggagtttgagtatccgccgtggttttcaccggagtccaagaggttgatttcaaagcttttagttgttgatcctaacaaacggatctcgataccggcgattatgcgaacaccgtggtttcgtaaaaacatcaactctccgatcgagttcaagatcgatgagctcgagatccaaaacgtagaagacgaaacaccaacaacaacagcaacaacagcaacaacaacaacaacaccggtctcgccgaagttctttaacgcgtttgaattcatctcttctatgtcatcaggatttgatctatcaagtttgttcgagagtaagaggaagctgagatctatgtttacgtcacggtggtcggcgtcggagataatggggaagcttgaagggatagggaaagagatgaatatgaaggtgaagaggactaaagactttaaggtgaagttgtttgggaaaacggaagggaggaaaggacagatcgcggtgactgctgaggttttcgaggttgcgccggaagtcgccgtcgttgagttgtgtaagtcggcgggagatactttggagtataataggttgtatgaagaacatgtccggccagcgttggaggagatagtgtggtcgtggcacggtgataatcataataataatattgttaagagtaatggtaattatgttagtgatgaaaattctggtagtgactgctaa

SEQ ID NO: 1864 - protein, 488 aa, Arabidopsis thaliana
MGSKLKLYPLLNHSSVFHPDSRYQSAPTMEEEQQQLRVLFAKYEMGRLLGKGTFGKVYYGKEITTGESVAIKIINKDQVKREGMMEQIKREISIMRLVRHPNIVELKEVMATKTKIFFIMEYVKGGELFSKIVKGKLKEDSARKYFQQLISAVDFCHSRGVSHRDLKPENLLVDENGDLKVSDFGLSALPEQILQDGLLHTQCGTPAYVAPEVLRKKGYDGAKGDIWSCGIILYVLLAGFLPFQDENLMKMYRKIFKSEFEYPPWFSPESKRLISKLLVVDPNKRISIPAIMRTPWFRKNINSPIEFKIDELEIQNVEDETPTTTATTATTTTTPVSPKFFNAFEFISSMSSGFDLSSLFESKRKLRSMFTSRWSASEIMGKLEGIGKEMNMKVKRTKDFKVKLFGKTEGRKGQIAVTAEVFEVAPEVAVVELCKSAGDTLEYNRLYEEHVRPALEEIVWSWHGDNHNNNIVKSNGNYVSDENSGSDC

SEQ ID NO: 1865 - DNA, 1251 bp, Arabidopsis thaliana
  CDS (1)..(1251)
atgggtttgtttggaacgaagaagatcgggaagtatgagataggaagaacaatcggagaagggaatttcgcaaaagtgaaacttggttacgacacgaccaatggtacttacgtagctgtcaaaatcatagacaaggctttggttattcaaaagggtcttgagtctcaagtcaagagagagatacgaacgatgaagcttcttaaccatcccaacatcgtccaaatacacgaggtgattggaaccaagacaaagatctgtatagttatggaatacgtttcaggtggtcagctttcagacagacttggaagacagaaaatgaaagaatcagatgctagaaaacttttccaacaattgattgatgctgttgattattgtcataacagaggagtttatcatagagatcttaagccacaaaacttgttactagattcaaagggtaatctcaaagtttctgactttggattaagtgcagttcctaaatcgggggatatgctctctacagcttgtggctctccatgttatatagcaccagagttgattatgaacaaaggctactcaggagcagcagtagatgtatggtcttgtggagtgattctatttgaattgcttgctggttatccacctttcgatgatcatacacttccggttttgtataagaagatactcagagcagattacacgttcccacctggattcactggagagcagaagaggctaatctttaacattcttgacccaaatcctctaagtcgtataacactagctgagataatcatcaaagattcttggttcaagataggttatacaccagtttatcatcaactttcagactcaatcaaggacaatgtcgcggagataaatgcagcaaccgcgtcatcaaatttcataaatgcttttcagataatagcaatgtctagtgatctagatttgtcaggtctcttcgaagaaaatgatgataagagatataaaacaagaattgggtccaagaacacagcacaagaaacaatcaagaagattgaagctgcagcaacttatgttagtttatcagttgagagaataaagcacttcaaggttaagattcagccaaaggagataagatcaagatcttcttatgacttattatcagcagaggtgatagaggtgactccaacaaattgtgttatagaaatatcgaaatccgcaggcgagttaagactatacatggagttttgccagagcttatcaagcttacttaccgcggaagtaagctaa

SEQ ID NO: 1866 - protein, 416 aa, Arabidopsis thaliana
MGLFGTKKIGKYEIGRTIGEGNFAKVKLGYDTTNGTYVAVKIIDKALVIQKGLESQVKREIRTMKLLNHPNIVQIHEVIGTKTKICIVMEYVSGGQLSDRLGRQKMKESDARKLFQQLIDAVDYCHNRGVYHRDLKPQNLLLDSKGNLKVSDFGLSAVPKSGDMLSTACGSPCYIAPELIMNKGYSGAAVDVWSCGVILFELLAGYPPFDDHTLPVLYKKILRADYTFPPGFTGEQKRLIFNILDPNPLSRITLAEIIIKDSWFKIGYTPVYHQLSDSIKDNVAEINAATASSNFINAFQIIAMSSDLDLSGLFEENDDKRYKTRIGSKNTAQETIKKIEAAATYVSLSVERIKHFKVKIQPKEIRSRSSYDLLSAEVIEVTPTNCVIEISKSAGELRLYMEFCQSLSSLLTAEVS

SEQ ID NO: 1867 - DNA, 1440 bp, Arabidopsis thaliana
  CDS (1)..(1440)
atggaaaataagccaagtgttttgactgataaatatgatgttgggaggttattgggtcaaggtacttttgccaaggtgtattatggaaggagtattcttactaaccagagtgttgctatcaagatgatcgataaggaaaaggttatgaaagttgggcttatcgaacagatcaagagagagatctctgttatgaggattgctagacaccctaacgttgtggagctatatgaggtcatggcaacaaaaacgaggatctactttgttatggagtattgtaaaggtggagagcttttcaacaaggttgccaaagggaaattgagagatgatgttgcttggaaatacttttatcagcttatcaacgcagttgatttttgccacagccgagaggtgtatcatcgtgacataaagccggagaacctattgctagatgataatgagaatctcaaggtatctgatttcgggttaagcgcccttgctgactgcaagagacaagatggcctcctccacactacttgtggtacacctgcatatgttgctccagaagtgatcaatcgaaaaggctatgatggcacaaaagcagatatttggtcttgtggtgtggttttgtttgtcctattggcaggctatctacctttccatgactccaatctgatggagatgtacaggaagataggaaaagcagattttaaggcaccaagctggtttgctccagaagtacggaggctgttgtgtaagatgctagaccctaaccctgaaactagaatcaccatcgcaagaatcagggagagttcttggttcagaaaaggtttacatatgaaacagaaaaagatggagaaacgagtcaaagagataaactctgtggaagctggtactgcaggtacaaatgagaacggagcaggtccaagtgagaatggagcaggtccaagtgaaaacggagacagggtcacggaggaaaaccatacagacgaacctacaaatttgaacgcttttgatttaattgccttgtctgctgggtttgatctggcaggactgtttggagatgataacaagagagaatctagattcacatcacagaaacctgcttcagtgatcatatctaagctggaggaagtagcacagcgattgaaactgagcataagaaagcgagaagcaggtttgttcaaattggaacgattaaaagaaggaagaaaagggattctgtcgatggatgcagaaatatttcaagtgacgccaaactttcatttagtggaagtgaagaaatcaaatggagatactctcgagtatcagaaattagtagcagaggatcttagacctgctctgtcagatattgtatgggtttggcagggtgagaaagatgagcttacttcacagcaagagacagaataccaacaacaacaacaacaagaacaacaagaacaggaagaaccattgaagttttga

SEQ ID NO: 1868 - protein, 479 aa, Arabidopsis thaliana
MENKPSVLTDKYDVGRLLGQGTFAKVYYGRSILTNQSVAIKMIDKEKVMKVGLIEQIKREISVMRIARHPNVVELYEVMATKTRIYFVMEYCKGGELFNKVAKGKLRDDVAWKYFYQLINAVDFCHSREVYHRDIKPENLLLDDNENLKVSDFGLSALADCKRQDGLLHTTCGTPAYVAPEVINRKGYDGTKADIWSCGVVLFVLLAGYLPFHDSNLMEMYRKIGKADFKAPSWFAPEVRRLLCKMLDPNPETRITIARIRESSWFRKGLHMKQKKMEKRVKEINSVEAGTAGTNENGAGPSENGAGPSENGDRVTEENHTDEPTNLNAFDLIALSAGFDLAGLFGDDNKRESRFTSQKPASVIISKLEEVAQRLKLSIRKREAGLFKLERLKEGRKGILSMDAEIFQVTPNFHLVEVKKSNGDTLEYQKLVAEDLRPALSDIVWVWQGEKDELTSQQETEYQQQQQQEQQEQEEPLKF

SEQ ID NO: 1869 - DNA, 1350 bp, Arabidopsis thaliana
  CDS (1)..(1350)
atgagtggaagcagaaggaaggcgacgccggcgagtaggacgcgagtagggaattacgagatgggacgaactctcggagaaggaagcttcgctaaggtgaaatacgccaagaacaccgtcaccggagatcaagccgctatcaaaatcctcgaccgagaaaaggtcttccgtcacaaaatggtcgaacagcttaaaagagaaatatctacaatgaaactgattaaacatccaaatgtggttgaaatcattgaggttatggcgagcaaaacgaagatctatatcgttcttgagcttgtcaatggaggtgaactctttgataaaatcgcgcaacaagggaggcttaaggaggatgaagctcggagatattttcagcagctcatcaatgctgtggattactgccacagtcgaggtgtctaccacagagatctcaagcctgaaaatctgatccttgacgcaaatggggttttgaaagtctctgattttgggttaagcgccttctcacgacaagttcgggaagatggtttgcttcatacagcttgtggaacgccaaactacgttgcccctgaggttttgtcggacaaaggctatgacggtgcagcagcagatgtctggtcttgtggtgtcattctctttgtgcttatggctggttacttgccttttgatgagccgaatctcatgacattatacaaacgtgtacgtatatgcaaggctgagtttagctgcccaccatggttctcgcaaggtgccaagagagtcatcaagcgtattctcgaacccaaccctattaccagaataagtattgcagagttgctcgaagatgaatggttcaagaaagggtacaagccgccatcatttgaccaagatgacgaggacataaccatagatgatgttgatgctgcttttagtaactccaaggaatgtcttgtaactgagaagaaggagaaacctgtatccatgaacgctttcgaacttatctctagctcaagcgagttcagtcttgaaaacttgttcgagaagcaagcgcaacttgtgaagaaagaaacgcggtttacttctcaacgatctgcgagtgaaataatgtcgaaaatggaagaaaccgcaaagccattaggctttaatgtccgtaaagacaactacaagataaaaatgaaaggagacaaaagtggtcgtaaaggtcagctctccgtagctacagaggtgtttgaagtggcgccatcattgcatgtggtagagcttaggaaaaccggtggtgataccctcgagtttcacaagttctacaaaaacttctcatctggattaaaggatgtagtctggaatactgatgcagccgctgaagaacaaaagcaataa

SEQ ID NO: 1870 - protein, 449 aa, Arabidopsis thaliana
MSGSRRKATPASRTRVGNYEMGRTLGEGSFAKVKYAKNTVTGDQAAIKILDREKVFRHKMVEQLKREISTMKLIKHPNVVEIIEVMASKTKIYIVLELVNGGELFDKIAQQGRLKEDEARRYFQQLINAVDYCHSRGVYHRDLKPENLILDANGVLKVSDFGLSAFSRQVREDGLLHTACGTPNYVAPEVLSDKGYDGAAADVWSCGVILFVLMAGYLPFDEPNLMTLYKRVRICKAEFSCPPWFSQGAKRVIKRILEPNPITRISIAELLEDEWFKKGYKPPSFDQDDEDITIDDVDAAFSNSKECLVTEKKEKPVSMNAFELISSSSEFSLENLFEKQAQLVKKETRFTSQRSASEIMSKMEETAKPLGFNVRKDNYKIKMKGDKSGRKGQLSVATEVFEVAPSLHVVELRKTGGDTLEFHKFYKNFSSGLKDVVWNTDAAAEEQKQ

SEQ ID NO: 1871 - DNA, 1356 bp, Arabidopsis thaliana
  CDS (1)..(1356)
atgagtggaagcagaaggaaggcgacgccggcgagtaggacgcgagtagggaattacgagatgggacgaactctcggagaaggaagcttcgctaaggtgaaatacgccaagaacaccgtcaccggagatcaagccgctatcaaaatcctcgaccgagaaaaggtcttccgtcacaaaatggtcgaacagcttaaaagagaaatatctacaatgaaactgattaaacatccaaatgtggttgaaatcattgaggttatggcgagcaaaacgaagatctatatcgttcttgagcttgtcaatggaggtgaactctttgataaaatcgcgcaacaagggaggcttaaggaggatgaagctcggagatattttcagcagctcatcaatgctgtggattactgccacagtcgaggtgtctaccacagagatctcaagcctgaaaatctgatccttgacgcaaatggggttttgaaagtctctgattttgggttaagcgccttctcacgacaagttcgggaagatggtttgcttcatacagcttgtggaacgccaaactacgttgcccctgaggttttgtcggacaaaggctatgacggtgcagcagcagatgtctggtcttgtggtgtcattctctttgtgcttatggctggttacttgccttttgatgagccgaatctcatgacattatacaaacgtatatgcaaggctgagtttagctgcccaccatggttctcgcaaggtgccaagagagtcatcaagcgtattctcgaacccaaccctattaccagaataagtattgcagagttgctcgaagatgaatggttcaagaaagggtacaagccgccatcatttgaccaagatgacgaggacataaccatagatgatgttgatgctgcttttagtaactccaaggaatgtcttgtaactgagaagaaggagaaacctgtatccatgaacgctttcgaacttatctctagctcaagcgagttcagtcttgaaaacttgttcgagaagcaagcgcaacttgtgaagaaagaaacgcggtttacttctcaacgatctgcgagtgaaataatgtcgaaaatggaagaaaccgcaaagccattaggctttaatgtccgtaaagacaactacaagataaaaatgaaaggagacaaaagtggtcgtaaaggtcagctctccgtagctacagaggtgtttgaagtggcgccatcattgcatgtggtagagcttaggaaaaccggtggtgataccctcgagtttcacaaggtatgtgattcgttctacaaaaacttctcatctggattaaaggatgtagtctggaatactgatgcagccgctgaagaacaaaagcaataa

SEQ ID NO: 1872 - protein, 451 aa, Arabidopsis thaliana
MSGSRRKATPASRTRVGNYEMGRTLGEGSFAKVKYAKNTVTGDQAAIKILDREKVFRHKMVEQLKREISTMKLIKHPNVVEIIEVMASKTKIYIVLELVNGGELFDKIAQQGRLKEDEARRYFQQLINAVDYCHSRGVYHRDLKPENLILDANGVLKVSDFGLSAFSRQVREDGLLHTACGTPNYVAPEVLSDKGYDGAAADVWSCGVILFVLMAGYLPFDEPNLMTLYKRICKAEFSCPPWFSQGAKRVIKRILEPNPITRISIAELLEDEWFKKGYKPPSFDQDDEDITIDDVDAAFSNSKECLVTEKKEKPVSMNAFELISSSSEFSLENLFEKQAQLVKKETRFTSQRSASEIMSKMEETAKPLGFNVRKDNYKIKMKGDKSGRKGQLSVATEVFEVAPSLHVVELRKTGGDTLEFHKVCDSFYKNFSSGLKDVVWNTDAAAEEQKQ

SEQ ID NO: 1873 - DNA, 1149 bp, Arabidopsis thaliana
  CDS (1)..(1149)
atgaatcggagacagcaagtgaaacgtagagtaggtaaatatgaagttggaagaacaattggagaaggaacgtttgctaaagttaagtttgctagaaactctgaaactggagaacctgttgctctcaagattcttgataaagagaaagttctcaagcataaaatggctgaacagattagaagagagatagctactatgaagttgataaaacatccaaatgttgttcaattatatgaggtgatggcaagtaagacgaaaatatttatcatcttggagtatgttacaggaggagaactctttgataagattgtaaatgatgggcggatgaaagaagatgaggcgcggagatatttccaacagcttatacatgctgtggactactgtcatagcagaggggtctaccatagagacctcaagcctgaaaatttactattggactcctatggaaacctcaagatctcagattttggattaagtgctttgtcccaacaagtcagggatgatggactcttgcatacatcgtgtggaacaccaaactacgttgctcctgaggttctcaatgatagaggctatgatggagcaacagctgacatgtggtcatgcggtgttgtactctatgtcctgcttgcaggttacttaccttttgatgattctaatctaatgaatctttataaaaaaatatcatctggtgaattcaactgtcctccgtggctctcactcggtgccatgaaactcatcactagaatcttagatccgaatccgatgactcgtgtaacaccgcaagaggttttcgaagatgaatggttcaagaaagattacaagccacctgttttcgaggagagggatgattcaaacatggacgatattgatgctgttttcaaggactctgaggaacatcttgttactgagaagagagaagaacagccagcggcgatcaatgccttcgagatcatttcaatgtcaaggggacttaacctagagaatctgtttgatccagaacaggaatttaagagggaaacaaggataacattgagaggaggcgcgaatgagatcatcgagaagatagaagaagctgcaaagcctctcggtttcgatgttcaaaagaagaactacaaggttagtgaaaactctgtaacggaaatgaaatga

SEQ ID NO: 1874 - protein, 382 aa, Arabidopsis thaliana
MNRRQQVKRRVGKYEVGRTIGEGTFAKVKFARNSETGEPVALKILDKEKVLKHKMAEQIRREIATMKLIKHPNVVQLYEVMASKTKIFIILEYVTGGELFDKIVNDGRMKEDEARRYFQQLIHAVDYCHSRGVYHRDLKPENLLLDSYGNLKISDFGLSALSQQVRDDGLLHTSCGTPNYVAPEVLNDRGYDGATADMWSCGVVLYVLLAGYLPFDDSNLMNLYKKISSGEFNCPPWLSLGAMKLITRILDPNPMTRVTPQEVFEDEWFKKDYKPPVFEERDDSNMDDIDAVFKDSEEHLVTEKREEQPAAINAFEIISMSRGLNLENLFDPEQEFKRETRITLRGGANEIIEKIEEAAKPLGFDVQKKNYKVSENSVTEMK

SEQ ID NO: 1875 - DNA, 1128 bp, Arabidopsis thaliana
  CDS (1)..(1128)
atgaatcggagacagcaagtgaaacgtagagtaggtaaatatgaagttggaagaacaattggagaaggaacgtttgctaaagttaagtttgctagaaactctgaaactggagaacctgttgctctcaagattcttgataaagagaaagttctcaagcataaaatggctgaacagattagaagagagatagctactatgaagttgataaaacatccaaatgttgttcaattatatgaggtgatggcaagtaagacgaaaatatttatcatcttggagtatgttacaggaggagaactctttgataagattgtaaatgatgggcggatgaaagaagatgaggcgcggagatatttccaacagcttatacatgctgtggactactgtcatagcagaggggtctaccatagagacctcaagcctgaaaatttactattggactcctatggaaacctcaagatctcagattttggattaagtgctttgtcccaacaagtcagggatgatggactcttgcatacatcgtgtggaacaccaaactacgttgctcctgaggttctcaatgatagaggctatgatggagcaacagctgacatgtggtcatgcggtgttgtactctatgtcctgcttgcaggttacttaccttttgatgattctaatctaatgaatctttataaaaaaatatcatctggtgaattcaactgtcctccgtggctctcactcggtgccatgaaactcatcactagaatcttagatccgaatccgatgactcgtgtaacaccgcaagaggttttcgaagatgaatggttcaagaaagattacaagccacctgttttcgaggagagggatgattcaaacatggacgatattgatgctgttttcaaggactctgaggaacatcttgttactgagaagagagaagaacagccagcggcgatcaatgccttcgagatcatttcaatgtcaaggggacttaacctagagaatctgtttgatccagaacaggaatttaagagggaaacaaggataacattgagaggaggcgcgaatgagatcatcgagaagatagaagaagctgcaaagcctctcggtttcgatgttcaaaagaagaactacaagtacattacttga

SEQ ID NO: 1876 - protein, 375 aa, Arabidopsis thaliana
MNRRQQVKRRVGKYEVGRTIGEGTFAKVKFARNSETGEPVALKILDKEKVLKHKMAEQIRREIATMKLIKHPNVVQLYEVMASKTKIFIILEYVTGGELFDKIVNDGRMKEDEARRYFQQLIHAVDYCHSRGVYHRDLKPENLLLDSYGNLKISDFGLSALSQQVRDDGLLHTSCGTPNYVAPEVLNDRGYDGATADMWSCGVVLYVLLAGYLPFDDSNLMNLYKKISSGEFNCPPWLSLGAMKLITRILDPNPMTRVTPQEVFEDEWFKKDYKPPVFEERDDSNMDDIDAVFKDSEEHLVTEKREEQPAAINAFEIISMSRGLNLENLFDPEQEFKRETRITLRGGANEIIEKIEEAAKPLGFDVQKKNYKYIT

SEQ ID NO: 1877 - DNA, 1326 bp, Arabidopsis thaliana
  CDS (1)..(1326)
atgaatcggagacagcaagtgaaacgtagagtaggtaaatatgaagttggaagaacaattggagaaggaacgtttgctaaagttaagtttgctagaaactctgaaactggagaacctgttgctctcaagattcttgataaagagaaagttctcaagcataaaatggctgaacagattagaagagagatagctactatgaagttgataaaacatccaaatgttgttcaattatatgaggtgatggcaagtaagacgaaaatatttatcatcttggagtatgttacaggaggagaactctttgataagattgtaaatgatgggcggatgaaagaagatgaggcgcggagatatttccaacagcttatacatgctgtggactactgtcatagcagaggggtctaccatagagacctcaagcctgaaaatttactattggactcctatggaaacctcaagatctcagattttggattaagtgctttgtcccaacaagtcagggatgatggactcttgcatacatcgtgtggaacaccaaactacgttgctcctgaggttctcaatgatagaggctatgatggagcaacagctgacatgtggtcatgcggtgttgtactctatgtcctgcttgcaggttacttaccttttgatgattctaatctaatgaatctttataaaaaaatatcatctggtgaattcaactgtcctccgtggctctcactcggtgccatgaaactcatcactagaatcttagatccgaatccgatgactcgtgtaacaccgcaagaggttttcgaagatgaatggttcaagaaagattacaagccacctgttttcgaggagagggatgattcaaacatggacgatattgatgctgttttcaaggactctgaggaacatcttgttactgagaagagagaagaacagccagcggcgatcaatgccttcgagatcatttcaatgtcaaggggacttaacctagagaatctgtttgatccagaacaggaatttaagagggaaacaaggataacattgagaggaggcgcgaatgagatcatcgagaagatagaagaagctgcaaagcctctcggtttcgatgttcaaaagaagaactacaagatgaggcttgagaatgtgaaggctggaagaaaggggaatctcaatgtagcgacagagatattccaagtagcgccaagtcttcatatggttcaagtatcgaagtcgaaaggagacactctcgaatttcacaagttctataagaagctctctaattctctggagcaagtagtctggacgaataacgaagttaagaaagaaacagcaaagtga

SEQ ID NO: 1878 - protein, 441 aa, Arabidopsis thaliana
MNRRQQVKRRVGKYEVGRTIGEGTFAKVKFARNSETGEPVALKILDKEKVLKHKMAEQIRREIATMKLIKHPNVVQLYEVMASKTKIFIILEYVTGGELFDKIVNDGRMKEDEARRYFQQLIHAVDYCHSRGVYHRDLKPENLLLDSYGNLKISDFGLSALSQQVRDDGLLHTSCGTPNYVAPEVLNDRGYDGATADMWSCGVVLYVLLAGYLPFDDSNLMNLYKKISSGEFNCPPWLSLGAMKLITRILDPNPMTRVTPQEVFEDEWFKKDYKPPVFEERDDSNMDDIDAVFKDSEEHLVTEKREEQPAAINAFEIISMSRGLNLENLFDPEQEFKRETRITLRGGANEIIEKIEEAAKPLGFDVQKKNYKMRLENVKAGRKGNLNVATEIFQVAPSLHMVQVSKSKGDTLEFHKFYKKLSNSLEQVVWTNNEVKKETAK

SEQ ID NO: 1879 - DNA, 1356 bp, Arabidopsis thaliana
  CDS (1)..(1356)
atgttgatccccaacaaaaaattaagagaaatgaatcggagacagcaagtgaaacgtagagtaggtaaatatgaagttggaagaacaattggagaaggaacgtttgctaaagttaagtttgctagaaactctgaaactggagaacctgttgctctcaagattcttgataaagagaaagttctcaagcataaaatggctgaacagattagaagagagatagctactatgaagttgataaaacatccaaatgttgttcaattatatgaggtgatggcaagtaagacgaaaatatttatcatcttggagtatgttacaggaggagaactctttgataagattgtaaatgatgggcggatgaaagaagatgaggcgcggagatatttccaacagcttatacatgctgtggactactgtcatagcagaggggtctaccatagagacctcaagcctgaaaatttactattggactcctatggaaacctcaagatctcagattttggattaagtgctttgtcccaacaagtcagggatgatggactcttgcatacatcgtgtggaacaccaaactacgttgctcctgaggttctcaatgatagaggctatgatggagcaacagctgacatgtggtcatgcggtgttgtactctatgtcctgcttgcaggttacttaccttttgatgattctaatctaatgaatctttataaaaaaatatcatctggtgaattcaactgtcctccgtggctctcactcggtgccatgaaactcatcactagaatcttagatccgaatccgatgactcgtgtaacaccgcaagaggttttcgaagatgaatggttcaagaaagattacaagccacctgttttcgaggagagggatgattcaaacatggacgatattgatgctgttttcaaggactctgaggaacatcttgttactgagaagagagaagaacagccagcggcgatcaatgccttcgagatcatttcaatgtcaaggggacttaacctagagaatctgtttgatccagaacaggaatttaagagggaaacaaggataacattgagaggaggcgcgaatgagatcatcgagaagatagaagaagctgcaaagcctctcggtttcgatgttcaaaagaagaactacaagatgaggcttgagaatgtgaaggctggaagaaaggggaatctcaatgtagcgacagagatattccaagtagcgccaagtcttcatatggttcaagtatcgaagtcgaaaggagacactctcgaatttcacaagttctataagaagctctctaattctctggagcaagtagtctggacgaataacgaagttaagaaagaaacagcaaagtga

SEQ ID NO: 1880 - protein, 451 aa, Arabidopsis thaliana
MLIPNKKLREMNRRQQVKRRVGKYEVGRTIGEGTFAKVKFARNSETGEPVALKILDKEKVLKHKMAEQIRREIATMKLIKHPNVVQLYEVMASKTKIFIILEYVTGGELFDKIVNDGRMKEDEARRYFQQLIHAVDYCHSRGVYHRDLKPENLLLDSYGNLKISDFGLSALSQQVRDDGLLHTSCGTPNYVAPEVLNDRGYDGATADMWSCGVVLYVLLAGYLPFDDSNLMNLYKKISSGEFNCPPWLSLGAMKLITRILDPNPMTRVTPQEVFEDEWFKKDYKPPVFEERDDSNMDDIDAVFKDSEEHLVTEKREEQPAAINAFEIISMSRGLNLENLFDPEQEFKRETRITLRGGANEIIEKIEEAAKPLGFDVQKKNYKMRLENVKAGRKGNLNVATEIFQVAPSLHMVQVSKSKGDTLEFHKFYKKLSNSLEQVVWTNNEVKKETAK

SEQ ID NO: 1881 - DNA, 1320 bp, Arabidopsis thaliana
  CDS (1)..(1320)
atgaatcggccaaaggttcagcgtcgtgttggaaagtatgaggttggaaagacgcttggacaaggcacttttgcgaaagttcggtgtgctgttaatactgagacaggagaacgcgtggctctcaaaatacttgataaggagaaggttcttaagcataagatggctgaacagataaggagagaaatttgtactatgaagctgataaaccatccaaatgtagtgcggctgtatgaggttttggcgagcaagactaagatatatattgttctagagttcggcactggtggagagctttttgacaaaattgtacatgatgggcgcttgaaagaagagaatgcacggaaatattttcagcagcttattaatgcagttgattactgccatagcaggggagtgtaccaccgggacttaaagccggaaaacttgcttctagatgctcaaggaaatctgaaagtctctgattttggattgagtgcgttgtcccgacaagtcaggggtgatggtcttcttcacactgcatgcggaactccaaactatgctgctcctgaggttcttaatgatcaaggttatgacggggcaaccgcagacttgtggtcctgtggagtgatactctttgtactacttgctggctacttgcctttcgaggattctaatctcatgacgctgtataaaaagataatagctggtgaatatcattgtcctccttggctctctcctggtgctaagaacttgattgtccgaatcttggatccaaaccctatgactcgtatcacaattccagaggttctgggagatgcgtggttcaagaaaaattacaagccagctgttttcgaggagaaggaagaagccaacttggatgatgtggacgctgttttcaaagattcagaagagcatcatgtcacagaaaagaaagaggagcaaccaacttcaatgaatgcctttgagttgatatcaatgtcgagagctctggatctcgggaatttgtttgaagaagaagagggattcaagcgagaaacgagatttgctgctaaaggtgctgctaatgatttagtccaaaagattgaagaagcttctaagccgcttggtttcgatattcaaaagaaaaactataagatgagacttgaaaacgtgactgctggaaggaaaggaaacctaagagttgcaactgagatatttcaagtatcaccgtctcttcatatgatcgaagtccggaaaacgaaaggggatacactagaattccataagttctacaagaagctctcaacctcacttaacgatgtggtttggaaatctggcgagagctctggtctaagcaaataa

SEQ ID NO: 1882 - protein, 439 aa, Arabidopsis thaliana
MNRPKVQRRVGKYEVGKTLGQGTFAKVRCAVNTETGERVALKILDKEKVLKHKMAEQIRREICTMKLINHPNVVRLYEVLASKTKIYIVLEFGTGGELFDKIVHDGRLKEENARKYFQQLINAVDYCHSRGVYHRDLKPENLLLDAQGNLKVSDFGLSALSRQVRGDGLLHTACGTPNYAAPEVLNDQGYDGATADLWSCGVILFVLLAGYLPFEDSNLMTLYKKIIAGEYHCPPWLSPGAKNLIVRILDPNPMTRITIPEVLGDAWFKKNYKPAVFEEKEEANLDDVDAVFKDSEEHHVTEKKEEQPTSMNAFELISMSRALDLGNLFEEEEGFKRETRFAAKGAANDLVQKIEEASKPLGFDIQKKNYKMRLENVTAGRKGNLRVATEIFQVSPSLHMIEVRKTKGDTLEFHKFYKKLSTSLNDVVWKSGESSGLSK

SEQ ID NO: 1883 - DNA, 2412 bp, Magnaporthe grisea 70-15
  CDS (1)..(2412)
atggcccactgccaggaccgaggcagcaattcgcggcgtggaagtttggcccacggaacctttgaggacgaggagctgtcgttatccttgactgccatcgaccctcggaacacggccgcgaccacgacaaggacgaccccgacccagcatcgacgcgacgacagcaacggccggcctcgacccaagcatagtcacagccacagccgccgccattcgcaacacgcacaacatcaaaatcagcaccagaatcaggatcagaatcagcaatcccctccatccgccatgccacccactgtccaccgcggcggcggcggcggcggccccaatgccatgcctgcggatggaagcaccagtagcaagatacgagtcgaccagcgcatcagcgcctacgagatcagcaaaaccctaggtgaaggttcgttcggcaaggtcaagttggccgtacacaagggaacaaagcaaatggtcgcgctcaagatcatctcgcgcaaacgcctcgctagtaccgacatggccggtcgcgtcgagagagaaattgagtacctgcagcttctccgccacccccacatcatcaaactctacaccgttatcaagaccgacaacgagatcataatggtcctcgaatatgccggcggggagctcttcgaccatatagtcaccaacggccgtctgagcgaggatgaagcccggcgctttttccagcaaatgttgtgcgctgtcgagtactgtcacaggcacaagattgtccaccgtgatctcaagcctgaaaacctgctgctggatgataatctcaacgtcaagattgccgattttggtctcagtaatatcatgacggatggaaactttctcaagacgagttgcggaagcccaaactatgctgcgcctgaagttattagcggaaagctgtacgcgggatctgaggtggacgtctggagctgtggtgtcatcctgtatgtcctgctggttggcaggctacctttcgacgatgaccatattcccacgctcttctccaagatcgccaggggaacatacgttgtgccccactggatgagtccaggtgctgccgcgttgatcaagaagatgcttgtggtaaaccccgtcaaccgtgccaccatcaccgagatacggcaggacccctggttcacaaccgaactaccagagtacctacagccgcccatagagccattcttcaatacgggcatagatccagagaaggcgattcggcccagcgacatcgcgccaaatgctcctccaaaggtccaggaaaagcttcacgccgaagtcactgacaaaatttcaaagaccatgggttacggcaagcaggacgttctcgacgctctggaagccgaagagccttccgctatcaaggatgcgtacatgattgtgcgcgagaacaagatgatgcagagtaatccggcccttgggggagacaacccgttctttgctactacgcctctgggtgatgaaaatggatccaccggtatcatggagaccatggattcagccatgtcagcttctggccacgaccctaatgcaagccccatgacgagcatgtccgtcagatcggccacgtctagcactctcagcgccgccctggcatatcaacggccatatacgagcaagattggtatcctccccagcagcttaccagcgtaccataacgcgtatatggagagcgagaagtcgggcacggctcaagatgtgcctgatatgatggcactgaatgagccgccagcaccagctaggactccagcagaacaggaggagactgcgaggagactgcggccgcacgcgcgtagtagccagagcgccgctgattccaaaccccaaagtttgactccctcaaacgcccccaagaaaaccaaacccaccagatggcaatttggtattcgctcacgaaacgcaccattcgaggctttgttgtgtatctacaaggctctcaagaagcttgactgctcctggaaaattgatcgagactatcacaaggtgcatggcgatgagaacgaaaaacatcgctcaagaggcgacgcaggaacaccttatatattaccggcagatccatggcatatcgaagcacgatgggagactggtcctctccgaacccactcggtaatgacggatccaaagaactcagccgcgttcccaggcggcaaagtgagggttcagaaaaagcacagcaacaacagctcggaagacgatgacgaggaagcaaacgccacctacgaggtgatcgccatgcgactttccatacagatctacgaaatggagagtggcgtgtacctggtagacttcaagtgcgcaggctacgaattgcctgatggtaggctgatggaggaaaaggatgtgaccagtccattccccttcctggacctggcggcccggctcattatacagcttgccgatgctgactag

SEQ ID NO: 1884 - protein, 803 aa, Magnaporthe grisea 70-15
MAHCQDRGSNSRRGSLAHGTFEDEELSLSLTAIDPRNTAATTTRTTPTQHRRDDSNGRPRPKHSHSHSRRHSQHAQHQNQHQNQDQNQQSPPSAMPPTVHRGGGGGGPNAMPADGSTSSKIRVDQRISAYEISKTLGEGSFGKVKLAVHKGTKQMVALKIISRKRLASTDMAGRVEREIEYLQLLRHPHIIKLYTVIKTDNEIIMVLEYAGGELFDHIVTNGRLSEDEARRFFQQMLCAVEYCHRHKIVHRDLKPENLLLDDNLNVKIADFGLSNIMTDGNFLKTSCGSPNYAAPEVISGKLYAGSEVDVWSCGVILYVLLVGRLPFDDDHIPTLFSKIARGTYVVPHWMSPGAAALIKKMLVVNPVNRATITEIRQDPWFTTELPEYLQPPIEPFFNTGIDPEKAIRPSDIAPNAPPKVQEKLHAEVTDKISKTMGYGKQDVLDALEAEEPSAIKDAYMIVRENKMMQSNPALGGDNPFFATTPLGDENGSTGIMETMDSAMSASGHDPNASPMTSMSVRSATSSTLSAALAYQRPYTSKIGILPSSLPAYHNAYMESEKSGTAQDVPDMMALNEPPAPARTPAEQEETARRLRPHARSSQSAADSKPQSLTPSNAPKKTKPTRWQFGIRSRNAPFEALLCIYKALKKLDCSWKIDRDYHKVHGDENEKHRSRGDAGTPYILPADPWHIEARWETGPLRTHSVMTDPKNSAAFPGGKVRVQKKHSNNSSEDDDEEANATYEVIAMRLSIQIYEMESGVYLVDFKCAGYELPDGRLMEEKDVTSPFPFLDLAARLIIQLADAD

SEQ ID NO: 1885 - DNA, 2136 bp, Gibberella zeae PH-1
  CDS (1)..(2136)
atggctccccgcggctttgaggacgaggagctcaccatatccttatcctcgtcacacgttcgtcgcccgcaacagacgcagccccagtcccagtcgcagcagcaagacgactcacacgatgctccccaagccgcttcccgtcccgccgatgcgccgctcaaggaaaggatcaagaccgaacagcgcatcggtgcctacaaggttcttcgaaccctgggcgaaggttcttttggcaaggttaagcttgctattcacaacggtacgggccagcaagtggccctcaagattatcgccaggaagaagctcatcagccgcgatatggccggccgtgttgagcgcgaaatcgaatatctccaactgctacgccatcctcacattattaagctcttcactgtcatcaagacgcccaatgaaatcatcatggttctcgagtacgcgggcggcgaacttttcgactacattgttcagcatggccgaatgaaggagcccgaagctcgtcgttttttccagcagatgctttgtgctgtcgaatattgtcaccgccacaaaattgttcatcgtgacttgaagcccgaaaacttgctgcttgacgagaacctcaatgtcaaaatcgccgatttcggactaagcaatattatgacggatggtaatttcctcaagacaagctgtggcagtccaaattatgctgcccctgaagttatcggtggcaagctgtatgccggccctgaagtagatgtatggagctgtggagtgattctctatgttcttctggtcggccgacttccctttgacgacgaacacatccccagtttatttgccaagatcgcaaagggtacatacagcataccccagtggatgcccactggtgcagccaacctgattaagaagatgctggtggtcaaccctgtgcatcgtgctacaatcgaagatatccgggcagatccttggttcacaaccgagctccccgtctaccttcaactccctgtcgaagaattcttcaacactggcgtggatcctaacaaggcaatcaagaagaatgatatcgctccgaatgcctcagaaaaggttcaggagcgcctacacaatgaagtcaccgagaagatcagcaagacgatgggttatggtaagagcgatgtcgaggaggcgctgcaggctgccgagccgtccgccatcaaggatgcctacatgattgtgagggaaaacaaaatgatgcaagtgaaccataactccgaagcactgctagcagagccagaagggtcaagtcccatgctcagcatgtcatcagcccgttcaacaatctcgcaggccactaccacccctcggccatatgtgagcaaggttggtatcctgccttctagcttaccggcctatcataaggactatatggagcgtgagaaagctggtagtgtcgaaaactcgccgcccaaggtccttatcaacgatgagcctcaacttaacaggacagatgcagagaaggaagagacagcacgtcgcctgcgacctcattcaaggagtcagctgcgtatagacgaagccaacactaggccccaaggcatgacacctatcaatcctccaaagaagaccaagccagtgcgttggcaatttggcattcgatcacgcaactccccctgggaggccctcctctgtatccacaaggcattgtacaaattaggggctacatatattcctgacgaagattacgagtcgaggacagcggaagagcgagcggaagcttctggcgacagcagttttgtggattctcatgacggctaccgcggttctacatcaagtatcgaccctaagaagcgttataatcttcctgctgacccttggcacatcaacgtgcgttgggatacttctgctatcaagaagaaggctggcaatacacccagcgcgcctagtacgcccagctcgcccagtacaccagatggccatcacgccaaggaaccatttgttgcgctgcacctggacatacagatctacgaaatggagcatggcgtataccttgtcgattttaaatgctcaggatatgagacagcccatgggcggctgcttgaggagaaggacgttaccagccccttcccgtttctagacatggctgccaagttgattatgcagcttgcagaagccgattaa

SEQ ID NO: 1886 - protein, 711 aa, Gibberella zeae PH-1
MAPRGFEDEELTISLSSSHVRRPQQTQPQSQSQQQDDSHDAPQAASRPADAPLKERIKTEQRIGAYKVLRTLGEGSFGKVKLAIHNGTGQQVALKIIARKKLISRDMAGRVEREIEYLQLLRHPHIIKLFTVIKTPNEIIMVLEYAGGELFDYIVQHGRMKEPEARRFFQQMLCAVEYCHRHKIVHRDLKPENLLLDENLNVKIADFGLSNIMTDGNFLKTSCGSPNYAAPEVIGGKLYAGPEVDVWSCGVILYVLLVGRLPFDDEHIPSLFAKIAKGTYSIPQWMPTGAANLIKKMLVVNPVHRATIEDIRADPWFTTELPVYLQLPVEEFFNTGVDPNKAIKKNDIAPNASEKVQERLHNEVTEKISKTMGYGKSDVEEALQAAEPSAIKDAYMIVRENKMMQVNHNSEALLAEPEGSSPMLSMSSARSTISQATTTPRPYVSKVGILPSSLPAYHKDYMEREKAGSVENSPPKVLINDEPQLNRTDAEKEETARRLRPHSRSQLRIDEANTRPQGMTPINPPKKTKPVRWQFGIRSRNSPWEALLCIHKALYKLGATYIPDEDYESRTAEERAEASGDSSFVDSHDGYRGSTSSIDPKKRYNLPADPWHINVRWDTSAIKKKAGNTPSAPSTPSSPSTPDGHHAKEPFVALHLDIQIYEMEHGVYLVDFKCSGYETAHGRLLEEKDVTSPFPFLDMAAKLIMQLAEAD

SEQ ID NO: 1887 - DNA, 1548 bp, Apis mellifera
  CDS (1)..(1548)
atgtctgaaaaaattccatctaatcaaccacaaccaattgttaagataggccattatacccttggacaaaccttaggtgttggaacatttggtaaagtaaaaattggagaacatgtattaacaaaacataaagttgctgtaaaaattttgaatcgtcagaagatcaaaagtttagatgtggttggaaagattagaagagaaatacaaaatcttaaacttttcagacatcctcatattattaaattatatcaagttataagcacacccacagatatatttatgataatggaatatgtatcaggtggagagttgttcgactatattgtgaaacatggcaaactaaaggaatatgaggcacgaagattttttcaacaaattatttctggtgttgattattgtcacagacatatgatagttcatcgagatttaaaaccagaaaatcttttgttagatcacaatctacatgtaaagatagcagattttggtttatcaaatatgatgatggatggagagtttttacgtacttcttgtggttctcctaattatgcagcaccagaagtaatttcgggtaaattatatgctggtccagaagttgatatttggtcttgtggaataatactttatgctttactttgtggtactttaccatttgatgatgaacatgtaccaacacttttccgtaaaattaaatctggagttttccctattccagagtatctgaataaaagtgttgtaagtcttttatgtcatatgttgcaagtggatcctatgaaaagagcaactattgaagatatcaagaaacatgaatggtttcaaaaggatttaccttcatatttatttccttcgcctgttgaacaagactcttctgtaatcgatatagacgcagtaaatgaagtttgtgaaaaatttaatgtaaaagaagctgaagttcattctgcattattaggtggagatcctcatgatcaattggcaattgcttatcacttgataatagacaataaaagaattgcagatgaagctgctaaagcagaattaaaagatttctatgtagcttctagtccacctcctgttgctttcagtcctaatgataccaatagtagtcctctgagaccacatccagaaagaatagcgccattacgagaaagacaaagttctcaaggaagcacatcatcctcaacacaaggtgctcgtggtacaccaataaaacgggctaaatggcatttaggaattcgttcgcaatctaaaccaaatgatattatgaatgaagtttatcgagcaatgaaagctcttaattttgaatggaaaattataaatgcttacagtgttagagttcgtcaaaaaaataaattaacagatagatatagtaagatgtcattacaactttatcaagttgattataaaagttacttattagattttaaatccttatcaaatgaagaagaagatattggacgagatcctacaattctaccacctcaaacaacaggtcatcatacaatggaattctttgaaatgtgtgcagcattaatcacacaattagctcgataa

SEQ ID NO: 1888 - protein, 515 aa, Apis mellifera
MSEKIPSNQPQPIVKIGHYTLGQTLGVGTFGKVKIGEHVLTKHKVAVKILNRQKIKSLDVVGKIRREIQNLKLFRHPHIIKLYQVISTPTDIFMIMEYVSGGELFDYIVKHGKLKEYEARRFFQQIISGVDYCHRHMIVHRDLKPENLLLDHNLHVKIADFGLSNMMMDGEFLRTSCGSPNYAAPEVISGKLYAGPEVDIWSCGIILYALLCGTLPFDDEHVPTLFRKIKSGVFPIPEYLNKSVVSLLCHMLQVDPMKRATIEDIKKHEWFQKDLPSYLFPSPVEQDSSVIDIDAVNEVCEKFNVKEAEVHSALLGGDPHDQLAIAYHLIIDNKRIADEAAKAELKDFYVASSPPPVAFSPNDTNSSPLRPHPERIAPLRERQSSQGSTSSSTQGARGTPIKRAKWHLGIRSQSKPNDIMNEVYRAMKALNFEWKIINAYSVRVRQKNKLTDRYSKMSLQLYQVDYKSYLLDFKSLSNEEEDIGRDPTILPPQTTGHHTMEFFEMCAALITQLAR

SEQ ID NO: 1889 - DNA, 1809 bp, Kluyveromyces lactis NRRL Y-1140
  CDS (1)..(1809)
atgtcgcacgacccaaatcaacaacagccgcatggtggctcaggtcaaggccatcaccaacgccagctgactaaccacgcacaaggccaacatatcggtaagtatcaaatcatcaagaccttgggtgaaggatcatttggtaaagtgaaactggcgtaccatatctctacgggacaaaaagtggcattaaaaatcatcaataagaaggttctagccaagagtgatatgcaaggtagaatcgagagagagatttcgtacttacgtttgttgagacatccacacattatcaaattgtatgacgtgatcaaatcgaaggacgaaattatcatggtgattgagtatgctggtaatgaattatttgattatattgtccaaagagacaagatgcctgaacaagaagcaagaagatttttccaacagattattagcgcagtagattattgtcaccgtcataaaattgtgcatagagatttgaaaccagagaatttactattagacgaacatttgaacgttaagattgctgattttggtttatctaatataatgacagatggtaactttttgaagacttcatgtggttctccaaattatgcggccccagaagtcatcagcggtaaactatatgcaggtccagaggttgacgtttggtcttcaggggttatcttatacgtcatgttgtgtcgtaggttaccattcgatgacgaaagtatcccagtgttgtttaagaacattagcaatggtgtttacaccatacctaacttcctttcccaaggtgctgcgagcttaatcaaaaagatgctcatcgtcaatccagttaatagaattaccgtgcatgaaatcatgcaggatgaatggttcaaagttgatttacccgactacctagttcctgctgaaagcacccatcaagaaaactctgaaagcaaaacagaagatggcggcccatccgtgccactcgaactgatcgatgattcgttagttcaaacgctatcaaacactatgggttatgacgtagatgagatatatgaggctttagagtccgatgaagatcatccatctttaaatgaaatcagggatgcctatcagttaattaaagagaacagaaatttaatcaacgacatcaaggtgaacaagcaacaatctaatgacttggatactttcttatcgcaatctccacccactttcgaacaatccttgcatgcccccccgggctcaaaaaatcgacactcacaccgccattcaaagagaacacagcaacgtacatatcaatatcattatggaaatggttctcaggatggagacagcacgattgcaattttacctagctcgttaccacagatccatagagccaacatggtagcacaagggtcccaggctgctgctaagatttcaccattaagcgtgaaaaaatcaaaaacaaggtggcatttcggtatacgatcaagatcctatccattagacgttatgggagaaatatacattgcattgaaaaacttgggagccgaatgggcgaaaccatcagaagaggacctatggactattagagtccgttggagatataatatcgatatgcctgatgacgaaatgaagaacaagcagattccagatttaatgaagatggtaatccaattgttccaaattgagacaaataactacttagtggatttcaaatttgatggctgggagtccagtaacggtgtagtgtattcaagtcggaacgacgatgaaatgagtacgttcagtgcatacccctttctacatttagcaaccaggctgattatggaacttgcagtgaatagccaaggaagttga

SEQ ID NO: 1890 - protein, 602 aa, Kluyveromyces lactis NRRL Y-1140
MSHDPNQQQPHGGSGQGHHQRQLTNHAQGQHIGKYQIIKTLGEGSFGKVKLAYHISTGQKVALKIINKKVLAKSDMQGRIEREISYLRLLRHPHIIKLYDVIKSKDEIIMVIEYAGNELFDYIVQRDKMPEQEARRFFQQIISAVDYCHRHKIVHRDLKPENLLLDEHLNVKIADFGLSNIMTDGNFLKTSCGSPNYAAPEVISGKLYAGPEVDVWSSGVILYVMLCRRLPFDDESIPVLFKNISNGVYTIPNFLSQGAASLIKKMLIVNPVNRITVHEIMQDEWFKVDLPDYLVPAESTHQENSESKTEDGGPSVPLELIDDSLVQTLSNTMGYDVDEIYEALESDEDHPSLNEIRDAYQLIKENRNLINDIKVNKQQSNDLDTFLSQSPPTFEQSLHAPPGSKNRHSHRHSKRTQQRTYQYHYGNGSQDGDSTIAILPSSLPQIHRANMVAQGSQAAAKISPLSVKKSKTRWHFGIRSRSYPLDVMGEIYIALKNLGAEWAKPSEEDLWTIRVRWRYNIDMPDDEMKNKQIPDLMKMVIQLFQIETNNYLVDFKFDGWESSNGVVYSSRNDDEMSTFSAYPFLHLATRLIMELAVNSQGS

SEQ ID NO: 1891 - DNA, 1869 bp, Debaryomyces hansenii CBS767
  CDS (1)..(1869)
atgtcagagcaacaaggaagtgataatcgccaccaccatcaccatcatcaccataacaatcatcatggtgaccatagtggacaacacgatggccacaacaataaggtacatcaaccccaaccaatagatccaaaggctaacccagcaaacagaatagggaaatatcaagtccttaagacgttaggagaagggtcatttggtaaagttaaattagcgcaacacacaaccacaggacagaaggttgcattgaagatcattaatcgtaaaacgttagctaaatccgatatgcaaggtagagttgaacgagaaatttcatatttgagattgttaagacatccacatataatcaagttatacgatgtgattaagtcgaaggatgagattattatggttattgagtatgcgggtaaggaattgttcgactatattgtgcagaggggtaagatgccagaagatgaggccagaaggttcttccaacagattatagctgcagtggaatactgtcacagacacaaaattgttcatagagatttaaagccggaaaacttattattggatgaacaattgaacgtcaagattgccgattttgggttgtctaacattatgacagatggtaacttcttgaaaacgagttgtgggtcgcccaattacgccgctcccgaagttataagtggtaaattatacgctggtccagaagttgatgtttggtcgtcgggggttattttatacgtcatgttgtgtgggaggttaccgttcgatgacgagttcattcctgcgttgttcaaaaagattagcaatggtgtttacacattgcctaattacctatcccaaggagctaaagatatattaacgaggatgttggtcgtcaacccattaaacagaattactatacacgagattattgaagatgaatggttcaaacaaaacatcgaggaatacttattacctccagatttatcgaagacaaagcacaagaaaatcgaggtcgacgaggacgttattactgctttgcagtcgactatgggttatgacagagatgaaattgttaatgttatcaataaatgtaaccaacataacgcaccacaacaacaatcaaacgaaataattgatgcttacttgttaatgagagaaaatcgtacattggtgaaggacttgaagaattccaaactgaataatatggacactttcttatctcaatcgccgccgccttcgtggaccaacaatgccaataataacagcaacatgaatataaacgtcaaccactccaccaaggcgcctggtgtgcaacaatcattaacatatcaaacgttagctgcagtgccagatttatctacgttacctaactctaccattgccattttaccttcttcgttgccgtcaatccacagagcgtacatgatggaatccaacatggacacccagctgaaaatagcgcccgtgtcacacaaaaagctgaaaacaaggtggcatttcggtataagatctagatcttatccgttggatgttatgggtgaaatctacagagccttgaagaacttgggtgcagagtggtctaaaccaaccgaggaagagttatggaccatcagagtcagatggaagtacggcccatgtatcttacccaatgagaaaagccaagaagagcaacagaaggacattcccgacatgatgaaaatgcaaatccaattattccaattggagccaaacaattatttggtggacttcaagttcgatgggtgggagaactcttctaataaggacgtatctataaaacaagacgtggatgaaatgtcttcgttctcggcttatccgttcttgcatttagctactaggctaatcatggaattagctgttaatagtcaaactaattaa

SEQ ID NO: 1892 - protein, 622 aa, Debaryomyces hansenii CBS767
MSEQQGSDNRHHHHHHHHNNHHGDHSGQHDGHNNKVHQPQPIDPKANPANRIGKYQVLKTLGEGSFGKVKLAQHTTTGQKVALKIINRKTLAKSDMQGRVEREISYLRLLRHPHIIKLYDVIKSKDEIIMVIEYAGKELFDYIVQRGKMPEDEARRFFQQIIAAVEYCHRHKIVHRDLKPENLLLDEQLNVKIADFGLSNIMTDGNFLKTSCGSPNYAAPEVISGKLYAGPEVDVWSSGVILYVMLCGRLPFDDEFIPALFKKISNGVYTLPNYLSQGAKDILTRMLVVNPLNRITIHEIIEDEWFKQNIEEYLLPPDLSKTKHKKIEVDEDVITALQSTMGYDRDEIVNVINKCNQHNAPQQQSNEIIDAYLLMRENRTLVKDLKNSKLNNMDTFLSQSPPPSWTNNANNNSNMNINVNHSTKAPGVQQSLTYQTLAAVPDLSTLPNSTIAILPSSLPSIHRAYMMESNMDTQLKIAPVSHKKLKTRWHFGIRSRSYPLDVMGEIYRALKNLGAEWSKPTEEELWTIRVRWKYGPCILPNEKSQEEQQKDIPDMMKMQIQLFQLEPNNYLVDFKFDGWENSSNKDVSIKQDVDEMSSFSAYPFLHLATRLIMELAVNSQTN

SEQ ID NO: 1893 - DNA, 1740 bp, Yarrowia lipolytica CLIB122
  CDS (1)..(1740)
atggcgaccgaacacgtggaacacgccgaaaacgccaagcagtcgccccaaccgtccttctcgggctccgagagcggccgaattggccggtaccaaatcatcaagactctgggagagggctcctttggcaaggtcaagctcgcctaccatctggccacccacgaaaaagtagcgctcaaaatcatcaacagaaagacgctggccaagtcggatatgcagggccgagtcgagcgggaaatctcgtacctgcgactgctcagacacccccacatcatcaagctgtacgacgtgatcaagtccaaggatgaaatcatcatggtgattgaatttgccggcaaggagctctttgactacattgtgcaacgtggaaagatgcccgaagacgaggctaggcgattcttccaacaaatcatctccgcagtcgagtactgccatagacacaagattgtgcacagagacctcaagcccgagaacctgttgctcgacgaaaacctcaacgtcaagattgccgactttggactctccaacattatgaccgatggtaacttcctcaagaccagttgtggctctcccaactatgctgctcccgaggttatcagtggcaagctgtatgctggccccgaggtcgacgtgtggtcctgtggtgtcattctatacgtcatgctgtgcggccgtctcccctttgacgacgaattcatccccaacctcttcaagaagatctccaatggtgtctacaccattcccccctatctgtctgccggcgcaaaacacctgcttcaacagatgctggtggtcaaccccctgaaccgaatcaccgtccagggcatcatggaagacccctggtttaaacagggcattgccgagtaccttgttccacgtgacctgaagcctgatcaggtggaaatcgacgacaaggttgtgggtgctctttcagacaccatgggctacgaccgagaccaggtctacgaggctctcaaggctcctaaatccgacggaaccgaaatccgagatgcctacgacctcatgaaggagaacagacagcagttggagaaggactcgaccgtgttcgacaaggtggacgaatccggcaagcctaagcaccagttctcgcgaaagaacccgccggctctgacgtttgactcacatcacatgcccaccattgtcgaccattctgatcttcgaacccctaacacaaccattgctgttcttccctcctcgctgccagcataccatcgggccaacatgatggcccatggtcccgctaccctgcgtaagctgaatcccatctcatcgcgaaaatcaaagacccgatggcatttcggcattcggtccaagtcgtaccctctcgacgtgatgggtgagctctaccgagctctcaagaacctgggagccgagtgggcaaagccatcagagaacgacctgtggaccatcagggtgcgatggagatacacccctgaaaaggatgagtcggacagcacaactaagccagacagcggactgcttaagatgcagattcaactgtatctgctggagcagaactcgtacttggtggacttcaagtttgacggctgggagtgcgagacggagagcggtgagattaagacccgcgatgtcgcccaggtgtcgaattcaaagtccgccaacgagaccttcacgttttccgcataccccttcttgcatctggccacccggctcattatggagctggccgtgagttctcagaaggagagtgagaagtaa

SEQ ID NO: 1894 - protein, 579 aa, Yarrowia lipolytica CLIB122
MATEHVEHAENAKQSPQPSFSGSESGRIGRYQIIKTLGEGSFGKVKLAYHLATHEKVALKIINRKTLAKSDMQGRVEREISYLRLLRHPHIIKLYDVIKSKDEIIMVIEFAGKELFDYIVQRGKMPEDEARRFFQQIISAVEYCHRHKIVHRDLKPENLLLDENLNVKIADFGLSNIMTDGNFLKTSCGSPNYAAPEVISGKLYAGPEVDVWSCGVILYVMLCGRLPFDDEFIPNLFKKISNGVYTIPPYLSAGAKHLLQQMLVVNPLNRITVQGIMEDPWFKQGIAEYLVPRDLKPDQVEIDDKVVGALSDTMGYDRDQVYEALKAPKSDGTEIRDAYDLMKENRQQLEKDSTVFDKVDESGKPKHQFSRKNPPALTFDSHHMPTIVDHSDLRTPNTTIAVLPSSLPAYHRANMMAHGPATLRKLNPISSRKSKTRWHFGIRSKSYPLDVMGELYRALKNLGAEWAKPSENDLWTIRVRWRYTPEKDESDSTTKPDSGLLKMQIQLYLLEQNSYLVDFKFDGWECETESGEIKTRDVAQVSNSKSANETFTFSAYPFLHLATRLIMELAVSSQKESEK

SEQ ID NO: 1895 - DNA, 1857 bp, Candida albicans SC5314
  CDS (1)..(1857): transl_table=12
atgtcagagcaagcccaaactcaggtctctgctgatcaacagcaacaccaacataatcaccaccaccatcatcatcatcaccatcataatgaaaatcaatcgcaacagcaagttccgatcgaccccgctgcaaatccagcaaatagaatagggcggtatcaaattctcaagacattaggtgaagggtcatttggtaaagtgaaattggctcaacacttgggcacaggtcaaaaagttgctttgaaaatcattaatcgtaaaacattagccaagtctgacatgcagggtcgtgttgaaagagagatttcatatttaagattattgagacacccacatatcattaaattatacgatgtcataaaatccaaagatgaaatcattatggttattgaatttgccggtaaagaattgtttgattatattgttcaaagaggtaaaatgccagaagacgaagccagaagatttttccaacaaattattgctgctgtagagtattgccatcgtcacaaaattgtccatcgtgatttaaagccagaaaacttattgttagacgaccagttgaatgttaaaattgctgattttgggttatccaatatcatgaccgatggtaatttcttaaagacatcttgtggatctcctaattatgccgctccggaagttatttctggtaagttgtatgctggtccagaagttgatgtttggtcagcaggggttattttgtatgtcatgttgtgtggtagattaccattcgatgacgagttcatccccgccttatttaaaaagatcagtaatggtgtttacactttgcctaattatttgagtgctggagctaagcatttgttgacaagaatgcttgttgttaacccattgaacagaatcaccatccatgaaattatggaagatgaatggtttaaacaagatatgccagattatttgttaccgccagatttatccaaaaacaagaatagcaagattgacgttgacgaagatgttatccgtgcattatcggtgacgatgggatatgaccgtgatgaaatcgttaatgtaattgaaaaggcaaacaaacaagttgctgcaggaaactcatcgtctcagcaatcgaaatcaagtaatgagatattagatgcctatttattaatgaaagagaatcatgcattggtgaaagacttgaaaaagagtaaatcagaaaacattgaatcattcttatcccaatctccaccaccaagtccattccctaacgcaggatcaacaagctcggctcctggtgtgcagcaatctttaacttatcaaacattagctacagtgcctgacttgtcaacgttaccaaattcgaccattgccatattaccaaccagtttgccttcgatacatcgagcctatatggccgaaactaaacagaatggtgatcctctgcaacaacatgctcctcctccaactaagaaactgaaaacaagatggcattttggaatcagatcaagatcatatcctctagatgtaatgggagaaatttatcgtgccttaaagaatttgggcgcggaatgggccaagcctactgaagaagaattatggacaataagagtaagatggaaatatgacactagtgcacaatttgaatgtggtagtgcaccaaatttgatgaagatgcaaatccaattattccaattggaaccaaataactatttagttgatttcaaatttgatggttgggaactggcacatggaaatgcaggtaccgattctcctcaaagtcacagacaacaagacctagatgaagttgggtcattctctgcttatcctttcttacatttagctactagattaattatggaattagccgtaaatagtcaaagtggataa

SEQ ID NO: 1896 - protein, 618 aa, Candida albicans SC5314
MSEQAQTQVSADQQQHQHNHHHHHHHHHHNENQSQQQVPIDPAANPANRIGRYQILKTLGEGSFGKVKLAQHLGTGQKVALKIINRKTLAKSDMQGRVEREISYLRLLRHPHIIKLYDVIKSKDEIIMVIEFAGKELFDYIVQRGKMPEDEARRFFQQIIAAVEYCHRHKIVHRDLKPENLLLDDQLNVKIADFGLSNIMTDGNFLKTSCGSPNYAAPEVISGKLYAGPEVDVWSAGVILYVMLCGRLPFDDEFIPALFKKISNGVYTLPNYLSAGAKHLLTRMLVVNPLNRITIHEIMEDEWFKQDMPDYLLPPDLSKNKNSKIDVDEDVIRALSVTMGYDRDEIVNVIEKANKQVAAGNSSSQQSKSSNEILDAYLLMKENHALVKDLKKSKSENIESFLSQSPPPSPFPNAGSTSSAPGVQQSLTYQTLATVPDLSTLPNSTIAILPTSLPSIHRAYMAETKQNGDPSQQHAPPPTKKSKTRWHFGIRSRSYPLDVMGEIYRALKNLGAEWAKPTEEELWTIRVRWKYDTSAQFECGSAPNLMKMQIQLFQLEPNNYLVDFKFDGWESAHGNAGTDSPQSHRQQDLDEVGSFSAYPFLHLATRLIMELAVNSQSG

SEQ ID NO: 1897 - DNA, 2262 bp, Tribolium castaneum
  CDS (1)..(2262)
atgcagaaggaaaacacgaacccttcgccggagatacaccagtacgtggggccctaccggctggagaagacgctcggaaagggacaaacgggtcttgtcaaacttggagtaaactgcgtgactggaaaaaaggtcgcgattaaaataatcaatcgcgagaaactcagtgagagcgtcttaatgaaagtagagcgtgaaatagcgataatgaagcttatcgaccacccccacgtcttggggttgactgacgtttacgaaaataagaaatatttgtacctagttttagagcacgtctcaggcggcgaacttttcgattatctagtcaaaaaaggtagactcacacctaaggaggctcgcagatttttccgccagatcatatccgcccttgatttctgccacagccactcgatttgccatcgggacctcaagccggaaaatctcctcctggacgaaaaaaacaacataaaaatcgccgattttggcatggcgtcgttacaaccaatggggtccatgttggagacaagttgtgggtccccccattatgcatgtcccgaagttatacggggggagaagtacgatgggaggaaagcagacgtgtggtcatgtggggtgattttgtacgctcttttagtaggggctttgcccttcgatgatgataatttgagacagttgttggagaaagtgaaaaggggggtgtttcatataccgcattttgtaccacccgactgtcaaagtttgttaagggggatgattgaagtcaatccggaaaaaagacttacgctttctgagatcaataaacacccatgggtgacggccggtggtaaaggcgagcttgaactcgaattacccatgatggaagtggtccaaacccatgtcttaccatcgattgaggccgtcgatcctgacgtattgcaagccatctgtagtctgggctgtttcaaagagaaagagaagttgattcaacacctactaagtccaaaccacaacaccgaaaaagtcatctatttcctcctcctcgagcgcaaacgccgtcgtcccgcctacgaagacgacaccgaatcaatcctgaggatgcgcgtgtccgaaacgtcggaccctccgaaaaagcgcatcgacacgtgtcgtgtcaacggccaaagcggcctccaattcggacaaataagcgaaggttcgcctttaacgccccgccgctcgcactacaagcgccaccacgcgaggcggagcccctccacaggctccacccacagcagtctgggcatccactcgccgacgagcccgcctccggccacgcctacgcaccatcgggccaatagcagtggcggcacggcgacgtcgtccgtactgacgtcacccgaaagtgatagtttaggggtggggccaccgtcgattttgacagcgatgactccgcccggttcgccacattcgacagcgacgagccaccactggcggtcgaggcttaccacgatcaagaacagttttttgggctcgccaaggtttcaccgccggaaattgcaaacgtcgtcggaggaagtgcatttaacgccggaatcgtcgcccgaattgacgaaaaaatcctggtttgggagcctgatgacgaccgaaaaggacgaaacgtttacgattttggtcaaagggaagcctctggcgacggtcaaggccgacctgattcacgcatttttgtcgatagccgagctgagccactccgtgtcgagtccgatgtcgttccgcgtggaatacaagcggggaaccaccggtccggccatgttccagcgccatgtccgtttccaagtcgatatttcaacaataacaaagcaagtcggtgacaatgcaaaagaacacctttacgctatcactttcactctcttatcaggaaacatccggcgtttccggcgcgtttgcgaacacatccaggcgcaagtgtgcacccgccggcccccaccgagcccgagggcgcagcgcaagttcaccaccgaactctccgaaagttcgagctgtggctccgattccagcgaactgtacctcaacgcccggcagttgaacgttttgcaactggaaggcagcgatctagagagcgaatgtagcgtgtttgacgtgcgcaccgctgcgcgggaggtgtcacgacgggcctccaccaataacaacacagaagcgtgcgaacagaacacgccggggactcctaaggccgttcggtccaattcggaaaatacggattcgtgcgaaaagacgtgcattacgacgatgtcggggagttccatagcgtaa

SEQ ID NO: 1898 - protein, 753 aa, Tribolium castaneum
MQKENTNPSPEIHQYVGPYRLEKTLGKGQTGLVKLGVNCVTGKKVAIKIINREKLSESVLMKVEREIAIMKLIDHPHVLGLTDVYENKKYLYLVLEHVSGGELFDYLVKKGRLTPKEARRFFRQIISALDFCHSHSICHRDLKPENLLLDEKNNIKIADFGMASLQPMGSMLETSCGSPHYACPEVIRGEKYDGRKADVWSCGVILYALLVGALPFDDDNLRQLLEKVKRGVFHIPHFVPPDCQSLLRGMIEVNPEKRLTLSEINKHPWVTAGGKGELELELPMMEVVQTHVLPSIEAVDPDVLQAICSLGCFKEKEKLIQHLLSPNHNTEKVIYFLLLERKRRRPAYEDDTESILRMRVSETSDPPKKRIDTCRVNGQSGLQFGQISEGSPLTPRRSHYKRHHARRSPSTGSTHSSLGIHSPTSPPPATPTHHRANSSGGTATSSVLTSPESDSLGVGPPSILTAMTPPGSPHSTATSHHWRSRLTTIKNSFLGSPRFHRRKLQTSSEEVHLTPESSPELTKKSWFGSLMTTEKDETFTILVKGKPLATVKADLIHAFLSIAELSHSVSSPMSFRVEYKRGTTGPAMFQRHVRFQVDISTITKQVGDNAKEHLYAITFTLLSGNIRRFRRVCEHIQAQVCTRRPPPSPRAQRKFTTELSESSSCGSDSSELYLNARQLNVLQLEGSDLESECSVFDVRTAAREVSRRASTNNNTEACEQNTPGTPKAVRSNSENTDSCEKTCITTMSGSSIA

SEQ ID NO: 1899 - DNA, 1974 bp, Bacillus licheniformis ATCC 14580
  CDS (1)..(1974): transl_table=11
gtgttaatcggcagacggatcagcggacgttacgaaatcctgcgcgccatcggcggcggggggatggcgaacgtttatttagcgctggacatcatcctcgaccgtgaagtcgcgattaaagtgctgcggtttgacttcgttcacgatgccgattttatcaggcggttcagacgggaagcgcagtccgctgcaagcctcgaccacccgaatatcgtcagcatttatgatgtcggagaagaagatgacatctattatatcgtgatggagtatgtcgaggggatgaccctgaaagaatacataaatcgaacaggcccacttcatccgaaagaagcggtccaaatcatggagcagatcgtatccgccatcgcacatgcccatgataaccagattgtccaccgggatattaagccccacaacattttgatcgaccatatgggccacattaaagtgactgatttcggcatcgccatggcgctcagctcgacgaccatcacgcacaccaactcggttttgggctctgtccattatttgtcgcccgaacaggcgagaggcggattatcgacgaaaaaatccgatatctactcgctcggcatcgtgcttttcgagctgctgacggcgcgtatgccgtttgaaggagaatcggcggtcagcatcgcgctgaaacatctccaatcagaaacgccgtcggtgaaaagatggaacccggccgtgccgcaaagcatagaaaacgtcgtcctgaaagcgatggcaaaagatccattccatcgctatgaagcggccgaagagatggaaaacgatttgaaaacggctttcgacccggaccggctcaacgaaaagcgcttcacgattccatccgatgatgagatgacgaaagcagttccgatcatcaagaatctgccggaaaacgggagcagctcgcaatccggcggcggagaagaggaagcggctccattatcaaaaaaagaaaagaagaagcaggcaaaagcaaacaagaagaaaaaaagaaagaaatggccgcttatattgctgacggtgtttttcgttctggctgcgtcagccgtcttggctttaacggtgtttccgtcgctctttattccgaaagatgtggccgttcccgatgttgccggccttgaatatgaagaagccgtcatcaagcttgaagacgaaggatttgaagttgatccgaatgctgaagacattgccgacgataaaattgaagaagggctgatcgtgaagacggaccctgcagccggcgatatcgtgaaggaaggttcaactgtcaagctatataaaagctcaggcaaagagaaaactgaagtcgatgatgtggtcggccagaaagtcgatgccgccaagaagcttcttgagcaaaaaggctttaaaaacatcaagacagaagaagtgcacgatgaagaagaagcgggaaccatcatcgaacaggaccctgcagccggaaccgaaatcgttgccgccgacgacgaggtcaaattaacggtcagcctcggtccggaagccattactttaagggatttaaaaacatacagcaaacaggcggcttcgggctatttggacgaccatcagcttgtccttgtcgaaaaggaggcgcattctgaagacgtgccggaaggtcaggtcattaaacaaaagccggaggcgggggcatcagtcaagccgggagacaaagtcgaggtcacgttttcgctcggacctaaacaaaagcccgtcaaaacggtgaccgagaaaattgatattccttatgaaccgggagcggcgggcgaagaacaaaacgtccaaatttcgatcgatgatgaagaacacagcatttctgacgtctacgaaaatttcaaaatcacagcgccggcagagcggacgatcaaattcaggattgcgcccggccaaaaagggtattatcaagtaacgatcaacgataaagtagtcaggtcaaaaacgattgaatatcctgaggatgaataa

SEQ ID NO: 1900 - protein, 657 aa, Bacillus licheniformis ATCC 14580
MLIGRRISGRYEILRAIGGGGMANVYLALDIILDREVAIKVLRFDFVHDADFIRRFRREAQSAASLDHPNIVSIYDVGEEDDIYYIVMEYVEGMTLKEYINRTGPLHPKEAVQIMEQIVSAIAHAHDNQIVHRDIKPHNILIDHMGHIKVTDFGIAMALSSTTITHTNSVLGSVHYLSPEQARGGLSTKKSDIYSLGIVLFELLTARMPFEGESAVSIALKHLQSETPSVKRWNPAVPQSIENVVLKAMAKDPFHRYEAAEEMENDLKTAFDPDRLNEKRFTIPSDDEMTKAVPIIKNLPENGSSSQSGGGEEEAAPLSKKEKKKQAKANKKKKRKKWPLILLTVFFVLAASAVLALTVFPSLFIPKDVAVPDVAGLEYEEAVIKLEDEGFEVDPNAEDIADDKIEEGLIVKTDPAAGDIVKEGSTVKLYKSSGKEKTEVDDVVGQKVDAAKKLLEQKGFKNIKTEEVHDEEEAGTIIEQDPAAGTEIVAADDEVKLTVSLGPEAITLRDLKTYSKQAASGYLDDHQLVLVEKEAHSEDVPEGQVIKQKPEAGASVKPGDKVEVTFSLGPKQKPVKTVTEKIDIPYEPGAAGEEQNVQISIDDEEHSISDVYENFKITAPAERTIKFRIAPGQKGYYQVTINDKVVRSKTIEYPEDE

SEQ ID NO: 1901 - DNA, 1833 bp, Carboxydothermus hydrogenoformans Z-2901
  CDS (1)..(1833): transl_table=11
atgatcgggagagtattagccggtaggtataaaatccttgaaaccctgggtggcggggggatggcggttgtttataaaggacaggatttacttttaaaccgctacataaccatcaaaattcttcgacctgaatttaccagtgatgaagaatttgtagaaagatttaaacgggaggctaaggctcttgccagcctttctcatcccaatatcgttaacatttacgatgtcggacaggaagagaatacttattttttagtgatggaatatgttgaaggtaaaaatttaaaagaaataattcgagaaaaaaatttaggtttacgtgaaagtgtgaggattgttttacaggttgctttggctttgggtcatgcccatcaacacggtatcttgcaccgggatgtaaaaccacaaaatatcattatcactcccgaaggaatcgccaaattaaccgattttggcattgccggtaatgttacctcctcgacaatcaacaaagataaagaaattttgggttcagtccattacctatcgcccgagcaggccaaaggtgaaaacttgacttttgcttccgacctttattctttaggagtggtgttttatgaattagtgacaaaaagactgccttttaccggtgattccccaattgctgtggctttaaagcagataaatgatcttccaaaaccaccttcctcttataataaaaatattcctgacgaactagaccgaataatcttgaagttattgagtaaaaagccagagcaaagatataaatccgcttatgagttaattgccactttaaaaaaattggatttgccggaagaaaattttgctgaggatagtacgatgaccattatattggataaaaaccagtttccggaagttcgcggtaaaaaaagattgaaaacttccggaatcatagccctggtggctttgtttctggctttaattggtggtttggggtattttttgtataattattttaatgtcaaagaagcggtgattcccgaggttcgcgggcttggaattggggaggcgaagcaaaagttagaggaacttggttttaccaatatcaatatttcctcggcataccacgaaacagttcccaaggataaagtgatttctattgaccctttaccgggagaaagggttaaagttgctcgaccgatttatttggttgttagtaaaggaaaggaaatggtgctggttcccgatgtgcgggaaaaagatattcatgatgcccgggtgattttggaaaatgcaggattaaaagtaggtgaaataaacgaaatatatgacgaacgtttagcaccgggtaccgttattgaacaggacccagaaccaaacactgaagtggaaaagggatacaaaataaaacttattttaagcaagggagcaaaaccggcctggattaccgtacctgatttgaggggcaaacaaattgaagaggctcgaaaaacactgcagcaggtgaaattagtccttgatgatactattaaagaggtagatagtaccgaatattttgccgggcaagttgttactcaaaatccccttccggggagtttagtggaggaaggctcaaaagttagaattaccgtatctcgtggccctggcccggtgagaaagtcggttttagtgactttagcggtgccaaatgatggccagaaacattcggtaaaaattgttgtaaaagatgcaagaacttctgaagtaattgtttatgctaatgatagtgaagagccaggaaccgttctggaaaaagaagtatactattatggaaaagggagaattaaagtgtatttagatgatgtggtgatagaagacaaggaggtgaactaa

SEQ ID NO: 1902 - protein, 610 aa, Carboxydothermus hydrogenoformans Z-2901
MIGRVLAGRYKILETLGGGGMAVVYKGQDLLLNRYITIKILRPEFTSDEEFVERFKREAKALASLSHPNIVNIYDVGQEENTYFLVMEYVEGKNLKEIIREKNLGLRESVRIVLQVALALGHAHQHGILHRDVKPQNIIITPEGIAKLTDFGIAGNVTSSTINKDKEILGSVHYLSPEQAKGENLTFASDLYSLGVVFYELVTKRLPFTGDSPIAVALKQINDLPKPPSSYNKNIPDELDRIILKLLSKKPEQRYKSAYELIATLKKLDLPEENFAEDSTMTIILDKNQFPEVRGKKRLKTSGIIALVALFLALIGGLGYFLYNYFNVKEAVIPEVRGLGIGEAKQKLEELGFTNINISSAYHETVPKDKVISIDPLPGERVKVARPIYLVVSKGKEMVLVPDVREKDIHDARVILENAGLKVGEINEIYDERLAPGTVIEQDPEPNTEVEKGYKIKLILSKGAKPAWITVPDLRGKQIEEARKTLQQVKLVLDDTIKEVDSTEYFAGQVVTQNPLPGSLVEEGSKVRITVSRGPGPVRKSVLVTLAVPNDGQKHSVKIVVKDARTSEVIVYANDSEEPGTVLEKEVYYYGKGRIKVYLDDVVIEDKEVN

SEQ ID NO: 1903 - DNA, 1425 bp, Populus trichocarpa
  CDS (1)..(1425)
atggtgagaaaggaggaggagaagcagaagaaggagaagggaatgcaacttggaaaatacgagctcggaaggactctaggcgaaggcaatttcgggaaagttaaactggctaagaacattgagactggccaaccttttgctgttaagattcttgaaaagaacagaatcatcgacctcaagatcaccgatcagattaaaagggagattgcaactttgaagctcctcaagcatccaaacgttgtcagattacatgaggtcctagcaagcaaatccaagatttatatggtccttgaatatgtaactggaggggaattgtttgatagaatcgcatcaaagggcaagcttccagaagcagagggcaggaagatgttccagcagttgattgatggtgtcagttactgtcatagcaaaggtgtttttcacagggatcttaagctagagaatgttcttgttgatgcaaaaggaaacatcaagatatctgattttggactcagtgctttgccccagcattttagggatgacgggttattgcatacaacctgtggaagtcctaactatgttgcgcctgagattctctcgaatagaggttatgatggtgctacatcagatatatggtcatgcggtgttattttgtatgtaattctcacagggtacctgccttttgatgatagaaatcttgctgttctatatcaaaagatcttcaagggggatgctcaggtaccaaaatggttgtcaccgggtgctaaaaatatgataaagaggattcttgatcccaaccctgttaccagaataacaacagcagatatcaaagctgatgaatggtttaagctggactatactccgatggattctgcagaagaacaagatgatgtatatatcgacgacgcagctttttcgattcaggaagcgccatcagaagatgggagtccaaaatcacccaacctcatcaatgcttttcaattaattgggatgtcctcatgcctagacctctcaggtttatttgagaaagaggatgtttctgagaggaagatcagatttacatccaatcattctatgagcgatttgctcgagaagatagaggatattgtgacggagatggggtttcgagtccagaagagaaatggaagatttcaagtgattcaagagcacagaggaaagaaaagttcgggcagtctttctgttgccacagaggtgtttgagattagcccatcactgtatgtagttgaattaagaaaatcttatggagattcttcagcatacagacagttgtgtacaaagctatcaaatgatttaggtgtcccctcaagtccaggactgttgaccacagaaggtacaagcagaccacttgagcatatgcctactactagacttccattcttgaaatggagaaacttgagtttggatgcaagaacattggacaggtaa

SEQ ID NO: 1904 - protein, 474 aa, Populus trichocarpa
MVRKEEEKQKKEKGMQLGKYELGRTLGEGNFGKVKLAKNIETGQPFAVKILEKNRIIDLKITDQIKREIATLKLLKHPNVVRLHEVLASKSKIYMVLEYVTGGELFDRIASKGKLPEAEGRKMFQQLIDGVSYCHSKGVFHRDLKLENVLVDAKGNIKISDFGLSALPQHFRDDGLLHTTCGSPNYVAPEILSNRGYDGATSDIWSCGVILYVILTGYLPFDDRNLAVLYQKIFKGDAQVPKWLSPGAKNMIKRILDPNPVTRITTADIKADEWFKLDYTPMDSAEEQDDVYIDDAAFSIQEAPSEDGSPKSPNLINAFQLIGMSSCLDLSGLFEKEDVSERKIRFTSNHSMSDLLEKIEDIVTEMGFRVQKRNGRFQVIQEHRGKKSSGSLSVATEVFEISPSLYVVELRKSYGDSSAYRQLCTKLSNDLGVPSSPGLLTTEGTSRPLEHMPTTRLPFLKWRNLSLDARTLDR

SEQ ID NO: 1905 - DNA, 1395 bp, Populus trichocarpa
  CDS (1)..(1395)
atggaaaataaacctagtgtgttgacacaaaagtatgaagtggggagattgcttggccaaggcacctttgccaaggtgtattttgcaaggaacatcaaaacaaaccagagtgtagccattaaattaattgagaaagagaaggtcttgagggttgggcttgttgatcagatcaagagagaaatatatgtaatgagacttgttagacaccctaatatcataaaactttacgaggtgttggccaccaaaagtaagatttactttgtaatggaatatgctaaaggtggtgaactctttaacaaggtctctaaaggaaggttaaaggaggatgttgcctggaaatattttcaacagctgatcaatgcagttgatttctgccacagcagggatgtttatcatcgtgatataaagccagagaatctgttgttggatgagaatgagaatctaaagattagtgattttgggttgagtgccctcgctgaatccaagcgacaagatggattactccacacaacttgtgggacacctgcatatgttgctcctgaagtgatcaaaaggaaaggttatgatggtgctaaggctgatatttggtcctgtggcgtggttttgttcgtgttattggctggttatctcccatttcatgatacaaatttgatggagatgtacagaaaaattgacaaagcagagttcaaatgccctaattggtttccaacagatgctcgtaagttgctgcgtaagatcctggatccaaaccccaatacaaggatctccattgctgagattaaggaaagttcttggtttagaaaagggttgcccagacaaagtaaaactgaaacagtaggcagggaggcagctgctctgggtaggaatggttctggtccttctgagaatagcagtgtggcctgtgaggcaaagcaagaatcagccaaacctccatacttaaatgcttttgatatcatttccctttctgctggatttgatctatcaggattatttgacgataagtatccgaacagagaagcaagatttacatctgcacaaccggcctcagtcgtcatctccaaactggaagatatttctaagtgtctaaagctgaaggtaatgaagaaagatgcaggtttgttgaaaatggaaggaatgaaggaaggtagaaaggggctgttggccattgatgctgagatctttgaactgactccaaatttccatttggtggagctgaagaaaactaatggagatacactggaatatcagaagatgttgaacgaagatataaggcctgctctcaaagatattgtttggttgtggcagggtagcaagaaccacaacagcagcagctgcagctgcagcaatgacattgaccaaactattagtaacagtttgcttgagatattctcttaa

SEQ ID NO: 1906 - protein, 464 aa, Populus trichocarpa
MENKPSVLTQKYEVGRLLGQGTFAKVYFARNIKTNQSVAIKLIEKEKVLRVGLVDQIKREIYVMRLVRHPNIIKLYEVLATKSKIYFVMEYAKGGELFNKVSKGRLKEDVAWKYFQQLINAVDFCHSRDVYHRDIKPENLLLDENENLKISDFGLSALAESKRQDGLLHTTCGTPAYVAPEVIKRKGYDGAKADIWSCGVVLFVLLAGYLPFHDTNLMEMYRKIDKAEFKCPNWFPTDARKLLRKILDPNPNTRISIAEIKESSWFRKGLPRQSKTETVGREAAALGRNGSGPSENSSVACEAKQESAKPPYLNAFDIISLSAGFDLSGLFDDKYPNREARFTSAQPASVVISKLEDISKCLKLKVMKKDAGLLKMEGMKEGRKGLLAIDAEIFELTPNFHLVELKKTNGDTLEYQKMLNEDIRPALKDIVWLWQGSKNHNSSSCSCSNDIDQTISNSLLEIFS

SEQ ID NO: 1907 - DNA, 1323 bp, Populus trichocarpa
  CDS (1)..(1323)
atgagtcaacctaaaatcaagcgtagagtgggtaaatatgaagtgggaaggacaattggtgaaggaacgtttgcaaaagtaaagtttgcgaggaattctgagacaggggaacctgtggccctgaagatccttgataaagagaaggttctcaaacacaagatggctgaacagatcaagcgggagattgagacaatgaagcttatcaagcatccaaatgttgttcgattatatgaggtgatgggaagtaagacaaagatatttattgttttggagtttgtcaccgggggagagctttttgacaaaattgtaaaccatggacggatgagagaagatgaagctcggagatatttccagcagcttatcaatgtagtggactattgccacagcaggggtgtttttcacagagaccttaagccagaaaatttgttgttggatgcttatgggaacctcaaagtttcagattttgggttgagtgcgctgtcccaacaagtcagggatgatggcctgcttcatacaacttgtggaactccaaattatgttgctcctgaggttcttaatgatagaggttacgatgggactactgcagatttgtggtcatgtggagtgatactttttgtattgctagcagggtatttgcctttcgatgattcaaatgttatgaacctgtataaaaaaatctcagcagctgaatttacttgccccccttggctctcttttggtgccatgaaattgataactcgaattttggatcccaaccctatgactcgcatcaccatacctgaaatcctggtagatgaatggtttaagaaaggttataagcctcctgtgtttgaagagaaagaggacaccaacttggatgatgttgaagctgtttttaaggactcagaagaacaccatgtaacagagaagaaggaagaggagcaaccaacagctatgaatgcattcgagttaatttctatgtctaaaggactaaatcttgggaatttgtttgatggagaacaggaatttaagagggaaacgaggttcacgtctagatgccctgccaatgaaataattcacaagattgaagaagctgccaagccccttggttttgatgtccacaagaaaaattacaagatgaggcttgagaatgtgaaggctgggagaaagggaaacctgaatgttgctaccgagatatttcaagtggcaccttcccttcatatggttgaagtgcgtaaagcaaagggagacactttggagttccataagttctataaaagcctttcaacctgccttgatgatgttgtctggaaaactgaggaggacatgcaagaaacgaagtaa

SEQ ID NO: 1908 - protein, 440 aa, Populus trichocarpa
MSQPKIKRRVGKYEVGRTIGEGTFAKVKFARNSETGEPVALKILDKEKVLKHKMAEQIKREIETMKLIKHPNVVRLYEVMGSKTKIFIVLEFVTGGELFDKIVNHGRMREDEARRYFQQLINVVDYCHSRGVFHRDLKPENLLLDAYGNLKVSDFGLSALSQQVRDDGLLHTTCGTPNYVAPEVLNDRGYDGTTADLWSCGVILFVLLAGYLPFDDSNVMNLYKKISAAEFTCPPWLSFGAMKLITRILDPNPMTRITIPEILVDEWFKKGYKPPVFEEKEDTNLDDVEAVFKDSEEHHVTEKKEEEQPTAMNAFELISMSKGLNLGNLFDGEQEFKRETRFTSRCPANEIIHKIEEAAKPLGFDVHKKNYKMRLENVKAGRKGNLNVATEIFQVAPSLHMVEVRKAKGDTLEFHKFYKSLSTCLDDVVWKTEEDMQETK

SEQ ID NO: 1909 - DNA, 1323 bp, Populus trichocarpa
  CDS (1)..(1323)
atgagtcaacctaaaattaagcgtagagtgggtaagtatgaaatgggaagaacaattggtgaaggaacatttgcaaaagtaaagtttgcaaggaattctgagacaggggaacctgtggctctgaagatcctcgataaagagaaggttctcaaacacaaaatggctgaacagatcaagcgggaggtagcgacaatgaagcgtatcaagcatccaaatgttgttcgattatatgaggtgatgggaagcaagacaaagatatttattgttttggaatttgttaccgggggagagctttttgacaaaattgtaaaccatggacggatgagagaagatgaagctcggggatatttccaccagcttatcaatgcagtcgattattgccacagtaggggtgtttttcacagagaccttaagccagaaaatttgttgttggatgcttatgggaacctcaaagtttcagattttggattgagtgcgctgtcccaacaagtcagggatgatggcttgcttcatacaacttgtggaactccaaattatgttgctcctgaggttcttaatgatagaggttatgatggggctcctgcagatttgtggtcatgtggagtgatactttttgtattgctagcagggtacttgccttttgatgattctaatcttatgaacctgtataaaaaaatttcagcagctgaatttacttgccccccttggctctcttttggtgccatgaaattgataactcgaattttggatcccaaccctatgactcgtatcaccgtatctgaaatcctggtagatgaatggttcaaaaaaggttataagactcctgtgtttgaagagaaagaggacaccaacttggatgacgttgaagctgtttttaaggactcagaagaaaaccatgtaacagagaaaaaggaagaagagcaaccaacagctatgaatgcgtttgagttaatttcgatgtctagagggctaaatcttgggaatttgtttgatggagaacaggaatttaagagggaaacacggttcacgtctaaatgccctgccaatgaaataattcacaagatcgaagaagctgcaaagccccttggttttgatgtccacaagaaaaactacaagatgaggcttgagaatgtgaaggctgggagaaagggaaaccttaatgtcgctaccgagatatttcaaatggcaccctcgcttcatatggttgaagtgcgtaaagcaaaaggagacactttggagttccataagttctataaaagcctttcaacctgccttgacgatgtcgtctggaaaactgaggaggacatgcaagaaacaaagtaa

SEQ ID NO: 1910 - protein, 440 aa, Populus trichocarpa
MSQPKIKRRVGKYEMGRTIGEGTFAKVKFARNSETGEPVALKILDKEKVLKHKMAEQIKREVATMKRIKHPNVVRLYEVMGSKTKIFIVLEFVTGGELFDKIVNHGRMREDEARGYFHQLINAVDYCHSRGVFHRDLKPENLLLDAYGNLKVSDFGLSALSQQVRDDGLLHTTCGTPNYVAPEVLNDRGYDGAPADLWSCGVILFVLLAGYLPFDDSNLMNLYKKISAAEFTCPPWLSFGAMKLITRILDPNPMTRITVSEILVDEWFKKGYKTPVFEEKEDTNLDDVEAVFKDSEENHVTEKKEEEQPTAMNAFELISMSRGLNLGNLFDGEQEFKRETRFTSKCPANEIIHKIEEAAKPLGFDVHKKNYKMRLENVKAGRKGNLNVATEIFQMAPSLHMVEVRKAKGDTLEFHKFYKSLSTCLDDVVWKTEEDMQETK

SEQ ID NO: 1911 - DNA, 1299 bp, Populus trichocarpa
  CDS (1)..(1299)
atggagcccccgccaccatcaacactacaaacgaccacctcgataccgaccacgcttctcaacaaatacgaattaggccgattactaggccgtggtagctttgcaaaagtctatgcagcccgctctttatccgacaagacacagctggcagcgatcaagatcatagacaaaacaaaaaccgatgctgccatggaacctcgtatcatctccgagatttcagccatgcaccgcctgcaacaccacccaaccattctcaaaattcacgaagttatggcaacaaaaaccaaaatctacctcgtcatggaacttgcctcaggaggtgatctttactctaagatccgcaagattgggaaactcaaagaatcagccgcacgtcgttactttcaacaacttgtgtctgccctccacttctgccaccaaaatggtgtctctcaccgcgatatcaagcctcataatttactccttgacggtaaaggtaatttaaaaatatctgattttggactctcggctttgaagaatggtggtggtgacggtgtgtttttgcttcagactgcttgtgggactccagctttcacggcaccggaagttatgtcgcggcagggttacgacggagctaaagcggatgcttggtcttgtggagtcattttgttctttttattgtcggcttgtttgccatttgatgacagtaatcttgcattcttgtataagagagctcataaaggagaatatcaagtgccctcttgtatatcaaagccggttaaatcgattataaaccagcttctagacccaaatcctaatacaagaatgagcatggaagctttaatgaagcattcttggtttttgaagaagtttgaattgccaactcaaagtagtgtgttcgagttggattataaaaaatattgtaaatttgatcaaaagagtgcggttgctagcattactgcgtttgatataatttctctatcttcagggttggatttgtcacggttatttgaggttaagaatcggaaagagagaagatttacatcaagcgatacggtggaaagagttacagagagagtgagagaggttggagggagattggggtatagggtagtggaaggaaagggtgggagtgctattgggttggggaaagggagggtgggagtgttgtttgaggtgttcgaaatagcggagaagctgttggtggtggaagttatggtggtggagggtggtgaggtggaatttgaggaggttcattggggagaactgaaagatgagcttgaggacgttgtgcttcaatggcataatgatgtcatgtga

SEQ ID NO: 1912 - protein, 432 aa, Populus trichocarpa
MEPPPPSTLQTTTSIPTTLLNKYELGRLLGRGSFAKVYAARSLSDKTQLAAIKIIDKTKTDAAMEPRIISEISAMHRLQHHPTILKIHEVMATKTKIYLVMELASGGDLYSKIRKIGKLKESAARRYFQQLVSALHFCHQNGVSHRDIKPHNLLLDGKGNLKISDFGLSALKNGGGDGVFLLQTACGTPAFTAPEVMSRQGYDGAKADAWSCGVILFFLLSACLPFDDSNLAFLYKRAHKGEYQVPSCISKPVKSIINQLLDPNPNTRMSMEALMKHSWFLKKFELPTQSSVFELDYKKYCKFDQKSAVASITAFDIISLSSGLDLSRLFEVKNRKERRFTSSDTVERVTERVREVGGRLGYRVVEGKGGSAIGLGKGRVGVLFEVFEIAEKLLVVEVMVVEGGEVEFEEVHWGELKDELEDVVLQWHNDVM

SEQ ID NO: 1913 - DNA, 1320 bp, Populus trichocarpa
  CDS (1)..(1320)
atggcagaaacaacaagtgatggtcacccgaccttgcttcatgggaaatatgaactgggtcggttactaggccatggcaccttcgctaaagtctaccacgcgcgtaacttgcagagtggaaaaagtgtggccatgaaggtggttggtaaagagaaggtgataaaggtggggatgatggagcaaatcaagagagaaatttcagttatgaagatggtgaagcaccccaatattgttgagttacatgaagtcatggctagcaagtccaagatctatttcgccatggaacttgttcgaggtggcgagttgttctccaagattgagaaaggtcggttaagagaagatgtggctagagtttattttcagcagttaatatctgcgatcgatttttgtcacagtcgcggtgtttatcatcgtgatttgaagcctgagaacttgctgcttgacgaaaatgggaagttgaaggttacagattttgggctgagtgctttcactgagcatttgaagcaagatgggttgttgcatacaacttgtgggacaccagcttatgttgcacctgaagtaattgggaagcaagggtatgatggtgccaaagcagatctctggtcttgtggtgttattctctatgtgcttcttgctgggttcttgccgtttcaagatgataatattgtggctatgtatagaaagatttatagaggtgacttcaaatgccctccatggttctcctctgaagctcgacggctgattaccaagcttcttgatccaaatccaagcactcgaatcacgatatccaaggtcatggattcaacctggttcaagaaatcagtgccaaagaccgtaaaaagcaaagaagagatggaatttgaagctttcaatggagatgaagatgccaatggagacaaatcaaagcaactcgaaacgttgaacgcgtttcacataatatctttatcccagggatttgatttgtcaccactctttgaggagaggaagagggaggaaaaagaggagctgagatttgccacaacaaggccagcaagcagtgtcatttcaagactcgaggaggtgggcaaggcagggaatttcagtgtcaagaagagcgattccaaagtgagattgcaagggcaggagaggggtaggaaagggaagttggctattgcagctgatatttttgctgtcacaccatcgtttttggtggtggaggtgaagaaagataacggagacacgttggagtttaaccaattctgcagtaaagcgctgagaccagcccttaaggacattgtgtggatatctcctgctgagaattcaactcttgctagaatatga

SEQ ID NO: 1914 - protein, 439 aa, Populus trichocarpa
MAETTSDGHPTLLHGKYELGRLLGHGTFAKVYHARNLQSGKSVAMKVVGKEKVIKVGMMEQIKREISVMKMVKHPNIVELHEVMASKSKIYFAMELVRGGELFSKIEKGRLREDVARVYFQQLISAIDFCHSRGVYHRDLKPENLLLDENGKLKVTDFGLSAFTEHLKQDGLLHTTCGTPAYVAPEVIGKQGYDGAKADLWSCGVILYVLLAGFLPFQDDNIVAMYRKIYRGDFKCPPWFSSEARRLITKLLDPNPSTRITISKVMDSTWFKKSVPKTVKSKEEMEFEAFNGDEDANGDKSKQLETLNAFHIISLSQGFDLSPLFEERKREEKEELRFATTRPASSVISRLEEVGKAGNFSVKKSDSKVRLQGQERGRKGKLAIAADIFAVTPSFLVVEVKKDNGDTLEFNQFCSKALRPALKDIVWISPAENSTLARI

SEQ ID NO: 1915 - DNA, 1314 bp, Populus trichocarpa
  CDS (1)..(1314)
atggcagaaaaaacaagtgatggccacccgaccttgcttcatgggaaatatgaactgggtcggttactaggccatggcaccttcgctaaagtctaccacgcgcgtaatttgcaaagtggcaagagtgtagccatgaaggtagttggcaaagagaaggtgataaaggtaggaatgatggagcaagtcaaacgagaaatatcagttatgaagatggtgaggcacccccatatcgttgaattaaatgaagtcatggctagcaagtccaagatctatttcgccatggaacttgttcgaggcggcgagttgttctccaagattgctaaaggtaggctaagagaagatgtggctagagtttattttcagcagttgatatctgctattgatttttgtcatagtcgcggcgtttatcatcgtgatttgaagccagagaatttgctgcttgatgaagatgggaagttgaaggttacagattttgggctgagtgctttctctgagcatttgaagcaggatgggttattgcatacaacttgcggaacaccagcttatgttgcacctgaagtaattgggaagaaagggtatgatggtgctaaagcagatctttggtcttgtggtgttattctctatgtgctccttgctgggttcttgccatttcaagatgataatattgtggctatgtatcgaaagatttacagaggtgacttcaaatgcccccaatggttctcctctgaagctcgacgactgatcacaaagcttcttgatcctaatccaagcactagaatcacgacatccaaggtcatggattcaacttggttcaagaaatcattgccaaagacggtgagaagcaaagaagagatggagtttgaggctttcaatggagaagaagatgctaacggagacaaagcaaagcaacctgaaacactaaacgcgtttcacataatatctttatcacagggattcgatttatcaccgctttttgaggagaagacaagggaggggaaagaggagctgagatttgccacaacaaggccagcaagcagtgtgatttcaagactcgaagaggtggccaaagcagggaatttcaatgtcaagaagagtgattccaaagtgagattgcaagggcaggagaggggcaggaaaggaaagctagctattgcagctgacatttttgctgtcacgccatcgtttttggtggtcgaggtgaagaaagataatggagacactttggagtataaccaattctgcagtaatgagctgagaccagccctcaaggatattgtttggacatctcctgcagagaattcaactctcgcttga

SEQ ID NO: 1916 - protein, 437 aa, Populus trichocarpa
MAEKTSDGHPTLLHGKYELGRLLGHGTFAKVYHARNLQSGKSVAMKVVGKEKVIKVGMMEQVKREISVMKMVRHPHIVELNEVMASKSKIYFAMELVRGGELFSKIAKGRLREDVARVYFQQLISAIDFCHSRGVYHRDLKPENLLLDEDGKLKVTDFGLSAFSEHLKQDGLLHTTCGTPAYVAPEVIGKKGYDGAKADLWSCGVILYVLLAGFLPFQDDNIVAMYRKIYRGDFKCPQWFSSEARRLITKLLDPNPSTRITTSKVMDSTWFKKSLPKTVRSKEEMEFEAFNGEEDANGDKAKQPETLNAFHIISLSQGFDLSPLFEEKTREGKEELRFATTRPASSVISRLEEVAKAGNFNVKKSDSKVRLQGQERGRKGKLAIAADIFAVTPSFLVVEVKKDNGDTLEYNQFCSNELRPALKDIVWTSPAENSTLA

SEQ ID NO: 1917 - DNA, 1308 bp, Populus trichocarpa
  CDS (1)..(1308)
atggaaccaccaccacaaaccctgccgccgcaaccactacaaagaacctcctcggtcccgaccacacttctcaacaaatacgaagtaggccgattattaggccgtggcagctttgcaaaagtgtatgcagcccgttctttatccgacaagacacagctggtagcgatcaaaatcatcgacaaaacaaaaaccgatgctgccatggaaccccgcattatctccgagatctcagccatgcaccgcctccaacaccacccaaacgttctcaagatccacgaagttatggctacgaaaaccaaaatctacctcgtcatggaacttgcctcgggaggcgatcttttctctaagatccggaagatgggcaaacttaaagaaccagccgcacgtcgttactttcaacaacttgtgtctgccatccacttctgccatcaaaatggtgtctctcaccgcgacatcaagcctcataatttgctccttgacggtaaaggtaatttaaaaatatctgattttggactctcggcgttaaagaatggatgtgttaatggtggttttatgcttcaaacggcttgtgggactccggctttcacagcaccggaagttatggcgcagcggggctacgacggatctaaagcggatgcttggtcttgtggggtcattttgttctttttattatcggcttccttgccttttgatgacagtaatcttgcagttatgtacaggaaaattcgtaaaggagaatatcaattgccttcttgtttaccaaagtcggttaaatcgattataaaccaacttctcgacccgaatcctaataaaagaatgagcatagaagcgttaatgaaacatccttggtttttgaagaagtttgaattaccaactaaaagtagtgtgttcgagtcggattataaagaatattgtaaatttgataagagtgcggctgggggcattaatgcgtttgatttaatatctctgtcttcagggttggatttgtcagggttgtttgaggttaaacacgcgagggatagaagatttacatcaagcgaaacggtggaaagagtaacggagagagtgagagaggttggagggagattgggatatatagtggaggaaggaatggttgggggtgctatagggttggggaaagggagggtgggattggtgtttgaggtgtgggaaatagtggagaagctgttggtggtggaagttaaggtggtggagcgtggtggggtggaatttgaggaccttcattggggagaactgaaagaagggcttggagatgttgtgcttcaatggaatgatgatgctatgtga

SEQ ID NO: 1918 - protein, 435 aa, Populus trichocarpa
MEPPPQTLPPQPLQRTSSVPTTLLNKYEVGRLLGRGSFAKVYAARSLSDKTQLVAIKIIDKTKTDAAMEPRIISEISAMHRLQHHPNVLKIHEVMATKTKIYLVMELASGGDLFSKIRKMGKLKEPAARRYFQQLVSAIHFCHQNGVSHRDIKPHNLLLDGKGNLKISDFGLSALKNGCVNGGFMLQTACGTPAFTAPEVMAQRGYDGSKADAWSCGVILFFLLSASLPFDDSNLAVMYRKIRKGEYQLPSCLPKSVKSIINQLLDPNPNKRMSIEALMKHPWFLKKFELPTKSSVFESDYKEYCKFDKSAAGGINAFDLISLSSGLDLSGLFEVKHARDRRFTSSETVERVTERVREVGGRLGYIVEEGMVGGAIGLGKGRVGLVFEVWEIVEKLLVVEVKVVERGGVEFEDLHWGELKEGLGDVVLQWNDDAM

SEQ ID NO: 1919 - DNA, 1356 bp, Populus trichocarpa
  CDS (1)..(1356)
atggagaagatgggtcctatattgatgaatagatatgagttagggagattgctcggacaagggactttcgccaaggtttaccatgcaagaaatctccaatctggccaaagcgttgccatcaagattattgacaaaggaaaggtattaaggagtggtttgatagatcaaatcaagagagaaatctcggtcatgcgtcttgttaggcaccccaatattgttcaactcaatgaggtcatggcaagcaggaccaagatttatttcgtcatggagtttgtgaaaggaggagagctattcaacttggtttccaaagggaaactcaaggaagacgttgctcgcaaatatttccaacagttgattggtgcggttgatttttgtcatagccgaggggtctaccatcgggatctcaagcctgaaaatcttctccttgatgaaaatggtgacctaaagattacggatttcggattgagtgcgttatcggagtcgaggaggcaagatggtcttctccacacgacctgtggaactcctgcatatgttgctccagaagtcattaacaagaaaggttatgatggacccaaggctgatatatggtcctgtggagttattctcttcgtgcttttggcgggttttcttcctttccatgaccaaaatctcatggaattgtataggaagattaccaaaggagaattcaggtgtcccaattggttccatcccgaggctaaaaagcttctttcgaggattcttgatccccatccaagctcaagaacgagcatagaaaagataacgaaaaattgttggtttaggaagggatataagcagattgaaaccccaccatcaccccaaggtcacgccagaagcaacttgattaaggatgtgcattctgccttcgattcagcatcggataacgaaagcaattcaagggaaaatgtcatggtggctccaagaagtcctctaagaccaacttgctacaatgcctttgacatcatatctctctcaaaaggatttgatttatctggcctctttgagaaggataagaatcgaagacaggaagcgagatttactacaacaaaatcggcctcgatgatcatgtcgaaattcgaacaaatagcaatggcagagagtttcagttttaagaagaaagatggaacactaatgttggagggcagcagggaaggaagaaaagggttgcttgctatagatgcagaaatctgtgaggttacgccatcattttatgttgtagagatgaagaaaaaatcaggggattcatttgaatacaaggagttttgtgatcacgaattaaagccttctctcaaggatatagtttgggcatggcagggaagtgagcaaccgcaagtgtag

SEQ ID NO: 1920 - protein, 451 aa, Populus trichocarpa
MEKMGPILMNRYELGRLLGQGTFAKVYHARNLQSGQSVAIKIIDKGKVLRSGLIDQIKREISVMRLVRHPNIVQLNEVMASRTKIYFVMEFVKGGELFNLVSKGKLKEDVARKYFQQLIGAVDFCHSRGVYHRDLKPENLLLDENGDLKITDFGLSALSESRRQDGLLHTTCGTPAYVAPEVINKKGYDGPKADIWSCGVILFVLLAGFLPFHDQNLMELYRKITKGEFRCPNWFHPEAKKLLSRILDPHPSSRTSIEKITKNCWFRKGYKQIETPPSPQGHARSNLIKDVHSAFDSASDNESNSRENVMVAPRSPLRPTCYNAFDIISLSKGFDLSGLFEKDKNRRQEARFTTTKSASMIMSKFEQIAMAESFSFKKKDGTLMLEGSREGRKGLLAIDAEICEVTPSFYVVEMKKKSGDSFEYKEFCDHELKPSLKDIVWAWQGSEQPQV

SEQ ID NO: 1921 - DNA, 1326 bp, Populus trichocarpa
  CDS (1)..(1326)
atgagtgtcaaggtaccggcggcgagaacacgtgtaggaaagtacgagttaggcaagaccattggtgaaggtagcttcgccaaggtcaaggtcgctaaaaatgttcagaccggtgatgttgttgccattaaaattctcgaccgtgatcaagtcctccgtcacaagatggtcgaacagttaaaaagagaaatatcaacaatgaagctgattaaacatccaaatgtcatcaaaatctttgaggtcatggcaagtaaaactaagatctacattgtcattgagtttgttgacggaggagagctctttgacaaaattgctaagcacgggagacttaaagaggacgaagccaggagatatttccagcagcttattaaagccgtggattactgccacagtagaggcgttttccatagagatttgaagcctgagaaccttcttcttgattcacgcggtgttcttaaagtttcggattttggattgagtgcgctgtcacaacaattgcggggtgatgggctacttcacactgcctgtggaacaccaaattatgtcgcacctgaggttctcagagaccaaggttatgatggcacagcatccgatgtatggtcctgtggggtcattctctatgttcttatggctggattcttacctttttccgagtcaagtcttgtggttttgtacagaaaaatctgcagagctgatttcacatttccatcgtggttttcatctggtgcaaagaaactgataaagcgcattcttgacccaaaacctcttacaaggataacagtttctgaaattttagaagatgaatggttcaagaaaggatacaagccaccgcaattcgagcaggaagaggatgtaaatatagatgatgttgatgctgtttttaatgactcaaaggaacatcttgtgacagaaaggaaggtgaaaccagtgtcaattaatgctttcgagcttatttctaaaacacaaggatttagccttgataatttgttcgggaagcaggcaggtgttgtgaaacgagaaacccatattgcttctcatagcccagcaaatgaaatcatgtctagaattgaggaagctgcaaagcctctgggctttaatgtcgataaacgaaactacaagatgaagttgaaaggtgacaaaagtgggaggaagggccaactctccgtagctactgaggtgtttgaggtagctccttctttgcacatggtggagctgcggaaaattggtggcgatacgcttgagtttcacaagttctacaagagcttctcgtcaggtttaaaggatgtagtctggaaatctgatcaaactatagaaggattaaggtaa

SEQ ID NO: 1922 - protein, 441 aa, Populus trichocarpa
MSVKVPAARTRVGKYELGKTIGEGSFAKVKVAKNVQTGDVVAIKILDRDQVLRHKMVEQLKREISTMKLIKHPNVIKIFEVMASKTKIYIVIEFVDGGELFDKIAKHGRLKEDEARRYFQQLIKAVDYCHSRGVFHRDLKPENLLLDSRGVLKVSDFGLSALSQQLRGDGLLHTACGTPNYVAPEVLRDQGYDGTASDVWSCGVILYVLMAGFLPFSESSLVVLYRKICRADFTFPSWFSSGAKKLIKRILDPKPLTRITVSEILEDEWFKKGYKPPQFEQEEDVNIDDVDAVFNDSKEHLVTERKVKPVSINAFELISKTQGFSLDNLFGKQAGVVKRETHIASHSPANEIMSRIEEAAKPLGFNVDKRNYKMKLKGDKSGRKGQLSVATEVFEVAPSLHMVELRKIGGDTLEFHKFYKSFSSGLKDVVWKSDQTIEGLR

SEQ ID NO: 1923 - DNA, 1329 bp, Populus trichocarpa
  CDS (1)..(1329)
atgagtgctaagggacaggggacgagaacacgagtaggtaagtacgagttagggaagaccataggtgaaggaagctttgccaaggtgaaggtcgctaaaaatgttgaaaccggtgatgttgttgccattaaaattctcgatcgtgagcaagtcctccgtcacaagatggtcgaacagttaaaaagagaaatatcaacaatgaagctgattaaacatcccaatgtcatcaagatttttgaggtcatggcaagcaaaactaagatttacattgttatcgagtttgttgacggaggagagctctttgacaagattgctaagcatgggagacttagagaggatgaagccaggaggtatttccagcagcttattaatgccgtggattactgccacagtagaggcgttttccatagagatctgaagcctgagaaccttcttcttgattcacacggtgttcttaaagtctcggattttggattgagtgcactgtcacaacaattgcagggtgatgggctgcttcacactgcatgtggaacaccaaattatgtcgcacctgaggttctcaaagacaaaggttatgatggcacagcatctgatgtatggtcttgtggggtcattctctatgtacttatggctggatacttgccttttgatgagacaagtcttatggccttatacttaaaaatctgcagtgctgatttcacatttccatcttggttttcatctggtgcaaagaaactgataaagcgtattcttgacccggagcctcttacaaggataacagttgctgagattatagaagatgaatggttcaagaaaggatacaggccaccacaattcgagcaggaagagcatgtaaatgtagatgatgttgatgctgtttttaatgatttgaaggaacatcttgttacagaaaagaagaagaaacctgcgtcgatgaatgcattcgagcttatttctaagacacagggatttagccttgagaatttgttcgggaagcaggcaggttttgtgaaacgagaaacccgtattgcttctcatagccccgcaaatgaaattatgtctagaattgaggaagctgcaaagcctctggggtttaatgtcgacaaacgaaactacaagatgaagctgaaaggagacaaaggtgggaggaagggccaactctctgtagcaactgaggtgtttgaggtagctccctctttgcacatggtggagctccggaaaattggtggtgatacgctggagtttcacaatttctacaagagtttctcgtcaggtttaaaggatgtagtctggaaatctgatcaaactatagaaggattaaggtcatag

SEQ ID NO: 1924 - protein, 442 aa, Populus trichocarpa
MSAKGQGTRTRVGKYELGKTIGEGSFAKVKVAKNVETGDVVAIKILDREQVLRHKMVEQLKREISTMKLIKHPNVIKIFEVMASKTKIYIVIEFVDGGELFDKIAKHGRLREDEARRYFQQLINAVDYCHSRGVFHRDLKPENLLLDSHGVLKVSDFGLSALSQQLQGDGLLHTACGTPNYVAPEVLKDKGYDGTASDVWSCGVILYVLMAGYLPFDETSLMALYLKICSADFTFPSWFSSGAKKLIKRILDPEPLTRITVAEIIEDEWFKKGYRPPQFEQEEHVNVDDVDAVFNDLKEHLVTEKKKKPASMNAFELISKTQGFSLENLFGKQAGFVKRETRIASHSPANEIMSRIEEAAKPLGFNVDKRNYKMKLKGDKGGRKGQLSVATEVFEVAPSLHMVELRKIGGDTLEFHNFYKSFSSGLKDVVWKSDQTIEGLRS

SEQ ID NO: 1925 - DNA, 1317 bp, Populus trichocarpa
  CDS (1)..(1317)
atggaaaataaaccaagtgttttgacaaagaactatgaagtggggagattgcttggccaaggcacctttgccaaggtttattttgcgaggagcatcagaacgaacctgagtgtagccattaaagtaattgacaaagagaaggtcttgaaggttgggcttgttaatcagatcaagagagaaatatctgtaatgagacttgttagacaccctaatatcgtgcaactttatgaggtcttggctaccaaaagtaagatttactttgtaatggaatatgctaaaggtggtgaactctttgacaaggttgctaaaggaaggttaaaggaggatgttgcccagaaatattttcaacagctgatcaatgcagttgatttctgtcacagcaggggtgtttatcatcgtgatataaagccagagaatctgttgttggatgagaatgagaatctgaagatatctgattttggattgagtgccctcactgaatccaagcaacaagatggactactacacacgacttgcgggacacctgcatatgttgctcctgaagtgatcaacaggaaaggttatgatggcactaaagctgatatttggtcctgtggcgtggttttatttgtgttattgtctggttatctcccatttcatgattcaaatttgatggagatgtacaggaaaattggcagagcagagttcaaatgccctaattggtttccaactgatgctcgtaggttgttgcgcaagatcctggatccaaaccccagtacaaggatctccatggctgagattaaggaaagttcttggtttagaaaaggcaaggaggtagctgctttggattggaatggttctggttcttctgagaatagcagtgtggcttctgaggcaaagcaagagtcagccaaacctcccagcttaaatgcttttgatatcatttccctttctgctggatttgatctatctggattattcgaggaaaattatcagaagagagaagcaagatttacttctatacaaccggcttcagtcatcatctctaaactggaagatattgctaagcgtcaaaagctgaaggtgattaagaaagatgcaggtttgctgaaattggaaggaatggaagaaggtagaaaggggccattgtctgttgatgctgagatttttgaagtgactccaaatatccattttgtggaagtgaagaaatctaatggagatacgctagaatatcagaagatattggaagaagctataaggcctgctctcaacgatattgtttgtgtctggcagggtgagcaagaactgcaacagcagcagcagcaacaatcaaattga

SEQ ID NO: 1926 - protein, 438 aa, Populus trichocarpa
MENKPSVLTKNYEVGRLLGQGTFAKVYFARSIRTNLSVAIKVIDKEKVLKVGLVNQIKREISVMRLVRHPNIVQLYEVLATKSKIYFVMEYAKGGELFDKVAKGRLKEDVAQKYFQQLINAVDFCHSRGVYHRDIKPENLLLDENENLKISDFGLSALTESKQQDGLLHTTCGTPAYVAPEVINRKGYDGTKADIWSCGVVLFVLLSGYLPFHDSNLMEMYRKIGRAEFKCPNWFPTDARRLLRKILDPNPSTRISMAEIKESSWFRKGKEVAALDWNGSGSSENSSVASEAKQESAKPPSLNAFDIISLSAGFDLSGLFEENYQKREARFTSIQPASVIISKLEDIAKRQKLKVIKKDAGLLKLEGMEEGRKGPLSVDAEIFEVTPNIHFVEVKKSNGDTLEYQKILEEAIRPALNDIVCVWQGEQELQQQQQQQSN

SEQ ID NO: 1927 - DNA, 1284 bp, Populus trichocarpa
  CDS (1)..(1284)
atgccagagatcgaacaagtttccgaaaatgccttatttggcaagtatgacgttggaaagcttcttggatgtggagcctttgcgaaggtctaccatgcacgagatgttcaaacaggaaaaagtgttgctataaagattatcaacaagaagaagatctctagccctagcttgattgctaacataaagcgggagatctccatcatgcgaaagctaaaccatccatatattgtgaaactcatcgaagtcttggcttccaagacgaagatttattgcgtcatggagtatgttaaaggtggagaattgtttactaaaattgctaaaggaagatttagcgaagatcttagcaggaaatacttccgacagttgatatcagcggtcggttattgtcatcttcggggggtttttcaccgggatttgaaacctgaaaacttgcttcttgatgaaaatgggaacctgaaggtttcagattttggtctgagtgctgtcagagatcagacccaacttgatgggcttttgcacacgctttgtggaactccagcttatgttgccccggagattcttgcaaagaaaggttatgatggtgctaagattgatgtctggtcttgtggtgttattctctttgtcttagcagctgggtatttgcccttcaatgatccaaacctgatggccatgtataaaaagatttacaaaggtgaattccgatgccctaagtggatgtccaccgatttgaaacgattcttgtctcggcttcttgatacgaatccggagacaagaatcaccattgatgagatcttgaaggatccttggttcaagaaagggaagcataaggaaattaacttctacgacgaggagttcaacaaggatgatgggagaaaagacgaggaattggcttctacaagcttgaatgccttcgatatcatatctttctcctccggtttgaacttatcagggatgtttgatgattcatataacgtggttgacgacggagagagatttgtctcgaccgaatcaccggaggatttggtgaagagagttgaggagtttgccaaggaggagaggttgagggtgaggagaaggaaagaatgggggctggagatggaagggcaagatggtaatttgatgctgtcggtcgagattcgcaggttgactgatactttgtttgttgtggaggctaagaggaatggtggtgatgctggatgttacaaggagatttggaagaataagcttaagcctgtgatatttaatggcttaattagtactaatagtgttgttaatgatgattaa

SEQ ID NO: 1928 - protein, 427 aa, Populus trichocarpa
MPEIEQVSENALFGKYDVGKLLGCGAFAKVYHARDVQTGKSVAIKIINKKKISSPSLIANIKREISIMRKLNHPYIVKLIEVLASKTKIYCVMEYVKGGELFTKIAKGRFSEDLSRKYFRQLISAVGYCHLRGVFHRDLKPENLLLDENGNLKVSDFGLSAVRDQTQLDGLLHTLCGTPAYVAPEILAKKGYDGAKIDVWSCGVILFVLAAGYLPFNDPNLMAMYKKIYKGEFRCPKWMSTDLKRFLSRLLDTNPETRITIDEILKDPWFKKGKHKEINFYDEEFNKDDGRKDEELASTSLNAFDIISFSSGLNLSGMFDDSYNVVDDGERFVSTESPEDLVKRVEEFAKEERLRVRRRKEWGLEMEGQDGNLMLSVEIRRLTDTLFVVEAKRNGGDAGCYKEIWKNKLKPVIFNGLISTNSVVNDD

SEQ ID NO: 1929 - DNA, 1257 bp, Populus trichocarpa
  CDS (1)..(1257)
atgccggagatcgaaagtgtatcggaaaatgccttgtttggcaagtatgaggttggaaagcttctcggatgtggagccttcgcgaaggtgtaccatgctcgagatgttcaaacaggaaaaagtgtcgctatcaagattatcaacaagaagaagatctctaaccctagcttgatgtctaacatcaagcgggagatctccatcatgagaaggctaaatcatcctcatattgtgaaactgatcgaagtcttggctaccaagacgaagatttatttcgttatagagtatgttaaaggtggagaattgtttgccaaggttgctaaagggagatttagcgaagatcttagcaggaaatattttcaccagttgatttctgcggtaggttattgccattctcgaggaatttttcatcgtgatttgaaacctgaaaacttgcttcttgatgaaaatgggagcctgaaggtttcagattttggtctaagtgctgttacagatcagatccgaactgatggactcttgcacacgctttgtggaactcctgcttatgttgcccctgagattcttgcaaagaaaggttatgatggtgctaaggttgatgtctggtcttgcggggttgttctctttgtcttaacagctggttttttgcctttcaatgatccaaacttgatggccatgtataaaaaaatttacaaaggtgaattccgatgccctaaatggatgtccacggatttgaaacgattcttgtctcggcttctggatacgaatccggagacaaggatcaccattgatgagattctgaaggatccttggttcaagaaagggaagcataaggaaattaatttctacgacgaggagctcaacaaggctgttgatgagaaaaaagatgaggaattagcttctacaagcttgaatgccttcgatatcatatctttctcctccggtttgaacctatcagggttgtttgatgattcatataatgtggttgatgacggagaaagatttgtgtcgaccgaatcgccagagaatttgatgaagaaggttgaggagtttgcaaaggaggagaggttgagggtgaagagaaggaaagaatgggggttggagatggaagggcaaaatggtaacctgatgatagcggtcgaggttcaccggttaaccgatactttgtttgttgtggaggctaagaggagtggtggtgatgctggatgctttaaggagacatggaagaataagcttaagcctccaaactacctcctgggttag

SEQ ID NO: 1930 - protein, 418 aa, Populus trichocarpa
MPEIESVSENALFGKYEVGKLLGCGAFAKVYHARDVQTGKSVAIKIINKKKISNPSLMSNIKREISIMRRLNHPHIVKLIEVLATKTKIYFVIEYVKGGELFAKVAKGRFSEDLSRKYFHQLISAVGYCHSRGIFHRDLKPENLLLDENGSLKVSDFGLSAVTDQIRTDGLLHTLCGTPAYVAPEILAKKGYDGAKVDVWSCGVVLFVLTAGFLPFNDPNLMAMYKKIYKGEFRCPKWMSTDLKRFLSRLLDTNPETRITIDEILKDPWFKKGKHKEINFYDEELNKAVDEKKDEELASTSLNAFDIISFSSGLNLSGLFDDSYNVVDDGERFVSTESPENLMKKVEEFAKEERLRVKRRKEWGLEMEGQNGNLMIAVEVHRLTDTLFVVEAKRSGGDAGCFKETWKNKLKPPNYLLG

SEQ ID NO: 1931 - DNA, 1374 bp, Populus trichocarpa
  CDS (1)..(1374)
atggcaaccaacaaaaccccaaacaacattagcaaccaaagccaaagtcctctgctcggtcggtacgagatcggcaaacttcttggacatggtacttttgctaaagtataccatgctagaaacgttaaaaccaacgaaagtgttgccatcaaagttattgacaaagaaaagatcctcaaggttggtcttatggctcatatcaaacgtgaaatctccattcttcgccgtgttcgccaccccaatattgtccagctttttgaagtcatggctacaaaggccaagatttactttgtcatggaatatgttcgaggcggtgaattgttcaataaagttgccaaaggtaggttaaaagaagaggttgccaggagatatttccagcaattgatatctgctgtgtctttctgtcatgccagaggtgtgtttcatcgcgatttgaagccagagaatttgttgcttgatgagaatgggaacttgaaagtttcggatttcggattgagtgcagtgcctgatcagattagacaagatggtttgttccatactttttgtgggactcctgcttacgttgctcctgaagttcttgcgaaaaaagggtatgatgctgctaaggttgatatttggtcttgtgggattgttttgtttgtgttaatggctggttatttaccatttcaagatcaaaatattatggttatgtataaaaagatctataagggtgagtttagatgtcctagatggttttcttctgaactagttaggcttctttctaaacttcttgatactaaccccgtcacaagaattacaatccccgagattatggagaataggtggttcaaaaaggggtttaaacatattaaattttatattgaagatgataaagtttgtagtgttcaagacgaggatgatgtgggttcatcttctgatcaatcattatctgaatcggaatcggaattcgaaactagaagaagggttaccactttgcctagacctgcaagtttgaatgcttttgatattatatcgttttcgcctgggtttgatttatctgggttgtttgaggagggtggggagggagcaaggtttgtttctggggctcctgtgacgaagattatatctaaattggaggagattgctaaagttgtaagctttacagttaggaaaaaggattgtagagtgagtttggaagggtctagagaaggtgtgaaaggcccattaacaattgcagctgagatatttgagttgacaccgaaattggttgtggtggaggttaagaagaagggaggggataaaggagagtacgaggagttttgtaacagggaattgaaacctggattgcagaaatccctttcctatcgatgtttcaaatataccatcggattctga

SEQ ID NO: 1932 - protein, 457 aa, Populus trichocarpa
MATNKTPNNISNQSQSPLLGRYEIGKLLGHGTFAKVYHARNVKTNESVAIKVIDKEKILKVGLMAHIKREISILRRVRHPNIVQLFEVMATKAKIYFVMEYVRGGELFNKVAKGRLKEEVARRYFQQLISAVSFCHARGVFHRDLKPENLLLDENGNLKVSDFGLSAVPDQIRQDGLFHTFCGTPAYVAPEVLAKKGYDAAKVDIWSCGIVLFVLMAGYLPFQDQNIMVMYKKIYKGEFRCPRWFSSELVRLLSKLLDTNPVTRITIPEIMENRWFKKGFKHIKFYIEDDKVCSVQDEDDVGSSSDQSLSESESEFETRRRVTTLPRPASLNAFDIISFSPGFDLSGLFEEGGEGARFVSGAPVTKIISKLEEIAKVVSFTVRKKDCRVSLEGSREGVKGPLTIAAEIFELTPKLVVVEVKKKGGDKGEYEEFCNRELKPGLQKSLSYRCFKYTIGF

SEQ ID NO: 1933 - DNA, 1374 bp, Populus trichocarpa
  CDS (1)..(1374)
atggcaaccaacaaaaccccaaacaacattagcaaccaaagccaaagtcctctgctcggtcggtacgagatcggcaaacttcttggacatggtacttttgctaaagtataccatgctagaaacgttaaaaccaacgaaagtgttgccatcaaagttattgacaaagaaaagatcctcaaggttggtcttatggctcatatcaaacgtgaaatctccattcttcgccgtgttcgccaccccaatattgtccagctttttgaagtcatggctacaaaagccaagatttactttgtcatggaatatgttcgaggcggtgaattgttcaataaagttgccaaaggtaggctaaaagaagaggttgccaggagatatttccagcaattgatatctgctgtgtctttctgtcatgccagaggtgtgtttcatcgcgatttgaagccagagaatttgttgcttgatgagaatgggaacttgaaagtttcggatttcggattgagtgcagtgcctgatcagattagacaagatggtttgttccatactttttgtgggactcctgcttacgttgctcctgaagttcttgcgaaaaaagggtatgatgctgctaaggttgatatttggtcttgtgggattgttttgtttgtgttaatggctggttatttaccatttcaagatcaaaatattatggttatgtataaaaagatctataagggtgagtttagatgtcctagatggttttcttctgaactagttaggcttctttctaaacttcttgatactaaccccgtcacaagaattacaatccccgagattatggagaataggtggttcaaaaaggggtttaaacatattaaattttatattgaagatgataaagtttgtagtgttcaagacgaggatgatgtgggttcatcttctgatcaatcattatctgaatcggaatcggaattcgaaactagaagaagggttaccactttgcctagacctgcaagtttgaatgcttttgatattatatcgttttcgcctgggtttgatttatctgggttgtttgaggagggtggggagggagcaaggtttgtttctggggctcctgtgtcgaagattatatctaaattggaggagattgctaaagttgtaagctttacagttaggaaaaaggattgtagagtgagtttggaagggtctagagaaggtgtgaaaggcccattaacaattgcagctgagatatttgagttgacaccgaaattggttgtggtggaggttaagaagaagggaggggataaaggagagtacgaggagttttgtaacagggaattgaaacctggattgcagaaatccctttcctaccgatgcttcaaatataccatcggattctga

SEQ ID NO: 1934 - protein, 457 aa, Populus trichocarpa
MATNKTPNNISNQSQSPLLGRYEIGKLLGHGTFAKVYHARNVKTNESVAIKVIDKEKILKVGLMAHIKREISILRRVRHPNIVQLFEVMATKAKIYFVMEYVRGGELFNKVAKGRLKEEVARRYFQQLISAVSFCHARGVFHRDLKPENLLLDENGNLKVSDFGLSAVPDQIRQDGLFHTFCGTPAYVAPEVLAKKGYDAAKVDIWSCGIVLFVLMAGYLPFQDQNIMVMYKKIYKGEFRCPRWFSSELVRLLSKLLDTNPVTRITIPEIMENRWFKKGFKHIKFYIEDDKVCSVQDEDDVGSSSDQSLSESESEFETRRRVTTLPRPASLNAFDIISFSPGFDLSGLFEEGGEGARFVSGAPVSKIISKLEEIAKVVSFTVRKKDCRVSLEGSREGVKGPLTIAAEIFELTPKLVVVEVKKKGGDKGEYEEFCNRELKPGLQKSLSYRCFKYTIGF

SEQ ID NO: 1935 - DNA, 1581 bp, Populus trichocarpa
  CDS (1)..(1581)
atggcaaccaacaaaaaattaggaaacaagagcaataatagccaaagccaaagccctcttctgggtcggtacgagatcggcaaacttcttggacatggtacttttgctaaggtataccttgctagaaacattaaaaccaacgaaagtgttgccatcaaagtcattgacaaagaaaaagtcctcaagggtggtctaattgctcatatcaaacgtgaaatctccattcttcgccttgttcgccacccctatattgtccagctttttgaagtcatggctacgaaagccaagatttactttgtcatggaatatgttcgtggtggtgagttgttcaataaggttgctaaaggcaggttaaaagaagaggttgccaggaagtatttccagcaattgatttcagccgtttccttttgtcacgccagaggtgtttttcatcgcgatttgaagccggagaacttgttgcttgatgagaatggtaacttgaaagtctccgattttggattgagcgcagtgtctgatcagattagacaagatggtttgttccatactttttgtgggacaccggcttatgttgctcctgaagttcttgcaagaaaagggtacgatgctgctaaggttgatatctggtcttgtgggattgttctgtttgtgttaatggctggttacttaccatttcatgatcaaaatgtcatggttatgtataaaaagatttacaagggggagtttagatgtcctaggtggttctcttctgagctagtcaggcttcttcataaacttcttgatactaaccctgttacaagaattacaatccctgagattatggagaacaggtggttcaaaaaggggtttaagaatattaaattttatatcgaagatgataaagtttgtagcgttgaagaggaggaagatgtgggttcatcttctgatcaatcattatctgaatcggaatcggaattcgaaactagaagaagggttacctctttgcctagacctgcaagtttgaatgcttttgacattatatcgttttcgcctggatttgatttatctgggttgttcgaggaaggtggagagggagcaaggtttgtttcgggggcccctgtgtcgaagattatatctaaactggaggagattgcgaaagttgttagctttacagtgaggaaaaaggactgtagagtgagtttggaagggtctagagaaggtgtgagaggtccattaacaattgcagctgagatatttgagttgacaccgaaattggttgtggtggaggttaaaaagaaaggaggggatagaggagagtacgaggagttttgtaataaggaattgaaacctggattgcagaagttgatgcaggaggaatccgaggctgctgctgctcctaaagttattactactgttcctgtgccatcgggatctccacaattcaccatcgatccttttcctactgattcttcacaattacccgttgatccttttcctaccgattccacacaattacctattaatccttttcctaccgattctacacaattacctattgatccttttcctatcctttcttcacatttaccttcggattccgaatag

SEQ ID NO: 1936 - protein, 526 aa, Populus trichocarpa
MATNKKLGNKSNNSQSQSPLLGRYEIGKLLGHGTFAKVYLARNIKTNESVAIKVIDKEKVLKGGLIAHIKREISILRLVRHPYIVQLFEVMATKAKIYFVMEYVRGGELFNKVAKGRLKEEVARKYFQQLISAVSFCHARGVFHRDLKPENLLLDENGNLKVSDFGLSAVSDQIRQDGLFHTFCGTPAYVAPEVLARKGYDAAKVDIWSCGIVLFVLMAGYLPFHDQNVMVMYKKIYKGEFRCPRWFSSELVRLLHKLLDTNPVTRITIPEIMENRWFKKGFKNIKFYIEDDKVCSVEEEEDVGSSSDQSLSESESEFETRRRVTSLPRPASLNAFDIISFSPGFDLSGLFEEGGEGARFVSGAPVSKIISKLEEIAKVVSFTVRKKDCRVSLEGSREGVRGPLTIAAEIFELTPKLVVVEVKKKGGDRGEYEEFCNKELKPGLQKLMQEESEAAAAPKVITTVPVPSGSPQFTIDPFPTDSSQLPVDPFPTDSTQLPINPFPTDSTQLPIDPFPILSSHLPSDSE

SEQ ID NO: 1937 - DNA, 1293 bp, Populus trichocarpa
  CDS (1)..(1293)
atggaggtggtcggagagacaccgccggcgtcagcgggggaggtgaacttgttcgggaagtacgagctagggaagcttctgggctacggcgcttttgccaaggtgtaccacgcgagaaacgtgagcacgggtcaaagcgtagccatcaaagcagtcagcaaggcgaaggtgatgaaagagggcttcgtggcgcacgttaagagggagatctctatcatgagccggttgcggcatgcgcacatagtcaggctccatgaagttttggccacgaagggtaaggtttatttcgtgatggagtatgccaaaggaggcgagttgttttccaagatttcgaaagggaggtttagtgaagatctcagccgtcggtattttcagcagttgatcacagccgtcggttactgtcacgcgaggggtgttttccaccgtgacttgaaacctgagaatctcttgctcgatgagaattttaacttgaaaatcacggatttcggtctcagtgcggttacggaacaggtccgacccgacgggctgttgcatactttgtgcggcacacctgcttacgtggcacctgaactcttggctaagaaaggttacgatggagctaaggtggatatttggtcatgcggtgtcgttttgtttgtcctgattgctggctatttgccttttaatgacactaatttgatggcaatgtaccggaagatttacaaaggacaatatcggtgcccgaaatggacctctcctgatttgaagaggctgctgtctcggcttttggacgcgaaccccgagacaaggatcaccattgatatgattattaatgatccatggtttaaaaagggtttcaaagaggagaaaaaactttatttagatgaatttgatttcgacaaagggttcgaggaagaggaggacgagaagtccttgaatgcattcgatataatttcgttctcgtccggttacgatctgtccaggatgttcaatgaatccgatacaatgatattaacagagaggtttgtgtcggccgagaagccggagaaagtcatggagagaatagaggaggttgctagaaaggagggactagaaattgcgaagaggaagaattggggggctaaattggaagggtgcaatggtaattttataatgatcattgaggttcaccggttaacggatcatctggttatgattgaagtgaaggaaaagaaatttaaaataggacctggacaggaaacatgggaagataaactgaaaccacaacttcgaagcctgatttatcaaccggaacaggctgtttccggcaactaa

SEQ ID NO: 1938 - protein, 430 aa, Populus trichocarpa
MEVVGETPPASAGEVNLFGKYELGKLLGYGAFAKVYHARNVSTGQSVAIKAVSKAKVMKEGFVAHVKREISIMSRLRHAHIVRLHEVLATKGKVYFVMEYAKGGELFSKISKGRFSEDLSRRYFQQLITAVGYCHARGVFHRDLKPENLLLDENFNLKITDFGLSAVTEQVRPDGLLHTLCGTPAYVAPELLAKKGYDGAKVDIWSCGVVLFVLIAGYLPFNDTNLMAMYRKIYKGQYRCPKWTSPDLKRLLSRLLDANPETRITIDMIINDPWFKKGFKEEKKLYLDEFDFDKGFEEEEDEKSLNAFDIISFSSGYDLSRMFNESDTMILTERFVSAEKPEKVMERIEEVARKEGLEIAKRKNWGAKLEGCNGNFIMIIEVHRLTDHLVMIEVKEKKFKIGPGQETWEDKLKPQLRSLIYQPEQAVSGN

SEQ ID NO: 1939 - DNA, 1413 bp, Populus trichocarpa
  CDS (1)..(1413)
atggagaacaaagggaatgtgttgatgcaaaaatatgagatagggagattgttggggcaaggaacttttgccaaggtccaccatgcaagggatctcaaaactggcatgagtgtggcaatcaagatgatcgacaaggagaaggtattcaaggttggaatgatggaccagattaagcgagaaatttctgtcatgagactgattaggcatcccaatgtggtggaactttatgaggtcatggccaccaaaactaagatttactttgttatggaatacgttaaaggtggtgagttgttcaacaaggttgccaagggaaagctcaaagaggatgttgccaggaaatattttcaacagctgatcagtgcagttgattactgtcacagtagaggagtctctcatcgtgatctgaaaccagaaaacctgctgttggatgagaatgagaatctaaaggtttctgattttggattaagtgcacttgctgaatcgaagcggcaagatggtttactacatacaacctgtggaacccctgcatatgttgctccagaagtgattaacagaaaaggctacgatggagctaaagctgatatttggtcctgtggagttatcttatatgttctactggccggctatctcccattccgtgatccaaatctgatggagatgtataggaagattgcgaagggagaatttaaatgccccaattggtttgcacccgaagttcgcaagcttctgtcaaagatactggatccgaacccaaacacaaggatatcaatggccaaaataatggaaaattcttgggttcggaaggatttgcaatccagaccctgtgttcttgaagccgaagtgaaagaaccagctcctttggactctgaggctgtttttggcataaatgagattagctgcgctgctgtggaaccaaagcaagaagtggcgaagccttgcaacttaaatgctttcgatattatctccttttctgcgggctttgacctgtctggcttatttgaggagaaagagcagaagaaagaagtgaggtttacatcaaacaagcctgcctccaccatcatctctaagctcgaagacatcgccaagcgtttgaggctgaaaataaagaaaaacgatggaggtttactgaaaatagaaggttcaaaggaaggccggaaaggagtcatgggcatcgatgcagaaatttttgagatcactccttttttccatttggtggagatgaaaaagtccagtggagataccgtggagtatcagaaggtagtgaaacaagacattcgacctgcactcaaggacattgtttggagctggcaaggagaacagcaaagggaacaactacaactacaagaacagcaggagctacagccttctcatgcatccacaacgcaggttgtctcaactcagaattcatcatga

SEQ ID NO: 1940 - protein, 470 aa, Populus trichocarpa
MENKGNVLMQKYEIGRLLGQGTFAKVHHARDLKTGMSVAIKMIDKEKVFKVGMMDQIKREISVMRLIRHPNVVELYEVMATKTKIYFVMEYVKGGELFNKVAKGKLKEDVARKYFQQLISAVDYCHSRGVSHRDLKPENLLLDENENLKVSDFGLSALAESKRQDGLLHTTCGTPAYVAPEVINRKGYDGAKADIWSCGVILYVLLAGYLPFRDPNLMEMYRKIAKGEFKCPNWFAPEVRKLLSKILDPNPNTRISMAKIMENSWVRKDLQSRPCVLEAEVKEPAPLDSEAVFGINEISCAAVEPKQEVAKPCNLNAFDIISFSAGFDLSGLFEEKEQKKEVRFTSNKPASTIISKLEDIAKRLRLKIKKNDGGLLKIEGSKEGRKGVMGIDAEIFEITPFFHLVEMKKSSGDTVEYQKVVKQDIRPALKDIVWSWQGEQQREQLQLQEQQELQPSHASTTQVVSTQNSS

SEQ ID NO: 1941 - DNA, 1383 bp, Populus trichocarpa
  CDS (1)..(1383)
atgatggaaacagagcaagtggcagatgaagattgccatgtcaataatggtgcaagaaagattctcctgggaaagtacgagatggggaggttgttaggacaaggaacgtttgctaaggtctacagagggaagaatcttgtgacacaagaaaatgttgcaatcaaagtgttgcacaaggatcaggtcaagaggacaggattaatggagcaaatcaagagagaaatctcaattatgcatcttgtgaagcatccaaatatagtggagttgaaagaagtgatggctaccaaatcaaaggtgttctttgtaatggagtttgtgaaaggtggtgagttatttgccaaaatcaagaagggagggctggaggaagatcttgcaagaaaatatttccaacagttgatttgtgcagttgattattgtcatagtcgtggcgtttctcatcgtgatttaaagcccgaaaacttgcttttggatgacaaagaagacttgaaagtgtccgatttcgggttttctgctttgcctgagcagaaatggaacgatggtttgctgcacacacggtgtggcacccctgcatatgtggctccagaggttctaagaaagaagggttatgatggtgctaaagctgatacctggtcttgtggggttattctattcgtgctgctttcagggcacttgccatttcgcaatgagaacgccatgaagatgtatgtgaagattttaaaggctgaatatgagttcccaccgtggatttcaagggatgccaagaggttgatttccaatcttcttgttgtggaccctgagaagagaattacaatccctgagatcagggcaaatagttggttccaaaaaggtcttgctcaatctgctgtatcttctaatgatttagaagatactgaaaacggagttagaagtgaagatcaagaggaattcccgggaaaaaccggatcgaagcattcgccgcctttttataatgcttttgaactcatatcttcaatgtcatcaggatttgatttatcaagtttgtttgagaccaagagaagaaggggttcaatgttcacttcaaaatgtccagcatcaatgatcctatcaacgttgaagtccgtggcaaagaagttgaactttagagtggcagtgagtgatacagaatttaaggtgaaattgctaggaaaagaggagggacggaaggggaaactggcggtgacagcagaggtgtttgagttggctgccgagcttgtggtggtcgagctatccaagtgctccggtgacacttttgagtacaccaaattctgtgaagaagatgtcaggcctgccctaaaagatatagtttggagttggcaaggagataatattgattctcatgaaggccaagtagggacaagtaattag

SEQ ID NO: 1942 - protein, 460 aa, Populus trichocarpa
MMETEQVADEDCHVNNGARKILLGKYEMGRLLGQGTFAKVYRGKNLVTQENVAIKVLHKDQVKRTGLMEQIKREISIMHLVKHPNIVELKEVMATKSKVFFVMEFVKGGELFAKIKKGGLEEDLARKYFQQLICAVDYCHSRGVSHRDLKPENLLLDDKEDLKVSDFGFSALPEQKWNDGLLHTRCGTPAYVAPEVLRKKGYDGAKADTWSCGVILFVLLSGHLPFRNENAMKMYVKILKAEYEFPPWISRDAKRLISNLLVVDPEKRITIPEIRANSWFQKGLAQSAVSSNDLEDTENGVRSEDQEEFPGKTGSKHSPPFYNAFELISSMSSGFDLSSLFETKRRRGSMFTSKCPASMILSTLKSVAKKLNFRVAVSDTEFKVKLLGKEEGRKGKLAVTAEVFELAAELVVVELSKCSGDTFEYTKFCEEDVRPALKDIVWSWQGDNIDSHEGQVGTSN

SEQ ID NO: 1943 - DNA, 1374 bp, Populus trichocarpa
  CDS (1)..(1374)
atgtcgtcttctagaagtggtggaagcggaagcaggacacgcgtggggaggtatgagctcggaaggactctcggagaaggaacttttgcgaaggtgaaatttgctaggaacgttgagacgggagagaatgttgctattaagattctcgataaagagaaagttcttaaacacaaaatgatcggtcagattaaacgggagatttcaacaatgaaattaattagacacccgaatgtcgtccgcatgtatgaggtgatggcgagcaagaccaaaatatacattgttttagaatttgtgacgggtggtgaacttttcgacaagattgcaagtaaagggaggttgaaggaggatgaagcgagaaagtattttcagcaacttatcaatgccgtggactactgccatagcagaggtgtataccacagagatctaaagcctgagaatctgctattggatgctagtgggtttcttaaagtttcggattttggactgagtgcactacctcagcaagttagagaagatgggttacttcacacaacgtgtggaacaccaaattatgttgctccagaggtgatcaacaataaaggctatgatggcgccaaggcagatttgtggtcatgtggtgtgattctttttgtcttgatggctgggtacttgccttttgaagaatccaaccttatggcactatacaaaaagatattcaaggctgacttcacatgtcctccatggttctcctcaagtgcaaagaaactaatcaaaagaattctggaccctaatccttcaacacgtattaccatttccgagcttattgaaaatgaatggtttaagaaaggatataagccacctacttttgaaaaggctaatgttagtctcgacgatgtggactctatcttcaatgaatcaatggattctcaaaaccttgttgtggagaggcgagaagaagggtttatagggcctatggcccctgtaaccatgaatgcgtttgaacttatctctacctctcagggtctcaaccttagtagtctttttgagaaacaaatggggcttgttaaacgggaaacgagattcacttccaaacattctgctagcgagataatctcgaaaattgaagcagcagcagcgcctctgggttttgatgtaaagaaaaataactttaagatgaagcttcaaggggagaaggatggacgcaagggtcgtttatctgtttcaacagaggtctttgaagtggccccttctctttatatggttgaggttcgcaagtctgatggtgataccctggaatttcataagttttacaagaacctttcaactgggctgaaagacatcgtatggaaaacgattgatgaagaagaggaagaagaggcagcgacaaatggttag

SEQ ID NO: 1944 - protein, 457 aa, Populus trichocarpa
MSSSRSGGSGSRTRVGRYELGRTLGEGTFAKVKFARNVETGENVAIKILDKEKVLKHKMIGQIKREISTMKLIRHPNVVRMYEVMASKTKIYIVLEFVTGGELFDKIASKGRLKEDEARKYFQQLINAVDYCHSRGVYHRDLKPENLLLDASGFLKVSDFGLSALPQQVREDGLLHTTCGTPNYVAPEVINNKGYDGAKADLWSCGVILFVLMAGYLPFEESNLMALYKKIFKADFTCPPWFSSSAKKLIKRILDPNPSTRITISELIENEWFKKGYKPPTFEKANVSLDDVDSIFNESMDSQNLVVERREEGFIGPMAPVTMNAFELISTSQGLNLSSLFEKQMGLVKRETRFTSKHSASEIISKIEAAAAPLGFDVKKNNFKMKLQGEKDGRKGRLSVSTEVFEVAPSLYMVEVRKSDGDTLEFHKFYKNLSTGLKDIVWKTIDEEEEEEAATNG

SEQ ID NO: 1945 - DNA, 1401 bp, Populus trichocarpa
  CDS (1)..(1401)
atgtcgtcttctagaagtggtggtggtggtggtggtggaggaggaggaagcggaagcaagacacgtgtggggagatacgaactcggaaggaccctcggagaaggaaattttgctaaggtgaaattcgctaggaacgttgagacgaaagagaatgttgccatcaaaattctcgataaagagaatgttcttaagcacaaaatgatcggtcagattaaacgggagatttcaacaatgaagttaatcagacaccctaatgtcgtccgcatgtatgaggtgatggcgagcaagaccaaaatttacattgttttacaatttgtgacgggtggtgaacttttcgacaaaattgcaagtaaggggaggttgaaagaggatgaagcgagaaagtattttcaacaacttatctgtgctgtagattactgccacagcagaggtgtataccatagggatctgaagcctgaaaatctgctaatggatgctaatgggattcttaaagtttcggattttggattgagtgcactacctcagcaagttagagaagatgggttacttcacacaacgtgtggaacaccaaattatgttgctccggaggtgatcaacaataagggctatgatggtgccaaggcagatttatggtcatgtggcgtgattctttttgtcttgatggctggctacttaccttttgaagaagccaacctgatggcactatacaaaaagatattcaaggctgacttcacgtgtcctccatggttctcctcaagtgcaaagaaactaatcaaaaggattcttgaccctaatccctcgacacgtatcaccattgccgagcttattgaaaatgaatggtttaagaaaggatataagccacctgcttttgaacaagctaatgttagcctcgacgatgtgaactctatcttcaacgaatcagtggattctcgaaacctagttgtggagaggcgagaagaagggtttatagggcctatggctcctgtaaccatgaatgcatttgaactcatctctacctctcagggtcttaaccttagtagtctttttgagaaacaaatggggcttgttaaacgggaatcaagattcacatccaaacattctgctagtgagataatctcaaaaattgaagcagcagcagcgcctttgggttttgatgttaagaaaaataacttcaagatgaagcttcaaggggacaaggatgggcgtaagggtcgtctatctgtagcaacagagatctttgaagtggccccttctctttatatggtcgaggttcgcaagtctggtggagataccctggaatttcacaagttttacaagaacctctcaactggactgaaagacatcgtatggaaaacaattgatgaagaaaaggaggaagaagaggcagcgacaaatggttag

SEQ ID NO: 1946 - protein, 466 aa, Populus trichocarpa
MSSSRSGGGGGGGGGGSGSKTRVGRYELGRTLGEGNFAKVKFARNVETKENVAIKILDKENVLKHKMIGQIKREISTMKLIRHPNVVRMYEVMASKTKIYIVLQFVTGGELFDKIASKGRLKEDEARKYFQQLICAVDYCHSRGVYHRDLKPENLLMDANGILKVSDFGLSALPQQVREDGLLHTTCGTPNYVAPEVINNKGYDGAKADLWSCGVILFVLMAGYLPFEEANLMALYKKIFKADFTCPPWFSSSAKKLIKRILDPNPSTRITIAELIENEWFKKGYKPPAFEQANVSLDDVNSIFNESVDSRNLVVERREEGFIGPMAPVTMNAFELISTSQGLNLSSLFEKQMGLVKRESRFTSKHSASEIISKIEAAAAPLGFDVKKNNFKMKLQGDKDGRKGRLSVATEIFEVAPSLYMVEVRKSGGDTLEFHKFYKNLSTGLKDIVWKTIDEEKEEEEAATNG

SEQ ID NO: 1947 - DNA, 1335 bp, Populus trichocarpa
  CDS (1)..(1335)
atgatgaagaaagtaacgagaaaggtaggaaaatatgaagttggccgtacaattggtgaaggaaccttcgccaaggtcaaatttgctcaaaatagagaaacaggagagagtgtcgccatgaagattctttctaaatccgccattcttaagcacagaatggttgatcagataaaaagagagatatcgatcatgaagcttgtcagacatccttacatagttatgctgcatgaggttttggcgagccggacgaagatatatataattctagagtttgttactggaggagaattatttgataaaattgttcatcaaagaagacttgaggagaacgagtcgagacggtattttcagcagcttattgatgcagttgctcattgtcattgcaagggggtgtaccacagagacctgaagcctgaaaatcttcttcttgatgcatttggaaatttgaaggtttctgactttggattgagtgcgttgccgcagaaaggggttggacttcttcatacgacatgtggaaccccgaattatgttgcacctgaggtgcttggtcaccaaggttatgatggggctgctgctgatgtgtggtcatgtggagtcatcctctttgttctaatggctggatatcttccatttgaggagacagaccttccaaccttgtaccgaaagataaatgctgcggaatattcgtgtccattttggttttcccctggggcgaaagcattgatagataagatactcaatcccaatcctaaaactcgtatagggattgagggaattaaaaaacatccatggtttcagaaaaactatgagcctgttggacatagggaagatgaggaagtgaatttggatgatgttcatgctgtttttgatgacattgaggatcaatatgtagcagagcaattggagaacagtgaagatggtcctctggtaatgaatgcatttgagatgattaccctgtctcaagggttgaatctatcagcgttgttcgacagacgtcaggattatataaaacgacaaactcgttttgtatcacgcaaacctgcaaaagatataatttcagcaattgaagcagttgcagaatcaatgaatctcaaggtccatacacgaaattacaagacaagacttgaaggagtatctgaaaacaaggctggacaatttgcagttgttctggaggtttatgaagttgctccatcacttttcatggtagatgctcggaaggcttctggggaaactcttgaatatcacaagttctacaagaatttctgcactaagctagaaaatatcatctggaaaccaccagagggtgcaaaacttcctgcctgcttcgaacaatga

SEQ ID NO: 1948 - protein, 444 aa, Populus trichocarpa
MMKKVTRKVGKYEVGRTIGEGTFAKVKFAQNRETGESVAMKILSKSAILKHRMVDQIKREISIMKLVRHPYIVMLHEVLASRTKIYIILEFVTGGELFDKIVHQRRLEENESRRYFQQLIDAVAHCHCKGVYHRDLKPENLLLDAFGNLKVSDFGLSALPQKGVGLLHTTCGTPNYVAPEVLGHQGYDGAAADVWSCGVILFVLMAGYLPFEETDLPTLYRKINAAEYSCPFWFSPGAKALIDKILNPNPKTRIGIEGIKKHPWFQKNYEPVGHREDEEVNLDDVHAVFDDIEDQYVAEQLENSEDGPLVMNAFEMITLSQGLNLSALFDRRQDYIKRQTRFVSRKPAKDIISAIEAVAESMNLKVHTRNYKTRLEGVSENKAGQFAVVLEVYEVAPSLFMVDARKASGETLEYHKFYKNFCTKLENIIWKPPEGAKLPACFEQ

SEQ ID NO: 1949 - DNA, 1296 bp, Populus trichocarpa
  CDS (1)..(1296)
atgatgaagaaagtaacgagaatggtaggaaaatatgaagttggccgtacaattggcgaaggaaacttcgccaaggtcaaatttgctcaaaatagagaaactggagagagtgtagccatgaaaattctcgctaaatcaaccattctcaagcacaaaatggttgatcagataaaaagagagatatcaatcatgaagattgtgagacatcctaacatagttaggctgcatgaggttttgtcgagccggacgaagatatatataattcttgagtttgttactggaggagaattatttgataaaattgttcatcaaggaagactttccgaaaatgaatcgaggcggtattttcagcagcttatagatgctgttgctcactgtcaccggaagggtgtgtaccacagagacctgaagcctgaaaaccttcttcttgatgcttttgggaatttgaaggtttcagactttggattgagcgcgttgcgccagaaaggggttggacttcttcatacaacgtgtggaaccccaaattatgttgcacctgaggtacttggtcaccagggttatgatggagctgctgctgatgtgtggtcatgtggagtcatcctctttgttctaatggctggatatcttccatttgaggagatagaccttccaaccttgtgccgaaagtattcttgtccattttggttttctcctgtggcaaaagcattgatagataagatactcgatcccaatcctaaaactcgtatagggattgagggaattaaaaaacatccatggtttcggaaaagctatgagcctgttggacatagtgaagaagaggaagtgaatttggatgatgttcatgcagtttttgatgacatcgaggatcattatgtagcagagcaattggagaacagtgagggcggtcctttggtaatgaatgcatttgagatgattgccctatctcaagggctgaatctatcagcattgtttgatagacgtcaggattatgtaaaaaaacaaactcgttttgtatcccacaaaccagcaaaagttataatttcagcatttgaagctgttgcggaatcaatgaatctcaagttccatacacataattacaagacaagactcgaaggaatatctgaaaataaggctggacaatttgcagttgttctggaggtttatgaagttggtccatcacttttcatggtagatgcacggaaggcatctggggaaactcttgaatatcacgagttctacaagaacttctgcgctcagctagaaaatatcatctggaaacctccagaagggtgctaa

SEQ ID NO: 1950 - protein, 431 aa, Populus trichocarpa
MMKKVTRMVGKYEVGRTIGEGNFAKVKFAQNRETGESVAMKILAKSTILKHKMVDQIKREISIMKIVRHPNIVRLHEVLSSRTKIYIILEFVTGGELFDKIVHQGRLSENESRRYFQQLIDAVAHCHRKGVYHRDLKPENLLLDAFGNLKVSDFGLSALRQKGVGLLHTTCGTPNYVAPEVLGHQGYDGAAADVWSCGVILFVLMAGYLPFEEIDLPTLCRKYSCPFWFSPVAKALIDKILDPNPKTRIGIEGIKKHPWFRKSYEPVGHSEEEEVNLDDVHAVFDDIEDHYVAEQLENSEGGPLVMNAFEMIALSQGLNLSALFDRRQDYVKKQTRFVSHKPAKVIISAFEAVAESMNLKFHTHNYKTRLEGISENKAGQFAVVLEVYEVGPSLFMVDARKASGETLEYHEFYKNFCAQLENIIWKPPEGC

SEQ ID NO: 1951 - DNA, 1356 bp, Populus trichocarpa
  CDS (1)..(1356)
atggaggagaggcatgttatttttgggaagtatgaaatgggtaggcttttagggaagggaacttttgctaaagtttactatgggaaacacttggtgacaggagagagtgtggcaatcaaagtcataagcaaagatcaagtcaagaaagaagggatgatggagcaaatccagagagaaatctcagtcatgcgtcttgttcgtcatcccaacattgtagagctcaaggaagtcatggctaccaagacaaaaatcttcttcatcatggagtatgttcgaggaggagagttgtttgccaaagtagccaaaggaaggctgaaagaagaagctgctcgaaaatatttccagcaactaatcagcgcaattgattattgtcatagcagaggtgtttatcatagagatttgaagccagagaatatgttgcttgatgaagatgaaaacttgaaaatctctgattttggcttgtcagccttgcctgaacaatttcggcaagatgggcttttgcatactcagtgtggaactcctgcttatgttgccccagaagtcttgagaaagaaaggctatgatggatcaaaagctgatatatggtcatgtggggtgattctttatgtgcttcttgcaggattcttgccatttcaagatgagaatgttatgaagatgtacaggaaagtcttcaaggctgaatatcagtttccgccttggttttcaacagattctaagaggttgatttcaagacttcttgttgctgatcctgaaaagagaatcacaattcctgccataatgagaaatcattggtttcttaaagggttttcaagaccagtggccttttctatccaagaatcaagcatggatcaaacaggacaagaacaagatcttgattcttgttctgttgtcaacaccaaggtatcatcaccagaattcttcaatgcattcgagtttatttcctcaatgtcatccggctttgatctgtctagtctttttgagactaagaggaaatcaggctctatgttcacttcaaaattttcagcgagtgctatcatggaaaaaattgaaggggttgcaaaagggctgagttataaggtggcaaaagtcaaagatttcaaagtgacgttacaaggtccatgcgagggtagaaaggggaagctggcagtgacggcggaggtgttcgaggtggcaccggaggttgcggtggtggagttctccaagtcttccggagataccttggagtatactaagttctgtgaggaagatgttaggcctgcactaaaagacatcgtttggacatggcaaggagacaatgtttgtaataaagataacaacaatagtcatgtagaagatcgtgaaattcaaatgttgtag

SEQ ID NO: 1952 - protein, 451 aa, Populus trichocarpa
MEERHVIFGKYEMGRLLGKGTFAKVYYGKHLVTGESVAIKVISKDQVKKEGMMEQIQREISVMRLVRHPNIVELKEVMATKTKIFFIMEYVRGGELFAKVAKGRLKEEAARKYFQQLISAIDYCHSRGVYHRDLKPENMLLDEDENLKISDFGLSALPEQFRQDGLLHTQCGTPAYVAPEVLRKKGYDGSKADIWSCGVILYVLLAGFLPFQDENVMKMYRKVFKAEYQFPPWFSTDSKRLISRLLVADPEKRITIPAIMRNHWFLKGFSRPVAFSIQESSMDQTGQEQDLDSCSVVNTKVSSPEFFNAFEFISSMSSGFDLSSLFETKRKSGSMFTSKFSASAIMEKIEGVAKGLSYKVAKVKDFKVTLQGPCEGRKGKLAVTAEVFEVAPEVAVVEFSKSSGDTLEYTKFCEEDVRPALKDIVWTWQGDNVCNKDNNNSHVEDREIQML

SEQ ID NO: 1953 - DNA, 1356 bp, Populus trichocarpa
  CDS (1)..(1356)
atggaggagaggcatgttctttttgggaagtatgagatggggaggctactggggaaggggacttttgctaaagtttactatgggaaacactcggtaaccggagacagtgtggctatcaaagttataaacacagatcaagtcaagaaagaaggcatgatggaacaaatccagacagagatctcagtgatgcatcttgttcgtcatcccaacattgttgagctcaaggaagtcatggctacaaagactaagatcttcttcatcatggagtatgttcgaggtggagagttgtttgccaaagtagccaaaggaaggctcaaagaagaagttgctcgaaaatatttccagcaactaatcagcgcgattgattattgtcacagcagaggtgtttatcatcgagacttgaagccagagaatatattgcttgatgaagacgaaaacttgaaaatctctgattttggcttgtcagccttacctgaacaattgctgcaagatggacttttgcatactctgtgcgggactcctgcttatgttgccccagaagttttgagaaagaaaggctatgatggatcaaaagcagatacatggtcatgtggggtgattctctacgtgcttcttgcaggattcttgccatttcaagatgaaaatgttatgaagatgtacaagaaaatcttcaaggctgaatatgagtttcagccttggttttcaacagatgctaagaggttgatttcaagacttcttgttgctgatcctgaaaggagaatcacaattcctgccataatgagaaatcattggtttctgaaagggtttttaagaccaatggccttttcaattcaagaatcaatcatggataaaacagaagaagatcaagatcttgattcttgttctgttgtcaagcctaaagtatcatcaccaagattcttcaatgcattcgagttcatctcttcaatgtcatctgggtttgatctgtccagtctttttgagactaagaagaaaccagggtcgatgttcacttcaaaagtgtcagcaagtgctatcatggaaaagattgaaggagttgcagaagggctgaattttaaggtagcaaaagttaaagatttcaaagtgaggttacaaagtccatgtgagggaagaaaggggaagctggcagtgacaacagaggtgttcgaggtggcaccggaggttgcggtggtggagttctccaagtcttccggagataccttggagtatgccacgttctgcaaggaagatgtcaggcctgcactaaaagacattgtttggacatggcaaggagacaatgtttttcttatcggtgagattcaaagattttttaataataaaatcaataattttaaataa

SEQ ID NO: 1954 - protein, 451 aa, Populus trichocarpa
MEERHVLFGKYEMGRLLGKGTFAKVYYGKHSVTGDSVAIKVINTDQVKKEGMMEQIQTEISVMHLVRHPNIVELKEVMATKTKIFFIMEYVRGGELFAKVAKGRLKEEVARKYFQQLISAIDYCHSRGVYHRDLKPENILLDEDENLKISDFGLSALPEQLLQDGLLHTLCGTPAYVAPEVLRKKGYDGSKADTWSCGVILYVLLAGFLPFQDENVMKMYKKIFKAEYEFQPWFSTDAKRLISRLLVADPERRITIPAIMRNHWFLKGFLRPMAFSIQESIMDKTEEDQDLDSCSVVKPKVSSPRFFNAFEFISSMSSGFDLSSLFETKKKPGSMFTSKVSASAIMEKIEGVAEGLNFKVAKVKDFKVRLQSPCEGRKGKLAVTTEVFEVAPEVAVVEFSKSSGDTLEYATFCKEDVRPALKDIVWTWQGDNVFLIGEIQRFFNNKINNFK

SEQ ID NO: 1955 - DNA, 1362 bp, Zea mays
  CDS (1)..(1362)
atggagaagaagccgaccatcctcatgaacaggtacgagctcgggcgcacgctcgggcagggcaccttcgccaaggtgtaccacggccggaacctcgcgtccggcgagagcgtggccatcaaggtcatcgacaaggagaaggtgatgcgcgtcggcatgatcgaccagatcaagcgcgagatctccgtcatgcgcctcgtccgccaccccaacgtcgtgcagctgcacgaggtgatggccagcaagagcaagatatacttcgccatggagtacgtccggggcggcgagctcttcgcccgcgtcgcccgcggccggctcaaggaggacgccgcgagaaggtacttccaccagctcgtcggcgccgtcgacttctgccacagccgcggcgtctaccaccgcgacctcaagcccgagaacctcctcgtcgacgagcacggcaacctcaaggtctccgacttcggcctcagcgcgctcagggagtgccagaagcaggacggcctgctgcacaccacctgcggcacccccgcgtacgtcgcgccggagatcatcaacaagaagggctacgacggggccaaggccgacatctggtcctgcggcgtcatcctcttcgtgctcctcgccggctacctcccgttccacgacgccaacctggtggagatgtaccgcaagatcagcagagccgacgtcaagtacccgcagtggttctcccctgagctccggcggttgatgcccaagctcctcgaaccgaacccaaacaacaggatcacgatcgagaagctggtcgagcacccctggttcaagaaggggtacaggccggccgtcatgctggcacagccgcacggctccagcagcctcaaggatgtccaggtcgccttcagcaacgccgaccacaaggacagcagcaccaaggtggaacagccggcggacagctccttgaagccggcgagcctgaacgcgttcgacatcatctcccactccagagggttcgacctgtcaagcctgttcgaggtggaccaagagcagaaggccagcaactcgcggttcatgacccagaaaccggcgtcggcgatagtgtcaaagctggagcagatcgctgagacagagcgcttcatggtgaagaaacaggacgggctggtgaagctgcaggggtccaagcaagggaggaaggggcagctcgcgatcgacgccgagatcttcgaggtgacaccggcctttcacgtcgtcgaggtgaagaagtcggcaggcgacacgctggagtatgagatgttctgcagcaagggcctaagaccttcactcagcgacatctgctggagcagccgatctgaggagaacatggctccttcagtggttcagccatcataa

SEQ ID NO: 1956 - protein, 453 aa, Zea mays
MEKKPTILMNRYELGRTLGQGTFAKVYHGRNLASGESVAIKVIDKEKVMRVGMIDQIKREISVMRLVRHPNVVQLHEVMASKSKIYFAMEYVRGGELFARVARGRLKEDAARRYFHQLVGAVDFCHSRGVYHRDLKPENLLVDEHGNLKVSDFGLSALRECQKQDGLLHTTCGTPAYVAPEIINKKGYDGAKADIWSCGVILFVLLAGYLPFHDANLVEMYRKISRADVKYPQWFSPELRRLMPKLLEPNPNNRITIEKLVEHPWFKKGYRPAVMLAQPHGSSSLKDVQVAFSNADHKDSSTKVEQPADSSLKPASLNAFDIISHSRGFDLSSLFEVDQEQKASNSRFMTQKPASAIVSKLEQIAETERFMVKKQDGLVKLQGSKQGRKGQLAIDAEIFEVTPAFHVVEVKKSAGDTLEYEMFCSKGLRPSLSDICWSSRSEENMAPSVVQPS

SEQ ID NO: 1957 - DNA, 1395 bp, Zea mays
  CDS (1)..(1395)
atggtgaacggcgagcagcgggcggacgcggagtgcacgcgggcgtcgctgctggggaggtatgagatcgggcggaccctcggcgagggcaacttcggcaaggtgaagtacgcgcgccacatcgccaccggcggccacttcgccatcaagatcctcgaccgcagcaagatcctctccctccgcatcgacgaccagatcaggagggagatcgggacgctcaagctgctcaagcacccgaatgtcgtccgcttgcacgaggttgctgccagtaaaacgaagatctacatggtgcttgagtttgtcaacggcggcgagctcttcgacaagatcgctatcaaggggaaactgtccgaacacgagggcaggaggctcttccagcagctaatcgacggcgtcagctattgccatgacagaggtgtctaccaccgagacctcaagccagagaatgtccttgttgatcggaagggcaccatcaagatctctgacttcggcctcagcgctctacctcaacatctcgggagtgacggacttctgcacacaacatgtggcagccccaactacatagctcctgaggttctgcaaaacagaggctatgacggctccttgtcagatctctggtcgtgtggggtgatcctctacgtgatgcttgttggctgccttcccttcgacgacaggaacctcgtcgttctttatcagaagattttcaagggagactgtcagatccccaagtggctttcgcctgccgcgcaggaccttctcaagaggatcctccaaccgaatccgatgaagaggatcaacgtcgcggggatcagggagcacgagtggttcaagaaggactacgtgcctgctgttccgcacgatgatgacgaagacgtccttcccagtccagctccctcgataaaggagccaatcgatgagccggcgcaggagaagtgtactcctatcaacgcttttcagttgatcgggatggcctcttcccttgacctttctggtttcttcgaggaagaggatgcagcgcaaagaaagattcggttcacttcgacgcacccacccaaggatctatttgacaagatcgagagcgttgtcatggagatgggattcaaagtccataggggggcaggcaagctcaaggtcttgaagaatagcaagtgttccaggaactccaggaacccgtcatcattgttggtgtgcaccgaggtgtttgagctcggtccatcattatatgtcgtagagcttaggaaatcccatggagactctatgttgtatagacagctgtgcgaaaggctctccgatgagctaggtgcctgcaagacagaccagatcgcgaggactgaatcatcgagtgacgacctctcgagcctcgatggcgaagcgttccctctatctgggttctga

SEQ ID NO: 1958 - protein, 464 aa, Zea mays
MVNGEQRADAECTRASLLGRYEIGRTLGEGNFGKVKYARHIATGGHFAIKILDRSKILSLRIDDQIRREIGTLKLLKHPNVVRLHEVAASKTKIYMVLEFVNGGELFDKIAIKGKLSEHEGRRLFQQLIDGVSYCHDRGVYHRDLKPENVLVDRKGTIKISDFGLSALPQHLGSDGLLHTTCGSPNYIAPEVLQNRGYDGSLSDLWSCGVILYVMLVGCLPFDDRNLVVLYQKIFKGDCQIPKWLSPAAQDLLKRILQPNPMKRINVAGIREHEWFKKDYVPAVPHDDDEDVLPSPAPSIKEPIDEPAQEKCTPINAFQLIGMASSLDLSGFFEEEDAAQRKIRFTSTHPPKDLFDKIESVVMEMGFKVHRGAGKLKVLKNSKCSRNSRNPSSLLVCTEVFELGPSLYVVELRKSHGDSMLYRQLCERLSDELGACKTDQIARTESSSDDLSSLDGEAFPLSGF

SEQ ID NO: 1959 - DNA, 1338 bp, Brassica juncea
  CDS (1)..(1338)
atgacaaagaaaacgaggaaactggggaaatatgaggttggtcggaccataggggaaggcagtttcgcaaaggttaagtttgcgaggaacacagacagtggagaaaacgttgccattaaaatcatggctaagagtactatacttaagaacaaaatggctgatcaggtaaaaagagagatatctataatgaagattgtacgacaccctaacatagtcaggttgtatgaggtcttggcgagtccttctaaaatatatatcgttttggagtttgtgactggaggagagctctttgatagaattgttcataaggggagacttgaagaaagtgaggctcgcaaatactttcaacagcttatagatgctattgctcattgtcactgcaagggtgtttaccaccgtgacctcaaacctgaaaatcttttactcgatacaaatggtaatctgaaggtttcggatttcggactcagtgcattgcctcagcaaggagtagaacttctgcggaccacgtgtggaactcccaactatgcagctccagaggtacttaatggccaaggttacgatggttcagcagcagatatttggtcttgcggggttattcttttcgtcattatggctgggttcttaccattttccgagacagatcttccatcattgtacagaaaaattagtgcagcagagttttcttgtccacagtggttctctgaagacgtgaagtctttaatacagaggatacttgaccccaatcccaaaacacgtattcaaattcaaaggaaattaggaaaacatagttggttcagattaaattacatgcctactcgagcgaggaaagaggaagaaagtaatttggatgatgtccgtgcagtttttgatggaattgaggggagttatgtagcggagaatatagagagaaaatatgagggacccctaatgatgaatgcctttgagatgattactttatcacagggcttaaacctatcagcattatttgacaggcggcaggattttgtgaggcaaacccgttttgtttctcgaagggagcctagtgtgataattgctaacattgaggctgttgcaacctcaatggggtttagggctcatacgcgcaacttcgaacgaaggctcgagggattatcttcgatcgaaggcaagggcgaatttgctgttgtgatagagtatgaggtggcaccatcgcttttcatggtagacgttagggaggctgctggtgaaacacttgaataccataagttctacaagaagttatgtgagaaactggagaacataatatggagagcaacggaaggaatgccaaagccagagctcagaacaatcacgttttaa

SEQ ID NO: 1960 - protein, 445 aa, Brassica juncea
MTKKTRKLGKYEVGRTIGEGSFAKVKFARNTDSGENVAIKIMAKSTILKNKMADQVKREISIMKIVRHPNIVRLYEVLASPSKIYIVLEFVTGGELFDRIVHKGRLEESEARKYFQQLIDAIAHCHCKGVYHRDLKPENLLLDTNGNLKVSDFGLSALPQQGVELLRTTCGTPNYAAPEVLNGQGYDGSAADIWSCGVILFVIMAGFLPFSETDLPSLYRKISAAEFSCPQWFSEDVKSLIQRILDPNPKTRIQIQRKLGKHSWFRLNYMPTRARKEEESNLDDVRAVFDGIEGSYVAENIERKYEGPLMMNAFEMITLSQGLNLSALFDRRQDFVRQTRFVSRREPSVIIANIEAVATSMGFRAHTRNFERRLEGLSSIEGKGEFAVVIEYEVAPSLFMVDVREAAGETLEYHKFYKKLCEKLENIIWRATEGMPKPELRTITF

SEQ ID NO: 1961 - DNA, 1395 bp, Oryza sativa subsp
  CDS (1)..(1395)
atggggggcgatggagatcagaggctgtcgctgactgcacccgggcgtcgcctgctggcgaggtatgagatcgggcgcacgctcggggagggcaacttcggcaaggtcaagtacgcgcgccacctcgccaccggcgcccacttcgccatcaagatcctcgaccgcaacaagatcctctccctccgcttcgacgaccagataaggagggagattgggacgctcaagctgctcaagcaccccaacgtcgtccgcctgcacgaggtggctgctagcaaaactaagatttacatggtgcttgaatatgtcaatggaggcgagctctttgacaagattgccgtaaaaggaaaactctctgaacatgaaggaaggagacttttccagcagttaatcgatgctgtgagctattgccatgataaaggtgtctaccacagagaccttaagcccgaaaatgttcttgtggatcgaagaggcaatatcaagatctctgactttggcctaagtgctttgcctcaacatcttgggaatgatggattgctgcacacaacatgtggcagccccaattatattgctcctgaggttttgcagaaccgaggttacgatggctcattgtcagatatctggtcttgtggagtaattctctatgtaatgctcgtcggataccttccctttgatgaccgaaatcttgttgtcctgtaccagaagattttcaagggggacactcaaatcccaaagtggctttcacctagtgcacgggatcttcttcgaaggattcttgaaccgaacccgatgaagagaatcaacatagcagggatcaaagagcatgagtggtttcagaaggattacactcctgttgttccatatgacgacgatgatgacaattatcttgactcagttcttccaatcaaagagcaaattgatgaagcaaagcaggaaaagcctactcatatcaatgcttttcagttgattggaatggcttctgcccttgatctttcaggtttctttgaggaagaggatgcgtctcaaagaaagataaggttcacatcaacacattcaccaaaagatttattcgacaagattgagaatgttgtgacggagatgggattccaagtccagaggggtaatagcaagctaaaggtcatgaaaaatggcaagggttcaaagaacctcaggaatccatcatcattcttggtctgtactgaggtagtcgagctcgggccatccttatatgttgtcgaattgaagaaatcccatggagatcctatattgtatagacagctatgtgagaggctatcagatgagctaggagtgtgcaagacagagcagattcagaggacggagtcgctggaggatgatctagagagcttcgacagcggatcttctctgcctggtttttga

SEQ ID NO: 1962 - protein, 464 aa, Oryza sativa subsp
MGGDGDQRLSLTAPGRRLLARYEIGRTLGEGNFGKVKYARHLATGAHFAIKILDRNKILSLRFDDQIRREIGTLKLLKHPNVVRLHEVAASKTKIYMVLEYVNGGELFDKIAVKGKLSEHEGRRLFQQLIDAVSYCHDKGVYHRDLKPENVLVDRRGNIKISDFGLSALPQHLGNDGLLHTTCGSPNYIAPEVLQNRGYDGSLSDIWSCGVILYVMLVGYLPFDDRNLVVLYQKIFKGDTQIPKWLSPSARDLLRRILEPNPMKRINIAGIKEHEWFQKDYTPVVPYDDDDDNYLDSVLPIKEQIDEAKQEKPTHINAFQLIGMASALDLSGFFEEEDASQRKIRFTSTHSPKDLFDKIENVVTEMGFQVQRGNSKLKVMKNGKGSKNLRNPSSFLVCTEVVELGPSLYVVELKKSHGDPILYRQLCERLSDELGVCKTEQIQRTESLEDDLESFDSGSSLPGF

SEQ ID NO: 1963 - DNA, 1437 bp, Oryza sativa subsp
  CDS (1)..(1437)
atggagacgacgagccaagattcgcaggtgatcatgggccggtacaagctcggccggctcctcggccgtggcacgttcgccaaggtctacaaggcctatcagttggccaccggcgaggccgtcgccatcaaggtgttcgacaaggaggcggtgcagcggtccggcacggtggagcaggtgaagcgcgaggtggacgtcatgcggcgtgtgcaccaccgccacgtcatccgcctccacgaggtgatggctacgcggtccaggatctacttcgtcatggagtacgcgagcggcggcgagctcttcacccgcctctcccggagcccgcggttccccgagcccgtcgcgcgccgctacttccagcagctgatcaccgccgtggagttctgccacagccgcggcgtgtaccaccgcgacctcaagcccgagaacctcctcctcgacgcccgcggcgacctcaaggtcaccgacttcggcctcagcgcgctagacggcagcctccgcggcgacggcctcttgcacaccacgtgcggcacgccggcgtacgtcgctcccgaggtgctcctgaagcgtggctacgacggcgccaaggcggacatctggtcgtgcggcgtgatcctcttcgtgctcctcgccggctacctccccttcaacgaaaccaacctcgtgctcctgtaccggaatatcacggagagcaactacaggtgcccgccgtggttctccgtcgaggcgcgcaagctcctcgccaggctgctcgacccgaaccccaagacccggatcaccatctccaagatcatggacaggccatggttccagcaggcgacgtgcccgctcggcgacatgtccctcgtcgcgagcgcgccctcggtgctgcttgccagaaaggaagccagccagcagcacgacgacgaggaggacgatgggtttgcacgggagaagaagaagcggtccaaggtgatcatgtcgtcgccggtgatcgacgtgaggccctcgagcatgaacgccttcgacatcatctcgcggtcgagagggctggacctgtccaagatgttcgacgcggaggagcgcaggtcggaggcgcggttctccaccagggagaccacgacggcgatcgtctccaagctggaggagatcgcggaggcggggaggttcagcttcaagctgaaggagaaagggagggtcgagctggaggggagccaggacgggcggaagggcgcgctggccatcgaggcggagatcttcaaggtggcgccggaggtgcacgtggtggaggtgaggaagaccggcggcgactcaccggatttccgggacttctacaagcaggagcttaagccgtcgcttggcgacatggtgtgggcgtggcagggaggtgattcgccgccgccgccgccgccgctcgtgccggcggcggggaggaggccgatcacgaagcgctcttga

SEQ ID NO: 1964 - protein, 478 aa, Oryza sativa subsp
METTSQDSQVIMGRYKLGRLLGRGTFAKVYKAYQLATGEAVAIKVFDKEAVQRSGTVEQVKREVDVMRRVHHRHVIRLHEVMATRSRIYFVMEYASGGELFTRLSRSPRFPEPVARRYFQQLITAVEFCHSRGVYHRDLKPENLLLDARGDLKVTDFGLSALDGSLRGDGLLHTTCGTPAYVAPEVLLKRGYDGAKADIWSCGVILFVLLAGYLPFNETNLVLLYRNITESNYRCPPWFSVEARKLLARLLDPNPKTRITISKIMDRPWFQQATCPLGDMSLVASAPSVLLARKEASQQHDDEEDDGFAREKKKRSKVIMSSPVIDVRPSSMNAFDIISRSRGLDLSKMFDAEERRSEARFSTRETTTAIVSKLEEIAEAGRFSFKLKEKGRVELEGSQDGRKGALAIEAEIFKVAPEVHVVEVRKTGGDSPDFRDFYKQELKPSLGDMVWAWQGGDSPPPPPPLVPAAGRRPITKRS

SEQ ID NO: 1965 - DNA, 1338 bp, Oryza sativa subsp
  CDS (1)..(1338)
atggggtttgtggagagcattgggaggtacagggttggccggaccatcggcgccggcacgttcgccaaggtcaggctcgccgtcgacgccgacaccggcgccaccgtcgccgtcaaggtcatcgacaagaggatggttatccgcaacaacctcatgtaccaggtcaaaagagagatcacggccatgaagctcctcaaccaccccaacattgtcaagatatatgaggtgatcgcgacgaagacgaagatatgcctggtaatggagtatgtcccaggagggcagctatctgacaagctaagttacctcaagaggttggatgagaaggaagcgaagaagtatttctaccaattgattgatgctgtagactactgccataggagaggtgtctaccacagagatctcaagcctgagaacttgttggtagataatcaaggcaatctcaaggtatctgattttggcctcagcgtgctaaaaaagccaggacagtttctatccacatcttgtggctcaccatgctatgtagctcctgagatgattcagcacaagagttatgatggggcagctgcagacgtctggtcttgtggtgtgatcctgtttgaacttcttgctggttatctaccatttcaagactgcagcttaacaaacttgtacagaaggatatctcgagctcagtttgtttttccacaatggctcagtgtccctcagaagaagattataatcaggatactggatccatctcctataacaagagcaaagataagcgatatttttgatgataagtggctccaagatcactgcaatccatcagcaaggattgagaatgatgatgattgtgatgttattgaagaggccagcacagacagtgatagcagtcacaacacagaggtaaaggaaactgaagagatgacggcagaaactgaccgattcattaatgccttccaattgatagtgagatgcagtgatcttgacttgtcaggtctcttccaggagcagaaaacaaagctcgcctcgccacacccagtacaggaaaccttcgacaagatcaaggttgcagccaaggatgtgagcatggcagtgaagagaatgaacagctctctggtggagattcaggacagcaaattactaccaagaagcaatcttgatcttactctgtcggccgagatcaatttggctccacctcaagatagtaggatgcacaatttactgaacggaaatgcaatgcatatgatgtcaacttgcagttctgtagaagcctatcaagcttgctcaatggtggacagctgtctgcaagctcatctgatatggagtgtgattaatcaagttatgttctatgagtag

SEQ ID NO: 1966 - protein, 445 aa, Oryza sativa subsp
MGFVESIGRYRVGRTIGAGTFAKVRLAVDADTGATVAVKVIDKRMVIRNNLMYQVKREITAMKLLNHPNIVKIYEVIATKTKICLVMEYVPGGQLSDKLSYLKRLDEKEAKKYFYQLIDAVDYCHRRGVYHRDLKPENLLVDNQGNLKVSDFGLSVLKKPGQFLSTSCGSPCYVAPEMIQHKSYDGAAADVWSCGVILFELLAGYLPFQDCSLTNLYRRISRAQFVFPQWLSVPQKKIIIRILDPSPITRAKISDIFDDKWLQDHCNPSARIENDDDCDVIEEASTDSDSSHNTEVKETEEMTAETDRFINAFQLIVRCSDLDLSGLFQEQKTKLASPHPVQETFDKIKVAAKDVSMAVKRMNSSLVEIQDSKLLPRSNLDLTLSAEINLAPPQDSRMHNLLNGNAMHMMSTCSSVEAYQACSMVDSCLQAHLIWSVINQVMFYE

SEQ ID NO: 1967 - DNA, 1281 bp, Medicago truncatula
  CDS (1)..(1281)
atggatccagaggggaaattattgatgaatagatatgagtttagaaaacaattaggccaaggaaactttgcaaaagtttacaaagcaagggacttgagaactggtgacagagttgctgtgaaggttattgacaaggaaaaagtcctaagagctggaatgatggttcaagcaaagcgggagattgaaacaatgagacgggttaaacacccgaacgttttgcgactttacgaggttttggcgaccaaaactaagatataccttatcttagaatatgcaaaaggcggtgagcttttcctcaaaatacgtaaaatcagttataatcaagcaagacaatacttccaacaattggtaagtgctctagatttttgccacaaaaagggtgtgtaccatcgggatttgaagcctgaaaatttgcttttagacgagaacggtgttcttaaaatagctgatttcgggtttagcacgttcatagaatctcatcgccgcaacaacatgctgcaaacaatgtgtggaactccgatgtatgtagctccagatgttctccatggaaaaggttattgtggagaaaaggctgatgtttggtcttgcggagtaatcttatatgttcttatgacccgttactatccattttatgatcggaatttaatggaaatgtatcggaaaagcaacaagggagaatacaaatgtcccgactggttttcagtcgagatacgcagattactatcacagattctcaatcccaaccctgatagtagaatatctactgctaaaataatggaaaagattacaaatgtggctgcaaatgctgagtctgataaagctattgttgaaaatgaaattgctgttgttgagccaaatcaagaattggttcaaccaaaatatcttaatgcttttcacatactttctctatctgcagggctcgatttgtctgtcttttttgcaagtaataatgatgatgaaattgaagacatcaagtttacttccaagagctcggcctcctctatcatatcaacaatggaggatattgcacacatgttgaatatgaagatagtaaagaataatggagagatgctaaagttggagagagagcaagatcttcgaaaaaggccactcactatttctactgaaatatttgagtttgctccatctttctatttggttgagataaagaagtacagtggcgatgcatcggaataccagaagatattgaaggagcatataataccagttctcaaagatatcatctggatttggcaaagtgagaaaaaaacacaacactag

SEQ ID NO: 1968 - protein, 426 aa, Medicago truncatula
MDPEGKLLMNRYEFRKQLGQGNFAKVYKARDLRTGDRVAVKVIDKEKVLRAGMMVQAKREIETMRRVKHPNVLRLYEVLATKTKIYLILEYAKGGELFLKIRKISYNQARQYFQQLVSALDFCHKKGVYHRDLKPENLLLDENGVLKIADFGFSTFIESHRRNNMLQTMCGTPMYVAPDVLHGKGYCGEKADVWSCGVILYVLMTRYYPFYDRNLMEMYRKSNKGEYKCPDWFSVEIRRLLSQILNPNPDSRISTAKIMEKITNVAANAESDKAIVENEIAVVEPNQELVQPKYLNAFHILSLSAGLDLSVFFASNNDDEIEDIKFTSKSSASSIISTMEDIAHMLNMKIVKNNGEMLKLEREQDLRKRPLTISTEIFEFAPSFYLVEIKKYSGDASEYQKILKEHIIPVLKDIIWIWQSEKKTQH

SEQ ID NO: 1969 - DNA, 1341 bp, Medicago truncatula
  CDS (1)..(1341)
atggtgatattgaaccttgggaagaagcagaataagaagaagttgcatagtggagaaggagtgagacttggaaaatatgagttgggtaggattcttggtgagggcaattttggtaaagttaagtttgctaggaacactgattctggacaaccttatgctattaagattattgataagaacaagatcattgatctcaatatcacaaaccagataaagagggaaatatgtgccttgaagctcctaaggcatcccaatgttgttaaattatacgaggtcttagctagcaaaacaaaaatttacatggtacttgagtacgtgacaggagaggagttatttgacaaaatagcttccaagggtaaacttcctgaaggtgaaggtagaaaattgttccaacagttgattgatggtgtgagctactgccacagtaaaggtgtcttccacagggatctcaagcttgagaatgtacttgtggatgccaaagggaatctaaagataactgattttggtcttagtgctttaccccaacaatttagggcagatgggttgttgcatacaacatgtggaagtgcaaattatgttgcaccagagattcttgctaataggggctataatggtgcatcatcagatgtatggtcatgtggggttatcttgtatgtagtcttaacaggattcctaccttttgatgatagaaatcttgcagttctctaccagaaggttttgaaaggagattttcagaaaccaaaatggttatcagctggtgcacaaaacattataaagaggattcttgatcccaaccctaaaaccagaataacaatggcggagatcaaagaagatttgtggttcaaggaaggatataatcaagcatatcatgaggacgaggaagatggtgtatatgttgacgatcaagcctttaacatccatgaattgtcacatgaagaagaaaagagtagttcacaatcaccaattcgtatcaatgcatttcagttgatagggatgtcttcatgcctagacctctctggcttttttgagaaagaggatgtatctgagaggaagataaggtttacagcaaatctttcagccaaagttctgatggagaaaattgaagattctgtgacagaaatggaatttagagttcaaaagaaaaatggcaaaatgaaagtgatgcaagagaacaaggatcataaaactcttggcagcctctcagtgataatagaggtttttgaaataagttcatcattgtatgtagtagagttaaggaagtgttatggagatgcctctgtatatagacagttatgcaagaagttattaaatgatctcggtgttccccacgaaaagcactag

SEQ ID NO: 1970 - protein, 446 aa, Medicago truncatula
MVILNLGKKQNKKKLHSGEGVRLGKYELGRILGEGNFGKVKFARNTDSGQPYAIKIIDKNKIIDLNITNQIKREICALKLLRHPNVVKLYEVLASKTKIYMVLEYVTGEELFDKIASKGKLPEGEGRKLFQQLIDGVSYCHSKGVFHRDLKLENVLVDAKGNLKITDFGLSALPQQFRADGLLHTTCGSANYVAPEILANRGYNGASSDVWSCGVILYVVLTGFLPFDDRNLAVLYQKVLKGDFQKPKWLSAGAQNIIKRILDPNPKTRITMAEIKEDLWFKEGYNQAYHEDEEDGVYVDDQAFNIHELSHEEEKSSSQSPIRINAFQLIGMSSCLDLSGFFEKEDVSERKIRFTANLSAKVLMEKIEDSVTEMEFRVQKKNGKMKVMQENKDHKTLGSLSVIIEVFEISSSLYVVELRKCYGDASVYRQLCKKLLNDLGVPHEKH

SEQ ID NO: 1971 - DNA, 1074 bp, Vitis vinifera
  CDS (1)..(1074)
atggagaagtatgagcttgtgaaggatataggatctgggaattttggtgtggctaggcttatgaggaacaaggaaaccaaagagcttgttgccatgaagtacattgaaagaggtcaaaagattgatgagaatgtggccagggagatcataaatcaccgttcccttcggcatccaaacataattcgattcaaggaggtggttttgactcccacacatcttgctattgttatggagtacgctgcaggaggggagctctttgagcgaatctgcaatgctgggaggtttagcgaagatgaggctaggtatttttttcagcagcttatctccggggtcagctattgccattccatgcaaatatgccatagggatttgaagctggaaaataccttgttggatggaagccctgctccacgcctgaaaatctgtgactttggctactctaagtcatctttgctgcattcaagacccaaatcaacagttggtactccagcttatattgcaccagaggttctttctcgaagagaatatgatggcaagttggcagatgtgtggtcctgtggagtaactctttatgttatgctggtgggagcgtacccttttgaggaccaagaagacccaaagaattttaggaaaaccatcagtcgtataatggctgttcaatacaagattcccgattatgttcacatatctcaagattgtaggcatctccttgctcgcatatttgtggcaaatccatccaggagggtcactatcaaagacatcaagaatcacccatggtttctaaagaacttgccccgggaactcacagaagcagctcaagctctctattacaggagagaaaaccctaccttttcccttcaaagtatagaggacatcatgaaaattgtggatgaggccaaaacccctcctccagtttcccggtcaattggaggctttggctggggaggcgaagaaaaaaaagaagaagaagaagaagaaaaggaagaagaggtggagaccgaggaagaagaagaggacgagtatgagaagcaagtcaaagaagcccatgcaagtggagaagttcatgtcagttaa

SEQ ID NO: 1972 - protein, 357 aa, Vitis vinifera
MEKYELVKDIGSGNFGVARLMRNKETKELVAMKYIERGQKIDENVAREIINHRSLRHPNIIRFKEVVLTPTHLAIVMEYAAGGELFERICNAGRFSEDEARYFFQQLISGVSYCHSMQICHRDLKLENTLLDGSPAPRLKICDFGYSKSSLLHSRPKSTVGTPAYIAPEVLSRREYDGKLADVWSCGVTLYVMLVGAYPFEDQEDPKNFRKTISRIMAVQYKIPDYVHISQDCRHLLARIFVANPSRRVTIKDIKNHPWFLKNLPRELTEAAQALYYRRENPTFSLQSIEDIMKIVDEAKTPPPVSRSIGGFGWGGEEKKEEEEEEKEEEVETEEEEEDEYEKQVKEAHASGEVHVS

SEQ ID NO: 1973 - DNA, 1308 bp, Vitis vinifera
  CDS (1)..(1308)
  misc_feature (1226)..(1226): r is g or a
atggagaacgatactggagatgctgatccggcgaacgaagatattcagccggagataactttgttcggaaagtacgcggttggaaagttgctcggctatggagccttcgcgaaggtctaccacgcaaggaacatccgaacgggccaaagcgtggcgatcaaggcggtgagcaagaaaaaggtgatgaaaggaggattgacggcccatgtgaagcgggagatttctatcatgcgccggctacggcatcctcacatcgttaagctgtatgaggtcttggcgacgaaaacgaagatctacttcgtgatggagtacgccaaaggtggtgagctctttacaaaaatagccaaggggcggttcagcgaagacctcagtcgccggtattttcagcagctgatctccgccattggatattgccactcccgaggcgttttccaccgcgatttgaagccggagaaccttcttctcgacgagaattggaaccttaaagtctccgatttcggtctcagcgccgtgaaggatcagatccgggccgatggtctcctacacactctctgcggtaccccggcgtatgtggcgccggagattctagcgaagaaaggttacgatggtaccaaggtggatatctggacttgcggcatcattctctatgtattgaacgccggttatcttccgttcaacgatccaaacctcatgggaatgtaccggaagatctataaaggcgagtttcggtgtccgaaatggacttctcctgatatgcgacgccttctatcacgccttctcgatacgaatccagagacgagaatcactgtcgatgagatcatccgtgacccttggttccaaaagggttacaaggaaatcaaattccacgtggaagattttgatttcaaggatcacgacgacgacgacgacaacgccgagtacatgaacgcgttccacattatctcattctcgtccggtttcgaattctccagtatgttgaacgattccggcatttcggtggccggtgaaagattcgtatcggccgagtcaccggagaaaataatagaaaaggtcgaggacgtggcaaaaaaggagaacgtaacagtgacgagaaaggaaaattggggagtgatgttggagggacaaaacggtaatttcgccttgataatggagatatatcggttgacggagaagctggtcctggtagaggtgaggaagaaagaggtggacgctggactaggacctgrcaaagaaatctggcgagacacactccggccgcagctcagcgaactgatttatcaaccggaggagccgagcaccgagagctga

SEQ ID NO: 1974 - protein, 435 aa, Vitis vinifera
  misc_feature (409)..(409): The Xaa at location 409 stands for Asp, or Gly.
MENDTGDADPANEDIQPEITLFGKYAVGKLLGYGAFAKVYHARNIRTGQSVAIKAVSKKKVMKGGLTAHVKREISIMRRLRHPHIVKLYEVLATKTKIYFVMEYAKGGELFTKIAKGRFSEDLSRRYFQQLISAIGYCHSRGVFHRDLKPENLLLDENWNLKVSDFGLSAVKDQIRADGLLHTLCGTPAYVAPEILAKKGYDGTKVDIWTCGIILYVLNAGYLPFNDPNLMGMYRKIYKGEFRCPKWTSPDMRRLLSRLLDTNPETRITVDEIIRDPWFQKGYKEIKFHVEDFDFKDHDDDDDNAEYMNAFHIISFSSGFEFSSMLNDSGISVAGERFVSAESPEKIIEKVEDVAKKENVTVTRKENWGVMLEGQNGNFALIMEIYRLTEKLVLVEVRKKEVDAGLGPXKEIWRDTLRPQLSELIYQPEEPSTES

SEQ ID NO: 1975 - DNA, 1389 bp, Vitis vinifera
  CDS (1)..(1389)
  misc_feature (22)..(22): y is t or c
  misc_feature (81)..(81): y is t or c
  misc_feature (108)..(108): y is t or c
  misc_feature (363)..(363): r is g or a
  misc_feature (525)..(525): y is t or c
atggaaaataatgggagtatcytgatgcaacggtatgaattagggaaattattaggtcaaggcacctttgccaaggtccaycatgccaggaaccttaaaactggcacyagtgttgccattaagataattgataaagagaagattttgaaggttgggatggtggatcagattaagcgagagatttctgtaatgagactggttagacacccaaatgtggtagagctttatgaggttatggccagcaaaacgaagatttactttgtcatggaatatgctaaaggaggggagctcttcaacaaggtagccaaaggaaagctcaaggaggatgttgcaaggaaatattttcaacagctgatcagtgcrgttgatttctgtcacagtagaggtgtttatcatcgggatttaaagccagaaaaccttctactggatgagaatggaaatctaaaagtttcagactttggactgagtgcccttgctgaatctaagcaccaagatgggttgcttcacacaacctgtggaaccccygcctatgttgctccagaggtgatcaataggaaaggctatgatggagccaaagctgatatatggtcatgtggggtggtcttattcgttttgttggctggctatctcccatttcatgattcaaatctgatggagttgtataggaagattggtaaggcagaatatagattccctaactggttcccttcggaagtacgaaggttgctgtcaaagatcttggatccaaacccaaagactaggatttccattaccaaaataatggaaaattcttggttccaaaagggtcttgatcctgtcctgaggatcactgaaacaggagagaaagagccagctgatctcgaggttgaggctgtatttggttctaatgagagtgccagcaccactgctgaggcaaagcaagaattggcgacgcttagtaacttgaatgcgtttgatatcatttccttttcagcagggtttgacttgtctggtttgttcgaggaaaataagcaaaagaaagaagtgcgatttacatctaggcagccagcctcagccatcatctctaaactggaggacattgctaagcgtttgatgctgaaggtgaagaagaaggatggtgggttgttgaaaatggaaggttcaaaggaaggcaggaaaggcgtcttgtccattgatgcagagatctttgaggtgactccatcttttcatttggtggaggtgaagaagtccagtggggacacgttggagtaccagaaaatagtgaaacaggagataagaccagctctcaaggacattgtgtgggcatggcaaggtgagcagcagcagcagcaacaacaaccagaagagccaatgcccctattgcagcccatctcacctccagcttcataa

SEQ ID NO: 1976 - protein, 462 aa, Vitis vinifera
MENNGSILMQRYELGKLLGQGTFAKVHHARNLKTGTSVAIKIIDKEKILKVGMVDQIKREISVMRLVRHPNVVELYEVMASKTKIYFVMEYAKGGELFNKVAKGKLKEDVARKYFQQLISAVDFCHSRGVYHRDLKPENLLLDENGNLKVSDFGLSALAESKHQDGLLHTTCGTPAYVAPEVINRKGYDGAKADIWSCGVVLFVLLAGYLPFHDSNLMELYRKIGKAEYRFPNWFPSEVRRLLSKILDPNPKTRISITKIMENSWFQKGLDPVLRITETGEKEPADLEVEAVFGSNESASTTAEAKQELATLSNLNAFDIISFSAGFDLSGLFEENKQKKEVRFTSRQPASAIISKLEDIAKRLMLKVKKKDGGLLKMEGSKEGRKGVLSIDAEIFEVTPSFHLVEVKKSSGDTLEYQKIVKQEIRPALKDIVWAWQGEQQQQQQQPEEPMPLLQPISPPAS

SEQ ID NO: 1977 - DNA, 1395 bp, Vitis vinifera
  CDS (1)..(1395)
  misc_feature (886)..(886): s is g or c
  misc_feature (1134)..(1134): r is g or a
atggcagacaggcagagcaaggagaacacaagcaaaaggaagaacggggagaaccaatctttgcttctggggcggtacgagatcgggaagcttctggggcatgggacattcgccaaggtctaccacgccaggaacgtcagatccaacgagagcgtggccatcaaagtcatcgacaaggagaagatcctcaaaggcggtttgatcgcacatatcaagcgcgagatctccatactccgccgcgttcgccatcccaacatcgttcaattgtttgaagtcatggccaccaaggctaagatctacttcgtcatggagtacgtcaggggcggagagctcttcaataaggtcgccaaaggccgcctcaaggaggaggtcgctcgcaagtatttccagcagttgatctccgccgtcggcttctgccacgccagaggggtctaccaccgcgacctcaagcccgagaatctcttattggacgaagccggtgacctcaaagtctccgattttgggcttagcgctgtctctgatcagatgaggcaggatggcctgttccacaccttttgtgggactccggcgtatgtggcacctgaggttttggcccggaagggctatgacgcatccaaggttgatatatggtcgtgcggtgtgatactcttcgtcttgatggctgggtatctccctttccatgatcagaacatcatggccatgtacaagaaaatctacaagggtgaattccgatgccctcggtggttttcgccggagctcgctcggcttcttactcggctcctcgatacgaacccggaaaccagaattacaattccggagattatggagaatcggtggtttaagaaaggttttaaacatattaaattttacattgaggatgatacgsttagactctgtaatgctgaggaggctgaggatgatgtggagtctttgtcggatcaatctatgtcagagtcggagtcggagttggagactcggaggaggctttctacattgccaagaccggcgagtttgaatgcatttgatattatatcattttcaccaggtttcgatctctctggattgtttgaggagggaggtggagacgcgcgatttgtgtcgggtgcacctgtatcgaagattatatcaaaattrgaggagattgccaaggtggtgagctttacagtgaggaagaaggattgtagggtgagcttagagggatccagagagggggtgaaggggccattaacgattgcagctgagatttttgagttaacgccctcattggtggtggtggaagttaagaagaaaggaggcgacaaaggggagtatgaggagttctgtaatcgtgaattgaaacccgtgttgcagaaccttaaaaacaagaggcatgctgaggttaatttgaagtattga

SEQ ID NO: 1978 - protein, 464 aa, Vitis vinifera
  misc_feature (296)..(296): The Xaa at location 296 stands for Leu, or Val.
MADRQSKENTSKRKNGENQSLLLGRYEIGKLLGHGTFAKVYHARNVRSNESVAIKVIDKEKILKGGLIAHIKREISILRRVRHPNIVQLFEVMATKAKIYFVMEYVRGGELFNKVAKGRLKEEVARKYFQQLISAVGFCHARGVYHRDLKPENLLLDEAGDLKVSDFGLSAVSDQMRQDGLFHTFCGTPAYVAPEVLARKGYDASKVDIWSCGVILFVLMAGYLPFHDQNIMAMYKKIYKGEFRCPRWFSPELARLLTRLLDTNPETRITIPEIMENRWFKKGFKHIKFYIEDDTXRLCNAEEAEDDVESLSDQSMSESESELETRRRLSTLPRPASLNAFDIISFSPGFDLSGLFEEGGGDARFVSGAPVSKIISKLEEIAKVVSFTVRKKDCRVSLEGSREGVKGPLTIAAEIFELTPSLVVVEVKKKGGDKGEYEEFCNRELKPVLQNLKNKRHAEVNLKY

SEQ ID NO: 1979 - DNA, 1389 bp, Vitis vinifera
  CDS (1)..(1389)
  misc_feature (22)..(22): r is g or a
  misc_feature (197)..(197): y is t or c
  misc_feature (1242)..(1242): k is g or t
atggcgtcacggtcaagtactrgcaggacacgtgtggggaagtatgaattgggtcgaaccctaggggaagggacgtttgcaaaggtcaagtttgcgaggaatgtggagactggggagaatgttgctattaagattctcgacaaagaaaaggttcttaagcataagatgatcggaggttctactgggcagacagttgyccttggattaaaaagggaaatttcaaccatgaaactgatcagacatccaaatgtcattcgaatgcatgaggtgatggctagcaagacaaagatatacattgttttggaatttgtgactggtggtgaactttttgacaaaattgctagtaaaggaaggttgaaagaagatgaagcaagaaagtatttccaacagctaattaacgctgtggattactgccatagtagatgtgttttccatagagacctaaagccggagaatctattgcttgatgctaatggagttcttaaagtttcagattttggattgagtgcactacctcaacaagttcgagaagatgggttacttcacacaacatgtggaactccaaactatgttgctccagaggtgatcaataacaaaggctatgatggagctaaggcagacctatggtcatgtggggtaatcttatttgttcttatggctggctatttgccttttgaagaatcgaacctcatggctttgtataaaaagatattcaaggccgactttacgtttcctccctggttatcctcaagtgcaaagaagctaattaaaagaatcttggaccctaacccggagacgaggattacaattgctgaagtcattgagaatgagtggtttaagaagggatataagccacctagtttcgaacaagcagatgttagtcttgatgatgtggacgccatctttgatgaatcaggggcaagtattcttgactctcaaaaccttgttgtggagaggcgtgaagagcgacctacgacgcctgtcactttgaatgcttttgaactcatctctacatctcagggtctcaacctcggtactctctttgaaaagccaatgggccttgttaaacgggagacaagattcacatcgaagcgtcctgccaatgagattatctcaaaaattgaggaaactgctatgcctttggggtttgatgtaaagaaaaataacttcaagatgaaacttcaaggggagaaaactggacgcaagggtcatttatccattgcaacagagatttttgaggtkgccccttcgctatacatggttgagcttcgaaaatctgggggagatactttggaatttcacaagttctacaagaacctctcaactgggttgaaagatattgtttggaaatcaggagatgaatcaaaggaggaagtgaataatggttag

SEQ ID NO: 1980 - protein, 462 aa, Vitis vinifera
  misc_feature (8)..(8): The Xaa at location 8 stands for Gly, or Ser.
  misc_feature (66)..(66): The Xaa at location 66 stands for Ala, or Val.
MASRSSTXRTRVGKYELGRTLGEGTFAKVKFARNVETGENVAIKILDKEKVLKHKMIGGSTGQTVXLGLKREISTMKLIRHPNVIRMHEVMASKTKIYIVLEFVTGGELFDKIASKGRLKEDEARKYFQQLINAVDYCHSRCVFHRDLKPENLLLDANGVLKVSDFGLSALPQQVREDGLLHTTCGTPNYVAPEVINNKGYDGAKADLWSCGVILFVLMAGYLPFEESNLMALYKKIFKADFTFPPWLSSSAKKLIKRILDPNPETRITIAEVIENEWFKKGYKPPSFEQADVSLDDVDAIFDESGASILDSQNLVVERREERPTTPVTLNAFELISTSQGLNLGTLFEKPMGLVKRETRFTSKRPANEIISKIEETAMPLGFDVKKNNFKMKLQGEKTGRKGHLSIATEIFEVAPSLYMVELRKSGGDTLEFHKFYKNLSTGLKDIVWKSGDESKEEVNNG

SEQ ID NO: 1981 - DNA, 1320 bp, Vitis vinifera
  CDS (1)..(1320)
  misc_feature (962)..(962): r is g or a
  misc_feature (1146)..(1146): r is g or a
atgaatccacctaaagtcaagcgtcgagttgggaaatatgaggtgggaaggacaattggggagggtacatttgcgaaagtcaagtttgcaaggaattctgagactggggaaccggttgctataaagatcctggacaaagagaaggttctgaaacacaaaatggctgaacagataaagcgggaagtagcaacaatgaaactaataaagcatccaaatgttgttcgcttatatgaggtaatggggagcaagacaaagatattcattgttttagagtttgttactgggggagagctctttgacaaaattgtaaaccatgggcgaatgagggaggatgaagcacgaaggtatttccagcagcttattaatgctgttgattattgtcacagtaggggtgtctaccacagagacttaaagccagaaaatctgctgttggatgcttatggaaacctcaaagtttctgattttggattaagtgcattgtcccaacaagtcagggatgatggcctgcttcacactacctgtggaactccaaactatgttgcccctgaggtccttaatgacagaggctatgatggtgcaactgcagacttgtggtcctgtggtgttatactctttgtattgcttgcagggtacttgccttttgatgattctaatcttatgatcctatataaaaaaatatcagctgcagaatttacttgtccaccttggctctctttcggtgctatgaaattgataactcgcattttggatcccaaccctatgactcgtattacaatccctgaaattctagaagatgaatggtttaagaaaggttataagccccctgtgtttgaggagaaaggagatgcaaacttggatgatgtagaagctgtatttaaagattcagaagaacatcatgttacagagaaaacggaggaacaaccagcagcaatgaatgcatttgaattaatttccatgtcaaragggctcaaccttgggaatttgtttgatatagaacagggattcaagagagaaacgaggttcacgtcaaaatgccctgccaatgagataattcataagattgaagaagctgtgaagcctcttgggtttgatgttcacaagaaaaactataagatgaggcttgaaaatatgaaagctgggagaaargggaaccttaatgtggctacagaggtatttcaagtggcaccttctcttcatatggttgaggttcgaaaagcaaagggagatactctggagttccataagttctacaaaaatctttcgacctgccttgaggatgtggtttggaaaactgaggatgacatgcaagaaacgaaataa

SEQ ID NO: 1982 - protein, 439 aa, Vitis vinifera
  misc_feature (321)..(321): The Xaa at location 321 stands for Arg, or Lys.
MNPPKVKRRVGKYEVGRTIGEGTFAKVKFARNSETGEPVAIKILDKEKVLKHKMAEQIKREVATMKLIKHPNVVRLYEVMGSKTKIFIVLEFVTGGELFDKIVNHGRMREDEARRYFQQLINAVDYCHSRGVYHRDLKPENLLLDAYGNLKVSDFGLSALSQQVRDDGLLHTTCGTPNYVAPEVLNDRGYDGATADLWSCGVILFVLLAGYLPFDDSNLMILYKKISAAEFTCPPWLSFGAMKLITRILDPNPMTRITIPEILEDEWFKKGYKPPVFEEKGDANLDDVEAVFKDSEEHHVTEKTEEQPAAMNAFELISMSXGLNLGNLFDIEQGFKRETRFTSKCPANEIIHKIEEAVKPLGFDVHKKNYKMRLENMKAGRKGNLNVATEVFQVAPSLHMVEVRKAKGDTLEFHKFYKNLSTCLEDVVWKTEDDMQETK

SEQ ID NO: 1983 - DNA, 1341 bp, Vitis vinifera
  CDS (1)..(1341)
  misc_feature (327)..(327): y is t or c
atgaaaaaggtcacgagaaaggtcggaaagtatgaggtcggccgaacaattggcgaaggaactttcgccaaggttaaatttgcgcacaacaccgagactggggagagcgtagctatgaaggttatggcaaagtccaccattcttaagcataggatggtcgatcagattaaacaagagatatccataatgaagattgtcaggcaccctaacatagttagattgcatgaggtcttggccagccagacaacgatatatattattcttgagtttgtcactggaggagaactatatgataaaattgttcaccaaggaagactctctgaaaaygaatccaggcgatactttcagcagcttatagatgctgtatcacattgtcacagtaagggtgtgtaccacagagatctgaagcctgaaaatctacttcttgattcgaatggaaatttgaaggtttctgattttggacttagtgcattgcctaaacaaggggttggacttcttcataccacatgtggaaccccaaattatgttgcacctgaggtgcttagtaaccaaggttatgacggtgcagctgctgatgtgtggtcatgtggagtcattctctatgttctaatggcaggatatcttccatttaatgagatagaccttccaagcttgtacaaaaagatcaatgctgcagagttttcctgtccattttggttttcttctggatcaaagtcgttcctatgtaggatacttgatcccaatccgaaaactcgtattcggattgaagggataaaaaatgatccatggtttcgaaagaactacgtgtctagcaaatgtagagaagatgaagaagtgaatttggatgatattcatgcggtttttgatgatattgaggaaaattacgtatctgagcagtcaggaaataatgacacaggtcctttgataatgaatgcatttgagatgattaccctatcccaagggttgaatctatcagcactttttgacagacgacaggattatgtaaaacggcaaactcgttttgtttcccgcgaaccagcaaaagttataatttctactattgaagctgtggcagaatctatgaatttcaaggtccatacacgccactacaagacaagacttgagggaatatctgcaaataagactgcacaatttgcagttgtcctagaggtttttgaagttgcaccatcccttttcatggtggatgttagaaaggctgctggggatacacttgaatatcacaagttttacaagaatttctgtgctaaacttgagcatatcatctggaaaccaaaagaggctatgacaaattccagtcttctaagaacaatgacttgctga

SEQ ID NO: 1984 - protein, 446 aa, Vitis vinifera
MKKVTRKVGKYEVGRTIGEGTFAKVKFAHNTETGESVAMKVMAKSTILKHRMVDQIKQEISIMKIVRHPNIVRLHEVLASQTTIYIILEFVTGGELYDKIVHQGRLSENESRRYFQQLIDAVSHCHSKGVYHRDLKPENLLLDSNGNLKVSDFGLSALPKQGVGLLHTTCGTPNYVAPEVLSNQGYDGAAADVWSCGVILYVLMAGYLPFNEIDLPSLYKKINAAEFSCPFWFSSGSKSFLCRILDPNPKTRIRIEGIKNDPWFRKNYVSSKCREDEEVNLDDIHAVFDDIEENYVSEQSGNNDTGPLIMNAFEMITLSQGLNLSALFDRRQDYVKRQTRFVSREPAKVIISTIEAVAESMNFKVHTRHYKTRLEGISANKTAQFAVVLEVFEVAPSLFMVDVRKAAGDTLEYHKFYKNFCAKLEHIIWKPKEAMTNSSLLRTMTC

SEQ ID NO: 1985 - DNA, 1281 bp, Vitis vinifera
  CDS (1)..(1281)
atggcggattcgggtaaagattcgtgcccgtctttgcttcacggtaaatacgagctgggacggcttctgggtcacggcaccttcgccaaggtgtatcatgcccggaacttgcagacagggaagagtgtagcgatgaaagtggtgggtaaggataaggtgataaaagtggggatgacggagcaggtgaagagggagatatcagttatgaagatggtacagcatcccaatattgttgagcttcacgaagtcatggccagcaagtccaagatctacttcgccatggagctcgtccgcggcggcgagcttttctccaagatctccaaagggcggttgagggaggacgttgctagagtgtacttccagcagctgatctcggcggtggacttttgccacagccgcggagtctaccaccgggatctgaagccggagaatctactcctcgacgagtctggcaacttgaaagtcaccgattttgggctgagcgcgctgtcagagcacttgaagcaagatgggcttttgcacacgacatgtgggactccagcctacgtcgcgcccgaggtgattggaaagaatgggtatgatggggcaaaggccgatctgtggtcgtgcggtgtgattctgtacgttcttctcgccggattcttgccgtttcaggacgacaacattgtggccatgtataggaagatctacagaggagactttaagtgtccgccttggttttcacccgaatctcgcagactcgtcacgaaactcctcgatccaacccccaacactcgaatcaccatagccaagatcgtggaatcctcctggttcaaaaagtcggtgcccaaaacgatactaaccaaagaggaacaagaattcgagtcattcaattgcggaaaagcaaagcagccggagaccctgaacgcgttccacatcatctccctatcggaggggttcgatctgtcacctttgttcgaagagaagaagagagagcaaaaggaggaactgaggttcgcgacgacgcagccagcgagcagcgtgatatcgaaactggaggaggtagcgaaggccgggaaattcagcgtgaagaagagcgaaacgatagtgaggctgcaggggcaggaaagaggaagaaaagggaaattagcgataggagcggagatattcgcagtggcgccgtctttcctggtggtggaggtgaagaagcaccatggtgatagcctggagtacgaccagttctgcaacaaggagctccggccggctctcaaggacatagtttggacgtccaccccagcctga

SEQ ID NO: 1986 - protein, 426 aa, Vitis vinifera
MADSGKDSCPSLLHGKYELGRLLGHGTFAKVYHARNLQTGKSVAMKVVGKDKVIKVGMTEQVKREISVMKMVQHPNIVELHEVMASKSKIYFAMELVRGGELFSKISKGRLREDVARVYFQQLISAVDFCHSRGVYHRDLKPENLLLDESGNLKVTDFGLSALSEHLKQDGLLHTTCGTPAYVAPEVIGKNGYDGAKADLWSCGVILYVLLAGFLPFQDDNIVAMYRKIYRGDFKCPPWFSPESRRLVTKLLDPTPNTRITIAKIVESSWFKKSVPKTILTKEEQEFESFNCGKAKQPETLNAFHIISLSEGFDLSPLFEEKKREQKEELRFATTQPASSVISKLEEVAKAGKFSVKKSETIVRLQGQERGRKGKLAIGAEIFAVAPSFLVVEVKKHHGDSLEYDQFCNKELRPALKDIVWTSTPA

SEQ ID NO: 1987 - DNA, 1197 bp, Vitis vinifera
  CDS (1)..(1197)
atggctaagattagccaagacaagttagactactcaagcctgctccatggcaaatacgagctgggccgcctgcttggccatggcacctttgcaaaggtgtaccatgccaggaacttaagaaatggggagagtgtagccatgaaagtggttgcgaaagacaaggtgataaaggtggggatgatggagcaaatgaagcgcgagatatcggtgatgaagaaggtgagccaccccaacatcgtccagctccatgaagtcatggcaagcaagtccaagatatacctggccatggaatatgttcgtgggggtgagctcttttccaagattgccaaaggcagactgcgggaggatgcagccaggtcctatttccaacaattgatttcagccgtggagttctgccacagccgcggggtttttcaccgggacttgaagcctgagaacctcctcctggatgaacaggggaacctcaaggtcactgattttgggctgtgcgcgctgtcggagcacttgaagcaggatggtttgctgcataccgcctgtgggactccggcctatgttgcgccggaggtgattgcgaagaggggctacgatggcgcaaaggcagatatatggtcttgtggggtgatactgttcgtgcttatggctggatttttgcccttccaggatgacaaccttattgctatgtacaaaaagatctacagaggggacttcaagtgtccgccttggttctcacctgaagcgcgcagagttgtttgtaggctgcttgatccaaaccccaataccagaatcaccatttccaagctcaaggaaacatcctggtttaagaaatcaaagcctaaaaatgtgcagactactgctagtggtgttgccgtcgaagagggaatggaagtgaaagagaaggtgcctgaggctcttaacgcctttcacataatctcgttatcggaggggttcgatctgtcgcctctgtttgaggagaagaagaaggaggaggaagaggagatgaggtttgcgacgttaaaaaagtcgatgagcgacgtggtattgaagctagaggagctgaccaagccggggatgtttccgatgactccagctctcggaggagacagtgtggatcagtacaatcagagttgcggcaaggagttgagaccagcagtggagggcataggctggacagcaacccaaaattcggcagttgcttga

SEQ ID NO: 1988 - protein, 398 aa, Vitis vinifera
MAKISQDKLDYSSLLHGKYELGRLLGHGTFAKVYHARNLRNGESVAMKVVAKDKVIKVGMMEQMKREISVMKKVSHPNIVQLHEVMASKSKIYLAMEYVRGGELFSKIAKGRLREDAARSYFQQLISAVEFCHSRGVFHRDLKPENLLLDEQGNLKVTDFGLCALSEHLKQDGLLHTACGTPAYVAPEVIAKRGYDGAKADIWSCGVILFVLMAGFLPFQDDNLIAMYKKIYRGDFKCPPWFSPEARRVVCRLLDPNPNTRITISKLKETSWFKKSKPKNVQTTASGVAVEEGMEVKEKVPEALNAFHIISLSEGFDLSPLFEEKKKEEEEEMRFATLKKSMSDVVLKLEELTKPGMFPMTPALGGDSVDQYNQSCGKELRPAVEGIGWTATQNSAVA

SEQ ID NO: 1989 - DNA, 1341 bp, Gossypium hirsutum
  CDS (1)..(1341)
atggaggagaggcatgttttgtttgggaaatatgagatggggaggctgttagggaaagggactttcgccaaagtctactacgggaaagaattagccaccggtgaaagcgtggcggtgaaagtcatcagcaaagatcaggtgaagaagaaagggatgatggagcaaatcaagagagaaatctcagtgatgcgccttgttcgacatcccaacatagtggagctcaaagaagtaatggcgaccaagaaaaagatcttctttgtcatggaacatgtccgtgggggtgagctctttgccaaagtttacaaaggcaagctcaaagaacacgtcgctcgtaagtactttcaacagctgatcagcgccgttgatttctgccacagcagaggtgtttcccaccgtgatttgaagcctgagaatctcctgttggacgaaaaagaagatctgaagatctctgattttgggttgtcggctttgcctgagcagcttctcaacgatggtctccttcacactcagtgtgggacaccggcttacgttgctcccgaggttttgaggaaaaaagggtacgatggatccagagctgatatttggtcttgtggggttgttttatatgttcttctcgcaggtttcttgccttttcaagatgagaatatgatgaagatgtataggaaagttttcaaagccgaattcgagttccccacctggttttcaacagaatcgaagcgtttgatctcgaaactacttgtggcagatcctgaaaaaaggatcacaatcccagctataatgcgtgatccttggttcagaaaagaattcacacgtccccttgcgttttcgatccaagaaccgatagacgatgatgaatccgcaccctctaagagtgctaaactatcgtctcccaaattcttcaacgcgttcgagttcatttcctctatgtcgtcggggttcgatctgtcgggcttgttcgaggacaagagaaaatcggggacgatgtttacgtcaagatgttcagccagtgctataatgtctaaagtcgaagctgttgcgaaggggttgaacttcagggtggggaaagccaaagacttcaagatgagattacaagggtcatcggaagggaggaaagggcggttgtttgtgaccgctgaggtgttcgaggtggcaccggaggtagcggtggtcgaattctccaagtcagcaggggataccttggagtatgctaagttttgcgaggaagatgttaggcctgcattgaaagacattgtttggacatggcaaggtgacagtttcaatgaggcagaagaacatgaaaaacaagtacaacaagacacagccgagcctaacacattgtag

SEQ ID NO: 1990 - protein, 446 aa, Gossypium hirsutum
MEERHVLFGKYEMGRLLGKGTFAKVYYGKELATGESVAVKVISKDQVKKKGMMEQIKREISVMRLVRHPNIVELKEVMATKKKIFFVMEHVRGGELFAKVYKGKLKEHVARKYFQQLISAVDFCHSRGVSHRDLKPENLLLDEKEDLKISDFGLSALPEQLLNDGLLHTQCGTPAYVAPEVLRKKGYDGSRADIWSCGVVLYVLLAGFLPFQDENMMKMYRKVFKAEFEFPTWFSTESKRLISKLLVADPEKRITIPAIMRDPWFRKEFTRPLAFSIQEPIDDDESAPSKSAKLSSPKFFNAFEFISSMSSGFDLSGLFEDKRKSGTMFTSRCSASAIMSKVEAVAKGLNFRVGKAKDFKMRLQGSSEGRKGRLFVTAEVFEVAPEVAVVEFSKSAGDTLEYAKFCEEDVRPALKDIVWTWQGDSFNEAEEHEKQVQQDTAEPNTL

SEQ ID NO: 1991 - DNA, 1320 bp, Oryza sativa
  CDS (1)..(1320)
atggagagtaaagggaaaatactaatggaaaggtatgagttgggcaaattgttggggaaaggaacatttggcaaggtgcactatgcagggaatctggagtcaaaccagagtgtggccataaagatgatggacaaacagcaggtgttgaagttcgggctttcggagcagatcagacgtgagatcacaaccatgcggttggtggctcataagaacattgttcagcttcatgaggtcatggcaacacggaacaagatctactttgtgatggagtatgtgaaaggtggtgagctatttgaaaaggttgcaaagcgtggaaagcttacagaggttgttgccataagtacttccagcaactcattaagtgcagtggattactgccacagtcgaggtgtgtatcaccgggacttgaagcctgaaaacctgctgttggatgagaatgagaacctgaaagtctcagactttggactgagtgcgctttcagagtcgaagaggcaagatggcttactccataccacctgtggaacacctgcatatgtagctccagaggtgatcagcaagataggatatgatggtgcaaagtcagatatttggtcttgtggtgttatcctgtttgttcttgttggtggttaccttcctttccagggcccaaacttgatggaaatgtatcggaagatacaacatggtgaattcaggtgccccggttggttttcacgcaaacttcagaatttgttgtacaagatcatggaccccaacccaagcacaaggatttcaatccagaagataaaggagtctacctggttccggaaaggtcctgaggaaaatcgtattttgaaggaaagaactttgaatgaaaacccccccaaaaatgttgctctggtgcttggtgtgagacccaagaaaaatgctcatgaagatgtgaagcccatgtcagtgacaaacttaaatgcctttgaaattatctctttctccaaggggtttgatctctctggcatgttcattgtaaaggaatggagaaatgaggcaaggttcacttcaaataaatctgcctcaaccataatctcaaagctagaagatgttgcaaaggcgctaaatctcagggtaaggaaaaaagacaatggtgtagtgaaaatgcaagggaggaaggaaggaaggaatggtgttcttcagtttgacataaaaatatttgaggttaccacttcctatcatatcatcgagatgaaacaaacaagtggcgattcattggagtaccgacagctactggaggagggcatccggccagctctgaaggacattgtcttggcctggcatggagatgaatag

SEQ ID NO: 1992 - protein, 439 aa, Oryza sativa
MESKGKILMERYELGKLLGKGTFGKVHYAGNLESNQSVAIKMMDKQQVLKFGLSEQIRREITTMRLVAHKNIVQLHEVMATRNKIYFVMEYVKGGELFEKVAKRGKLTEVVAISTSSNSLSAVDYCHSRGVYHRDLKPENLLLDENENLKVSDFGLSALSESKRQDGLLHTTCGTPAYVAPEVISKIGYDGAKSDIWSCGVILFVLVGGYLPFQGPNLMEMYRKIQHGEFRCPGWFSRKLQNLLYKIMDPNPSTRISIQKIKESTWFRKGPEENRILKERTLNENPPKNVALVLGVRPKKNAHEDVKPMSVTNLNAFEIISFSKGFDLSGMFIVKEWRNEARFTSNKSASTIISKLEDVAKALNLRVRKKDNGVVKMQGRKEGRNGVLQFDIKIFEVTTSYHIIEMKQTSGDSLEYRQLLEEGIRPALKDIVLAWHGDE

SEQ ID NO: 1993 - DNA, 1323 bp, Sorghum bicolor
  CDS (1)..(1323)
atgagtacaaccaaggtgaagagacgtgtgggcaagtatgagctcggccgcaccataggtgagggcacattcgcaaaggtcaggttcgcgagggacacggtgaccggcgaggccgtagccatcaagatcctagataaggataaggtactcaagcacaagatggtcgagcagattaagcgggaaatctcgacgatgaagttaatcaagcaccctaatgttgtccgcatatacgaggtgatgggaagtaaaacaaagatctacatagtgttagaatttgctactggtggcgagctctttcagagaattgttaaccacggtcggatgagggaagatgaggcaaggaggtacttccaacaattaatcaatgcagttgattattgtcatagcaggggtgtgtaccaccgggatttaaaacctgaaaatttactgcttgattcatatggaaacctgaaagtctctgactttgggctcagtgcgctatctcagcagatgaaggatgatggactgctgcacacaacttgtgggactccaaactatgttgcaccagaggtccttgaagatcaaggctatgacggtgcaatggctgatctgtggtcatgtggagttatcctgtttgttctgctagcagggtatttgccatttgaggactctaatctcatgactttgtataagaaaatatcaaatgcagaatttacatttccaccatggacatcttttcctgccaagaggttgttaacaagaatccttgatccaaatccaatgacgagaataacaatcccagaaatattagaggatgaatggttcaaaaagggctacaagcgcccagagtttgatgaaaaatatgacaccacgttggatgatgtggatgctgtcttcaatgattcagaagagcaccatgtgacagaaaagaaagaagaagaaccagtagctctgaacgcatttgaactgatctcaatgtcagcaggcctaaaccttggaaacttattcgactcagagcaggagttcaaaagagaaacaaggtttacatcaaaatgtccacccaaagaaattgtccgcaagattgaggaagctgcaaaacctctaggatttgatgttcagaagaaaaattacaagttgaggctcgaaaaggttaaggcagggaggaaggggaacctcaatgttgctactgagatactgcaagttgcaccctcccttcatatggtagaagtccgaaaagcaaaaggtgacactctggaatttcataagttctacaagaacctttccaagaccttaaaggacgtcgtctggaaatccgacgatactcaaatgctacatgctgcttag

SEQ ID NO: 1994 - protein, 440 aa, Sorghum bicolor
MSTTKVKRRVGKYELGRTIGEGTFAKVRFARDTVTGEAVAIKILDKDKVLKHKMVEQIKREISTMKLIKHPNVVRIYEVMGSKTKIYIVLEFATGGELFQRIVNHGRMREDEARRYFQQLINAVDYCHSRGVYHRDLKPENLLLDSYGNLKVSDFGLSALSQQMKDDGLLHTTCGTPNYVAPEVLEDQGYDGAMADLWSCGVILFVLLAGYLPFEDSNLMTLYKKISNAEFTFPPWTSFPAKRLLTRILDPNPMTRITIPEILEDEWFKKGYKRPEFDEKYDTTLDDVDAVFNDSEEHHVTEKKEEEPVALNAFELISMSAGLNLGNLFDSEQEFKRETRFTSKCPPKEIVRKIEEAAKPLGFDVQKKNYKLRLEKVKAGRKGNLNVATEILQVAPSLHMVEVRKAKGDTLEFHKFYKNLSKTLKDVVWKSDDTQMLHAA

SEQ ID NO: 1995 - DNA, 1323 bp, Sorghum bicolor
  CDS (1)..(1323)
atgagtgcaaccaaggtgaagagacgtgtgggcaagtatgagctcggccgaaccataggtgaaggcacattcgcaaaggtcaggttcgccaagaacactgagaccggagaacccgtagccatcaagatcctagataaggaaaaagtcctcaggcacaagatggtcgagcagattaagcgggaaatttcgaccatgaagttgattaagcatcctaatgttgttcggatatatgaggtgatgggaagtaaaacaaagatctacattgtgttggagtatgttactggtggcgagctttttgacacaattgctaaccatggtcgaatgagggaagatgaggcaaggagatacttccaacagttaatcaatgcagttgattattgtcatagcaggggtgtgtaccaccgggatttaaaaccagagaatttactgcttgactcatatggaaatctgaaggtctctgactttggactgagtgcgctctctcagcaaatcaaggatgatggattgctgcatacaacttgtgggactccaaactacgttgcaccagaggtcctagaagaccaaggctatgatggtgcaatggctgatttgtggtcatgtggagttatcctgtttgttctgctagctgggtatttaccttttgaggactctaatcttatgacgctgtataagaaaatatcgaatgcagaatatacatttccaccatggacgtctttccctgccaagaggttgttaacaagattccttgatccaaatccaatgacgagaataacaatccctgaaatactggaggatgaatggttcaaaaagggctacaagcgcccggagtttgacgagaaatatgacacaccattggatgatgtggatgctgtcttcaatgattcagaagagcatcacgtgacagagaagaaagaagaagaaccagtagttctcaatgcatttgaactgatttcaaggtcagcaggcctaaatcttgggaacctatttgactcagagcaggaattcaaaagagaaacaaggttcacatcaaaatgtccaccaaaagaaattgtgcgcaagattgaggaagctgcaaaacctctaggatttggtgttcagaagaaaaattacaagttgaggcttgagaaagtaaaagcagggaggaagggaaacctcaatgttgctactgagatactgcaagttgcaccctcacttcatatggtagaagtcaggaaagcaaaaggtgacactctggaattccaaaagttctacaagaacctttccaagaccttaaaggacgttgtctggaaatctgaagatctgcaaatgcaacctgcttcttag

SEQ ID NO: 1996 - protein, 440 aa, Sorghum bicolor
MSATKVKRRVGKYELGRTIGEGTFAKVRFAKNTETGEPVAIKILDKEKVLRHKMVEQIKREISTMKLIKHPNVVRIYEVMGSKTKIYIVLEYVTGGELFDTIANHGRMREDEARRYFQQLINAVDYCHSRGVYHRDLKPENLLLDSYGNLKVSDFGLSALSQQIKDDGLLHTTCGTPNYVAPEVLEDQGYDGAMADLWSCGVILFVLLAGYLPFEDSNLMTLYKKISNAEYTFPPWTSFPAKRLLTRFLDPNPMTRITIPEILEDEWFKKGYKRPEFDEKYDTPLDDVDAVFNDSEEHHVTEKKEEEPVVLNAFELISRSAGLNLGNLFDSEQEFKRETRFTSKCPPKEIVRKIEEAAKPLGFGVQKKNYKLRLEKVKAGRKGNLNVATEILQVAPSLHMVEVRKAKGDTLEFQKFYKNLSKTLKDVVWKSEDLQMQPAS

SEQ ID NO: 1997 - DNA, 1068 bp, Craterostigma plantagineum
  CDS (1)..(1068)
atggaaaagtacgaacttgtgaaggatataggctctgggaattttggcgtggcgaggcttatgagaaacaaggagacaaaggagctcgtagctatgaagtacattgagagaggacataagatcgatgagaacgtagctcgagagatcataaaccatagatcgcttcgacaccccaatataattaggttcaaggaggtggtcttgacgccgactcatttagccattgtaatggagtacgccgcaggtggagagctcttcgagagaatatgcaacgcggggcgcttcagcgaagacgaggcgaggtacttctttcagcagcttatttgcggtgtccattattgccacgccttgcaaatttgccaccgtgacctaaagctggagaacacacttctcgacggtagcccagccccgcgcctcaaatcttgtgatttcggctattcaaagtcgtctctgcttcattcgaggcccaaatcaacagtcggcactcctgcttatatagctcccgaggttctatctaggcgagaatacgacggcaaattggctgatgtgtggtcgtgcggcgtcacgctatacgtcatgctagtcggagcctatcccttcgaagatcaagaagacccctttttcttcaggaaaacaatactttggataatggcagttcagtacaaaatcccggactacgtcagaatatcccaaagttgcaggcaccttctttcacgcatattcgtcgccaatccacttaggaggataacgatcaaggagataaaatcgcacctatggtttctgaagaacttgccgagggagctcactgaagtggcccaagctgcgtattttcgtagggacaatcctacgtattcactccaaagcgaggaagagattatgaagatcgtcgaagaagctaaggtccctcctcaggcgtctcgctccataggaggctttggctggggaactgaagaagatgaagagaacgtcgaagaagaggaggaaggtgaatctgaaggtgaagaagatgagtatgagaagcaagtcaaggctgcccatgctagtggggaagttcctcctcttacgtaa

SEQ ID NO: 1998 - protein, 355 aa, Craterostigma plantagineum
MEKYELVKDIGSGNFGVARLMRNKETKELVAMKYIERGHKIDENVAREIINHRSLRHPNIIRFKEVVLTPTHLAIVMEYAAGGELFERICNAGRFSEDEARYFFQQLICGVHYCHALQICHRDLKLENTLLDGSPAPRLKSCDFGYSKSSLLHSRPKSTVGTPAYIAPEVLSRREYDGKLADVWSCGVTLYVMLVGAYPFEDQEDPFFFRKTILWIMAVQYKIPDYVRISQSCRHLLSRIFVANPLRRITIKEIKSHLWFLKNLPRELTEVAQAAYFRRDNPTYSLQSEEEIMKIVEEAKVPPQASRSIGGFGWGTEEDEENVEEEEEGESEGEEDEYEKQVKAAHASGEVPPLT

SEQ ID NO: 1999 - DNA, 1296 bp, Arabidopsis thaliana
  CDS (1)..(1296)
atggccgaagactctaattcttccgaatcaatcattgttaacgtcaccggagatgataataagtcggctttgttcggtaagtacgatctcggtaagctcctcggtagcggcgcgtttgccaaagtctaccaagcggaggatcttcaaaacggcggcgaaagcgttgcgatcaaagtcgtacaaaaaaaacgtttgaaagacggtttaacggcgcacgttaagagagaaatatctgtcatgcgccgcctccgtcatcctcatatcgtgctcctctccgaagtcctcgccacaaagacgaagatctacttcgtcatggagctagccaaaggtggtgagctcttctcaagagtcaccagcaaccgtttcacagagagtcttagccggaaatatttccggcaattgatctccgccgtgagatactgccacgcaagaggagttttccaccgtgatttgaagccggagaatctcctcctcgacgagaatcgagatctgaaggtttcagacttcggtctcagtgcgatgaaggagcagatccaccccgacggaatgctacatacgctctgtggaactccggcttacgtagcaccggagcttcttttgaagaaaggctacgacggttctaaagctgatatttggtcatgcggcgtcgttttgtttcttctcaacgcaggctacttgccgtttcgtgatccaaacatcatgggactctaccggaaaatccacaaggctcaatacaagttaccggattggacatcttcagatctgcggaaactcctccgccgtctcttggagccaaatccggaactgcgaatcaccgtggaggagattctaaaggatccgtggttcaatcatggagtagatccaagcgaaatcatcggaatccaagccgatgattacgatctggaagaaaacggtaaaattctaaacgcgttcgatttgatttcttcggcgtcgagctcgaatctctccggtttgtttggaaatttcgtgacgccggatcattgcgaccagtttgtatccgatgagagtacggccgttattatgaggaaggtcgaggaagttgcgaagcagttaaatttgagaatcgcgaagaagaaggagagagcgataaagcttgaaggtccacatggagtagctaatgtcgtcgttaaagttcgccggctaacaaatgaactagtgatggtggagatgaagaacaagcaaagagacgtgggcttggtttgggccgatgctcttagacaaaagttacgtcgtttgattaaccaaccggtttataaagttcctgacaaaccgtaa

SEQ ID NO: 2000 - protein, 431 aa, Arabidopsis thaliana
MAEDSNSSESIIVNVTGDDNKSALFGKYDLGKLLGSGAFAKVYQAEDLQNGGESVAIKVVQKKRLKDGLTAHVKREISVMRRLRHPHIVLLSEVLATKTKIYFVMELAKGGELFSRVTSNRFTESLSRKYFRQLISAVRYCHARGVFHRDLKPENLLLDENRDLKVSDFGLSAMKEQIHPDGMLHTLCGTPAYVAPELLLKKGYDGSKADIWSCGVVLFLLNAGYLPFRDPNIMGLYRKIHKAQYKLPDWTSSDLRKLLRRLLEPNPELRITVEEILKDPWFNHGVDPSEIIGIQADDYDLEENGKILNAFDLISSASSSNLSGLFGNFVTPDHCDQFVSDESTAVIMRKVEEVAKQLNLRIAKKKERAIKLEGPHGVANVVVKVRRLTNELVMVEMKNKQRDVGLVWADALRQKLRRLINQPVYKVPDKP

SEQ ID NO: 2001 - DNA, 1386 bp, Sorghum bicolor
  CDS (1)..(1386)
atggacgagaggaggactattttgatggaccgttatgaaatcgggaggcaattaggacaaggaaactttgctaaggtatattttgctcgaaacctgactgatgggcagtctgttgcaataaagatgattgataaggacaagatcacgagggttgggctaatagtgcagataaagagggagatctctataatgagactggtaaagcatccgaatgttctgcaactgtttgaggtaatggctagcaagagcaagatttactttgtattggagtatgctaaaggtggtgagctgttcaacaaaatatcaaagggaaagttcagtgaggatgttgcaaggaggtatttccaccaactgattagtgccgtggactactgccacagccgaggtgtttaccatcgcgacttgaagccggaaaacctacttcttgatgagaatgagaaccttaaagtctcggattttggtctaagtgccctagctgaatccaaaaggcacgatggcctcctacataccacctgtggaactcctgcctatgttgctcctgaagtgcttagtaggagaggctacgatggcacaaaggcggatatatggtcttgtggagtaattctttttgtgctagtggctggttacctacctttccatgacccaaatcttattgagatgtacaggaagatctccaaagctgaatacagatgtcctcgttccttttccggtgaattgaaggacctgctttttagaatgcttgatccagatccaagtactagaatatcaatttcaaggataaagagaagcacttggtacagaaaacctattgaggtaaattcagcaaagatcaagcatgacacaacaagagacaaggtgtgcaacggtgaagccacaacctctaactcaatagaatgcagtaattcagaggaaactcgagggtcatcgagcctccctaacctgaatgcatttgacatcatttctctttcaactggatttgacctatcaaatttgtttgaagaaaaatatggccggagggaagagaggttcaccactaggcagccagcaggaacagtatttgctaagctaaatgaactggctgagcggttaaagctcaaaattaagaagaaagaaaacggggtcttgaaactggcttcaccaaaggaaggaataaagggatttctcgagcttgatgcagagatttttgagcttgctccttctttccttctagtcgagttgaagaagaccaatggtgacaccatagagtatcaaaggctcgtgaaagaagaaataaggcctgcactgaaggatatggtctgggcatggcagagcgaccggcaccagcagcgcaacgagtctgtgcaaggagagcagcagctgtcatcacctttgccaccacagcagtag

SEQ ID NO: 2002 - protein, 461 aa, Sorghum bicolor
MDERRTILMDRYEIGRQLGQGNFAKVYFARNLTDGQSVAIKMIDKDKITRVGLIVQIKREISIMRLVKHPNVLQLFEVMASKSKIYFVLEYAKGGELFNKISKGKFSEDVARRYFHQLISAVDYCHSRGVYHRDLKPENLLLDENENLKVSDFGLSALAESKRHDGLLHTTCGTPAYVAPEVLSRRGYDGTKADIWSCGVILFVLVAGYLPFHDPNLIEMYRKISKAEYRCPRSFSGELKDLLFRMLDPDPSTRISISRIKRSTWYRKPIEVNSAKIKHDTTRDKVCNGEATTSNSIECSNSEETRGSSSLPNLNAFDIISLSTGFDLSNLFEEKYGRREERFTTRQPAGTVFAKLNELAERLKLKIKKKENGVLKLASPKEGIKGFLELDAEIFELAPSFLLVELKKTNGDTIEYQRLVKEEIRPALKDMVWAWQSDRHQQRNESVQGEQQLSSPLPPQQ

SEQ ID NO: 2003 - DNA, 1266 bp, Arabidopsis thaliana
  CDS (1)..(1266)
atggagaagaaaggatctgtgttgatgctccgttatgaggttgggaagtttctcggtcaaggtacctttgctaaggtataccatgctaggcatttgaaaactggtgatagtgtagcgattaaggtcatcgacaaagaaagaatcctcaaagttggcatgaccgagcagattaagcgagagatctctgccatgagactcttgaggcatcccaacatcgttgagctccatgaagtcatggccaccaaatctaaaatctacttcgtcatggaacatgttaagggtggtgagctcttcaacaaagtgtcaactgggaagctgagagaagacgttgcgagaaagtactttcagcagcttgtacgcgctgttgacttctgtcacagccgtggagtatgccacagggacctgaagccggagaatctcttgttggatgagcatgggaatcttaagatctctgattttggtctcagcgctctttctgactctagaaggcaagacgggttgctgcatactacatgcgggacccctgcatatgttgcaccggaggtgataagcaggaacgggtatgatgggtttaaagcggatgtgtggtcctgtggagtgatattgttcgtcttgctcgctggatatcttcctttccgtgattccaatctgatggagctgtataagaagataggcaaagctgaagtcaggttccccaactggcttgctccgggggcaaagagattgctcaagaggatcttggatcctaaccccaacacaagggtatcaactgagaaaataatgaagagctcttggttccgtaaaggcctacaagaggaggtgaaagaatcagttgaggaagagacagaagtggacgcagaggcagagggaaacgcaagtgcagagaaggaaaagaagcggtgtatcaacctgaacgcgtttgagatcatatctctgtccacggggtttgatctctcgggactgttcgagaagggagaggagaaggaggagatgaggtttacatcaaacagagaggcatctgagataacagagaagctggtggagattgggaaggaccttaagatgaaagtgaggaagaaggaacacgaatggagggtgaaaatgtcggctgaggctacagtggtggaagcggaagtgtttgagattgcgccgagctatcacatggtggtgctaaagaagagcggtggagatactgctgagtataagagagtcatgaaggagagtataagaccggctttgatcgactttgtattagcttggcactga

SEQ ID NO: 2004 - protein, 421 aa, Arabidopsis thaliana
MEKKGSVLMLRYEVGKFLGQGTFAKVYHARHLKTGDSVAIKVIDKERILKVGMTEQIKREISAMRLLRHPNIVELHEVMATKSKIYFVMEHVKGGELFNKVSTGKLREDVARKYFQQLVRAVDFCHSRGVCHRDLKPENLLLDEHGNLKISDFGLSALSDSRRQDGLLHTTCGTPAYVAPEVISRNGYDGFKADVWSCGVILFVLLAGYLPFRDSNLMELYKKIGKAEVRFPNWLAPGAKRLLKRILDPNPNTRVSTEKIMKSSWFRKGLQEEVKESVEEETEVDAEAEGNASAEKEKKRCINLNAFEIISLSTGFDLSGLFEKGEEKEEMRFTSNREASEITEKLVEIGKDLKMKVRKKEHEWRVKMSAEATVVEAEVFEIAPSYHMVVLKKSGGDTAEYKRVMKESIRPALIDFVLAWH

SEQ ID NO: 2005 - DNA, 1533 bp, Medicago truncatula
  CDS (1)..(1533)
atggcagttgtagctgctcccaagaagaacaactcaatgaacaagaaagataatccaaatcttctattgggacgttttgaattaggaaaacttcttggccatggaacctttgcaaaagtccaccttgccaagaacctcaaaacaggtgaatccgtagctataaagatcataagtaaagataaaatccttaaaagtggtttagtttcacatatcaaacgagaaatctccattctgcgccgtgttcgtcaccccaacattgttcaactctttgaagtcatggctacaaagacaaagatttactttgtgatggaatatgtacgaggtggtgagcttttcaacaaggttgctaaaggtaggttgaaagaagaagttgcaaggaaatattttcagcagttaatatgtgctgttggattttgtcatgctagaggtgtttttcatagagatctaaagcctgaaaatttgttgcttgatgaaaaaggtaaccttaaagtttcagattttggtcttagtgctgtgtcggatgaaattaagcaagatgggttgtttcatactttttgtggtacacctgcttatgttgctcctgaggttttgtctaggaaaggttatgatggtgctaaggttgatatttggtcttgtggggttgttttgtttgttttgatggctggttatttaccttttcatgatcctaataatgttatggctatgtataagaagatttataaaggtgaatttaggtgtcctagatggttttcaccagaacttgttagtcttcttactaggcttcttgatattaaacctcaaactaggatttctattcctgagattatggagaatcgttggtttaagataggttttaagcatattaaattttatgttgaggatgatgttgtttgtgatcttgattcacttgatcttgatggtgaggataataataataaggtagtaaaggtcgatgatcatcacgatgaagtactggaatcagtatcagaaaatgaatcggattctgaggttgtgaatagaaggatcaggaatcgtggttcattgccaaggcctgcaagtttgaatgcttttgatattatatcgttttcgcaaggttttgatctttctggtttatttgaggaaaagggtgatgaggcaaggtttgtgtctagtgcatcagtgccaaagataatatcaaaattggaggaagttggtcaaatggttaggttcaatgtgaggaagaaagattgcaaggttagcttggagggttcaagagaaggggcaaaagggcgattgactattgctgccgaggtcttcgaattgacaccttctttggtggtggttgaggtgaagaaaaaaggaggggataaggttgagtatgataaattcttaaacactgaattgaagcctgctttgcatagtttaaccaaggaggaatctgcaggttcttcaagtcaaactacaccagatgaatctttgcaacaacgtgcattttctgattctgccatcgacaaacattcagatagtattgaatctctgaacttagatacctga

SEQ ID NO: 2006 - protein, 510 aa, Medicago truncatula
MAVVAAPKKNNSMNKKDNPNLLLGRFELGKLLGHGTFAKVHLAKNLKTGESVAIKIISKDKILKSGLVSHIKREISILRRVRHPNIVQLFEVMATKTKIYFVMEYVRGGELFNKVAKGRLKEEVARKYFQQLICAVGFCHARGVFHRDLKPENLLLDEKGNLKVSDFGLSAVSDEIKQDGLFHTFCGTPAYVAPEVLSRKGYDGAKVDIWSCGVVLFVLMAGYLPFHDPNNVMAMYKKIYKGEFRCPRWFSPELVSLLTRLLDIKPQTRISIPEIMENRWFKIGFKHIKFYVEDDVVCDLDSLDLDGEDNNNKVVKVDDHHDEVLESVSENESDSEVVNRRIRNRGSLPRPASLNAFDIISFSQGFDLSGLFEEKGDEARFVSSASVPKIISKLEEVGQMVRFNVRKKDCKVSLEGSREGAKGRLTIAAEVFELTPSLVVVEVKKKGGDKVEYDKFLNTELKPALHSLTKEESAGSSSQTTPDESLQQRAFSDSAIDKHSDSIESLNLDT

SEQ ID NO: 2007 - DNA, 1398 bp, Medicago truncatula
  CDS (1)..(1398)
atggtgatcataaatcaagcaaggaggattgaaggaaaaatagtgcgattagggaaatacgaattgggaaaaacacttggtgaaggaaattttggaaaagtgaaattggctagggatactgattgtggacaattttttgctgttaagattcttgaaaagaataagattgttgatcttaataacactgatcagataaagagggagatatcaaccttgaagcttctgaaacatcctaatgttgttagattatacgaggtcttggctagcaaaaccaaaatttatatggtacttgagtatgtgaatggaggagagttatttgacaaaatttcatccaaaggtaaacttactgaagctcatggtaggaagatgttccaacaattgattgatggtgtgagttactgccacaataaaggtgtctttcacagggatcttaagctagagaatgttcttgtggatgccaaagggaacataaagataactgattttaacctcagtgctttgcctcaacattgtagggctgatgggttgctacatacaacctgtggaagtccaaactatgttgctcccgagattcttgccaacagaggctatgatggcgcgaaatcggatatttggtcatgcggtgttatcttatatgtaattctaacaggataccttccttttgatgacagaaatcttgcagttctctatcaaaagatttttaaagcagatgttcaaataccaagatggctgtcacctggtgctcaaaacattataaagaaaattcttgatcccaatccgaaaacccgagtaacgatggatatgatcaaagaagatgaatggtttaaagagggttataatcctgcaaatctagaggatgaggaagaggaagaggatgtattcattgacgatgaagctttttccatccatgaagtgtcccttgacggagaccagagtccaaaatcaccagcacttatcaacgcatttcagttgatagggatgtcttcatgcttagacctctctggattttttgagcaagaggatgtctcggagaggaagataagatttacgtcaaaccattcaccgaaagatttgactgagaagattgaggacattgtaatagaaatgggatttaaagttcataagaaaaatggaaaattgaaagtgatacaagaggataaagctcataaaagtctagatagcctctcagtcgcagcagaggtttttgaagttggtccatctttgtatgtagtagaactaaggaagtcttatggagatgcttctgtatatagacaattatgcaaaaggttatcaaacgacttgggtatagccgaggtggcagaggtaagctcagaaaggcacggcttgggtatagccgaggcggcagagctagtaagctcagaaagcctagacatatga

SEQ ID NO: 2008 - protein, 465 aa, Medicago truncatula
MVIINQARRIEGKIVRLGKYELGKTLGEGNFGKVKLARDTDCGQFFAVKILEKNKIVDLNNTDQIKREISTLKLLKHPNVVRLYEVLASKTKIYMVLEYVNGGELFDKISSKGKLTEAHGRKMFQQLIDGVSYCHNKGVFHRDLKLENVLVDAKGNIKITDFNLSALPQHCRADGLLHTTCGSPNYVAPEILANRGYDGAKSDIWSCGVILYVILTGYLPFDDRNLAVLYQKIFKADVQIPRWLSPGAQNIIKKILDPNPKTRVTMDMIKEDEWFKEGYNPANLEDEEEEEDVFIDDEAFSIHEVSLDGDQSPKSPALINAFQLIGMSSCLDLSGFFEQEDVSERKIRFTSNHSPKDLTEKIEDIVIEMGFKVHKKNGKLKVIQEDKAHKSLDSLSVAAEVFEVGPSLYVVELRKSYGDASVYRQLCKRLSNDLGIAEVAEVSSERHGLGIAEAAELVSSESLDI

SEQ ID NO: 2009 - DNA, 1308 bp, Medicago truncatula
  CDS (1)..(1308)
atgtgtgaaaaggaaaaccctaactctcactcggctctgctcgatggaaaatacgagcttggtcgagtactcggtcacggaacatttgctaaggtttaccacgccaagaatttgaatactggaaaaaacgtagccatgaaagtagttggtaaagaaaaagtgattaaagttggaatgattgaacagatcaaaagagaaatctctgtcatgaagatggtcaaacaccctaacatagttcaacttcacgaagtcatggcttccaaatcaaagatctatatcgccatggaactcgttcgcggtggagagcttttcaacaaaatcgtcaaaggtcgactcaaagaagacgttgctagagtctatttccagcagttgatctcagccgttgatttctgtcacagtcgcggtgtttaccaccgtgatctcaagccggagaatctcctcctcgacgaagacggtaatctcaaagtctctgattttggtctctgtactttctctgaacatttgagacaagatggattgttgcataccacatgtggtactccggcgtatgtttcgccggaggttatcgcgaagaagggttacgacggtgctaaggctgatatttggtcttgtggtgttattctttacgttcttctggctggatttttaccgtttcaggatgataatttggttgctatgtataagaagatttaccgcggtgatttcaaatgtccaccgtggttttctttggaagctaggaggttaattacaaagcttctagatccgaatccgaatacaagaatatccatatcgaagataatggattctagttggtttaagaaaccggttccaaagagtatagcgatgaggaagaaggagaaagaagaggaagaagataaggtgtttgaatttatggagtgtgagaaatcatcgacgacaatgaatgcttttcatataatttcactatcagaaggatttgatttgtctccgttgtttgaagagaagaagagagaagagagggaggagatgagatttgcaacgggtgggacgccgagtagagtgatatcgaaactggaacaagtggcgaaggcggtgaaatttgatgtgaagagtagtgatacgaaggtgagacttcaagggcaagaaagagggaggaaaggaaagttggctattgcagcggatatttacgcggtgacaccgtcgtttctggtggtggaggtgaagaaagataagggtgatactttggagtataatcagttctgtagcaaagagcttcgtcctgctttgaaagatattttctggacttctgctgaccctccagctgcttga

SEQ ID NO: 2010 - protein, 435 aa, Medicago truncatula
MCEKENPNSHSALLDGKYELGRVLGHGTFAKVYHAKNLNTGKNVAMKVVGKEKVIKVGMIEQIKREISVMKMVKHPNIVQLHEVMASKSKIYIAMELVRGGELFNKIVKGRLKEDVARVYFQQLISAVDFCHSRGVYHRDLKPENLLLDEDGNLKVSDFGLCTFSEHLRQDGLLHTTCGTPAYVSPEVIAKKGYDGAKADIWSCGVILYVLLAGFLPFQDDNLVAMYKKIYRGDFKCPPWFSLEARRLITKLLDPNPNTRISISKIMDSSWFKKPVPKSIAMRKKEKEEEEDKVFEFMECEKSSTTMNAFHIISLSEGFDLSPLFEEKKREEREEMRFATGGTPSRVISKLEQVAKAVKFDVKSSDTKVRLQGQERGRKGKLAIAADIYAVTPSFLVVEVKKDKGDTLEYNQFCSKELRPALKDIFWTSADPPAA

SEQ ID NO: 2011 - DNA, 1440 bp, Nicotiana tabacum
  CDS (1)..(1440)
atggccggtaccactaccgccggcgacaccagcaccagcagtagaagcaacctagcgccgacaaaaagtctgagcaaaaaggaaaatcaaggacttttatcgggtaggtacgaaattgggaaattacttgggcatggtacgtttgctaaggtgtaccacgctaggaatgtgaagacaaatgagagcgttgccataaaagttattgataaagaaaagatcttgaaagttggtcttattgatcacataaaacgcgagatctcaattttaaggagagttaggcacccaaacatagtccaattgtacgaagttatggccacaaaggccaaaatctactttgtcatggagtatgttaaaggcggtgagctttttaacaaagttgctaaaggcaggcttaaggaggaagttgctagaaaatatttccagcagttaatctctgctgtagccttttgtcatgctcgtggtgtttaccatagggacctaaagcctgaaaatatactgttagatgaagatgggaatgttaaagtttctgactttggccttagtgccatttcagagcagataaaacaagatggtttgtttcataccttttgtggtaccccggcttacgtggcgccggaggtgttagctagaaagggttatgatgcagccaaagttgatatttggccatgtggggtgatactctttgtgctaatggcagggtatttgccatttcatgatcagaatattatggctatgtataagaagatatacaagggtgaatttagatgtcctagatggttttcacccgaattgactaagtttttaaggcaacttcttgatactaatcctgaaactaggatcactattcaggaggttatgaacaataggtggtttaagaagggttttaaacatgtcaagttttatattgaggatgacaagttgcgtagtgttaatgatgatgattatgatggcggggttgattattcgtctgatagatcggagtctgaatctgaaatggagatgagaaggaagcctgctactttgcctaggccagctagcttgaatgcatttgatatcatatcgttttctcgtggttttgatttatctggtttgtttgaagaaggaggagatggggcaaggtttgtatccggggctcctgtgcccaagatcattagtaagttggaggaaattgctaaagttgtgagctttgcggtgaggaagaaggattgtagagtgagtttagaggggtctaaagagggtgaaaagggaccattgacaattgcagctgagatattcgagttgacaccatctttgagagttgttgaggtgaaaaaaaaagcgggagacagagtggagtacgaggagttttaccataaggaattgaagcctgggttacaaaatctgacgcttgaagttgatggacctgtcgattcatcgcatttgccttcagatactgagtag

SEQ ID NO: 2012 - protein, 479 aa, Nicotiana tabacum
MAGTTTAGDTSTSSRSNLAPTKSLSKKENQGLLSGRYEIGKLLGHGTFAKVYHARNVKTNESVAIKVIDKEKILKVGLIDHIKREISILRRVRHPNIVQLYEVMATKAKIYFVMEYVKGGELFNKVAKGRLKEEVARKYFQQLISAVAFCHARGVYHRDLKPENILLDEDGNVKVSDFGLSAISEQIKQDGLFHTFCGTPAYVAPEVLARKGYDAAKVDIWPCGVILFVLMAGYLPFHDQNIMAMYKKIYKGEFRCPRWFSPELTKFLRQLLDTNPETRITIQEVMNNRWFKKGFKHVKFYIEDDKLRSVNDDDYDGGVDYSSDRSESESEMEMRRKPATLPRPASLNAFDIISFSRGFDLSGLFEEGGDGARFVSGAPVPKIISKLEEIAKVVSFAVRKKDCRVSLEGSKEGEKGPLTIAAEIFELTPSLRVVEVKKKAGDRVEYEEFYHKELKPGLQNLTLEVDGPVDSSHLPSDTE

SEQ ID NO: 2013 - DNA, 1377 bp, Trifolium pratense
  CDS (1)..(1377)
atggatcaacaaaacaaacaaagtttccaaaaccccaaacacataattttcgacaaatacgaaatgggaaaagtcttgggtcaaggaaactttgcaaaggtttaccattgtagaagcctttcaacaaacgagagtgtagccaccaaggtgataaagaaagagaagctaagaaaagagaggttagtgaagcaaatcaagcgtgaagtttcggttatgcgtctcgttcgccatcctcatatagttgacctcaaagaagttatggcaacaaagggaaaaatatttctagtaatggaatatgtaaaaggaggtgaactttttgccaaagttgcaaaaggaaaattgaaagaagatgttgctagaaaatactttcaacagctcatcagcgccgttgatttttgtcatagtcgcggtgtcacacaccgtgatttgaaaccagagaatctcctcttagacgaaaacgaagacctaaaggtctccgattttggactctcagcattgccagagcaacatcgagaggatgggatgcttttaactccatgtgggacccctgcttatgtggcacccgaggttttgaagaagaaagggtatgatggttctaaggctgatctatggtcttgtggtgttatcctctatgccttggtttgtggatatcttccttttcaaggtgagaatgttatgaggatttataaaaaggcttttaaaggtgaatatgaatttcctgaatggatttctccgcaagctaaaatattaatttcgaatcttcttgtcgcggatcctaaaaaaaggtattcaattgttgatattatgaatgatccttggtttcgaattgggtttgttagacccattgcgttttctatgaatggttcgagtattgaagataacgacaaagacatcaatattgatttcaatgaggttggtgaagataatgttgatgttcctgaattgataatggtgaagccatctcgtcctttttataatgcatttgagataatttcgtcgttgtcacatggttttgatcttaggaatttgtttgagacgaggaaaaagttgccatcaatgtttatatcaaaattttcggcttcaacagtcttggagaaacttgaggtgatggcgaagaagttgaactttaggatgacagggaagaaggagttcgtggtgagatttgaggggacaaaagatgggagaaaggggaaggtggcggtgacgatggaggtgtttggggtggcaccggacgtggcggtggttgagttttctaagtgtggtggagacacattggagtatgttaagttgtgtgatgaacaattaagaccttcactcaaagatattgtttggagctggcaaggtgatgacaatcataacgataacaactctcaatag

SEQ ID NO: 2014 - protein, 458 aa, Trifolium pratense
MDQQNKQSFQNPKHIIFDKYEMGKVLGQGNFAKVYHCRSLSTNESVATKVIKKEKLRKERLVKQIKREVSVMRLVRHPHIVDLKEVMATKGKIFLVMEYVKGGELFAKVAKGKLKEDVARKYFQQLISAVDFCHSRGVTHRDLKPENLLLDENEDLKVSDFGLSALPEQHREDGMLLTPCGTPAYVAPEVLKKKGYDGSKADLWSCGVILYALVCGYLPFQGENVMRIYKKAFKGEYEFPEWISPQAKILISNLLVADPKKRYSIVDIMNDPWFRIGFVRPIAFSMNGSSIEDNDKDINIDFNEVGEDNVDVPELIMVKPSRPFYNAFEIISSLSHGFDLRNLFETRKKLPSMFISKFSASTVLEKLEVMAKKLNFRMTGKKEFVVRFEGTKDGRKGKVAVTMEVFGVAPDVAVVEFSKCGGDTLEYVKLCDEQLRPSLKDIVWSWQGDDNHNDNNSQ

SEQ ID NO: 2015 - DNA, 1581 bp, Triticum aestivum
  CDS (1)..(1581)
atgtcggccatcaagccgccgccgcctgaccggccgccgcaggccgcgcggctgccgtccccttcctcctcctcctcggcggcggcggcggccaagcaaggcggcacaggctcccgcgggctgctcatggggcgctacgagctgggccgcgtcctgggcaaaggcaccttcgccaaggtgtaccacgcgcggcacgtgcagaccggggagagcgtggccatcaaggtgctcgaccgggagaaggccgtgcggagcggcctcgtctcgcacatcaagcgcgagatcgccgtgctccgccgcgtgcgccaccccaacatcgtgcacctcttcgaggtcatggccaccaagaccaagatctacttcgtcatggagctcctcgtccgcggcggcgagctcttctcccgcgtctccaagggccgcctcaaggaggacattgctcgccgctacttccagcacctcatctccgccgtcggattctgccacacccgcggggtcttccaccgggacctcaagccggagaacctcctcgtcgacgaggcgggcaacctcaaggtttccgacttcggcctctccgccgtcgccgagccgttccagccagagggtctcctccacaccttctgcggcacgccggcctatgtcgcccccgaagttctcgcccgccgtggatacgaaggcgccaaggccgacatatggtcctgcggcgtcatcctctttgttctcatggccggatacctccctttccatgaccagaacctcatggccatgtaccgtaaggtttacaagggagagttccgatgtccaaggtggttctccaaggaccttactagcctgatcatgcgttttcttgacacaaacccaagcaccaggatcaccttgccggaggtcatggagagccggtggttcaagaaaggtttccggccagtcaagttctatattgaagacgaccagctgtacaacgtgatagatgccgagaatgatatgctcgacctgggcctcccagaccctcttcctcaaccattgccgcctccacctccatctccatctccacaacaagttgatggagacgactcagggtcagagtcggacgcatcagtcgtgtcctgccctgccacatcgtcatttgaagagcgccacaggctccgcgggccactcccacgccccgcaagccttaatgcgttcgacatcatatcattctcaaggggattcaacttgtcggggctgtttgaggaaaaaggggacgaggtgagattcatctcgggtgaacctatgccagacattataacgaaattggaggagatcgcaaatgtgaagagcttcgcggtgcggaagaaggattggcgggtgagcctagagggcacaagggaaggggttaaggggccactaacaatctgcgcggagatatttgaactcacgccctcccttgtagtagtggaggtaaaaaagaaggcgggggataaggaagagtatgatgatttctgtaacaaggaactgaagccaggaatgcagcatcttgtgcaccagatggtcccagttccaaatacacctaccatttctgagttggccgaaaggccttcaaggtaa

SEQ ID NO: 2016 - protein, 526 aa, Triticum aestivum
MSAIKPPPPDRPPQAARLPSPSSSSSAAAAAKQGGTGSRGLLMGRYELGRVLGKGTFAKVYHARHVQTGESVAIKVLDREKAVRSGLVSHIKREIAVLRRVRHPNIVHLFEVMATKTKIYFVMELLVRGGELFSRVSKGRLKEDIARRYFQHLISAVGFCHTRGVFHRDLKPENLLVDEAGNLKVSDFGLSAVAEPFQPEGLLHTFCGTPAYVAPEVLARRGYEGAKADIWSCGVILFVLMAGYLPFHDQNLMAMYRKVYKGEFRCPRWFSKDLTSLIMRFLDTNPSTRITLPEVMESRWFKKGFRPVKFYIEDDQLYNVIDAENDMLDLGLPDPLPQPLPPPPPSPSPQQVDGDDSGSESDASVVSCPATSSFEERHRLRGPLPRPASLNAFDIISFSRGFNLSGLFEEKGDEVRFISGEPMPDIITKLEEIANVKSFAVRKKDWRVSLEGTREGVKGPLTICAEIFELTPSLVVVEVKKKAGDKEEYDDFCNKELKPGMQHLVHQMVPVPNTPTISELAERPSR

SEQ ID NO: 2017 - DNA, 1341 bp, Solanum lycopersicum
  CDS (1)..(1341)
atgaagaaagtgaagagaaagcttgggaagtatgaagttggcagaactattggtgaagggacatttgccaaggttaagtttgcacgaaacaccgagactggagagaatgttgccattaaagtcttggccaaaagtaccattcttaagcatagaatggttgaacagatcaaaagagagatatctataatgaagattgtcagacatccttgcatagttcgacttcatgaggttttagctagccagacaaaaatatatatcgttcaggagtttgtcactggaggagagctttttgataaaattgttcatctaggtaggctttctgaggatgaagcaaggagatacttccaagaactcatagatgcaattgctcactgtcacagcaagggtgtttaccacagagatttgaagcctgaaaatttgcttcttgatttccaagggaacttaaaaatttctgactttgggcttagtgcattgcctcaacaaggagtcgagctcctctataccacttgtgggactccaaattatgttgcacctgaggtgttaggtaaccgaggttatgatggtgctgctgcggatgtgtggtcatgtggtatcatcctttatgttctgatggcaggatatcttccatttgatgagacagaccttcctaccttgtatacaaagatcaaggctgctgaattttcctgtccattttggttttctcctggtgcaacatcgttgattcaaaaaatcattgatccaaatcctcaaactaggatcaagattgatggaataaaacgagacccttggttccggaaaaactacagagctgttaaagctaaagcagatgaagtagtgaatcttgatgatatccatgctgtgttcgacgacattgaggatgcatttgtcagtgaaaaatcagaagatagtgagagtggtcccttggtaatgaatgcatttgagatgataacactatctcagggattaaatctatccgctttgtttgacagacgtcaggattatgtcaagcgtcaaactcgatttatttcccgccaacctgctaaagtcgtcattgaaactattgaagcagctgcagagtcgttgggtcttaaggtccacacacgcgattacaagacaagaattgagggggtaacggcaaatagggctggtcaatttgctgttgtgctggaggttttccaagtagccccttccctttttatggttgatgttagaaaggctgctggggacactcttgaatatcacaagttctacaaaaccttctgcacgaaaattgacgacgtcatttggaaaccgaaggaaggcatgtcaaatgctgttctgcttaggacaaggactcgctga

SEQ ID NO: 2018 - protein, 446 aa, Solanum lycopersicum
MKKVKRKLGKYEVGRTIGEGTFAKVKFARNTETGENVAIKVLAKSTILKHRMVEQIKREISIMKIVRHPCIVRLHEVLASQTKIYIVQEFVTGGELFDKIVHLGRLSEDEARRYFQELIDAIAHCHSKGVYHRDLKPENLLLDFQGNLKISDFGLSALPQQGVELLYTTCGTPNYVAPEVLGNRGYDGAAADVWSCGIILYVLMAGYLPFDETDLPTLYTKIKAAEFSCPFWFSPGATSLIQKIIDPNPQTRIKIDGIKRDPWFRKNYRAVKAKADEVVNLDDIHAVFDDIEDAFVSEKSEDSESGPLVMNAFEMITLSQGLNLSALFDRRQDYVKRQTRFISRQPAKVVIETIEAAAESLGLKVHTRDYKTRIEGVTANRAGQFAVVLEVFQVAPSLFMVDVRKAAGDTLEYHKFYKTFCTKIDDVIWKPKEGMSNAVLLRTRTR

SEQ ID NO: 2019 - DNA, 1341 bp, Lotus japonicus
  CDS (1)..(1341)
atgaagaaggtgaggagaaggatcgggaaatatgaagtgggtagaacaatcggtgaaggtacattcgccaaggttaaattcgctaaaaattctgagactggggaaagtgttgctattaaaatcatggataaaaccaccattctcaagcacagaatggttgaacagattaaaagagagatatccattatgaagattgtcagacatcctaatatagtaaggctgcatgaggttttgtccagccagaccaagatctacataatcctcgagtttgtaatgggaggagaattgtatgatagaattgttcagcggggaaagctttctgaagatgaatctaggcgctactttcaacaacttatagatgctgttgctcattgtcataaaaagggtgtgtaccatagagacttgaagcctgaaaaccttctccttgatgcttttggaaatttgaaggtttctgactttggattgagtgcattgactaagcagggtgttgacctgcttcacaccacatgtggaaccccaagttatgttgctcctgaggtgctcagtaatcaaggttatgatggtgcagctgctgatgtttggtcatgtggagtcatcctatatgttctaaaggccggatatcttccttttgaggaggcagacctttcaacattgtaccgaaggaccagtgctgctgaatttgtttgtccatcctggttttccactggcactacgacattgatacataaaattctggatcctaatcctaaaacacgggtgaaaataggagaaataaggaaagatccttggtttcaaagaaactatttgcccctcaagctcaatgaagatgaacaagtgaatttggatgatgttcaggctgtgtttgatgatattgaggaccaatatgttcctgtacagtcagaaatcaccgagggaggtcctttggtaatgaatgcatttgagatgattaccttatcacaagggttgaatctttcaccattatttgacaggcatcaggattatgtaaagcggcaaactcgtttcgtttcccgcaaaccagcaaaagttataatctcatctattaaagttgttgcagagtcaatgggtctaaaactccagagtcgcaattacaagatgaggattgaaggactttctgcgaataaggctggacaatttgcagtggtcttggaggtgtatgaagtcgcaccgtgcctttacatggtagatgttagaaaggcagctggggatactcttgactatcacaagttttacaagaatctttgtgccaaactagaaaatatcatttggaggccgacagagactatgccagattctgggttgcttcgacaaatgaccttgtga

SEQ ID NO: 2020 - protein, 446 aa, Lotus japonicus
MKKVRRRIGKYEVGRTIGEGTFAKVKFAKNSETGESVAIKIMDKTTILKHRMVEQIKREISIMKIVRHPNIVRLHEVLSSQTKIYIILEFVMGGELYDRIVQRGKLSEDESRRYFQQLIDAVAHCHKKGVYHRDLKPENLLLDAFGNLKVSDFGLSALTKQGVDLLHTTCGTPSYVAPEVLSNQGYDGAAADVWSCGVILYVLKAGYLPFEEADLSTLYRRTSAAEFVCPSWFSTGTTTLIHKILDPNPKTRVKIGEIRKDPWFQRNYLPLKLNEDEQVNLDDVQAVFDDIEDQYVPVQSEITEGGPLVMNAFEMITLSQGLNLSPLFDRHQDYVKRQTRFVSRKPAKVIISSIKVVAESMGLKLQSRNYKMRIEGLSANKAGQFAVVLEVYEVAPCLYMVDVRKAAGDTLDYHKFYKNLCAKLENIIWRPTETMPDSGLLRQMTL

SEQ ID NO: 2021 - DNA, 1347 bp, Lotus japonicus
  CDS (1)..(1347)
atggtgctgaggaaagtgggcaagtacgaaattgggagaaccattggggaaggaaccttcgcgaaggtgaagttcgctcagaacactgaaactggcgagagtgtcgccatgaaggtgcttgatcgcaacaccatcatcaagcacaacatggtcgaccagatcaaaagggagatttccattatgaagctagttagacatccttatgttgttcgtctctatgaggttcttgcgagccgaacgaaaatttatatcatattggagttcattactggtggtgaattgtttgataaaattatacgtcatgggcgtcttagtgaagctgagtctagaagatatttccagcagttgattgatggtgtagattattgccacagtaagggagtttatcatagagatttgaagccggaaaatcttttacttgattcacttggaaatataaagatttccgattttggattgagcgcattacctgaacagggagtgagtatccttcggacaacttgtgggactccaaactatgtagctcctgaggtactcagtcacaagggttacaatggtgctgttgcagatgtttggtcctgtggggttatcctctatgtcctattggttggatatcttccctttgatgagctcgatctaacctccttatacagtaagattgagaaagcagagtattcatgccctcctgggtttcccgtgggtgcaaaaacattgatacataaaattttggacccaaatcctgaaactcgtataaccattgaacaaatacgaaatgatgaatggtttcagagaggctatgttcctgtcagtcttctcgagtatgaggatgtaaatctggatgatgtaaatgctgtttttgatgatgccgaggaacagagggctaatcaacagtgtgatcatgaggacatgggtcctttaatgctaaatgcatttgacttgataattctatctcaaggcttaaaccttgcagcaatctttgaccgtggacaggactctatgaagtaccaaacccgctttatcactcaaaagccagcaaaggtggttttgtctagtatggaagttgtggcacaatcaatgggatttaagacgcatattcgcaactacaagatgagggtagagggtctttcagcgaaaaaaacttctcatttctcggttatgcttgaaatttttgaagtggctcccacattttacatggtggacattcagaaagcagctggagatgcaggtgaatacctcaagttttacaagaacttttgtggcaatctggaggatataatctggaaaccgcctcatgaatcaaccaaatcaaaggtctccaagactagaagcaaaaggcgctcaagatag

SEQ ID NO: 2022 - protein, 448 aa, Lotus japonicus
MVLRKVGKYEIGRTIGEGTFAKVKFAQNTETGESVAMKVLDRNTIIKHNMVDQIKREISIMKLVRHPYVVRLYEVLASRTKIYIILEFITGGELFDKIIRHGRLSEAESRRYFQQLIDGVDYCHSKGVYHRDLKPENLLLDSLGNIKISDFGLSALPEQGVSILRTTCGTPNYVAPEVLSHKGYNGAVADVWSCGVILYVLLVGYLPFDELDLTSLYSKIEKAEYSCPPGFPVGAKTLIHKILDPNPETRITIEQIRNDEWFQRGYVPVSLLEYEDVNLDDVNAVFDDAEEQRANQQCDHEDMGPLMLNAFDLIILSQGLNLAAIFDRGQDSMKYQTRFITQKPAKVVLSSMEVVAQSMGFKTHIRNYKMRVEGLSAKKTSHFSVMLEIFEVAPTFYMVDIQKAAGDAGEYLKFYKNFCGNLEDIIWKPPHESTKSKVSKTRSKRRSR

SEQ ID NO: 2023 - DNA, 1326 bp, Lotus japonicus
  CDS (1)..(1326)
atgaatcagcctaagattaagcgccgtgtgggtaaatatgaggttgggaggaccattggtgagggaacatttgcaaaggtgaaatttgcaaggaactctgagacaggggaagctgtggctctcaaaattcttgacaaagagaaggtcctcaagcacaagatggctgaacagattaagcgggaagtagctacaatgaagttaatcaagcatccaaatgtggttcagctgtatgaggtcttgggaagcaagacgaaaatatatatggttttggagtttgtgactgggggagagctcttcgacaaaattgtaaaccatggacggatgtgtgaagatgaagcacgtagatatttccagcaactgataaatacagttgattattgccatagcaggggtgtctaccacagagatcttaagccagaaaatttgctattagatgcttgcgggaatcttaaagtttctgattttgggttgagtgcactctcccagcaaattaaggatgatggactactacatactacatgtggaactccaaattatgttgctccagaggtccttaatgataaaggctatgatggagcaactgcagatttgtggtcatgtggggtgattctctttgtattggttgcgggttacttgccttttgatgaccctaatcttatggaattgtataaaaaaatctcagcagcagaatttacttgccccccatggctttctttcagtgcccggaaattgataactcgaatcttggatcccaatcccatgactcgtatcactatagctgagattctggaagatgaatggtttaagaaagattataagcctccaattttccaggagaatggggaaaccaacctcgacgatgtagaagccgtctttaaagattctgaagagcaccatgtgacagagaagaaagaagagcagccaacagcaatgaatgcattcgagttaatttccatgtccaaagggctcaaccttgaaaacttgtttgatgttgagcagggatttaaaagggaaacaagattcacatcaaagtcccctgccaatgagataatcagcaagattgaagaagctgcaaaacctcttggctttgatgtgcagaagaaaaattacaagatgaggcttgcaaatgtgaaagctggaaggaagggaaaccttaatgttgccacagaggtgtttcaagtggcaccttctcttcacatggttgaggtgcggaaagctaaaggcgatacattggagttccataagttctacaaaaaactctcgacatgcctggaagatgttgtttggaaaacagaagatgacatgcaaaagcaagaagcaaaatga

SEQ ID NO: 2024 - protein, 441 aa, Lotus japonicus
MNQPKIKRRVGKYEVGRTIGEGTFAKVKFARNSETGEAVALKILDKEKVLKHKMAEQIKREVATMKLIKHPNVVQLYEVLGSKTKIYMVLEFVTGGELFDKIVNHGRMCEDEARRYFQQLINTVDYCHSRGVYHRDLKPENLLLDACGNLKVSDFGLSALSQQIKDDGLLHTTCGTPNYVAPEVLNDKGYDGATADLWSCGVILFVLVAGYLPFDDPNLMELYKKISAAEFTCPPWLSFSARKLITRILDPNPMTRITIAEILEDEWFKKDYKPPIFQENGETNLDDVEAVFKDSEEHHVTEKKEEQPTAMNAFELISMSKGLNLENLFDVEQGFKRETRFTSKSPANEIISKIEEAAKPLGFDVQKKNYKMRLANVKAGRKGNLNVATEVFQVAPSLHMVEVRKAKGDTLEFHKFYKKLSTCLEDVVWKTEDDMQKQEAK

SEQ ID NO: 2025 - DNA, 1506 bp, Oryza sativa subsp
  CDS (1)..(1506)
atggatgggaggtcaatcttgatgggccgttatgaggttgggaagcaattaggacaaggaacatttgcaaaggtgtattatgcacgaaatcttactaccggccaagctgttgccataaagatgatcaacaaggataaggtcatgaaagttgggctaatggagcaaataaagagggagatttcaattatgagattggtgaaacatccaaatgttcttcagttatttgaggttatggctagcaagagcaagatttattttgttctggagtatgctaaaggtggtgagcttttcaacaaaattgctaaggagggaaagctcagtgaggattctgcgaggagatatttccaccaattgatcaatgcagttgactattgccatagtcgaggtgtttatcatcgtgacttaaagcctgaaaatctgctcctggatgagaatgaaaaccttaaagtctcagattttggtttaagtgccctggctgagtccaagaggcaagatggtctcctgcatactacatgtggaactccagcttatgttgctcctgaagttcttagcaggaaaggctatgatggtgcaaaggcagatgtatggtcttgtggagtaattttgtttgtgcttgtggctggttaccttcctttccatgatccaaatttgatagagatgtacagaaagatttgcagagcagacttcagatgccctcgttacttttctgctgagctgaaggatcttatacataaaatccttgattcagatccaagtactaggatttctatcccaaggataaagagaagtacttggtacagaaaaccagttgaaataaatgctaaaaacagtgaggcagccacaacaaacagcatctcttcaggtgtagctacaacctcaggttctgcagagtgcagcacttctgaggaaaatcaagggtccttaagcctcccaaacctgaatgcatttgacataatttctctctcaacagggtttaatctatctgggttttttgaggatacgcatggtcaccaggaagaacggtttaccactaggcagcctgtgacaacagtacttggaaagctgaaggaattggccaaacgcctgaaactaaaagttaagaagaaggataatggagttttgagattggcagcaccaaaggaaggaaagaagggctttcttgaacttgatgcagagatttttgaggtcaccccttcattcctcttagttgagttgaaaaagaccaacggggatactatggagtatcgaaagctggtcaaagaagatataaggccagcactcaaggatattgtttgggtgtggcaaggtgatgagcacctgaactcacaatctatcctgcaaggagagcagcagcagtccccattgccaccagagctaccacaggatcagttgcaaccatcattgccacaacaggagaagcaggacatgcctgaaccaccgttgttgccacaagtaccacaagaagaagtgcaaacatctatccccgcagaacaaacaaagaattag

SEQ ID NO: 2026 - protein, 501 aa, Oryza sativa subsp
MDGRSILMGRYEVGKQLGQGTFAKVYYARNLTTGQAVAIKMINKDKVMKVGLMEQIKREISIMRLVKHPNVLQLFEVMASKSKIYFVLEYAKGGELFNKIAKEGKLSEDSARRYFHQLINAVDYCHSRGVYHRDLKPENLLLDENENLKVSDFGLSALAESKRQDGLLHTTCGTPAYVAPEVLSRKGYDGAKADVWSCGVILFVLVAGYLPFHDPNLIEMYRKICRADFRCPRYFSAELKDLIHKILDSDPSTRISIPRIKRSTWYRKPVEINAKNSEAATTNSISSGVATTSGSAECSTSEENQGSLSLPNLNAFDIISLSTGFNLSGFFEDTHGHQEERFTTRQPVTTVLGKLKELAKRLKLKVKKKDNGVLRLAAPKEGKKGFLELDAEIFEVTPSFLLVELKKTNGDTMEYRKLVKEDIRPALKDIVWVWQGDEHLNSQSILQGEQQQSPLPPELPQDQLQPSLPQQEKQDMPEPPLLPQVPQEEVQTSIPAEQTKN

SEQ ID NO: 2027 - DNA, 1437 bp, Gossypium hirsutum
  CDS (1)..(1437)
atggattccacctccaagtccaacgccgcaacctcatcaaagaaagacgccaacaatggccaaactcttctcttaggacgctacgaggtcggcaagctcctcggccatggcactttcgctaaagtctaccacgctcgtaacgtcaaatccggtgataacgtagccatcaaagtgatcgacaaggaaaagattctcaagagtggtttaatcgctcacatcaagcgcgaaatctctattctccgccgcgttcgccacccgaacattgtgcaattattcgaagtcatggctactaagtccaagatctacttcgttatggaatacgttcgtggtggtgaactgttcaataaagtggctaaagggcgattaaaagaagatgttgctaggaagtatttccagcaattaatctcggccgttcatttttgccacgcgcgtggcgtttaccaccgtgacctgaaacctgaaaatctacttctcgatgaaaatggggatttgaaagtctctgatttcgggttgagtgctgtatcggatcagatccggcaagacggtttgtttcacacgttttgtggaaccccggcttttgttgcgccggaagttttggcgaggaaaggatacgatgcggcgaaagtagatatctggtcttgtggagtgattttatttgttctaatggcagggtatttaccatttcaagatcagaacattatggctatgtacaagaagatttacaagggtgagtttaggtgtccgagatggttttcacccgagttaattcggttactcaccaaactcctagacaccaacccggaaacaagaattacgattccagaaatcatggagaaacgttggttcaaaaaggggtttaaacatattaagttctacatcgaagatgataagttatgcagtgtcgaagacgatgataatgatgttgggtcatgttcagaccaatcatcaatgtctgagtcagaaacagagttggaaacgaggaaacgagttggcacattgccaaggccagctagtttaaacgcgttcgaccttatttctttctccccagggttcaacctatccgggttgttcgaggaaggagaagaaggctcccggttcgtttcaggggcaccggtttcgacaatcatatcgaaattggaggagatagccaaggttgttagctttacagtgaggaaaaaggattgtagagtgagcttggagggttctagagaaggagctaaaggtccattatcgattgctgctgagatattcgaattaaccccttcattagtcgttgtggaagtgaagaagaaaggaggggaacgaggagagtatgaggatttttgtaacagggaattgaaacccgggttaaaggaattaatggttgaggaatcacaatcttctgcagcagcttcacttgctacttcatcatcatatttaccttcggatactgaatag

SEQ ID NO: 2028 - protein, 478 aa, Gossypium hirsutum
MDSTSKSNAATSSKKDANNGQTLLLGRYEVGKLLGHGTFAKVYHARNVKSGDNVAIKVIDKEKILKSGLIAHIKREISILRRVRHPNIVQLFEVMATKSKIYFVMEYVRGGELFNKVAKGRLKEDVARKYFQQLISAVHFCHARGVYHRDLKPENLLLDENGDLKVSDFGLSAVSDQIRQDGLFHTFCGTPAFVAPEVLARKGYDAAKVDIWSCGVILFVLMAGYLPFQDQNIMAMYKKIYKGEFRCPRWFSPELIRLLTKLLDTNPETRITIPEIMEKRWFKKGFKHIKFYIEDDKLCSVEDDDNDVGSCSDQSSMSESETELETRKRVGTLPRPASLNAFDLISFSPGFNLSGLFEEGEEGSRFVSGAPVSTIISKLEEIAKVVSFTVRKKDCRVSLEGSREGAKGPLSIAAEIFELTPSLVVVEVKKKGGERGEYEDFCNRELKPGLKELMVEESQSSAAASLATSSSYLPSDTE

SEQ ID NO: 2029 - DNA, 1242 bp, Nicotiana tabacum
  CDS (1)..(1242)
atgccggaaaagccattattcgggaaatatgagctcggaaaattactcggctgtggcgcatccgccaaagtttaccatgcccgagaaatcaacaatggccaaagcgtcgcgatcaaaatgatcaacaaaaacaacaaagacaatattccaaacgaaaacattgagcgcgagatttccatcttgcgccagctgcgccacccttacattgtcaaactctatgaagtgctcgccacgaaatcaaaaatctatttcgtcatggaatacgttaaaggaggcgaattattcaccaaaattgccgatcacggccgattcagcgaggatcttagccggaaatactttcagcaactaatttccgcgctcaattactgtcattcacgtggaatctaccaccgcgatttgaaacctgaaaacatattaattgatgaaaatggggatctcaaaatttccgatttcggtctaagtgccacaactgaccaaatacaaaaattcgacgggctgttacataccgtttgcggatctccagcttacgtggcaccggagattctaacaattaaaggatacgacggagctaaaactgatatatggtcatgtggaattattctgtacgtgatgatcgccggttatttgccgttttacgatcagaatttaatgctaatgtacaaaaaaatctacaaaggtgaattcaagtgcccgaaatggatgtctcctgatgttatacggatattatctcgtcttctggatacaaatccggcgacgagaataacgattgatgaaattatcaaggatccgtggttcagaaagggattgaaatttattaaatttgcaggggaagaagaagataaatattcattatcaagtaattgtttgaatgcgttcgatttaatttcgttttctcaaggattagacatttcgggattgttcaaatcgaataatccggcgaatgatttggagaggacggtggtggaacagtcgccggagagtgtaattgagagagttgaggaaatggcgaagaaggagaatttcagattaaggaaaaagaaagaatggggaattgagatgaaagtgcaaaatggtaaattaacaatgagcgtcgatatttacagattgacagaacgatttgtaattgtggaggtaaaaagagaagctggaaatggtgatttgtatacagatctatggcggaataaattgaaggcggtaattctgggccagcaaatagcagagattcaggattccggtagctag

SEQ ID NO: 2030 - protein, 413 aa, Nicotiana tabacum
MPEKPLFGKYELGKLLGCGASAKVYHAREINNGQSVAIKMINKNNKDNIPNENIEREISILRQLRHPYIVKLYEVLATKSKIYFVMEYVKGGELFTKIADHGRFSEDLSRKYFQQLISALNYCHSRGIYHRDLKPENILIDENGDLKISDFGLSATTDQIQKFDGLLHTVCGSPAYVAPEILTIKGYDGAKTDIWSCGIILYVMIAGYLPFYDQNLMLMYKKIYKGEFKCPKWMSPDVIRILSRLLDTNPATRITIDEIIKDPWFRKGLKFIKFAGEEEDKYSLSSNCLNAFDLISFSQGLDISGLFKSNNPANDLERTVVEQSPESVIERVEEMAKKENFRLRKKKEWGIEMKVQNGKLTMSVDIYRLTERFVIVEVKREAGNGDLYTDLWRNKLKAVILGQQIAEIQDSGS

SEQ ID NO: 2031 - DNA, 1359 bp, Arabidopsis thaliana
  CDS (1)..(1359)
atgaatcggccaaaggttcagcgtcgtgttggaaagtatgaggttggaaagacgcttggacaaggcacttttgcgaaagttcggtgtgctgttaatactgagacaggagaacgcgtggctctcaaaatacttgataaggagaaggttcttaagcataagatggctgaacagataaggagagaaatttgtactatgaagctgataaaccatccaaatgtagtgcggctgtatgaggttttggcgagcaagactaagatatatattgttctagagttcggcactggtggagagctttttgacaaaattgtacatgatgggcgcttgaaagaagagaatgcacggaaatattttcagcagcttattaatgcagttgattactgccatagcaggggagtgtaccaccgggacttaaagccggaaaacttgcttctagatgctcaaggaaatctgaaagtctctgattttggattgagtgcgttgtcccgacaagtcaggggtgatggtcttcttcacactgcatgcggaactccaaactatgctgctcctgaggttcttaatgatcaaggttatgacggggcaaccgcagacttgtggtcctgtggagtgatactctttgtactacttgctggctacttgcctttcgaggattctaatctcatgacgctgtataaaaagataatagctggtgaatatcattgtcctccttggctctctcctggtgctaagaacttgattgtccgaatcttggatccaaaccctatgactcgtatcacaattccagaggttctgggagatgcgtggttcaagaaaaattacaagccagctgttttcgaggagaaggaagaagccaacttggatgatgtggacgctgttttcaaagattcagaagagcatcatgtcacagaaaagaaagaggagcaaccaacttcaatgaatgcctttgagttgatatcaatgtcgagagctctggatctcgggaatttgtttgaagaagaagagtctataccgtttaacttgcagggattcaagcgagaaacgagatttgctgctaaaggtgctgctaatgatttagtccaaaagattgaagaagcttctaagccgcttggtttcgatattcaaaagaaaaactataagcgctacttatgtacacagatgagacttgaaaacgtgactgctggaaggaaaggaaacctaagagttgcaactgagatatttcaagtatcaccgtctcttcatatgatcgaagtccggaaaacgaaaggggatacactagaattccataagttctacaagaagctctcaacctcacttaacgatgtggtttggaaatctggcgagagctctggtctaagcaaataa

SEQ ID NO: 2032 - protein, 452 aa, Arabidopsis thaliana
MNRPKVQRRVGKYEVGKTLGQGTFAKVRCAVNTETGERVALKILDKEKVLKHKMAEQIRREICTMKLINHPNVVRLYEVLASKTKIYIVLEFGTGGELFDKIVHDGRLKEENARKYFQQLINAVDYCHSRGVYHRDLKPENLLLDAQGNLKVSDFGLSALSRQVRGDGLLHTACGTPNYAAPEVLNDQGYDGATADLWSCGVILFVLLAGYLPFEDSNLMTLYKKIIAGEYHCPPWLSPGAKNLIVRILDPNPMTRITIPEVLGDAWFKKNYKPAVFEEKEEANLDDVDAVFKDSEEHHVTEKKEEQPTSMNAFELISMSRALDLGNLFEEEESIPFNLQGFKRETRFAAKGAANDLVQKIEEASKPLGFDIQKKNYKRYLCTQMRLENVTAGRKGNLRVATEIFQVSPSLHMIEVRKTKGDTLEFHKFYKKLSTSLNDVVWKSGESSGLSK

SEQ ID NO: 2033 - DNA, 1551 bp, Pisum sativum
  CDS (1)..(1551)
atggcagtagtagcagctcccaagaagaacaactcattcaacaagaaagacaacccaaatcttctattgggtcgtttcgaattaggaaaactcctcggccatggaaccttcgccaaggtccacctagctaaaaacatcaaaaccggtgaagcagtagctataaagatcataagcaaagacaaaatccttaaaagtggtttagtttcacacatcaaacgagaaatctccattctccgccgtgtccgccaccccaacatcgtccagctgttcgaagtcatggcgacaaagacaaagatctacttcgtgatggaatatgtacgaggtggagagcttttcaataaagttgctaaaggtaggttgaaagaagaggttgcgagaaaatattttcaacagttaatatgtgcggttgaattttgtcatgctagaggtgtttttcatagagatataaagcctgagaatttgttgcttgatgaaaatggtaaccttaaagtttccgattttgggttaagtgctgtgtcggatgagattaagcaagatgggttgtttcatactttttgtggtacacctgcatatgttgctcctgaggttttgtctaggaaaggttatgatggtggtaaggttgatatttggtcttgtggtgttgttttgtttgttttaatggctggttatttaccttttcatgatcctaataatgttatggttatgtataagaagatttataaaggtgattttaggtgtcctagatggttttctcctgagcttgttaaccttcttactaggcttcttgatactaagcctcaaactaggatttcgattccggagattatggagaatcgttggtttaagataggttttaagcgtattaagttttatgttgaggatgatgttgtttgtaatcttgattctcttggtcttgatggtaataatggtaatgatggtaatgatgataagaaggtgctaaacattgatgaacaccgtgatgaagcgttggaatcggtatcagaatcagaatgggattctgaggttgtgaatagaaggaagaatcgtcagcttggttcattgccaaggcctgcgagtttgaatgcttttgacattatatcgttttcgcaaggctttgatctttctggattgtttgaggaaaagggcgacgaagcaaggtttgtgtctggtgcgtcggtgtcaaagattatgacgaaattggaggaagttgctcagttggttagtttcaaagtgaggaagaaagattgcagggttagcttcgagggttcaagagaaggggtaaaagggccgttgagtatcgctgctgaggtattcgagttaaccccgtctttggttgttgttgaagtgaagaaaaaaggaggggataaagttgagtatgataggtttttaaacactgaattgaagtctgctttgcatagtttaaccatggaagaatctgcaggttcttcatgtcaaaatacaccagatgaaactttgcaacaacgcgcgttttctgattccgccattgacaaacattcagatagcattgaatctctgaacttagacacctga

SEQ ID NO: 2034 - protein, 516 aa, Pisum sativum
MAVVAAPKKNNSFNKKDNPNLLLGRFELGKLLGHGTFAKVHLAKNIKTGEAVAIKIISKDKILKSGLVSHIKREISILRRVRHPNIVQLFEVMATKTKIYFVMEYVRGGELFNKVAKGRLKEEVARKYFQQLICAVEFCHARGVFHRDIKPENLLLDENGNLKVSDFGLSAVSDEIKQDGLFHTFCGTPAYVAPEVLSRKGYDGGKVDIWSCGVVLFVLMAGYLPFHDPNNVMVMYKKIYKGDFRCPRWFSPELVNLLTRLLDTKPQTRISIPEIMENRWFKIGFKRIKFYVEDDVVCNLDSLGLDGNNGNDGNDDKKVLNIDEHRDEALESVSESEWDSEVVNRRKNRQLGSLPRPASLNAFDIISFSQGFDLSGLFEEKGDEARFVSGASVSKIMTKLEEVAQLVSFKVRKKDCRVSFEGSREGVKGPLSIAAEVFELTPSLVVVEVKKKGGDKVEYDRFLNTELKSALHSLTMEESAGSSCQNTPDETLQQRAFSDSAIDKHSDSIESLNLDT

SEQ ID NO: 2035 - DNA, 1308 bp, Arabidopsis thaliana
  CDS (1)..(1308)
atggaggaagaacggcgagttctgttcggaaagtacgagatgggaaggttattaggcaaaggaaccttcgccaaagtctattacggcaaagagatcatcggcggcgagtgcgtcgcaatcaaagtcatcaacaaggatcaagtaatgaagagacctggaatgatggaacaaatcaaacgcgagatttcaatcatgaagctcgttcgtcatcccaacatagttgaattgaaagaagtcatggctacgaagaccaagatcttcttcgtcatggagttcgttaaaggcggcgagcttttctgcaaaatctctaaaggtaagttacacgaagacgctgctcgtagatatttccagcaattgatctcagccgttgattattgccatagtagaggcgtttctcatcgcgatctgaaacctgagaatcttcttttagatgagaatggagatttgaaaatctccgatttcggattatctgcgttaccggaacagattcttcaagacggattgcttcatacgcagtgtggaactccggcgtatgttgcgccggaggtattaaagaagaaaggatacgacggcgcgaaagctgatatctggtcgtgcggcgtcgttttgtatgttcttctcgccggatgtttgccgtttcaagatgagaatctgatgaatatgtatcggaagattttcagagcggattttgaatttccgccgtggttttctccggaagcgaggaggttgatttcgaaactcctcgttgtagatccagatcgacggatctcgattccggcgattatgagaacgccttggctccggaaaaacttcactccgccgttagctttcaaaatcgacgaaccgatttgttctcaaagcagcaaaaacaacgaagaagaagaagaagacggagattgtgaaaatcaaacagagccgatatcgccgaaattcttcaacgctttcgaattcatatcctcgatgtcttccggatttgacttatcgagcttgttcgagagcaagaggaaagtgcaatcggtgtttacgtcacggtcgtcggcgacggaggtaatggagaagatagaaacggttacgaaggagatgaacatgaaagtgaagagaacgaaggattttaaagtgaagatggaagggaaaacggaagggagaaaaggacggttgtcgatgacggcggaagtgtttgaagtagcgccggagatatcggtggtggagttttgcaaatcggcgggagatactttggagtacgataggttatacgaagaagaagtacggccggcgttaaacgacatcgtctggtcaagagcacggtga

SEQ ID NO: 2036 - protein, 435 aa, Arabidopsis thaliana
MEEERRVLFGKYEMGRLLGKGTFAKVYYGKEIIGGECVAIKVINKDQVMKRPGMMEQIKREISIMKLVRHPNIVELKEVMATKTKIFFVMEFVKGGELFCKISKGKLHEDAARRYFQQLISAVDYCHSRGVSHRDLKPENLLLDENGDLKISDFGLSALPEQILQDGLLHTQCGTPAYVAPEVLKKKGYDGAKADIWSCGVVLYVLLAGCLPFQDENLMNMYRKIFRADFEFPPWFSPEARRLISKLLVVDPDRRISIPAIMRTPWLRKNFTPPLAFKIDEPICSQSSKNNEEEEEDGDCENQTEPISPKFFNAFEFISSMSSGFDLSSLFESKRKVQSVFTSRSSATEVMEKIETVTKEMNMKVKRTKDFKVKMEGKTEGRKGRLSMTAEVFEVAPEISVVEFCKSAGDTLEYDRLYEEEVRPALNDIVWSRAR

SEQ ID NO: 2037 - DNA, 1362 bp, Persea americana
  CDS (1)..(1362)
atggataataaagggggaattttgatgcaaaggtttgaattaggaaggctattggggcaaggtacttttgcaaaggtttaccatgcaaggaatctgaaaagtagccagagtgttgctataaaggtgatagacaaagagaaggttttgaaggtaggaatgattgatcagatcaagcgagaaatatcaacaatgagattggctagtcacccaaatgttgttcagctttatgaagtcatggctaccaaaaccaagatatattttgttttggaatatgtgaaaggcggtgagctctttaacaaggttgccaagggcaagctcaaagaggatgttgcatggaaatatttccagcagctggttagtgctgtggatttttgccacagcaggggtgtttatcatcgtgatttaaaacctgaaaacctactggtggatgagaatgagaacttaaaggttacagactttggattgggtgccctggcagaatccaagcggcaggatggtttacttcacacaacttgtgggactcccgcttatgttgctcctgaagtgataagtagaaaggggtatgatggtgcaaaagctgacatttggtcctgtggagtgatattatttgttcttctggctggatatcttccatttcatgattcaaatctgatggagttgtacaggaaggttggcaaagcggaatataaatgccctaattggtttccaccagaagtgcgtaggctgctagcaaggattttggatccgaacccaaacactcggatttcaattgcgaagatcaaagataactcttggttcaaaaggggatttgaagcaaagtttgccaaaggtgaaacaaagtccaaggaattggctcccctcgatactgatgcagcatttgcttcaagtgatactggtgttgctgcacgtaaaccagagttagtgaaaccacaacacctgaatgcgtttgatatcatctctctttctgctggatttgatctttctggtttgtttgaagacaccaactgcaggaaagaagcacggttcgcttctaagcagcctgcctcggccatcatctcaaagttggaggatattgctaagcgattgaggctgaaggtaaaaaagaaggatgagggaatattgaaattggaaggatccaaagaaggaagaaaaggagtgctttcaattgatgccgagatctttgtggtcaatccatcatttcatttggtggaggtgaagaagtcgagtggggatacactggaatatcagaagctatggaatcaggatatgagaccagcactgactgacattgtctgggcttggcaaggtgaccagcagcaacaacaagagtctttggtatgttctctaggacagtcgctctaa

SEQ ID NO: 2038 - protein, 453 aa, Persea americana
MDNKGGILMQRFELGRLLGQGTFAKVYHARNLKSSQSVAIKVIDKEKVLKVGMIDQIKREISTMRLASHPNVVQLYEVMATKTKIYFVLEYVKGGELFNKVAKGKLKEDVAWKYFQQLVSAVDFCHSRGVYHRDLKPENLLVDENENLKVTDFGLGALAESKRQDGLLHTTCGTPAYVAPEVISRKGYDGAKADIWSCGVILFVLLAGYLPFHDSNLMELYRKVGKAEYKCPNWFPPEVRRLLARILDPNPNTRISIAKIKDNSWFKRGFEAKFAKGETKSKELAPLDTDAAFASSDTGVAARKPELVKPQHLNAFDIISLSAGFDLSGLFEDTNCRKEARFASKQPASAIISKLEDIAKRLRLKVKKKDEGILKLEGSKEGRKGVLSIDAEIFVVNPSFHLVEVKKSSGDTLEYQKLWNQDMRPALTDIVWAWQGDQQQQQESLVCSLGQSL

SEQ ID NO: 2039 - DNA, 2121 bp, Fusarium oxysporum
  CDS (1)..(2121)
  misc_feature (1815)..(1815): r is g or a
atggctccccgaggcttcgaggacgaggagcttaccatttccctatcctcctcccacgttcgtcgccctcaacagcagcaacaacaacagtcacagcagcagcagcagcacgcttctagtgatgctcctacacccggttcccgccccgccgatgcgccgctcaaggaaagaatcaagacggaacagcgcatcggcgcctacaaggtccttcgaactttaggcgagggctcttttggcaaggttaagcttgctattcacaatggaaccggccagcaagttgccctcaaaattatcgccagaaagaagcttatcagccgcgatatggctgggcgtgttgagcgtgagattgaatacttacagctcttacgccatcctcatatcatcaaactgtacacacccaatgaaatcatcatggtcctcgaatatgctggcggcgagctcttcgactacattgttcaacatggccggatgaaggaacctgaagctcgccgtttctttcagcagatgctttgtgccgtcgaatattgccatcgacacaagattgttcaccgtgacttaaagcccgagaacttgctactcgacgaaaatctcaacgtcaaaatcgccgatttcggcctaagcaatattatgaccgacggtaactttctcaagacaagctgtggcagtcccaactatgctgctcctgaagtcattggtggcaagttatatgctggtcccgaagtcgatgtgtggagctgcggtgttattctctatgttcttttggttggtcgacttcccttcgacgatgaacacattcccagtttgtttgccaagattgcaaagggcacatacagcataccgcaatggatgcctgccggcgccgcaaacctcatcaagaagatgctggtggtgaaccctgtgcatcgagctacaattgaggatatccgagccgatccctggttcaccaccgatctgcctgcttatcttcaacttcccgttgaagaattcttcaacactggtgttgatccaaacaaagccattaagaagaacgacatcgcaccgaatgcttcagaaaaggttcaagagagattgcataatgaggttactgaaaagattagtaagactatgggttatggtaagagtgatgtagaggaggccctgcaggctgccgagccggcggcaatcaaggacgcctacatgattgtaagggaaaacaagatgatgcaagtgaatcataatcctgaagccctcctagcagagcctgagggatcaagccccatgctaagcatgtcttctgcccgctcaacgacttctcaagctaccaccacccctcgcccgtacgtgagcaaggtcggtatcttgccttcaagtttaccagcttaccacaaggactatatggagcgggagaaggccggtagcgtcgaaaactcaccacccaaagtacttatcaacgacgaacctcccagcaacagaacagatgcggaaaaggaagaaacagcgcgccgtttacggccccactcgagaagtcaattgcgtatggacgaagccaacacaaggccccaagggatgactcctatcaacccccctaaaaagaataagccagttcgttggcagttcggcatccgatcacgtaactcgccatgggaagcccttctgtgcatccacaaggcacttcataaattgggcgcgacatacatccccgatgaagactacgagtcaagaactgcagaggagcgagctgaagcttcaggtgaaggtagctttgcggattctcacgataataaccggggctcaagctcaagcatcgatcctaagaaacgttacaatcttcccgcrgatccttggcatatcaatgtgcgctgggatacttctgccatcaagaagaaggcggccagcgttcctggcactcccagctcgccgagcacgccagagggacaacatcaccccaaggagcctttcgttgcgctacatatggacatacaaatttacgaaatggaacatggcgtgtacttggtcgacttcaagtgctctggatacgagacagcccatggccgactgctcgaggaaaaagacgtcaccagcccctttcccttcctggacatggccgccaagttgattatgcaacttgccgaggctgattga

SEQ ID NO: 2040 - protein, 706 aa, Fusarium oxysporum
MAPRGFEDEELTISLSSSHVRRPQQQQQQQSQQQQQHASSDAPTPGSRPADAPLKERIKTEQRIGAYKVLRTLGEGSFGKVKLAIHNGTGQQVALKIIARKKLISRDMAGRVEREIEYLQLLRHPHIIKLYTPNEIIMVLEYAGGELFDYIVQHGRMKEPEARRFFQQMLCAVEYCHRHKIVHRDLKPENLLLDENLNVKIADFGLSNIMTDGNFLKTSCGSPNYAAPEVIGGKLYAGPEVDVWSCGVILYVLLVGRLPFDDEHIPSLFAKIAKGTYSIPQWMPAGAANLIKKMLVVNPVHRATIEDIRADPWFTTDLPAYLQLPVEEFFNTGVDPNKAIKKNDIAPNASEKVQERLHNEVTEKISKTMGYGKSDVEEALQAAEPAAIKDAYMIVRENKMMQVNHNPEALLAEPEGSSPMLSMSSARSTTSQATTTPRPYVSKVGILPSSLPAYHKDYMEREKAGSVENSPPKVLINDEPPSNRTDAEKEETARRLRPHSRSQLRMDEANTRPQGMTPINPPKKNKPVRWQFGIRSRNSPWEALLCIHKALHKLGATYIPDEDYESRTAEERAEASGEGSFADSHDNNRGSSSSIDPKKRYNLPADPWHINVRWDTSAIKKKAASVPGTPSSPSTPEGQHHPKEPFVALHMDIQIYEMEHGVYLVDFKCSGYETAHGRLLEEKDVTSPFPFLDMAAKLIMQLAEAD

SEQ ID NO: 2041 - DNA, 1317 bp, Glycine max
  CDS (1)..(1317)
atgggtgagaagagcaacgttggcggcgacgcgattaacacgacactgcttcacgggaagtacgagctgggccggctgttaggccacggaaccttcgcgaaggtgtaccacgcgcgccacctgaagacgggaaagagcgtggcgatgaaggtggtgggcaaagagaaggtggtgaaggtaggcatgatggagcagatcaagagagagatctcagccatgaacatggtgaagcacccaaacatcgtgcagcttcacgaggtcatggcgagcaagtccaagatctacatcgccatggagctcgtccgcggcggcgagctcttcaacaagatcgccagaggccgtctccgggaggagatggccagactttacttccaacaactcatctctgctgtggacttctgccacagccgcggcgtctaccaccgtgacctcaagccagagaaccttctcctcgacgacgacggcaacctcaaggtcaccgacttcggcctcagcactttctccgagcacctccggcacgacggcctgctgcacactacgtgcggcacgccggcctatgtcgcgcccgaggtgattgggaaaagaggctacgacggcgccaaggccgatatttggtcttgtggcgtaatcctctacgtacttcttgctggttttttacccttccaggatgacaacctggtggccttgtacaagaaaatttaccgcggtgacttcaagtgtccgccgtggttctcctccgaggcgcggaggctcatcaccaagctcctcgaccccaacccgaacacgcgaatcacaatttcaaaaatcatggactcgtcgtggttcaagaaacccgtgccgaagaacttgatgggaaagaaaagagaggaattggatctggaggagaagattaaacagcatgagcaggaggtttctactacgatgaatgcttttcacatcatttcgctctcggaggggttcgatttgtcgccgttgttcgaggaaaagaagagagaagagaaagagttacggtttgcgaccacgcgccccgcgagcagcgtgatttcgagattggaagatttggcgaaggcggtgaagttcgacgtgaagaagagcgagactaaggtgaggttgcagggtcaagaaaaagggcgaaaaggtaaactcgctattgctgcggacttgtacgccgtgacgccgtcgtttttggtggtggaggttaagaaggacaacggtgacaccttggagtataaccagttctgtagcaaggagcttcgtccagctcttaaagatatcgtgtggaggacttctcctgcagagaatcctacactcgcttga

SEQ ID NO: 2042 - protein, 438 aa, Glycine max
MGEKSNVGGDAINTTLLHGKYELGRLLGHGTFAKVYHARHLKTGKSVAMKVVGKEKVVKVGMMEQIKREISAMNMVKHPNIVQLHEVMASKSKIYIAMELVRGGELFNKIARGRLREEMARLYFQQLISAVDFCHSRGVYHRDLKPENLLLDDDGNLKVTDFGLSTFSEHLRHDGLLHTTCGTPAYVAPEVIGKRGYDGAKADIWSCGVILYVLLAGFLPFQDDNLVALYKKIYRGDFKCPPWFSSEARRLITKLLDPNPNTRITISKIMDSSWFKKPVPKNLMGKKREELDLEEKIKQHEQEVSTTMNAFHIISLSEGFDLSPLFEEKKREEKELRFATTRPASSVISRLEDLAKAVKFDVKKSETKVRLQGQEKGRKGKLAIAADLYAVTPSFLVVEVKKDNGDTLEYNQFCSKELRPALKDIVWRTSPAENPTLA

SEQ ID NO: 2043 - DNA, 1251 bp, Arabidopsis thaliana
  CDS (1)..(1251)
atgggtttgtttggaacgaagaagatcgggaagtatgagataggaagaacaatcggagaagggaatttcgcaaaagtgaaacttggttacgacacgaccaatggtacttacgtagctgtcaaaatcatagacaaggctttggttattcaaaagggtcttgagtctcaagtcaagagagagatacgaacgatgaagcttcttaaccatcccaacatcgtccaaatacacgaggtgattggaaccaagacaaagatctgtatagttatggaatacgtttcaggtggtcagctttcagacagacttggaagacagaaaatgaaagaatcagatgctagaaaacttttccaacaattgattgatgctgttgattgttgtcataacagaggagtttatcatagagatcttaagccacaaaacttgttactagattcaaagggtaatctcaaagtttctgactttggattaagtgcagttcctaaatcgggggatatgctctctacagcttgtggctctccatgttatatagcaccagagttgattatgaacaaaggctactcaggagcagcagtagatgtatggtcttgtggagtgattctatttgaattgcttgctggttatccacctttcgatgatcatacacttccggttttgtataagaagatactcagagcagattacacgttcccacctggattcactggagagcagaagaggctaatctttaacattcttgacccaaatcctctaagtcgtataacactagctgagataatcatcaaagattcttggttcaagataggttatacaccagtttatcatcaactttcagactcaatcaaggacaatgtcgcggagataaatgcagcaaccgcgtcatcaaatttcataaatgcttttcagataatagcaatgtctagtgatctagatttgtcaggtctcttcgaagaaaatgatgataagagatataaaacaagaattgggtccaagaacacagcacaagaaacaatcaagaagattgaagctgcagcaacttatgttagtttatcagttgagagaataaagcacttcaaggttaagattcagccaaaggagataagatcaagatcttcttatgacttattatcagcagaggtgatagaggtgactccaacaaattgtgttatagaaatatcgaaatccgcaggcgagttaagactatacatggagttttgccagagcttatcaagcttacttaccgcggaagtaagctaa

SEQ ID NO: 2044 - protein, 416 aa, Arabidopsis thaliana
MGLFGTKKIGKYEIGRTIGEGNFAKVKLGYDTTNGTYVAVKIIDKALVIQKGLESQVKREIRTMKLLNHPNIVQIHEVIGTKTKICIVMEYVSGGQLSDRLGRQKMKESDARKLFQQLIDAVDCCHNRGVYHRDLKPQNLLLDSKGNLKVSDFGLSAVPKSGDMLSTACGSPCYIAPELIMNKGYSGAAVDVWSCGVILFELLAGYPPFDDHTLPVLYKKILRADYTFPPGFTGEQKRLIFNILDPNPLSRITLAEIIIKDSWFKIGYTPVYHQLSDSIKDNVAEINAATASSNFINAFQIIAMSSDLDLSGLFEENDDKRYKTRIGSKNTAQETIKKIEAAATYVSLSVERIKHFKVKIQPKEIRSRSSYDLLSAEVIEVTPTNCVIEISKSAGELRLYMEFCQSLSSLLTAEVS

SEQ ID NO: 2045 - DNA, 1326 bp, Brassica napus
  CDS (1)..(1326)
atggtcggagcaaaacctatagagaacggatctgacggtggagcaagcactggtcttctccacggacgttacgagctaggccgtcttctaggccacgggacattcgctaaagtgtaccacgcgcgtaacgtaacaacgggtaaaagcgtggcgatgaaagtcgtcggaaaagagaaggtggtgaaggtcggcatggtggaccagatcaagcgcgagatctcggtgatgaggatggtgaagcatcccaacatcgtcgagctccacgaggtgatggctagcaaaaccaagatctacttcgccatggagctcgtgcgaggcggggagctgttcgccaaagtcgccaaagggaggctgcgcgaggacgtggcgcgcgtgtactttcagcagctgatctccgccgtcgatttttgccacagccgcggggtttaccaccgagatctcaagccggagaatctcttgcttgacgaagaaggcaacctcaaggtcaccgactttggtctctctgctttcaccgagcatttgaagcaagacgggcttctccacaccacttgtggaactccggcgtacgtcgcgccggaggttatactgaagaaaggatatgacggagcgaaggcggatctttggtcttgcggcgttatcctcttcgtgctcctcgcgggttacttgccgtttcaggatgataatcttgtcaacatgtataggaagatctacagaggagacttcaagtgccctgggtggctctcctccgatgcgaggaggctcgtgacgaagcttctggatccgaatccgaatacccggatcactatcgataaggtgatggattcacactggttcaagaagtcctcaacgagatcaagaaacgagccagtggccgcaacaccagaggctgaggaggatgttgatgtgtccgtgcacaagtccaaggaagagacggagacgctaaacgcgtttcacatcatcgcgttgtctgaagggtttgatctctcgccgttgttcgaggagaagaagaaagaggagaagatggagatgaggttcgcgacttctaggccggcgagtagtgtgatatcgagccttgaggaggcggcgaaggttgggaataagtttgatgtgaggaagagcgagtgtagagtgaggatcgaagggaaacagaatggccggaaagggaagttggcggtggaggcggagatattcgcggtggctccgtcgtttgttgtcgtggaggtgaagaaagatcatggggacacgcttgagtacaataacttttgtagtacggctcttagaccagctctcaaggacatcttctggacttctactacacctgcttga

SEQ ID NO: 2046 - protein, 441 aa, Brassica napus
MVGAKPIENGSDGGASTGLLHGRYELGRLLGHGTFAKVYHARNVTTGKSVAMKVVGKEKVVKVGMVDQIKREISVMRMVKHPNIVELHEVMASKTKIYFAMELVRGGELFAKVAKGRLREDVARVYFQQLISAVDFCHSRGVYHRDLKPENLLLDEEGNLKVTDFGLSAFTEHLKQDGLLHTTCGTPAYVAPEVILKKGYDGAKADLWSCGVILFVLLAGYLPFQDDNLVNMYRKIYRGDFKCPGWLSSDARRLVTKLLDPNPNTRITIDKVMDSHWFKKSSTRSRNEPVAATPEAEEDVDVSVHKSKEETETLNAFHIIALSEGFDLSPLFEEKKKEEKMEMRFATSRPASSVISSLEEAAKVGNKFDVRKSECRVRIEGKQNGRKGKLAVEAEIFAVAPSFVVVEVKKDHGDTLEYNNFCSTALRPALKDIFWTSTTPA

SEQ ID NO: 2047 - DNA, 1290 bp, Arabidopsis thaliana
  CDS (1)..(1290)
atggaatcacttccccagccgcaaaaccaatcatctccggcaacaactccggcgaagatcctccttgggaaatacgaactcggtcgtcgtctcggtagcggaagcttcgcgaaagtccatttagctcgatcaatcgaatccgacgagctcgtcgccgttaaaatcatcgagaagaagaaaacaatcgaatccggtatggaaccaagaataatcagagagatcgatgcgatgcgtcgtcttcgtcatcatccaaacatactcaagatccatgaagttatggcaaccaaatctaagatctatctcgtaatggaactcgcttccggtggtgaacttttctcaaaagtcctccgtcgtggacgtcttcctgaatcaacggcgcgtcgttactttcaacaactcgcctccgctcttcgtttctctcaccaagacggtgtcgctcaccgtgatgtgaaacctcagaatctactcttagatgagcaaggtaacctcaaggtctctgactttggtttatcagctttaccggagcatctacaaaacggattgcttcacacggcgtgtggtactccggcttatacagctccggaggttatttcacggaggggatacgacggagcaaaagctgatgcgtggtcttgtggtgtgattttgtttgttttattggttggcgatgctccatttgatgattcgaatatcgctgcgatgtatcggaagattcatcggagagattatcggtttccgagctggatttcgaaacaagctaaatcgataatctatcagatgttagatccgaatccagtaacgaggatgagtattgaaacagtgatgaaaacgaattggttcaagaagtctctagagacttctgagtttcatcgtaacgtctttgattcggaagtagagatgaaatcgagtgttaattcgattactgcttttgatttgatctcgttatcgtcgggattagatctttctggattgtttgaggctaagaagaagaaggagaggagattcccggcgaaggtttcgggtgttgaagtggaggagaaggcgaagatgattggggagaagttaggttatgtagtgaagaagaagatgatgaagaaggaaggagaagtgaaggttgttggattagggagaggaagaactgtgattgtggtggaagcagtggagttaacggtggatgttgtggtggttgaagtgaaagttgttgaaggtgaagaagatgattcacggtggtctgatttgattactgagcttgaagatatagttctttcatggcacaatgacatcatgtaa

SEQ ID NO: 2048 - protein, 429 aa, Arabidopsis thaliana
MESLPQPQNQSSPATTPAKILLGKYELGRRLGSGSFAKVHLARSIESDELVAVKIIEKKKTIESGMEPRIIREIDAMRRLRHHPNILKIHEVMATKSKIYLVMELASGGELFSKVLRRGRLPESTARRYFQQLASALRFSHQDGVAHRDVKPQNLLLDEQGNLKVSDFGLSALPEHLQNGLLHTACGTPAYTAPEVISRRGYDGAKADAWSCGVILFVLLVGDAPFDDSNIAAMYRKIHRRDYRFPSWISKQAKSIIYQMLDPNPVTRMSIETVMKTNWFKKSLETSEFHRNVFDSEVEMKSSVNSITAFDLISLSSGLDLSGLFEAKKKKERRFPAKVSGVEVEEKAKMIGEKLGYVVKKKMMKKEGEVKVVGLGRGRTVIVVEAVELTVDVVVVEVKVVEGEEDDSRWSDLITELEDIVLSWHNDIM

SEQ ID NO: 2049 - DNA, 1464 bp, Arabidopsis thaliana
  CDS (1)..(1464)
atgggatccaaacttaaactttaccctctcttaaatcactcatccgtttttcacccagacagtcgttaccaatcggcccctacaatggaggaagagcaacaacaacttcgtgttctcttcgcgaaatacgagatgggaaggttactaggcaaaggaacattcggaaaagtttattacggcaaagagataacaaccggagaaagcgttgcaatcaaaatcatcaacaaagatcaagtcaaacgtgaaggtatgatggaacaaatcaaacgagagatctcaatcatgagacttgttcgtcatccaaacatcgttgagttaaaagaagtcatggctacaaaaacaaagatcttctttatcatggaatacgttaaaggcggtgaacttttctccaagatcgttaaaggaaagcttaaagaagactctgctcgtaagtatttccaacaattaatctcagccgttgatttttgtcatagtagaggcgtttctcaccgagatctaaaaccggagaatctcttagttgacgagaacggagatcttaaggtttcagattttggtctctctgctttaccggaacagattttacaagacggtttgcttcatactcagtgtggaactccggcgtatgttgcaccggaggttttgaggaagaaaggttacgacggagctaaaggtgatatttggtcgtgtggtattatcttgtacgtgcttctcgctggattcttaccgtttcaagatgagaacctaatgaaaatgtatcggaagatcttcaaatcggagtttgagtatccgccgtggttttcaccggagtccaagaggttgatttcaaagcttttagttgttgatcctaacaaacggatctcgataccggcgattatgcgaacaccgtggtttcgtaaaaacatcaactctccgatcgagttcaagatcgatgagctcgagatccaaaacgtagaagacgaaacaccaacaacaacagcaacaacagcaacaacaacaacaccggtctcgccgaagttctttaacgcgtttgaattcatctcttctatgtcatcaggatttgatctatcaagtttgttcgagagtaagaggaagctgagatctatgtttacgtcacggtggtcggcgtcggagataatggggaagcttgaagggatagggaaagagatgaatatgaaggtgaagaggactaaagactttaaggtgaagttgtttgggaaaacggaagggaggaaaggacagatcgcggtgactgctgaggttttcgaggttgcgccggaagtcgccgtcgttgagttgtgtaagtcggcgggagatactttggagtataataggttgtatgaagaacatgtccggccagcgttggaggagatagtgtggtcgtggcacggtgataatcataataataatattgttaagagtaatggtaattatgttagtgatgaaaattctggtagtgactgctaa

SEQ ID NO: 2050 - protein, 487 aa, Arabidopsis thaliana
MGSKLKLYPLLNHSSVFHPDSRYQSAPTMEEEQQQLRVLFAKYEMGRLLGKGTFGKVYYGKEITTGESVAIKIINKDQVKREGMMEQIKREISIMRLVRHPNIVELKEVMATKTKIFFIMEYVKGGELFSKIVKGKLKEDSARKYFQQLISAVDFCHSRGVSHRDLKPENLLVDENGDLKVSDFGLSALPEQILQDGLLHTQCGTPAYVAPEVLRKKGYDGAKGDIWSCGIILYVLLAGFLPFQDENLMKMYRKIFKSEFEYPPWFSPESKRLISKLLVVDPNKRISIPAIMRTPWFRKNINSPIEFKIDELEIQNVEDETPTTTATTATTTTPVSPKFFNAFEFISSMSSGFDLSSLFESKRKLRSMFTSRWSASEIMGKLEGIGKEMNMKVKRTKDFKVKLFGKTEGRKGQIAVTAEVFEVAPEVAVVELCKSAGDTLEYNRLYEEHVRPALEEIVWSWHGDNHNNNIVKSNGNYVSDENSGSDC

SEQ ID NO: 2051 - DNA, 1425 bp, Oryza sativa subsp
  CDS (1)..(1425)
atggagacgacgagccaagattcgcaggtgatcatggggcggtacaagctcggccggctcctcggccgtggcacgttcgccaaggtctacaaggcctataagttggccaccggcgaggccgtcgccatcaaggtgttcgacaaggaggcggtgcagcggtccggcacggtggagcaggtgaagcgcgaggtggacgtcatgcggcgtgtgcaccaccgccacgtcatccgcctccacgaggtgatggctacgcggtccaggatctacttcgtcatggagtacgcgagcggcggcgagctcttcacccgcctctcccggagcccgcggttcccggagcccgtcgcgcgccgctacttccagcagctgatcaccgccgtggagttctgccacagccgcggcgtgtaccaccgcgacctcaagcccgagaacctcctcctcgacgcccgcggcgacctcaaggtcaccgacttcggcctcagcgcgctagacggaggcctccgcggcgacggcctcttgcacaccacgtgcggcacgccggcgtacgtcgctcccgaggtgctcctgaagcgtggctacgacggcgccaaggcggacatctggtcgtgcggcgtgatccttttcgtgctcctcgccggctacctccccttcaacgaaaccaacctcgtgatcctgtaccggaatatcacggagagcaactacaggtgcccgccgtggttctccgtcgaggcgcgcaagctccttgccaggctgctcgacccgaaccccaagacccggatcaccatctccaagatcatggacaggccatggttccagcaggcgacgtgcccgctcggcgacatgtccctcgtcgcgagcgcgccctcggtgctgcttgccagaaaggaagccagccagcagcacgacgacgaggaggacgatgggtttgcacgggagaagaagaagcggtccaatgtgatcatgtcgtcgccggtgatcgacgtgaggccctcgagcatgaacgccttcgacatcatctcgcggtcgagagggctggacctgtccaagatgttcgacgcggaggagcgcaggtcggaggcgcggttctccaccagggagaccacgacggcgatcgtctccaagctggaggagatcgcggaggcggggaggttcagcttcaagctgaaggagaaagggagggtcgagctggaggggagccaggacgggcggaagggcgcgctggccatcgaggcggagatcttcaaggtggcgccggaggtgcacgtggtggaggtgaggaagaccggcggcgactcaccggatttccgggacttctacaagcaggagcttaagccgtcgcttggcgacatggtgtgggcgtggcagggaggtgattcgccgccgctcgtgccggcggcggggaggaggccgatcacgaagcgctcttga

SEQ ID NO: 2052 - protein, 474 aa, Oryza sativa subsp
METTSQDSQVIMGRYKLGRLLGRGTFAKVYKAYKLATGEAVAIKVFDKEAVQRSGTVEQVKREVDVMRRVHHRHVIRLHEVMATRSRIYFVMEYASGGELFTRLSRSPRFPEPVARRYFQQLITAVEFCHSRGVYHRDLKPENLLLDARGDLKVTDFGLSALDGGLRGDGLLHTTCGTPAYVAPEVLLKRGYDGAKADIWSCGVILFVLLAGYLPFNETNLVILYRNITESNYRCPPWFSVEARKLLARLLDPNPKTRITISKIMDRPWFQQATCPLGDMSLVASAPSVLLARKEASQQHDDEEDDGFAREKKKRSNVIMSSPVIDVRPSSMNAFDIISRSRGLDLSKMFDAEERRSEARFSTRETTTAIVSKLEEIAEAGRFSFKLKEKGRVELEGSQDGRKGALAIEAEIFKVAPEVHVVEVRKTGGDSPDFRDFYKQELKPSLGDMVWAWQGGDSPPLVPAAGRRPITKRS

SEQ ID NO: 2053 - DNA, 1344 bp, Arabidopsis thaliana
  CDS (1)..(1344)
atgagtggaagcagaaggaaggcgacgccggcgagtaggacgcgagtagggaattacgagatgggacgaactctcggagaaggaagcttcgctaaggcgaaatacgccaagaacaccgtcaccggagatcaagccgctatcaaaatcctcgaccgagaaaaggtcttccgtcacaaaatggtcgaacagcttaaaagagaaatatctacaatgaaactgattaaacatccaaatgtggttgaaatcattgaggttatggcgagcaaaacgaagatctatatcgttcttgagcttgtcaatggaggtgaactctttgataaaatcgcgcaacaagggaggcttaaggaggatgaagctcggagatattttcagcagctcatcaatgctgtggattactgccacagtcgaggtgtctaccacagagatctcaagcctgaaaatctgatccttgacgcaaatggggttttgaaagtctctgattttgggttaagcgccttctcacgacaagttcgggaagatggtttgcttcatacagcttgtggaacgccaaactacgttgcccctgaggttttgtcggacaaaggctatgacggtgcagcagcagatgtctggtcttgtggtgtcattctctttgtgcttatggctggttacttgccttttgatgagccgaatctcatgacattatacaaacgtatatgcaaggctgagtttagctgcccaccatggttctcgcaaggtgccaagagagtcatcaagcgtattctcgaacccaaccctattaccagaataagtattgcagagttgctcgaagatgaatggttcaagaaagggtacaagccgccatcatttgaccaagatgacgaggacataaccatagatgatgttgatgctgcttttagtaactccaaggaatgtcttgtaactgagaagaaggagaaacctgtatccatgaacgctttcgaacttatctctagctcaagcgagttcagtcttgaaaacttgttcgagaagcaagcgcaacttgtgaagaaagaaacgcggtttacttctcaacgatctgcgagtgaaataatgtcgaaaatggaagaaaccgcaaagccattaggctttaatgtccgtaaagacaactacaagataaaaatgaaaggagacaaaagtggtcgtaaaggtcagctctccgtagctacagaggtgtttgaagtggcgccatcattgcatgtggtagagcttaggaaaaccggtggtgataccctcgagtttcacaagttctacaaaaacttctcatctggattaaaggatgtagtctggaatactgatgcagccgctgaagaacaaaagcaataa

SEQ ID NO: 2054 - protein, 447 aa, Arabidopsis thaliana
MSGSRRKATPASRTRVGNYEMGRTLGEGSFAKAKYAKNTVTGDQAAIKILDREKVFRHKMVEQLKREISTMKLIKHPNVVEIIEVMASKTKIYIVLELVNGGELFDKIAQQGRLKEDEARRYFQQLINAVDYCHSRGVYHRDLKPENLILDANGVLKVSDFGLSAFSRQVREDGLLHTACGTPNYVAPEVLSDKGYDGAAADVWSCGVILFVLMAGYLPFDEPNLMTLYKRICKAEFSCPPWFSQGAKRVIKRILEPNPITRISIAELLEDEWFKKGYKPPSFDQDDEDITIDDVDAAFSNSKECLVTEKKEKPVSMNAFELISSSSEFSLENLFEKQAQLVKKETRFTSQRSASEIMSKMEETAKPLGFNVRKDNYKIKMKGDKSGRKGQLSVATEVFEVAPSLHVVELRKTGGDTLEFHKFYKNFSSGLKDVVWNTDAAAEEQKQ

SEQ ID NO: 2055 - DNA, 2016 bp, Trichoderma reesei
  CDS (1)..(2016)
atggcgcgagccgaccagccgcaggacaagaccaagacggagcagcggattggcgcctacaccgtcgtccggaccttgggcgagggctcctttggcaaggtgcggctggccatccacaacggcaccggccagaaggtcgccctcaagatcatcaccaggaagaagctcatcagccgcgacatggccggccgcgtcgagcgcgagattgagtacctgcagctgctgcggcacccgcacatcatcaagctctataccgtcatcaagactccgtccgaaatcatcatggtgctcgagtacgcaggcggcgagctcttcgactacatcgtccagaacggccgcatgaaggaggcagaggcacgccgcttcttccagcagatgatctgtgccgttgagtactgccaccgccacaagatcgtccaccgcgacctgaagccagagaacctgctgctggacgagaacctcaacgtcaagattgccgactttggcctgagcaacatcatgaccgacggcaacttcctcaagacgagctgcggcagccccaactacgccgcccccgaggtcattggcgggaagctctacgccggctccgaggtcgacgtatggagctgcggcgtcatcctctacgtccttctcgtcggcaggctaccctttgacgacgagcacatccccagcctcttcgccaagattgcaaggggcacctacagcatgccgcagtggatgcctccgggcgcggccgccttgatcaagggcatgctggtggtcaatcccgtgcagcgcatgacgattgacgagatcagggccgatccgtggttcaacaccgacttgcccgcgtacctgcagcctcccgtcgaggagtttttcaacaccggcgtcgatcccaacaaggcaatcaagaagagtgatattgcgcccaatgctcccgaaaaggtgcaggagaagctgcataacgaagtgaccgaaaagattagcaagaccatgggctatggcaaagacgacgtggaggaggctcttcagtctgatgagccttccgctatcaaggatgcctacatgattgttcgagaaaacaagctcatgctagcgaacaacccagacgccggcctcactggggacgaaggcagtcctatgatgagtatatcttctacacgatccgccatttcgccaggaggcgcgtcccctcgtccgtacgtcaccaagatcggcattctacccagcagtcttcctgcctaccacaaggattacatggagagggaaaagaacgggaccggccatgaccccgttactccggccatcaccatcaacgacgagctgcccgtcactcgcactgaggttgaaaaagaggaggcggcgcgtcgtttgaatcctcactcccgcagtgctctgcgtctggacgagtccagcaaacgcccgcagggcatgacacccatcaccgccccagtcaagaagcccaagcctgtgcgctggcaatttggcataagatctcgcaatgcgccatgggaggctctcctttgcatccacaaggccctgaacaagcttggcgcatcccatctccgcgacgaaggctacgatgaggcgcaacgcagaggggtcgaagatgccacaagccgcgatagcagcttcgcaaacggcgccccattagaaagagatccgaacgggcatgacaaggatcccacgaagaggtataagctgcctgcagatccgtggcatatccaggtcagatggccatcaacaagcatgcaagcaggggcggatcgtcgagatgagctcggttccaaagccggatctcccgacagcttcgtctacactcgcggagatgcggcctcacgcaaggactttgtcgccttgcatatggacatccaaatctatgagatggagcagggggtctatctcgtggacttcaagtgctcgggctacgagacccaggacggaaggctgctcgaggagaaggaggtcaccagtccgtttccgttcctggaccgggccgccaaactgattatgcagctggccgaggccgactag

SEQ ID NO: 2056 - protein, 671 aa, Trichoderma reesei
MARADQPQDKTKTEQRIGAYTVVRTLGEGSFGKVRLAIHNGTGQKVALKIITRKKLISRDMAGRVEREIEYLQLLRHPHIIKLYTVIKTPSEIIMVLEYAGGELFDYIVQNGRMKEAEARRFFQQMICAVEYCHRHKIVHRDLKPENLLLDENLNVKIADFGLSNIMTDGNFLKTSCGSPNYAAPEVIGGKLYAGSEVDVWSCGVILYVLLVGRLPFDDEHIPSLFAKIARGTYSMPQWMPPGAAALIKGMLVVNPVQRMTIDEIRADPWFNTDLPAYLQPPVEEFFNTGVDPNKAIKKSDIAPNAPEKVQEKLHNEVTEKISKTMGYGKDDVEEALQSDEPSAIKDAYMIVRENKLMLANNPDAGLTGDEGSPMMSISSTRSAISPGGASPRPYVTKIGILPSSLPAYHKDYMEREKNGTGHDPVTPAITINDELPVTRTEVEKEEAARRLNPHSRSALRLDESSKRPQGMTPITAPVKKPKPVRWQFGIRSRNAPWEALLCIHKALNKLGASHLRDEGYDEAQRRGVEDATSRDSSFANGAPLERDPNGHDKDPTKRYKLPADPWHIQVRWPSTSMQAGADRRDELGSKAGSPDSFVYTRGDAASRKDFVALHMDIQIYEMEQGVYLVDFKCSGYETQDGRLLEEKEVTSPFPFLDRAAKLIMQLAEAD

SEQ ID NO: 2057 - DNA, 1443 bp, Arabidopsis thaliana
  CDS (1)..(1443)
atggcttctcgaacaacgccttcacgatcgactccttcacgatcaacgccttctggtagttcttctggtggtaggacacgagttggtaagtatgagcttggacgaactttgggtgaaggaactttcgctaaggtcaaattcgctagaaatgttgagaatggtgataatgtcgctattaaggttattgataaagagaaagttctgaaaaataagatgatcgctcagatcaagcgtgagatttcgacgatgaaattgatcaagcacccgaatgtcattcgtatgtttgaggtgatggctagcaaaactaagatctacttcgttttggaattcgtcactggtggggagcttttcgataaaatttcaagcaatgggagattgaaggaagatgaggcgaggaagtatttccaacagctgattaatgcggttgattattgtcatagcaggggagtttatcatagagaccttaagccagaaaatttgcttttggatgctaatggtgctttgaaagtgtctgactttggattgagcgctctacctcagcaagaggatgggttacttcacacaacctgtggaacacccaattatgttgctccggaggtaatcaacaacaaaggttatgatggagcgaaggctgatttgtggtcttgtggagtaattctctttgttttaatggctggttatttaccttttgaagattctaacctgacgtcgttatataaaaagatattcaaagcagaatttacttgccctccctggttctctgcaagtgctaagaagttaatcaaaagaattctggatcccaatccagcaacgaggattacatttgctgaggtcattgaaaatgagtggtttaaaaaagggtataaagcacctaaatttgagaatgctgatgtcagccttgatgatgttgatgcaatctttgatgactcaggggagtctaagaatcttgttgtggagaggcgagaagaaggactcaaaacaccagtaacgatgaatgcttttgagctcatctcgacatcccagggtctcaatctcggttcacttttcgaaaaacaaatggggctggtgaaacgaaaaactcgatttacttccaaatcttcggctaatgagatagttacaaaaattgaggctgcggcagcacctatggggtttgatgtcaagacaaataactacaagatgaagctgacaggagagaaatcaggccgcaagggtcagttggcagttgccactgaggtttttcaagttgctccatctctttacatggttgaaatgcgaaaatcagggggtgacacattggaattccacaagttttacaagaaccttaccacgggacttaaggacattgtttggaaaaccatcgacgaagagaaagaggaaggaaccgatggtggtggtactaatggtgccatggctaaccggacaattgcaaaacagtcgacataa

SEQ ID NO: 2058 - protein, 480 aa, Arabidopsis thaliana
MASRTTPSRSTPSRSTPSGSSSGGRTRVGKYELGRTLGEGTFAKVKFARNVENGDNVAIKVIDKEKVLKNKMIAQIKREISTMKLIKHPNVIRMFEVMASKTKIYFVLEFVTGGELFDKISSNGRLKEDEARKYFQQLINAVDYCHSRGVYHRDLKPENLLLDANGALKVSDFGLSALPQQEDGLLHTTCGTPNYVAPEVINNKGYDGAKADLWSCGVILFVLMAGYLPFEDSNLTSLYKKIFKAEFTCPPWFSASAKKLIKRILDPNPATRITFAEVIENEWFKKGYKAPKFENADVSLDDVDAIFDDSGESKNLVVERREEGLKTPVTMNAFELISTSQGLNLGSLFEKQMGLVKRKTRFTSKSSANEIVTKIEAAAAPMGFDVKTNNYKMKLTGEKSGRKGQLAVATEVFQVAPSLYMVEMRKSGGDTLEFHKFYKNLTTGLKDIVWKTIDEEKEEGTDGGGTNGAMANRTIAKQST

SEQ ID NO: 2059 - DNA, 1239 bp, Arabidopsis thaliana
  CDS (1)..(1239)
atgggtttgtttggaacgaagaagatcgggaagtatgagataggaagaacaatcggagaagggaatttcgcaaaagtgaaacttggttacgacacgaccaatggtacttacgtagctgtcaaaatcatagacaaggctttggttattcaaaagggtcttgagtctcaagtcaagagagagatacgaacgatgaagcttcttaaccatcccaacatcgtccaaatacacgaggtgattggaaccaagacaaagatctgtatagttatggaatacgtttcaggtggtcagctttcagacagacttggaagacagaaaatgaaagaatcagatgctagaaaacttttccaacaattgattgatgctgttgattattgtcataacagaggagtttatcatagagatcttaagccacaaaacttgttactagattcaaagggtaatctcaaagtttctgactttggattaagtgcagttcctaaatcgggggatatgctctctacagcttgtggctctccatgttatatagcaccagagttgattatgaacaaaggctactcaggagcagcagtagatgtatggtcttgtggagtgattctatttgaattgcttgctggttatccacctttcgatgatcatacacttccggttttgtataagaagatactcagagcagattacacgttcccacctggattcactggagagcagaagaggctaatctttaacattcttgacccaaatcctctaagtcgtataacactagctgagataatcatcaaagattcttggttcaagataggttatacaccagtttatcatcaactttcagactcaatcaaggacaatgtcgcggagataaatgcagcaaccgcgtcatcaaatttcataaatgcttttcagataatagcaatgtctagtgatctagatttgtcaggtctcttcgaagaaaatgatgataagagatataaaacaagaattgggtccaagaacacagcacaagaaacaatcaagaagattgaagctgcagcaacttatgttagtttatcagttgagagaataaagcacttcaagccaaaggagataagatcaagatcttcttatgacttattatcagcagaggtgatagaggtgactccaacaaattgtgttatagaaatatcgaaatccgcaggcgagttaagactatacatggagttttgccagagcttatcaagcttacttaccgcggaagtaagctaa

SEQ ID NO: 2060 - protein, 412 aa, Arabidopsis thaliana
MGLFGTKKIGKYEIGRTIGEGNFAKVKLGYDTTNGTYVAVKIIDKALVIQKGLESQVKREIRTMKLLNHPNIVQIHEVIGTKTKICIVMEYVSGGQLSDRLGRQKMKESDARKLFQQLIDAVDYCHNRGVYHRDLKPQNLLLDSKGNLKVSDFGLSAVPKSGDMLSTACGSPCYIAPELIMNKGYSGAAVDVWSCGVILFELLAGYPPFDDHTLPVLYKKILRADYTFPPGFTGEQKRLIFNILDPNPLSRITLAEIIIKDSWFKIGYTPVYHQLSDSIKDNVAEINAATASSNFINAFQIIAMSSDLDLSGLFEENDDKRYKTRIGSKNTAQETIKKIEAAATYVSLSVERIKHFKPKEIRSRSSYDLLSAEVIEVTPTNCVIEISKSAGELRLYMEFCQSLSSLLTAEVS

SEQ ID NO: 2061 - DNA, 1371 bp, Arabidopsis thaliana
  CDS (1)..(1371)
atggagaacaaaccaagtgtattaactgaaagatatgaagttgggaggttattgggtcaaggtacttttgctaaagtgtattctggaaggagtaatcataccaacgagagtgtagctatcaagatgattgacaaggacaaagttatgagagtcgggcttagccagcaaatcaagcgagagatctctgtaatgaggatcgctaaacacccgaatgtcgttgagttatacgaggttatggctacaaagtcaaggatttactttgttattgagtattgtaaaggtggtgagcttttcaacaaggttgcaaaaggaaaacttaaagaagatgttgcttggaagtatttttatcagcttattagtgcggttgatttttgtcacagccgcggagtttatcaccgcgacattaagccggaaaatcttttgttggatgacaatgataatcttaaggtatctgattttggtttaagtgcgcttgctgattgcaagcggcaagatggtcttctacatacaacttgtggtacacctgcttatgttgcgcccgaggttattaaccgaaaaggatacgagggtacgaaagcggatatttggtcttgtggtgttgttttgtttgttcttttggctggttatctccctttccatgacactaatcttatggagatgtataggaagataggtaaagcagacttcaagtgtcccagctggtttgctcctgaggtaaagagactattgtgtaagatgttggaccctaaccatgagactagaatcactattgcaaaaatcaaggagagttcttggttcagaaagggtttgcatttgaagcaaaaaaagatggaaaagatggagaaacaacaagtcagagaggctactaatcccatggaagctggaggttcaggccaaaatgaaaacggagaaaaccacgagccgcctcgacttgctaccttgaatgctttcgatatcatcgccttgtctacggggtttggtctggcaggactttttggggatgtatatgacaagcgagaatctaggttcgcgtcgcaaaaacctgcttcagagatcatttctaagctagtagaggttgccaagtgcctgaagctgaagataagaaagcaaggcgcaggcttgttcaaactggaaagagtaaaggaaggaaaaaacggaattttgacgatggatgcagagatattccaagtgacgccgacgtttcacctggtggaagtgaagaaatgtaatggagatacaatggagtatcagaagttagtggaggaggatcttaggcctgctttggcagatattgtttgggtttggcaaggcgagaaggagaaagaggagcagttactgcaggatgaacaaggagagcaagaaccatcatag

SEQ ID NO: 2062 - protein, 456 aa, Arabidopsis thaliana
MENKPSVLTERYEVGRLLGQGTFAKVYSGRSNHTNESVAIKMIDKDKVMRVGLSQQIKREISVMRIAKHPNVVELYEVMATKSRIYFVIEYCKGGELFNKVAKGKLKEDVAWKYFYQLISAVDFCHSRGVYHRDIKPENLLLDDNDNLKVSDFGLSALADCKRQDGLLHTTCGTPAYVAPEVINRKGYEGTKADIWSCGVVLFVLLAGYLPFHDTNLMEMYRKIGKADFKCPSWFAPEVKRLLCKMLDPNHETRITIAKIKESSWFRKGLHLKQKKMEKMEKQQVREATNPMEAGGSGQNENGENHEPPRLATLNAFDIIALSTGFGLAGLFGDVYDKRESRFASQKPASEIISKLVEVAKCLKLKIRKQGAGLFKLERVKEGKNGILTMDAEIFQVTPTFHLVEVKKCNGDTMEYQKLVEEDLRPALADIVWVWQGEKEKEEQLLQDEQGEQEPS

SEQ ID NO: 2063 - DNA, 1395 bp, Arabidopsis thaliana
  CDS (1)..(1395)
atggaaaataagccaagtgttttgactgataaatatgatgttgggaggttattgggtcaaggtacttttgccaaggtgtattatggaaggagtattcttactaaccagagtgttgctatcaagatgatcgataaggaaaaggttatgaaagttgggcttatcgaacagatcaagagagagatctctgttatgaggattgctagacaccctaacgttgtggagctatatgaggtcatggcaacaaaaacgaggatctactttgttatggagtattgtaaaggtggagagcttttcaacaaggttgccaaagggaaattgagagatgatgttgcttggaaatacttttatcagcttatcaacgcagttgatttttgccacagccgagaggtgtatcatcgtgacataaagccggagaacctattgctagatgataatgagaatctcaaggtatctgatttcgggttaagcgcccttgctgactgcaagagacaagatggcctcctccacactacttgtggtacacctgcatatgttgctccagaagtgatcaatcgaaaaggctatgatggcacaaaagcagatatttggtcttgtggtgtggttttgtttgtcctattggcaggctatctacctttccatgactccaatctgatggagatgtacaggaagataggaaaagcagattttaaggcaccaagctggtttgctccagaagtacggaggctgttgtgtaagatgctagaccctaaccctgaaactagaatcaccatcgcaagaatcagggagagttcttggttcagaaaaggtttacatatgaaacagaaaaagatggagaaacgagtcaaagagataaactctgtggaagctggtactgcaggtacaaatgagaacggagcaggtccaagtgagaatggagcagacgaacctacaaatttgaacgcttttgatttaattgccttgtctgctgggtttgatctggcaggactgtttggagatgataacaagagagaatctagattcacatcacagaaacctgcttcagtgatcatatctaagctggaggaagtagcacagcgattgaaactgagcataagaaagcgagaagcaggtttgttcaaattggaacgattaaaagaaggaagaaaagggattctgtcgatggatgcagaaatatttcaagtgacgccaaactttcatttagtggaagtgaagaaatcaaatggagatactctcgagtatcagaaattagtagcagaggatcttagacctgctctgtcagatattgtatgggtttggcagggtgagaaagatgagcttacttcacagcaagagacagaataccaacaacaacaacaacaagaacaacaagaacaggaagaaccattgaagttttga

SEQ ID NO: 2064 - protein, 464 aa, Arabidopsis thaliana
MENKPSVLTDKYDVGRLLGQGTFAKVYYGRSILTNQSVAIKMIDKEKVMKVGLIEQIKREISVMRIARHPNVVELYEVMATKTRIYFVMEYCKGGELFNKVAKGKLRDDVAWKYFYQLINAVDFCHSREVYHRDIKPENLLLDDNENLKVSDFGLSALADCKRQDGLLHTTCGTPAYVAPEVINRKGYDGTKADIWSCGVVLFVLLAGYLPFHDSNLMEMYRKIGKADFKAPSWFAPEVRRLLCKMLDPNPETRITIARIRESSWFRKGLHMKQKKMEKRVKEINSVEAGTAGTNENGAGPSENGADEPTNLNAFDLIALSAGFDLAGLFGDDNKRESRFTSQKPASVIISKLEEVAQRLKLSIRKREAGLFKLERLKEGRKGILSMDAEIFQVTPNFHLVEVKKSNGDTLEYQKLVAEDLRPALSDIVWVWQGEKDELTSQQETEYQQQQQQEQQEQEEPLKF

SEQ ID NO: 2065 - DNA, 1362 bp, Arabidopsis thaliana
  CDS (1)..(1362)
atgagtggaagcagaaggaaggcgacgccggcgagtaggacgcgagtagggaattacgagatgggacgaactctcggagaaggaagcttcgctaaggtgaaatacgccaagaacaccgtcaccggagatcaagccgctatcaaaatcctcgaccgagaaaaggtcttccgtcacaaaatggtcgaacagcttaaaagagaaatatctacaatgaaactgattaaacatccaaatgtggttgaaatcattgaggttatggcgagcaaaacgaagatctatatcgttcttgagcttgtcaatggaggtgaactctttgataaaatcgcgcaacaagggaggcttaaggaggatgaagctcggagatattttcagcagctcatcaatgctgtggattactgccacagtcgaggtgtctaccacagagatctcaagcctgaaaatctgatccttgacgcaaatggggttttgaaagtctctgattttgggttaagcgccttctcacgacaagttcgggaagatggtttgcttcatacagcttgtggaacgccaaactacgttgcccctgaggttttgtcggacaaaggctatgacggtgcagcagcagatgtctggtcttgtggtgtcattctctttgtgcttatggctggttacttgccttttgatgagccgaatctcatgacattatacaaacgtgtacgtatatgcaaggctgagtttagctgcccaccatggttctcgcaaggtgccaagagagtcatcaagcgtattctcgaacccaaccctattaccagaataagtattgcagagttgctcgaagatgaatggttcaagaaagggtacaagccgccatcatttgaccaagatgacgaggacataaccatagatgatgttgatgctgcttttagtaactccaaggaatgtcttgtaactgagaagaaggagaaacctgtatccatgaacgctttcgaacttatctctagctcaagcgagttcagtcttgaaaacttgttcgagaagcaagcgcaacttgtgaagaaagaaacgcggtttacttctcaacgatctgcgagtgaaataatgtcgaaaatggaagaaaccgcaaagccattaggctttaatgtccgtaaagacaactacaagataaaaatgaaaggagacaaaagtggtcgtaaaggtcagctctccgtagctacagaggtgtttgaagtggcgccatcattgcatgtggtagagcttaggaaaaccggtggtgataccctcgagtttcacaaggtatgtgattcgttctacaaaaacttctcatctggattaaaggatgtagtctggaatactgatgcagccgctgaagaacaaaagcaataa

SEQ ID NO: 2066 - protein, 453 aa, Arabidopsis thaliana
MSGSRRKATPASRTRVGNYEMGRTLGEGSFAKVKYAKNTVTGDQAAIKILDREKVFRHKMVEQLKREISTMKLIKHPNVVEIIEVMASKTKIYIVLELVNGGELFDKIAQQGRLKEDEARRYFQQLINAVDYCHSRGVYHRDLKPENLILDANGVLKVSDFGLSAFSRQVREDGLLHTACGTPNYVAPEVLSDKGYDGAAADVWSCGVILFVLMAGYLPFDEPNLMTLYKRVRICKAEFSCPPWFSQGAKRVIKRILEPNPITRISIAELLEDEWFKKGYKPPSFDQDDEDITIDDVDAAFSNSKECLVTEKKEKPVSMNAFELISSSSEFSLENLFEKQAQLVKKETRFTSQRSASEIMSKMEETAKPLGFNVRKDNYKIKMKGDKSGRKGQLSVATEVFEVAPSLHVVELRKTGGDTLEFHKVCDSFYKNFSSGLKDVVWNTDAAAEEQKQ

SEQ ID NO: 2067 - DNA, 1557 bp, Zea mays
  CDS (1)..(1557)
atggccgccatcacgccgccgacgcagtcggagccgtcgccgcagacggggcgcccggcctcgtctgccgccgccgcggccaagcgtggagggggcggggctggtgccgccggcgggccgctgatggggaagtacgagctggggcgcctcctggggcacggcaccttcgcgaaggtgtaccacgcgcggcacgtcgacacgggggacaacgttgccatcaaggtgctcgacaaggagaaggccgtgaagagcgggctcgtcccgcacatcaagcgcgagatcgctgtgctacgccgcgtgcgccacccgaacatcgtgcacctgttcgaggttatggccacaaagactaagatctacttcgtcatggagctcgtccgcggcggcgagctcttctcccgcgtctccaagggccgactcagggaggacaccgcgcgccgctacttccagcagctcgtctccgccgtggggttctgccacgcccgcggcgtcttccaccgcgacctgaagcccgagaatctactcgtcgacgagcaggggaacctcaaggtatcggattttgggctctccgccgtcgccgagcagttccgtcccgacggcctgctccacaccttctgcggcaccgcggcctatgtggcccccgaagtgctcggccgccgcgggtacgacggcgccaaggcagacgtgtggtcgtgcggtgtcatcctctttgtgctcatggccggatatctccctttccatgacaaaaacatcatggccatgtacaagaagatttacaagggcgagttccgctgtgcgaggtggttctccaaagaccttaccagcttgctgatgcgcattcttcacactaatcccaacactcggatcactttgccggagatcatggagtcccgctggttcaagaaaggattcaagcctgtcaagttctatatcgaggatgaccagctgcataacgttatagatgacgaagatggcctgttagatatgggacctgctggtcctgttcctccaccattgccacctccaccgccacctctacctccaccaaaggttgatggtgatgaatcagggtctgactcagactcgtcgatctcatcctgccctgcttcaatgttatctgatgagagccaaaggccccgtggctctctaccacgtccagcaagtcttaatgcctttgatatcatatcattttcaaggggatttaacttatcagggttatttgaggagaaaggggatgaagtgaggttcatctcggctgagcccatgtcagatatcataaccaaattggaggacatagcgaagctgaagagcttcaagttgcggaggaaggactggcgcatctgcctggagggtacaagggaaggagttaaggggccattaacaattggcgcggagatatttgaactcacacctccccttgtaatggtggaggtaaaaaagaaggcaggggataatgaagagtacgagaacttctgtgacaaggaattgaagccagggatgcagcaccttgtccaccatatggtccgagctccaagtatgctgcttactgatgccaagtag

SEQ ID NO: 2068 - protein, 518 aa, Zea mays
MAAITPPTQSEPSPQTGRPASSAAAAAKRGGGGAGAAGGPLMGKYELGRLLGHGTFAKVYHARHVDTGDNVAIKVLDKEKAVKSGLVPHIKREIAVLRRVRHPNIVHLFEVMATKTKIYFVMELVRGGELFSRVSKGRLREDTARRYFQQLVSAVGFCHARGVFHRDLKPENLLVDEQGNLKVSDFGLSAVAEQFRPDGLLHTFCGTAAYVAPEVLGRRGYDGAKADVWSCGVILFVLMAGYLPFHDKNIMAMYKKIYKGEFRCARWFSKDLTSLLMRILHTNPNTRITLPEIMESRWFKKGFKPVKFYIEDDQLHNVIDDEDGLLDMGPAGPVPPPLPPPPPPLPPPKVDGDESGSDSDSSISSCPASMLSDESQRPRGSLPRPASLNAFDIISFSRGFNLSGLFEEKGDEVRFISAEPMSDIITKLEDIAKLKSFKLRRKDWRICLEGTREGVKGPLTIGAEIFELTPPLVMVEVKKKAGDNEEYENFCDKELKPGMQHLVHHMVRAPSMLLTDAK

SEQ ID NO: 2069 - DNA, 1563 bp, Oryza sativa
  CDS (1)..(1563)
atgctgatggcgaccgtctcgccggcgcggagggagccgacgccgcaggcggtgcgggcgtccccgatgccatcggcggcggcggcgttggtgaggagaggcggtggtggtagcggggggacggtgctggggaagtacgagctggggcgcgtcctgggacagggctcgttcgcgaaggtgtaccaggcgaggcacctggagaccgacgagtgcgtggcaatcaaggtgctcgacaaggagaaggccgtgaagggcgggatggtccacctcgtcaagcgcgagatcaacgtgctccgccgggtgcgccacccgaacatcgtgcagctgttcgaggtaatggccagcaagaccaagatctacttcgtcatggagtatgtccgcggcggcgagctcttctcccgcgtctccaagggacgcctcagggaggacaccgcgcggcgctacttccagcagcttgtctccgccgtcgacttctgccacgcccgcggcgtgttccaccgtgacctcaagcccgagaacctcctcgtggatgagaacggggacttgaaggtctcggacttcggcctcgccgccggccccgaccagttcgaccccgacggtctgctccacacgttctgcggcacgccggcctacgtcgcccccgaggtgctcaggcgccgcggatacgacggcgccaaggcggacatatggtcatgcggtgtcatcctctttgcgctcatggccgggtacctccctttccatgaccacaacatcatggttctgtaccggaagatctacaatggggagttcaggtgtccaaggtggttctccaaggattttactagattgataacgcgccttcttgacgcaaaccccaaaactaggatcaccgtgccagagatcattgagagcgattggttcaagaaaggatacaagccagtcaagttttacattgaggatgacaagctctacaacctgtctgatgacgtgctgaacttggagcctgctgatcctgttcccccaccattgggtttggcacctcctgttcctccacctccacaaggggatgatcctgatggttcagggtctgagtcagattcatcagtcgtatcctgcccggccacattgtcaactggggagagccagagagtccgtgggtcactaccacgcccagcaagccttaatgcatttgatatcatatcattctcaaaaggattcaacttgtctgggctgtttgaggagagggggaacgagatcaggtttgtatctggtgagcccatgtctgacattgtaaaaaagctggaggagattgcaaaggtcaagagcttcacagtgcggaggaaggactggcgggtgagcatagagggtacacgcgaaggagttaaggggcctctaaccataggcgcggagatatttgagcttacaccctcccttgtagtagtggaagtaaaaagaaaggcaggtgataatgaagagtatgaggatttctgcaacatggagttgaagccaggaatgcagcaccttgtgcaccagatgctcccagctccaaatggaactcctgtgagtgagaaggttgaaaggtaa

SEQ ID NO: 2070 - protein, 520 aa, Oryza sativa
MLMATVSPARREPTPQAVRASPMPSAAAALVRRGGGGSGGTVLGKYELGRVLGQGSFAKVYQARHLETDECVAIKVLDKEKAVKGGMVHLVKREINVLRRVRHPNIVQLFEVMASKTKIYFVMEYVRGGELFSRVSKGRLREDTARRYFQQLVSAVDFCHARGVFHRDLKPENLLVDENGDLKVSDFGLAAGPDQFDPDGLLHTFCGTPAYVAPEVLRRRGYDGAKADIWSCGVILFALMAGYLPFHDHNIMVLYRKIYNGEFRCPRWFSKDFTRLITRLLDANPKTRITVPEIIESDWFKKGYKPVKFYIEDDKLYNLSDDVLNLEPADPVPPPLGLAPPVPPPPQGDDPDGSGSESDSSVVSCPATLSTGESQRVRGSLPRPASLNAFDIISFSKGFNLSGLFEERGNEIRFVSGEPMSDIVKKLEEIAKVKSFTVRRKDWRVSIEGTREGVKGPLTIGAEIFELTPSLVVVEVKRKAGDNEEYEDFCNMELKPGMQHLVHQMLPAPNGTPVSEKVER

SEQ ID NO: 2071 - DNA, 1266 bp, Arabidopsis thaliana
  CDS (1)..(1266)
atggtgataaagggaatgcgtgttggtaagtacgagcttgggaggacactcggagagggaaattccgcaaaagttaaatttgctatagatactcttaccggcgaatcattcgccatcaaaatcatcgagaagtcgtgtatcacacgtcttaacgtctcttttcagattaagagagagattcgaacactcaaagttttgaagcatccaaacattgtccgattacatgaggtcttggctagcaaaaccaagatttacatggttctggaatgtgtcactggaggagacttatttgacagaattgtctcgaaaggaaagctttcggaaacacaaggacgaaaaatgtttcagcagttgattgatggagtcagctattgtcataacaagggcgtttttcacagggatctcaagctagagaatgttcttcttgatgcaaagggtcacattaagatcactgattttggccttagtgctctgtctcaacattatagggaagatgggttgctacatacaacttgtggtagtcctaactatgtcgcgcctgaggttctagctaatgagggctatgatggtgcagcatcagatatatggtcatgtggagtaatcttgtatgttattcttacgggatgtctcccttttgatgatgcaaaccttgcagttatttgccggaagatattcaaaggggatcccccaatacctagatggatatcactgggagctaaaactatgatcaagagaatgcttgatcctaatccagtcacgagggtgacaatcgcaggtataaaggctcatgattggtttaaacatgactacactccttcaaactacgatgacgacgatgatgtatacttgatccaagaagatgtttttatgatgaaggaatatgaagaagagaagagccctgattctccaaccattatcaacgcttttcagttgattggaatgtcctcgtttctcgacctctcaggtttctttgagacagagaaattatcagagaggcagataagattcacgtcaaatagtttagctaaagatttgttggagaacatcgaaacgattttcacggagatgggcttttgtttacagaagaaacatgcaaagttaaaagcaatcaaagaagaaagcactcaaaaaaggcaatgcggtttatcggtaacggctgaggttttcgagataagtccgtccctgaatgtggttgaactaagaaaatcacatggcgattcgtctctatataaacaggtaatgatgcactcttgtaacattagttga

SEQ ID NO: 2072 - protein, 421 aa, Arabidopsis thaliana
MVIKGMRVGKYELGRTLGEGNSAKVKFAIDTLTGESFAIKIIEKSCITRLNVSFQIKREIRTLKVLKHPNIVRLHEVLASKTKIYMVLECVTGGDLFDRIVSKGKLSETQGRKMFQQLIDGVSYCHNKGVFHRDLKLENVLLDAKGHIKITDFGLSALSQHYREDGLLHTTCGSPNYVAPEVLANEGYDGAASDIWSCGVILYVILTGCLPFDDANLAVICRKIFKGDPPIPRWISLGAKTMIKRMLDPNPVTRVTIAGIKAHDWFKHDYTPSNYDDDDDVYLIQEDVFMMKEYEEEKSPDSPTIINAFQLIGMSSFLDLSGFFETEKLSERQIRFTSNSLAKDLLENIETIFTEMGFCLQKKHAKLKAIKEESTQKRQCGLSVTAEVFEISPSLNVVELRKSHGDSSLYKQVMMHSCNIS

SEQ ID NO: 2073 - DNA, 1389 bp, Mesembryanthemum crystallinum
  CDS (1)..(1389)
atgggggaacaagaattgcttttgcagcagcaaatcaaggaagacaggaatgtgagtagggagacagagatgaagcatcctgcgctccaaggcaaatacgagctcgggagggtgttgggccaaggcacctttgctcgtgtctaccacgctcgcaacctggttaccggcaacagcctcgccatcaaggttgttgccaaggacaaggtcattaaagttgggatgatggagcagatgaagagagagattagcgtcatgaagagggtcaaacatcctaacattgtccaactccacgaggtcatggccagcaaatcaaagatctacctggctatggacctcgttcgcggcggcgagctattctccaaggtttccaaagggggcaagcttgacgaggacgtcgctcgatcctatttcaagcagctcatctccgctgtcgatttctgccacagccgaggcgtctaccaccgcgacctcaagcccgaaaacctgctcctggacgaacacggcaacctcaagatcaccgatttcggcctcagcgcctccttcgaaaacgaggaccatcaccagactctgctgcgtacaagctgcggcacccctcattatgtggcacctgaggtcatcagcaggaaagggcagcaggggtatcacggtgccaagtccgacatctggtcctgtggcatcatcctcttcgtcctcctcgccggcttcctcccttttcacgatgataacatcatcaggatgtaccgcaaggtcttcaagggggatttcacctgcccttcctggctctcctctcaggctcgggatctcatcacccgcttgctcgatatcaaccctgccacccgaatcactgtctccgaaattatgcaatccgattggtactgcatggacactagtagtatgaccgctgtcacaaccgacgagttcgatcttgatcacaacaacaacaacaacaacaacagcaactacaacaatattcatcatcacaagaaggagccagagatgttgaatgctttccacatcatatccctatcacaagggttcgacctgtctcccctcttcgaggagaagcacagggaggagagacaagatatgagatttgcaaccaccaagtcagcaagcacggtcgtgtcgaggctggaggaagtggctgccaaggctggcaagttcatcgtcaaaaagttctgtggggactcggtggtcaggctgcaggggcaggagcgaggcaggaaaggcaagctggccattgcagccgagattatgtcggtatcaccatcgctcctggtggtggaggtgaagaaagataacggagacactcttgagtacaaccaattctgcaccaagcagcttcgccccgctcttaaggatatcgtttggacctgcccctcttcttaa

SEQ ID NO: 2074 - protein, 462 aa, Mesembryanthemum crystallinum
MGEQELLLQQQIKEDRNVSRETEMKHPALQGKYELGRVLGQGTFARVYHARNLVTGNSLAIKVVAKDKVIKVGMMEQMKREISVMKRVKHPNIVQLHEVMASKSKIYLAMDLVRGGELFSKVSKGGKLDEDVARSYFKQLISAVDFCHSRGVYHRDLKPENLLLDEHGNLKITDFGLSASFENEDHHQTLLRTSCGTPHYVAPEVISRKGQQGYHGAKSDIWSCGIILFVLLAGFLPFHDDNIIRMYRKVFKGDFTCPSWLSSQARDLITRLLDINPATRITVSEIMQSDWYCMDTSSMTAVTTDEFDLDHNNNNNNNSNYNNIHHHKKEPEMLNAFHIISLSQGFDLSPLFEEKHREERQDMRFATTKSASTVVSRLEEVAAKAGKFIVKKFCGDSVVRLQGQERGRKGKLAIAAEIMSVSPSLLVVEVKKDNGDTLEYNQFCTKQLRPALKDIVWTCPSS

SEQ ID NO: 2075 - DNA, 1062 bp, Arabidopsis thaliana
  CDS (1)..(1062)
atggacaagtatgacgttgtcaaggatctgggagctggaaatttcggtgtggctcgccttctcaggcacaaggacaccaaagagcttgttgccatgaaatacatcgagagaggtcgcaagatagatgagaacgtggcgagagagattattaatcacagatcacttaaacatcctaatatcatccggttcaaggaggtgatcctgacacctactcatcttgctattgtgatggagtatgcttctggaggagagctctttgatcgaatctgtactgccggtagatttagtgaagctgaggctaggtacttctttcaacagctgatttgtggtgttgattactgccattccttgcaaatatgtcatagagacctgaagcttgagaacacactgctcgatgggagccctgctccgcttttgaaaatctgtgattttggttactctaagtcatctatactacattctaggcctaaatcaactgttggaactccagcttacatagcacctgaagttctttcacggagagaatatgatggcaagcacgcggatgtgtggtcatgtggagtaaccctttatgtgatgctggtgggagcttacccgtttgaggaccctaatgatccaaaaaacttcaggaaaacaatccagcgcataatggctgtacaatacaagatcccggactatgttcacatatctcaggaatgcaaacatcttctctctcgcatattcgtcactaactctgctaagagaatcacacttaaggagatcaagaatcatccgtggtacttgaagaatttgccaaaggagctgctagagtcggctcaagcggcgtattacaagagagacacaagcttctctcttcaaagcgtagaggacataatgaagatagttggagaagcaaggaatccagctccatcaactagtgctgtcaaaagctcgggctcaggagctgatgaagaagaggaagaggacgttgaagctgaagtggaagaggaagaagatgatgaagacgaatacgagaagcatgtcaaagaggcacagtcttgtcaagagtctgacaaagcttaa

SEQ ID NO: 2076 - protein, 353 aa, Arabidopsis thaliana
MDKYDVVKDLGAGNFGVARLLRHKDTKELVAMKYIERGRKIDENVAREIINHRSLKHPNIIRFKEVILTPTHLAIVMEYASGGELFDRICTAGRFSEAEARYFFQQLICGVDYCHSLQICHRDLKLENTLLDGSPAPLLKICDFGYSKSSILHSRPKSTVGTPAYIAPEVLSRREYDGKHADVWSCGVTLYVMLVGAYPFEDPNDPKNFRKTIQRIMAVQYKIPDYVHISQECKHLLSRIFVTNSAKRITLKEIKNHPWYLKNLPKELLESAQAAYYKRDTSFSLQSVEDIMKIVGEARNPAPSTSAVKSSGSGADEEEEEDVEAEVEEEEDDEDEYEKHVKEAQSCQESDKA

SEQ ID NO: 2077 - DNA, 1599 bp, Daucus carota
  CDS (1)..(1599)
atgggaggttgtttcagcaagaaagagtatcaagcagatggtaatgggtatagatcagctcccactgcttaccatactgttactgaccaaagctatgaaaagtcatctcaaaggtctcagcctcaggctcagccacagcctcaggttcagcaaacagggccttcacttaagcccaggcaagttcatagacctgagtcaaacactattttaggcaagccatttgaagatattaggggtaagtatactcttgggaaagaattgggcaggggtcaatttggttgtgtatatcaatgtactgagaattcaagtggtcaattatatgcttgtaagtctattttaaagagaaagcttgttagtaagaatgataaggaggatataaagagggagattcagattttgcagcatttgagtgggcaaccgaatattgtggagtttaaaggtgtttttgaggataggcaatctgtgcaccttgtgatggagctttgtgctggtggggagttgtttgacaggattatagctcaaggacattactcggagagagcggctgctacgatttgtaggcagattgtgaatgttgtccatgtttgtcattttatgggggtgatgcatagggatcttaagcctgaaaatttcttgctttcgagtaaggataaagatgcaatgctgaaggcgactgatttcgggttatctgtcttcattgaagaaggaaaggtatatcgtaatatagttggtagtgcttactatgttgctcctgaagtactacgacgtagttatggaaaggagattgatatctggagcgctggagttattttgtatatactacttagcggggtacctccattttgggcagagaatgaaaaaggaatatttgatgcaatactggaaggagtgattgactttgaaagtgaaccatggccatcagtctcaaacagtgcaaaagaccttgttagaaagatgctgacacaggatccaaggagaaggattacttctgcacaagttcttgatcatccctggatgagagaaggtggagaagcatcagacaagccaatagatagtgcagtcctctctagaatgaagcagttcagagcaatgaacaagctcaaacaacttgcacttaaggtcatcgctgaaagtctatccgaggaagaaattaaaggtcttaaatccatgtttgcaaacatggacacggacaaaagtggtacaatcacttatgaggaattgaaatcaggtttggcacggctaggctcaaagctatcagaagtggaggtccaacaattgatggatgctgctgatgtagatggaaatggtacaattgactaccttgaatttattactgctactatgcataggcacaagcttgaaagttatgagcatcaagcatttcagtattttgacaaggataatagcggcttcattactaaagatgaactggaatctgcaatgaaagagtatggaatgggtgacgaagccactatcaaggacataatctctgaagtagattcagataatgatggaaggattaattacgatgagttctgtgcgatgatgagaagggcacgcaacagaaggaagctttttagtgtctcgctaacctcttag

SEQ ID NO: 2078 - protein, 532 aa, Daucus carota
MGGCFSKKEYQADGNGYRSAPTAYHTVTDQSYEKSSQRSQPQAQPQPQVQQTGPSLKPRQVHRPESNTILGKPFEDIRGKYTLGKELGRGQFGCVYQCTENSSGQLYACKSILKRKLVSKNDKEDIKREIQILQHLSGQPNIVEFKGVFEDRQSVHLVMELCAGGELFDRIIAQGHYSERAAATICRQIVNVVHVCHFMGVMHRDLKPENFLLSSKDKDAMLKATDFGLSVFIEEGKVYRNIVGSAYYVAPEVLRRSYGKEIDIWSAGVILYILLSGVPPFWAENEKGIFDAILEGVIDFESEPWPSVSNSAKDLVRKMLTQDPRRRITSAQVLDHPWMREGGEASDKPIDSAVLSRMKQFRAMNKLKQLALKVIAESLSEEEIKGLKSMFANMDTDKSGTITYEELKSGLARLGSKLSEVEVQQLMDAADVDGNGTIDYLEFITATMHRHKLESYEHQAFQYFDKDNSGFITKDELESAMKEYGMGDEATIKDIISEVDSDNDGRINYDEFCAMMRRARNRRKLFSVSLTS

SEQ ID NO: 2079 - DNA, 1335 bp, Arabidopsis thaliana
  CDS (1)..(1335)
atggtgagaaggcaagaggaggagaagaaggcggagaagggaatgcgtctggggaaatacgagctagggaggacgctcggcgagggtaatttcggtaaagttaaattcgctaaagataccgtctccggtcattccttcgccgttaaaatcatcgacaagtctcgtatcgccgatctcaacttctccttacagataaaaagagagatccggactctgaaaatgttgaaacatccccacattgttagattacatgaggtcttggctagcaaaacgaaaattaatatggtaatggaacttgttaccggaggagaattgttcgacagaattgtttccaacggaaaattaacagaaactgatggaagaaaaatgtttcagcagcttatcgatggaatcagctactgtcatagcaaaggtgttttccacagggatctcaagctagagaatgttcttcttgatgcaaagggacatataaagatcactgattttggcctcagtgctctgcctcagcattttagggatgacggattgttgcatacaacctgtggaagtcctaattacgttgcgcctgaggttttagctaacagaggctacgatggtgcagcatcagacatatggtcctgtggtgtaatcttgtatgtgattctaaccggatgtcttcctttcgacgacagaaaccttgcagttctttaccagaagatatgtaaaggagacccaccaataccaagatggttatccccgggtgcaagaaccatgattaagagaatgcttgatccaaatccagtcacgaggatcacagttgtgggtattaaagccagcgagtggttcaaacttgagtacattccttcaattcccgatgatgatgacgaagaagaagttgacacagacgatgatgctttctcaatccaagaactcggatcagaagaagggaagggcagtgattcaccgaccatcatcaatgcgtttcagttaatcggaatgtcttcctttcttgacctgtccggtttctttgaacaagagaatgtatcagagaggagaataagattcacttcaaatagctcagcaaaagatttactggagaaaatcgaaacagccgttacagaaatgggattcagtgtacaaaagaaacatgccaagttaagagtaaaacaagaagaaagaaaccagaaaggtcaagttggtttatcagtaacagctgaggttttcgagataaagccgtcactgaacgtggttgagctaagaaaatcttatggcgattcatgtttatatagacagttgtacgagagactattaaaagacgtgggcacatcctcgccggagcaagagatagtaacttag

SEQ ID NO: 2080 - protein, 444 aa, Arabidopsis thaliana
MVRRQEEEKKAEKGMRLGKYELGRTLGEGNFGKVKFAKDTVSGHSFAVKIIDKSRIADLNFSLQIKREIRTLKMLKHPHIVRLHEVLASKTKINMVMELVTGGELFDRIVSNGKLTETDGRKMFQQLIDGISYCHSKGVFHRDLKLENVLLDAKGHIKITDFGLSALPQHFRDDGLLHTTCGSPNYVAPEVLANRGYDGAASDIWSCGVILYVILTGCLPFDDRNLAVLYQKICKGDPPIPRWLSPGARTMIKRMLDPNPVTRITVVGIKASEWFKLEYIPSIPDDDDEEEVDTDDDAFSIQELGSEEGKGSDSPTIINAFQLIGMSSFLDLSGFFEQENVSERRIRFTSNSSAKDLLEKIETAVTEMGFSVQKKHAKLRVKQEERNQKGQVGLSVTAEVFEIKPSLNVVELRKSYGDSCLYRQLYERLLKDVGTSSPEQEIVT

SEQ ID NO: 2081 - DNA, 1266 bp, Arabidopsis thaliana
  CDS (1)..(1266)
atggagaagaaaggatctgtgttgatgctccgttatgaggttgggaagtttctcggtcaaggtacctttgctaaggtataccatgctaggcatttgaaaactggtgatagtgtagcgattaaggtcatcgacaaagaaagaatcctcaaagttggcatgaccgagcagattaagcgagagatctctgccatgagactcttgaggcatcccaacatcgttgagctccatgaagtcatggccaccaaatctaaaatctacttcgtcatggaacatgttaagggtggtgagctcttcaacaaagtgtcaactgggaagctgagagaagacgttgcgagaaagtactttcagcagcttgtacgcgctgttgacttctgtcacagccgtggagtatgccacagggacctgaagccggagaatctcttgttggatgagcatgggaatcttaagatctctgattttggtctcagcgctctttctgactctagaaggcaagacgggttgctgcatactacatgcgggacccctgcatatgttgcaccggaggtgataagcaggaacgggtatgatgggtttaaagcggatgtgtggtcctgtggagtgatattgttcgtcttgctcgctggatatcttcctttccgtgattccaatctgatggagctgtataagaagataggcaaagctgaagtcaagttccccaactggcttgctccgggggcaaagagattgctcaagaggatcttggatcctaaccccaacacaagggtatcaactgagaaaataatgaagagctcttggttccgtaaaggcctacaagaggaggtgaaagaatcagttgaggaagagacagaagtggacgcagaggcagagggaaacgcaagtgcagagaaggaaaagaagcggtgtatcaacctgaacgcgtttgagatcatatctctgtccacggggtttgatctctcgggactgttcgagaagggagaggagaaggaggagatgaggtttacatcaaacagagaggcatctgagataacagagaagctggtggagattgggaaggaccttaagatgaaagtgaggaagaaggaacacgaatggagggtgaaaatgtcggctgaggctacagtggtggaagcggaagtgtttgagattgcgccgagctatcacatggtggtgctaaagaagagcggtggagatactgctgagtataagagagtcatgaaggagagtataagaccggctttgatcgactttgtattagcttggcactga

SEQ ID NO: 2082 - protein, 421 aa, Arabidopsis thaliana
MEKKGSVLMLRYEVGKFLGQGTFAKVYHARHLKTGDSVAIKVIDKERILKVGMTEQIKREISAMRLLRHPNIVELHEVMATKSKIYFVMEHVKGGELFNKVSTGKLREDVARKYFQQLVRAVDFCHSRGVCHRDLKPENLLLDEHGNLKISDFGLSALSDSRRQDGLLHTTCGTPAYVAPEVISRNGYDGFKADVWSCGVILFVLLAGYLPFRDSNLMELYKKIGKAEVKFPNWLAPGAKRLLKRILDPNPNTRVSTEKIMKSSWFRKGLQEEVKESVEEETEVDAEAEGNASAEKEKKRCINLNAFEIISLSTGFDLSGLFEKGEEKEEMRFTSNREASEITEKLVEIGKDLKMKVRKKEHEWRVKMSAEATVVEAEVFEIAPSYHMVVLKKSGGDTAEYKRVMKESIRPALIDFVLAWH

SEQ ID NO: 2083 - DNA, 1341 bp, Arabidopsis thaliana
  CDS (1)..(1341)
atgacaaagaaaatgagaagagtgggcaagtacgaggttggtcgcacaataggtgaaggaacctttgctaaggttaagtttgcgaggaacacagacactggtgataatgtagccatcaaaattatggctaagagtacaatacttaagaacagaatggttgatcagataaaaagagagatatctataatgaagattgttcgtcacccgaacatagtgaggttgtatgaggtgttggcgagtccttcgaaaatatatatagttttggagtttgtgacaggaggagagctctttgatagaattgttcataaagggaggcttgaagaaagtgagtctcggaaatactttcaacagcttgtagatgctgttgctcattgtcactgcaagggtgtttaccaccgtgacctaaagccagaaaatcttttactcgatacaaatggaaatctgaaggtttcggatttcggactcagtgcattgcctcaggaaggagtagaacttctgcgtaccacatgtggaactccgaactatgtagctccagaggtacttagtggacagggttacgatggttcagcagctgatatttggtcttgcggggttattcttttcgttatattggctggatatttacctttttccgagacggatcttccagggttgtacagaaaaataaatgcagcagagttttcttgtccaccgtggttttccgcagaagtgaagtttttaatacataggatacttgaccccaatcccaaaacacgtattcaaattcaaggaatcaagaaagatccttggttcagattaaattatgtgcctatacgagcaagggaagaagaagaagtgaatttggatgatattcgtgcagtttttgatggaattgagggcagttatgtagcggagaatgtagagagaaatgatgaagggcccctgatgatgaatgcctttgagatgattaccttatcacaaggcttaaatttatctgcactatttgacaggcgacaggattttgttaaaaggcaaacccgttttgtttctcgaagggaacctagtgagataattgctaacattgaggctgtagcgaactcaatgggttttaagtctcatacacgaaacttcaagacaaggctcgagggattatcttcgatcaaggccggacagttagctgttgtgatagagatttacgaggtggcaccatcgcttttcatggtagacgtaagaaaggctgctggtgaaactcttgaatatcacaagttctacaagaagctatgttcgaaactggaaaacataatatggagggcaacagaaggaataccaaagtcagagattctcagaacaatcacgttttga

SEQ ID NO: 2084 - protein, 446 aa, Arabidopsis thaliana
MTKKMRRVGKYEVGRTIGEGTFAKVKFARNTDTGDNVAIKIMAKSTILKNRMVDQIKREISIMKIVRHPNIVRLYEVLASPSKIYIVLEFVTGGELFDRIVHKGRLEESESRKYFQQLVDAVAHCHCKGVYHRDLKPENLLLDTNGNLKVSDFGLSALPQEGVELLRTTCGTPNYVAPEVLSGQGYDGSAADIWSCGVILFVILAGYLPFSETDLPGLYRKINAAEFSCPPWFSAEVKFLIHRILDPNPKTRIQIQGIKKDPWFRLNYVPIRAREEEEVNLDDIRAVFDGIEGSYVAENVERNDEGPLMMNAFEMITLSQGLNLSALFDRRQDFVKRQTRFVSRREPSEIIANIEAVANSMGFKSHTRNFKTRLEGLSSIKAGQLAVVIEIYEVAPSLFMVDVRKAAGETLEYHKFYKKLCSKLENIIWRATEGIPKSEILRTITF

SEQ ID NO: 2085 - DNA, 1863 bp, Candida albicans
  CDS (1)..(1863): transl_table=12
atgtcagagcaagctcaacctcaggcatctgctgatcaacagcaacaccaacataatcaccaccaccatcatcatcatcaccatcataatgaaaatcaatcgcaacagcaagttccgatcgaccccgctgcaaatccagcaaatagaatagggcggtatcaaattctcaagacattaggtgaagggtcatttggtaaagtgaaattggctcaacacttgggcacaggtcaaaaagttgctttgaaaatcattaatcggaaaacattagccaagtctgacatgcagggtcgtgttgaaagagagatttcatatttaagattattgagacacccacatatcattaaattatacgatgtcataaaatccaaagatgaaatcattatggttattgaatttgccggtaaagaattgtttgattatattgttcaaagaggtaaaatgccagaagacgaagccagaagatttttccaacaaattattgctgctgtagagtattgccatcgtcacaaaattgtccatcgtgatttaaagccagaaaacttattgttagacgaccagttgaatgttaaaattgctgattttgggttatccaatatcatgaccgatggtaatttcttaaagacatcttgtggatctcctaattatatgcccgctccggaagttatttctggtaagttgtatgctggtccagaagttgatgtttggtcagcaggggttattttgtatgtcatgttgtgtggtagattaccattcgatgacgagttcatccccgccttatttaaaaagatcagtaatggtgtttacactttgcctaattatttgagtgctggagctaagcatttgttgacaagaatgctcgttgttaacccattgaacagaatcaccatccatgaaattatggaagatgactggtttaaacaagatatgccagattatttgttaccaccagatttatccaaaaacaagaatagcaagattgacgttgatgaagatgttatccgtgcattatcggtgacgatgggatatgaccgtgattgcaaaatcgttaatgtaattgaaaaggcaaacaaacaagttgctgcaggaaactcatcgtctcagcaatcgaaatcaagtaatgagatattagatgcctatttattaatgaaagagaatcatgcattggtgaaagacttgaaaaagagtaaatcagaaaacattgaatcattcttatcccaatctccaccaccaagtccattccctaacagaggatcaacaagctcggctcctggtgtgcagcaatctttaacttatcaaacattagctacagtgcctgacttgtcaacgttaccaaattcgaccattgccatattaccaaccagtttgccttcgatacatcgagcctatatggccgaaactaaacagaatggtgatcctctgcaacaacatgctcctcctccaactaagaagctgaaaacaagatggcattttggaatcagatcaagatcatatcctctagatgtaatgggagaaatttatcgtgccttaaagaatttgggcgcggaatgggccaagcctactgaagaagagttatggacaataagagtaagatggaaatatgacactagtgcacaatttgaatgtggcagtgcaccaaatttgatgaagatgcaaatccaattattccaattggaaccaaataactatttagttagtttcaaatttagtggttgggaactggcacatggaaatgcaggtaccgattctcctcaaagtcacagacaacaagacctagatgaagttgggtcattctctgcttatcctttcttacatttagctactagattaattatggaattagccgtaaatagtcaaagtggataa

SEQ ID NO: 2086 - protein, 620 aa, Candida albicans
MSEQAQPQASADQQQHQHNHHHHHHHHHHNENQSQQQVPIDPAANPANRIGRYQILKTLGEGSFGKVKLAQHLGTGQKVALKIINRKTLAKSDMQGRVEREISYLRLLRHPHIIKLYDVIKSKDEIIMVIEFAGKELFDYIVQRGKMPEDEARRFFQQIIAAVEYCHRHKIVHRDLKPENLLLDDQLNVKIADFGLSNIMTDGNFLKTSCGSPNYMPAPEVISGKLYAGPEVDVWSAGVILYVMLCGRLPFDDEFIPALFKKISNGVYTLPNYLSAGAKHLLTRMLVVNPLNRITIHEIMEDDWFKQDMPDYLLPPDLSKNKNSKIDVDEDVIRALSVTMGYDRDCKIVNVIEKANKQVAAGNSSSQQSKSSNEILDAYLLMKENHALVKDLKKSKSENIESFLSQSPPPSPFPNRGSTSSAPGVQQSLTYQTLATVPDLSTLPNSTIAILPTSLPSIHRAYMAETKQNGDPSQQHAPPPTKKSKTRWHFGIRSRSYPLDVMGEIYRALKNLGAEWAKPTEEELWTIRVRWKYDTSAQFECGSAPNLMKMQIQLFQLEPNNYLVSFKFSGWESAHGNAGTDSPQSHRQQDLDEVGSFSAYPFLHLATRLIMELAVNSQSG

SEQ ID NO: 2087 - DNA, 1839 bp, Candida glabrata
  CDS (1)..(1839)
atggagaacaaggagcatcatcaccaccaccatcaccaccatcaccaccattctaatgggtcctatgtgagcaacaaggtgtcctcgctggctgatggttctcgtgttggtaattaccaaattgtgaagacgcttggagaaggttcctttggtaaagtgaagctggcataccatgtaaccactgggcagaaagtggcattgaagatcattaacaagaaagtgttggccaagtctgatatgcaaggccgtattgagcgtgagatatcgtacctgaggttgctgagacacccacatatcatcaaactgtatgatgtcatcaagtctaaggacgaaattatcatggttatcgagtatgcaggcaatgagttgttcgattacattgtgcagaggaataagatgagtgagcaggaggccaggaggttcttccagcagattatcagtgcagtagagtactgccacagacataagattgtacatagagacttgaagccggagaacttgttgttggacgaacacttgaatgtcaagattgccgatttcggtttgtctaatatcatgacagatggtaacttcttgaagacttcttgtggttcaccaaattacgcggcaccagaggttattagtgggaaactgtatgcaggtcctgaagtcgatgtgtggtcctgcggtgtcattttatatgtcatgctttgtcgtcgtttgcccttcgatgatgaaagcattccagtgttgttcaagaacattagcaacggtgtctacactttgccaaagtttttgtcacctggagcttctgatcttattaagagaatgcttattgttaacccattgaacagaataagtatccatgaaataatgcaggatgaatggttcaaagttgatctggcagagtatttagtcccacaggatttgaaacagcaagaacagttcaacaaaaagtcaggaaatgaagaaaatgtggaagagattgacgacgaaatggttgttactctatcgaagaccatgggatatgataaggatgaaatttacgaagccttggaatcctctgaagatacaccagcttataacgagataagaaatgcatacattctgattaaggacaacaagtctttgatcaaggacatgaagcaagataataatgtaacacaagaactggatacgttcctttcgcaatctcctccaacattccagcagaatggtgatggtatgaaggcatcggaagatcaaaagaaaaaacacagtgggagaagacttgcttcttcggtaactcagcaaaggacgttccaccaacctccgtttatggaccaatcaaaggaagaggactccacaatctctattcttccaacctctttaccacaaatccaccgtgcaaatatgctggcacaaggcttgccggctgcttccaagatatcacctttggtaaccaaaaaatcaaagacaagatggcattttggtatacgatcccgttcctacccattagatgtgatgggtgagatttatattgcattaaagaaccttggtgcagagtgggcaaagccttctgaagaagacctatggactatcagggtgagatggaagtatgattcagatgaatccagacttatcgaagatggtgttaagaaaattccaaacctaatgaaaattgtaattcaattgtttcaaatagaaactaataactacttagttgacttcaagtttgacggttgggagagtacttacggtgactcaactatttcaaccaatatgtctgaggatgagatgagtaccttttcggcatacccattcttgcatttgacaactaaacttatcatggaattggctgtaaacagtcaaggaaactag

SEQ ID NO: 2088 - protein, 612 aa, Candida glabrata
MENKEHHHHHHHHHHHHSNGSYVSNKVSSLADGSRVGNYQIVKTLGEGSFGKVKLAYHVTTGQKVALKIINKKVLAKSDMQGRIEREISYLRLLRHPHIIKLYDVIKSKDEIIMVIEYAGNELFDYIVQRNKMSEQEARRFFQQIISAVEYCHRHKIVHRDLKPENLLLDEHLNVKIADFGLSNIMTDGNFLKTSCGSPNYAAPEVISGKLYAGPEVDVWSCGVILYVMLCRRLPFDDESIPVLFKNISNGVYTLPKFLSPGASDLIKRMLIVNPLNRISIHEIMQDEWFKVDLAEYLVPQDLKQQEQFNKKSGNEENVEEIDDEMVVTLSKTMGYDKDEIYEALESSEDTPAYNEIRNAYILIKDNKSLIKDMKQDNNVTQELDTFLSQSPPTFQQNGDGMKASEDQKKKHSGRRLASSVTQQRTFHQPPFMDQSKEEDSTISILPTSLPQIHRANMLAQGLPAASKISPLVTKKSKTRWHFGIRSRSYPLDVMGEIYIALKNLGAEWAKPSEEDLWTIRVRWKYDSDESRLIEDGVKKIPNLMKIVIQLFQIETNNYLVDFKFDGWESTYGDSTISTNMSEDEMSTFSAYPFLHLTTKLIMELAVNSQGN

SEQ ID NO: 2089 - DNA, 1860 bp, Candida tropicalis
  CDS (1)..(1860): transl_table=12
atgtcggagcagaatcaaggacagcccgatcagcagcacagcggtgaccaccaacaccatcatcaccaccaccaccaccaccaccactcgcagcagccagcgcagcctattccaatcgacccaaatgtgaaccctgccaacaggataggtaggtaccagatcatcaagaccttgggtgagggttctttcggtaaggtcaagttggcccagcatgtgggcaccggccagaaggttgctttgaagatcatcaaccgtaagacgttggccaagtcggacatgcagggccgtgtcgagagagagatttcgtatttgagattattgagacacccacatattatcaagttgtatgatgttataaagtcaaaggacgagatcattatggttattgagtttgctggtaaggagttgtttgattatattgttcagagaggtaagatgccggaggatgaagctagaagattcttccaacagattatagcagctgttgagtactgtcatcgtcacaagattgtgcatcgtgatttgaagccagagaacttgttgttggacgatcaattgaatgtcaagattgccgatttcggtttgtcgaatatcatgaccgatggtaacttcttgaagacgagttgtggttctccaaattacgcggctcctgaagtcatttctggtaagttgtatgctggtccggaagttgacgtctggtcatcgggtgttatcttgtatgttatgttgtgtggtagattgccattcgacgacgagttcattcctgctttgttcaagaagatcagtaatggtgtttacacgttgccaaactacttgagtcctggtgccaagcacttgttgacgagaatgcttgttgtgaacccattgaatagaatcacaattcacgagatcatggaagatgaatggttcaagcaagacatgccagattacttgttgccaccagacttgtccaagatcaagaccagcaagattgatatcgacgaagacgttattagtgcgttgtcggtcaccatgggttacgaccgtgatgaaattatttccgtgattgaaaaagccaacagagaagcagctgctggtggagcaactccaacaaaccaatctaaatctaccaacgaagtcttggatgcctatttgttgatgaaggagaaccataccttagttaaagacttgaagaagagcaagtcagagaatatcgaatccttcttgtcgctgtcaccaccgccaagctcatcgttcccaaaccctggttctacaagttctgctcctggcgtacaacaatcgttgacttaccaaacattagcaactgttccagacttgtctactttgcctaactccaccattgctatattaccaaccagtttgccatccattcaccgtgcatatatgatggagaccaaggtgaatgaccctcaacaacagataccggccccacaaccaaccaagaagctgaaaacgagatggcattttggtatcagatccaggtcgtacccactagatgttatgggtgaaatataccgtgcattgaagaatttgggtgctgaatgggccaagcctacagaagaagagttgtggacaataagagtgagatggaagtacgactctacgccgcagttacgagtgtggcaacgcacaaacttgatgaagatgcaaatccaattgttccagttggagccaaacaactacttggttgatttcaagtttgacgggtgggaacaaacaagcgacgagagcaagaacgacgcctctctggattacaagcaacaagacttggacgaagttggttcgttctctgcctacccattcttgcatttggccactagattaattatggagttggcagtgaatagccagagcgggtag

SEQ ID NO: 2090 - protein, 619 aa, Candida tropicalis
MSEQNQGQPDQQHSGDHQHHHHHHHHHHHSQQPAQPIPIDPNVNPANRIGRYQIIKTLGEGSFGKVKLAQHVGTGQKVALKIINRKTLAKSDMQGRVEREISYLRLLRHPHIIKLYDVIKSKDEIIMVIEFAGKELFDYIVQRGKMPEDEARRFFQQIIAAVEYCHRHKIVHRDLKPENLLLDDQLNVKIADFGLSNIMTDGNFLKTSCGSPNYAAPEVISGKLYAGPEVDVWSSGVILYVMLCGRLPFDDEFIPALFKKISNGVYTLPNYLSPGAKHLLTRMLVVNPLNRITIHEIMEDEWFKQDMPDYLLPPDLSKIKTSKIDIDEDVISALSVTMGYDRDEIISVIEKANREAAAGGATPTNQSKSTNEVLDAYLLMKENHTLVKDLKKSKSENIESFLSLSPPPSSSFPNPGSTSSAPGVQQSLTYQTLATVPDLSTLPNSTIAILPTSLPSIHRAYMMETKVNDPQQQIPAPQPTKKLKTRWHFGIRSRSYPLDVMGEIYRALKNLGAEWAKPTEEELWTIRVRWKYDSTPQLRVWQRTNLMKMQIQLFQLEPNNYLVDFKFDGWEQTSDESKNDASLDYKQQDLDEVGSFSAYPFLHLATRLIMELAVNSQSG

SEQ ID NO: 2091 - DNA, 1536 bp, Oryza sativa
  CDS (1)..(1536)
atggcgcggatggggatcagcaagggaggcagcggcaaggaggcgaagaagccgccgctgctgctggggcgattcgaggtcgggaagctgctggggcagggcaacttcgccaaggtgtaccacgcgcgcaacgtggccaccggcgaggaggtggcgatcaaggtgatggagaaggagaagatcttcaagtcggggctcacggcgcacatcaagcgggagatcgccgtgctccggcgcgtccgccacccgcacatcgtgcagctgtacgaggtgatggccaccaagctccggatctacttcgtcatggagtacgtccgcggcggcgagctgttcgcgcgcgtggcgcgggggcggctgcccgaggccgacgcgcggcgctacttccagcagctggtgtccgccgtcgcgttctgccacgcgcgcggggtgttccaccgcgacatcaagccggagaacctcctcgtcgacgacgccggcgacctcaaggtgtccgacttcgggctctccgcggtggcggacgggatgcggcgcgacgggctgttccacacgttctgcggcacgccggcgtacgtcgcgccggaggtgctgtcgcgccgcgggtacgacgccgccggggccgacctctggtcctgcggcgtcgtgctcttcgtcctcatggccggctacctccccttccaggaccgcaacctcgccggcatgtaccgcaagatccacaagggcgacttccgctgccccaagtggttctcgccggagctcatccgcctcctccgcggcgtcctcgtcaccaacccgcagcgccgcgccaccgccgaggggatcatggagaacgagtggttcaagatcggcttccgccgcttctccttccgcgtcgaggacgaccgcaccttcacctgcttcgaacttgacgacgacgccgccgtcgacgcgcccacctcgccgccggacacgccgcggacagtggacagcggcgacgtcggcgctgctccgacgcgaccaagaaaagccgggagcctgacgtcgtgcgactcggcgccgtcgttgctggaagggagattcgggctgggagggagctcgcggcggcggtcgagcctgaacgcgttcgacatcatctccttctccccggggttcgacctctcaggactgttcgatcaggacgacggcggcggcgccggcgccggcagcatcccggagcagcagaaacacacggcgaggttcgtgtcggcggcgccggtggaggtgatcgtggcgacgctggaggcggccgcggcggcggcgggcatggcggtgcgggagagggaggacgggtcgatcagcatggaggggacacgcgagggcgagcacggcgcgctggcggtggccgcggagatctacgagctcacgccggagctggtggtggtggaggtgcggcggaaggccggcggcgccgccgagtacgaggagttcttccgggcgcggctcaagccaagcctccgcgagctcgtctgcgacgaccggccatgcccggaggactccggcgagctctcccggagcctttga

SEQ ID NO: 2092 - protein, 511 aa, Oryza sativa
MARMGISKGGSGKEAKKPPLLLGRFEVGKLLGQGNFAKVYHARNVATGEEVAIKVMEKEKIFKSGLTAHIKREIAVLRRVRHPHIVQLYEVMATKLRIYFVMEYVRGGELFARVARGRLPEADARRYFQQLVSAVAFCHARGVFHRDIKPENLLVDDAGDLKVSDFGLSAVADGMRRDGLFHTFCGTPAYVAPEVLSRRGYDAAGADLWSCGVVLFVLMAGYLPFQDRNLAGMYRKIHKGDFRCPKWFSPELIRLLRGVLVTNPQRRATAEGIMENEWFKIGFRRFSFRVEDDRTFTCFELDDDAAVDAPTSPPDTPRTVDSGDVGAAPTRPRKAGSLTSCDSAPSLLEGRFGLGGSSRRRSSLNAFDIISFSPGFDLSGLFDQDDGGGAGAGSIPEQQKHTARFVSAAPVEVIVATLEAAAAAAGMAVREREDGSISMEGTREGEHGALAVAAEIYELTPELVVVEVRRKAGGAAEYEEFFRARLKPSLRELVCDDRPCPEDSGELSRSL

SEQ ID NO: 2093 - DNA, 1386 bp, Oryza sativa
  CDS (1)..(1386)
atggagaagaaggcgtccatcctcatgaaccggtatgagctcggccgcatgctcgggcaaggcaccttcgccaaggtgtaccatgcacggaaccttgcatccaaccagagcgtcgccatcaaggtcattgacaaggaaaaggtattgcgtgtcggcatgattgaccagatcaagcgagagatctccatcatgcgcctcgttcgccaccccaacatcgtccagctgcacgaggtcatggccagcaagagcaagatatactttgcaatggagtatgtccggggtggtgagctcttcagcagggtagccagggggcgactcaaggaggatgctgcgaggaagtacttccagcagttgataggggctgtggacttctgtcacagccgcggtgtctaccaccgagacctcaagccagagaacctcctcgtcgacgagaatggcaacctcaaagtgtcggactttgggctgagcgccttcaaggagtgtcagaagcaggacgggctgctccacacgacgtgtggcacacctgcatatgttgcaccagagataatcaataagaggggctatgatggagcaaaagcagacatatggtcttgcggtgtcatactctttgttctgcttgctggctacctcccattccatgactcaaatctaatggagatgtaccggaagataagcaaaggtgatgtcaagttcccacagtggttcactactgatgtccgaaggcttctgtccaggctgcttgatccaaatccaaacattaggatcaccgttgagaagctagttgagcatccatggttcaagaaggggtacaaaccagcagtgatgctatcacagccaaatgaatcaaacaacctcaaggatgtccatactgctttcagtgctgatcacaaggacaatgaaggcaaggcaaaagaaccagcaagctctttgaagccagtgagcttgaatgcatttgacatcatctccctctccaaaggatttgatctgtcaggcctgtttgagaacgacaaagagcagaaggcagactcacggttcatgacacaaaaaccagcatcagcaatagtgtcaaagctagagcagattgctgagacagagagcttcaaggtgaagaagcaggatggactggtgaagctccagggatccaaagaagggaggaaagggcagctcgcgatcgatgcagagatctttgaagtgacaccatccttctttgttgttgaggtgaagaagtctgcaggggacacgttggagtacgaaaaattctgcaacaagggcctaagaccttctctcagggacatctgctgggatggtcagtcagagcatccatcactggcacagtcatcaactctgactcagtcctctaagtcaatctcgagacatgccatttaa

SEQ ID NO: 2094 - protein, 461 aa, Oryza sativa
MEKKASILMNRYELGRMLGQGTFAKVYHARNLASNQSVAIKVIDKEKVLRVGMIDQIKREISIMRLVRHPNIVQLHEVMASKSKIYFAMEYVRGGELFSRVARGRLKEDAARKYFQQLIGAVDFCHSRGVYHRDLKPENLLVDENGNLKVSDFGLSAFKECQKQDGLLHTTCGTPAYVAPEIINKRGYDGAKADIWSCGVILFVLLAGYLPFHDSNLMEMYRKISKGDVKFPQWFTTDVRRLLSRLLDPNPNIRITVEKLVEHPWFKKGYKPAVMLSQPNESNNLKDVHTAFSADHKDNEGKAKEPASSLKPVSLNAFDIISLSKGFDLSGLFENDKEQKADSRFMTQKPASAIVSKLEQIAETESFKVKKQDGLVKLQGSKEGRKGQLAIDAEIFEVTPSFFVVEVKKSAGDTLEYEKFCNKGLRPSLRDICWDGQSEHPSLAQSSTLTQSSKSISRHAI

SEQ ID NO: 2095 - DNA, 1386 bp, Oryza sativa
  CDS (1)..(1386)
atggtgaacggagaggcggaggcggagtgcacgcgggcgtcgctgctggggaggtatgagatcgggcgcacgctcggggagggcaacttcggcaaggtcaagtacgcgcgccacctcgccaccggcgcccacttcgccatcaagatcctcgaccgcaacaagatcctctccctccgcttcgacgaccagataaggagggagattgggacgctcaagctgctcaagcaccccaacgtcgtccgcctgcacgaggtggctgctagcaaaactaagatttacatggtgcttgaatatgtcaatggaggcgagctctttgacaagattgccgtaaaaggaaaactctctgaacatgaaggaaggagacttttccagcagttaatcgatgctgtgagctattgccatgataaaggtgtctaccacagagaccttaagcccgaaaatgttcttgtggatcgaagaggcaatatcaagatctctgactttggcctaagtgctttgcctcaacatcttgggaatgatggattgctgcacacaacatgtggcagccccaattatattgctcctgaggttttgcagaaccgaggttacgatggctcattgtcagatatctggtcttgtggagtaattctctatgtaatgctcgtcggataccttccctttgatgaccgaaatcttgttgtcctgtaccagaagattttcaagggggacactcaaatcccaaagtggctttcacctagtgcacgggatcttcttcgaaggattcttgaaccgaacccgatgaagaggatcaacatagcagggatcaaagagcatgagtggtttcagaaggattacactcctgttgttccatatgacgacgatgatgacaattatcttgactcagttcttccaatcaaagagcaaattgatgaagcaaagcaggaaaagcctactcatatcaatgcttttcagttgattggaatggcttctgcccttgatctttcaggtttctttgaggaagaggatgcgtctcaaagaaagataaggttcacatcaacacattcaccaaaagatttattcgacaagattgagaatgttgtgacggagatgggattccaagtccagaggggtaatagcaagctaaaggtcatgaaaaatggcaggggttcaaagaacctcaggaatccatcatcattcttggtctgtactgaggtagtcgagctcgggccatccttatatgttgtcgaattgaagaaatcccatggagatcctatattgtatagacagctatgtgagaggctatcagatgagctaggagtgtgcaagacagagcagattcagaggacggagtcgctggaggatgatctagagagcttcgacagcggatcttctctgcctggtttttga

SEQ ID NO: 2096 - protein, 461 aa, Oryza sativa
MVNGEAEAECTRASLLGRYEIGRTLGEGNFGKVKYARHLATGAHFAIKILDRNKILSLRFDDQIRREIGTLKLLKHPNVVRLHEVAASKTKIYMVLEYVNGGELFDKIAVKGKLSEHEGRRLFQQLIDAVSYCHDKGVYHRDLKPENVLVDRRGNIKISDFGLSALPQHLGNDGLLHTTCGSPNYIAPEVLQNRGYDGSLSDIWSCGVILYVMLVGYLPFDDRNLVVLYQKIFKGDTQIPKWLSPSARDLLRRILEPNPMKRINIAGIKEHEWFQKDYTPVVPYDDDDDNYLDSVLPIKEQIDEAKQEKPTHINAFQLIGMASALDLSGFFEEEDASQRKIRFTSTHSPKDLFDKIENVVTEMGFQVQRGNSKLKVMKNGRGSKNLRNPSSFLVCTEVVELGPSLYVVELKKSHGDPILYRQLCERLSDELGVCKTEQIQRTESLEDDLESFDSGSSLPGF

SEQ ID NO: 2097 - DNA, 1281 bp, Oryza sativa
  CDS (1)..(1281)
atggtgaacggagaggcggaggcggagtgcacgcgggcgtcgctgctggggaggtatgagatcgggcgcacgctcggggagggcaacttcggcaaggtcaagtacgcgcgccacctcgccaccggcgcccacttcgccatcaagatcctcgaccgcaacaagatcctctccctccgcttcgacgaccagataaggagggagattgggacgctcaagctgctcaagcaccccaacgtcgtccgcctgcacgaggtggctgctagcaaaactaagatttacatggtgcttgaatatgtcaatggaggcgagctctttgacaagattgccgtaaaaggaaaactctctgaacatgaaggaaggagacttttccagcagttaatcgatgctgtgagctattgccatgataaaggtgtctaccacagagaccttaagcccgaaaatgttcttgtggatcgaagaggcaatatcaagatctctgactttggcctaagtgctttgcctcaacatcttgggaatgatggattgctgcacacaacatgtggcagccccaattatattgctcctgaggttttgcagaaccgaggttacgatggctcattgtcagatatctggtcttgtggagtaattctctatgtaatgctcgtcggataccttccctttgatgaccgaaatcttgttgtcctgtaccagaagattttcaagggggacactcaaatcccaaagtggctttcacctagtgcacgggatcttcttcgaaggattcttgaaccgaacccgatgaagaggatcaacatagcagggatcaaagagcatgagtggtttcagaaggattacactcctgttgttccatatgacgacgatgatgacaattatcttgactcagttcttccaatcaaagagcaaattgatgaagcaaagcaggaaaagcctactcatatcaatgcttttcagttgattggaatggcttctgcccttgatctttcaggtttctttgaggaagaggatgcgtctcaaagaaagataaggttcacatcaacacattcaccaaaagatttattcgacaagattgagaatgttgtgacggagatgggattccaagtccagaggggtaatagcaagctaaaggtcatgaaaaatggcaggggttcaaagaacctcaggaatccatcatcattcttggtctgtactgaggtagtcgagctcgggccatccttatatgttgtcgaattgaagaaatcccatggagatcctatattgtatagacaggtaccataccaatga

SEQ ID NO: 2098 - protein, 426 aa, Oryza sativa
MVNGEAEAECTRASLLGRYEIGRTLGEGNFGKVKYARHLATGAHFAIKILDRNKILSLRFDDQIRREIGTLKLLKHPNVVRLHEVAASKTKIYMVLEYVNGGELFDKIAVKGKLSEHEGRRLFQQLIDAVSYCHDKGVYHRDLKPENVLVDRRGNIKISDFGLSALPQHLGNDGLLHTTCGSPNYIAPEVLQNRGYDGSLSDIWSCGVILYVMLVGYLPFDDRNLVVLYQKIFKGDTQIPKWLSPSARDLLRRILEPNPMKRINIAGIKEHEWFQKDYTPVVPYDDDDDNYLDSVLPIKEQIDEAKQEKPTHINAFQLIGMASALDLSGFFEEEDASQRKIRFTSTHSPKDLFDKIENVVTEMGFQVQRGNSKLKVMKNGRGSKNLRNPSSFLVCTEVVELGPSLYVVELKKSHGDPILYRQVPYQ

SEQ ID NO: 2099 - DNA, 1122 bp, Oryza sativa
  CDS (1)..(1122)
atggtgaacggagaggcggaggcggagtgcacgcgggcgtcgctgctggggaggtatgagatcgggcgcacgctcggggagggcaacttcggcaaggtcaagtacgcgcgccacctcgccaccggcgcccacttcgccatcaagatcctcgaccgcaacaagatcctctccctccgcttcgacgaccagataaggagggagattgggacgctcaagctgctcaagcaccccaacgtcgtccgcctgcacgaggtggctgctagcaaaactaagatttacatggtgcttgaatatgtcaatggaggcgagctctttgacaagattgccgtaaaaggaaaactctctgaacatgaaggaaggagacttttccagcagttaatcgatgctgtgagctattgccatgataaaggtgtctaccacagagaccttaagcccgaaaatgttcttgtggatcgaagaggcaatatcaagatctctgactttggcctaagtgctttgcctcaacatcttgggaatgatggattgctgcacacaacatgtggcagccccaattatattgctcctgaggttttgcagaaccgaggttacgatggctcattgtcagatatctggtcttgtggagtaattctctatgtaatgctcgtcggataccttccctttgatgaccgaaatcttgttgtcctgtaccagaagattttcaagggggacactcaaatcccaaagtggctttcacctagtgcacgggatcttcttcgaaggattcttgaaccgaacccgatgaagaggatcaacatagcagggatcaaagagcatgagtggtttcagaaggattacactcctgttgttccatatgacgacgatgatgacaattatcttgactcagttcttccaatcaaagagcaaattgatgaagcaaagcaggaaaagcctactcatatcaatgcttttcagttgattggaatggcttctgcccttgatctttcaggtttctttgaggaagaggttcgtatgatgttttctcattctagacttctttcatacttttcagttatttatcagaacaagactatgtgtagtgtaacttacaatcttacaacaattttccgaatgaacctatcctaa

SEQ ID NO: 2100 - protein, 373 aa, Oryza sativa
MVNGEAEAECTRASLLGRYEIGRTLGEGNFGKVKYARHLATGAHFAIKILDRNKILSLRFDDQIRREIGTLKLLKHPNVVRLHEVAASKTKIYMVLEYVNGGELFDKIAVKGKLSEHEGRRLFQQLIDAVSYCHDKGVYHRDLKPENVLVDRRGNIKISDFGLSALPQHLGNDGLLHTTCGSPNYIAPEVLQNRGYDGSLSDIWSCGVILYVMLVGYLPFDDRNLVVLYQKIFKGDTQIPKWLSPSARDLLRRILEPNPMKRINIAGIKEHEWFQKDYTPVVPYDDDDDNYLDSVLPIKEQIDEAKQEKPTHINAFQLIGMASALDLSGFFEEEVRMMFSHSRLLSYFSVIYQNKTMCSVTYNLTTIFRMNLS

SEQ ID NO: 2101 - DNA, 1341 bp, Oryza sativa
  CDS (1)..(1341)
atggtgggcggaggggcgctgcggcgggtggggaagtacgaggtggggcggacgatcggggaggggacgttcgccaaggtgaagttcgcgcagaacacggagagcggggagagcgtcgccatgaaggtggtcgaccgctcctccatcctcaagcacaagatggcggatcagattaagagagagatatctataatgaagcttgtgaggcatccgaatgtggttagactacacgaagtcttggcaagccggaagaagatatttataatcttggagttcatcactggcggtgaactatttgataaaataattcgtcatggaagactcaatgaagctgatgcacgcagatactttcagcagctcattgatggtgttgatttttgtcacagcaaaggtgtctaccatcgagatttaaagcccgaaaatctcctccttgattcccaaggaaatcttaaaatatcagactttggactcagcgcctggcctgctcagggtggtgcccttttacgtactacctgtggaaccccaaattatgttgccccagaggttctcagtcataaaggatatgatggagcacttgctgatacatggtcatgtggagttattctatatgtcctgttggcaggttatcttccatttgatgaagttgatttgactaccctttacgggaagatagagagtgcagaatattcattcccagcttggtttcctaatggtgccaagtcacttattcacagaattcttgaccctaatccagataaaagaatcaggatagaagagatcaggaatgatgaatggtttaagaagaattatgaacctaccagagaaattgaaagtgaagaagtcaatcttgatgatgtcaatgcagcttttgatgatcctgaggaagacgctgaccatactttagatgacgaagcaggacctttgacactcaatgcattcgacctaataattctatctcaaggcttgaaccttgcagcactatttgatcgccgacaggactatgacaagcttcaaaatagatttttatcacgcaaaccagcaaaggttatcatgtcaagcatggaggttgttgctcagtcaatggggtacaagacacacattcgcaattataagatgagggtggaaggtctaaatgcaaataagacaagtcatctcgcagttatgcttgaaatttttgaagttgccccatcgatcttcatgattgaactgcaaagagcagcgggagacacctccgattataacaagtttataaataattactgcagcaaattagacgatatcatttggaattttccaattgagaagagcaaatcaaggatatcgcggctatcgaagcgctag

SEQ ID NO: 2102 - protein, 446 aa, Oryza sativa
MVGGGALRRVGKYEVGRTIGEGTFAKVKFAQNTESGESVAMKVVDRSSILKHKMADQIKREISIMKLVRHPNVVRLHEVLASRKKIFIILEFITGGELFDKIIRHGRLNEADARRYFQQLIDGVDFCHSKGVYHRDLKPENLLLDSQGNLKISDFGLSAWPAQGGALLRTTCGTPNYVAPEVLSHKGYDGALADTWSCGVILYVLLAGYLPFDEVDLTTLYGKIESAEYSFPAWFPNGAKSLIHRILDPNPDKRIRIEEIRNDEWFKKNYEPTREIESEEVNLDDVNAAFDDPEEDADHTLDDEAGPLTLNAFDLIILSQGLNLAALFDRRQDYDKLQNRFLSRKPAKVIMSSMEVVAQSMGYKTHIRNYKMRVEGLNANKTSHLAVMLEIFEVAPSIFMIELQRAAGDTSDYNKFINNYCSKLDDIIWNFPIEKSKSRISRLSKR

SEQ ID NO: 2103 - DNA, 1431 bp, Oryza sativa
  CDS (1)..(1431)
atggccatggagacgacgagccaagattcgcaggtgatcatggggcggtacaagctcggccggctcctcggccgtggcacgttcgccaaggtctacaaggcctataagttggccaccggcgaggccgtcgccatcaaggtgttcgacaaggaggcggtgcagcggtccggcacggtggagcaggtgaagcgcgaggtggacgtcatgcggcgtgtgcaccaccgccacgtcatccgcctccacgaggtgatggctacgcggtccaggatctacttcgtcatggagtacgcgagcggcggcgagctcttcacccgcctctcccggagcccgcggttcccggagcccgtcgcgcgccgctacttccagcagctgatcaccgccgtggagttctgccacagccgcggcgtgtaccaccgcgacctcaagcccgagaacctcctcctcgacgcccgcggcgacctcaaggtcaccgacttcggcctcagcgcgctagacggaggcctccgcggcgacggcctcttgcacaccacgtgcggcacgccggcgtacgtcgctcccgaggtgctcctgaagcgtggctacgacggcgccaaggcggacatctggtcgtgcggcgtgatccttttcgtgctcctcgccggctacctccccttcaacgaaaccaacctcgtgatcctgtaccggaatatcacggagagcaactacaggtgcccgccgtggttctccgtcgaggcgcgcaagctccttgccaggctgctcgacccgaaccccaagacccggatcaccatctccaagatcatggacaggccatggttccagcaggcgacgtgcccgctcggcgacatgtccctcgtcgcgagcgcgccctcggtgctgcttgccagaaaggaagccagccagcagcacgacgacgaggaggacgatgggtttgcacgggagaagaagaagcggtccaatgtgatcatgtcgtcgccggtgatcgacgtgaggccctcgagcatgaacgccttcgacatcatctcgcggtcgagagggctggacctgtccaagatgttcgacgcggaggagcgcaggtcggaggcgcggttctccaccagggagaccacgacggcgatcgtctccaagctggaggagatcgcggaggcggggaggttcagcttcaagctgaaggagaaagggagggtcgagctggaggggagccaggacgggcggaagggcgcgctggccatcgaggcggagatcttcaaggtggcgccggaggtgcacgtggtggaggtgaggaagaccggcggcgactcaccggatttccgggacttctacaagcaggagcttaagccgtcgcttggcgacatggtgtgggcgtggcagggaggtgattcgccgccgctcgtgccggcggcggggaggaggccgatcacgaagcgctcttga

SEQ ID NO: 2104 - protein, 476 aa, Oryza sativa
MAMETTSQDSQVIMGRYKLGRLLGRGTFAKVYKAYKLATGEAVAIKVFDKEAVQRSGTVEQVKREVDVMRRVHHRHVIRLHEVMATRSRIYFVMEYASGGELFTRLSRSPRFPEPVARRYFQQLITAVEFCHSRGVYHRDLKPENLLLDARGDLKVTDFGLSALDGGLRGDGLLHTTCGTPAYVAPEVLLKRGYDGAKADIWSCGVILFVLLAGYLPFNETNLVILYRNITESNYRCPPWFSVEARKLLARLLDPNPKTRITISKIMDRPWFQQATCPLGDMSLVASAPSVLLARKEASQQHDDEEDDGFAREKKKRSNVIMSSPVIDVRPSSMNAFDIISRSRGLDLSKMFDAEERRSEARFSTRETTTAIVSKLEEIAEAGRFSFKLKEKGRVELEGSQDGRKGALAIEAEIFKVAPEVHVVEVRKTGGDSPDFRDFYKQELKPSLGDMVWAWQGGDSPPLVPAAGRRPITKRS

SEQ ID NO: 2105 - DNA, 1623 bp, Oryza sativa
  CDS (1)..(1623)
atgctgatggcgaccgtctcgccggcgcggagggagccgacgccgcaggcggtgcgggcgtccccgatgccatcggcggcggcggcgttggtgaggagaggcggtggtggtagcggggggacggtgctggggaagtacgagctggggcgcgtcctgggacagggctcgttcgcgaaggtgtaccaggcgaggcacctggagaccgacgagtgcgtggcaatcaaggtgctcgacaaggagaaggccgtgaagggcgggatggtccacctcgtcaagcgcgagatcaacgtgctccgccgggtgcgccacccgaacatcgtgcagctgttcgaggtaatggccagcaagaccaagatctacttcgtcatggagtatgtccgcggcggcgagctcttctcccgcgtctccaagggacgcctcagggaggacaccgcgcggcgctacttccagcagcttgtctccgccgtcgacttctgccacgcccgcggcgtgttccaccgtgacctcaagcccgagaacctcctcgtggatgagaacggggacttgaaggtctcggacttcggcctcgccgccggccccgaccagttcgaccccgacggtctgctccacacgttctgcggcacgccggcctacgtcgcccccgaggtgctcaggcgccgcggatacgacggcgccaaggcggacatatggtcatgcggtgtcatcctctttgcgctcatggccgggtacctccctttccatgaccacaacatcatggttctgtaccggaagatctacaatggggagttcaggtgtccaaggtggttctccaaggattttactagattgataacgcgccttcttgacgcaaaccccaaaactaggatcaccgtgccagagatcattgagagcgattggttcaagaaaggatacaagccagtcaagttttacattgaggatgacaagctctacaacctgtctgatgacgtgctgaacttggagcctgctgatcctgttcccccaccattgggtttggcacctcctgttcctccacctccacaaggggatgatcctgatggttcagggtctgagtcagattcatcagtcgtatcctgcccggccacattgtcaactggggagagccagagagtccgtgggtcactaccacgcccagcaagccttaatgcatttgatatcatatcattctcaaaaggattcaacttgtctgggctgtttgaggagagggggaacgagatcaggtttgtatctggtgagcccatgtctgacattgtaaaaaagctggaggagattgcaaaggtcaagagcttcacagtgcggaggaaggactggcgggtgagcatagagggtacacgcgaaggagttaaggggcctctaaccataggcgcggagatatttgagcttacaccctcccttgtagtagtggaagtaaaaagaaaggcaggtgataatgaagagtatgaggatttctgcaacatggagttgaagccaggaatgcagcaccttgtgcaccagatgctcccagctccaaatggaactcctgtgagtgagaaggttgaaaggtcttcaagcttacaggctcccctcaccctgaagttgataggaacagaaggcagcatgagctag

SEQ ID NO: 2106 - protein, 540 aa, Oryza sativa
MLMATVSPARREPTPQAVRASPMPSAAAALVRRGGGGSGGTVLGKYELGRVLGQGSFAKVYQARHLETDECVAIKVLDKEKAVKGGMVHLVKREINVLRRVRHPNIVQLFEVMASKTKIYFVMEYVRGGELFSRVSKGRLREDTARRYFQQLVSAVDFCHARGVFHRDLKPENLLVDENGDLKVSDFGLAAGPDQFDPDGLLHTFCGTPAYVAPEVLRRRGYDGAKADIWSCGVILFALMAGYLPFHDHNIMVLYRKIYNGEFRCPRWFSKDFTRLITRLLDANPKTRITVPEIIESDWFKKGYKPVKFYIEDDKLYNLSDDVLNLEPADPVPPPLGLAPPVPPPPQGDDPDGSGSESDSSVVSCPATLSTGESQRVRGSLPRPASLNAFDIISFSKGFNLSGLFEERGNEIRFVSGEPMSDIVKKLEEIAKVKSFTVRRKDWRVSIEGTREGVKGPLTIGAEIFELTPSLVVVEVKRKAGDNEEYEDFCNMELKPGMQHLVHQMLPAPNGTPVSEKVERSSSLQAPLTLKLIGTEGSMS

SEQ ID NO: 2107 - DNA, 1509 bp, Oryza sativa
  CDS (1)..(1509)
atgatggatgggaggtcaatcttgatgggccgttatgaggttgggaagcaattaggacaaggaacatttgcaaaggtgtattatgcacgaaatcttactaccggccaagctgttgccataaagatgatcaacaaggataaggtcatgaaagttgggctaatggagcaaataaagagggagatttcaattatgagattggtgaaacatccaaatgttcttcagttatttgaggttatggctagcaagagcaagatttattttgttctggagtatgctaaaggtggtgagcttttcaacaaaattgctaaggagggaaagctcagtgaggattctgcgaggagatatttccaccaattgatcaatgcagttgactattgccatagtcgaggtgtttatcatcgtgacttaaagcctgaaaatctgctcctggatgagaatgaaaaccttaaagtctcagattttggtttaagtgccctggctgagtccaagaggcaagatggtctcctgcatactacatgtggaactccagcttatgttgctcctgaagttcttagcaggaaaggctatgatggtgcaaaggcagatgtatggtcttgtggagtaattttgtttgtgcttgtggctggttaccttcctttccatgatccaaatttgatagagatgtacagaaagatttgcagagcagacttcagatgccctcgttacttttctgctgagctgaaggatcttatacataaaatccttgattcagatccaagtactaggatttctatcccaaggataaagagaagtacttggtacagaaaaccagttgaaataaatgctaaaaacagtgaggcagccacaacaaacagcatctcttcaggtgtagctacaacctcaggttctgcagagtgcagcacttctgaggaaaatcaagggtccttaagcctcccaaacctgaatgcatttgacataatttctctctcaacagggtttaatctatctgggttttttgaggatacgcatggtcaccaggaagaacggtttaccactaggcagcctgtgacaacagtacttggaaagctgaaggaattggccaaacgcctgaaactaaaagttaagaagaaggataatggagttttgagattggcagcaccaaaggaaggaaagaagggctttcttgaacttgatgcagagatttttgaggtcaccccttcattcctcttagttgagttgaaaaagaccaacggggatactatggagtatcgaaagctggtcaaagaagatataaggccagcactcaaggatattgtttgggtgtggcaaggtgatgagcacctgaactcacaatctatcctgcaaggagagcagcagcagtccccattgccaccagagctaccacaggatcagttgcaaccatcattgccacaacaggagaagcaggacatgcctgaaccaccgttgttgccacaagtaccacaagaagaagtgcaaacatctatccccgcagaacaaacaaagaattag

SEQ ID NO: 2108 - protein, 502 aa, Oryza sativa
MMDGRSILMGRYEVGKQLGQGTFAKVYYARNLTTGQAVAIKMINKDKVMKVGLMEQIKREISIMRLVKHPNVLQLFEVMASKSKIYFVLEYAKGGELFNKIAKEGKLSEDSARRYFHQLINAVDYCHSRGVYHRDLKPENLLLDENENLKVSDFGLSALAESKRQDGLLHTTCGTPAYVAPEVLSRKGYDGAKADVWSCGVILFVLVAGYLPFHDPNLIEMYRKICRADFRCPRYFSAELKDLIHKILDSDPSTRISIPRIKRSTWYRKPVEINAKNSEAATTNSISSGVATTSGSAECSTSEENQGSLSLPNLNAFDIISLSTGFNLSGFFEDTHGHQEERFTTRQPVTTVLGKLKELAKRLKLKVKKKDNGVLRLAAPKEGKKGFLELDAEIFEVTPSFLLVELKKTNGDTMEYRKLVKEDIRPALKDIVWVWQGDEHLNSQSILQGEQQQSPLPPELPQDQLQPSLPQQEKQDMPEPPLLPQVPQEEVQTSIPAEQTKN

SEQ ID NO: 2109 - DNA, 1482 bp, Oryza sativa
  CDS (1)..(1482)
atggatgacaggaggacaattttgatggatcgctatgaaataggtaggcagttaggacagggaaattttgccaaggtatattatgctcggaatctcacaagcggacaggccgttgcaataaagatgattgataaggagaaggtaacaagggttgggctaatggtgcagataaagagggagatttcaataatgagattagtaaagcatccaaacattcttcagctttttgaggtgatggcaagcaagagcaaaatttactttgttttggagtatgctaaaggcggtgaacttttcaagaaaatatccaagggaaagttcagtgaagatgttgcgaggcggtatttccatcagttgatcagtggtatagactactgccacagccggggtgtttatcaccgtgatttgaagccagaaaacctacttctagatgagaatgagagcttaaaagtctcggattttggtttaagtgccctttctgagtccaagagacatgatggcctccttcataccacctgtggaactccagcttatgttgctcctgaagttcttagtaggagaggctacgacggtgcgaaggctgatatatggtcttgtggagtaattctgtttgtgcttgtatctggctaccttcctttccatgacacaaatcttatagagatgtatagaaagattgccaaagctgaatacaaatgccctcgttccttttctgctgagttgaaggatctgctatataagatacttgatccagatccaagtactagaatttctatcccgaagataaagagaagcgcttggtacagaaaatccagtgatgtaaatgcactgaagagcaaacatgaaacaggagacaaggtgtataagggtgaagccacaacctctgacacaacagaatgcagtatttttgagggaaatcgtgcgtcatcaagagacaaagtgtacactaatggtgaagccacaacctctgactcaccagaatgtagtaattccgatggaaagcaagcttcattaagcctcccgaacttgaacgcgtttgacatcatttctctgtctaccgggtttgacttatccaatttgtttgaagaaagatatggccggagggaagagagatttaccactaggcaaccggcggcagctatatttgctaagctaaatgaattggccagacgcttcaagctcaaaattaagaaaaaagaaaatggggttctgaggttggtagcaccaaaggaaggaataaaaggattacttgagcttgatgctgaggtttttgagcttgctccatctttccatttagttgaatttaaaaagtccaatggggacactatagaatatcaaaagctcatgaaggaagatataaggcctgcacttaaggatatagtttgggcatggcaaggaggtcagcaccagcaacctgagcaatctatgcaaggaatgcaaggagagcagcagccgtcacgtttaccatcacagcagccacagggctaa

SEQ ID NO: 2110 - protein, 493 aa, Oryza sativa
MDDRRTILMDRYEIGRQLGQGNFAKVYYARNLTSGQAVAIKMIDKEKVTRVGLMVQIKREISIMRLVKHPNILQLFEVMASKSKIYFVLEYAKGGELFKKISKGKFSEDVARRYFHQLISGIDYCHSRGVYHRDLKPENLLLDENESLKVSDFGLSALSESKRHDGLLHTTCGTPAYVAPEVLSRRGYDGAKADIWSCGVILFVLVSGYLPFHDTNLIEMYRKIAKAEYKCPRSFSAELKDLLYKILDPDPSTRISIPKIKRSAWYRKSSDVNALKSKHETGDKVYKGEATTSDTTECSIFEGNRASSRDKVYTNGEATTSDSPECSNSDGKQASLSLPNLNAFDIISLSTGFDLSNLFEERYGRREERFTTRQPAAAIFAKLNELARRFKLKIKKKENGVLRLVAPKEGIKGLLELDAEVFELAPSFHLVEFKKSNGDTIEYQKLMKEDIRPALKDIVWAWQGGQHQQPEQSMQGMQGEQQPSRLPSQQPQG

SEQ ID NO: 2111 - DNA, 1311 bp, Oryza sativa
  CDS (1)..(1311)
atggggtttgtggagagcattgggaggtacagggttggccggaccatcggcgccggcacgttcgccaaggtcaggctcgccgtcgacgccgacaccggcgccaccgtcgccgtcaaggtcatcgacaagaggatggtgatccgcaacaacctcatgtaccaggtcaaaagagagatcacggccatgaagctcctcaaccaccccaacattgtcaagatatatgaggtgatcgcgacgaagacgaagatatgcctggtaatggagtatgtctcaggagggcagctatctgacaagctaagttacctcaagaggttggatgagaaggaagcgaagaagtatttctaccaattgattgatgctgtagactactgccataggagaggtgtctaccacagagatctcaagcctgagaacttgttggtagataatcaaggcaatctcaaggtatctgattttggcctcagcgtgctaaaaaagccaggacagtttctatccacatcttgtggctcaccatgctatgtagctcctgaggtgattcagcacaagagttatgatggggcagctgcagacgtctggtcttgtggtgtgatcctgtttgaacttcttgctggttatctaccatttcaagactgcagcttaacaaacttgtacagaaggatatctcgagctcagtttgtttttccacaatggctcagtgtccctcagaagaagattataatcaggatactggatccatctcctataacaagagcaaagataagcgatatttttgatgataagtggctccaagatcactgcaatccatcagcaaggattgagaatgatgatgattgtgatgttattgaagaggccagcacagacagtgatagcagtcacaacacagaggtaaaggaaactgaagagatgacggcagaaactgaccgattcattaatgccttccaattgatagcgagatgcagtgatcttgacttgtcaggtctcttccaggagcagaaaacaaagctcgcctcgccacacccagtacaggaaaccttcgacaagatcaaggttgcagccaaggatgtgagcatggcagtgaagagaatgaacagctctctggtggagattcaggacagcaaattactaccaagaagcaatcttgatcttactctgtcggccgaggtgatcaaggtaacaccagctcactgcgtcgtcgaggtgtccaaatcaactggggatctgagatcatacaaagagttctgtagaagcctatcaagcttgctcaatggtggacagctgtctgcaagctcatctgatatggagtgtgattaa

SEQ ID NO: 2112 - protein, 436 aa, Oryza sativa
MGFVESIGRYRVGRTIGAGTFAKVRLAVDADTGATVAVKVIDKRMVIRNNLMYQVKREITAMKLLNHPNIVKIYEVIATKTKICLVMEYVSGGQLSDKLSYLKRLDEKEAKKYFYQLIDAVDYCHRRGVYHRDLKPENLLVDNQGNLKVSDFGLSVLKKPGQFLSTSCGSPCYVAPEVIQHKSYDGAAADVWSCGVILFELLAGYLPFQDCSLTNLYRRISRAQFVFPQWLSVPQKKIIIRILDPSPITRAKISDIFDDKWLQDHCNPSARIENDDDCDVIEEASTDSDSSHNTEVKETEEMTAETDRFINAFQLIARCSDLDLSGLFQEQKTKLASPHPVQETFDKIKVAAKDVSMAVKRMNSSLVEIQDSKLLPRSNLDLTLSAEVIKVTPAHCVVEVSKSTGDLRSYKEFCRSLSSLLNGGQLSASSSDMECD

SEQ ID NO: 2113 - DNA, 1371 bp, Oryza sativa
  CDS (1)..(1371)
atggcggaggcggaggcggaggcggcgggggcgggggcgggggcggggccggcgaggaggacgacgagggtggggcgctacgagctcggcaagacgatcggggaggggagcttcgccaaggtcaaggtcgcccgcgacacgcgcaccggcgacaccctcgccatcaaggtgctcgaccgcaaccatgtgcttcgccacaagatggtcgagcagatcaaacgggagatttccacaatgaagctaataaaacatccaaatgtggtccagttgcatgaggtcatggctagcaaatcaaagatatacatggttcttgaatatgttgatggaggcgagctttttgataagattgtcaattctgggagactaggagaagatgaagcaagaagatacttccatcaacttataaatgcagtagattattgccacagcagaggagtgtaccatagagatctgaagccagagaatctgcttcttgattcacatggagctcttaaagtttcagattttggccttagtgcgtttgctccacaaacaaaagaggatggacttctgcatactgcttgcggaacaccaaattatgttgcacctgaggtgcttgctgataaaggttatgatggtatggctgctgatgtatggtcctgcggcataatcttatttgtcctcatggctggatatttacctttcgatgaccccaacctaatgaccctttacaaactgatctgcaaggcaaaagtttcttgtccacattggttttcttcaggtgcgaagaagttcattaagcgcatacttgatcctaatccctgcacaagaataacaattgcacaaattttggaagatgattggttcaaaaaggattacaaaccaccactttttgagcaaggtgaagatgtgagccttgatgatgttgatgctgcattcgattgttcagaggagaatctcgtggcagagaagagagaaaagcctgaatccatgaatgcatttgctctaatttcaaggtcacagggattcaaccttggaaatttatttgagaaggaaatgatgggaatggtgaagcgggaaacttccttcacatctcaatgtacaccacaggagatcatgtctaaaatagaggaagcttgtggacctcttggtttcaatgtgcggaaacaaaattataagatgaagttaaaaggtgataagactggaagaaaaggctatttatctgtagcaacggaggttttcgaggttgctccatcactccacatggttgagcttcgtaaaactggaggggacacgctggagtttcacaatttctacaacaatttctcgtcagagttaaaagacatagtgtggaaatctgaatctgacgcaaaagcagcaaagaagaggtga

SEQ ID NO: 2114 - protein, 456 aa, Oryza sativa
MAEAEAEAAGAGAGAGPARRTTRVGRYELGKTIGEGSFAKVKVARDTRTGDTLAIKVLDRNHVLRHKMVEQIKREISTMKLIKHPNVVQLHEVMASKSKIYMVLEYVDGGELFDKIVNSGRLGEDEARRYFHQLINAVDYCHSRGVYHRDLKPENLLLDSHGALKVSDFGLSAFAPQTKEDGLLHTACGTPNYVAPEVLADKGYDGMAADVWSCGIILFVLMAGYLPFDDPNLMTLYKLICKAKVSCPHWFSSGAKKFIKRILDPNPCTRITIAQILEDDWFKKDYKPPLFEQGEDVSLDDVDAAFDCSEENLVAEKREKPESMNAFALISRSQGFNLGNLFEKEMMGMVKRETSFTSQCTPQEIMSKIEEACGPLGFNVRKQNYKMKLKGDKTGRKGYLSVATEVFEVAPSLHMVELRKTGGDTLEFHNFYNNFSSELKDIVWKSESDAKAAKKR

SEQ ID NO: 2115 - DNA, 1350 bp, Oryza sativa
  CDS (1)..(1350)
atgtatagggctaagagggctgcattatctccaaaggtgaagcgccgtgtagggaagtatgagctcgggcgcaccattggagaaggaacctttgcaaaggtccggtttgcgaagaacactgaaaatgacgaaccagttgctatcaaaatccttgacaaggagaaggttcagaagcacagattggttgaacagattaggcgtgaaatttgtactatgaagttagtaaagcatcctaatgttgttcggctgttcgaggtcatgggaagtaaagcaagaattttcattgttctggaatatgttactggaggagagctctttgaaatcattgcaactaatggaaggttgaaggaggaggaagcacgaaaatactttcaacaacttatcaatgcagttgactactgccacagtaggggtgtgtaccacagagacttgaagttagaaaatttgctgcttgatgcttctggaaacctgaaagtatctgactttggtttgagtgctttaaccgagcaagtgaaggctgacggtttgctgcacacgacatgtggaactcctaattatgttgctccagaggtgattgaggacagaggctatgatggggcagctgcagatatctggtcttgtggggtaatcctttatgttctgcttgctgggtttttaccatttgaggatgacaacatcattgctctttataaaaagatctctgaagctcagtttacctgtccctcttggttttctactggagctaagaagctgatcaccagaattctggatcccaaccctacaactaggatcaccatttctcaaatactggaagatccttggttcaaaaagggttacaaaccgcctgtatttgacgagaaatatgaaactagttttgacgatgtcgatgctgcttttggagactccgaagaccggcatgtcaaagaagaaactgaagatcagcctacctctatgaacgcgtttgaactcatttcactgaatcaggcactgaatctggacaatttgttcgaggcaaaaaaggagtataaaagagagacaagattcacatcacaatgtcctccaaaagaaattatcaccaagattgaagaagctgcaaagccacttggatttgatattcaaaagaaaaattacaagatgcgcatggagaacctgaaagcaggtagaaaaggcaatctcaatgttgcaactgaggttttccaagtagctccatccttacatgtggttgagctcaagaaggcaaagggggacactctggagttccaaaagttctacagaaccctgtcgacccagctcaaggacgtggtctggaagtgcgacggcgaggtcgaaggcaacggcgccgcggcgtga

SEQ ID NO: 2116 - protein, 449 aa, Oryza sativa
MYRAKRAALSPKVKRRVGKYELGRTIGEGTFAKVRFAKNTENDEPVAIKILDKEKVQKHRLVEQIRREICTMKLVKHPNVVRLFEVMGSKARIFIVLEYVTGGELFEIIATNGRLKEEEARKYFQQLINAVDYCHSRGVYHRDLKLENLLLDASGNLKVSDFGLSALTEQVKADGLLHTTCGTPNYVAPEVIEDRGYDGAAADIWSCGVILYVLLAGFLPFEDDNIIALYKKISEAQFTCPSWFSTGAKKLITRILDPNPTTRITISQILEDPWFKKGYKPPVFDEKYETSFDDVDAAFGDSEDRHVKEETEDQPTSMNAFELISLNQALNLDNLFEAKKEYKRETRFTSQCPPKEIITKIEEAAKPLGFDIQKKNYKMRMENLKAGRKGNLNVATEVFQVAPSLHVVELKKAKGDTLEFQKFYRTLSTQLKDVVWKCDGEVEGNGAAA

SEQ ID NO: 2117 - DNA, 1296 bp, Oryza sativa
  CDS (1)..(1296)
atgtatagggctaagagggctgcattatctccaaaggtgaagcgccgtgtagggaagtatgagctcgggcgcaccattggagaaggaacctttgcaaaggtccggtttgcgaagaacactgaaaatgacgaaccagttgctatcaaaatccttgacaaggagaaggttcagaagcacagattggttgaacagattaggcgtgaaatttgtactatgaagttagtaaagcatcctaatgttgttcggctgttcgaggtcatgggaagtaaagcaagaattttcattgttctggaatatgttactggaggagagctctttgaaatcattgcaactaatggaaggttgaaggaggaggaagcacgaaaatactttcaacaacttatcaatgcagttgactactgccacagtaggggtgtgtaccacagagacttgaagttagaaaatttgctgcttgatgcttctggaaacctgaaagtatctgactttggtttgagtgctttaaccgagcaagtgaaggtgattgaggacagaggctatgatggggcagctgcagatatctggtcttgtggggtaatcctttatgttctgcttgctgggtttttaccatttgaggatgacaacatcattgctctttataaaaagatctctgaagctcagtttacctgtccctcttggttttctactggagctaagaagctgatcaccagaattctggatcccaaccctacaactaggatcaccatttctcaaatactggaagatccttggttcaaaaagggttacaaaccgcctgtatttgacgagaaatatgaaactagttttgacgatgtcgatgctgcttttggagactccgaagaccggcatgtcaaagaagaaactgaagatcagcctacctctatgaacgcgtttgaactcatttcactgaatcaggcactgaatctggacaatttgttcgaggcaaaaaaggagtataaaagagagacaagattcacatcacaatgtcctccaaaagaaattatcaccaagattgaagaagctgcaaagccacttggatttgatattcaaaagaaaaattacaagatgcgcatggagaacctgaaagcaggtagaaaaggcaatctcaatgttgcaactgaggttttccaagtagctccatccttacatgtggttgagctcaagaaggcaaagggggacactctggagttccaaaagttctacagaaccctgtcgacccagctcaaggacgtggtctggaagtgcgacggcgaggtcgaaggcaacggcgccgcggcgtga

SEQ ID NO: 2118 - protein, 431 aa, Oryza sativa
MYRAKRAALSPKVKRRVGKYELGRTIGEGTFAKVRFAKNTENDEPVAIKILDKEKVQKHRLVEQIRREICTMKLVKHPNVVRLFEVMGSKARIFIVLEYVTGGELFEIIATNGRLKEEEARKYFQQLINAVDYCHSRGVYHRDLKLENLLLDASGNLKVSDFGLSALTEQVKVIEDRGYDGAAADIWSCGVILYVLLAGFLPFEDDNIIALYKKISEAQFTCPSWFSTGAKKLITRILDPNPTTRITISQILEDPWFKKGYKPPVFDEKYETSFDDVDAAFGDSEDRHVKEETEDQPTSMNAFELISLNQALNLDNLFEAKKEYKRETRFTSQCPPKEIITKIEEAAKPLGFDIQKKNYKMRMENLKAGRKGNLNVATEVFQVAPSLHVVELKKAKGDTLEFQKFYRTLSTQLKDVVWKCDGEVEGNGAAA

SEQ ID NO: 2119 - DNA, 1146 bp, Oryza sativa
  CDS (1)..(1146)
atgtatagggctaagagggctgcattatctccaaaggtgaagcgccgtgtagggaagtatgagctcgggcgcaccattggagaaggaacctttgcaaaggtccggtttgcgaagaacactgaaaatgacgaaccagttgctatcaaaatccttgacaaggagaaggttcagaagcacagattggttgaacagattaggcgtgaaatttgtactatgaagttagtaaagcatcctaatgttgttcggctgttcgaggtcatgggaagtaaagcaagaattttcattgttctggaatatgttactggaggagagctctttgaaatcattgcaactaatggaaggttgaaggaggaggaagcacgaaaatactttcaacaacttatcaatgcagttgactactgccacagtaggggtgtgtaccacagagacttgaagttagaaaatttgctgcttgatgcttctggaaacctgaaagtatctgactttggtttgagtgctttaaccgagcaagtgaaggctgacggtttgctgcacacgacatgtggaactcctaattatgttgctccagaggtgattgaggacagaggctatgatggggcagctgcagatatctggtcttgtggggtaatcctttatgttctgcttgctgggtttttaccatttgaggatgacaacatcattgctctttataaaaagatctctgaagctcagtttacctgtccctcttggttttctactggagctaagaagctgatcaccagaattctggatcccaaccctacaactaggatcaccatttctcaaatactggaagatccttggttcaaaaagggttacaaaccgcctgtatttgacgagaaatatgaaactagttttgacgatgtcgatgctgcttttggagactccgaagaccggcatgtcaaagaagaaactgaagatcagcctacctctatgaacgcgtttgaactcatttcactgaatcaggcactgaatctggacaatttgttcgaggcaaaaaaggagtataaaagagagacaagattcacatcacaatgtcctccaaaagaaattatcaccaagattgaagaagctgcaaagccacttggatttgatattcaaaagaaaaattacaaggtattcatatag

SEQ ID NO: 2120 - protein, 381 aa, Oryza sativa
MYRAKRAALSPKVKRRVGKYELGRTIGEGTFAKVRFAKNTENDEPVAIKILDKEKVQKHRLVEQIRREICTMKLVKHPNVVRLFEVMGSKARIFIVLEYVTGGELFEIIATNGRLKEEEARKYFQQLINAVDYCHSRGVYHRDLKLENLLLDASGNLKVSDFGLSALTEQVKADGLLHTTCGTPNYVAPEVIEDRGYDGAAADIWSCGVILYVLLAGFLPFEDDNIIALYKKISEAQFTCPSWFSTGAKKLITRILDPNPTTRITISQILEDPWFKKGYKPPVFDEKYETSFDDVDAAFGDSEDRHVKEETEDQPTSMNAFELISLNQALNLDNLFEAKKEYKRETRFTSQCPPKEIITKIEEAAKPLGFDIQKKNYKVFI

SEQ ID NO: 2121 - DNA, 1356 bp, Oryza sativa
  CDS (1)..(1356)
atggtagaacaaaaggggaatattttgatgaagagatatgagataggaaaattacttgggcaaggaagtttcgctaaagtttaccatggccgtaatattaagaattcacaaagtgttgcaatcaaggtgattgacaaagaaaagatattgaaatgtgagcttatggatcaaataagaagagagatttcagtgatgaacctagtaagacatccgtgcattgttcaattgtatgaggtgatggctaccaaaactaagatatattttatcctagagtatgtgaaagggggagagttattcaacaaggttcgacgtggaagactaaaggaagaagttgcacggaagtactttcagcagttaattagtgctattgacttttgtcatagcagaggggtttatcatcgtgatctaaagccagaaaaccttcttcttgatgaaaatcgaaatttgaaaatctcagactttggtttgagtgcacttgcagaatgtaagagacaagatgggttgctccacacaacttgtggaactcctgcatatgttgctccagaagtgattaacagaaaaggatatgatggtgcaaaggctgacgtatgggcttgtggagtgattctttatgtactattggctggttatctcccatttcaagataaaaatgtgataaacatgtataagaagatatgcaaagcggaattcaaatggccaagttggttttcttctgatatccgaaagcttttgcgacgtattcttgatccaaaccctgcgacacggatctcagtttcagaaattatggaagatccttggtttagagtaggtcttaattcagatctacttaacaagaccataccaacagataaagttgataaagttgtgcatgttgacatggattcaacatttggtaatttaagcaacaatataaatgaaggaaaacaagaagcagaaaatcttactagcttgaatgcttttgatattatttctctttcatcaggatttgatctttctgctatgtttgaagatgaaaacagcaaagaggaatcaaaatttacatccactaacacagctacgacaatcaccaaaaagcttgaggatgttgcgaagaatttacgattaaaattcttgaagaaaaatggtggtttgttaaagatggaaggatcaaaacctggaaggaaaggtgtaatgtccatcaatgctgaaatatttcagatcacaccagattttcatttagtggaatttacgaagataaatggtgatacacttgagtatcaaaaggtcaaacaagagatgagaccagcactaaaggatattgtatgggcttggcaaggtgagcagccacaaccacaatcattgaacgaacagtcttaa

SEQ ID NO: 2122 - protein, 451 aa, Oryza sativa
MVEQKGNILMKRYEIGKLLGQGSFAKVYHGRNIKNSQSVAIKVIDKEKILKCELMDQIRREISVMNLVRHPCIVQLYEVMATKTKIYFILEYVKGGELFNKVRRGRLKEEVARKYFQQLISAIDFCHSRGVYHRDLKPENLLLDENRNLKISDFGLSALAECKRQDGLLHTTCGTPAYVAPEVINRKGYDGAKADVWACGVILYVLLAGYLPFQDKNVINMYKKICKAEFKWPSWFSSDIRKLLRRILDPNPATRISVSEIMEDPWFRVGLNSDLLNKTIPTDKVDKVVHVDMDSTFGNLSNNINEGKQEAENLTSLNAFDIISLSSGFDLSAMFEDENSKEESKFTSTNTATTITKKLEDVAKNLRLKFLKKNGGLLKMEGSKPGRKGVMSINAEIFQITPDFHLVEFTKINGDTLEYQKVKQEMRPALKDIVWAWQGEQPQPQSLNEQS

SEQ ID NO: 2123 - DNA, 1089 bp, Oryza sativa
  CDS (1)..(1089)
atggaccgggcggcgctgacggtggggccggggatggacatgccgataatgcacgacggcgaccggtacgagctggtgcgggacatcggctccggcaacttcggcgtcgcgcgcctcatgcgcagccgcgccgacggccagctcgtcgccgtcaagtacatcgagcgcggcgacaagatcgacgagaacgtgcagcgggagatcatcaaccaccgctcgctgcgccaccccaacatcatccgcttcaaggaggtcatcctcacccccacccacctcgccatcgtcatggagtacgcctccggcggcgagctcttcgagcgcatctgcaacgccggcaggttcagcgaggacgaggcacggttctttttccagcaactgatttcaggagtcagctattgccattccatgcaagtatgccatcgtgacctgaagctggagaacaccctgctcgacggcagcacggcgcctcgcctcaagatatgcgactttggctattcaaagtcgtctgttcttcattcgcaaccaaaatctactgttggaactccggcatacatcgctcctgaggttctgctgaagaaggaatatgatggaaagattgctgatgtgtggtcgtgtggagtaaccctctacgtaatgctggttggtgcatatccttttgaggatccagatgagcctaagaatttcaggaagacaattcagagaatattgggtgtgcagtactctattccagattatgtccacatatctccagagtgccgagatcttattgcgaggatttttgtggccaacccagccactagaatctctatccccgagatcagaaatcatccatggttcttgaagaatctcccagctgaccttatggatgatagcaagatgagcagccagtacgaggagcccgaacagccaatgcagagcatggatgagatcatgcagatactggcagaggcgaccataccagcagctgggtctggtggaatcaaccagttcttgaatgatggccttgacctcgatgatgacatggaggaccttgattcagaccccgatcttgacgtggaaagcagtggggagatagtatacgctatgtga

SEQ ID NO: 2124 - protein, 362 aa, Oryza sativa
MDRAALTVGPGMDMPIMHDGDRYELVRDIGSGNFGVARLMRSRADGQLVAVKYIERGDKIDENVQREIINHRSLRHPNIIRFKEVILTPTHLAIVMEYASGGELFERICNAGRFSEDEARFFFQQLISGVSYCHSMQVCHRDLKLENTLLDGSTAPRLKICDFGYSKSSVLHSQPKSTVGTPAYIAPEVLLKKEYDGKIADVWSCGVTLYVMLVGAYPFEDPDEPKNFRKTIQRILGVQYSIPDYVHISPECRDLIARIFVANPATRISIPEIRNHPWFLKNLPADLMDDSKMSSQYEEPEQPMQSMDEIMQILAEATIPAAGSGGINQFLNDGLDLDDDMEDLDSDPDLDVESSGEIVYAM

SEQ ID NO: 2125 - DNA, 1344 bp, Oryza sativa
  CDS (1)..(1344)
atggccgccaccaagagcaaggcggccaagaagggcgctccgctcctcggcaagtacgagctcggccgcctcctcggccgcggcaccttcgccaaggtctaccacgcccgctccctcgcccccggcgccgaccccgtcgccgtcaaggtgctcgacaagcccgacctcgccgccgccggcgccggcatggccacccgcgtcctccgcgaggtcgccgccatgcgccgcctccgccaccccaacgtcctccgcctccacgaggtgctcgccacgcgctccaaggtgtacctcgtcatggagctcgcccccggcggcgacctcctctccaggctcgcctcgctgccgtcgcgccgcctccccgagcacgccgcgcagcgggtgttcctccagctggtgtccgcgctcatctactgccacgcgcggggcgtgtcccaccgcgacgtcaagccgcagaacgtgctcctcgacgcacacggcaacctcaaggtctccgacttcggcctcgccgcgctcccggactcgctccgcgacgacgggcgcctgcacaccgcgtgcggcaccccggcgttcgcggcgcccgaggtgctccgccgcaaggcctacgacggcgccaaggccgacgcgtggtcctgcggcgtcatcctcttcgtcctcctcgccggccacctgccgttcgacgactccaacatcgccgacatgtgccggaaggcgcaccgccgcgagtacgcgctcccgcggtgggtgtcgcagccggcgcgccgcctcgtgtcgcgcctcctcgacccgaacccggccacccgcctcgccgtcgccgagctcgccacccacccgtggttcaagcgctcgctcagcctcgactcgcagctcggcagcctcctcggcggccagccggagcgggagctggcgttccaggcgccgccgccactgaacgcgttcgacatcatatccatgtcgccggggctcgacctgtccgggctgttcggcgagagcaagcgccgccgggagaagcggttcgtgacgacggcgtcgccggagcggacggtggagcggctcggccaggcgggcgccaagctcggctacttcatggtgggcaagaagggcgtcgaacgcctgcccctgggcggcctctcgggcctcgtcgccatgtccatggagatgtcggaggtgtcgccgtcgatgatgctcgtcgagctgaggctggagggaggcgacgacggcgacggcgacggcggtgccgaggagttcgggtgggaggagctcagggcggagctcggcgacgacgtggtgatggcatggcatggctgcgatggagggaagaaagacaaggaagggattcttttgtag

SEQ ID NO: 2126 - protein, 447 aa, Oryza sativa
MAATKSKAAKKGAPLLGKYELGRLLGRGTFAKVYHARSLAPGADPVAVKVLDKPDLAAAGAGMATRVLREVAAMRRLRHPNVLRLHEVLATRSKVYLVMELAPGGDLLSRLASLPSRRLPEHAAQRVFLQLVSALIYCHARGVSHRDVKPQNVLLDAHGNLKVSDFGLAALPDSLRDDGRLHTACGTPAFAAPEVLRRKAYDGAKADAWSCGVILFVLLAGHLPFDDSNIADMCRKAHRREYALPRWVSQPARRLVSRLLDPNPATRLAVAELATHPWFKRSLSLDSQLGSLLGGQPERELAFQAPPPLNAFDIISMSPGLDLSGLFGESKRRREKRFVTTASPERTVERLGQAGAKLGYFMVGKKGVERLPLGGLSGLVAMSMEMSEVSPSMMLVELRLEGGDDGDGDGGAEEFGWEELRAELGDDVVMAWHGCDGGKKDKEGILL

SEQ ID NO: 2127 - DNA, 1113 bp, Oryza sativa
  CDS (1)..(1113)
atggagaaatacgagccagttcgggagatcggggcgggcaacttcggggtagcgaagctgatgcggaacaaggagacgcgggagctggtggcgatgaagttcatcgagagagggaacaggatcgacgagaacgtgttccgggagatcgtgaatcatcgttcgctgcgtcacccgaacataataaggttcaaggaggtggtggtgacggggaggcatctggcgatcgtgatggagtacgcggcgggaggggagctgttcgagaggatatgcgaggcggggaggttccacgaggacgaggcgcgctacttcttccagcagctggtgtgcggggtgagctactgccacgccatgcagatctgccaccgcgacctcaagctggagaatacgctgctggacggcagcccggccccgcgcctcaagatctgcgacttcggctactccaagtcctccctcctccactcccgccccaaatccaccgtcggcacccccgcctacatcgcccccgaggtcctctcccgccgcgagtacgacggcaagctcgccgacgtctggtcctgcggcgtcaccctctacgtcatgctcgtcggcgcttaccctttcgaggatcccaaggaccccaagaacttcagaaagaccatctcgcgcatcatgtccgtccagtacaagatccccgagtacgtccacgtctcccagccctgccgccacctcctctcccgcatcttcgtcgccaacccctacaagcgcatcagcatgggcgagatcaagagccacccctggttcctcaagaacctgccgcgcgagctcaaggaggaggcgcaggccgtctactacaaccgccggggagccgatcacgcggcttccagcgcaagtagtgcggctgctgcagctgccttctcgccgcagagcgtggaggacatcatgaggatcgtgcaggaggcgcagaccgtccccaagcccgacaagcccgtctctggctacggctggggcaccgacgacgacgacgacgaccaacaaccagctgaggaggaggacgaagaagacgactacgacaggacggtgcgcgaggttcacgccagcgtcgacctcgacatgtcaaacctccaaatctcctga

SEQ ID NO: 2128 - protein, 370 aa, Oryza sativa
MEKYEPVREIGAGNFGVAKLMRNKETRELVAMKFIERGNRIDENVFREIVNHRSLRHPNIIRFKEVVVTGRHLAIVMEYAAGGELFERICEAGRFHEDEARYFFQQLVCGVSYCHAMQICHRDLKLENTLLDGSPAPRLKICDFGYSKSSLLHSRPKSTVGTPAYIAPEVLSRREYDGKLADVWSCGVTLYVMLVGAYPFEDPKDPKNFRKTISRIMSVQYKIPEYVHVSQPCRHLLSRIFVANPYKRISMGEIKSHPWFLKNLPRELKEEAQAVYYNRRGADHAASSASSAAAAAAFSPQSVEDIMRIVQEAQTVPKPDKPVSGYGWGTDDDDDDQQPAEEEDEEDDYDRTVREVHASVDLDMSNLQIS

SEQ ID NO: 2129 - DNA, 1365 bp, Oryza sativa
  CDS (1)..(1365)
atggtgaagggagggagggaggcgctgctgggcgggtacgagatggggaggacgctcggggagggcaacttcggcaaggtgaagtacgcgcgccacctcgccaccggcggccacttcgccgtcaagatcctcgaccgcggccgcgtcgtctccctccgcgccggcgaccagattcgccgcgagatcgccacgctcaagctgctcaggcacccccacgtcgtccgcctccacgaggttgctgctagcaaaactaagatttacatggtgcttgagtttgtcaatggaggtgaactgtttgagagaattgcagtaaagggaaaactatcagagaaagaaggaaggaggctttttcagcagttaattgatggtgttagctattgccatgataggggagtctaccacagagacctcaagcctgagaacgttcttgtggaccaaaaaggcaacatcaagatctctgattttggtcttagtgctttacctcaacacctcgggaatgatggattgctgcatactacctgtggtagccccaactatattgctcctgaggttctgcagaataaaggatatgatggatccttgtcagatatctggtcttgcggagtaatcctttatgtaatgcttataggatatcttccgttcgatgaccgaaatattgttgttctgtatcagaagattttcaagggtgacactcagatcccaaagtggctttcacacagtgcacaaaatcttcttcggaggattcttgaacccaatccgatgaagaggatcgacatggcagggatcaaatcacacgaatggtttcagaaggactatattcctgttcttccatatgatgatgacgatgaagatgtacagtttggggcacgtcttcctgccaaagagcaaatcaatgatgagcctggagataagaattctcatcagatcaacgctttccagttgattggaatggcatcatcccttgatctttcagggtttttcgaggatgaggaagtgtcccaaaggaggattagattcacatcaacgcatccacccaaggatgccttcgacaagattgaaagctcagcgacggagttgggattccaagttcagagggggcacagcaagctcaaattaatgcgcaattgcaagggatcaaagaaccctgagtcatttatggtgtccgccgaggtttttgagcttggcccttctgtaaatgttgtagaacttaggaagtccaacggagaccctgcactgtatagacagctctgtgagaggatctccagtgacatgggggcgcgcaacacggagcagatcttcgcaacggcatcgcttgaggatgatcttcagaacagcaatgcagggacgccgctgttcgctttgtaa

SEQ ID NO: 2130 - protein, 454 aa, Oryza sativa
MVKGGREALLGGYEMGRTLGEGNFGKVKYARHLATGGHFAVKILDRGRVVSLRAGDQIRREIATLKLLRHPHVVRLHEVAASKTKIYMVLEFVNGGELFERIAVKGKLSEKEGRRLFQQLIDGVSYCHDRGVYHRDLKPENVLVDQKGNIKISDFGLSALPQHLGNDGLLHTTCGSPNYIAPEVLQNKGYDGSLSDIWSCGVILYVMLIGYLPFDDRNIVVLYQKIFKGDTQIPKWLSHSAQNLLRRILEPNPMKRIDMAGIKSHEWFQKDYIPVLPYDDDDEDVQFGARLPAKEQINDEPGDKNSHQINAFQLIGMASSLDLSGFFEDEEVSQRRIRFTSTHPPKDAFDKIESSATELGFQVQRGHSKLKLMRNCKGSKNPESFMVSAEVFELGPSVNVVELRKSNGDPALYRQLCERISSDMGARNTEQIFATASLEDDLQNSNAGTPLFAL

SEQ ID NO: 2131 - DNA, 1401 bp, Oryza sativa
  CDS (1)..(1401)
atgccggagaagggcaccgtggtgatgagccggtacgagctcggccgctcgctggggcacggcacgttctccaaggtgtaccaggccaggagcctcgtgtccggcgagaccgtcgccgtgaaggtgatcgacaaggagaaggcgctgcgcgccggcgccggcatggtcgaccagatcgagcgcgaggtcgccgtcatgcggctcgtcggccgccaccccaacgtggtccgcctccacgaggtgatggccagcaggagcaagatctacttcgtcatggagctcgtccgcggcggcgagctcctcgccaggctggtcgccggcggcggccgcctcggggaggacgcggcgaggaggtacttccaccagctcgtcgccgccgtcgacttctgccacagccgcggcgtctaccaccgcgacctcaagccggagaacctcctcgtcgacgacgacggcagcggcggcggcggcaacctcaaggtcaccgacttcgggctcagcgcgctcagcgcgtcgcggcggcacgacggcctcctccacacgacgtgcggcacgccgtcgtacgtcgcgccggagatcatcggcgacaagggctacgacggggccaccgccgacgtctggtcctgcggcgtcatcctcttcctcctcctcgccggctacctcccgttcttcgattccaacctcatggagatgtacaagaagatcaccaatggcgagttcaaggtccccgactggttcacccccgacgcacgcagcctcatctccagactcctcgacccaaaccctacaactcgcatcaccatcgacgagctcgtcaagcatccatggttcaagaagggacacaccaagcggccggcaagctcgaacaccatgaaactcaacgaggaggagaaaccagcgaacgccgccatgaacatgaagccggcgagcttgaacgcgttcgacatcatctcgctctcgcagggattcgacctgtcagggatgttctgctgccatggccacagcagcaggacgcaggatcagctgttcgtcaccgggaagccggcgacggcgatcgtgtcgaggctggaggagatcgcggagacggagcacttcacggtgaagaagaagcagaagaagaggcaagaagaggacgggatggcggtgaagctgcaggggtggaaggaagggaggaaagggcagctcgccattgacgccgagatcttcgaggtttcgccgtcgtgctacgtcgtcgaggtgaagaaaacggccggcgacacgctggagtaccaggcgttctgcaacagagacctcaggccgtcgctgaacgacatctgctggacctcgccggcgacagcagcgtcggagaagaaccagctgccggcagtgtcggaggtgtcgccactgagtagtcctcggaattga

SEQ ID NO: 2132 - protein, 466 aa, Oryza sativa
MPEKGTVVMSRYELGRSLGHGTFSKVYQARSLVSGETVAVKVIDKEKALRAGAGMVDQIEREVAVMRLVGRHPNVVRLHEVMASRSKIYFVMELVRGGELLARLVAGGGRLGEDAARRYFHQLVAAVDFCHSRGVYHRDLKPENLLVDDDGSGGGGNLKVTDFGLSALSASRRHDGLLHTTCGTPSYVAPEIIGDKGYDGATADVWSCGVILFLLLAGYLPFFDSNLMEMYKKITNGEFKVPDWFTPDARSLISRLLDPNPTTRITIDELVKHPWFKKGHTKRPASSNTMKLNEEEKPANAAMNMKPASLNAFDIISLSQGFDLSGMFCCHGHSSRTQDQLFVTGKPATAIVSRLEEIAETEHFTVKKKQKKRQEEDGMAVKLQGWKEGRKGQLAIDAEIFEVSPSCYVVEVKKTAGDTLEYQAFCNRDLRPSLNDICWTSPATAASEKNQLPAVSEVSPLSSPRN

SEQ ID NO: 2133 - DNA, 1374 bp, Oryza sativa
  CDS (1)..(1374)
atgatggaacttgagaagaatggaaacattctactgcgaaggtatgagattggaaaattattggggcaaggaacttttgccaaggtttatcatggtaggaacatcgtgacttcacaaagtgtggctatcaaggtgatcgacaaggacaaaatttttaaggttggcctaatggatcagattaaacgagagatatctgtgatgaaattagtgaggcaccccaacattgtacagctgtatgaggtcatggctaccaaatcgaagatatactttgtgctagaatatgtcaagggcggtgagttgtttaacaaagtagctaaaggtaggttgaaagaagatgctgcaaggaaatacttccagcaattagtaagtgctgttgatttctgccacagtagaggcgtttatcatcgcgatctgaagccagagaacctacttgttgatgaaaatggaaacctgaaaattaccgattttggattgagcgctcttgctgaatcaagacgacaagatggccttctacacacaacttgtggaactcccgcatatgtggcgcctgaggtgatcagccgaaaagggtatgacggtgtcaaggttgacacatggtcttgtggtgtgatcctgtttgttctgatggctggttatctgccttttcaagattcaaatttgatggagatgtacagaaagattgggaaagcagagttcaaatgcccagcttggttttcgtctgatgtacgaaaattagtttcgagaattcttgatccaaacccaagaagtagaatgccaattacaaaaataatggaaacttactggttcaagaaaggacttgatagcaagctaatccttaagaacgtggagacaaatgaaccagttacagctcttgctgatgttaatgttgttttctcctccatgggtagcagtagtagcaaaaagactgaggagaaacaggatgcaggaaagctaaccaaccttaacgctttcgatattatttctctttcggaaggctttgatctttctggcttgtttgaggagactgataaaaagaaagaagcaaggtttacatcaagtcaatcagcttcagctattatctcaaaactagaggatgttgcctcatgttcgaagttgacagtgaaaaagaaagaaggtggtgtgctgaaaatggaaggtgcaagtgaaggaaggaaaggtgtattggcaatcgatgcagagatcttcgaggtgactccttcatttcatttggtagaaatcaagaagaacaatggagatacactagaataccaacatttgtggaaggaggacatgaaaccagctcttaaggacattgtttgggcttggcaaggtgaacgccaggatcagcaacctgaagatcatggccagccatag

SEQ ID NO: 2134 - protein, 457 aa, Oryza sativa
MMELEKNGNILLRRYEIGKLLGQGTFAKVYHGRNIVTSQSVAIKVIDKDKIFKVGLMDQIKREISVMKLVRHPNIVQLYEVMATKSKIYFVLEYVKGGELFNKVAKGRLKEDAARKYFQQLVSAVDFCHSRGVYHRDLKPENLLVDENGNLKITDFGLSALAESRRQDGLLHTTCGTPAYVAPEVISRKGYDGVKVDTWSCGVILFVLMAGYLPFQDSNLMEMYRKIGKAEFKCPAWFSSDVRKLVSRILDPNPRSRMPITKIMETYWFKKGLDSKLILKNVETNEPVTALADVNVVFSSMGSSSSKKTEEKQDAGKLTNLNAFDIISLSEGFDLSGLFEETDKKKEARFTSSQSASAIISKLEDVASCSKLTVKKKEGGVLKMEGASEGRKGVLAIDAEIFEVTPSFHLVEIKKNNGDTLEYQHLWKEDMKPALKDIVWAWQGERQDQQPEDHGQP

SEQ ID NO: 2135 - DNA, 1356 bp, Oryza sativa
  CDS (1)..(1356)
atgccaccggccggcgacgacgagtcgccggcggccaccggcgacggctactcgaagaaggtcctgcagggccggtacgagctcggccgcgtgctcggccagggcgcctcctccaaggtgtaccgcgcgcgcgacgcccgcacgggcgcccacgtcgccgtcaaggccatccgcaagcagcagcagccgcaccaccacccgtcgtgccgctcgcccgaggcggccgccgcggcgcggaggtgcgtggaggtggagcgggaggtcgccgcgctccgccgcgtgcgcggccacccgcacgtggtggcgctcctcgacgtgctcgccacccgctccaccgtctacctcgtcctcgagctcgccagcggcggcagcgtcctgtccgcgctcgacagccgcggcggcggccactacgacgagcccgcggcgcgccgcctgttcgcgcagctggcctccgcggtggcgcacgcgcactccctcggcgtgttccatcgcgacatcaagccggagaacctcctcctcgacgagcgcggcgacctccggctcacggacttcgggctcagcgcgttcgccgacgccgaccagcacctcggcgccacagacggcctcgccgccacgcactgcggctccccggcctacgtcgcgccggagatcctcctgaagcggcggtacgacgccagcaaggcggacgtgtggtcctgcggcgtcgtgctcttcgtgctcaccgccggctacctgccgttcaacgacggcaacctcatggccatgtaccggaagatctgcgccgctaagttccggtgtccaaaatggtgctcgcaggagctccgctcccttatcgggcggatgcttgacccggaacccgatacccgcatcaagattggtgaaatcttcgatcacccttggctccaacaagatgggagttcatcatcattcggtatgatccaagctgcgtcctctcattctaaaccagaggtagagaaatgggaggctgaattggagcaagcaatggagctaaatgctttcgacataatcgggttcgcctcgggatgcgatctaagcgggttgatcggtccattgccagatcgagttcgattcgtcttgccgggtggggattccaagtcagttctggacaaagttgagaagctagggcgagaggaagggcttgtagtgaggaggaaagaggaagaatggtgtggaggagttcatgtagaggcaactagtgggaaattcactgcatatgtgagggttaatctattgcccaagaaaatactgatgatagaggctgaaagggttattggaagcgagattcctaaattttggcatcaacttcagattggtaatctattagtaagaaaatga

SEQ ID NO: 2136 - protein, 451 aa, Oryza sativa
MPPAGDDESPAATGDGYSKKVLQGRYELGRVLGQGASSKVYRARDARTGAHVAVKAIRKQQQPHHHPSCRSPEAAAAARRCVEVEREVAALRRVRGHPHVVALLDVLATRSTVYLVLELASGGSVLSALDSRGGGHYDEPAARRLFAQLASAVAHAHSLGVFHRDIKPENLLLDERGDLRLTDFGLSAFADADQHLGATDGLAATHCGSPAYVAPEILLKRRYDASKADVWSCGVVLFVLTAGYLPFNDGNLMAMYRKICAAKFRCPKWCSQELRSLIGRMLDPEPDTRIKIGEIFDHPWLQQDGSSSSFGMIQAASSHSKPEVEKWEAELEQAMELNAFDIIGFASGCDLSGLIGPLPDRVRFVLPGGDSKSVLDKVEKLGREEGLVVRRKEEEWCGGVHVEATSGKFTAYVRVNLLPKKILMIEAERVIGSEIPKFWHQLQIGNLLVRK

SEQ ID NO: 2137 - DNA, 1944 bp, Oryza sativa
  CDS (1)..(1944)
atggctgctgatctgcagacatttggtgcgttgctgaaatacccaaaagtggaggggccaatccggaaaaacgcctctgcccctgcctctgcctgttcgtccccacatcgccgcggcgacccgctcgacgccgacgagcggcgactggcacgaggagggagccgatcagccgaatttggagcagaagccctcatcctcgccgagggcgagcaggccagccgccgtgtaatgcagggtagcatcttggtgaagactgaaagtgattcacctggaaatgcagagatatgtgccaagaggagtgtgttgatggaacggtatgtaattgggagacaattggggcaaggaacctttggaaaggtttattatgctcgtaatcttagttctggtcagtctgttgcgataaagatgattgataaggagaagatcttgaaggttggcctcatggagcagataaagagggagatctcgataatgagattggtgaggcatccaaatgttctccagctcttcgaggtaatggctaccaagagcaatatttactttgctttagagtatgctaagggtggcgagcttttccacaaaatggccagagcaaagctcaatgaggagtctgcgagaaattattttcaacagttgatctctgcaatggactattgccatagccgaggtgtttatcatcgtgacttgaagccggaaaacttactactggatgagaatgaaacccttaaagtctctgactttggattaagtgcgttagctgaatcaaggagacaagatggtcttctccacaccgcatgtggaactccagcttatgttgctccagaagtgcttagtaggaaaggctatagtggctcaaaggcggatgtgtggtcttgtggagtgattctgtttgtgcttgtggccaattatcttcctttccatgatagaaatatcatacaaatgtataggaagatcgcaaaggctgagtatagatgccctcgtcatttttcagctgagctaaaggagctcctttatggaatccttgatcctgatcctagtactaggatgtctatctcaaggataaagagaagtgcttggtacaggaaacccatcgccatatctgcattgaacaacgaaacaggaaagaagagttgtacaagtgaggctcctttctctggcccaacaatctgcatcagttctgagagaaatcaagagccaccaaacctacacaacttgaatgcatttgacatcatttctctctctactggattcgatctatcaggtttatttggtgaaagatatggccgaagagagtcactgtttacatccagaaagccagctgcagctgtacttgtgaagctgaaggaactggccaaagccttgaatctcaaagttacaaaaactgacaatggagtgcttaaattggctacgacgaaggaaggaaggaagggcagacttgagcttgatgcagaggtttctgaggttgctccttttctcttagttgagttgaagaaaactaatggtgacacattggagtatcaaaggatgatgaaagaggacattaggccatcactcaaggatattatttggacatggcaaggaaactctatcgagctgccaaatgatgaattgacggtccaatgtagtgaaggtgaagtacagaagcaatcaaggctaccaagcatcaagaattttctggacagggtcacggttacttattccactagtagaacttcctggtcatggactcatggtcacggaaactgcagtaagaatgcaagcaaaaatggaatcaaaggcgaggcttacaatgcagattgtgtctccaggaggtctattgaggtctgtgccaaattgctagagccagatgatcagatgactaaactaattgataggctggaccgccggagatgtaaactaattgataggttccgtcctaaagaaaggttggaaatgactgactaa

SEQ ID NO: 2138 - protein, 647 aa, Oryza sativa
MAADLQTFGALLKYPKVEGPIRKNASAPASACSSPHRRGDPLDADERRLARGGSRSAEFGAEALILAEGEQASRRVMQGSILVKTESDSPGNAEICAKRSVLMERYVIGRQLGQGTFGKVYYARNLSSGQSVAIKMIDKEKILKVGLMEQIKREISIMRLVRHPNVLQLFEVMATKSNIYFALEYAKGGELFHKMARAKLNEESARNYFQQLISAMDYCHSRGVYHRDLKPENLLLDENETLKVSDFGLSALAESRRQDGLLHTACGTPAYVAPEVLSRKGYSGSKADVWSCGVILFVLVANYLPFHDRNIIQMYRKIAKAEYRCPRHFSAELKELLYGILDPDPSTRMSISRIKRSAWYRKPIAISALNNETGKKSCTSEAPFSGPTICISSERNQEPPNLHNLNAFDIISLSTGFDLSGLFGERYGRRESLFTSRKPAAAVLVKLKELAKALNLKVTKTDNGVLKLATTKEGRKGRLELDAEVSEVAPFLLVELKKTNGDTLEYQRMMKEDIRPSLKDIIWTWQGNSIELPNDELTVQCSEGEVQKQSRLPSIKNFLDRVTVTYSTSRTSWSWTHGHGNCSKNASKNGIKGEAYNADCVSRRSIEVCAKLLEPDDQMTKLIDRLDRRRCKLIDRFRPKERLEMTD

SEQ ID NO: 2139 - DNA, 1527 bp, Oryza sativa
  CDS (1)..(1527)
atggccgcgaccccgccgtcgtcgcagcaccggcggccgctgtcctcctccgcctccgccgcctccctcgctggcaagccgcgggggggcgggctcctgctcgggcggtacgagctcggccgcctcctcggccacggcaccttcgccaaggtgtaccaggcgcggagcgcggattccggggagccggtcgcgatcaaggtgctcgacaaggagaaggcgatgcggcacggcctcgtcccgcacatcaagcgggagatcgccatcctccgccgcgtccgccaccccaacatcgtgaggctgttcgaggtgatggccaccaagtccaagatctacttcgtgatggagctcgtccgcggcggggagctgttcggccgcgtcgccaaggggcggctcaaggaggacaccgcgcggcgctacttccagcagctcgtctccgccgtcgggttctgccacgcgcgcggcgtgttccaccgcgacctcaagcccgagaacctcctcgtcgacgagcacggcgacctcaaggtctccgacttcggcctctccgccgtcgccgaccagttccaccccgacggcctcctccacaccttctgcggcacgccctcctacgtcgcgcccgaggtgctcgcgcgccgcggctacgacggcgccaaggcggacatatggtcctgcggcatcatcctcttcgtgctcatggctggctaccttccgttccatgaccagaatctcatggccatgtaccgaaagatttacaggggggaattccggtgcccgagatggttctccaaggatctttccagtctactgaatcgcatccttgacacgaacccagagacaaggatcactgtcaaagaggtcatggagagcaggtggttccagaagggattccggccggtcagattctatgttgaggatgatcaggttcacagcttggcagatggtgataatgatatgccggagttggaacctagtgagcctcctcctcctcctccgtttccgccgccgccgccgcagcaagatgatgacggtgaggagtcgggatgggagtcggactcatccgtggcatcatgtcctgccacattgtcatctgaggagcgtcggcaaagacctctcgggtctctcacacggccagcaagtcttaatgcgttcgatatcatatcgttctcaaagggatttgatttgtcggggttgtttgaggagcgagggagtgaagtgaggttcatatcggcagagcctatgcaaacaatcatcacaaaattggaggagatcgcaaaggtgaagagcttcttcgttcggcgaaaagactggcgagtgagcatagaaggcacgagggaaggtttgaagggtccattgacaatcggcgctgagatatttgagctcacaccaagcctggtggtagtggaggtgaagaagaaggcaggggataaggaagaatatgatgacttctgtaacagggagttgaaacctgggatgcagcatctcgtacaccatatgggatcagttccaaatataccttctgatacggagtag

SEQ ID NO: 2140 - protein, 508 aa, Oryza sativa
MAATPPSSQHRRPLSSSASAASLAGKPRGGGLLLGRYELGRLLGHGTFAKVYQARSADSGEPVAIKVLDKEKAMRHGLVPHIKREIAILRRVRHPNIVRLFEVMATKSKIYFVMELVRGGELFGRVAKGRLKEDTARRYFQQLVSAVGFCHARGVFHRDLKPENLLVDEHGDLKVSDFGLSAVADQFHPDGLLHTFCGTPSYVAPEVLARRGYDGAKADIWSCGIILFVLMAGYLPFHDQNLMAMYRKIYRGEFRCPRWFSKDLSSLLNRILDTNPETRITVKEVMESRWFQKGFRPVRFYVEDDQVHSLADGDNDMPELEPSEPPPPPPFPPPPPQQDDDGEESGWESDSSVASCPATLSSEERRQRPLGSLTRPASLNAFDIISFSKGFDLSGLFEERGSEVRFISAEPMQTIITKLEEIAKVKSFFVRRKDWRVSIEGTREGLKGPLTIGAEIFELTPSLVVVEVKKKAGDKEEYDDFCNRELKPGMQHLVHHMGSVPNIPSDTE

SEQ ID NO: 2141 - DNA, 1518 bp, Oryza sativa
  CDS (1)..(1518)
atggagggagctggcagagatgggaaccctcttggcggttaccggattggcaaaaccctagggattgggtcatttggcaaagtgaagatcgcggagcatatattgactggtcacaaggtggcaatcaagatcctcaatcgccgtaagatcaagagcatggagatggaagagaaagttaaaagagaaatcaagatacttagattatttatgcacccacatatcattcgcctttatgaggtgatagacaccccagctgatatttatgttgttatggagtatgtcaaatctggagagttgtttgattacatcgttgagaagggaagactgcaagaggaagaagctcgacgctttttccagcagatcatatctggtgttgaatattgccatagaaacatggtggttcatcgtgatcttaagccagagaaccttcttttggactccaaatgcaatgttaagattgcagactttggcttgagtaatgttatgcgtgatggtcactttctgaagacaagttgtggtagcccaaattatgcagcacctgaggtgatatctggtaaactatatgctggccctgaagttgatgtgtggagttgtggtgttattctttatgctcttctttgtggtacccttccatttgatgacgagaatattcccaacctttttaagaaaataaagggtggcatatatacccttcccagtcatttgtcacctttggcaagggatttgattcccagaatgcttgttgttgatcccatgaagaggatcaccatacgtgaaatccgtgaacatcagtggttcacagttggtcttccgcgttatttagctgtgccacctcctgacactgcacaacaggttaaaaagctcgacgatgaaactctgaatgatgttatcaatatggggtttgacaagaatcagctaatcgaatcacttcacaagagactgcaaaacgaggcgacagttgcctactatttactattggacaataggctgcgcacaaccagtggctaccttggagctgagttccatgaatctatggaatcttctctcgctcaagtaactccagctgagacaccaaactcagccactgatcatcggcagcatgggcatatggaatctcctgggtttggcttgaggcatcatttcgcagctgacaggaaatgggcccttggtcttcagtctcgagcacatccacgagaaataataactgaagttcttaaagctctgcaagagctaaatgtttgctggaagaagattggacattataacatgaaatgcagatggagtcctagttttcccagtcatgagagtatgatgcataacaaccatggctttggtgcagaatctgctataattgaaactgatgacagtgagaaatcaacccacactgtgaaatttgaaattcagctttacaaaacaagggatgaaaaataccttcttgacttgcaaagggtcagtggaccacagcttctctttctggacctgtgctctgcctttctaactcagctgagagtcctttaa

SEQ ID NO: 2142 - protein, 505 aa, Oryza sativa
MEGAGRDGNPLGGYRIGKTLGIGSFGKVKIAEHILTGHKVAIKILNRRKIKSMEMEEKVKREIKILRLFMHPHIIRLYEVIDTPADIYVVMEYVKSGELFDYIVEKGRLQEEEARRFFQQIISGVEYCHRNMVVHRDLKPENLLLDSKCNVKIADFGLSNVMRDGHFLKTSCGSPNYAAPEVISGKLYAGPEVDVWSCGVILYALLCGTLPFDDENIPNLFKKIKGGIYTLPSHLSPLARDLIPRMLVVDPMKRITIREIREHQWFTVGLPRYLAVPPPDTAQQVKKLDDETLNDVINMGFDKNQLIESLHKRLQNEATVAYYLLLDNRLRTTSGYLGAEFHESMESSLAQVTPAETPNSATDHRQHGHMESPGFGLRHHFAADRKWALGLQSRAHPREIITEVLKALQELNVCWKKIGHYNMKCRWSPSFPSHESMMHNNHGFGAESAIIETDDSEKSTHTVKFEIQLYKTRDEKYLLDLQRVSGPQLLFLDLCSAFLTQLRVL

SEQ ID NO: 2143 - DNA, 1545 bp, Oryza sativa
  CDS (1)..(1545)
atgttccgatccatggggacggggacggggacgaagccgccggcgatgacgacggagcggtacgagttcgggccgctcgtcggcgagggcaacttcgccaaggtgtacctcggccggcacagggccaccggcgaggaggtcgccatcaaggtgatggacaaggagaagctcgtcaggctcggcgccacggagctgatcaagcgggagatcgccgtcatgcagcggctgcgccacccgaacgtcgtccgcatccacgaggtcatggccaacaagcgccgcatctgcgtcgtcatggagtacgtccgcggcggcgcgctctaccgctacttccgcaggggccccagcggcggcgccgccggcctccgggagcacgaggcgcgccggttcttccagcagctcgtctccgccgtcgcctactgccactcccgcggcgtgttccaccgcgacatcaagctggacaacctcctcgtcgacgagcaggggaacctcaaggtcgccgacttcggcctctccgcgctcgccgacatggagcggcgagaggcccacctccagaccgtctgcgggacgccgctgttcctcgcgcccgaggtgttcaagcgccggggctacgacggcgccaaggccgacgtctgggcatgcggcgtcgtcctctacgtgctcctcaccggccgcaagcctttccccgacgagcacgtctccaggctctaccgcctgatcgggcagaaccagttccagtgcccgccgtcgttcagccctgaccttgcccgtctcgtgcgccgcctcctccagcccgaccccgaccgccgcatcaccataccagagatcatggagatgaggtggttcaagaggggattcaaggaggtcacctactacatcgacagcaacgaccgcctccgcagcctcgacggcctcgacggcgagccggagctgtacgactccgacaccgacacgatcgagtcctcgtcgtcgtcggaatctcccaccccggtggccggaacgccccgcggcatgcacacctcggtgtcggcgccggctctgtccgagctcgaccgcatggaggacagcgcgtccctcccgctcccgctcccgctcccgccccggccgcgcatgccgcggcccaagagcctgaacgcgttcgacatcatcgcgtcgtcgccgagcttcgacctgtcggggctgttcgaggagcgcggcgagaggatgcgcttcgtgtccggcgcgccggtggccgacattatcgccaagctgcaggagatcgccgggatggtgagcttcacggcgcggaccaaggactgccaggtgagcatcgaggcgacgcggaacgggcagaagggcgcgctcgccatctccgccaaggtgttcgagctcacgcgggagctcgtcatggtccaggtgtgcaagaaggccggcgacaccgccgagtaccgcaggttctgcgacaacgagctcaaggccggcctgcgcggcctcgtcgtcgacgccctgccgcctccggtggagggcggcggccatggcggcgcggctgctgcggctgaagccgaatga

SEQ ID NO: 2144 - protein, 514 aa, Oryza sativa
MFRSMGTGTGTKPPAMTTERYEFGPLVGEGNFAKVYLGRHRATGEEVAIKVMDKEKLVRLGATELIKREIAVMQRLRHPNVVRIHEVMANKRRICVVMEYVRGGALYRYFRRGPSGGAAGLREHEARRFFQQLVSAVAYCHSRGVFHRDIKLDNLLVDEQGNLKVADFGLSALADMERREAHLQTVCGTPLFLAPEVFKRRGYDGAKADVWACGVVLYVLLTGRKPFPDEHVSRLYRLIGQNQFQCPPSFSPDLARLVRRLLQPDPDRRITIPEIMEMRWFKRGFKEVTYYIDSNDRLRSLDGLDGEPELYDSDTDTIESSSSSESPTPVAGTPRGMHTSVSAPALSELDRMEDSASLPLPLPLPPRPRMPRPKSLNAFDIIASSPSFDLSGLFEERGERMRFVSGAPVADIIAKLQEIAGMVSFTARTKDCQVSIEATRNGQKGALAISAKVFELTRELVMVQVCKKAGDTAEYRRFCDNELKAGLRGLVVDALPPPVEGGGHGGAAAAAEAE

SEQ ID NO: 2145 - DNA, 1362 bp, Oryza sativa
  CDS (1)..(1362)
atgggaggggaggagggaatggcggcggggaggaagaagcgggtggggaggtacgaggttgggcggaccatcgggcaggggacgttcgccaaggtcaagttcgccgtggacgccgacaccggcgccgccgtcgccatgaaggtgctcgacaaggacaccatcctcaaccaccgcatgctccaccagatcaaaagggagatatcaataatgaagattgtaagacaccccaatatagttagactaaacgaggttctagctggaaagacgaagatatacataatcttggagcttatcactggaggcgaattgttcgataaaatagctcgccaagggaagcttcgtgaaaatgaagcaaggaagtacttccagcagcttattgatgccatcaattattgccatagcaaaggagtatatcatagagatttgaagcctgaaaacctgcttcttgactcacgtggaaacttgaaagtttctgattttggacttagcactttggcccagaaaggagtaggccttcttcacacaacttgtggaacaccaaattatgttgctcctgaggtgcttagcaacaatggttatgatggatctgcagcagatgtttggtcatgtggtgttattctctatgttttgatggctggataccttccttttgaggaagatgatcttccaacactgtatgataagattactgcaggtcagttttcatgcccttattggttctctccaggtgctacatcgcttatccacagaatactcgacccaaatccaaaaactcgtatcactattgaacagataagggaagacacatggtttaagaagacttatgtagccattaaacgtggtgaagatgaaaatgttgatctggatgatgtacaggctgtttttgacaatattgaggacaagtacgtttctgagcaagtgactcataatgatggtggccctcttgtgatgaatgccttcgagatgattacattatctcaaggtttggatctttcagcattatttgatagacagcaggagtttgtcaaacgtcaaactcgttttgtctcaaggaaaccagcaaagactatagtagctacaattgaagttgttgctgagactatgggtcttaaggtccactctcagaattacaagttgcgtcttgaaggtgtatcttcaaacagaatgagcccgtttgctgttgttctacaggttttcgaagttgctccttctctgttcatggttgatgttcgaaaggttgctggtgacacactggaataccacaggttctacaagaacttgtgcaacaagatggaaagcataatctggagaccgattgaagtttcagcgaaatccgcactgctgaggacagccacatgctag

SEQ ID NO: 2146 - protein, 453 aa, Oryza sativa
MGGEEGMAAGRKKRVGRYEVGRTIGQGTFAKVKFAVDADTGAAVAMKVLDKDTILNHRMLHQIKREISIMKIVRHPNIVRLNEVLAGKTKIYIILELITGGELFDKIARQGKLRENEARKYFQQLIDAINYCHSKGVYHRDLKPENLLLDSRGNLKVSDFGLSTLAQKGVGLLHTTCGTPNYVAPEVLSNNGYDGSAADVWSCGVILYVLMAGYLPFEEDDLPTLYDKITAGQFSCPYWFSPGATSLIHRILDPNPKTRITIEQIREDTWFKKTYVAIKRGEDENVDLDDVQAVFDNIEDKYVSEQVTHNDGGPLVMNAFEMITLSQGLDLSALFDRQQEFVKRQTRFVSRKPAKTIVATIEVVAETMGLKVHSQNYKLRLEGVSSNRMSPFAVVLQVFEVAPSLFMVDVRKVAGDTLEYHRFYKNLCNKMESIIWRPIEVSAKSALLRTATC

SEQ ID NO: 2147 - DNA, 1353 bp, Oryza sativa
  CDS (1)..(1353)
atgagcgtgtcgggcgggaggacgcgggtggggaggtacgagctcgggaggacgctcggcgagggcaccttcgccaaggtcaagttcgcccgcaacgcggactccggcgagaatgtcgccatcaagatcctcgacaaggacaaggtcctcaagcacaagatgatcgcccagataaagcgcgagatctccaccatgaagctcatcaggcaccccaacgtcatccggatgcatgaggtgatggccagcaagaccaaaatatacatagtgatggagcttgtcaccggtggtgaacttttcgacaagattgcttcgcgtgggaggctgaaagaggatgatgcaaggaagtattttcagcagctgatcaacgctgtcgattactgtcatagcagaggagtctatcaccgggatctcaagcccgaaaatcttctgcttgatgctagtggcactctcaaagtatcagattttgggctgagtgcactgtctcaacaagtcagagaggatggtctgttgcacactacctgtggaactcctaattatgttgctcccgaggttatcaacaacaaaggatatgatggagccaaggctgatctgtggtcatgtggagtgattctctttgtcctcatggcaggctaccttccatttgaagactcaaacctcatgtcactttacaagaagatcttcaaagcagacttcagttgcccgtcttggttctctacaagtgcgaagaagctcatcaagaaaatactagatcctaatcctagcaccaggattaccatcgcagagcttatcaacaatgagtggttcaagaagggatatcagcctccaaggtttgagacagcagatgttaacctggatgatatcaactctatttttaatgaatctggggaccaaacacagcttgttgtcgagaggcgagaagagaggccatcagtgatgaatgcttttgagttgatctctacatctcagggtctcaatcttggcacactctttgaaaagcaatcgcagggttctgtgaagcgagaaacaagatttgcatcaaggctgcctgcaaacgagatattgtcgaaaattgaagcagctgctggacccatgggctttaatgtacagaagcgcaactacaagctgaagttgcaaggagagaatccaggaaggaaaggtcagcttgcaattgcaacagaggtttttgaagtcacgccctcgctgtacatggttgagctccgcaaatctaacggcgacactcttgaattccataagttctaccacaacatctccaatggcctgaaagatgtgatgtggaagccggagagtagcataatcgcaggcgatgagatccagcatcggaggtcaccgtga

SEQ ID NO: 2148 - protein, 450 aa, Oryza sativa
MSVSGGRTRVGRYELGRTLGEGTFAKVKFARNADSGENVAIKILDKDKVLKHKMIAQIKREISTMKLIRHPNVIRMHEVMASKTKIYIVMELVTGGELFDKIASRGRLKEDDARKYFQQLINAVDYCHSRGVYHRDLKPENLLLDASGTLKVSDFGLSALSQQVREDGLLHTTCGTPNYVAPEVINNKGYDGAKADLWSCGVILFVLMAGYLPFEDSNLMSLYKKIFKADFSCPSWFSTSAKKLIKKILDPNPSTRITIAELINNEWFKKGYQPPRFETADVNLDDINSIFNESGDQTQLVVERREERPSVMNAFELISTSQGLNLGTLFEKQSQGSVKRETRFASRLPANEILSKIEAAAGPMGFNVQKRNYKLKLQGENPGRKGQLAIATEVFEVTPSLYMVELRKSNGDTLEFHKFYHNISNGLKDVMWKPESSIIAGDEIQHRRSP

SEQ ID NO: 2149 - DNA, 1350 bp, Oryza sativa
  CDS (1)..(1350)
atgagcgtgtcgggcgggaggacgcgggtggggaggtacgagctcgggaggacgctcggcgagggcaccttcgccaaggtcaagttcgcccgcaacgcggactccggcgagaatgtcgccatcaagatcctcgacaaggacaaggtcctcaagcacaagatgatcgcccagataaagcgcgagatctccaccatgaagctcatcaggcaccccaacgtcatccggatgcatgaggtgatggccagcaagaccaaaatatacatagtgatggagcttgtcaccggtggtgaacttttcgacaagattgcttcgcgtgggaggctgaaagaggatgatgcaaggaagtattttcagcagctgatcaacgctgtcgattactgtcatagcagaggagtctatcaccgggatctcaagcccgaaaatcttctgcttgatgctagtggcactctcaaagtatcagattttgggctgagtgcactgtctcaacaagtcagagaggatggtctgttgcacactacctgtggaactcctaattatgttgctcccgaggttatcaacaacaaaggatatgatggagccaaggctgatctgtggtcatgtggagtgattctctttgtcctcatggcaggctaccttccatttgaagactcaaacctcatgtcactttacaagaagatcttcaaagcagacttcagttgcccgtcttggttctctacaagtgcgaagaagctcatcaagaaaatactagatcctaatcctagcaccaggattaccatcgcagagcttatcaacaatgagtggttcaagaagggatatcagcctccaaggtttgagacagcagatgttaacctggatgatatcaactctatttttaatgaatctggggaccaaacacagcttgttgtcgagaggcgagaagagaggccatcagtgatgaatgcttttgagttgatctctacatctcagggtctcaatcttggcacactctttgaaaagcaatcgggttctgtgaagcgagaaacaagatttgcatcaaggctgcctgcaaacgagatattgtcgaaaattgaagcagctgctggacccatgggctttaatgtacagaagcgcaactacaagctgaagttgcaaggagagaatccaggaaggaaaggtcagcttgcaattgcaacagaggtttttgaagtcacgccctcgctgtacatggttgagctccgcaaatctaacggcgacactcttgaattccataagttctaccacaacatctccaatggcctgaaagatgtgatgtggaagccggagagtagcataatcgcaggcgatgagatccagcatcggaggtcaccgtga

SEQ ID NO: 2150 - protein, 449 aa, Oryza sativa
MSVSGGRTRVGRYELGRTLGEGTFAKVKFARNADSGENVAIKILDKDKVLKHKMIAQIKREISTMKLIRHPNVIRMHEVMASKTKIYIVMELVTGGELFDKIASRGRLKEDDARKYFQQLINAVDYCHSRGVYHRDLKPENLLLDASGTLKVSDFGLSALSQQVREDGLLHTTCGTPNYVAPEVINNKGYDGAKADLWSCGVILFVLMAGYLPFEDSNLMSLYKKIFKADFSCPSWFSTSAKKLIKKILDPNPSTRITIAELINNEWFKKGYQPPRFETADVNLDDINSIFNESGDQTQLVVERREERPSVMNAFELISTSQGLNLGTLFEKQSGSVKRETRFASRLPANEILSKIEAAAGPMGFNVQKRNYKLKLQGENPGRKGQLAIATEVFEVTPSLYMVELRKSNGDTLEFHKFYHNISNGLKDVMWKPESSIIAGDEIQHRRSP

SEQ ID NO: 2151 - DNA, 1020 bp, Oryza sativa
  CDS (1)..(1020)
atggagaggtacgaggtgatcaaggacatagggtcggggaacttcggcgtggccaagcttgtccgggatgtgcggaccaaggagctgtttgccgtcaagttcatcgagagggggcagaagatcgacgagaatgtccaaagggagattatgaaccacaggtcactgaggcatccgaacattgttagattcaaggaggttgtgctaactcccacacatttggccatagttatggaatatgctgctggaggtgagctattcgaaaggatttgcagtgctgggaggtttagcgaggatgaggcaaggttcttcttccagcagttgatttcaggagttagctactgtcattccatgcaaatatgtcatagagatttgaaactagaaaatactctcttggatgggagcatagcacctcggctcaagatatgtgattttggttactcaaagtcctctttgttgcactctcaaccgaaatctactgtcggtactccagcttatatcgctcctgaggtccttgctagaaaagaatatgatggaaaggttgctgacgtttggtcatgtggagtaactctatatgtgatgcttgttggtgcgtacccctttgaggaccctgacgaaccaagaaacttccgcaagacaattactcggatactaagcgtacaatacatggttcctgattatgttcgagtttcgatggaatgcagacatcttctgtcccggattttcgtggcaaacccagagcaacgaattaccattcctgagatcaagaaccacccatggttcctcaagaacctgccgatcgagatgactgacgagtaccagatgagcgtccagatgaacgacatcaacaccccgtcacagggcctggaggagatcatggccatcatacaggaggcgcggaagccgggtgatggctccaaattctccgggcagatcccgggcctagggagcatggagctcgacgacgttgacaccgacgacatcgacgtcgaggacagcggcgacttcgtgtgcgcattgtga

SEQ ID NO: 2152 - protein, 339 aa, Oryza sativa
MERYEVIKDIGSGNFGVAKLVRDVRTKELFAVKFIERGQKIDENVQREIMNHRSLRHPNIVRFKEVVLTPTHLAIVMEYAAGGELFERICSAGRFSEDEARFFFQQLISGVSYCHSMQICHRDLKLENTLLDGSIAPRLKICDFGYSKSSLLHSQPKSTVGTPAYIAPEVLARKEYDGKVADVWSCGVTLYVMLVGAYPFEDPDEPRNFRKTITRILSVQYMVPDYVRVSMECRHLLSRIFVANPEQRITIPEIKNHPWFLKNLPIEMTDEYQMSVQMNDINTPSQGLEEIMAIIQEARKPGDGSKFSGQIPGLGSMELDDVDTDDIDVEDSGDFVCAL

SEQ ID NO: 2153 - DNA, 1335 bp, Oryza sativa
  CDS (1)..(1335)
atgcggatggggaagtacgagatggggcgggcgctgggagaggggcacttcggcaaggtgaagctggcgcgccacgccgacaccggcgccgccttcgccatcaagatcctcgaccgccaacgcatcctcgccatgaagatcgacgaacagataaagagggagatcgccacgttgaagctgctcaagcaccccaatgtcgtccgcctccacgaggtttcagctagcaaaaccaagatatacatggttcttgaatatgtaaatggaggagagctattcgacaaaattgcattaaagggtaagttgtcagagaaggaaggaagaaaactcttccagcagctgatggatgctgtaagctattgccatgagaagggagtttatcatagggaccttaagccggagaatgtcctagttgatgcaaaaggaaacataaaggtttcggattttggactaagtgcccttccacaaaatcaacggaaagatggattgttgcataccacatgtggcagccctaactacatcgcccctgaggtccttctcaacagaggttatgatggctctttgtccgacatatggtcttgtggggttatcctatatgtcatgcttacagggaatcttccatttgatgaccaaaatacggttgtcctttatcagaagattctgaagggggatgctcgtattcctaaatggctttccccaggtgcccaagatatactgcgaaaaatcttggatcctaacccaattacacgcttagatataactggaataagggcacatgagtggttcaggcaagattatactcctgctatgcctttcgatgatgatgacgacaacaatatcagtgatggcaacctacatatgactgagaatcaagatattgaaaccagcccagcaatcagccaaatcaatgcattccagctcattgggatgtcctcatgccttgatctatctggattttttgagaaagaagatgtttctgaaaggaaaatcagatttgtatcaaattattcccctacttctctatttgagaagattgagagcactgtcacagaaaagggtttccaggtacagaagaacagtggcaagctaaaagtgatccaagtttgtaaagaaccagcaaatccaagaggacatggaaatttattgatttctgctgaggtgtttgagatcaatgaatctctttatgttgttgagctaaaaaggtcatctggggattgttccctttacagacagctatgtgcgtcactttctgaagacttgggcatatgcaaaaggcaacagcttttgaagaaagattctatgagacaagacctttgtcgatataacagtagcttttga

SEQ ID NO: 2154 - protein, 444 aa, Oryza sativa
MRMGKYEMGRALGEGHFGKVKLARHADTGAAFAIKILDRQRILAMKIDEQIKREIATLKLLKHPNVVRLHEVSASKTKIYMVLEYVNGGELFDKIALKGKLSEKEGRKLFQQLMDAVSYCHEKGVYHRDLKPENVLVDAKGNIKVSDFGLSALPQNQRKDGLLHTTCGSPNYIAPEVLLNRGYDGSLSDIWSCGVILYVMLTGNLPFDDQNTVVLYQKILKGDARIPKWLSPGAQDILRKILDPNPITRLDITGIRAHEWFRQDYTPAMPFDDDDDNNISDGNLHMTENQDIETSPAISQINAFQLIGMSSCLDLSGFFEKEDVSERKIRFVSNYSPTSLFEKIESTVTEKGFQVQKNSGKLKVIQVCKEPANPRGHGNLLISAEVFEINESLYVVELKRSSGDCSLYRQLCASLSEDLGICKRQQLLKKDSMRQDLCRYNSSF

SEQ ID NO: 2155 - DNA, 1332 bp, Oryza sativa
  CDS (1)..(1332)
atgccgccctccaccggctccgtcccacccgccgcatcaacgccggcggctggggacgaggccaccgccgccgggagggtactcctcggcaggtacgagctcggcggcctcctcggccgcggcgcctccgccaaggtgtacctcgcccgcgacctcctcaccggccgcgacgtcgccatcaagtccttccccaacccccgccacggcggcggcctccgcggcggcgaggaggatgtcctcctccgccccgcgcccatcgagcgggaggcggccattctccccaggctgcgccaccgccacgtgatgcgcctccgcgagattctggccacgcgcaagaaggtccacttcgtcctcgacctcgccgccggcggcgagctcttctccctgctcgacgcgtccggccgcatgacggaggacctcgcgcggcactacttccggcagctcatctccgccgtccggtactgccactcccgtggcgtgtaccaccgcgacatcaagccggagaacctcctcctcgacgacgcgggcgacctcaaggtggccgacttcggcctcggcgccgtcgccgacggcgccctccaccacaccctctgcggcaccccggcctacgtggcgccggagatcctgtcgaggaaggggtacaacccagcgaaggtggacatctggtcctgcggcgtcgtcctcttcgtgctcgccgcggggtacctccccttcaacgacgccagcctcgtcaacatgtaccgcaagatctacgccggcaagttccggtgcccggcctggttctcgccggagctccggtgcctggtccgccgcatcctggaccccaacccggcgacccgcattgacacggaggagatcatcacccacccgtggttccgccaggacgcgagccacttcgcgatggcgcagctgatgcagcacggccacgacgaggaggccaaattcaagaccgagttcaaggaggacgacatggcccgggacatgacggcgttcgacatactcgcatgctcccctggctccgacctctccggcctcttcggcgccgagccggggaaggagcgggtgttcgtcggcgagccggcggcggcggtgctatcccgagtggaggaggccgggaagaaggaagggtacatggtaacgagagaagggaagaagggcaccgggccggtgtacgtgaaaggcgagaacggcggcattgtggccaaggtctgcgtgttcaagatcgccgacgcggtgtccgtcgtcgaggtggtgaaaggctacggcgccgaggccgcccggttctggaaggccaggctcgagccggcgatgaagcctccggcagccatctga

SEQ ID NO: 2156 - protein, 443 aa, Oryza sativa
MPPSTGSVPPAASTPAAGDEATAAGRVLLGRYELGGLLGRGASAKVYLARDLLTGRDVAIKSFPNPRHGGGLRGGEEDVLLRPAPIEREAAILPRLRHRHVMRLREILATRKKVHFVLDLAAGGELFSLLDASGRMTEDLARHYFRQLISAVRYCHSRGVYHRDIKPENLLLDDAGDLKVADFGLGAVADGALHHTLCGTPAYVAPEILSRKGYNPAKVDIWSCGVVLFVLAAGYLPFNDASLVNMYRKIYAGKFRCPAWFSPELRCLVRRILDPNPATRIDTEEIITHPWFRQDASHFAMAQLMQHGHDEEAKFKTEFKEDDMARDMTAFDILACSPGSDLSGLFGAEPGKERVFVGEPAAAVLSRVEEAGKKEGYMVTREGKKGTGPVYVKGENGGIVAKVCVFKIADAVSVVEVVKGYGAEAARFWKARLEPAMKPPAAI

SEQ ID NO: 2157 - DNA, 1332 bp, Oryza sativa
  CDS (1)..(1332)
atggcggagcagagaggaaatatgttgatgaaaaagtatgagatggggaaattactcgggcaaggaacctttgccaaggtttaccatgcccgtaacaccgagacttctgagagtgttgctatcaagatgattgataaagagaaggttttgaaaggcgggctcatggatcagatcaaacgtgagatttctgtgatgaagttggtgaggcatccaaacattgtgcagttatatgaggtcatggctaccaagactaagatatattttgtgctggagcacgtcaaaggtggagagttgttcaacaaagttcagagaggaagactaaaggaagatgcagcaaggaagtacttccaacaactgatttgcgctgttgacttttgccacagcaggggtgtttatcaccgtgatttgaagccagaaaatcttcttcttgatgagaacagcaatctgaaggtttcagattttggcctaagtgctcttgctgattgcaaaagacaggatgggctgctccacacaacctgtggcacacctgcttatgttgctccagaagtgatcaacagaagaggctatgacggtgctaaggctgacatatggtcttgtggagtgatactctttgtgctattggccggctatctacctttccatgataagaacttgatggatatgtataagaagattgggaaagcagaattcaaatgtccaagttggtttaataccgatgttcgaaggctcttgctcaggatacttgatcctaacccaagtacaaggatctcaatggacaaaatcatggaaaatccttggtttaggaagggtctcgatgcaaagctgctcagatataatctacaaccaaaggatgcaattcctgttgatatgagcacagattttgactccttcaatagcgctccaacattggagaagaagccgtccaacttgaatgcttttgatataatttctttgtcaactggacttgacctctctggtatgtttgaggagtctgataagaaagagtccaaattcacatccaccagtacagcttcaacaatcatatctaagattgaggatattgccaagggcttgcggttgaagctcacaaagaaagatggtggactgttgaagatggaaggctccaagcctggaaggaaaggtgttatgggcattgatgcagagatattcgaggttaccccaaactttcatcttgtggagctaaagaagacaaatggtgatacacttgaataccgtaaggtcttgaaccaagagatgagaccagctttgaaggacatagtctgggcttggcagggtgagcaaccgaagcagcagcagcagccaacgtgctaa

SEQ ID NO: 2158 - protein, 443 aa, Oryza sativa
MAEQRGNMLMKKYEMGKLLGQGTFAKVYHARNTETSESVAIKMIDKEKVLKGGLMDQIKREISVMKLVRHPNIVQLYEVMATKTKIYFVLEHVKGGELFNKVQRGRLKEDAARKYFQQLICAVDFCHSRGVYHRDLKPENLLLDENSNLKVSDFGLSALADCKRQDGLLHTTCGTPAYVAPEVINRRGYDGAKADIWSCGVILFVLLAGYLPFHDKNLMDMYKKIGKAEFKCPSWFNTDVRRLLLRILDPNPSTRISMDKIMENPWFRKGLDAKLLRYNLQPKDAIPVDMSTDFDSFNSAPTLEKKPSNLNAFDIISLSTGLDLSGMFEESDKKESKFTSTSTASTIISKIEDIAKGLRLKLTKKDGGLLKMEGSKPGRKGVMGIDAEIFEVTPNFHLVELKKTNGDTLEYRKVLNQEMRPALKDIVWAWQGEQPKQQQQPTC

SEQ ID NO: 2159 - DNA, 1338 bp, Oryza sativa
  CDS (1)..(1338)
atgtataaggctaaaaggactgctgcccagaaagtaaggcgctgccttggaaaatatgagcttggacgcgcaattggtcaaggaacttttgcaaaggttaggtttgcaaagaacatggagaccggtgatcatgttgctattaagatccttgacaaagcgaaggttcagaagcacagattagtcgaacagattagacgggaaatttgtacaatgaagttgatacaacaccccaatgttgttcacctgcatgaggtgatgggaagtaaaacaaggattttcattgttctagaatatgtgatgggaggagagctccatgatattattgccacaagtggaaggttgaaggaggatgaagcacggaaatactttcagcaactgatcaacgccgtagattactgccacagtaggggtgtataccacagagacctgaagttagagaatttgttgcttgatactgccgggaacatcaaagtctcggactttggcctaagtgctatatctgagcaagtgaaggctgatggattactacatactacatgtggaacacctaattatgttgctcctgaggttattgaagataagggctacgatggtgctcttgcagacctttggtcatgtggagtaattctttttgtgctgcttgcaggatatcttccttttgaggatgaaaatattgtctccctttataacaagatttctggagctcagtttacttgtccctcttggttttctgctgaagctaagaggctcattgctagaattctggatccaaatcctgctactcggataactacttctcaagtgctacaagatcaatggttcaaaaaaggctatgagtcccctgttttcgatgacaaatattacccttatttccacgatgtttatgatgcttttggagactcagaagaaaaacatgtgaaagaggctatggaagagcagccaaccttgatgaatgcctttgagttgatttcactaaataagggtctgaatctagacaatttttttgagtctgataagaagtacaagagagagacaagatttacatcgcagtgccctccgaaagaaatcatcaataggatcgaagaagctgctaacttactaggatttaatattcagaagagaaactacaggatgagaatggagaatataaaggaaggaagaaaaggacatctaaacattgcaactgaggttttccaagtggcaccatccttacatgtggttgagctcaaaaaggccaagggagataccctggagtttcaaaagttctaccaaacgctctcgacgcaactaaaagatgttgtttgggaattagaagatgcggctgaggatatgagctaa

SEQ ID NO: 2160 - protein, 445 aa, Oryza sativa
MYKAKRTAAQKVRRCLGKYELGRAIGQGTFAKVRFAKNMETGDHVAIKILDKAKVQKHRLVEQIRREICTMKLIQHPNVVHLHEVMGSKTRIFIVLEYVMGGELHDIIATSGRLKEDEARKYFQQLINAVDYCHSRGVYHRDLKLENLLLDTAGNIKVSDFGLSAISEQVKADGLLHTTCGTPNYVAPEVIEDKGYDGALADLWSCGVILFVLLAGYLPFEDENIVSLYNKISGAQFTCPSWFSAEAKRLIARILDPNPATRITTSQVLQDQWFKKGYESPVFDDKYYPYFHDVYDAFGDSEEKHVKEAMEEQPTLMNAFELISLNKGLNLDNFFESDKKYKRETRFTSQCPPKEIINRIEEAANLLGFNIQKRNYRMRMENIKEGRKGHLNIATEVFQVAPSLHVVELKKAKGDTLEFQKFYQTLSTQLKDVVWELEDAAEDMS

SEQ ID NO: 2161 - DNA, 1356 bp, Oryza sativa
  CDS (1)..(1356)
atgatggcggcggcggcggaggagggggaggggaagaagggcggcggcacggtgctgcaggggaggtacgagatggggcgggtgctcggccacggcaacttcgggcgggtgcacgtggcgcgggacctgaggaccgggaggagcgtggcggtgaaggtggtggcgaaggagaaggtggtgcgcgccgggatgatggagcagatcaagcgggagatcgccgtcatgaagcgcgtctcccaccccaacatcgtcgagctccacgaggtgatggccacgcgctccaagatctacctcgcgctcgagctcgtccgcggcggggagctcttcggccgcatcgtccgcctcggccgcgtcagggaggacgccgcgcggcactacttccggcagctcgtctccgccgtcgacttctgccactcccgcggcgtctaccaccgcgacctcaagccggagaacctgctgctcgacgaggccgggaacctcaaggtggtcgacttcggcctcagcgcgctcgccgaccacgcccgcgccgacggcctcctccacacgctctgcggcacgccggggtacgccgcgcccgaggtgctccgcgacaagggctacgacggcgccaaggccgacctctggtcctgcggcgtcatcctctacgtgctcctcgccgggtccctcccgttccccgacgacaacatcgtcaccctgtaccggaaggcccagcgcggcgactaccggtgcccggcgtggctgtccaccgacgcgcgccgcctcatccccaggctgctcgaccccaacccgaccacccgcatcagcgtcgcgcagctcgtcgagacgccgtggttcaagaagacgtccatctccaggcctgtgagcatagagcttcctccggcctttgccgatcctgctccggctaaggaggaggccgagaaggacgagccggagacgctgaacgcgttccacctgatatcactctcggaggggttcgacctctcgccgctgttcgagggggactcggccaaggggaggcgggacggtggcatgctgttcgcgacgcgggagccagcgagcggcgtgatctcccgcctcgagggggtggcggcgcgcggcggcggccggatgcgggtgaccaagagcggcgcccgcggcgtgcgcctggagggcgcggagcgcggcggggccaagggccgcctcgccgtggccgccgacatcttcagcgtggcgccctccgtcctcgtcgtcgacgtcaagaaggacggcggcgacacgctcgagtaccgctcattctgcagcgaggagctccggccggcgctccaggacatcgtctggggcgccgccgccgacccaacgccgaccgccgccgtctga

SEQ ID NO: 2162 - protein, 451 aa, Oryza sativa
MMAAAAEEGEGKKGGGTVLQGRYEMGRVLGHGNFGRVHVARDLRTGRSVAVKVVAKEKVVRAGMMEQIKREIAVMKRVSHPNIVELHEVMATRSKIYLALELVRGGELFGRIVRLGRVREDAARHYFRQLVSAVDFCHSRGVYHRDLKPENLLLDEAGNLKVVDFGLSALADHARADGLLHTLCGTPGYAAPEVLRDKGYDGAKADLWSCGVILYVLLAGSLPFPDDNIVTLYRKAQRGDYRCPAWLSTDARRLIPRLLDPNPTTRISVAQLVETPWFKKTSISRPVSIELPPAFADPAPAKEEAEKDEPETLNAFHLISLSEGFDLSPLFEGDSAKGRRDGGMLFATREPASGVISRLEGVAARGGGRMRVTKSGARGVRLEGAERGGAKGRLAVAADIFSVAPSVLVVDVKKDGGDTLEYRSFCSEELRPALQDIVWGAAADPTPTAAV

SEQ ID NO: 2163 - DNA, 1371 bp, Oryza sativa
  CDS (1)..(1371)
atggcgaggagagcgcgggaagaggaagcggatcaggtggagaggaagctggtgctggggcggtacgagctcgggaggctgctggggcagggcacgttcgccaaggtgtactacggccgtgacctccggtccggtgagagcgtggcgatcaaggtgatcgacaaggcgcggctccgtcgcacggaagggatggtggagcagctgcggcgtgagatctccatcatgcggatggtgcgccaccccaacgtggtggggatccgcgaggtgctcgccagccgcgcccgcgtgttcgtcgtcatggagtacgcccgcggcggggagctgttcgccaaggtggcgcgcgggcggctcaccgaggagcacgcgaggaggtacttccagcagctcgtcgccgccgtcgggttctgccacggccgcggcgtcgcgcaccgggacctcaagcccgagaacctgctgctcgacgaggaggggcggctcaaggtcaccgacttcggcctcgccgcgctgcccgagcagctgcgacaggacggcctcctccacacgcagtgcggcaccccggcgtacgtcgcgcccgaggtgctccggaagcgcggctatgacggcgcccgcgccgacctctggtcctgcggcgtcgtgctctacgtgctcctctgcggcttcctcccgttccagcacgagaactacgccaagatgtaccagaagatcttcaaggcggagtaccaggtgccgccgtgggtgtccggcgacgcgcgccgcctcatcgtccgcctgctcgtcgtcgacccggccaagcgcatctccatcccggagatcatgcgcacgccatggttcaagaagggcttcgtgccgcccgtccccacctcccctgtctcccccaagaaatgggaagaagacgatgtcctcctcgacggcggcgactccggcgccatgtcgccccggacgtgcaacgcgttccagctcatatcctccatgtcctccgggttcgacctgtcggggatgttcgagagcgagcagaaggccgccacggtgttcacgtcgcgcgcgccggcggccaccgtcatccagaagctggaggccgtggggcgatcgctgggttacagcgccacgagagggaaagggtggaagctgaggttggaggcgacggcggacggagcaaacgggcggctcgcggtcaccgtcgaggcgctcgaggtggccgccgacgtcgcggtggtcgagttcgcgcacgacgccggcgacgagctcgagttcaacaagttctgcgccgtcgacgtgcggccggggctcgccgacattgtctgggcgtggcagggcgaccggccggcggcgcccgacgttgccgccgccaccgtcgagtgctcgccggcgtga

SEQ ID NO: 2164 - protein, 456 aa, Oryza sativa
MARRAREEEADQVERKLVLGRYELGRLLGQGTFAKVYYGRDLRSGESVAIKVIDKARLRRTEGMVEQLRREISIMRMVRHPNVVGIREVLASRARVFVVMEYARGGELFAKVARGRLTEEHARRYFQQLVAAVGFCHGRGVAHRDLKPENLLLDEEGRLKVTDFGLAALPEQLRQDGLLHTQCGTPAYVAPEVLRKRGYDGARADLWSCGVVLYVLLCGFLPFQHENYAKMYQKIFKAEYQVPPWVSGDARRLIVRLLVVDPAKRISIPEIMRTPWFKKGFVPPVPTSPVSPKKWEEDDVLLDGGDSGAMSPRTCNAFQLISSMSSGFDLSGMFESEQKAATVFTSRAPAATVIQKLEAVGRSLGYSATRGKGWKLRLEATADGANGRLAVTVEALEVAADVAVVEFAHDAGDELEFNKFCAVDVRPGLADIVWAWQGDRPAAPDVAAATVECSPA

SEQ ID NO: 2165 - DNA, 1215 bp, Oryza sativa
  CDS (1)..(1215)
atggaggggaagggggtgctggaggggaggtacgagatggggcgggtgctgggccacggcaacttcggtcgtgtgcacgcggcgcgggacgtgcgcacggggcgcgccgtggcgatgaaggtggtgtccaaggacaaggtggagcgcgccgggatggcggagcagatcaagcgggagatcgccgtgatgaagatggtgtcccacccgagcgtcgtggagctccacgaggtgatggccacgcgcaccaaggtgtacctggcgctcgagctcgtccggggcggcgagctgttcgaccggatcgcccgccacggccgcgtcggggagggcgtcgcgcggaggtacttccgccagctcgtctccgccgtcgacttctgccacggccgcggggtgtaccaccgcgacctgaagcccgagaacctgctgctcgacgaggccgggaacctcaaggtcgccgacttcgggctcagcgcgctcgcctgccacgcgcgccccgacggcctcctccacaccgcctgcggcacgccggcgtacgtcgcccccgaggtgctcgccggcaacggctacgacggcgccaaggccgacctctggtcctgcggcgtcatcctctacgtgctgctcgccggcgcgctgccgttccaggacgacaacctcgtgtgcatgtaccgcaagatgcggcggggtgacttctgctgcccgccgtgggtgacgacggacgcccggaagctcatcaagtcgctgctcgaccccaacccgggcacccgcatcaccgtcgccggcctcctcgagacgccgtggttccggaagacggcgcccgtcccgcgccccatcatcgccgaccccgcggcggcgccggtggacacgcgtggcaatgccggcgacgacaaggacgagccgcccgaggtgctgaacgccttccacctgatctccctgtccgagggcttcgacctgtcgccgctgttcgagcacgaccccgccgcgtcgccggggcgggccacggcgcgcgcgggcggcacgcggttcgcgacgcgggaggcggcgagcggcgtggtcgcgcggctggaggcgctcgcgatgggcggcgcacgcgtggcgccgtcgttgctcatggtggacgtcaagaaggatggcggcgacgccatggagtaccggccgttcttcagcgaggagctccggccggcgctcaaggacatcgtctggtcgccggcggcgacctga

SEQ ID NO: 2166 - protein, 404 aa, Oryza sativa
MEGKGVLEGRYEMGRVLGHGNFGRVHAARDVRTGRAVAMKVVSKDKVERAGMAEQIKREIAVMKMVSHPSVVELHEVMATRTKVYLALELVRGGELFDRIARHGRVGEGVARRYFRQLVSAVDFCHGRGVYHRDLKPENLLLDEAGNLKVADFGLSALACHARPDGLLHTACGTPAYVAPEVLAGNGYDGAKADLWSCGVILYVLLAGALPFQDDNLVCMYRKMRRGDFCCPPWVTTDARKLIKSLLDPNPGTRITVAGLLETPWFRKTAPVPRPIIADPAAAPVDTRGNAGDDKDEPPEVLNAFHLISLSEGFDLSPLFEHDPAASPGRATARAGGTRFATREAASGVVARLEALAMGGARVAPSLLMVDVKKDGGDAMEYRPFFSEELRPALKDIVWSPAAT

SEQ ID NO: 2167 - DNA, 1305 bp, Oryza sativa
  CDS (1)..(1305)
atggagagtagagggaagattctaatggagaggtatgagttggggagattgttggggaaaggaacatttggcaaggtgcactatgcaaggaatctggagtcaaaccagagtgtggccataaagatgatggacaaacagcagatattgaaggtcgggctttcggagcagatcagacgtgagatcacaaccatgcggttggtggctcataagaacattgttcagcttcatgaggtcatggcaacacggaacaagatctactttgtgatggagtatgtgaaaggtggtgagctatttgaaaaggttgcaaagcgtggaaagcttacagaggttgttgcacataagtatttccagcaactcattagtgcagtggattactgccacagtcgaggtgtgtatcaccgggacttgaagcctgagaacctactgttggatgagaatgagaacctgaaagtctcagactttggattgagtgcgctttcagagtcgaagaggcaagatggcttactccataccacctgtggaacacctgcatatgtagctccagaggtgattagcaagataggctatgatggtgcaaagtcagatatttggtcttgtggtgttatcctgtttgttcttgttgctggttaccttcctttccagggcccaaacttgatggaaatgtatcggaagatacaacacggtgaattcaggtgccccggttggttttcacgcaaactccagaagttgttgtacaagatcatggaccccaacccaagcacaaggatttcaatccagaagataaaggagtctacctggttccggaaaggtcctgaggagaaccgtattttgaaggaaagaactttgaatgaaaacaccaccaaaaatgttgctccggtgcttggtgtgagacgcaagaaaaatgctcatgaagatgtgaagcccatgtcagtgacaaacttaaatgcttttgaaattatctctttctccaagggatttgatctctctggcatgttcattgtaaaggaatggagaaatgaggcaaggttcacttcagataaatctgcctcaaccataatctcaaagctagaagatgtagcaaaggcgctaaatctcagggtaaggaagaaagacaatggtgtagtgaagatgcaagggaggaaggagggaaggaatggtgttcttcagtttgacatagagatatttgaggttaccacttcctatcatatcatcgagatgaaacaaacaagtggcgattcattggagtaccgacagctactggaggagggcatccggccagctctgaaggacattgtcttggcctag

SEQ ID NO: 2168 - protein, 434 aa, Oryza sativa
MESRGKILMERYELGRLLGKGTFGKVHYARNLESNQSVAIKMMDKQQILKVGLSEQIRREITTMRLVAHKNIVQLHEVMATRNKIYFVMEYVKGGELFEKVAKRGKLTEVVAHKYFQQLISAVDYCHSRGVYHRDLKPENLLLDENENLKVSDFGLSALSESKRQDGLLHTTCGTPAYVAPEVISKIGYDGAKSDIWSCGVILFVLVAGYLPFQGPNLMEMYRKIQHGEFRCPGWFSRKLQKLLYKIMDPNPSTRISIQKIKESTWFRKGPEENRILKERTLNENTTKNVAPVLGVRRKKNAHEDVKPMSVTNLNAFEIISFSKGFDLSGMFIVKEWRNEARFTSDKSASTIISKLEDVAKALNLRVRKKDNGVVKMQGRKEGRNGVLQFDIEIFEVTTSYHIIEMKQTSGDSLEYRQLLEEGIRPALKDIVLA

SEQ ID NO: 2169 - DNA, 1365 bp, Oryza sativa
  CDS (1)..(1365)
atgagtacaaccaaagtgaagagacgtgtgggaaagtatgagctaggaagaacaatcggagagggcacattcgcgaaggtcaagttcgcgagggataccgagaccggtgatccagtagccatcaagatcctagacaaggagaaagttctcaagcataagatggtcgaacagattaaaagggaaatttcgacgatgaagttgattaagcacccaaatgttgtccgtatatatgaggtgatgggaagcaagacaaatatctacattgttttagaatatgttaccggtggtgagctctttgatacaattgttaaccatggtcgtatgagggaagatgaggcaagaaggtacttccaacaattaattaatgctgttgattattgtcatagcaggggtgtgtaccacagggacttaaaaccagaaaatttactactagattcatatgggaatctgaaggtctctgattttgggctgagtgcactatctcagcaaattaaggatgatggtttgctgcacacaacctgtgggacaccaaattatgttgcaccggaggtccttgaagatcaaggatatgatggagcaatggcagatttgtggtcatgtggagttatcctgttcgttctgctagcagggtatttgccttttgaggactctaatcttatgacgttgtataagaaaatatcaaatgcagagtttacgtttccaccttggacgtcttttcctgccaagaggttgttaacaagaatccttgatccaaacccaatgacgagaataacaattccagaaatattagaggatgaatggttcaaaaagggctacaaacgcccagagtttgacgaaaaatatgacacgacattggatgatgttgatgctgtcttcaatgactctgaagagcaccatgtgacagaaaagaaagaagaaccagaagctctcaatgcatttgaactgatttcaatgtcagcaggcctcaatcttggaaatttgtttgactcagagcaggaattcaaaagggaaacaaggttcacatcaaaatgtccaccaaaagaaattgtccgcaagattgaggaagccgcaaaacctctaggatttgatgttcagaagaaaaattacaagatctgctccccttgcctaacaactatctgcatgaatatcccttttaaattaaggctagaaaaagtaaaagcagggagaaaaggaaatctcaatgttgctactgagatactgcaggttgcaccctctcttcatatggttgaagtacgaaaagcaaaaggcgacaccctcgaatttcacaagttctacaagaacctctccagaaccttaaaggatgttgtttggaaatcagatgatcttcaaaatcaactttcctag

SEQ ID NO: 2170 - protein, 454 aa, Oryza sativa
MSTTKVKRRVGKYELGRTIGEGTFAKVKFARDTETGDPVAIKILDKEKVLKHKMVEQIKREISTMKLIKHPNVVRIYEVMGSKTNIYIVLEYVTGGELFDTIVNHGRMREDEARRYFQQLINAVDYCHSRGVYHRDLKPENLLLDSYGNLKVSDFGLSALSQQIKDDGLLHTTCGTPNYVAPEVLEDQGYDGAMADLWSCGVILFVLLAGYLPFEDSNLMTLYKKISNAEFTFPPWTSFPAKRLLTRILDPNPMTRITIPEILEDEWFKKGYKRPEFDEKYDTTLDDVDAVFNDSEEHHVTEKKEEPEALNAFELISMSAGLNLGNLFDSEQEFKRETRFTSKCPPKEIVRKIEEAAKPLGFDVQKKNYKICSPCLTTICMNIPFKLRLEKVKAGRKGNLNVATEILQVAPSLHMVEVRKAKGDTLEFHKFYKNLSRTLKDVVWKSDDLQNQLS

SEQ ID NO: 2171 - DNA, 1320 bp, Oryza sativa
  CDS (1)..(1320)
atggagagtagagggaagatactaatggagaggtatgagttgggcagattgttggggaaaggaacatttggcaaggtgcactatgcaaggaatctggagtcaaaccagagtgtggccataaagatgatggacaaacagcaggtgttgaaggtcgggctttcggagcagatcagacgtgagatcacaaccatgcggttggtggctcataagaacattgttcagcttcatgaggtcatggcaacacggaacaagatctactttgtgatggagtatgtgaaaggtggtgagctatttgaaaaggttgcaaagcgtggaaagcttacagaggttgttgcacataagtacttccagcaactcattagtgcagtggattactgccacagtcgaggtgtgtatcaccgggacttgaagcctgaaaacctgctgttggatgagaatgagaacctgaaagtctcagactttggactgagtgcgctttcagagtcgaagaggcaagatggcttactccataccacctgtggaacacctgcatatgtagctccagaggtgatcagcaagataggatatgatggtgcaaagtcagatatttggtcttgtggtgttatcctgtttgttcttgttgctggttaccttcctttccagggcccaaacttgatggaaatgtatcggaagatacaacatggtgaattcaggtgccccggttggttttcacgcaaacttcagaagttgttgtacaagatcatggaccccaacccaagcacaaggatttcaatccagaagataaaggagtctacctggttccggaaaggtcctgaggagaatcgtattttgaaggaaagaactttgaatgaaaacaccaccaaaaatgttgctctggtgcttggtgtgagacgcaagaaaaatgctcatgaagatgtgaagcccatgtcagtgacaaacttaaatgcctttgaaattatctctttctccaaggggtttgatctctctggcatgttcattgtaaaggaatggagaaatgaggcaaggttcacttcagataaatctgcctcaaccataatctcaaagctagaagatgtagcaaaggcgctaaatctcagggtaaggaagaaagacaatggtgtagtgaagatgcaagggaggaaggagggaaggaatggtgttcttcagtttgacatagagatatttgaggttaccacttcctatcatatcatcgagatgaaacaaacaagtggcgattcattggagtaccgacagctactggaggagggcatccggccagctctgaaggacattgtcttggcctggcatggagatgaatag

SEQ ID NO: 2172 - protein, 439 aa, Oryza sativa
MESRGKILMERYELGRLLGKGTFGKVHYARNLESNQSVAIKMMDKQQVLKVGLSEQIRREITTMRLVAHKNIVQLHEVMATRNKIYFVMEYVKGGELFEKVAKRGKLTEVVAHKYFQQLISAVDYCHSRGVYHRDLKPENLLLDENENLKVSDFGLSALSESKRQDGLLHTTCGTPAYVAPEVISKIGYDGAKSDIWSCGVILFVLVAGYLPFQGPNLMEMYRKIQHGEFRCPGWFSRKLQKLLYKIMDPNPSTRISIQKIKESTWFRKGPEENRILKERTLNENTTKNVALVLGVRRKKNAHEDVKPMSVTNLNAFEIISFSKGFDLSGMFIVKEWRNEARFTSDKSASTIISKLEDVAKALNLRVRKKDNGVVKMQGRKEGRNGVLQFDIEIFEVTTSYHIIEMKQTSGDSLEYRQLLEEGIRPALKDIVLAWHGDE

SEQ ID NO: 2173 - DNA, 1317 bp, Oryza sativa
  CDS (1)..(1317)
atgagtacaaccaaagtgaagagacgtgtgggaaagtatgagctaggaagaacaatcggagagggcacattcgcgaaggtcaagttcgcgagggataccgagaccggtgatccagtagccatcaagatcctagataaggagaaagttctcaagcataagatggtcgaacagattaaaagggaaatttcgacaatgaagttgattaagcacccaaatgttgtccgtatatatgaggtgatgggaagcaagacaaaaatctacattgttttagaatatgttaccggtggtgagctctttgatacaattgttaaccatggtcgtatgagggaagatgaggcaagaaggtacttccaacaattaattaatgctgttgattattgtcatagcaggggtgtgtaccacagggacttaaaaccagaaaatttactactagattcatatgggaatctgaaggtctctgattttgggctgagtgcactttctcagcaaattaaggatgatggtttgctgcacacaacctgcgggacaccaaattatgttgcaccggaggtccttgaagatcaaggatatgatggagcaatggcagatttgtggtcatgtggagttatcctgttcgttctgctagcagggtatttgccttttgaggactctaatcttatgacgttgtataagaaaatatcaaatgcagagtttacgtttccaccttggacgtcttttcctgccaagaggttgttaacaagaatccttgatccaaacccaatgacgagagtaacaattccagaaatattagaggatgagtggttcaaaaagggctacaaacgcccagagtttgacgaaaaatatgacacaacattggatgatgtttatgctgtcttcaatgactctgaagagcaccatgtgacagaaaagaaagaagaaccagaagctctcaatgcatttgaactgatttcaatgtcagcaggcctcaatcttgggaatttgtttgattcagagcaggaattcaaaagagaaacaaggttcacatcaaaatgtccaccaaaagaaattgtccgcaagattgaggaagccgcaaaacctctaggatttgatgttcagaagaaaaattacaagttaaggttggaaaaggtaaaagcagggagaaaaggaaatctcaatgttgctactgagatactgcaggttgcaccctctcttcatatggttgaagtacgaaaagcaaaaggcgacaccctcgaatttcataagttctacaagaacctctccagaaccttaaaggatgttgtttggaaatcagatgatcttcaaaatcaactttcctag

SEQ ID NO: 2174 - protein, 438 aa, Oryza sativa
MSTTKVKRRVGKYELGRTIGEGTFAKVKFARDTETGDPVAIKILDKEKVLKHKMVEQIKREISTMKLIKHPNVVRIYEVMGSKTKIYIVLEYVTGGELFDTIVNHGRMREDEARRYFQQLINAVDYCHSRGVYHRDLKPENLLLDSYGNLKVSDFGLSALSQQIKDDGLLHTTCGTPNYVAPEVLEDQGYDGAMADLWSCGVILFVLLAGYLPFEDSNLMTLYKKISNAEFTFPPWTSFPAKRLLTRILDPNPMTRVTIPEILEDEWFKKGYKRPEFDEKYDTTLDDVYAVFNDSEEHHVTEKKEEPEALNAFELISMSAGLNLGNLFDSEQEFKRETRFTSKCPPKEIVRKIEEAAKPLGFDVQKKNYKLRLEKVKAGRKGNLNVATEILQVAPSLHMVEVRKAKGDTLEFHKFYKNLSRTLKDVVWKSDDLQNQLS

SEQ ID NO: 2175 - DNA, 1017 bp, Oryza sativa
  CDS (1)..(1017)
atgagtacaaccaaagtgaagagacgtgtgggaaagtatgagctaggaagaacaatcggagagggcacattcgcgaaggtcaagttcgcgagggataccgagaccggtgatccagtagccatcaagatcctagataaggagaaagttctcaagcataagatggtcgaacagattaaaagggaaatttcgacaatgaagttgattaagcacccaaatgttgtccgtatatatgaggtgatgggaagcaagacaaaaatctacattgttttagaatatgttaccggtggtgagctctttgatacaattgttaaccatggtcgtatgagggaagatgaggcaagaaggtacttccaacaattaattaatgctgttgattattgtcatagcaggggtgtgtaccacagggacttaaaaccagaaaatttactactagattcatatgggaatctgaaggtctctgattttgggctgagtgcactttctcagcaaattaaggatgatggtttgctgcacacaacctgcgggacaccaaattatgttgcaccggaggtccttgaagatcaaggatatgatggagcaatggcagatttgtggtcatgtggagttatcctgttcgttctgctagcagggtatttgccttttgaggactctaatcttatgacgttgtataagaaaatatcaaatgcagagtttacgtttccaccttggacgtcttttcctgccaagaggttgttaacaagaatccttgatccaaacccaatgacgagagtaacaattccagaaatattagaggatgagtggttcaaaaagggctacaaacgcccagagtttgacgaaaaatatgacacaacattggatgatgtttatgctgtcttcaatgactctgaagagcaccatgtgacagaaaagaaagaagaaccagaagctctcaatgcatttgaactgatttcaatgtcagcaggcctcaatcttgggaatttgtttgattcagagcaggtacgtgatctccctatttaa

SEQ ID NO: 2176 - protein, 338 aa, Oryza sativa
MSTTKVKRRVGKYELGRTIGEGTFAKVKFARDTETGDPVAIKILDKEKVLKHKMVEQIKREISTMKLIKHPNVVRIYEVMGSKTKIYIVLEYVTGGELFDTIVNHGRMREDEARRYFQQLINAVDYCHSRGVYHRDLKPENLLLDSYGNLKVSDFGLSALSQQIKDDGLLHTTCGTPNYVAPEVLEDQGYDGAMADLWSCGVILFVLLAGYLPFEDSNLMTLYKKISNAEFTFPPWTSFPAKRLLTRILDPNPMTRVTIPEILEDEWFKKGYKRPEFDEKYDTTLDDVYAVFNDSEEHHVTEKKEEPEALNAFELISMSAGLNLGNLFDSEQVRDLPI

SEQ ID NO: 2177 - DNA, 1365 bp, Oryza sativa
  CDS (1)..(1365)
atggccatggctgccatggacgcgaggaagaagaagagcggcggcggcggcggcgagccgcttctcggcaagtatgagcttgggcggatgcttgggcgagggacgttcgccaaggtgtacctggcgcgcgcggtggccggcggcgaggcggtggcggtgaaggtgatcgacaaggcggaggtgatgggcacggcgggcatggcgccgcgcgtgctccgggaggtggcggcgatgcggcggctgcgccacccgcacgtgctgcgcctccacgaggtgctcgccacgcgcgccaggatctacctcgtcatggagctcgccaccggcggcgacctcctgtcgaggctggcggcgctgccgcggcggcgcctgcccgagagcgcggcgcgccgggtgttcgtccagctcgtcgacgcgctgtcctactgccacgcgcgcggcgtggcgcaccgtgacgtgaagccgcagaacgtcctcctcgacggcgacggcaacctcaaggtctccgacttcggcctcgccgcgctcccggacacgctccgcgacgacggccgcctccacaccgcgtgcggcacgccggcgtacgcggcgcccgaggtgctccgccgcagggcctacgacggcgccaaggccgacgcgtggtcgtgcggcgtcatcctcttcgtcctcctcgccggccacctccccttcgacgactccaacatcgccgacatgtgccggaaggcgcaccgccgcgagtacgagctcccgcggtgggtgtcccagccggcgcgccgcctggtgagccgcctgctcgacccgaacccggacacccgcgtcgccgtcgagtcgctggcggcgcaccacccgtggttcaagcgctcgctcagcgtcgactcccagctcgacggcctcctcaacggcgagccagagcgcgccgtggcgttccaggcggcgccgccgccgccgctgaacgcgttcgacatcatctccatgtctcccgggctcgacctgtccgggctgttcggcgaacacgacaagagcctaagggagaagcggttcacgacgacggcgtcgccggagaagacgctggagcagctcggcctcgccggcgggaagctcgggtacgtggtggtggtggggaagaaaggggtggagtgcttgccgctggcgggggggcggctgtcgtcggggatcgccgcgatgtcggtggagatgtcggaggtggcgccgccgctgttgctcgtcgagctgaggctggaggtcgccgccggcgacgtcgacggcggcgacggcgaggtgaaggggtttgggtgggagcagctgagaatggagctaggtgatgtagttagggcttggcatagttgtgaggatttgtgtgaaatttag

SEQ ID NO: 2178 - protein, 454 aa, Oryza sativa
MAMAAMDARKKKSGGGGGEPLLGKYELGRMLGRGTFAKVYLARAVAGGEAVAVKVIDKAEVMGTAGMAPRVLREVAAMRRLRHPHVLRLHEVLATRARIYLVMELATGGDLLSRLAALPRRRLPESAARRVFVQLVDALSYCHARGVAHRDVKPQNVLLDGDGNLKVSDFGLAALPDTLRDDGRLHTACGTPAYAAPEVLRRRAYDGAKADAWSCGVILFVLLAGHLPFDDSNIADMCRKAHRREYELPRWVSQPARRLVSRLLDPNPDTRVAVESLAAHHPWFKRSLSVDSQLDGLLNGEPERAVAFQAAPPPPLNAFDIISMSPGLDLSGLFGEHDKSLREKRFTTTASPEKTLEQLGLAGGKLGYVVVVGKKGVECLPLAGGRLSSGIAAMSVEMSEVAPPLLLVELRLEVAAGDVDGGDGEVKGFGWEQLRMELGDVVRAWHSCEDLCEI

SEQ ID NO: 2179 - DNA, 1323 bp, Brassica napus
  CDS (1)..(1323)
atggagaacaaaccaagcatgctaaccgatagatacgaggtagggagattactaggccaaggcaacttcgccaaggtcttctacggaagaagcgtccacacaaacgagagtgtagctatcaagatgatcgacaaagacaaactcaagaaggtcggacacagcgagcagatcaagagagagatctccgtgatgagcctcgccaaacacccaaacgtcgtgaatctacacgaggtcatggcgaccaaaacaaagatctacctcgtcctagagtactgcaaaggcggagagcttttcaagaaaatggtcaaaggcaaactcgccgagaacgtcgcttggaagtactttcaccagctcatcgacgcggttgacttttgccacagccgtggagtgtaccaccgcgacatcaagccggagaatctcttgcttgacgagcacgataacctcaaggtttctgattttggtttaagcgcgcttgccgaaagcaagcgcgctgacggtttgcttcacacggcgtgcggctcgcacgcctacgcttgtcctgagattgttaaccgtaaagggtacgatgggactaaagcggacgtatggtcttgtggggttgttttgtttgtgcttttgactggttatctccctttctacgcttcgaatctgatggatatgtataggaagataggtaaagcgcagttcaagtgtcctcgtgagttccctcctgaagcgaagaggctgttgtctaagatgctggatcctaaccctgagagtaggatcaccatctcaaagatcaaggagagttcatggttcaagaaaggtttaccaatgaagcagaaaaggattgagaaggaagctgtaggaggctcaggttcaggttcaggtccaagcgagacgccgccgcagctttcaagcatgaatgcttttgatatcattgcattgtcttcggggcttgcactgggaggactatttggagaagtgtacagcaagaaagagtctaagttcacatctagaaagcctgcttcggagatcatttgtaagctggaggaggtggctaaagggctgaagatgaagataaggaagcaagaagcggggctgttcaagatggaaggagggaaggaaggaaggaaagggaggttgttgatagatgcggagatatttgaagtgacggagacgtttcacttggttgaagtgaagaaatgtagtggggatacaatggagtatcagaggatggtggaggaggatcttaggcctgctctggctgatattgtttgggtttggcaaggggagaacgagcatgtgttgcgtggtttgaaggagggacaagaaccattgtag

SEQ ID NO: 2180 - protein, 440 aa, Brassica napus
MENKPSMLTDRYEVGRLLGQGNFAKVFYGRSVHTNESVAIKMIDKDKLKKVGHSEQIKREISVMSLAKHPNVVNLHEVMATKTKIYLVLEYCKGGELFKKMVKGKLAENVAWKYFHQLIDAVDFCHSRGVYHRDIKPENLLLDEHDNLKVSDFGLSALAESKRADGLLHTACGSHAYACPEIVNRKGYDGTKADVWSCGVVLFVLLTGYLPFYASNLMDMYRKIGKAQFKCPREFPPEAKRLLSKMLDPNPESRITISKIKESSWFKKGLPMKQKRIEKEAVGGSGSGSGPSETPPQLSSMNAFDIIALSSGLALGGLFGEVYSKKESKFTSRKPASEIICKLEEVAKGLKMKIRKQEAGLFKMEGGKEGRKGRLLIDAEIFEVTETFHLVEVKKCSGDTMEYQRMVEEDLRPALADIVWVWQGENEHVLRGLKEGQEPL

SEQ ID NO: 2181 - DNA, 1332 bp, Brassica napus
  CDS (1)..(1332)
atggtgagaaagcatgaagaggaggtgaggaaagaaatgcgactggggaaatacgagctcgggaggacgctcggcgagggtaatttcggcaaagtcaaattcgctaaagacaccgtctccggtcaaccgttcgccgttaagatcatcgacaagtctcgtatctcccatctcaacttctccttgcagataaaaagagagatacggacgctgaaaatgcttaaacatcccaacattgttagattacatgaggtcttggctagcaaaacaaagatttatatggtcatggaatgtgttatgggaggggaattattcgacagaattgtttctaaaggaaagctatcagaaaccgaaggaagaaaaatgtttcagcaactcatcgatggaatcagctactgtcacagcaaaggtgttttccacagggatcttaagctagagaacgttcttcttgatgcaaatggacatatcaagatcactgactttggcctcagtgctctccctcagcattttagggatgatggattgctacatacaacttgtggaagtcctaactacgttgcacctgaggtgttagccaacagaggctatgatggtgcagcatctgatatatggtcttgtggtgtaatcctgtatgtgattctaaccggatgtctcccttttgacgataggaaccttgctgttctttatcagaagatatgcaaaggagatccaccaataccaagatggttatcaccaggtgcaagaaccatggtcaagagaatgcttgatccaaatccagtcacgaggatcacagtcacaggtatcaaagccagcgaatggttcaagcaagactacactccttcggttccagatgatgatgatgacaaagaagaagttgacacagatgatgattctttctcagttcaagaacttggatctgaagaagggaagggcagtgattcacctactatcatcaacgcgtttcagttgataggaatgtcttcctttcttgacctgtctggtttctttgaacaagaggatgtatcagagaggagaataagattcacttcaaatagctcagcaagagatttactggagaaaatcgaaaccgcagttacagaaatgggattcagtgtacaaaagaaacatgccaagttaaaagtaaaacaagaagaaacaaaccacaaagggcaagttggtttattagtaacagctgaggttttcgagataaagccgtcactgaacgtggttgagctaagaaaatcttatggagattctagtttgtatagacagttgtacgagagactattaaaagacgtcggcacttcctcgccggaacaaggactagtaacatag

SEQ ID NO: 2182 - protein, 443 aa, Brassica napus
MVRKHEEEVRKEMRLGKYELGRTLGEGNFGKVKFAKDTVSGQPFAVKIIDKSRISHLNFSLQIKREIRTLKMLKHPNIVRLHEVLASKTKIYMVMECVMGGELFDRIVSKGKLSETEGRKMFQQLIDGISYCHSKGVFHRDLKLENVLLDANGHIKITDFGLSALPQHFRDDGLLHTTCGSPNYVAPEVLANRGYDGAASDIWSCGVILYVILTGCLPFDDRNLAVLYQKICKGDPPIPRWLSPGARTMVKRMLDPNPVTRITVTGIKASEWFKQDYTPSVPDDDDDKEEVDTDDDSFSVQELGSEEGKGSDSPTIINAFQLIGMSSFLDLSGFFEQEDVSERRIRFTSNSSARDLLEKIETAVTEMGFSVQKKHAKLKVKQEETNHKGQVGLLVTAEVFEIKPSLNVVELRKSYGDSSLYRQLYERLLKDVGTSSPEQGLVT

SEQ ID NO: 2183 - DNA, 1338 bp, Brassica napus
  CDS (1)..(1338)
atgagcgggagtagaaagaagacaacgccggcaagccggacgcgagtggggaactacgagatgggacgaactctaggcgaaggaagcttcgctaaggtcaaatacgcacggaacaccgtcactggagatctagccgctatcaaaattctcgaccgagataagattctccgccacaaaatggtcgaacagcttaaaagagaaatagctacaatgaaactgattaaacatccaaatgtggtcgaaatcattgaggttatggcgagcaaaactaagatctatattgttcttgagctggtcaacggaggtgaactatttgataaaatcgcccaacaggggaaactaaaggaggatgaagctcggagttattttcatcagctcataaatgctgtggattattgccacagtcgaggggtctaccacagagatctcaagcctgaaaatcttatccttgatgcaaatgggattttaaaagtttctgattttgggctaagcgcgttttcactacaagttcggggagatggtttgcttcacactgcttgtggaacgccgaactatgttgctcctgaggttctgtcggacaaaggctacgacggtgcagcagcagacgtctggtcctgtggtattattctatttgtgctcatggctggttacttgccttttgatgagccaaatctcatgacattatacaaacgtatatgcaaagctgagttcagctgcccatcatggttctcgccgggtgccaaggaagtcattaagcgtattcttgatcccagtcctataaccagaataagtattgcagaattactagaagatgaatggttcaagcaagggtacaagccaccatcgtttggccaagatgatgaagacataaccattgatgatgtggatgctgctttcagtaactccaaggagtctcttgtaacagagaagaaggcgaaaccggaatccatgaacgcttttgaacttatctctagctcaaacagtcttgaaaacttgttcgaaaagcaagcccaacttgtgaagaaagagacacggtttacttctcaacgacctgcgagcgaaataatgtccaaaatggaagaaaccgcaaagccattaggcttcaacgtccgtaaagacaagtacaagataaaaatgaaaggagacaaaagtggtcgtaaaggtcagctctcagttgctacagaggtgtttgaagtggcgccatcgttgcatgtagtagagcttaggaaaaccggcggtgataccctcgagtttcacaagttctataaaaacttctcatctggattaaaggatgtagtatggaatactgatggagcacctgaagaacataaagcttaa

SEQ ID NO: 2184 - protein, 445 aa, Brassica napus
MSGSRKKTTPASRTRVGNYEMGRTLGEGSFAKVKYARNTVTGDLAAIKILDRDKILRHKMVEQLKREIATMKLIKHPNVVEIIEVMASKTKIYIVLELVNGGELFDKIAQQGKLKEDEARSYFHQLINAVDYCHSRGVYHRDLKPENLILDANGILKVSDFGLSAFSLQVRGDGLLHTACGTPNYVAPEVLSDKGYDGAAADVWSCGIILFVLMAGYLPFDEPNLMTLYKRICKAEFSCPSWFSPGAKEVIKRILDPSPITRISIAELLEDEWFKQGYKPPSFGQDDEDITIDDVDAAFSNSKESLVTEKKAKPESMNAFELISSSNSLENLFEKQAQLVKKETRFTSQRPASEIMSKMEETAKPLGFNVRKDKYKIKMKGDKSGRKGQLSVATEVFEVAPSLHVVELRKTGGDTLEFHKFYKNFSSGLKDVVWNTDGAPEEHKA

SEQ ID NO: 2185 - DNA, 1476 bp, Brassica napus
  CDS (1)..(1476)
atggctccagtcccatctccgcaagtgctactcccccgtcttctcggtaaagtcattactaaagacgcgaagaaagagaccagtactccagagagccctaagagtccaaaaaccccacaaggctctatcctcatggacaagtacgagttaggaaagcttcttggccacggaagcttcgctaaagtctatctcgcccggaacattaacaccggcgagaacgtcgccatcaaagtcatcgacaaagaaaagatcgtcaaaagcggtttagccggccacataaaacgtgagatatccatcctccgccgcgtccgccacccttacatcgtccacctcctcgaggtcatggctacaaagaccaagatctacatcgtcatggagtacgtacgaggcggagacctttacacaaaggtctccaaagggcggctccgcgaaggagtcgcccgtagatatttccaacagctgatctcctcggtttccttctgccacggccgcggcgtttaccaccgcgacctgaagctcgagaatcttcttttagacgacgaagggagccttaaggtatctgacttcggtctcagcgtcgtctccgagcagctcaagcaagacgggatctgccagacgttttgcgggacgcctgcttatctggcgcctgaggttttcacgaggaaaggctacgacgcggctaaagccgatgtgtggtcttgcggagtgatcttgtttgtgttgatggctggttaccttccttttgatgataagaacgttatgtttatgtacaagaagatattcaaaggacagtttaaatgtcctcattggttttcacctgagcttacgaggcttatggggaggatcttggacacgaatccggatacaagaatcacgatatcggagatcatgaagcatagatggttcaagaaagggtttaaagatgttaaattctatatcgaaaacgataagttatgtagagaggatgatgatgatgatgaatatgattcgttgtcatcagggagatcatctactgcctcagagggagatgcagagtttgtgattaaacgagttggttcaatgccgagacccgccagtctaaacgcatttgacatcatatcattctcttcgggattcgatctttctggcttgtttgaagaaggaggacaaggagcgaggtttgtatccgctgctcccgtgacaaagattatatcaaagttggaagagattgcgaatgtggcgaaatttaccgtgaggaagaaggattggagcgtgaggctagaaggtagtagagaaggtgctaaaggaccgctgactattaaggttgagatattcgagttgacaccgtctcttgtggtggttgaagtgaagaagaaaggagggtttatagaagagtatgaagagttttgcagcaaggagcttagaccacagctagagaaaatgatgcattaccaagcagatgaagttgaagtagcaatgtgtttggtcccatgttaa

SEQ ID NO: 2186 - protein, 491 aa, Brassica napus
MAPVPSPQVLLPRLLGKVITKDAKKETSTPESPKSPKTPQGSILMDKYELGKLLGHGSFAKVYLARNINTGENVAIKVIDKEKIVKSGLAGHIKREISILRRVRHPYIVHLLEVMATKTKIYIVMEYVRGGDLYTKVSKGRLREGVARRYFQQLISSVSFCHGRGVYHRDLKLENLLLDDEGSLKVSDFGLSVVSEQLKQDGICQTFCGTPAYLAPEVFTRKGYDAAKADVWSCGVILFVLMAGYLPFDDKNVMFMYKKIFKGQFKCPHWFSPELTRLMGRILDTNPDTRITISEIMKHRWFKKGFKDVKFYIENDKLCREDDDDDEYDSLSSGRSSTASEGDAEFVIKRVGSMPRPASLNAFDIISFSSGFDLSGLFEEGGQGARFVSAAPVTKIISKLEEIANVAKFTVRKKDWSVRLEGSREGAKGPLTIKVEIFELTPSLVVVEVKKKGGFIEEYEEFCSKELRPQLEKMMHYQADEVEVAMCLVPC

SEQ ID NO: 2187 - DNA, 1416 bp, Brassica napus
  CDS (1)..(1416)
atgacggatctcaaaagagaaacatccctcccgaaggagagaagcagcccaccaccacaagccctaatcctcggccgctacgaaatggggaagcttctcggccacggaaccttcgcgaaggtctacctcgctcgcaacgtgaaaacaaacgagagcgtggccatcaaagccatcgacaaggagaaagtgctcaaaggcggcttgatcgcgcacatcaaacgcgagatctccatcctccgccgcgtccgccaccccagcatcgtccagctcttcgaggtcatggccacgaaagccaagatctacttcgtgatggagtacgtccgcggaggcgagcttttcaacaaggtagccaagggacgtctcaaggaagacgccgctcgcaggtacttccagcagctgatctccgccgtcacgttctgccacgcgcgcggcgtctaccaccgcgacctcaaaccggagaatctgttgttagacgacaagggtaaccttaaagtctctgactttgggctcagcgcggtctctgatcagattcgacaagacgggcttttccacaccttctgtgggacccctgcttacgtggcgcctgaggttttagcgaggagagggtacgatgctgccaaggttgatatctggtcttgtggtgttgtgttgtttgttctgatggcgggttacctcccgtttcatgataggaacgttatggctatgtataagaagatttacagaggcgagttcagatgtccgagatggttctcgccggagctcacgaggttgatgtctcgtcttctcgagacggatccggagaaacggtttactttccttgaggttatggagaactcttggttcaagaaagggtttaagcatgtgaaattctatgtggaagatgataagctttgcaatgttgatgatgatgacgatgagttggagattgcttccgtggagtctggtcggtcttctgctgtgtctgaatccgagattgagtgtttggagcctagaaggaaggttgtggggttgcctagacccgcgagtttgaatgccttcgatattatatcgttttcgcaaggttttgacttgtcagggttgtttgatgatgatggggaaggctctaggtttgtttcaggagctccggtttcgaagatcatatcgaagttggaagagattgctaaagttgtgagctttaccgtgaggaagaaggattgtagggtgagtcttgaaggttcaagacaaggagtgaaaggtccattgacgattgcagcggagatatttgagttgacaccgtcgttggttgttgtggaggtgaagaagaaaggaggagacagagcagagtatgaagagttttgcaacaacgagttgaaacccatgttgcagaatctgagagctgatgatgttgaagagcctctgacgggtttcagcggttga

SEQ ID NO: 2188 - protein, 471 aa, Brassica napus
MTDLKRETSLPKERSSPPPQALILGRYEMGKLLGHGTFAKVYLARNVKTNESVAIKAIDKEKVLKGGLIAHIKREISILRRVRHPSIVQLFEVMATKAKIYFVMEYVRGGELFNKVAKGRLKEDAARRYFQQLISAVTFCHARGVYHRDLKPENLLLDDKGNLKVSDFGLSAVSDQIRQDGLFHTFCGTPAYVAPEVLARRGYDAAKVDIWSCGVVLFVLMAGYLPFHDRNVMAMYKKIYRGEFRCPRWFSPELTRLMSRLLETDPEKRFTFLEVMENSWFKKGFKHVKFYVEDDKLCNVDDDDDELEIASVESGRSSAVSESEIECLEPRRKVVGLPRPASLNAFDIISFSQGFDLSGLFDDDGEGSRFVSGAPVSKIISKLEEIAKVVSFTVRKKDCRVSLEGSRQGVKGPLTIAAEIFELTPSLVVVEVKKKGGDRAEYEEFCNNELKPMLQNLRADDVEEPLTGFSG

SEQ ID NO: 2189 - DNA, 1326 bp, Brassica napus
  CDS (1)..(1326)
atggtcggagcaaaacctatagagaacggatctgacggtggagcaagcactggtcttctccacggacgttacgagctaggccgtcttctaggccacgggacattcgctaaagtgtaccacgcgcgtaacgtaacaacgggtaaaagcgtggcgatgaaagtcgtcggaaaagagaaggtggtgaaggtcggcatggtggaccagatcaagcgcgagatctcggtgatgaggatggtgaagcatcccaacatcgtcgagctccacgaggtgatggctagcaaaaccaagatctacttcgccatggagctcgtgcgaggcggggagctgttcgccaaagtcgccaaagggaggctgcgcgaggacgtggcgcgcgtgtactttcagcagctgatctccgccgtcgatttttgccacagccgcggggtttaccaccgagatctcaagccggagaatctcttgcttgacgaagaaggcaacctcaaggtcaccgactttggtctctctgctttcaccgagcatttgaagcaagacgggcttctccacaccacttgtggaactccggcgtacgtcgcgccggaggttatactgaagaaaggatatgacggagcgaaggcggatctttggtcttgcggcgttatcctcttcgtgctcctcgcgggttacttgccgtttcaggatgataatcttgtcaacatgtataggaagatctacagaggagacttcaagtgccctgggtggctctcctccgatgcgaggaggctcgtgacgaagcttctggatccgaatccgaatacccggatcactatcgataaggtgatggattcacactggttcaagaagtcctcaacgagatcaagaaacgagccagtggccgcaacaccagaggctgaggaggatgttgatgtgtccgtgcacaagtccaaggaagagacggagacgctaaacgcgtttcacatcatcgcgttgtctgaaggttttgatctctcgccgttgttcgaggagaagaagaaagaggagaagatggagatgaggttcgcgacttctaggccggcgagtagtgtgatatcgagccttgaggaggcggcgaaggttgggaataagtttgatgtgaggaagagcgagtgtagagtgaagatcgaagggaaacagaatggccggaaagggaagttggcggtggaggcggagatattcgcggtggctccgtcgtttgttgtcgtggaggtgaagaaagatcatggggacacgcttgagtacaataacttttgtagtacggctcttagaccagctctcaaggacatcttctggacttctactacacctgcttga

SEQ ID NO: 2190 - protein, 441 aa, Brassica napus
MVGAKPIENGSDGGASTGLLHGRYELGRLLGHGTFAKVYHARNVTTGKSVAMKVVGKEKVVKVGMVDQIKREISVMRMVKHPNIVELHEVMASKTKIYFAMELVRGGELFAKVAKGRLREDVARVYFQQLISAVDFCHSRGVYHRDLKPENLLLDEEGNLKVTDFGLSAFTEHLKQDGLLHTTCGTPAYVAPEVILKKGYDGAKADLWSCGVILFVLLAGYLPFQDDNLVNMYRKIYRGDFKCPGWLSSDARRLVTKLLDPNPNTRITIDKVMDSHWFKKSSTRSRNEPVAATPEAEEDVDVSVHKSKEETETLNAFHIIALSEGFDLSPLFEEKKKEEKMEMRFATSRPASSVISSLEEAAKVGNKFDVRKSECRVKIEGKQNGRKGKLAVEAEIFAVAPSFVVVEVKKDHGDTLEYNNFCSTALRPALKDIFWTSTTPA

SEQ ID NO: 2191 - DNA, 1452 bp, Brassica napus
  CDS (1)..(1452)
atggcttctcgaacaacaccttcgcgatccactccttctcgatcgacaccttcaggtagtagtagtagtagtagttcgattagtaggacacgagtgagtaagtacgagcttgggagaacacttggtgaaggaaccttcgctaaggtcaaattcgctaggaacgtcgagaagggagagagagtgactatcaaggttattgataaagagaaggttctgaagaacaagatgatcgctcagattaagcgtgagatctcgaccatgaagctgatcaagcacccaaatgtcatccgcatgattgaggtgatggctagcaagactaagatctactttgtgttggaacttgttactggtggagagcttttcgataaaatttcaagcactgggagattgaaggaagatgaggcgaggaagtactttcagcagcttattaatgcagtggactattgccatagcagaggtgtttatcatagagaccttaagcccgagaatttgcttttggatgcaaacgggactctcaaagtttctgattttggactgagtgcacttcctcagcaagtccgagaggatgggctacttcacacaacatgtggaacacccaattatgttgctccagaggtaatcaacaacaaaggttacgatggagctaaggctgatctgtggtcttgtggtgtgatcctcttcgtcttaatggctggttacttacctttcgaagattctaatctcacgtcactatacaaaaagatatttaaagccgaatttacgtgcccgccttggttctcagcaagtgctaagaagttaattaaaaggattctcgatcctaaaccagcaacgaggataacatttgctgaagtcattgaaaatgagtggtttaagaaagggtataaggctcctaaatatgagaacgctgatgtcagccttgatgacgttgatgcaatctttgatgaatcaggggagtctaagaacctggttgtggagaggaaagaagaagaacctaaaaacccagtaactatgaatgcttttgagctcatctcaacctcccagggtctcaatctgggctcacttttcgaaaaacaaatgggacttgtaaaacgaaaaactcgatttacttcgaaatgttcggctaatgatatagtcacaaaaattgaggctgcagcagggcctttggggtttgatgtcaagaaaaacaactacaagatgaagctgctaggagagaaatcagggcgcaagggtcagttagcagttgctactgaggtttttcaagtagctccatcgctttacatggttgaaatgcgaaaatcaggtggtgacacgttggaatttcacaagttttacaaaaaccttaccacgggtcttaaggatattgtttggaaaacaatcgacgaagagaaagaagaaggaactgaaggtaaagcatcaggtggtactactaatggtaccgtggctgcttcttga

SEQ ID NO: 2192 - protein, 483 aa, Brassica napus
MASRTTPSRSTPSRSTPSGSSSSSSSISRTRVSKYELGRTLGEGTFAKVKFARNVEKGERVTIKVIDKEKVLKNKMIAQIKREISTMKLIKHPNVIRMIEVMASKTKIYFVLELVTGGELFDKISSTGRLKEDEARKYFQQLINAVDYCHSRGVYHRDLKPENLLLDANGTLKVSDFGLSALPQQVREDGLLHTTCGTPNYVAPEVINNKGYDGAKADLWSCGVILFVLMAGYLPFEDSNLTSLYKKIFKAEFTCPPWFSASAKKLIKRILDPKPATRITFAEVIENEWFKKGYKAPKYENADVSLDDVDAIFDESGESKNLVVERKEEEPKNPVTMNAFELISTSQGLNLGSLFEKQMGLVKRKTRFTSKCSANDIVTKIEAAAGPLGFDVKKNNYKMKLLGEKSGRKGQLAVATEVFQVAPSLYMVEMRKSGGDTLEFHKFYKNLTTGLKDIVWKTIDEEKEEGTEGKASGGTTNGTVAAS

SEQ ID NO: 2193 - DNA, 1395 bp, Zea mays
  CDS (1)..(1395)
atggtgaacggcgagcagcgggcggacgcggagtgcacgcgggcgtcgctgctggggaggtatgagatcgggcggaccctcggcgagggcaacttcggcaaggtgaagtacgcgcgccacatcgccaccggcggccacttcgccatcaagatcctcgaccgcagcaagatcctctccctccgcatcgacgaccagatcaggagggagatcgggacgctcaagctgctcaagcacccgaatgtcgtccgcttgcacgaggttgctgccagtaaaacgaagatctacatggtgcttgagtttgtgaacggcggcgagctcttcgacaagatcgctatcaaggggaaactgtccgaacacgagggcaggaggctcttccagcagctaatcgacggcgtcagctattgccatgacagaggtgtctaccaccgagacctcaagccagagaatgtccttgttgatcggaagggcaccatcaagatctctgacttcggcctcagcgctctacctcaacatctcgggagtgacggacttctgcacacaacatgtggcagccccaactacatagctcctgaggttctgcaaaacagaggctatgacggctccttgtcagatctctggtcttgtggggtcatcctctacgtgatgcttgttggctgccttcccttcgacgacaggaacctcgtcgttctttatcagaagattttcaagggagactgccagatccccaagtggctttcgcctgccgcgcaggaccttctcaagaggatcctccaaccgaatccgatgaagaggatcaacgtcgcggggatcagggagcacgagtggttcaagaaggactacgtgcctgctgttccgcacgatgatgacgaagacgtccttcctagtccagctccctcgataaaggagccaatcgatgagccggcgcaggagaagtgtactcctatcaacgcttttcagttgatcgggatggcctcttcccttgatctttctggtttcttcgaggaagaggatgcagcgcaaagaaagattcggttcacttcgacgcacccacccaaggatctatttgacaagatcgagagcgttgtcatggagatggcattcaaagtccataggggggcaggcaagctcaaggtcttgaagaatagcaagtgttccaggaactccaggaacccgtcatcattgttggtgtgcaccgaggtgtttgagctcggtccatcattatatgtcgtagagcttaggaaatcccacggagactctacgttgtatagacagctgtgcgaaaggctctccgatgagctaggtgcctgcaagacagaccagatcgcgaggactgaatcatcgagtgacgatctttcgagcctcgatggcgaagcgttccctctatctgggttctga

SEQ ID NO: 2194 - protein, 464 aa, Zea mays
MVNGEQRADAECTRASLLGRYEIGRTLGEGNFGKVKYARHIATGGHFAIKILDRSKILSLRIDDQIRREIGTLKLLKHPNVVRLHEVAASKTKIYMVLEFVNGGELFDKIAIKGKLSEHEGRRLFQQLIDGVSYCHDRGVYHRDLKPENVLVDRKGTIKISDFGLSALPQHLGSDGLLHTTCGSPNYIAPEVLQNRGYDGSLSDLWSCGVILYVMLVGCLPFDDRNLVVLYQKIFKGDCQIPKWLSPAAQDLLKRILQPNPMKRINVAGIREHEWFKKDYVPAVPHDDDEDVLPSPAPSIKEPIDEPAQEKCTPINAFQLIGMASSLDLSGFFEEEDAAQRKIRFTSTHPPKDLFDKIESVVMEMAFKVHRGAGKLKVLKNSKCSRNSRNPSSLLVCTEVFELGPSLYVVELRKSHGDSTLYRQLCERLSDELGACKTDQIARTESSSDDLSSLDGEAFPLSGF

SEQ ID NO: 2195 - DNA, 1344 bp, Glycine max
  CDS (1)..(1344)
atggaagagtgtcacacggtgttcggaaagtacgagatggggaggcttctggggaagggcacgtttgccaaagtgtattacgggaagcaaataagcacgggcgagagcgtggcaatcaaagtaatcaacaaagagcaagtgagaaaagaaggaatgatggaacaaatcaaacgcgaaatttccgtgatgcgtttggtgcgacacccaaacgtggtggaaatcaaggaagtgatggccacaaagacaaaaatcttcttcgtgatggaatacgtgcgtggcggggaactcttcgccaaaatctccaaaggcaaactcaaagaagatctcgcccgcaagtattttcagcagttaatcagcgccgttgattactgccacagcagaggtgtatcccaccgtgatctcaaaccagagaatctactcctcgacgaagacgaaaaccttaaaatctccgatttcggtctctccgcgctgccggagcagcttcgttacgatggactcctccacacccagtgcggcacccctgcctacgtggcaccagaagtgttaagaaaaaaaggctacgacgggtcaaaagcagatatctggtcatgcggcgtcgttttgtacgttcttctcgctggatttcttcctttccaacacgagaatctcatgacaatgtattacaaagttctcagagccgagtttgagtttccaccgtggttttcgcctgagtcaaagaggctaatctccaagattctagtggcggatcccgcgaagagaaccaccatttccgccataactcgcgtgccgtggttccggaagggcttttcttcgttttccgcgccggacttgtgccagttggagaaacaagaggccgttacggaggaagaaaacaattccaaggtgcccaagttcttcaacgcgtttgagtttatttcgtcgatgtcttccgggttcgacctctcggggctgttcgagaccaagaggaagacagcggcggtgttcacgtcgaagtgctccgcggcggcgattgtggcgaagattgcggcggcggcgcgggggctgaggttccgcgtggcggaggtcaaggacttcaagatccggctgcagggtgcggcggaggggaggaaggggaggctggaggtcacggcggaggtgtttgaggtggcgccggaggtcgccgttgtggagttttcgaagtccgccggcgacacgttggaatacgccaagttctgtgaggaggacgtgaggcccgcgctgaaggacattgtttggacgtggcaaggggatgccacgtgtgctgctaacttccccgcctgtcacggtgaggagtgtcaaaagcaggttgttgttagtactatataa

SEQ ID NO: 2196 - protein, 447 aa, Glycine max
MEECHTVFGKYEMGRLLGKGTFAKVYYGKQISTGESVAIKVINKEQVRKEGMMEQIKREISVMRLVRHPNVVEIKEVMATKTKIFFVMEYVRGGELFAKISKGKLKEDLARKYFQQLISAVDYCHSRGVSHRDLKPENLLLDEDENLKISDFGLSALPEQLRYDGLLHTQCGTPAYVAPEVLRKKGYDGSKADIWSCGVVLYVLLAGFLPFQHENLMTMYYKVLRAEFEFPPWFSPESKRLISKILVADPAKRTTISAITRVPWFRKGFSSFSAPDLCQLEKQEAVTEEENNSKVPKFFNAFEFISSMSSGFDLSGLFETKRKTAAVFTSKCSAAAIVAKIAAAARGLRFRVAEVKDFKIRLQGAAEGRKGRLEVTAEVFEVAPEVAVVEFSKSAGDTLEYAKFCEEDVRPALKDIVWTWQGDATCAANFPACHGEECQKQVVVSTI

SEQ ID NO: 2197 - DNA, 1326 bp, Glycine max
  CDS (1)..(1326)
atgagtcagcctaagattaaacgccgagttggtaaatacgaggtggggaggaccattggtgaaggtacatttgcaaaggtgaaatttgcaaggaactctgagacaggagagcccgtggctcttaaaattcttgacaaggagaaggtgctaaagcacaagatggctgagcagatcaggagagaagtagctacaatgaaactaatcaagcatccaaatgttgttcgattgtatgaggtcatgggaagcaagaccaaaatatatattgttttggagtttgtaactgggggggaactctttgacaaaattgtaaaccatggaaggatgagtgaaaatgaagcacgtagatatttccagcagcttataaatgctgttgattattgccatagcaggggtgtctaccacagagacctgaagccagaaaatttgctattagatacttatgggaaccttaaagtttctgattttggtttgagtgccctctcccagcaagttagggatgatggacttcttcatactacatgtggcactccaaattatgttgctcctgaggtccttaacgatagaggctatgatggggcaactgcagacttgtggtcatgtggggttattctctttgtattggttgcaggttacttgcctttcgacgaccctaatcttatgaacctgtataaaaagatctcagctgctgaatttacttgccccccatggctttctttcactgccaggaaattgattacacgaatcttggatccagatcccaccactcgtatcactatacctgagattttggatgatgaatggtttaagaaagaatataagcctcccatttttgaggagaatggggaaatcaacctcgatgatgttgaagctgtctttaaagactctgaagagcaccatgtgacagagaaaaaagaagagcagcctacagccatgaatgcatttgagttaatctccatgtccaaaggactgaaccttgaaaacttgtttgatactgagcagggatttaaaagggaaacaagattcacctcaaaatcccctgcggatgagataatcaacaagattgaggaagccgcaaaacctcttggctttgatgtgcagaagaaaaattacaagatgaggcttgcaaatgtgaaagctggaaggaagggaaaccttaatgttgccacagagatatttcaagtggcaccttctcttcacatggtagaggtacggaaggcaaaaggagatacattggagttccataagttctacaagaaactttcaacaagcctggatgatgttgtttggaaaacagaagatgatatgcaaatgcgagaaacaaagtga

SEQ ID NO: 2198 - protein, 441 aa, Glycine max
MSQPKIKRRVGKYEVGRTIGEGTFAKVKFARNSETGEPVALKILDKEKVLKHKMAEQIRREVATMKLIKHPNVVRLYEVMGSKTKIYIVLEFVTGGELFDKIVNHGRMSENEARRYFQQLINAVDYCHSRGVYHRDLKPENLLLDTYGNLKVSDFGLSALSQQVRDDGLLHTTCGTPNYVAPEVLNDRGYDGATADLWSCGVILFVLVAGYLPFDDPNLMNLYKKISAAEFTCPPWLSFTARKLITRILDPDPTTRITIPEILDDEWFKKEYKPPIFEENGEINLDDVEAVFKDSEEHHVTEKKEEQPTAMNAFELISMSKGLNLENLFDTEQGFKRETRFTSKSPADEIINKIEEAAKPLGFDVQKKNYKMRLANVKAGRKGNLNVATEIFQVAPSLHMVEVRKAKGDTLEFHKFYKKLSTSLDDVVWKTEDDMQMRETK

SEQ ID NO: 2199 - DNA, 1386 bp, Glycine max
  CDS (1)..(1386)
atggaccggcgatcccatcccacgggcaccgtcagcacccggaacatcctcttcaacaagtacgagattggaaaattgctgggacagggcaacttcgccaaggtgtaccacggcagaaacctcagcacaaacgagagcgtggccatcaaagtcataaaaaaggaaaggctccagaaagagaggctcgtgaagcagatcaaacgcgaggtctccgtcatgcgcctggtgcgtcacccccacatcgtcgaattaaaagaggtcatggccaacaaagccaaaatcttcatggttgtcgaatacgtcaagggaggggaactcttcgccaaggtagcaaaagggaagatgaaggaagatgtcgccagaaagtactttcagcaactcatcagcgccgtcgatttctgccacagccgcggcgtcacccaccgcgatctcaagccggagaatctgctcctcgacgagaacgaagaccttaaagtctccgactttggcctgtcggcgctaccggaccagcgcagatccgacgggatgctcctcacgccgtgcggcacgccggcctacgtggcgccggaggttctcaagaagaagggctacgatgggtcgaaggctgatatatggtcctgcggggtcatcctctttgctcttctttctggctatttgccctttcaaggtgaaaatgtgatgagaatttacagcaagtctttcaaagccgattatgcattccccgaatggatttcccctgcggccaaaaacttgatctccaatttactcgttgtggacccgcaaaagaggtattccattccagacatcatgaaggacccttggtttcaaattggcttcttgaggcccattgcgttttccatgaaggagtctgcgcttgaagataacattgatttcagcggggatgatgttcctagtcctggtagtgatgatggtaatagcagcagcaacaacgaggatggggagttgacgggggctaagcctgctcgtccgtcttacaacgcttttgagataatctcgtccttgtcgcatgggttcgatctgaggaatttgtttgagacgaggaagcggtcgccgtcaatgttcatttccaagttttcggcttcggcggtgatggcgaagctggagggggtggccaagaagctgaattttagggtgacggggaagaaggagttcatggtgaggatgcagggggcgacggaagggaggaaggggaagctggccatgacggtggaggtattcgaggtggcgccggaggtcgcggtggtcgagttctccaagcccgccggagacacgcttgaataccttaatttctgtgaggaccaagtcagaccttcgctcagggatattgtgtggagttggcaaggggacgctaattgccaccagtaa

SEQ ID NO: 2200 - protein, 461 aa, Glycine max
MDRRSHPTGTVSTRNILFNKYEIGKLLGQGNFAKVYHGRNLSTNESVAIKVIKKERLQKERLVKQIKREVSVMRLVRHPHIVELKEVMANKAKIFMVVEYVKGGELFAKVAKGKMKEDVARKYFQQLISAVDFCHSRGVTHRDLKPENLLLDENEDLKVSDFGLSALPDQRRSDGMLLTPCGTPAYVAPEVLKKKGYDGSKADIWSCGVILFALLSGYLPFQGENVMRIYSKSFKADYAFPEWISPAAKNLISNLLVVDPQKRYSIPDIMKDPWFQIGFLRPIAFSMKESALEDNIDFSGDDVPSPGSDDGNSSSNNEDGELTGAKPARPSYNAFEIISSLSHGFDLRNLFETRKRSPSMFISKFSASAVMAKLEGVAKKLNFRVTGKKEFMVRMQGATEGRKGKLAMTVEVFEVAPEVAVVEFSKPAGDTLEYLNFCEDQVRPSLRDIVWSWQGDANCHQ

SEQ ID NO: 2201 - DNA, 1320 bp, Triticum aestivum
  CDS (1)..(1320)
atgagtacaaccaaggtgaagaggcgtgtgggcaagtatgagctaggccggaccatcggcgagggcaccttcgccaaggtcaggttcgccaggaacaccgagaccggggaccccgttgccatcaagatcttggacaaggagaagcttctcaagcacaagatggtcgagcagatcaagcgggaaatcgcaacgatgaagctgattaagcatcccaatgttgtccgcatacacgaggtgatgggaagcaaaacaaaaatctacatagttttggaatacgtcaccgggggcgagctctttgacacaatcgttaaccatggcagaatgagggaagatgaggcaaggagatacttccagcagttgattaatgcggttgattattgccatagcaggggggtgtaccaccgtgatttaaaaccagaaaatctattacttgattcatgtggaaatctgaagatgtctgattttgggctgagcgcgctatctcagcagctcaaggatgacggattactgcacacgacttgtggcactccaaattatgttgcaccagaggtcctcgaagatcaaggctatgatggcgcaatggcagatttgtggtcatgtggagtaattctgtttgttctgctagcagggtatttgccttttgaggactctaatcttatggccttgtataagaaaatatcaaatgcagagtttacgtttccgccttggacgtcttttcctgccaagaggttgttaacaagaatccttgatccaaatccgatcacgagaataacagttcaagaaatgctagaagatgagtggttcaagaaaggttacaagcgtgcggagtttgatgagaagtatgacacaacactggatgatgtggatgctgttttcaatgattcagaagagcaccatgtaacagaaaagaaagaagaagaaccagtagctctgaatgcatttgaactgatttctatgtcagcaggcctcaatcttggaaatttattcgactctgagcaggattttaaaagagaaacaaggtttacatctaaaagctcgcctaaagaaattctccgcaagattgaagaagctgcaaagcctctaggatttgatattcagaagaaaaattacaagctgagactagaaaaggtaaaagcaggaaggaaggggaacctcaatgttgctaccgagatactgcgagtcggactttctcttcatatggttgaagttcgcaaagcaaaaggtgacactctagaatttcacaagttctacaagaacctttcaaacaccttgaaggacgttgtttggaaatccgacgatcttcagatccaaccttcctag

SEQ ID NO: 2202 - protein, 439 aa, Triticum aestivum
MSTTKVKRRVGKYELGRTIGEGTFAKVRFARNTETGDPVAIKILDKEKLLKHKMVEQIKREIATMKLIKHPNVVRIHEVMGSKTKIYIVLEYVTGGELFDTIVNHGRMREDEARRYFQQLINAVDYCHSRGVYHRDLKPENLLLDSCGNLKMSDFGLSALSQQLKDDGLLHTTCGTPNYVAPEVLEDQGYDGAMADLWSCGVILFVLLAGYLPFEDSNLMALYKKISNAEFTFPPWTSFPAKRLLTRILDPNPITRITVQEMLEDEWFKKGYKRAEFDEKYDTTLDDVDAVFNDSEEHHVTEKKEEEPVALNAFELISMSAGLNLGNLFDSEQDFKRETRFTSKSSPKEILRKIEEAAKPLGFDIQKKNYKLRLEKVKAGRKGNLNVATEILRVGLSLHMVEVRKAKGDTLEFHKFYKNLSNTLKDVVWKSDDLQIQPS

SEQ ID NO: 2203 - DNA, 1524 bp, Linum usitatissimum
  CDS (1)..(1524)
atggcggcgaagcccacggattcgccgacgacttccagcaacggcgcagcagcaacgacgtcaaccgccgctggaggaggcgccaccaccaccaccaaccagccgttgcttctaggccggtacgaggtgggcaagctgctcggccatggcaccttcgccaaggtctaccacgctcggaacgtgaagacgaacgagaatgttgcgatcaaggtgatcgacaaggagaagataatgaaaggcgggctcatcgtccacatcaagcgcgaaatctcaaacctccgccgcgtccgccacccgaatatcgtacacctattcgaggtaatggcgaccaaggccaagatttactttgtaatggagtatgtccggggaggcgagcttttcaacaaggtcgccaaggggcgattgaaagaggacgccgcccgccgatatttccagcagctgatctccgccgtcgccttctgccacgcccgcggcgttttccaccgcgatctgaagccggagaatctgttattggacgaggaaggcaaccttaaggtctccgatttcggactcagcgccgtcgccgatcagatccgtcaggatgggttattccacacgttctgtgggactccggcgtatgtagcaccggaggtgctagggaggaaaggatacgacgctgctaaggtagatatctggtcctgtggcgtaatcctgtttgttttgatggctggatatttacctttccatgatcagaacattatgttgatgtataagaagatctacaagggcgaatttcgttgccctagatggttttcccctgaattagctaagcttttagtaaagcttctcgacacgaatcctgcaactcgaatcacgattgctgaagttatggagaatcgatggttcaagagagggtttaagcacatcaaattctacatcgaggatgatagagtgtacaatgtggttgacgaattgaatcaggaacaggacgatgctagctcctgctgctcggaatcttcaatgtccgagtctgattcagaagtggaagctcgaagaacaacacgagctcctggttcattgcctaggccggcgagtttgaatgctttcgatataatctcgttctcaccagggttcgacttgtccggattgttcgaggaaggtagtagcggggaagggacgaggtttgtgacaggggctcctgtgtcaaagatcatttcgaaattggaggagattgctaatttggtgaggtttacagtcaggaagaaggattacagagtgagcttggaagggtcgagggaaggcgtgaaggggccattgacgattgcagctgagatattcgagcttacaccgaagcttgtggtcgttgaagtgaagaagaagagtggggataagggggagtatgaagagttctgtgagaaggaattgaaacccgggttgcagaaactgatgctggaggaatccgaagctgctgcctcgaagaagaaggatgatccgatcttcgattcgcctcgattgtctactgattctttgctgtctatcgaataa

SEQ ID NO: 2204 - protein, 507 aa, Linum usitatissimum
MAAKPTDSPTTSSNGAAATTSTAAGGGATTTTNQPLLLGRYEVGKLLGHGTFAKVYHARNVKTNENVAIKVIDKEKIMKGGLIVHIKREISNLRRVRHPNIVHLFEVMATKAKIYFVMEYVRGGELFNKVAKGRLKEDAARRYFQQLISAVAFCHARGVFHRDLKPENLLLDEEGNLKVSDFGLSAVADQIRQDGLFHTFCGTPAYVAPEVLGRKGYDAAKVDIWSCGVILFVLMAGYLPFHDQNIMLMYKKIYKGEFRCPRWFSPELAKLLVKLLDTNPATRITIAEVMENRWFKRGFKHIKFYIEDDRVYNVVDELNQEQDDASSCCSESSMSESDSEVEARRTTRAPGSLPRPASLNAFDIISFSPGFDLSGLFEEGSSGEGTRFVTGAPVSKIISKLEEIANLVRFTVRKKDYRVSLEGSREGVKGPLTIAAEIFELTPKLVVVEVKKKSGDKGEYEEFCEKELKPGLQKLMLEESEAAASKKKDDPIFDSPRLSTDSLLSIE

SEQ ID NO: 2205 - DNA, 1350 bp, Zea mays
  CDS (1)..(1350)
atggcgtacgcggcgaggcggaagaagcgggtgggccgctacgaggtgggccggaccatcggccagggcaccttcgccaaggtcaagttcgccgtcgacgccgacaccggcgcgcccgtcgccatgaaggtgctcgacaaggagaccatcttcgcccaccgcatgctccaccagatcaaaagggaaatatcaatcatgaagatcgtaagacatcccaacatagtcaggcttaatgaggtgttggcagggaagacgaagatatacataatcttggaacttgtcaatggaggcgaactgtttgataaaatagcccgatatgggaagctacgtgagaatgaagccaggaagtatttccagcagcttattgatgccattgattattgccacagcaaaggagtttatcatagggatttgaagcctgaaaatatgcttcttgactcacgtggaaacttaaaagtttctgattttggacttagtacactgtctcagaatggagcaggacttcttcacacaacatgtggaacaccaaattatgttgctcctgaggtgctaggtagcgatggatatgacggacttgcagcagacatttggtcatgtggtgtcatcctctatgttttaatggctggttaccttccctttgaggagaatgaccttccaagtttgtatgaaaagataactgcagctaagtactcatgcccatactggttctctccaggagccaagtcattgatccagagattacttgatccaaatccaagaactcgtatcactattggagaaataagagcagacccatggtttgagaagaactatgtagctattagacgcggtgaagatgagaatgttagcctggatgatgttcaagctgtttttgacaatattgaggacaagtacgtatctgaggaagtaactcacaaggatggtggtcctcttatgatgaatgcctttgagatgattacgctatctcaaggtttggatctctcagcgttgtttgataggcaacaggagtatgtcaagcgccaaacgcgttttgtctcaagaaaaccagctaagactatagtagctacaattgaagttgttgccgagtcaatgagtctcaaggtccactcccagaattacaagctgcggcttgaaggtgcatcatcgaacagaacgagccaattcgctgttgttctagaggtttttcaagttgccccttctctgttcatggttgatgttcgaaaggtcgccggtgacaccctggaataccacaggttttacaagaacctatgcagcagacttgacagcataatctggaggccaatcgaagtttctgcgaaatctaagctgctgaggacgaccacttgctag

SEQ ID NO: 2206 - protein, 449 aa, Zea mays
MAYAARRKKRVGRYEVGRTIGQGTFAKVKFAVDADTGAPVAMKVLDKETIFAHRMLHQIKREISIMKIVRHPNIVRLNEVLAGKTKIYIILELVNGGELFDKIARYGKLRENEARKYFQQLIDAIDYCHSKGVYHRDLKPENMLLDSRGNLKVSDFGLSTLSQNGAGLLHTTCGTPNYVAPEVLGSDGYDGLAADIWSCGVILYVLMAGYLPFEENDLPSLYEKITAAKYSCPYWFSPGAKSLIQRLLDPNPRTRITIGEIRADPWFEKNYVAIRRGEDENVSLDDVQAVFDNIEDKYVSEEVTHKDGGPLMMNAFEMITLSQGLDLSALFDRQQEYVKRQTRFVSRKPAKTIVATIEVVAESMSLKVHSQNYKLRLEGASSNRTSQFAVVLEVFQVAPSLFMVDVRKVAGDTLEYHRFYKNLCSRLDSIIWRPIEVSAKSKLLRTTTC

SEQ ID NO: 2207 - DNA, 1596 bp, Zea mays
  CDS (1)..(1596)
atggggcagtgttacagcagagctacggccccggactctggacggggaggtgccaatggttatggctattctaaccaggcaaagccggcgcaagcacccccgagttacaaccctcctcagcaggcggccgaggtgaggtacacaccatcggcgacgaactcttcggcagtcccacccgtggctgtgccgccgaagccaacggcggacacgattcttggcaagcagtacgaggacgtgcgctctgtctactccctcgggaaggagcttggccggggccagttcggggtgacatacctctgcacagagattgcctctggtaggcagtacgcctgcaagtccatctccaagcgcaagctcgtcagcaaggcagacagggaggacattcgaagggagatccagatcatgcagcacctgtctgggcagccaaacattgttgagttccggggagcatacgaggacaagagcaatgtccatgtggtgatggagctctgcgcaggtggggagctcttcgatcgcatcattgcaaaggggcactacacagaacgtgcggctgctacaatctgcagagcagttgtgaatgttgtcaacatttgccacttcatgggtgtgatgcatcgtgatctgaaacccgagaacttcttgcttgcgaccaaggaggagaatgcaatgctcaaggccactgattttgggctttctgtcttcattgaagaaggaaagatgtacagggacattgttggaagtgcttactatgttgctcctgaagtccttagacggagctatggaaaagagatagatgtttggagtgcgggtgttattttgtacattcttctcagtggcgtgcctccattttgggctgaaactgaaaaggggatatttgatgctattctgcatgaggagattgactttgaaagtcaaccttggccatcaatttctgagagtgctaaagacttggtgagaaagatgttgacacgagatccaaagaaaagactgacttcagcccaagttcttcaacatcagtggctcagagaaggtggggaggcatctgataagcctatcgacagtgctgttctttctagaatgaagcaattcagagcaatgaataagctgaaaaagatggccctaaaggttattgcttcaaaccttaacgaggaagagatcaaggggctaaagcaaatgttcatgaacatggacacagacaatagtggcacaatcacatacgaagaactcaaagcaggattagccaaacttggatcaaagctgtcagaagctgaagtaaagcagttgatggaggctgctgatgttgatgggaatggatctattgactatgttgagttcatcactgccacaatgcatagacacaagctcgaaagggacgagcatttgttcaaggcattccagtactttgacaaagataacagcggcttcatcacaagggatgaactggaatctgctttgattgagcatgagatgggcgacacgagtacaataaaggagatcatatcagaagttgacacagataatgatgggaggattaactatgaggagttttgtgcaatgatgagaggagggatgcagcagccaatgaggctcaagtag

SEQ ID NO: 2208 - protein, 531 aa, Zea mays
MGQCYSRATAPDSGRGGANGYGYSNQAKPAQAPPSYNPPQQAAEVRYTPSATNSSAVPPVAVPPKPTADTILGKQYEDVRSVYSLGKELGRGQFGVTYLCTEIASGRQYACKSISKRKLVSKADREDIRREIQIMQHLSGQPNIVEFRGAYEDKSNVHVVMELCAGGELFDRIIAKGHYTERAAATICRAVVNVVNICHFMGVMHRDLKPENFLLATKEENAMLKATDFGLSVFIEEGKMYRDIVGSAYYVAPEVLRRSYGKEIDVWSAGVILYILLSGVPPFWAETEKGIFDAILHEEIDFESQPWPSISESAKDLVRKMLTRDPKKRLTSAQVLQHQWLREGGEASDKPIDSAVLSRMKQFRAMNKLKKMALKVIASNLNEEEIKGLKQMFMNMDTDNSGTITYEELKAGLAKLGSKLSEAEVKQLMEAADVDGNGSIDYVEFITATMHRHKLERDEHLFKAFQYFDKDNSGFITRDELESALIEHEMGDTSTIKEIISEVDTDNDGRINYEEFCAMMRGGMQQPMRLK

SEQ ID NO: 2209 - DNA, 1356 bp, Zea mays
  CDS (1)..(1356)
atggcgggcgcgggcgcgggcgggtggaagaagcgggtgggccgctacgaggtgggccggaccatcggccggggcaccttcgccaaggttaagttcgccgtcgacgccgacaccggcgcggctttcgccattaaggtgctcgacaaggagaccatcttcacccaccgcatgctccaccagatcaaaagggaaatatctatcatgaagatcgtaagacatcccaacatagttaggcttaatgaggtgttggccggcaagacaaagatatacatagtcttggaacttgtcactggaggtgaactgtttgatagaatagtccgccatgggaagctacgtgagaatgaagccaggaagtatttccagcagcttattgatgccattgattattgccacaacaaaggagtttatcatagagatttgaagcctcaaaacttgcttcttgactcacgtggaaacttaaaactttctgattttggacttagcacactgtctcaaaatggagtaggccttgtacacacgacatgtggaacaccaaattatgttgcacctgaggtgctaagtagcaatggatatgacggatctgcagcagacatttggtcgtgtggtgtcattctctatgttttaatggctggttaccttccctttgaggagaacgaccttccacatttgtatgaaaagataactgcagctcagtactcatgcccatattggttctctccaggagccaagtcattgatccagagaatacttgatccaaatccaagaactcgtatcactattgaagaaataagagaagacccatggtttaagaagaactatgtaactattagatgtggtgaagatgaaaatgtcagcctggacgatgttcaagctatttttgacaatattgaggacaagtatgtatcagacgaagtaactcacaaggatggtggtcctcttatgatgaatgcctttgagatgattgcactatctcaaggtttggatctctcagcattgtttgataggcaacaggagtttgtcaagcgccaaacacgtttcgtctcaagaaagccagccaagactgtagtagctacaattgaggttgttgctgagtcaatgggtctcaaggtccactcccggaactacaaggtgaggcttgaaggtccaacgtcaaacagagcgagccaatttgctgttgttctagaggtctttgaagttgctccttctctgttcatggtcgatgttcgaaaggttgccggtgacactccggaataccacaggttttacgagaacctatgcagcaaacttggcagcataatctggaggccaaccgaagtttctgccaaatctacgccgctgaggacgaccacctgctag

SEQ ID NO: 2210 - protein, 451 aa, Zea mays
MAGAGAGGWKKRVGRYEVGRTIGRGTFAKVKFAVDADTGAAFAIKVLDKETIFTHRMLHQIKREISIMKIVRHPNIVRLNEVLAGKTKIYIVLELVTGGELFDRIVRHGKLRENEARKYFQQLIDAIDYCHNKGVYHRDLKPQNLLLDSRGNLKLSDFGLSTLSQNGVGLVHTTCGTPNYVAPEVLSSNGYDGSAADIWSCGVILYVLMAGYLPFEENDLPHLYEKITAAQYSCPYWFSPGAKSLIQRILDPNPRTRITIEEIREDPWFKKNYVTIRCGEDENVSLDDVQAIFDNIEDKYVSDEVTHKDGGPLMMNAFEMIALSQGLDLSALFDRQQEFVKRQTRFVSRKPAKTVVATIEVVAESMGLKVHSRNYKVRLEGPTSNRASQFAVVLEVFEVAPSLFMVDVRKVAGDTPEYHRFYENLCSKLGSIIWRPTEVSAKSTPLRTTTC

SEQ ID NO: 2211 - DNA, 1338 bp, Zea mays
  CDS (1)..(1338)
atggcggagcccgcggcggcggggaggaagacgcgggtggggccgtacgaggtcggcaagaccatcggggagggcagcttcgccaaggtgaagcacgcccacgactcccgcacgggcgccgtccgcgccatcaaggtgctcgaccgcaaccacgttctccgccacaagatggtcgagcagatcaaacgggagatttcgactttgaagctaatcaaacatcccaacgtggttcagctgcatgaggttatggcgagtaggacgaagatatacatggttcttgaatttgttgatggaggcgagttattcgataagatcgtcaattctggaaggctaggagaggatgaagctaggatatactttcatcaacttataaatgcggttgattattgtcatagccgaggagtgtaccatagagatctgaagccagagaatctacttctggactcacatggaacccttaaagtttcagactttggcctaagtgcatttgcaccacaaacaaaagaggatgggcttctgcatactgcctgtggaactccaaactatgtagcacctgaggtgctcgctgataaaggctatgatggtatggctgcagatgtatggtcctgtggcataatcttgtttgttcttatggccggatacttaccctttgatgatgtcaatctgatgagactgtacaaactgatctgccatgcaactttttcttgcccaccatggttttcttctggagcaaggaagtttattaagcgcattctcgatcctaaccctgatactaggataaaaattgcagaaatgttggaagatgaatggttcaaaaaaggctataaaccaccacattttgaacaaggcgaagatgttaaccttgacgacgttgatgctgcattcaatgattcagaggaccgtcttgtggcagagaaaagagaaaagccagaatccatgaatgcatttgctcttatttcgaggtcacagggcttcaaccttggaaatttgtttgagaaggagatgatgggaatggtaaagagggaaacatctttcacgtctcaatgtacagcacaggagatcatgtcaaaaatagaggatgcatgtgggccacttggtttcaacgtgcggaaacaaaattacaagatgaaattgaaaggtgacaaatccggaagaaaaggtcacttatctgttgcaactgaggtttttgaggttgctccttcacttcacatggttgagcttcgtaaaaccggaggagacacattggagttccacaatttctacaagaatttctcatcagagctgaaagatatcgtgtggaaagctgaatctgatgcaagtatgaaacagacgaagtga

SEQ ID NO: 2212 - protein, 445 aa, Zea mays
MAEPAAAGRKTRVGPYEVGKTIGEGSFAKVKHAHDSRTGAVRAIKVLDRNHVLRHKMVEQIKREISTLKLIKHPNVVQLHEVMASRTKIYMVLEFVDGGELFDKIVNSGRLGEDEARIYFHQLINAVDYCHSRGVYHRDLKPENLLLDSHGTLKVSDFGLSAFAPQTKEDGLLHTACGTPNYVAPEVLADKGYDGMAADVWSCGIILFVLMAGYLPFDDVNLMRLYKLICHATFSCPPWFSSGARKFIKRILDPNPDTRIKIAEMLEDEWFKKGYKPPHFEQGEDVNLDDVDAAFNDSEDRLVAEKREKPESMNAFALISRSQGFNLGNLFEKEMMGMVKRETSFTSQCTAQEIMSKIEDACGPLGFNVRKQNYKMKLKGDKSGRKGHLSVATEVFEVAPSLHMVELRKTGGDTLEFHNFYKNFSSELKDIVWKAESDASMKQTK

SEQ ID NO: 2213 - DNA, 1308 bp, Brassica napus
  CDS (1)..(1308)
atggtcggagctaaaccggtgaaaacgatggaaaagggatctgacggggcggggcttctccacggccgttacgagctaggtcgtctcctagggcacggaacgttcgcaaaagtttaccacgcatgcaacgtaacaacgggaaaaagcatggcgatgaaagtcgtggccaaagagaaggtcataaaggtaggcatggtggagcagatcaagcgtgagatctcagtgatgagcatggtgaagcatcccaacatcgtcgagctccacgaagtcatggccagcaaatccaagatctacttcgccatggagcttgtccgaggcggcgagctattcgccaaagtctccaaaggaaggctacgcgaggacgtggcgcgcgtgtacttccagcaactaatctccgccgtcgatttttgccatagccggggagtttaccaccgcgatctcaaaccggagaatctgttgcttgacgaagaaggcaaccttaaggtcactgactttggtctctctgctctaactgagcatttgaagcaagacgggcttttccacacgacttgtggaactccggcgtacgttgcgccggaggttatactgaagaaaggttacgacggagctaaggcggatctgtggtcgtgcggtgtgatcctctttgtgcttctcgctgggtacttaccgtttcaagatgataatcttgtgaacatgtataggaagatttatagaggagacttcaagtgccctggatggctttcttctgatgcaagaaggctcgtgacgaagcttctggatccgaattcgaatacccgaatcagtatcgataaggttatggactcgtcttggttcaagaaaccctcaacgaggtccaagaatcagccaggagaggctgaggatcttgatttgtccgtgcacaagtcgaaggaagagactgaaacgctaaacgcgtttcacatcattgcgttgtctgaagggtttgatctctcgccgttgtttgaggagaagaagaaagaggagaagagagagatgagattcgcgacttctcggccggcgagtagtgtcatctcgagccttgaggaagctgcgagagttggggataagtttgatgtgaggaagagtgagagtagagtgaggattgaagggaaacagaatggtcggaaagggaaattggcggtggaggcggagatattcgcggtggctccgtcgtttgttgtcgtggaggtgaagaaagatcatggagatactcttgagtacaataacttttgcagtacggctcttagaccagccctcaaagacattttctggacttcaacacctgtttga

SEQ ID NO: 2214 - protein, 435 aa, Brassica napus
MVGAKPVKTMEKGSDGAGLLHGRYELGRLLGHGTFAKVYHACNVTTGKSMAMKVVAKEKVIKVGMVEQIKREISVMSMVKHPNIVELHEVMASKSKIYFAMELVRGGELFAKVSKGRLREDVARVYFQQLISAVDFCHSRGVYHRDLKPENLLLDEEGNLKVTDFGLSALTEHLKQDGLFHTTCGTPAYVAPEVILKKGYDGAKADLWSCGVILFVLLAGYLPFQDDNLVNMYRKIYRGDFKCPGWLSSDARRLVTKLLDPNSNTRISIDKVMDSSWFKKPSTRSKNQPGEAEDLDLSVHKSKEETETLNAFHIIALSEGFDLSPLFEEKKKEEKREMRFATSRPASSVISSLEEAARVGDKFDVRKSESRVRIEGKQNGRKGKLAVEAEIFAVAPSFVVVEVKKDHGDTLEYNNFCSTALRPALKDIFWTSTPV

SEQ ID NO: 2215 - DNA, 1452 bp, Brassica napus
  CDS (1)..(1452)
atggcttctcgaacaacaccttcgcgatccactccttctcgatcgacaccttcaggtagtagtagtagtagtagttcgattagtaggacacgagtgagtaagtacgagcttgggagaacacttggtgaaggaaccttcgctaaggtcaaattcgctaggaacgtcgacaagggagagagagtgactatcaaggttattgataaagagaaggttctgaaaaacaagatgatcgctcagattaagcgtgagatctcgacaatgaaactcatcaagcacccaaatgtcatccgcatgattgaggtgatggctagcaagactaagatctactttgtgttggaacttgttactggtggagagcttttcgataaaatttcaagcactgggagattgaaggaagatgaggcgaggaagtactttcagcagcttattaatgcagtggactattgccatagcagaggagtttatcatagagaccttaagccagagaatttgcttttggatgcaaacgggactctcaaagtttctgattttggactgagtgcacttcctcagcaagtccgagaggatgggctacttcacacaacatgtggaacacccaattatgttgctccagaggtaatcaacaacaaaggttacgatggagctaaggctgatctgtggtcttgtggtgtgatcctcttcgtcttaatggctggttacttacctttcgaagattctaatctcacgtcactatacaaaaagatatttaaagccgaatttacgtgcccgccttggttctcagcaagtgctaagaagttaattaaaaggattctcgatcctaaaccagcaacgaggataacatttgctgaagtcattgaaaatgagtggtttaagaaagggtataaggctcctaaatatgagaacgctgatgtcagccttgatgacgttgatgcaatctttgatgaatcaggggagtctaagaaccttgttgtggagaggcgagaagaagaacctaaaacaccagtaactatgaatgcttttgagctcatctcaacatcccagggtctcaatcttggttcacttttcgaaaagcaaatggggcttgttaaacggaaaactcagtttacttccaaatgtccggctaatgacatagtcacaaaaattgaggcagcagcagcacctatgggatttgatgtcaagaaaaataactacaagatgaagcttctaggagagaaatcaggccgcaagggtcagttagcagtcacaactgaggtttttcaagttgctccatcgctttatatggttgaaatgcgaaaatcaggtggtgacacgttggaatttcacaagttttacaaaaaccttaccacgggtcttaaggatattgtttggaaaacaatcgacgaagagaaagaggaaggaactgaaggtaaagcatcaggtggtactactaatggtaccgtggctgcttcttga

SEQ ID NO: 2216 - protein, 483 aa, Brassica napus
MASRTTPSRSTPSRSTPSGSSSSSSSISRTRVSKYELGRTLGEGTFAKVKFARNVDKGERVTIKVIDKEKVLKNKMIAQIKREISTMKLIKHPNVIRMIEVMASKTKIYFVLELVTGGELFDKISSTGRLKEDEARKYFQQLINAVDYCHSRGVYHRDLKPENLLLDANGTLKVSDFGLSALPQQVREDGLLHTTCGTPNYVAPEVINNKGYDGAKADLWSCGVILFVLMAGYLPFEDSNLTSLYKKIFKAEFTCPPWFSASAKKLIKRILDPKPATRITFAEVIENEWFKKGYKAPKYENADVSLDDVDAIFDESGESKNLVVERREEEPKTPVTMNAFELISTSQGLNLGSLFEKQMGLVKRKTQFTSKCPANDIVTKIEAAAAPMGFDVKKNNYKMKLLGEKSGRKGQLAVTTEVFQVAPSLYMVEMRKSGGDTLEFHKFYKNLTTGLKDIVWKTIDEEKEEGTEGKASGGTTNGTVAAS

SEQ ID NO: 2217 - DNA, 1392 bp, Brassica napus
  CDS (1)..(1392)
atggagaacaaaccgagtgtcttaaccgacacatacgaggtaggtaggctactaggtcaaggcacgttcgccaaagtctactacggtcgaagcgtccacaccaacgagagcgtggcgatcaaaatgatcgacaaagagaaagtcctccgcgtggggctcagcgaccagatcaagcgcgagatctccgtcatgcgtatcgccaagcaccccaacgtggtctccctccacgaggtcatggccaccaagtcccgcatctacttcgtgatcgagtactgcaaaggcggcgagcttttcaacaaggtcaaaaaggggaagctcagggaagacgtcgcctggaagtacttccaccagctcatcaacgctgtggacttttgccatagccgcggtgtttaccaccgcgacatcaagccggagaatctcctgcttgatgacaatgagaatctcaaggtttctgacttcggtctgagcgcgctcgcggattgcaaacgcgccgatgggcttttgcataccacttgcggcacccctgcttacgtggcgcctgaggtgattaacaggaaaggttacgatgggactaaggctgatatttggtcttgtggggttgttttgttcgtgctgttggctggttacctcccctttcacgactctaatctaatggagatgtataggaagattggtaaagcggatttcaagtgtcccaactggttcgcccccgaggcgaagaggcttctgtgcaagatgctggatcctaaccacgagagtaggatcaccatctcgaggatcagggagagttcttggtttaggaaagggctgcatttgaagcagaagaagattgataaacaactccgggaaacaactgttgttattcccacggtggaagttggagagagttcgggctcgagcgagaacggagagagccaagaggcgccggctcagctcgcgtacctgaacgctttcgatatcatcagcttgtctgcggggtttgatctgggagggcttttcggggatgccaatgacaagagggagtctagattcgcgtcgaggaagcctgctgctgagatcatttctaagctggaggaggtggccagaggtttgaacctgaagataaggaagcaggacgcggggctgttcaagctcgaagggtcgaaggaaggaagaaagggagctttgtcgatggacgcggagatattccaagtgactcagacgtttcacctggttgaagtgaagaaatgtgatggggacacggtggagtatcagaggctggtggaggaggatcttaggcctgcgctgggagatgtagtctgggtttggcaaggcgataaggagaaggaagagcagctaaagcgtggtttgcaggacgaacaggaagtagaacagcatagtgaaccattgtag

SEQ ID NO: 2218 - protein, 463 aa, Brassica napus
MENKPSVLTDTYEVGRLLGQGTFAKVYYGRSVHTNESVAIKMIDKEKVLRVGLSDQIKREISVMRIAKHPNVVSLHEVMATKSRIYFVIEYCKGGELFNKVKKGKLREDVAWKYFHQLINAVDFCHSRGVYHRDIKPENLLLDDNENLKVSDFGLSALADCKRADGLLHTTCGTPAYVAPEVINRKGYDGTKADIWSCGVVLFVLLAGYLPFHDSNLMEMYRKIGKADFKCPNWFAPEAKRLLCKMLDPNHESRITISRIRESSWFRKGLHLKQKKIDKQLRETTVVIPTVEVGESSGSSENGESQEAPAQLAYLNAFDIISLSAGFDLGGLFGDANDKRESRFASRKPAAEIISKLEEVARGLNLKIRKQDAGLFKLEGSKEGRKGALSMDAEIFQVTQTFHLVEVKKCDGDTVEYQRLVEEDLRPALGDVVWVWQGDKEKEEQLKRGLQDEQEVEQHSEPL

SEQ ID NO: 2219 - DNA, 1299 bp, Brassica napus
  CDS (1)..(1299)
atggtcggagctaaacctgtgaaaacgatggagaaaggatctgacggtgcggggcttctccacggccgttacgagctaggtcgtctcctagggcacggaacgttcgcgaaagtgtaccacgcacgtaacgtaacaacgggaaaaagcatggcgatgaaagtcgtggcaaaagagaaggtcataaaggtaggcatggtggaccagatcaaacgagagatctcagtgatgagcatggtgaagcatcccaacatcgtcgagctccacgaggtcatggccagcaaaaccaagatctacttcgccatggagctagtccgaggcggcgagctattcgccaaaatcgccaaaggaaggctacgcgaggacgtggcgcgcgtgtacttccagcaactaatctccgccgtcgatttctgccacagccggggagtttaccaccgagatcttaagccggagaatctcttgcttgacgaagaaggcaaccttaaggtcactgactttggtctctctgctttgactgagcatttgaagcaagacgggcttttccacaccacgtgtggaactccggcgtacgttgccccggaggttatactgaagaaaggatacgacggagctaaggcagatctgtggtcgtgcggtgtgatcctcttcgtgcttctcgctgggtacttaccgtttcaagatgataatcttgtgaacatgtataggaagatttatagaggagacttcaagtgccctggatggctttcttctgatgcaagaaggctcgtgacgaagcttctggatccgaatccgaatacccgaatcaccatcgataaggttatggactcggcttggttcaagaaacactcaacgagatccaagaacgaggctgaggatcttgatatctctgttcataagtccaaggaagagactgaaacgctaaacgcgtttcacatcatagcgttgtctgaagggtttgatctctcgccgttgtttgaggagaagaagaaagaggagaagagagagatgagattcgcaacttctcggccggcgagtagtgtcatctcgagccttgaggaagctgcgagagttggggacaagtttgatgtgaggaagagtgagagtagagtgaggattgaagggaaacagaatggtcggaaagggaaattggcggtggaggcggagatattcgcggtggctccgtcgtttgttgtcgtggaggtgaagaaagatcatggagatactcttgagtacaataacttttgcagtacggctcttagaccagctctcaaagacattttctggacttcaacacctgtttga

SEQ ID NO: 2220 - protein, 432 aa, Brassica napus
MVGAKPVKTMEKGSDGAGLLHGRYELGRLLGHGTFAKVYHARNVTTGKSMAMKVVAKEKVIKVGMVDQIKREISVMSMVKHPNIVELHEVMASKTKIYFAMELVRGGELFAKIAKGRLREDVARVYFQQLISAVDFCHSRGVYHRDLKPENLLLDEEGNLKVTDFGLSALTEHLKQDGLFHTTCGTPAYVAPEVILKKGYDGAKADLWSCGVILFVLLAGYLPFQDDNLVNMYRKIYRGDFKCPGWLSSDARRLVTKLLDPNPNTRITIDKVMDSAWFKKHSTRSKNEAEDLDISVHKSKEETETLNAFHIIALSEGFDLSPLFEEKKKEEKREMRFATSRPASSVISSLEEAARVGDKFDVRKSESRVRIEGKQNGRKGKLAVEAEIFAVAPSFVVVEVKKDHGDTLEYNNFCSTALRPALKDIFWTSTPV

SEQ ID NO: 2221 - DNA, 1323 bp, Brassica napus
  CDS (1)..(1323)
atggtcggagcaaaacctatagagaacggatctgacggtggagcaagcactggtcttctccacggacgttacgagctaggccgtcttctaggccacgggacattcgctaaagtgtaccacgcgcgtaacgtaacaacgggtaaaagcgtggcgatgaaagtcgtcggaaaagagaaggtggtgaaggtcggcatggtggaccagatcaagcgcgagatctcggtgatgaggatggtgaagcatcccaacatcgtcgagctccacgaggtgatggctagcaaaaccaagatctacttcgccatggagctcgtgcgaggcggggagctgttcgccaaagtcgccaaaggaaggctgcgcgaggacgtggcgcgcgtgtacttccagcagctgatctccgccgtcgatttctgccacagccgcggggtttaccaccgagatctcaagccggagaatctcttgcttgacgaagaaggcaacctcaaggtcaccgactttggtctctctgctttcaccgagcatttgaagcaagacgggcttctccacaccacctgtggaactccggcgtacgtcgcgccggaggttatactgaagaaaggatatgacggagcgaaggcggatctttggtcttgcggcgttatcctcttcgtgctcctcgcgggttacttgccgtttcaagatgataatcttgtcaacatgtataggaagatctacagaggagacttcaagtgccctggatggctctcctccgatgcgaggaggctcgtgacgaagcttctggatccgaatccgaatacacggatcactatcgataaggtgatggattcacactggttcaagaagtcctcaacgagatcaagaaacgagccagtggccgcaacaccagaggctgaggaggatgttgatgtgtccgtgcacaagtccaaggaagagacggagacgctaaacgcgtttcacatcatcgcgttatctgaagggtttgatctctcgccgttgttcgaggagaagaagaaagaggagaagatggagatgaggttcgcgacttctcggccggcgagtagtgtgatatctagtcttgaggaagcggcgagggttggggataagttcgatgtgaggaagagtgagagcagagtgaggatggaagggaagctgagtggtcggaaagggaagttggcggtggaggcggagatattcgcggtggctccgtcgtttgttgtcgtggaggtgaagaaagatcatggggacacgcttgagtacaataacttttgtagtacggctcttagaccagccctcaaggacatcttctggacttctacacctgcttga

SEQ ID NO: 2222 - protein, 440 aa, Brassica napus
MVGAKPIENGSDGGASTGLLHGRYELGRLLGHGTFAKVYHARNVTTGKSVAMKVVGKEKVVKVGMVDQIKREISVMRMVKHPNIVELHEVMASKTKIYFAMELVRGGELFAKVAKGRLREDVARVYFQQLISAVDFCHSRGVYHRDLKPENLLLDEEGNLKVTDFGLSAFTEHLKQDGLLHTTCGTPAYVAPEVILKKGYDGAKADLWSCGVILFVLLAGYLPFQDDNLVNMYRKIYRGDFKCPGWLSSDARRLVTKLLDPNPNTRITIDKVMDSHWFKKSSTRSRNEPVAATPEAEEDVDVSVHKSKEETETLNAFHIIALSEGFDLSPLFEEKKKEEKMEMRFATSRPASSVISSLEEAARVGDKFDVRKSESRVRMEGKLSGRKGKLAVEAEIFAVAPSFVVVEVKKDHGDTLEYNNFCSTALRPALKDIFWTSTPA

SEQ ID NO: 2223 - DNA, 1608 bp, Brassica napus
  CDS (1)..(1608)
atggggaactgttgcggcagtccaagttcagccacaatagagagtaaacatggcaaacccaagaacaaaaacaacccctttcaaagcaacgagtacacaacagcaaacggatctggagctggcttcaagctctctgtgctgaaagatccaacaggacacgacatatcttctcagtatgatcttggacgcgaggttggtcgaggggagtttggtgtgacttacttgtgtaccgacatccaaacgggtgacaagtacgcttgcaagtccatatcgaagaagaagctgaggacagcggtggatataggggatgttaggagggaggttgagataatgagacatatgcctaaacacccaaacattgtcacgctcaaggatgccttcgaggatgatgacgcggtgcatatagtgatggagctgtgtgaaggaggggagctgtttgatcggattgttgcgagaggtcattatactgaacgggctgctgctgctgttatgaagactattcttgaagttgttcagatatgtcataagaatggagtgatgcatagggatcttaagccggagaactttctatttgctaataaaaaagagacatcaccacttaaggctattgattttggattatcagtcttctttaaacctggtgaggggtttaatgagattgttggaagtccttattacatggcaccagaagtgctaagacgaaactatggacctgagatcgatgtctggagtgcaggagtcatcctctatatccttctttgtggtgtccctcctttttgggcagagactgagcaaggggtggctcaagcgatcattaggtcagtcattgacttcaagagagatccatggccaagagtttccgaaagcgccaaagaccttgtgagaaagatgctcgaacctgaccccaaaaaacgcctttctgctgcagaagtactcgaacatccttggatacaaaatgcaaagaaggctccaaatgtttccctcggcgagactgtgaaagcaaggctcaaacagttttctgttatgaacaagctcaagaaacgagctctacgggtgatagccgaacatttatcagtagaggaagtagctggcataaaggaagcgtttgagatgatggacagtaacaaaacggggaagataaacctcgagcagcttaaacatggacttcataaactcggacagcagcagatggctgatgctgatctacagattttgatggaagctgctgatgtagatggggacgggactttgaattatggagagtttgtggctgtctctgtgcatcttaagaagatggcgaacgacgaacatttgcacaaggcttttagctttttcgaccagaaccagagcaattacatagagattgaggagctgcggcaggctttaaatgatgaggaggatacgagcagtgaagaagttattgcagccatcatgcaagatgttgacactgacaaggatgggagaataagctacgaagagtttgcagcaatgatgaaagctgggacagactggaggaaagcatcaagacagtattcgagggaaagattcaacagtttgagcctcaagttaatgagagacggttcattgcaattagaaggcgagacctga

SEQ ID NO: 2224 - protein, 535 aa, Brassica napus
MGNCCGSPSSATIESKHGKPKNKNNPFQSNEYTTANGSGAGFKLSVLKDPTGHDISSQYDLGREVGRGEFGVTYLCTDIQTGDKYACKSISKKKLRTAVDIGDVRREVEIMRHMPKHPNIVTLKDAFEDDDAVHIVMELCEGGELFDRIVARGHYTERAAAAVMKTILEVVQICHKNGVMHRDLKPENFLFANKKETSPLKAIDFGLSVFFKPGEGFNEIVGSPYYMAPEVLRRNYGPEIDVWSAGVILYILLCGVPPFWAETEQGVAQAIIRSVIDFKRDPWPRVSESAKDLVRKMLEPDPKKRLSAAEVLEHPWIQNAKKAPNVSLGETVKARLKQFSVMNKLKKRALRVIAEHLSVEEVAGIKEAFEMMDSNKTGKINLEQLKHGLHKLGQQQMADADLQILMEAADVDGDGTLNYGEFVAVSVHLKKMANDEHLHKAFSFFDQNQSNYIEIEELRQALNDEEDTSSEEVIAAIMQDVDTDKDGRISYEEFAAMMKAGTDWRKASRQYSRERFNSLSLKLMRDGSLQLEGET

SEQ ID NO: 2225 - DNA, 1341 bp, Brassica napus
  CDS (1)..(1341)
atggtgagagagcaagcggaagagaagaaggaggtgaggaagggaatgcgactggggaaatacgagcttggaagaacgctaggcgagggtaatttcggaaaagtaaaattcgctaaagacaccgtgtctggtcaaccgttcgctgttaaaatcatcgacaagtctcgtatcgccgatctcaacttctccttgcagataaaaagagagatcagaacgctgaaaatgctgaaacatcccaacattgtcagattacatgaggtattggctagcaaaacaaagatcaatatggtgatggagttagtaaccggaggagaattgttcgacaaaattgtttcaaacggaaagctaacagaaactgagggaagaaaaatgtttcagcagctcatcgatggaatcagttactgtcacatcaaaggtgttttccacagggatctcaagctagagaatgttcttcttgatgcaaagggacatataaagatcactgactttggcctcagtgctctgcctcagcattttagggaagacggattgctacatacaacctgtggaagtcctaactacgttgcgcctgaggttttagctaacagaggctacgagggtgcagcatctgatatatggtcatgtggtgtagtcctgtatgtgattctaaccggatgtctcccttttgatgatagaaaccttgtagttctttaccagaagatatgcaaaggagacccaccgataccaagatggttatcacctggtgcaagaaccatgatcaagaaaatgctagatccaaatcctgtctcgaggatcacagtcgcaggtattaaagccagcgaatggttcaagcacgagtatactccttcagttccagatgatgatgatgacgaagaagacattgacacagacgatgatgctttctcagtccaagacgtcggatcggaagatggaaagggcagtgattcaccgactatcatcaacgcgtttcagttgatcggaatgtcttccttccttgacctgtctggtttctttgaacaagagaatgtatcagagaggagaataagatttacttcaaatagctcagcaaaagatttactggagaaaatcgaaaactcagttacagaaatgggattcagtgtacaaaagaaaaatgcaaagttgaaagtaaagcaagaagaacataaccagaagggtcaagttggtttatcagtaacagctgaggttttcgagataaagccgtcactgaacgtggttgagttaagaaaatcttatggcgattcatctttgtatagacagctgtacgagagactattaaaagaagtaggcacttcctcgccggaacaagagctagtaacatag

SEQ ID NO: 2226 - protein, 446 aa, Brassica napus
MVREQAEEKKEVRKGMRLGKYELGRTLGEGNFGKVKFAKDTVSGQPFAVKIIDKSRIADLNFSLQIKREIRTLKMLKHPNIVRLHEVLASKTKINMVMELVTGGELFDKIVSNGKLTETEGRKMFQQLIDGISYCHIKGVFHRDLKLENVLLDAKGHIKITDFGLSALPQHFREDGLLHTTCGSPNYVAPEVLANRGYEGAASDIWSCGVVLYVILTGCLPFDDRNLVVLYQKICKGDPPIPRWLSPGARTMIKKMLDPNPVSRITVAGIKASEWFKHEYTPSVPDDDDDEEDIDTDDDAFSVQDVGSEDGKGSDSPTIINAFQLIGMSSFLDLSGFFEQENVSERRIRFTSNSSAKDLLEKIENSVTEMGFSVQKKNAKLKVKQEEHNQKGQVGLSVTAEVFEIKPSLNVVELRKSYGDSSLYRQLYERLLKEVGTSSPEQELVT

SEQ ID NO: 2227 - DNA, 1326 bp, Brassica napus
  CDS (1)..(1326)
atggtcggagcaaaacctatagagaacggatctgacggtggagcaagcactggtcttctccacggacgttacgagctaggccgtcttctaggccacgggacattcgctaaagtgtaccacgcgcgtaacgtaacaacgggtaaaagcgtggcgatgaaagtcgtcggaaaagagaaggtggtgaaggtcggcatggtggaccagatcaagcgcgagatctcggtgatgaggatggtgaagcatcccaacatcgtcgagctccacgaggtgatggctagcaaaaccaagatctacttcgccatggagctcgtgcgaggcggggagctgttcgccaaagtcgccaaagggaggctgcgcgaggacgtggcgcgcgtgtacttccagcagctgatctccgccgtcgatttctgccacagccgcggggtttaccaccgagatctcaagccggagaatctcttgcttgacgaagaaggcaacctcaaggtcaccgactttggtctctctgctttcaccgagcatttgaagcaagacgggcttctccacaccacttgtggaactccggcgtacgtcgcgccggaggttatactgaagaaaggatatgacggagcgaaggcggatctttggtcttgcggtgttatcctcttcgtgctcctcgcgggttacttgccgtttcaggatgataatcttgtcaacatgtataggaagatctacagaggagacttcaagtgccctggatggctctcctccgatgcgaggaggctcgtgacgaagcttctggatccgaatccgaatacccggatcactatcgataaggtgatggattcacactggttcaagaagtcctcaacgagatcaagaaacgagccagtggccgcaacaccagaggctgaggaggatgttgatgtgtccgtgcacaagtccaaggaagagacggagacgctaaacgcgtttcacatcattgcgttatctgaagggttcgatctctcgccgttgttcgaggagaagaagaaagaggagaaggtggagatgaggttcgcgacgtctcggccggcgagtagtgtgatatcgagcctggaggaggcggcgaaggttgggaataagtttgatgtgaggaagagtgagagtagagtgaggatggaagggaagctgagtggtcggaaagggaagttggcggtggaggcggagatattcgcggtggctccgtcgcttgttgtcgtggaggtgaagaaagatcatggggacacgcttgagtacaataacttttgtagtacggctcttagaccagccctcaaggacatcttctggacttctactacacctgcttga

SEQ ID NO: 2228 - protein, 441 aa, Brassica napus
MVGAKPIENGSDGGASTGLLHGRYELGRLLGHGTFAKVYHARNVTTGKSVAMKVVGKEKVVKVGMVDQIKREISVMRMVKHPNIVELHEVMASKTKIYFAMELVRGGELFAKVAKGRLREDVARVYFQQLISAVDFCHSRGVYHRDLKPENLLLDEEGNLKVTDFGLSAFTEHLKQDGLLHTTCGTPAYVAPEVILKKGYDGAKADLWSCGVILFVLLAGYLPFQDDNLVNMYRKIYRGDFKCPGWLSSDARRLVTKLLDPNPNTRITIDKVMDSHWFKKSSTRSRNEPVAATPEAEEDVDVSVHKSKEETETLNAFHIIALSEGFDLSPLFEEKKKEEKVEMRFATSRPASSVISSLEEAAKVGNKFDVRKSESRVRMEGKLSGRKGKLAVEAEIFAVAPSLVVVEVKKDHGDTLEYNNFCSTALRPALKDIFWTSTTPA

SEQ ID NO: 2229 - DNA, 1461 bp, Brassica napus
  CDS (1)..(1461)
atggcggagctaacgaaagaaacatccctccccaaggagagaagctccccctccccgcaagccctcatcctcggccgctacgagatgggcaagctcctcggccacgggaccttcgccaaggtctacctcgcccgcaacgtcaaaacaaacgagagcgtcgccatcaaagtcatcgacaaggagaagatcctcaaaggcggcctcatcgcccacatcaagcgcgagatctccatcctccgccgcgtccgccaccccaacatcgtccagctcttcgaggtcatggccaccaaagccaagatctacttcgtcatggagtacgtccgcggcggcgagctcttcaacaaggtagccaaaggacgtctcaaggaagacaccacccgcagatacttccagcagctgatctccgccgtcacgttctgccacgcacgcggcgtctaccaccgcgacctcaaaccggagaatctgctgctagacgacaaagggaaccttaaagtctctgactttgggctcaacgcggtctctgatcagattcgacaagacgggcttttccacaccttctgtgggacccctgcttacgtggcgccagaggttttagcgaggaaagggtacgacgcggccaaagttgatatctggtcttgtggtgttgtgttgtttgttctgatggcgggctacctcccgtttcacgacaggaacgttatggctatgtacaagaagatttacagaggagagttcagatgtccgagatggttctcgccggagctcacgaggttgatgtctcgtcttctcgagacggatccggagaaacggtttactttccttgaggttatggagaactcttggttcaagaaagggtttaagcatgtgaaattctatgtggaagatgataagctttgcaacgttgatgatgatgacgatgagttggagactgcttccgtggagtctgatcggtcttctaccgtgtctgaatccgacattgagtgtttcaagcccacaaggaaagttggggggttgcctagacccgcgagtttgaatgccttcgatattatatcgttctcgcaagggtttgacttgtcagggctgtttgatgatgatggggaaggctctaggtttgtttcaggagctccggtttcgaagatcatatcgaagttggaagagattgctaaagttgtgagctttaccgtgaggaagaaggattgtagggtgagtcttgaagggtcaagacaaggagtgaaaggtcctttgactattgcagcggagatatttgagttgacaccgtcgttggttgttgtggaggtgaagaagaaaggaggagacagagcagagtatgaagagttttgcaacaacgagttgaaacccatgttgcagaatctgagagctgatgatgttgaagagcctgtgacggtttcagcggttgatgatgaaaccgtgaaatctccaccggtttgtttctttgccttctga

SEQ ID NO: 2230 - protein, 486 aa, Brassica napus
MAELTKETSLPKERSSPSPQALILGRYEMGKLLGHGTFAKVYLARNVKTNESVAIKVIDKEKILKGGLIAHIKREISILRRVRHPNIVQLFEVMATKAKIYFVMEYVRGGELFNKVAKGRLKEDTTRRYFQQLISAVTFCHARGVYHRDLKPENLLLDDKGNLKVSDFGLNAVSDQIRQDGLFHTFCGTPAYVAPEVLARKGYDAAKVDIWSCGVVLFVLMAGYLPFHDRNVMAMYKKIYRGEFRCPRWFSPELTRLMSRLLETDPEKRFTFLEVMENSWFKKGFKHVKFYVEDDKLCNVDDDDDELETASVESDRSSTVSESDIECFKPTRKVGGLPRPASLNAFDIISFSQGFDLSGLFDDDGEGSRFVSGAPVSKIISKLEEIAKVVSFTVRKKDCRVSLEGSRQGVKGPLTIAAEIFELTPSLVVVEVKKKGGDRAEYEEFCNNELKPMLQNLRADDVEEPVTVSAVDDETVKSPPVCFFAF

SEQ ID NO: 2231 - DNA, 1299 bp, Brassica napus
  CDS (1)..(1299)
atgggctttccatctccagcatctccagaaaaggcctcagggaccattctgctcggtaaatacgaacttggtctccgattaggcagtggtagctttgccaaagtccatgtggctcgttccatcgaagccggcgaactcgtggccgttaagatcatcgccaagaaaaaaacagctgatgccggtatggaaccgaggattatccgggagatagaagccatgcgccgcctccacaaccaccccaacgtcctcaaaatccacgaagtcatggccaccaaaaccaaaatctatctcgtcatggaactcgccgccggtggagagcttttcacccgaatccgccgtttcggctgccttcaagaatctgccgcgcgtcgctacttccagcagctagcctccgcgctaaccttctgccgccgagaaggaatcgctcaccgcggcgtgaagccgcagaatctcctcctcgataagcaaggaaacctcaaggtctccgacttcggtttatcggctctcccggagcaccgtagcagcaccgggttgctccaaacatcgtgcggctcaccggcttacacagctccggaggtgatcgctcagaaatcgtacgacggagctaaggcggattcgtggtcgtgcggtgtcttcctctttgtacttctcgcaggttacgttccttttgaggactcaaacgttgtgaccatgtaccgtaagatccaacggagagattacaagttcccaaacgggatctcgaaacgtgctcgatccatcatctacaagttgctcgatccgaatccggaaacgaggatgattatcgaagctgtaactgaaaccaaatggttcaagaaatcccttgaaacctccgagtttaaatccagtgtcttggaatcggatgatcgattggttaaattgacaagtcatacgatcacagcgttggattggatctcgttatctgcgggattggatctatcggggctgtttgagaggaggaagaggaaggagacgaggtttacggcgacggtttccgcggaaggagttgtggagaaggcgaagacgataggggagaagttggggtatagagtggagaagaagaaggaggcgatggctttggggttgggaaaaggaagaacgacggtgatggttgaggcggtggagctggtggaaggtttggttgtggcggaggtgaaggtggtggaaggtgaagaggaggaggaggaatcttattggtcggagcttattgtagagtttgaggagattgtgctttcatggcacagtgacgtatctgttaaagttgaaagtgacttagcttaa

SEQ ID NO: 2232 - protein, 432 aa, Brassica napus
MGFPSPASPEKASGTILLGKYELGLRLGSGSFAKVHVARSIEAGELVAVKIIAKKKTADAGMEPRIIREIEAMRRLHNHPNVLKIHEVMATKTKIYLVMELAAGGELFTRIRRFGCLQESAARRYFQQLASALTFCRREGIAHRGVKPQNLLLDKQGNLKVSDFGLSALPEHRSSTGLLQTSCGSPAYTAPEVIAQKSYDGAKADSWSCGVFLFVLLAGYVPFEDSNVVTMYRKIQRRDYKFPNGISKRARSIIYKLLDPNPETRMIIEAVTETKWFKKSLETSEFKSSVLESDDRLVKLTSHTITALDWISLSAGLDLSGLFERRKRKETRFTATVSAEGVVEKAKTIGEKLGYRVEKKKEAMALGLGKGRTTVMVEAVELVEGLVVAEVKVVEGEEEEEESYWSELIVEFEEIVLSWHSDVSVKVESDLA

SEQ ID NO: 2233 - DNA, 1095 bp, Brassica napus
  CDS (1)..(1095)
atggataagtatgaggttgtgaaggatctggggactgggaacttcggtgtggctcgcctccttaggcacaaagaaaccaaagagcttgttgccatgaagtacatcgagagaggtcgcaagatagatgagaacgtggcgagagagattattaatcacagatcacttaagcatcctaatatcatccgattcaaggaggtgattctgacaccaactcatcttgccattgtaatggagtatgcttctggaggagagctctttgaaagaatctgtaatgccggtagattcagtgaagctgaggctagatacttctttcagcagctgatttgtggagtggactactgccactccctgcaaatatgccacagagatctgaagcttgagaacacactgctcgatgggagccctgctccgcttttgaaaatctgtgattttggttactccaagtcatctatactacattctaggcctaaatcgactgttggaactccagcatacatagcacctgaagttctttcccggagagaatatgatggcaagcacgcggatgtgtggtcatgtggagtaaccctttatgtgatgctggttggagcttacccatttgaggaccctaatgatccaaagaacttcaggaaaacaatccaacgtataatggctatacaatacaagatcccggactacgttcacatatctcaggagtgcaaacaccttctctctcgcatattcgtcactaaccccgctaagagaatcacgcttaaggagatcaagaatcatccgtggtacttaaagaatttgccaaaggagctgctggagtcggctcaagcggtgtattacaagagagacaacacgagctattctcttcaaagcatagaggacataatgaagatagttggagaagcaaggaatccagcttcatcttcaagcgtcagcaaaagcttgggatcaggggctgaggaagaagaggaagaagaagctgaagcggaagtggaagaagaagaggaggaagaagaagaagaagaagatgaatacgagaagcatgtcaaagaggcacattcttctattcaagagcctcacgaagcgttaaaggaaaaaaaatga

SEQ ID NO: 2234 - protein, 364 aa, Brassica napus
MDKYEVVKDLGTGNFGVARLLRHKETKELVAMKYIERGRKIDENVAREIINHRSLKHPNIIRFKEVILTPTHLAIVMEYASGGELFERICNAGRFSEAEARYFFQQLICGVDYCHSLQICHRDLKLENTLLDGSPAPLLKICDFGYSKSSILHSRPKSTVGTPAYIAPEVLSRREYDGKHADVWSCGVTLYVMLVGAYPFEDPNDPKNFRKTIQRIMAIQYKIPDYVHISQECKHLLSRIFVTNPAKRITLKEIKNHPWYLKNLPKELLESAQAVYYKRDNTSYSLQSIEDIMKIVGEARNPASSSSVSKSLGSGAEEEEEEEAEAEVEEEEEEEEEEEDEYEKHVKEAHSSIQEPHEALKEKK

SEQ ID NO: 2235 - DNA, 1323 bp, Brassica napus
  CDS (1)..(1323)
atgaatcggaggcagcaagtcaagcgtagagtaggtaagtatgaagtgggaaggacaattggggaaggaacttttgctaaagtcaagtttgcaagaaactctgaaactggagaacctgtagccctcaagattcttgataaagagaaagtcctcaagcataagatgtctgaacagatcagaagagagatagctactatgaagttgattaagcatccaaatgttgttcaactgtatgaggtgatggcaagcaagacaaaaatatttatcatcttggagtatgttacaggaggagaactcttcgataagattgtgaatgatgggaggatgaaagaagatgaggctcgtagatattttcaacagcttgtgcatgctgtggactactgtcatagcagaggtgtttaccatagagatctcaagcctgaaaatttgctattggatgcatatggaaacctcaagatctcagattttggattaagtgctttgtctcagcaagtcagggatgatggactccttcatacatcgtgtggaactccaaactacgttgctcctgaggttcttaatgacggaggctacgatggagcaacagcagacatgtggtcatgtggtgttattctctatgtcctgcttgcaggttacttgcctttcgatgattctaatcttatgaatctttataagaaaatttcatctggtgaattcaactgtcctccatggctatcacttggcgccatgaaactgatcactagaatcttagatcctaaccccatgactcgtgtaacaccacaagaggtgttcgaagatgagtggttcaagaaagattacaagcctccagtgtttgaggagaaggatgattcaaacatggatgatgttgatgctgttttcaaggactctgaggaacatcatgttactgaaaaaaaggaagagcagccagctgcaatcaatgcctttgagatcatctcaatgtcaagggggcttaacttggaaaacctgtttgatcctgaacaggaatttaagagagaaacaaggataactctgagaggaggggcgaacgaaatcatcgacaagatagaagaagctgcaaagcctctcggttttgatgtgcaaaagaaggactacaagatgaggcttgagaatgtgaaggctgggagaaaagggaatctcaatgtggcaacagagatattccaagtagcaccaagtcttcatatggttcaagtttcgaaatcaaaaggggacactctcgaattccacaagttttataagaagctgtctaattctctggagaatgtagtctggacgaacaacgaagtgaagaaagctggaaagtga

SEQ ID NO: 2236 - protein, 440 aa, Brassica napus
MNRRQQVKRRVGKYEVGRTIGEGTFAKVKFARNSETGEPVALKILDKEKVLKHKMSEQIRREIATMKLIKHPNVVQLYEVMASKTKIFIILEYVTGGELFDKIVNDGRMKEDEARRYFQQLVHAVDYCHSRGVYHRDLKPENLLLDAYGNLKISDFGLSALSQQVRDDGLLHTSCGTPNYVAPEVLNDGGYDGATADMWSCGVILYVLLAGYLPFDDSNLMNLYKKISSGEFNCPPWLSLGAMKLITRILDPNPMTRVTPQEVFEDEWFKKDYKPPVFEEKDDSNMDDVDAVFKDSEEHHVTEKKEEQPAAINAFEIISMSRGLNLENLFDPEQEFKRETRITLRGGANEIIDKIEEAAKPLGFDVQKKDYKMRLENVKAGRKGNLNVATEIFQVAPSLHMVQVSKSKGDTLEFHKFYKKLSNSLENVVWTNNEVKKAGK

SEQ ID NO: 2237 - DNA, 1389 bp, Brassica napus
  CDS (1)..(1389)
atggaaaacaagccgagtgtcttgaccgataagtatgaagtcgggaggttgttgggtcaaggtacttttgccaaggtgtattatggaaggagtgttcatactaaccagagcgttgctatcaagatgatcgacaaggataaggttatgaaagttggccttatggagcagatcaagcgagagatctctgtcatgcggatcgctaaacaccctaacgttgtggagctatacgaggtcatggcaactaaaacaaggatctactttgttatggagtactgtaaaggaggggagcttttcaacaaggttgctaaagggaagctgagagacgatgttgcttggaaatactttcatcagcttatcaacgcggttgatttttgccacagcaggcaagtgtatcatcgtgacataaagcccgagaatctgttgctggatgacaatgagaatctcaaggtttctgatttcgggttaagtgccctcgctgattgcaagcggcaagatggtctcctccacacaacttgtggtacgcctgcgtatgttgctcctgaagtgatcaatcgaaaaggctacgatgggacaaaggcagatatttggtcttgtggagtagttttgtttgttctgttggctggctatctccctttccatgactctaacctcatggagatgtacaggaagataggaaaaggagattttaaggccccaagctggttcgctccagaagtacggaggctgttgtgtaagatgctggaccctaaccctgaaactagaatcaccatcgcaaaaatcagggagagttcttggttcagaaaaggtttacacatgaaacagaagaagatggagaaacgagtcagagagactaatcccctggaagctagtgctgcaggtccaagcgagaacggaggaagggtaacggaggaaaacaatacagaccagcctacaagtataaatgcgtttgatataattgcctcgtcttctgggtttgacctgacgggactgtttggagatgtgtacgacaagcgagaatctagattcacatcccagaaacctgcttcagtgatcatatctaagctggaggaggtggcgcaacggttgaaactgagcataagaaaacgagaagcaggtctgttcaaactagaaacttcaaaggagggaagaaaaggaaaactatcgatggatgcggaaatattccaagtaacgccaacatttcatatggtggaactgaagaaatctaatggagatactctagagtatcagaaattagtgaaagaggatcttaggcctgctcttgcagatattgtgtgggtttggcagagcgacaaagatgagcagttaattcctgattcaaaccaagagaccgaacaacaacaacaacaggaagaagaagaaccattgtag

SEQ ID NO: 2238 - protein, 462 aa, Brassica napus
MENKPSVLTDKYEVGRLLGQGTFAKVYYGRSVHTNQSVAIKMIDKDKVMKVGLMEQIKREISVMRIAKHPNVVELYEVMATKTRIYFVMEYCKGGELFNKVAKGKLRDDVAWKYFHQLINAVDFCHSRQVYHRDIKPENLLLDDNENLKVSDFGLSALADCKRQDGLLHTTCGTPAYVAPEVINRKGYDGTKADIWSCGVVLFVLLAGYLPFHDSNLMEMYRKIGKGDFKAPSWFAPEVRRLLCKMLDPNPETRITIAKIRESSWFRKGLHMKQKKMEKRVRETNPLEASAAGPSENGGRVTEENNTDQPTSINAFDIIASSSGFDLTGLFGDVYDKRESRFTSQKPASVIISKLEEVAQRLKLSIRKREAGLFKLETSKEGRKGKLSMDAEIFQVTPTFHMVELKKSNGDTLEYQKLVKEDLRPALADIVWVWQSDKDEQLIPDSNQETEQQQQQEEEEPL

SEQ ID NO: 2239 - DNA, 1299 bp, Brassica napus
  CDS (1)..(1299)
atggtcggagctaaaccggtgaaaacgatggaaaaaggatctgacggtgcggggcttctccacggccgttacgagctaggtcgtctcctagggcacggaacgttcgcaaaagtttaccacgcatgtaacgtaacaacgggaaaaagcatggcgatgaaagtcgtggccaaagagaaggtcataaaggtaggcatggtggagcagatcaagcgagagatctcagtgatgagcatggtgaagcatcccaacatcgtcgagcttcacgaggtcatggccagcaaatccaagatctacttcgccatggagctagtccgcggcggcgagctattcgccaaaatctccaaaggaaggctacgcgaggacgtggcgcgcgtgtacttccagcaactaatctccgccgtcgatttttgccatagccggggagtttaccaccgtgatcttaagccggagaatctgttgcttgacgaagaaggcaaccttaaggtcactgactttggtctctctgctttgactgagcatttgaagcaagacgggcttttccacaccacgtgtggaactccggcgtacgttgcgccggaggttatactgaagaaaggatacgacggagctaaggcggatctgtggtcgtgcggtgtgatcctctttgtgcttctcgctgggtacttaccgtttcaagatgataatcttgtgaacatgtataggaagatttatagaggagacttcaagtgccctggatggctttcttctgatgcaagaaggctcgtgacgaagcttctggatccgaatccgaatacccgaatcagtatcgataaggttatggactcggcttggttcaagaaacactcaacgagatccaagaacgaggctgaggatcttgatatctctgttcataagtccaaggaagagactgaaacgctaaacgcgtttcacatcatagcgttgtctgaagggtttgatctctcgccgttgtttgaggagaagaagaaagaggagaagagagagatgaggtttgcaacttctcggccggcgagtagtgtcatctcgagtcttgaggaagctgcgagagttggggacaagtttgatgtgaggaagagtgagagtagagtgaggattgaagggaaacagaatggtcggaaagggaaattggcggtggaggcggagatattcgcggtggctccgtcgtttgttgtcgtggaggtgaagaaagatcatggagatactcttgagtacaataacttttgcagtacggctcttagaccagctctcaaagacattttctggacttcaacacctgtttga

SEQ ID NO: 2240 - protein, 432 aa, Brassica napus
MVGAKPVKTMEKGSDGAGLLHGRYELGRLLGHGTFAKVYHACNVTTGKSMAMKVVAKEKVIKVGMVEQIKREISVMSMVKHPNIVELHEVMASKSKIYFAMELVRGGELFAKISKGRLREDVARVYFQQLISAVDFCHSRGVYHRDLKPENLLLDEEGNLKVTDFGLSALTEHLKQDGLFHTTCGTPAYVAPEVILKKGYDGAKADLWSCGVILFVLLAGYLPFQDDNLVNMYRKIYRGDFKCPGWLSSDARRLVTKLLDPNPNTRISIDKVMDSAWFKKHSTRSKNEAEDLDISVHKSKEETETLNAFHIIALSEGFDLSPLFEEKKKEEKREMRFATSRPASSVISSLEEAARVGDKFDVRKSESRVRIEGKQNGRKGKLAVEAEIFAVAPSFVVVEVKKDHGDTLEYNNFCSTALRPALKDIFWTSTPV

SEQ ID NO: 2241 - DNA, 1095 bp, Brassica napus
  CDS (1)..(1095)
atggataagtatgaggttgtgaaggatctggggactgggaacttcggtgtggctcgccttcttaggcacaaggaaaccaaagagcttgtcgccatgaagtacatcgagagaggccgaaagatagatgagaacgtggctagagagattatcaatcacagatcacttaagcatcctaatatcatccgcttcaaggaggtgattctgacacctactcatcttgccattgtgatggagtatgcttctggtggagagctctttgagagaatctgtactgccggtagattcagtgaagctgaggctaggtacttctttcagcagctgatttgtggggttgactactgccactccttgcaaatatgccacagagatctgaagcttgagaacacactgcttgatgggagccctgctccgcttttgaaaatctgtgattttggttactccaagtcatctatactacattctaggcctaaatcgactgttggaactccagcatacatagcacctgaagttctttcccggagagaatatgatggcaagcacgcggatgtgtggtcatgtggagtaaccctttatgtgatgctggttggagcttacccatttgaggaccctaatgatccaaagaacttcaggaaaacaatccaacgtataatggctatacaatacaagattccggactacgttcacatatctcaggaatgcaaacaccttctctctcgcatattcgtcactaaccccgctaagagaatcacgcttaaggagatcaagaatcatccgtggtacttaaagaatctgccaaaggagctgctggagtctgctcaagcggtgtattacaagagagacaacacgagctattctcttcaaagcgtagaggacataatgaagatagttggagaagctaggaatccagcttcttcttcaagcgtcagcaaaagcttgggatcaggggttgaggaagaagaggatgttgaagctgaagtggaagtggaagaagaagaggaggaagaagaagaagaagaagatgaatacgagaagcatgtcaaagaggcacattcttctattcaagagcctcacgaagcgttaaaggaaaaaaaatga

SEQ ID NO: 2242 - protein, 364 aa, Brassica napus
MDKYEVVKDLGTGNFGVARLLRHKETKELVAMKYIERGRKIDENVAREIINHRSLKHPNIIRFKEVILTPTHLAIVMEYASGGELFERICTAGRFSEAEARYFFQQLICGVDYCHSLQICHRDLKLENTLLDGSPAPLLKICDFGYSKSSILHSRPKSTVGTPAYIAPEVLSRREYDGKHADVWSCGVTLYVMLVGAYPFEDPNDPKNFRKTIQRIMAIQYKIPDYVHISQECKHLLSRIFVTNPAKRITLKEIKNHPWYLKNLPKELLESAQAVYYKRDNTSYSLQSVEDIMKIVGEARNPASSSSVSKSLGSGVEEEEDVEAEVEVEEEEEEEEEEEDEYEKHVKEAHSSIQEPHEALKEKK

SEQ ID NO: 2243 - DNA, 1338 bp, Brassica napus
  CDS (1)..(1338)
atggtggtaagaaaagtaggaaagtatgagttaggtagaacaatcggggaaggcaccttcgccaaagtcaagttcgctcagaacactgagaccggcgagagcgtcgccatgaagatcgtggatcgcaacaccatcctcaaacgcaagatggttgatcagattaagagggagatctcgatcatgaaacttgttcgccatccttgcgttgttcgtctctacgaggttctagcgagccgtactaagatttacatcatcttggagtatattactggtggtgaactgtttgataagattgttcgtaatggacgtcttagtgaagctgaagctaggaagtactttcatcagcttattgatggtgttgattactgtcatagtaaaggggtttaccacagagatcttaagccggagaatcttctgctggattctcaaggaaatctcaagatatctgattttggactcagtgcattaccagaacaaggagttaccatcctaaagacaacgtgtggaactccaaattacgttgctcctgaggttctgagtcataagggttataatggtgctgtggcagatgtatggtcctgtggggtcatcctttatgttcttatggcaggatatcttccctttgatgaaatggatctccctactctatacagtaagatcgacaatgctgacttctcttgcccatcatattttgccttgggagcaaaggccttgatccgtagaattttggatccaaatcctgaaactcgaattacaattgctgaaatcaggaaagatgaatggttcgtaaaggattacactcctgtacaagttattgattacgaacatgtaaacctggatgatgtatatgctgcttttgatgatccggaggaacaaaaagaagcacaggttggaacaggagacacgggtcctctgactctaaatgcatttgaccttattattctgtctcaaggcctgaaccttgcaactctttttgaccgtggaaaggactccatgaagcatcagacaaggttcatctcacacaagccagcaaacgtggttctttcaagcatggaagttgtgtcgcagtccatgggcttcaagactcacattcgcaactacaaaatgagagtagaaggactatctgcaaataagtcgtctcacttctccgtcattctagaagtctttaaagttgcaccaacatttctcatggtagacatccaaaatgcagcaggagatgcagaagaatacctcaagttctacaagaccttttgtggtaagctggatgacatcatctggaagccgccagatgcatccgtgagaaatcgagtcaccaagaccaagagtaagagacgttga

SEQ ID NO: 2244 - protein, 445 aa, Brassica napus
MVVRKVGKYELGRTIGEGTFAKVKFAQNTETGESVAMKIVDRNTILKRKMVDQIKREISIMKLVRHPCVVRLYEVLASRTKIYIILEYITGGELFDKIVRNGRLSEAEARKYFHQLIDGVDYCHSKGVYHRDLKPENLLLDSQGNLKISDFGLSALPEQGVTILKTTCGTPNYVAPEVLSHKGYNGAVADVWSCGVILYVLMAGYLPFDEMDLPTLYSKIDNADFSCPSYFALGAKALIRRILDPNPETRITIAEIRKDEWFVKDYTPVQVIDYEHVNLDDVYAAFDDPEEQKEAQVGTGDTGPLTLNAFDLIILSQGLNLATLFDRGKDSMKHQTRFISHKPANVVLSSMEVVSQSMGFKTHIRNYKMRVEGLSANKSSHFSVILEVFKVAPTFLMVDIQNAAGDAEEYLKFYKTFCGKLDDIIWKPPDASVRNRVTKTKSKRR

SEQ ID NO: 2245 - DNA, 1338 bp, Glycine max
  CDS (1)..(1338)
atggtggtgaggaaagtggggaagtacgagattgggagaacgattggggagggaacctttgccaaggtgaaattcgctcagaacacagaaactggcgagagcgtggccatgaaggtgctcgatagaagcaccatcatcaagcacaagatggtcgaccagatcaagagggagatttcgatcatgaagcttaggcacccttatgttgttcgcctgcacgaggttcttgcaagccgtactaagatttatattatattggagttcatcacgggtggtgaattgtttgataaaattatacaccatggccgccttagtgaagctgattctagaagatatttccaacagcttattgacggtgtagattattgccacagtaagggagtttatcacagagatttaaagcctgaaaatcttttacttgattcactaggaaatataaagattttcgattttggtttgagtgcatttcctgagcagggggtgagtatccttcggacaacttgtgggactccgaactatgtggctcctaaggtactcagtcataagagttacaacggtgctgtggcagatggttggtcctgtggggttatcctctttctcctactggctggatatcttccttttgatgagcttgatctaaccaccttatatagtaagattgagagagcagagttttcatgccctccttggtttccagtgggagcaaaattgttgatacatagaattttggacccaaatcctgaaactcgtataacaattgagcatataagaaatgacgaatggtttcagaggagttatgttcctgtcagtcttcttgagtatgaagatgtaaaccttgatgatgtaaatgctgcttttgacgatgctgaggaactgagggctgatcaacaatgtgacaacgatgacatgggtcctctaatgcttaatgcatttgacttgataattttgtctcaaggcttaaatcttgcaacaatctttgatcgtgggcaggactctgtgaagtaccaaacccgttttatctctcaaaaaccagcaaaggtggttttatcaagtatggaagttgtggcacaatcaatgggatttaagacgcatattcgcaactacaagatgagggtggagggtgtttcagcaaataaaacatcctatttctctgttatcctggaaatttttgaagtggctcctacattttatatggtggacattcagaaagcagctggagatactggtgaatacctcaagttttacaagaacttttgtagcaatcttgaggatataatctggaaaccgccccatgaagcaagcaaatcaaggatctccaagaccaaaagcaaaagacgatag

SEQ ID NO: 2246 - protein, 445 aa, Glycine max
MVVRKVGKYEIGRTIGEGTFAKVKFAQNTETGESVAMKVLDRSTIIKHKMVDQIKREISIMKLRHPYVVRLHEVLASRTKIYIILEFITGGELFDKIIHHGRLSEADSRRYFQQLIDGVDYCHSKGVYHRDLKPENLLLDSLGNIKIFDFGLSAFPEQGVSILRTTCGTPNYVAPKVLSHKSYNGAVADGWSCGVILFLLLAGYLPFDELDLTTLYSKIERAEFSCPPWFPVGAKLLIHRILDPNPETRITIEHIRNDEWFQRSYVPVSLLEYEDVNLDDVNAAFDDAEELRADQQCDNDDMGPLMLNAFDLIILSQGLNLATIFDRGQDSVKYQTRFISQKPAKVVLSSMEVVAQSMGFKTHIRNYKMRVEGVSANKTSYFSVILEIFEVAPTFYMVDIQKAAGDTGEYLKFYKNFCSNLEDIIWKPPHEASKSRISKTKSKRR

SEQ ID NO: 2247 - DNA, 1323 bp, Zea mays
  CDS (1)..(1323)
atgagtacaaccaaggtgaagagacgtgtgggcaagtatgagctcggccggaccataggcgagggcaccttcgcgaaggtcaggttcgcgagggacacggtcaccggcgaggccgtggccattaagatcctggacaaggagaaggtcctcaggcacaagatggttgagcagatcaagcgggagatctcgacgatgaagctgatcaagcaccctaacgtcgtccgcatatacgaggtgatgggaagtaaaacaaagatctacattgtgttagaattcgctaccggtggcgagctctttgatacaattgttaaccatggtcgaatgagggaagacgaggcaaggaggtacttccaacagttaatcaatgcagttgattattgtcatagcaggggtgtgtaccaccgggatttaaaacctgaaaatttgctgcttgattcatatggtaacctgaaggtctctgactttgggctcagcgcgctatctcagcaaatcaaggatgatggactgctgcacacaacttgtgggactccaaactatgttgcaccagaggtccttgaagatcaaggctacgatggagcaatggctgatctgtggtcatgtggagttatcctgtttgttctgctagcagggtatttgccgtttgaggaatctaatctcatgactttgtataagaaaatatcaaatgcagaatttacatttccaccatggacatcttttcctgccaagaggttgttaacaagaatccttgatccaaatccaatgacgagaataacaatcccagaaatattagaggatgagtggttcaaaaagggctacaagcgcccagaatttgatgaacaatatgacaccacattggatgatgtggatgccgtcttcaatgattcagaagagcaccatgtgacagaaaagaaagaagaagaaccagtagctctgaacgcattcgaactgatttcgatgtcagcgggcctaaaccttggaaacttatttgactcagagcaggagttcaaaagagaaacaaggtttacatcaaaatgtccccccaaagaaattgtccgcaagatcgaggaagctgcaaaacctctaggatttgatgttcagaagaaaaattacaagttgaggctcgaaaaggtaaaggcagggaggaagggaaacctcaacgttgctactgagatactgcaagttgcgccctctctccacatggtagaagtccgaaaagcaaagggtgacactctggaatttcataagttctacaagaacctttccaagaccttgaaggacgtcgtctggaaatccgacgatcttcaaacgcaacatgcttcttag

SEQ ID NO: 2248 - protein, 440 aa, Zea mays
MSTTKVKRRVGKYELGRTIGEGTFAKVRFARDTVTGEAVAIKILDKEKVLRHKMVEQIKREISTMKLIKHPNVVRIYEVMGSKTKIYIVLEFATGGELFDTIVNHGRMREDEARRYFQQLINAVDYCHSRGVYHRDLKPENLLLDSYGNLKVSDFGLSALSQQIKDDGLLHTTCGTPNYVAPEVLEDQGYDGAMADLWSCGVILFVLLAGYLPFEESNLMTLYKKISNAEFTFPPWTSFPAKRLLTRILDPNPMTRITIPEILEDEWFKKGYKRPEFDEQYDTTLDDVDAVFNDSEEHHVTEKKEEEPVALNAFELISMSAGLNLGNLFDSEQEFKRETRFTSKCPPKEIVRKIEEAAKPLGFDVQKKNYKLRLEKVKAGRKGNLNVATEILQVAPSLHMVEVRKAKGDTLEFHKFYKNLSKTLKDVVWKSDDLQTQHAS

SEQ ID NO: 2249 - DNA, 1389 bp, Glycine max
  CDS (1)..(1389)
atgacgtcacgatcggggcaggggagcagcggcggagggagcaacaggacccgtgtggggaagtacgaggtgggtcggacgctgggcgagggcaatttcgccaaggtgaaattcgggaggcacgtggaaactagagagaacgtggccatcaagattctcgacaaggagaaactactcaaacacaaaatgattgcgcagataaaacgagaaatatcaacaatgaaactgattagacacccaaatgtcatacgcatgtatgaggtaatggctagcaaaacaaagatatacattgtattggaatttgtgactggtggggagctgtttgataaaattgcacgcagtgggaggttgaaagaagatgaagcaagaaaatactttcaacagcttatatgtgctgtggattactgtcatagtagaggtgttttccatagagacttaaagcctgagaatttattgctggatgctaatggagtgcttaaagtatcagattttggattgagtgcattgcctcaacaagttcgggaagatggactacttcacacaacatgcggtacgccgaattatgttgctccagaggtgattaacaacaaaggttatgacggtgcaaaggcagatttatggtcatgtggtgttattctctttgttttaatggctggctatttgccctttgaagaaaccaatctatcagctttatataaaaagattttcaaggccgagttcacatgtcctccgtggttctcttcaagtgcaaagaagctaatcaacaaaatccttgatcccaatcctgccactcggattacatttgctgaggtcattgagaatgactggttcaagaagggatataagcctcccgtatttgaacaggctaatgttagtcttgatgatttagattctattttcagtgattctacggattcacaaaatcttgttgtagagaggcgtgaagagggacctatggcacctgtggcacctgtgactatgaatgcctttgagcttatctctaaatctcagggcctcaatcttagtagtctttttgagaagcaaatgggactagttaaaagggaaacacgatttacatccaaatgttcagcagatgaaataatttcaaaaatagagaaagctgcaggacccctgggttttgatgttaagaagaacaactgtaagttaaagattcaaggtgaaaagacaggacggaaaggtcatctatctgtagccactgagatcttagaggtggccccttcactatacatggttgagctgcgaaagtctgaaggagatactctcgaatttcacaagttctacaaaaatcttgctactgggctgaaggatattgtttggaaagccgagcctatcgatgaagaaaaagatggtgccaatccatcgaaataa

SEQ ID NO: 2250 - protein, 462 aa, Glycine max
MTSRSGQGSSGGGSNRTRVGKYEVGRTLGEGNFAKVKFGRHVETRENVAIKILDKEKLLKHKMIAQIKREISTMKLIRHPNVIRMYEVMASKTKIYIVLEFVTGGELFDKIARSGRLKEDEARKYFQQLICAVDYCHSRGVFHRDLKPENLLLDANGVLKVSDFGLSALPQQVREDGLLHTTCGTPNYVAPEVINNKGYDGAKADLWSCGVILFVLMAGYLPFEETNLSALYKKIFKAEFTCPPWFSSSAKKLINKILDPNPATRITFAEVIENDWFKKGYKPPVFEQANVSLDDLDSIFSDSTDSQNLVVERREEGPMAPVAPVTMNAFELISKSQGLNLSSLFEKQMGLVKRETRFTSKCSADEIISKIEKAAGPLGFDVKKNNCKLKIQGEKTGRKGHLSVATEILEVAPSLYMVELRKSEGDTLEFHKFYKNLATGLKDIVWKAEPIDEEKDGANPSK

SEQ ID NO: 2251 - DNA, 1524 bp, Glycine max
  CDS (1)..(1524)
atggcggcgaaatctagttcgagttcgacaacaaacgtggtgactctgaaggcggcgtgggttctcccgcagcgcacgcagaacatccgtgaggtgtacgaggtggggcggaagttggggcagggtcaattcgggactaccttcgagtgcacgcgccgcgcgtccggggggaaattcgcgtgcaagtcaattcccaagcggaagctgctgtgcaaggaggactacgaggacgtgtggcgggagattcagataatgcaccacttgtcggagcacgcgcacgttgtccgcatcgaagggacgtacgaggattcctcggcggtgcacctcgtcatggagttgtgtgagggtggggagttgtttgacaggatcgtgcagaagggacactacagcgagagacaggcggcgaggttgataaagacgattgttgaggttgttgaagcgtgtcactcgcttggggtcatgcatagggacctcaagcctgagaacttcctctttgatactgatgatgaggatgctaagcttaaggccactgatttcggcttgtctgttttttacaagcctggtgaatccttttgtgatgttgtcgggagcccatactatgttgcaccagaggtcttgcgcaagcactatggacctgaatcagacgtgtggagtgctggggttattctgtacatcttattaagtggggtgccaccattttgggctgaatctgaaccagggatcttccgacagattttactaggaaaacttgattttcaatctgagccttggcctaacatttcagacagtgccaaggatctaattcggaaaatgcttgatcaaaatccaaaaacaaggcttacagcacatgaagtactccgccacccatggattgttgatgacaacattgcacctgataaacctcttgattctgcagttttatcacgtctgaaacaattctctgcaatgaataaattgaaaaagatggcattgcgtgttattgcggagaggctatctgaagaagaaattggtggcctgaaagagttattcaagatgattgacacagacaacagtggaacgataacgtttgatgagttaaaagatggcttgaagcgagtaggatctgaacttatggagtctgaaatcaaggatcttatggatgctgcggatattgataaaagtgggacaattgattatggtgaattcattgctgccactgttcatttaaataagctggagagagaggaaaacctagtgtcagccttctcgtattttgacaaagatggcagtggttacataacccttgatgagatacaacaagcctgtaaggactttggtttagatgatgtccatattgatgacatgatcaaggaaattgatcaagataacgatgggcaaatagattatggggaatttgctgccatgatgagaaagggcaatggaggaattggaaggcgaactatgagaaaaacactaaatttaagagatgctcttggattagtagacaatgggtccaatcaagttattgagggctactttaagtaa

SEQ ID NO: 2252 - protein, 507 aa, Glycine max
MAAKSSSSSTTNVVTLKAAWVLPQRTQNIREVYEVGRKLGQGQFGTTFECTRRASGGKFACKSIPKRKLLCKEDYEDVWREIQIMHHLSEHAHVVRIEGTYEDSSAVHLVMELCEGGELFDRIVQKGHYSERQAARLIKTIVEVVEACHSLGVMHRDLKPENFLFDTDDEDAKLKATDFGLSVFYKPGESFCDVVGSPYYVAPEVLRKHYGPESDVWSAGVILYILLSGVPPFWAESEPGIFRQILLGKLDFQSEPWPNISDSAKDLIRKMLDQNPKTRLTAHEVLRHPWIVDDNIAPDKPLDSAVLSRLKQFSAMNKLKKMALRVIAERLSEEEIGGLKELFKMIDTDNSGTITFDELKDGLKRVGSELMESEIKDLMDAADIDKSGTIDYGEFIAATVHLNKLEREENLVSAFSYFDKDGSGYITLDEIQQACKDFGLDDVHIDDMIKEIDQDNDGQIDYGEFAAMMRKGNGGIGRRTMRKTLNLRDALGLVDNGSNQVIEGYFK

SEQ ID NO: 2253 - DNA, 1269 bp, Glycine max
  CDS (1)..(1269)
atgaacagcgagagacagtcgacgacgacgacgttgctgcacggcaagtacgagctaggtcgtgtgctggggcacggaagcttcgccaaggtctaccacgcgcggaacctgaagacggggcagcacgtggctatgaaggtcgttggaaaagaaaaggtgatcaaggtcggaatgatggagcaggtcaagagggagatctcggtcatgaagatggtcaagcacccaaacatcgtcgagctccacgaagtcatggccagtaagtccaagatctacatctccatcgaactcgtccgcggcggagagctcttcaacaaggtctccaagggacgcttgaaggaggacctggccagactctacttccagcagttaatctctgccgtcgatttctgccacagccgcggcgtctaccaccgtgacctcaagccggagaatctcctcctggacgaacacggcaacctcaaggtctccgacttcggactcaccgccttctccgaccaccttaaagaggacgggctgttacacaccacgtgcggcacgcctgcgtacgtgtcaccggaagttattgcaaagaaaggctatgacggtgccaaggctgatatatggtcatgcggagtaatcctctacgttctcctagctgggtttttaccctttcaggatgataatttggttgccatgtataaaaaaatccatagaggggacttcaagtgcccaccgtggttctctctcgatgcgagaaagcttgttacgaaactgcttgatccgaatccgaatacgaggattagtatttctaaagtgatggagtcttcttggtttaagaaacaggtgccgaggaaggtggaggaggtggttgagaaggtcgatttggaggagaagattgagaatcaggagacgatgaatgctttccacataatctccttgtcggaggggttcaatttgtcgccgttgttcgaggagaagaggaaggaggagatgaggttcgccaccgcggggacgccgagcagcgtcatttcgcgcctggaggaggtggccaaggcggggaagtttgacgtgaagagtagcgagacgaaagtgaggcttcagggacaggagcgtgggaggaaggggaagctagcgattgcggcggatatctacgccgtgacgccgtcgtttatggtggtggaggtcaagaaggacaatggggatacgttggagtataaccagttctgcagcaaacaacttcgtcctgcgcttaaggatatcttctggaattctgcacctgccagtgcttga

SEQ ID NO: 2254 - protein, 422 aa, Glycine max
MNSERQSTTTTLLHGKYELGRVLGHGSFAKVYHARNLKTGQHVAMKVVGKEKVIKVGMMEQVKREISVMKMVKHPNIVELHEVMASKSKIYISIELVRGGELFNKVSKGRLKEDLARLYFQQLISAVDFCHSRGVYHRDLKPENLLLDEHGNLKVSDFGLTAFSDHLKEDGLLHTTCGTPAYVSPEVIAKKGYDGAKADIWSCGVILYVLLAGFLPFQDDNLVAMYKKIHRGDFKCPPWFSLDARKLVTKLLDPNPNTRISISKVMESSWFKKQVPRKVEEVVEKVDLEEKIENQETMNAFHIISLSEGFNLSPLFEEKRKEEMRFATAGTPSSVISRLEEVAKAGKFDVKSSETKVRLQGQERGRKGKLAIAADIYAVTPSFMVVEVKKDNGDTLEYNQFCSKQLRPALKDIFWNSAPASA

SEQ ID NO: 2255 - DNA, 1383 bp, Glycine max
  CDS (1)..(1383)
atggagcagaagggaagtgtgcttatgcaaagatatgaacttgggagattattaggccaaggaacctttgctaaggtctaccatgctaggaaccttataactggcatgagtgtggccattaagattattgataaggagaagattctgaaagttgggatgattgatcagattaagcgtgaaatttcagtgatgaggctaatcaggcatccacatgtggttgagctttatgaggtaatggccagtaaaaccaaaatttactttgtcatggaacatgcaaaaggtggtgagctcttcaacaaggtagtcaaaggaaggctcaaggtggatgttgctcggaaatattttcagcaactgattagtgcagttgactactgccatagcaggggtgtgtgtcatcgagatttaaaacccgaaaatctactattggatgaaaatgagaatttgaaggtttctgactttgggttgagtgcacttgctgaatctaagtgccaagatggattgctccatactacatgtggtacccctgcctatgttgctccggaagtgataaacagaaagggctatgatgggattaaagctgatatatggtcatgtggggtaatcttgtatgttctattggctggtcatcttccattccaggatacaaatctgatggagatgtacaggaagattggtagaggggaattcaaatttcctaaatggtttgcaccggatgttcgccggtttttgtccagaatattggatccaaacccaaaggccaggatatcaatggccaagattatggaaagttcttggtttaaaaaggggttggagaagcctgctattactgtgaccgaaaacgaagagctagctccccttgatgctgatggaatatttgaagcatgcgaaaatgatggtcctattgccgagcctaagcaagaacaggccaagccttgtaacttaaatgcttttgatattatctccttctcaactggttttgatttatctggtttgttcgaggacacttttctcaagaaagagacacggtttatgtcaaaaaagcctgcctcaatcatagtcttgaagttggaagaaatttgtaagcggctttgcttgaaagtaaagaagaaagatggaggcttgctcaaattggaaggttccaaggaaggcaggaaaggaactttgggtgttgatgctgagatttttgagattaccccacacttccatatggtggaacttagaaagtccaatggtgacaccatggagtaccagaagctttttaaacaggatataagaccagcgcttaaggacattgtttggacctggcaaggagaaaaaccacagcaagagcaagagcaacatgaagtagtccaggaagagcaccaaccttctcatactgcttag

SEQ ID NO: 2256 - protein, 460 aa, Glycine max
MEQKGSVLMQRYELGRLLGQGTFAKVYHARNLITGMSVAIKIIDKEKILKVGMIDQIKREISVMRLIRHPHVVELYEVMASKTKIYFVMEHAKGGELFNKVVKGRLKVDVARKYFQQLISAVDYCHSRGVCHRDLKPENLLLDENENLKVSDFGLSALAESKCQDGLLHTTCGTPAYVAPEVINRKGYDGIKADIWSCGVILYVLLAGHLPFQDTNLMEMYRKIGRGEFKFPKWFAPDVRRFLSRILDPNPKARISMAKIMESSWFKKGLEKPAITVTENEELAPLDADGIFEACENDGPIAEPKQEQAKPCNLNAFDIISFSTGFDLSGLFEDTFLKKETRFMSKKPASIIVLKLEEICKRLCLKVKKKDGGLLKLEGSKEGRKGTLGVDAEIFEITPHFHMVELRKSNGDTMEYQKLFKQDIRPALKDIVWTWQGEKPQQEQEQHEVVQEEHQPSHTA

SEQ ID NO: 2257 - DNA, 1527 bp, Glycine max
  CDS (1)..(1527)
atggctgcgaaatctagttcgagttcgacaacaacaaacgtggtgactctgaaggcggcgtgggttctcccgcagcgcacgcagaacatccgtgaggtgtacgaggttgggcggaagctcgggcagggccaattcgggaccaccttcgagtgcacgcgccgtgcgagtggtgggaagttcgcgtgcaagtcgattccgaagcggaagctgctgtgcaaggaggactacgaggacgtgtggcgggagattcagataatgcaccacttgtcggaacacgccaacgttgtccgcatcgaagggacgtacgaggattccacggccgtgcacctggtcatggagttgtgcgagggtggagagttgtttgacaggatcgtgcagaagggacactacagcgagagacaggcggcgaggttgataaagacgattgttgaggttgttgaggcgtgtcactcgctaggggtcatgcatagggaccttaagcctgagaatttcttgtttgataccattgatgaggatgctaagcttaaggccaccgatttcggcttgtctgttttttacaagcctggtgaatccttttgtgatgttgtcgggagcccatactatgtcgcaccagaggtcttgcgcaagctctatggacctgaatcagatgtttggagtgcaggggttattctgtacatcttattaagtggggtgccaccattttgggccgaatctgaaccggggatcttccgacagattttactaggaaaacttgattttcattctgagccttggcctagcatttcagacagtgccaaggatctaattcggaaaatgcttgatcaaaatccaaaaacaaggcttacagcacatgaagtactccgccacccatggattgttgatgacaacattgcacctgataaacctcttgattctgcagttttatcacgtctgaaacaattctctgccatgaataaattgaaaaagatggcattgcgtgttattgctgagaggctatctgaagaagaaattggtggactgaaagagttattcaagatgattgacacagacaacagtggaaccataacgtttgatgagttaaaagatggtttgaagcgagtaggatctgaacttatggagtctgaaatcaaggatcttatggatgctgcggatattgataaaagtgggacaattgattatggtgaattcattgctgccactgtccatttaaataagctggagagagaggaaaacctagtgtcggccttctcctattttgacaaagatggcagtggttacataacccttgatgagatacaacaagcttgtaaggactttggtttagatgatatccatattgacgacatgatcaaggaaattgatcaagataacgatgggcaaatagattatggggaatttgctgccatgatgagaaaaggcaatggaggaattgggaggcgaactatgagaaaaacactaaatttaagagatgctcttggattagtagacaatgggtccaatcaagttattgagggctactttaagtaa

SEQ ID NO: 2258 - protein, 508 aa, Glycine max
MAAKSSSSSTTTNVVTLKAAWVLPQRTQNIREVYEVGRKLGQGQFGTTFECTRRASGGKFACKSIPKRKLLCKEDYEDVWREIQIMHHLSEHANVVRIEGTYEDSTAVHLVMELCEGGELFDRIVQKGHYSERQAARLIKTIVEVVEACHSLGVMHRDLKPENFLFDTIDEDAKLKATDFGLSVFYKPGESFCDVVGSPYYVAPEVLRKLYGPESDVWSAGVILYILLSGVPPFWAESEPGIFRQILLGKLDFHSEPWPSISDSAKDLIRKMLDQNPKTRLTAHEVLRHPWIVDDNIAPDKPLDSAVLSRLKQFSAMNKLKKMALRVIAERLSEEEIGGLKELFKMIDTDNSGTITFDELKDGLKRVGSELMESEIKDLMDAADIDKSGTIDYGEFIAATVHLNKLEREENLVSAFSYFDKDGSGYITLDEIQQACKDFGLDDIHIDDMIKEIDQDNDGQIDYGEFAAMMRKGNGGIGRRTMRKTLNLRDALGLVDNGSNQVIEGYFK

SEQ ID NO: 2259 - DNA, 1341 bp, Glycine max
  CDS (1)..(1341)
atggtggtgaggaaagtggggaagtacgagattggaagaaccattggagagggaacctttgccaaggtaaaattcgctcagaacacagaaactggcgagagcgtggccatgaaggtgctagacagaagcaccatcatcaagcacaaaatggtcgaccagatcaagagggaaatttcgatcatgaagctagtcaggcatccatatgtcgttcgtctacacgaggttctagcaagccgtactaagatttatatcatattggagtttattacaggtggtgaattgtttgataaaaagatacaccatggccgtcttagtgaagctgaatctagaagatatttccaacagcttattgacggtgtagattattgccacagtaagggagtttatcacagagatttaaagcctgaaaatcttttactcgattcactaggaaatataaagatttccgattttggtttgagtgcatttcctgagcagggggtgagtatccttcggacaacttgtgggactccaaactatgtggctcctgaggtactcagtcataagggttacaacggtgctgtggcagatgtttggtcctgtggggttatcctctatgtcctactggctggatatcttccttttgatgagcttgatctaaccaccttatatagtaagattgagagagcagagttttcatgccctccttggtttccagtgggagcaaaattgttgatacatagaattttggacccaaatcctgaaactcgtataacaattgagcatataagaaatgacgaatggtttcagaggagttatgttcctgtcagtcttcttgagtatgaagatgtaaaccttgatgatgtaaatgctgcttttgacgatgctgaggaactgagggctgatcaacaatgtgacaacgatgacatgggtcctctaatgcttaatgcatttgacttgataattttgtctcaaggcttaaatcttgcaacaatctttgatcgtgggcaggactctgtgaagtaccaaacccgttttatctctcaaaaaccagcaaaggtggttttatcaagtatggaagttgtggcacaatcaatgggatttaagacgcatattcgcaactacaagatgagggtggagggtgtttcagcaaataaaacatcctatttctctgttatcctggaaatttttgaagtggctcctacattttatatggtggacattcagaaagcagctggagatactggtgaatacctcaagttttacaagaacttttgtagcaatcttgaggatataatctggaaaccgccccatgaagcaagcaaatcaaggatctccaagaccaaaagcaaaagacgatag

SEQ ID NO: 2260 - protein, 446 aa, Glycine max
MVVRKVGKYEIGRTIGEGTFAKVKFAQNTETGESVAMKVLDRSTIIKHKMVDQIKREISIMKLVRHPYVVRLHEVLASRTKIYIILEFITGGELFDKKIHHGRLSEAESRRYFQQLIDGVDYCHSKGVYHRDLKPENLLLDSLGNIKISDFGLSAFPEQGVSILRTTCGTPNYVAPEVLSHKGYNGAVADVWSCGVILYVLLAGYLPFDELDLTTLYSKIERAEFSCPPWFPVGAKLLIHRILDPNPETRITIEHIRNDEWFQRSYVPVSLLEYEDVNLDDVNAAFDDAEELRADQQCDNDDMGPLMLNAFDLIILSQGLNLATIFDRGQDSVKYQTRFISQKPAKVVLSSMEVVAQSMGFKTHIRNYKMRVEGVSANKTSYFSVILEIFEVAPTFYMVDIQKAAGDTGEYLKFYKNFCSNLEDIIWKPPHEASKSRISKTKSKRR

SEQ ID NO: 2261 - DNA, 1323 bp, Glycine max
  CDS (1)..(1323)
atgatgggagagaaaagcaacagcaacagcggcgacgcgattaactcgacgctgctccacgggaagtacgagctggggcggctgttaggccacggaagcttcgcgaaggtataccacgcgcgccacctaaacaccggaaagagcgtggcgatgaaggtggtgggaaaagagaaggtggtgaaggtaggcatgatggaacaaatcaagagagagatctcagccatgaacatggtgaagcacccgaacatcgttcaacttcacgaggtcatggcgagcaagtccaagatctacatcgccatggagctcgtgcgcggcggcgagctcttcaacaagatcgccagaggccggctccgggaggaaaccgccagactttacttccaacaactcatctccgcggtggacttctgccacagccgcggcgtcttccaccgcgacctcaagccggagaacctcctcctcgacgacgatggcaacctcaaggtcactgacttcggcctcagcactttctccgagcatctcaggcacgacggcctgctgcacactacgtgtggcacgccggcctacgttgcgcctgaggtcatcggaaaaagaggttacgacggcgccaaggctgatatttggtcttgtggcgtaatcctctacgtacttcttgctggttttttacctttccaggatgaaaacttggtggctttgtacaagaaaatttaccgcggtgacttcaagtgtccaccgtggttttcctccgaggcacggaggctcatcaccaagctcctcgacccgaacccgaacacgcgaatcacgatttcgaaaatcatggactcgtcgtggttcaagaaacccgtgccaaagaacttggtgggaaagaaaagagaggaattgaacttggaggaaaagattaaacatcaggagcaagaagtttccactacgatgaatgcatttcacatcatttccctttcggaagggttcgatttgtcgccgttgttcgaggagaagaagagggaggagaaagagttacgtttcgccaccacgcgccccgcgagtagcgtgatttcgagattggaagatttagcgaaggcggtgaagttcgacgtgaaaaagagcgagactaaggtgaggttgcagggtcaagaaaatgggcgaaaaggtaaactcgctattgctgcggatttgtacgccgtgacgccgtcgtttttggtcgtggaggttaagaaagacaacggtgacaccttggagtataaccagttctgcagcaaggagcttcggccagcgctcaaggacatcgtgtggaggacttctcctgcagagaatcctacactcgcttga

SEQ ID NO: 2262 - protein, 440 aa, Glycine max
MMGEKSNSNSGDAINSTLLHGKYELGRLLGHGSFAKVYHARHLNTGKSVAMKVVGKEKVVKVGMMEQIKREISAMNMVKHPNIVQLHEVMASKSKIYIAMELVRGGELFNKIARGRLREETARLYFQQLISAVDFCHSRGVFHRDLKPENLLLDDDGNLKVTDFGLSTFSEHLRHDGLLHTTCGTPAYVAPEVIGKRGYDGAKADIWSCGVILYVLLAGFLPFQDENLVALYKKIYRGDFKCPPWFSSEARRLITKLLDPNPNTRITISKIMDSSWFKKPVPKNLVGKKREELNLEEKIKHQEQEVSTTMNAFHIISLSEGFDLSPLFEEKKREEKELRFATTRPASSVISRLEDLAKAVKFDVKKSETKVRLQGQENGRKGKLAIAADLYAVTPSFLVVEVKKDNGDTLEYNQFCSKELRPALKDIVWRTSPAENPTLA

SEQ ID NO: 2263 - DNA, 1491 bp, Glycine max
  CDS (1)..(1491)
atggcgaagcctcacagcggcacccccgcggtcgcaccgaagcccgcgtgggtcctcccataccgaaccgagaatctccgcgaggtctacaccctaacccgaaaactaggccagggccaattcggaacaaccttcctctgcacgcacaacgccacgggacgcaccttcgcctgcaagtcaatcccgaagcggaagctgctctgcaaggaggactacgacgacgtatggagggagattcagataatgcaccacctctccgagcaccccaacgtcgttcgcatccacggcacctacgaggacgccgcctccgtccacctcgtcatggagctctgcgagggaggggagttgttcgacaggattgtgcagaaggggcactacagcgagcgccaggctgcgaagctcatcaagaccattgttgaggttgtggaggcttgccactcgcttggggtcatgcatagggacctcaagcctgagaactttctctttgatactgttgaggagggtgctaagctcaaaactactgattttgggctctccgtgttttataagccaggtgaaaccttttgtgacgttgttggaagcccgtactatgttgcaccagaggtcttgcgtaagcattatggtcctgaagcagacgtgtggagtgctggtgttattttgtacatcttattaagtggggtgccaccattttgggctgaaacagagcaggggattttccgacagattttgctaggaagactagatttccagtctgagccatggcctagcatttcagacagtgccaaagatctaattcgaaaaatgcttgatcggaatccaaaaacaagggttacagctcaccaagtactctgtcacccttggattgttgatgacaacattgcaccagataaacctcttgattctgctgttttatcacgcctgaagcagttctctgcaatgaataaacttaaaaagatggctttgcgtgttattgcagagaggctctctgaggaagaaattggtggtctgaaggaattattccggatgattgatgcagataacagtggtactataacatttgatgagctaaaagaaggcttaaagcgagtaggatctgaactaatggagtctgaaatcaaggatcttatggatgctgcagatattgataatagtgggacaatagactatggtgaattcattgctgctacggtccacttaaataagctggagagagaggaaaatttggtgtcagctttctcctattttgataaagatggaagtggttatataaccattgatgagatacaacaggcttgtaaggagttcggtttggatgatgtccatatcgatgaaattgtcaaggaaattgatcaagacgatgatggacagattgattatggggaatttgctgccatgatgagaaagggtaatggaggaattggcaggcgaaccatgaggagcacgctcaatttcagagatactctgggaattaaaggccatgggtccgattaa

SEQ ID NO: 2264 - protein, 496 aa, Glycine max
MAKPHSGTPAVAPKPAWVLPYRTENLREVYTLTRKLGQGQFGTTFLCTHNATGRTFACKSIPKRKLLCKEDYDDVWREIQIMHHLSEHPNVVRIHGTYEDAASVHLVMELCEGGELFDRIVQKGHYSERQAAKLIKTIVEVVEACHSLGVMHRDLKPENFLFDTVEEGAKLKTTDFGLSVFYKPGETFCDVVGSPYYVAPEVLRKHYGPEADVWSAGVILYILLSGVPPFWAETEQGIFRQILLGRLDFQSEPWPSISDSAKDLIRKMLDRNPKTRVTAHQVLCHPWIVDDNIAPDKPLDSAVLSRLKQFSAMNKLKKMALRVIAERLSEEEIGGLKELFRMIDADNSGTITFDELKEGLKRVGSELMESEIKDLMDAADIDNSGTIDYGEFIAATVHLNKLEREENLVSAFSYFDKDGSGYITIDEIQQACKEFGLDDVHIDEIVKEIDQDDDGQIDYGEFAAMMRKGNGGIGRRTMRSTLNFRDTLGIKGHGSD

SEQ ID NO: 2265 - DNA, 1326 bp, Glycine max
  CDS (1)..(1326)
atggatccacaaaaccaacacacccctaacccgagaagcataatcttcaacaagtacgagatggggcgggtcctggggcaaggaaacttcgccaaagtctaccacgcccgaaacctcaacaccaacgagagcgtcgccatcaaagtcatcaagaaagagaagctcaagaaagagcgactcgtgaagcagatcaagcgcgaggtgtcggtgatgagactcgtccgccatccccacatcgttgaactcaaggaagtcatggccacaaagggaaaaatcttcctcgtcatggaatacgttaaaggcggtgaactcttcgccaaagtcaacaaaggaaaactcaccgaagatctcgccagaaagtacttccaacaactcatcagcgccgtcgacttctgtcacagccgcggcgtcacccaccgcgacctcaagccggagaatctcctcttagaccaaaacgaagacctcaaagtctccgacttcggactctccacgctgccggagcagcgccgcgccgacggcatgctcgtaaccccgtgtgggacccctgcttacgttgcacccgaggtcttaaagaaaaaaggttacgacggttcaaaggccgatttatggtcctgtggggtaatcctcttcgctttgctttgtggctatttacccttccaaggtgagaacgttatgagaatttaccgaaaggctttcagagctgaatatgaattcccagaatggatttctccgcaggccaagaatcttatttcgaatctcctcgttgctgatcctggcaagaggtattccattcctgatataatgagggatccttggtttcaagttgggttcatgaggccaatcgcgttttctattaaggagtcttacgttgaagacaacattgatttcgacgatgtggagaacaaccaggaggaggaggttacaatgaggaaacctgccaggccgttttacaacgcgttcgagataatatcgtccttgtcgcacggctttgatcttaggagtttgtttgagacgaggaagcggtcgccgtcgatgttcatatgcaagttttcggcttcggcggtgttggcgaaggtggaggcggtggcgaagaagctgaactttagggtgacggggaagaaggagtttgtggtgaggatgcaggggacggaggaggggaggaaggggaagctggcgatgacggtggaggttttcgaggtggcgccggaggtggcggtggcggagtttactaagtctgccggagatacgttggagtatgttaagttctgtgaggagcaagtgaggccttccctcaaagacattgtttggagctggcagggtgattga

SEQ ID NO: 2266 - protein, 441 aa, Glycine max
MDPQNQHTPNPRSIIFNKYEMGRVLGQGNFAKVYHARNLNTNESVAIKVIKKEKLKKERLVKQIKREVSVMRLVRHPHIVELKEVMATKGKIFLVMEYVKGGELFAKVNKGKLTEDLARKYFQQLISAVDFCHSRGVTHRDLKPENLLLDQNEDLKVSDFGLSTLPEQRRADGMLVTPCGTPAYVAPEVLKKKGYDGSKADLWSCGVILFALLCGYLPFQGENVMRIYRKAFRAEYEFPEWISPQAKNLISNLLVADPGKRYSIPDIMRDPWFQVGFMRPIAFSIKESYVEDNIDFDDVENNQEEEVTMRKPARPFYNAFEIISSLSHGFDLRSLFETRKRSPSMFICKFSASAVLAKVEAVAKKLNFRVTGKKEFVVRMQGTEEGRKGKLAMTVEVFEVAPEVAVAEFTKSAGDTLEYVKFCEEQVRPSLKDIVWSWQGD

SEQ ID NO: 2267 - DNA, 1341 bp, Glycine max
  CDS (1)..(1341)
atgaagaaggtgaggagaaagatcggcaagtatgaggtgggtcggactattggcgaaggcaccttcgccaaggttaagttcgcaagaaactcggagacaggggagagcgtggctattaaagtcatggctaagaccaccattctccagcacagaatggttgaacagattaaaagagagatatccattatgaagattgtcaggcatcctaatatagttagattgcacgaggttttggctagccagaccaagatctacataatccttgaatttgtaatgggaggggaactatatgataaaattgttcagctgggaaagctttctgaaaatgaatctaggcactactttcaacaacttatagacgcagttgatcattgtcatagaaagggtgtgtaccatagagacttgaagcctgaaaatcttcttcttgatgcttacggaaatttgaaggtttctgactttggattgagtgcattgactaaacagggtgctgaccttcttcacaccacttgtgggaccccaaactatgttgcccctgaggtactcagcaatagaggatatgatggtgcagcagctgatgtttggtcatgtggagtcatcctatatgttctaatggctggatatcttccttttgaggaggcagaccttccaacactgtatagaaggatcaatgctgcagaatttgtttgcccattctggttttctgctgacacaaagtcattcatacaaaaaattctggatcctaatcctaaaacacgggtgaaaattgaagaaataaggaaagatccatggttcaagaaaaactattttcctgtcaaactcggggaagatgagcaagtgaatttggatgatgttcgggctgtttttgatgatattgaggaccagtatgtttctgaaaggtcagaaattactgagggaggtcctctgataatgaatgcatttgagatgattgctttatcacaagggttgaatctttcaccactatttgataggcatcaggattatgtaaagcggcaaactcgttttgtctcccgtaaaccagcaaaagttataatttcttcaattgaagctgttgcagagtcaatgggtcttaaggtccattctcgcaattacaaggtgaggcttgaaggcgtttctgcaaacagggttggacaatttgcagtggtcttggaggtgtttgaagttgcgccatcccttttcatggttgatgttcggaaggccactggggatacttttgactaccacaagttttacaagaatttttgtggcaaactaggaaacattatttggagaccggcagggactatgccaaattctaatctgcgcaagcaaatgactttataa

SEQ ID NO: 2268 - protein, 446 aa, Glycine max
MKKVRRKIGKYEVGRTIGEGTFAKVKFARNSETGESVAIKVMAKTTILQHRMVEQIKREISIMKIVRHPNIVRLHEVLASQTKIYIILEFVMGGELYDKIVQLGKLSENESRHYFQQLIDAVDHCHRKGVYHRDLKPENLLLDAYGNLKVSDFGLSALTKQGADLLHTTCGTPNYVAPEVLSNRGYDGAAADVWSCGVILYVLMAGYLPFEEADLPTLYRRINAAEFVCPFWFSADTKSFIQKILDPNPKTRVKIEEIRKDPWFKKNYFPVKLGEDEQVNLDDVRAVFDDIEDQYVSERSEITEGGPLIMNAFEMIALSQGLNLSPLFDRHQDYVKRQTRFVSRKPAKVIISSIEAVAESMGLKVHSRNYKVRLEGVSANRVGQFAVVLEVFEVAPSLFMVDVRKATGDTFDYHKFYKNFCGKLGNIIWRPAGTMPNSNLRKQMTL

SEQ ID NO: 2269 - DNA, 1389 bp, Glycine max
  CDS (1)..(1389)
atggagagtaagccacatgtcttaatgcaaagatatgagttaggaagattacttggccagggaacctttggaaaggtttactatgctaggagtacaataactaaccagagtgtggctattaaagtgattgacaaagataaggttatgaaaactgggcaagctgaacaaatcaagcgcgaaatatctgttatgagactggccaggcaccccaatattatacagcttttcgaggttttggccaacaagaataaaatttactttgttatagaatatgctaaaggtggagagctcttcaacaaggtggccaaaggaaaactcaaggaagatgttgcacacaagtattttaagcagctaatcaatgctgtagactattgtcacagtagaggcgtgtaccaccgagacataaagcccgagaacattctattggatgaaaatgggaatctaaaggtttctgacttcggtttaagcgctctcgttgattccaagaggcaggatggcttactccatacaccatgtggcacacctgcttatgttgctcccgaagtcatcaaaaggaagggatatgatggtaccaaagctgatatatggtcttgtggaattgttctgtttgtcttgttggcaggttatctcccttttcacgacccgaatttgatagagatgtataggaagataagcaaagcagaattaaaatgtcctaattggttcccaccagaagtatgtgagctattgggcatgatgttgaatccaaatcctgaaactaggattccaatatctactattagagaaaatagttggtttaagaaaggacaaaatattaaaaacaaaagacctgtagtggaaaacaacactgtctcttcttcaagtactgttcttcttgatcaaaatgattgtgatggtctagcagcagaagcaaatggggagtcagttgtgcccttaagtataaacgcctttgatattatctcccgttctgttggttttgatctttctagattctttgatgaaagttttaagaaaaaggaagcaagatttagttcaaggttacctgcaaatgtcatcatctccaagctggaagacattgctaaccaactgaggatgaaaataaagaaaaaagctgcgggtttgttgaaattagagagcctcaatgaaggtaggaagggagttttatccattgatgcagagatctttgaggttacaccttgtttccatatggtggaggtgaaaaaatcaaatggagatacattggaatatcaaaagatattgaaagaggatattaggcctgctcttcaggatattgtttgggtctggcaaagtgaccaacaactgcaatcacaacagtcagagcaacagcaacagacagatgaccagcagcaacaacaaccacagtcataa

SEQ ID NO: 2270 - protein, 462 aa, Glycine max
MESKPHVLMQRYELGRLLGQGTFGKVYYARSTITNQSVAIKVIDKDKVMKTGQAEQIKREISVMRLARHPNIIQLFEVLANKNKIYFVIEYAKGGELFNKVAKGKLKEDVAHKYFKQLINAVDYCHSRGVYHRDIKPENILLDENGNLKVSDFGLSALVDSKRQDGLLHTPCGTPAYVAPEVIKRKGYDGTKADIWSCGIVLFVLLAGYLPFHDPNLIEMYRKISKAELKCPNWFPPEVCELLGMMLNPNPETRIPISTIRENSWFKKGQNIKNKRPVVENNTVSSSSTVLLDQNDCDGLAAEANGESVVPLSINAFDIISRSVGFDLSRFFDESFKKKEARFSSRLPANVIISKLEDIANQLRMKIKKKAAGLLKLESLNEGRKGVLSIDAEIFEVTPCFHMVEVKKSNGDTLEYQKILKEDIRPALQDIVWVWQSDQQLQSQQSEQQQQTDDQQQQQPQS

SEQ ID NO: 2271 - DNA, 1350 bp, Glycine max
  CDS (1)..(1350)
atggagaaaagagggaatgtgttgatggagaagtatgagtttgggaagctattaggtcaaggaaactttgcgaaggtttaccatgcaagggacgtcagaactggggagagtgttgccgttaaggtgattgacaaggagaaagttctaaaaattgggctggtggatcaaacgaagcgagagatatcgattatgagactggttaaacaccccaatgttttgcagctttatgaggtcttggccaccaagaccaagatttacttcatcatagaatatgccaaagggggtgaacttttcaacaaggtagctaaaggtagactcactgaggacaaggcaaagaagtactttcaacaattggtcagtgctgttgatttttgccacagcaggggtgtttatcacagagatttgaagccagagaacttgcttttggatgagaatggagttctcaaggttgcggattttggattgagtgcacttgttgaatctcaccggcaaaaagacatgctgcatacaatttgtggaactcctgcatatgtggctcctgaggttataagtagaaggggctatgatggagcaaaagctgatgtatggtcttgtggagtgatcttatttgttcttttggctggtcatttgccattctatgatttgaatcttatgtcactgtataagaaaataggcaaggcggaatacaaatgtccaaactggtttccatttgaagtgcgcagactgttagcgaaaatccttgaccccaacccaaataccaggatatccatggcaaaagttatggaaaattcgtggttcagaaaaggattcaaacctaaatctggtcaagtgaaaagagaggctgttgatgtggctttagttgtttctgatcaaatttttggcttgtgtgagaatacaagtgctgctgttgttgaggcagagcaagcagtggttaaacctgcacattttaatgctttcaatataatttctctgtctgctgggcttgacttgtctggcctctttgctggcaatgttgaactggatgataccaaatttacatttatgagctctgcctcatcaatcatgtctaccatggaggatattgctcgcactttgaggatggagataattaagaaggatggagggttgctgaaattggagagatccaaggagggtagaaaaggaccactttccattgatgctgaaatatttgaggtcgccccatctttccatttggttgagctgaagaagtccagcggtgatacattagaataccagaagatattggaggacttaagaccagctctcaaagatattgtcggtgtttggcaaggtgagcagcatgcagtagcaaggttgtgtactccttaa

SEQ ID NO: 2272 - protein, 449 aa, Glycine max
MEKRGNVLMEKYEFGKLLGQGNFAKVYHARDVRTGESVAVKVIDKEKVLKIGLVDQTKREISIMRLVKHPNVLQLYEVLATKTKIYFIIEYAKGGELFNKVAKGRLTEDKAKKYFQQLVSAVDFCHSRGVYHRDLKPENLLLDENGVLKVADFGLSALVESHRQKDMLHTICGTPAYVAPEVISRRGYDGAKADVWSCGVILFVLLAGHLPFYDLNLMSLYKKIGKAEYKCPNWFPFEVRRLLAKILDPNPNTRISMAKVMENSWFRKGFKPKSGQVKREAVDVALVVSDQIFGLCENTSAAVVEAEQAVVKPAHFNAFNIISLSAGLDLSGLFAGNVELDDTKFTFMSSASSIMSTMEDIARTLRMEIIKKDGGLLKLERSKEGRKGPLSIDAEIFEVAPSFHLVELKKSSGDTLEYQKILEDLRPALKDIVGVWQGEQHAVARLCTP

SEQ ID NO: 2273 - DNA, 1362 bp, Glycine max
  CDS (1)..(1362)
atggaagagtgtcacacggtgttcggaaagtacgagatggggaggcttctggggaagggcacgtttgccaaagtgtattacgggaagcaaataagcacgggcgagaacgtggcaatcaaagtaatcaacaaagagcaagtgagaaaagaaggaatgatggaacaaatcaaacgcgaaatctccgcgatgcgtttggtgcgacacccaaacgtggtggaaatcaaggaagtgatggccacaaagacaaaaatcttcttcgtcatggaatacgtgcgtggcggggaactcttcgccaaaatctccaaaggcaaactcaaagaagatctcgcccgcaagtattttcagcagttaatcagtgccgttgattactgccacagcagaggagtatcccaccgtgatctcaaaccagagaatcttctcctcgacgaagacgaaaaccttaaaatctccgatttcggtctctctgcgctgccggaacagcttcgttacgatgggctcctccacacacagtgcggcacccctgcctacgtggcacccgaagtgttaagaaaaaaaggctacgatggttccaaagctgatatctggtcatgcggcgtcgttttgtatgttcttctcgctggctttcttcctttccaacacgagaatctcatgacgatgtataacaaagttctcagagccgagtttgagtttccaccgtggttttcgcctgattcgaagaggctaatctccaagattctagtggcggatccctcgaagaggaccgcgatttccgccatagctcgcgtgtcgtggttccggaagggcttttcttcgctttccgcgccggacttgtgtcagttggagaaacaagaagatgccgttacggttacggttacggaggaagagaataattccaaggtccccaagttcttcaacgcgttcgagtttatttcttcgatgtcttccgggtttgatctctcggggctgtttgagagtaagcggaagacagcgacggtgttcacgtcgaagtgttcggcggcggcgattgtggcgaagattgcggcggcggcgcgggggctgagtttccgcgtggcggaggttaaggacttcaagatccggctgcagggcgcggcggaggggaggaaagggaggctggcggtcacggctgaggtgttcgaggtggcgccggaggtcgccgttgttgagttttcgaagtccgccggcgacacgttggaatacgcgaagttctgtgaggaggacgtgaggcccgcgctgaaggacattgtttggacgtggcaaggggatgccacgtgtgctgctaacgttcccgcctgtcacggtgaggagtgtcataagcaggttgttgttgttagtactatataa

SEQ ID NO: 2274 - protein, 453 aa, Glycine max
MEECHTVFGKYEMGRLLGKGTFAKVYYGKQISTGENVAIKVINKEQVRKEGMMEQIKREISAMRLVRHPNVVEIKEVMATKTKIFFVMEYVRGGELFAKISKGKLKEDLARKYFQQLISAVDYCHSRGVSHRDLKPENLLLDEDENLKISDFGLSALPEQLRYDGLLHTQCGTPAYVAPEVLRKKGYDGSKADIWSCGVVLYVLLAGFLPFQHENLMTMYNKVLRAEFEFPPWFSPDSKRLISKILVADPSKRTAISAIARVSWFRKGFSSLSAPDLCQLEKQEDAVTVTVTEEENNSKVPKFFNAFEFISSMSSGFDLSGLFESKRKTATVFTSKCSAAAIVAKIAAAARGLSFRVAEVKDFKIRLQGAAEGRKGRLAVTAEVFEVAPEVAVVEFSKSAGDTLEYAKFCEEDVRPALKDIVWTWQGDATCAANVPACHGEECHKQVVVVSTI

SEQ ID NO: 2275 - DNA, 1335 bp, Glycine max
  CDS (1)..(1335)
atgaagaaggtgaggagaaagatcggcaagtatgaggtgggtcggactattggcgaaggcaccttcgccaaggttaagttcgcaagaaactcggagacaggggagagcgtggctattaaagtcatggctaagaccaccattctccagcacagaatggttgaacagattaaaagagagatatccattatgaagattgtcaggcatcctaatatagttagattgcacgaggttttggctagccagaccaagatctacataatccttgaatttgtaatgggaggggaactatatgataaaattctgggaaagctttctgaaaatgaatctaggcactactttcaacaacttatagacgcagttgatcattgtcatagaaagggtgtgtaccatagagacttgaagcctgaaaatcttcttcttgatgcttacggaaatttgaaggtttctgactttggattgagtgcattgactaaacagggtgctgaccttcttcacaccacttgtgggaccccaaactatgttgcccctgaggtactcagcaatagaggatatgatggtgcagcagctgatgtttggtcatgtggagtcatcctatatgttctaatggctggatatcttccttttgaggaggcagaccttccaacactgtatagaaggatcaatgctgcagaatttgtttgcccattctggttttctgctgacacaaagtcattcatacaaaaaattctggatcctaatcctaaaacacgggtgaaaattgaagaaataaggaaagatccatggttcaagaaaaactattttcctgtcaaactcggggaagatgagcaagtgaatttggatgatgttcgggctgtttttgatgatattgaggaccagtatgtttctgaaaggtcagaaattactgagggaggtcctctgataatgaatgcatttgagatgattgctttatcacaagggttgaatctttcaccactatttgataggcatcaggattatgtaaagcggcaaactcgttttgtctcccgtaaaccagcaaaagttataatttcttcaattgaagctgttgcagagtcaatgggtcttaaggtccatcctcgcaattacaaggtgaggcttgaaggcgtttctgcaaacagggttggacaatttgcagtggtcttggaggtgtttgaagttgcgccatcccttttcatggttgatgttcggaaggccactggggatacttttgactaccacaagttttacaagaatttttgtggcaaactaggaaacattatttggagaccggcagggactatgccaaattctaatctgcgcaagcaaatgactttataa

SEQ ID NO: 2276 - protein, 444 aa, Glycine max
MKKVRRKIGKYEVGRTIGEGTFAKVKFARNSETGESVAIKVMAKTTILQHRMVEQIKREISIMKIVRHPNIVRLHEVLASQTKIYIILEFVMGGELYDKILGKLSENESRHYFQQLIDAVDHCHRKGVYHRDLKPENLLLDAYGNLKVSDFGLSALTKQGADLLHTTCGTPNYVAPEVLSNRGYDGAAADVWSCGVILYVLMAGYLPFEEADLPTLYRRINAAEFVCPFWFSADTKSFIQKILDPNPKTRVKIEEIRKDPWFKKNYFPVKLGEDEQVNLDDVRAVFDDIEDQYVSERSEITEGGPLIMNAFEMIALSQGLNLSPLFDRHQDYVKRQTRFVSRKPAKVIISSIEAVAESMGLKVHPRNYKVRLEGVSANRVGQFAVVLEVFEVAPSLFMVDVRKATGDTFDYHKFYKNFCGKLGNIIWRPAGTMPNSNLRKQMTL

SEQ ID NO: 2277 - DNA, 1383 bp, Glycine max
  CDS (1)..(1383)
atggagcagaagggaagtgtgcttatgcaaagatatgaacttgggagattattaggccaaggaacctttgctaacgtctaccatgctaggaaccttataactggcatgagtgtggccattaagataattgataaggagaagattctgaaagttgggatgattgatcagattaagcgtgaaatttcagtgatgaggctaatcaggcatccacatgtggttgagctttatgaggtaatggccagtaaaaccaaaatttactttgtcatggaacatgcaaaaggtggtgagctcttcaacaaggtagtcaaaggaaggctcaaggtggatgttgctcggaaatattttcagcaactgattagtgcagttgactactgccatagcaggggtgtgtgtcatcgagatttaaaacccgaaaatctactattggatgaaaatgagaatttgaaggtttctgactttgggttgagtgcacttgctgaatctaagtgccaagatggattgctccatactacatgtggtacccctgcctatgttgctccggaagtgataaacagaaagggctatgatgggattaaagctgatatatggtcatgtggggtaatcttgtatgttctattggctggtcatcttccattccaggatacaaatctgatggagatgtacaggaagattggtagaggggaattcaaatttcctaaatggtttgcaccggatgttcgccggtttttgtccagaatattggatccaaacccaaaggccaggatatcaatggccaagattatggaaagttcttggtttaaaaaggggttggagaagcctgctattactgtgaccgaaaacgaagagctagctccccttgatgctgatggaatatttgaagcatgcgaaaatgatggtcctattgccgagcctaagcaagaacaggccaagccttgtaacttaaatgcttttgatattatctccttctcaactggttttgatttatctggtttgttcgaggacacttttctcaagaaagagacacggtttatgtcaaaaaagcctgcctcaatcatagtcttgaagttggaagaaatttgtaagcagctttgcttgaaagtaaagaagaaagatggaggcttgctcaaattggaaggttccaaggaaggcaggaaaggaactttgggtgttgatgctgagatttttgagattaccccacacttccatatggtggaacttagaaagtccaatggtgacaccatggagtaccagaagctttttaaacaggatataagaccagcgcttaaggacattgtttggacctggcaaggagaaaaaccacagcaagagcaagagcaacatgaagtagtccaggaagagcaccaaccttctcatactgcttag

SEQ ID NO: 2278 - protein, 460 aa, Glycine max
MEQKGSVLMQRYELGRLLGQGTFANVYHARNLITGMSVAIKIIDKEKILKVGMIDQIKREISVMRLIRHPHVVELYEVMASKTKIYFVMEHAKGGELFNKVVKGRLKVDVARKYFQQLISAVDYCHSRGVCHRDLKPENLLLDENENLKVSDFGLSALAESKCQDGLLHTTCGTPAYVAPEVINRKGYDGIKADIWSCGVILYVLLAGHLPFQDTNLMEMYRKIGRGEFKFPKWFAPDVRRFLSRILDPNPKARISMAKIMESSWFKKGLEKPAITVTENEELAPLDADGIFEACENDGPIAEPKQEQAKPCNLNAFDIISFSTGFDLSGLFEDTFLKKETRFMSKKPASIIVLKLEEICKQLCLKVKKKDGGLLKLEGSKEGRKGTLGVDAEIFEITPHFHMVELRKSNGDTMEYQKLFKQDIRPALKDIVWTWQGEKPQQEQEQHEVVQEEHQPSHTA

SEQ ID NO: 2279 - DNA, 1344 bp, Glycine max
  CDS (1)..(1344)
atggtgattttaaaccttgggagaaaggaggagcagggagtgcgacttgggaaatacgagttgggaaagacacttggagaaggcaattttggaaaagtcaagttggcaagggacactcattctggcaaactatttgctgttaagatccttgacaagagcaagatcattgacctcaataacattgatcagataaagagggaaatatcgaccttaaagctcctaaagcatcccaacgtggttagattatacgaggtcttggctagcaaaacaaaaatttatatggtacttgagtacgtgaatggaggagaattattcgacaaaattgcatccaaaggtaaacacaaagaagctgaaggtaggaaaatattccaacagttaattgatggggtgagcttctgccacaataaaggtgtcttccacagggatctcaagctggagaatgtacttgtggatgccaaagggaacataaagataaccgattttaatcttagtgctttgccccagcattttagggaagatgggttgctgcatacaacatgtggaagtcccaattatgttgcccctgaaattcttgccaataaaggctatgatggtgcaacatcagacatatggtcatgtggtgttatcttgtatgtaattctaacaggataccttccttttgatgacagaaatcttgcagttctctatcaaaagatttttaaaggagaagttcagataccaagatggctatcacctggttctcaaaacattataaagagaatgcttgatgccaatcctaaaacccggataacaatggctatgatcaaagaagatgaatggttcaaggagggttatactcctgcaaatccagaagatgaggaagagagtgtgtatattgatgacgaagacttttcaatccatgatgtgtcacatgaagcagatcaagggtgtccaagatcaccaacacttatcaatgcattccagttgatatcaatgtcttcaagtctagatctctctggtctttttgagcaagaggatgtttctgagaggaagataagatttacatccatccattcaccaaaagatttggttgagaggatagaagacattgtaacagaaatgggattcagagtccagaagaaaaatgggatgttgaaagtgatacaagagatcaaagtacagaaatgtccaggtagcttctcagtggaagcagaggtgtttgaaataagtccatccttgtatgtagtagagttaagtaagtcttgtggagatgcttctctatatagacagttatgtaagaagttatcaaatgatttgggtgttcacacaaggcaacaactagggagctcagaagtgatggcctaa

SEQ ID NO: 2280 - protein, 447 aa, Glycine max
MVILNLGRKEEQGVRLGKYELGKTLGEGNFGKVKLARDTHSGKLFAVKILDKSKIIDLNNIDQIKREISTLKLLKHPNVVRLYEVLASKTKIYMVLEYVNGGELFDKIASKGKHKEAEGRKIFQQLIDGVSFCHNKGVFHRDLKLENVLVDAKGNIKITDFNLSALPQHFREDGLLHTTCGSPNYVAPEILANKGYDGATSDIWSCGVILYVILTGYLPFDDRNLAVLYQKIFKGEVQIPRWLSPGSQNIIKRMLDANPKTRITMAMIKEDEWFKEGYTPANPEDEEESVYIDDEDFSIHDVSHEADQGCPRSPTLINAFQLISMSSSLDLSGLFEQEDVSERKIRFTSIHSPKDLVERIEDIVTEMGFRVQKKNGMLKVIQEIKVQKCPGSFSVEAEVFEISPSLYVVELSKSCGDASLYRQLCKKLSNDLGVHTRQQLGSSEVMA

SEQ ID NO: 2281 - DNA, 1293 bp, Glycine max
  CDS (1)..(1293)
atgagtgagaaagagaaaggcaataatagtgagggacagtcgacgttgctgcacggcaagtacgagcttggtcgtgtgctggggcacggaacgttcgccaaggtgtaccacgcgcggaacctgaatacagggcagcacgtggccatgaaggtggtgggaaaagaaaaggtgataaaggtcggaatgatggagcaggtgaagagggagatctcggtgatgaagatggtgaagcaccaaaacatcgtcgaactccacgaagtcatggccagcaagtccaagatctatattgccatggaactcgtccgcggcggagagctcttcaacaaggtctctaaaggccgcttaaaggaggacgtggcaagactctacttccagcagttaatctccgccgtcgacttctgccacagccgcggcgtctaccaccgcgacctcaagccggaaaacctcctcctggacgaacacggcaacctcaaagtctccgacttcggactcaccgctttctccgaacacctcaaggaggacgggctgttacacaccacgtgcggcacgcctgcgtacgtgtcgcctgaagtgatagcgaaaaaaggctatgacggtgccaaggctgatatatggtcatgtggtgtaatcctctacgttctcctcgcaggctttttaccctttcaggatgataatttggttgccatgtataaaaaaatttacagaggggacttcaagtgtccaccctggttctctcttgatgccaggaagcttgtcaccaagcttctcgaccccaatcccaatacaaggattagtatttccaaagtgatggagtcttcttggtttaagaaaccggtgccgaggaagcttgctgccgaaaaggtggatttggaggaggagaagattgagagccagctggagaccatcaatgctttccacataatttccttgtcggaggggttcaatttgtcgcccttgttcgaggacaagaggagggaggagatgaggttcgccaccgcggggacgcccagcaccgtcatttcgcggctggaggaggtggccaaggccgggaagttcgacgtcaggagtagcgagaccaaggtgaggcttcagggtcaggagcgtgggaggaaggggaagctggcgattgccgcggatatctacgccgtgacgccgtcgtttatggtggtggaggtcaagaaggacaatggggataccttggagtataaccagttctgcagcaaacagcttcgccctgcgcttaaggatatcttctggaattcctcccagaattccgcacctgctagtgcttga

SEQ ID NO: 2282 - protein, 430 aa, Glycine max
MSEKEKGNNSEGQSTLLHGKYELGRVLGHGTFAKVYHARNLNTGQHVAMKVVGKEKVIKVGMMEQVKREISVMKMVKHQNIVELHEVMASKSKIYIAMELVRGGELFNKVSKGRLKEDVARLYFQQLISAVDFCHSRGVYHRDLKPENLLLDEHGNLKVSDFGLTAFSEHLKEDGLLHTTCGTPAYVSPEVIAKKGYDGAKADIWSCGVILYVLLAGFLPFQDDNLVAMYKKIYRGDFKCPPWFSLDARKLVTKLLDPNPNTRISISKVMESSWFKKPVPRKLAAEKVDLEEEKIESQLETINAFHIISLSEGFNLSPLFEDKRREEMRFATAGTPSTVISRLEEVAKAGKFDVRSSETKVRLQGQERGRKGKLAIAADIYAVTPSFMVVEVKKDNGDTLEYNQFCSKQLRPALKDIFWNSSQNSAPASA

SEQ ID NO: 2283 - DNA, 1332 bp, Glycine max
  CDS (1)..(1332)
atgagagaggcgcagaacgacatcgttgcaacagaattcgcaacgacaacaaacgacgaggaggttccgtccggcgtcgttttgttcgggaagtacgagttgcgaaggttgctgggagttggcgcattcgcgaaggtgtaccacgcgacgagcgtggacgacacgcaccagagcgtggcgttgaaggccgtgagcaagaacaaggtcctgaacggaggcttcgccgccaacgtggagcgcgagatctccatcatgcgccgcctccaccaccccaacatcattaacctcttcgaagtactcgcgaccaaaacaaaaatctacttcgtcatggagttcgccgccggcggggagctcttccacgaggtcgccggcaagggacggctcacggaggaaaccgccagattttacttccggcagctgatctccgccgtgaagcactgccactcccgcggcgtcttccaccgcgacctcaagctcgacaacctcttactcgacgaggatgggaaccttaaggtctccgatttcgggttgagtgcggtcacaggtcagatccgacccgacgggctgttgcacacggtttgtggaacccctacctacgtggcgcccgagattcttgcgaagagaggctacgatggcgccaaggtggatctttggtcgtgcggcgtcgttttgttcgcgctcattgctggctatttacccttcaatgattacaatccctccgttctgtataggaagatttaccgcggtcaattccggttcccgaggtggatatcacatgatctgagattcctcttatcacgacttttggacacgaatcccaagacaaggataaccgtcgatgagatctataaggacacgtggttcaatgcggatggcgagtatcggttcaaccgggttttggtcaaggagagtgagtgtgaaaagcaattgggtcgaaccggattcaagtctttgaatgctttcgacttaatttctttctcgaccgggttggatatgtcgggtcttttcgaggacccgaccggatcgaattcggttgaacgggttgtttcgacagtggtgccagagaaaattatggagagagtggaggcaatgacggaggagggaagggtggtggtgagaagggagaagaatggtggtggagcaaagctagaagggcaggatggtaatttgattggtattgttgtggtttaccaattaaccgatgagctggtggtggttgaaatgaaaagaagtgaaaagggaggggggtttggggggcagttttggaaagataaactgcggccactgcttcttgaattggcaagtgaattggaagagccggtctctcggtga

SEQ ID NO: 2284 - protein, 443 aa, Glycine max
MREAQNDIVATEFATTTNDEEVPSGVVLFGKYELRRLLGVGAFAKVYHATSVDDTHQSVALKAVSKNKVLNGGFAANVEREISIMRRLHHPNIINLFEVLATKTKIYFVMEFAAGGELFHEVAGKGRLTEETARFYFRQLISAVKHCHSRGVFHRDLKLDNLLLDEDGNLKVSDFGLSAVTGQIRPDGLLHTVCGTPTYVAPEILAKRGYDGAKVDLWSCGVVLFALIAGYLPFNDYNPSVLYRKIYRGQFRFPRWISHDLRFLLSRLLDTNPKTRITVDEIYKDTWFNADGEYRFNRVLVKESECEKQLGRTGFKSLNAFDLISFSTGLDMSGLFEDPTGSNSVERVVSTVVPEKIMERVEAMTEEGRVVVRREKNGGGAKLEGQDGNLIGIVVVYQLTDELVVVEMKRSEKGGGFGGQFWKDKLRPLLLELASELEEPVSR

SEQ ID NO: 2285 - DNA, 1386 bp, Glycine max
  CDS (1)..(1386)
atggaccggcgatcccatcccacgggcaccgtcagcacccggaacatcctcttcaacaagtacgagattggaaaattgctgggacagggcaacttcgccaaggtgtaccacggcagaaacctcagcacaaacgagagcgtggccatcaaagtcataaaaaaggaaaggctccagaaagagaggctcgtgaagcagatcaaacgcgaggtctccgtcatgcgcctggtgcgtcacccccacatcgtcgaattaaaagaggtcatggccaacaaagccaaaatcttcatggttgtcgaatacgtcaaaggaggggaactcttcgccaaggtagcaaaagggaagatgaaggaagatgtcgccagaaagtactttcagcaactcatcagcgccgtcgatttctgccacagccgcggcgtcacccaccgcgatctcaagccggagaatctgctcctcgacgagaacgaagaccttaaagtctccgactttggcctgtcggcgctgccggaccagcgcagatccgacgggatgctcctgacgccgtgcgggacgccggcctacgtggcgccggaggttctgaagaagaaggggtacgatgggtcgaaggctgatatatggtcctgcggggtcatcctctttgctcttctttctggctatttgccctttcaaggtgagaatgtgatgagaatttacagcaagtctttcagagccgattatgcgttccccgaatggatttcccctggggctaaaaacttgatctccaatttactcgttgtggacccgcaaaagaggtattccattcccgacatcatgaaggacccttggtttcaaattgggttcatgaggcccattgctttttccatgaaggagtctgcggttgaagataacattgatttcagcggggatgatgtttccaatggtagtgatgatggcaatagcagcagcagcaacaacgatgatggggaattgactggggctaagcctgctcgtccgtcttacaacgcttttgagataatctcgtccttgtcgaatgggttcgatctgaggaatttgtttgagacgaggaagcggtcgccgtccatgttcatttccaagttttcggcttcggcggtgatggcgaagctggagggggtggcgaagaagctgaactttagggtgacggggaagaaggagttcgtggtgaggatgcagggggcgacggaagggaggaaggggaagctggccatgacggtcgaggtattcgaggtggcgccggaggttgcggtggttgagttcgccaagtctgctggagacacgcttgaatacattaaattctgtgaggaccaagtcagaccttctctcaaagacattgtgtggagttggcaaggggacgctaattgccaccagtaa

SEQ ID NO: 2286 - protein, 461 aa, Glycine max
MDRRSHPTGTVSTRNILFNKYEIGKLLGQGNFAKVYHGRNLSTNESVAIKVIKKERLQKERLVKQIKREVSVMRLVRHPHIVELKEVMANKAKIFMVVEYVKGGELFAKVAKGKMKEDVARKYFQQLISAVDFCHSRGVTHRDLKPENLLLDENEDLKVSDFGLSALPDQRRSDGMLLTPCGTPAYVAPEVLKKKGYDGSKADIWSCGVILFALLSGYLPFQGENVMRIYSKSFRADYAFPEWISPGAKNLISNLLVVDPQKRYSIPDIMKDPWFQIGFMRPIAFSMKESAVEDNIDFSGDDVSNGSDDGNSSSSNNDDGELTGAKPARPSYNAFEIISSLSNGFDLRNLFETRKRSPSMFISKFSASAVMAKLEGVAKKLNFRVTGKKEFVVRMQGATEGRKGKLAMTVEVFEVAPEVAVVEFAKSAGDTLEYIKFCEDQVRPSLKDIVWSWQGDANCHQ

SEQ ID NO: 2287 - DNA, 1524 bp, Glycine max
  CDS (1)..(1524)
atggcggcgaaatctagttcgagttcgacaacaaacgtggtgactctgaaggcggcgtgggttctcccgcagcgcacgcagaacatccgtgaggtgtacgaggtggggcggaagttggggcagggtcaattcgggactaccttcgagtgcacgcgccgcgcgtccggggggaaattcgcgtgcaagtcaattcccaagcggaagctgctgtgcaaggaggactacgaggacgtgtggcgggagattcagataatgcaccacttgtcggagcacgcgcacgttgtccgcatcgaagggacgtacgaggattcctcggcggtgcacctcgtcatggagttgtgtgagggtggggagttgtttgacaggatcgtgcagaagggacactacagcgagagacaggcggcgaggttgataaagacgattgttgaggttgttgaagcgtgtcactcgcttggggtcatgcatagggacctcaagcctgagaacttcctctttgatactgttgatgaggatgctaagcttaaggccactgatttcggcttgtctgttttttacaagcctggtgaatccttttgtgatgttgtcgggagcccatactatgttgcaccagaggtcttgcgcaagcactatggacctgaatcagacgtgtggagtgctggggttattctgtacatcttattaagtggggtgccaccattttgggctgaatctgaaccagggatcttccgacagattttactaggaaaacttgattttcaatctgagccttggcctagcatttcagacagtgccaaggatctaattcggaaaatgcttgatcaaaatccaaaaacaaggcttacagcacatgaagtactccgccacccatggattgttgatgacaacattgcacctgataaacctcttgattctgcagttttatcacgtctgaaacaattctctgcaatgaataaattgaaaaagatggcattgcgtgttattgcggagaggctatctgaagaagaaattggtggactgaaagagttattcaagatgattgacacagacaacagtggaaccataacgtttgatgagttaaaagatggcttgaagcgagtaggatctgaacttatggagtctgaaatcaaggatcttatggatgctgcggatattgataaaagtgggacaattgattatggtgaattcattgctgccactgtccatttaaataagctggagagagaggaaaacctagtgtcggccttctcctattttgacaaagatggcagtggttacataacccttgatgagatacaacaagcttgtaaggactttggtttagatgatatccatattgacgacatgatcaaggaaattgatcaagataacgatgggcaaatagattatggggaatttgctgccatgatgagaaaaggcaatggaggaattgggaggcgaactatgagaaaaacactaaatttaagagatgctcttggattagtagacaatgggtccaatcaagttattgagggctactttaagtaa

SEQ ID NO: 2288 - protein, 507 aa, Glycine max
MAAKSSSSSTTNVVTLKAAWVLPQRTQNIREVYEVGRKLGQGQFGTTFECTRRASGGKFACKSIPKRKLLCKEDYEDVWREIQIMHHLSEHAHVVRIEGTYEDSSAVHLVMELCEGGELFDRIVQKGHYSERQAARLIKTIVEVVEACHSLGVMHRDLKPENFLFDTVDEDAKLKATDFGLSVFYKPGESFCDVVGSPYYVAPEVLRKHYGPESDVWSAGVILYILLSGVPPFWAESEPGIFRQILLGKLDFQSEPWPSISDSAKDLIRKMLDQNPKTRLTAHEVLRHPWIVDDNIAPDKPLDSAVLSRLKQFSAMNKLKKMALRVIAERLSEEEIGGLKELFKMIDTDNSGTITFDELKDGLKRVGSELMESEIKDLMDAADIDKSGTIDYGEFIAATVHLNKLEREENLVSAFSYFDKDGSGYITLDEIQQACKDFGLDDIHIDDMIKEIDQDNDGQIDYGEFAAMMRKGNGGIGRRTMRKTLNLRDALGLVDNGSNQVIEGYFK

SEQ ID NO: 2289 - DNA, 1344 bp, Oryza sativa
  CDS (1)..(1344)
atggccgccaccaagagcaaggcggccaagaagggcgctccgctcctcggcaagtacgagctcggccgcctcctcggccgcggcaccttcgccaaggtctaccacgcccgctccctcgcccccggcgccgaccccgtcgccgtcaaggtgctcgacaagcccgacctcgccgccgccggcgccggcatggccacccgcgtcctccgcgaggtcgccgccatgcgccgcctccgccaccccaacgtcctccgcctccacgaggtgctcgccacgcgctccaaggtgtacctcgtcatggagctcgcccccggcggcgacctcctctccaggctcgcctcgctgccgtcgcgccgcctccccgagcacgccgcgcagcgggtgttcctccagctggtgtccgcgctcatctactgccacgcgcggggcgtgtcccaccgcgacgtcaagccgcagaacgtgctcctcgacgcacacggcaacctcaaggtctccgacttcggcctcgccgcgctcccggactcgctccgcgacgacgggcgcctgcacaccgcgtgcggcaccccggcgttcgcggcgcccgaggtgctccgccgcaaggcctacgacggcgccaaggccgacgcgtggtcctgcggcgtcatcctcttcgtcctcctcgccggccacctgccgttcgacgactccaacatcgccgacatgtgccggaaggcgcaccgccgcgagtacgcgctcccgcggtgggtgtcgcagccggcgcgccgcctcgtgtcgcgcctcctcgacccgaacccggccacccgcctcgccggcgccgagctcgccacccacccgtggttcaagcgctcgctcagcctcgactcgcagctcggcagcctcctcggcggccagccggagcgggagctggcgttccaggcgccgccgccactgaacgcgttcgacatcatatccatgtcgccggggctcgacctgtccgggctgttcggcgagagcaagcgccgccgggagaagcggttcgtgacgacggcgtcgccggagcggacggtggagcggctcggccaggcgggcgccaagctcgggtacttcatggtgggcaagaagggcgtcgaacgcctgcccctgggcggcctttcgggcctcgtcgccatgtccatggagatgtcggaggtgtcgccgtcgatgatgctcgtcaagctgaggctggagggaggcgacgacggcgacggcgacggcggtgccgaggagttcgggtgggaggagctcagggcggagctcggcgacgacgtggtgatggcatggcatggctgcgatggagggaagaaagacaaggaagggattcttttgtag

SEQ ID NO: 2290 - protein, 447 aa, Oryza sativa
MAATKSKAAKKGAPLLGKYELGRLLGRGTFAKVYHARSLAPGADPVAVKVLDKPDLAAAGAGMATRVLREVAAMRRLRHPNVLRLHEVLATRSKVYLVMELAPGGDLLSRLASLPSRRLPEHAAQRVFLQLVSALIYCHARGVSHRDVKPQNVLLDAHGNLKVSDFGLAALPDSLRDDGRLHTACGTPAFAAPEVLRRKAYDGAKADAWSCGVILFVLLAGHLPFDDSNIADMCRKAHRREYALPRWVSQPARRLVSRLLDPNPATRLAGAELATHPWFKRSLSLDSQLGSLLGGQPERELAFQAPPPLNAFDIISMSPGLDLSGLFGESKRRREKRFVTTASPERTVERLGQAGAKLGYFMVGKKGVERLPLGGLSGLVAMSMEMSEVSPSMMLVKLRLEGGDDGDGDGGAEEFGWEELRAELGDDVVMAWHGCDGGKKDKEGILL

SEQ ID NO: 2291 - DNA, 1371 bp, Oryza sativa
  CDS (1)..(1371)
atggcggaggcggaggcggaggcggcgggggcgggggcgggggcggggccggcgaggaggacgacgagggtggggcgctacgagctcggcaagacgatcggggaggggagcttcgccaaggtcaaggtcgcccgcgacacgcgcaccggcgacaccctcgccatcaaggtgctcgaccgcaaccatgtgcttcgccacaagatggtcgagcagatcaaacgggagatttccacaatgaagctaataaaacatccaaatgtggtccagttgcatgaggtcatggctagcaaatcaaagatatgcatgattcttgaatatgttgatggaggcgagctttttgataagattgtcaattctgggagactaggagaagatgaagcaagaagatacttccatcaacttataaatgcagtagattattgccacagcagaggagtgtaccatagagatctgaagccagagaatctgcttcttaatcgtccgggagctcttaaagtttcagattttggccttagtgcgtttgctccacaaacaaaagaggatggacttctgcatactgcttgcggaacaccaaattatgttgcacctgaggtgcttgctgataaaggttatgatggtatggctgctgatgtatggtcctgcggcataatcttatttgtcctcatggctggatatttacctttcgatgaccccaacctaatgaccctttacaaactgatctgcaaggcaaaagtttcttgtccacattggttttcttcaggtgcgaagaagttcattaagcgcatacttgatcctaatccctgcacaagaataacaattgcacaaattttggaagatgattggttcaaaaaggattacaaaccaccactttttgagcaaggtgaagatgtgagccttgatgatgttgatgctgcattcgattgttcagaggagaatctcgtggcagagaagagagaaaagcctgaatccatgaatgcatttgctctaatttcaaggtcacagggattcaaccttggaaatttatttgagaaggaaatgatgggaatggtgaagcgggaaacttccttcacatctcaatgtacaccacaggagatcatgtctaaaatagaggaagcttgtggacctcttggtttcaatgtgcggaaacaaaattataagatgaagttaaaaggtgataagactggaagaaaaggccatttatctgtagcaacggaggttttcgaggttgctccatcactccacatggttgagcttcgtaaaactggaggggacacgctggagtttcacaatttctacaacaatttctcgtcagagttaaaagacatagtgtggaaatctgaatctgacgcaaaagcagcaaagaagaggtga

SEQ ID NO: 2292 - protein, 456 aa, Oryza sativa
MAEAEAEAAGAGAGAGPARRTTRVGRYELGKTIGEGSFAKVKVARDTRTGDTLAIKVLDRNHVLRHKMVEQIKREISTMKLIKHPNVVQLHEVMASKSKICMILEYVDGGELFDKIVNSGRLGEDEARRYFHQLINAVDYCHSRGVYHRDLKPENLLLNRPGALKVSDFGLSAFAPQTKEDGLLHTACGTPNYVAPEVLADKGYDGMAADVWSCGIILFVLMAGYLPFDDPNLMTLYKLICKAKVSCPHWFSSGAKKFIKRILDPNPCTRITIAQILEDDWFKKDYKPPLFEQGEDVSLDDVDAAFDCSEENLVAEKREKPESMNAFALISRSQGFNLGNLFEKEMMGMVKRETSFTSQCTPQEIMSKIEEACGPLGFNVRKQNYKMKLKGDKTGRKGHLSVATEVFEVAPSLHMVELRKTGGDTLEFHNFYNNFSSELKDIVWKSESDAKAAKKR

SEQ ID NO: 2293 - DNA, 1341 bp, Zea mays
  CDS (1)..(1341)
atggcggagcccaaagcggcggcggcgaggaagacgcgggtgggcccgtacgaggtcggcaagaccatcggcgagggcagcttcgccaaggtcaagcacgcgcgcgactcccgcaccggcgccgtccgcgccatcaaggtgctcgaccgcaaccacgtcctccgccacaggatggtcgagcagatcaaaagggagatcgccacaatgaagctaatcaaacatcccaatgtggtacagctgcatgaggttatggcgagcaaaacgaagatatacatggttcttgaatttgttgatggaggcgagctattcgataagatcgtcaattctggaaggctaggagaggatgaagctaggatatactttcatcaacttataaatgcggttgattattgtcatagccgaggagtgtaccatagagatctgaagccagagaatctgcttctggattcaaatggagctcttaaagtttcagacttcggcctaagtgcatttgcaccacaaacaaatgaggatgggcttctgcatactacctgtggaactccaaactatgtagcacctgaggtgcttgctgataaaggctatgatggtatggctgcagatgtatggtcctgtggcataatcttatttgttcttatggctggatacttaccctttgatgatgccaatctgatgagactgtacaaactgatctgccaagcatatttttcttgcccaccatggttttcttctggagcaaagaagtttattaagcgcattctcgatcctaatcctgatacgaggataacaattgcagaaattttggaagatgaatggttcaaaaaaggctataaaccaccacgttttgaacaaggtgaagatgttagccttgacgacattgatgctgcattcaatgattcagaggaccgtcttgtggcagagaaaagagaaaagccagaatccatgaacgcatttgctcttatttcgaggtcgcagggcttcaaccttggaaatttgtttgagaaggagatgatgggaatggtaaagagggaaacatctttcacgtctcaatgtacagcacaggagatcatgtcaaaaatagaggatgcatgtgggccacttggtttcaacgtgcggaaacaaaattacaagatgaaattgaaaggtgacaaatccggaagaaaaggtcacttatctgttgcaactgaggtttttgaggttgctccttcacttcacatggttgagcttcgtaaaaccggaggagacacattggagttccacaatttctacaagaatttctcatcagagctgaaagatatcgtgtggaaagctgaatctgatgcaagtatgaaacagacgaagtga

SEQ ID NO: 2294 - protein, 446 aa, Zea mays
MAEPKAAAARKTRVGPYEVGKTIGEGSFAKVKHARDSRTGAVRAIKVLDRNHVLRHRMVEQIKREIATMKLIKHPNVVQLHEVMASKTKIYMVLEFVDGGELFDKIVNSGRLGEDEARIYFHQLINAVDYCHSRGVYHRDLKPENLLLDSNGALKVSDFGLSAFAPQTNEDGLLHTTCGTPNYVAPEVLADKGYDGMAADVWSCGIILFVLMAGYLPFDDANLMRLYKLICQAYFSCPPWFSSGAKKFIKRILDPNPDTRITIAEILEDEWFKKGYKPPRFEQGEDVSLDDIDAAFNDSEDRLVAEKREKPESMNAFALISRSQGFNLGNLFEKEMMGMVKRETSFTSQCTAQEIMSKIEDACGPLGFNVRKQNYKMKLKGDKSGRKGHLSVATEVFEVAPSLHMVELRKTGGDTLEFHNFYKNFSSELKDIVWKAESDASMKQTK

SEQ ID NO: 2295 - DNA, 1323 bp, Zea mays
  CDS (1)..(1323)
atgagtacaaccaaggtgaagagacgtgtgggcaagtatgagctcggccggaccataggcgagggcaccttcgcgaaggtcaggttcgcgagggacacggtcaccggcgaggccgtggccattaagatcctggacaaggagaaggtcctcaagcacaagatggttgagcagatcaagcgggagatctcgacgatgaagctgatcaagcaccctaacgtcgtccgcatatacgaggtgatgggaagtaaaacaaagatctacattgtgttagaattcgctaccggtggcgagctctttgatacaattgttaaccatggtcgaatgagggaagacgaggcaaggaggtacttccaacagttaatcaatgcagttgattattgccatagcaggggtgtgtaccaccgggatttaaaacctgaaaatttgctgcttgattcatatggaaacctgaaggtctctgactttgggctcagcgcgctatctcagcaaatcaaggatgatggactgctgcacacaacttgtgggactccaaactatgttgcaccagaggtccttgaagatcaaggctacgatggagcaatggctgatctgtggtcatgtggagttatcctgtttgttctgctagcagggtatttgccgtttgaggactctaatctcatgactttgtataagaaaatatcaaatgcagaatttacatttccaccatggacatcttttcctgccaagaggttgttaacaagaatccttgatccaaatccaatgacgagaataacaatcccagaaatattagaggatgagtggttcaaaaagggctacaagcgcccagaatttgatgaacaatatgacaccacattggatgatgtggatgccgtcttcaatgattcagaagagcaccatgtgacagaaaagaaagaagaagaaccagtagctctgaacgcattcgaactgatttcgatgtcagcgggcctaaaccttggaaacttatttgactcagagcaggagttcaaaagagaaacaaggtttacatcaaaatgtccccccaaagaaattgtccgcaagatcgaggaagctgcaaaacctctaggatttgatgttcagaagaaaaattacaagttgaggctcgaaaaggtaaaggcagggaggaagggaaacctcaacgttgctactgagatactgcaagttgcaccctctctccacatggtagaagtccgaaaagcaaagggtgacactctggaatttcataagttctacaagaacctttccaagaccttgaaggacgtcgtctggaaatccgacgatcttcaaacgcaacatgcttcttag

SEQ ID NO: 2296 - protein, 440 aa, Zea mays
MSTTKVKRRVGKYELGRTIGEGTFAKVRFARDTVTGEAVAIKILDKEKVLKHKMVEQIKREISTMKLIKHPNVVRIYEVMGSKTKIYIVLEFATGGELFDTIVNHGRMREDEARRYFQQLINAVDYCHSRGVYHRDLKPENLLLDSYGNLKVSDFGLSALSQQIKDDGLLHTTCGTPNYVAPEVLEDQGYDGAMADLWSCGVILFVLLAGYLPFEDSNLMTLYKKISNAEFTFPPWTSFPAKRLLTRILDPNPMTRITIPEILEDEWFKKGYKRPEFDEQYDTTLDDVDAVFNDSEEHHVTEKKEEEPVALNAFELISMSAGLNLGNLFDSEQEFKRETRFTSKCPPKEIVRKIEEAAKPLGFDVQKKNYKLRLEKVKAGRKGNLNVATEILQVAPSLHMVEVRKAKGDTLEFHKFYKNLSKTLKDVVWKSDDLQTQHAS

SEQ ID NO: 2297 - DNA, 1356 bp, Zea mays
  CDS (1)..(1356)
atggcagagcataaagggaacgttctcttgcacaagtatgagatggggaaattgcttggccaaggcacctttgccaaggtttaccatgctcgtaacacggcgacttcggaaagtgtcgcgatcaaagtgattgataaggagaaggttatgaaggttggtctcattgatcaaatccagcgagaaatttctgtgatgaagcttgttaggcatccaaacatcgtacagctctatgaggtcatggccaccaaaaccaaaatatactttgtgctggaacatgttaaaggtggagagctgttcaacaagattcagcgaggaaggctcaaggaagacgcagcgaggaagtacttccagcagttgatctgtgcggtggacttctgccacagcaggggtgtctatcatcgagatttgaagccagaaaatcttttgctcgatgagaatagcaacctgaaggtatcagattttggtctaagcgcacttgctgaatgccatagacaagacggcctgctccacacgacttgtggcacgcctgcttatgttgccccagaggtgattaacagaaagggttatgatggtgcaaaggctgacatatggtcttgtggggtcatcctgtttgtgctattggctggttatcttccgttccatgataagaacttgatggacatgtataagaagattgagaaagctgacttcaaatgtccaagttggttttctaccgatgttcggaggcttttgcaaaggattcttgatcctaaccctagtagaaggatctcggtggaaaaaatcatggagaatccatggtttaggaagggtttaggtgcaaagctacttaggtacgatttacagaataagaatgcccctcatgtggacaagaaggcagattttgattcactgagcaccaacgtaacaactgagagcaagcaacatgaagaaaagaagcctaccaacatgaatgcatttgatataatatctctatcaactggcttggacctctctggtttatttgaagaatctaacaagaagagagaatccaaattcacatctaccaacacaagctcgacaatcatatcgaagatcgaagatattgcaaagaatttgcggttgaatttgacaaaaaaggatggtggcttgttaaagatggaagcttcaaagcccggaaggaaaggggtaatgggtatcgatgccgaagtatttgaggttagccccaacttccatcttgtggagataaagaagacgaatggcgacactctagagtatcaaaaggtcctgaaccaagaaatgaggcccgcactcaaggaaatagtgtgggcttggcaaggtgagcaatcaaagcaaaagcaggaacaacagtcgtgttaa

SEQ ID NO: 2298 - protein, 451 aa, Zea mays
MAEHKGNVLLHKYEMGKLLGQGTFAKVYHARNTATSESVAIKVIDKEKVMKVGLIDQIQREISVMKLVRHPNIVQLYEVMATKTKIYFVLEHVKGGELFNKIQRGRLKEDAARKYFQQLICAVDFCHSRGVYHRDLKPENLLLDENSNLKVSDFGLSALAECHRQDGLLHTTCGTPAYVAPEVINRKGYDGAKADIWSCGVILFVLLAGYLPFHDKNLMDMYKKIEKADFKCPSWFSTDVRRLLQRILDPNPSRRISVEKIMENPWFRKGLGAKLLRYDLQNKNAPHVDKKADFDSLSTNVTTESKQHEEKKPTNMNAFDIISLSTGLDLSGLFEESNKKRESKFTSTNTSSTIISKIEDIAKNLRLNLTKKDGGLLKMEASKPGRKGVMGIDAEVFEVSPNFHLVEIKKTNGDTLEYQKVLNQEMRPALKEIVWAWQGEQSKQKQEQQSC

SEQ ID NO: 2299 - DNA, 1335 bp, Glycine max
  CDS (1)..(1335)
atggtgttgaggaaagtgggtaagtatgagattggaaggaccgttggagagggaacgtttgcgaaggtaaagttcgctcagaacacagagagtggcgagagtgttgccatgaaggtgctagaccgtagcgccatcatcaagcacaaaatggtcgaccagatcaagagggaaatttctatcatgaagctagtcaggcatccatatgtcgttcgtctacacgaggttctagcaagccgtactaagatttatatcatattggagtttattacaggtggtgaattgtttgataaaattgtaagccatgggcgtcttagtgaagctgaatctagaagatacttccaacagcttattgatggtgtagatttttgccacagcaagggagtttatcatagagatttaaagcctgaaaatcttttacttgattcacaaggaaatataaagatttcagattttggtttgagtgcatttccagaacagggggtcagtttgcttcggacaacttgtgggactcctaattatgtagctcctgaggtactcagtcacaagggttataatggggctccagcagatgtttggtcctgtggagttatcctctacgttctattggctggatatcttccctttgacgaacttgatctaactacgttgtacagtaagattgagaaagcacagttttcgtgccctccttcgtttcctgtgggagcaaagtctttaatacacacaatgctggacccaaatcctgaacgtcgtataaccattgagcagataaggaatgatgagtggtttcaaaaggaatatgttccggtcagtctcatcgagtatgaagatgtaaatctggatgatgtaaatgctgcatttgacaatgatgaggatcagaggactaaccagcaatgtgagaatgacgacatgggtcctctaactcttaatgcattcgacatgataattttatctcaaggcttaaaccttgcaaccctatttgatcgtggacaggactctatgaaatacgaaacgcgcttcatcagtcaaaagccaccaaaggtgattttatcaagtatggaagttgtggcacaatcaatgggatttaagacacatattcgcaactataagatgagaatagagagtatctcaacaaataaggcttcttatttctcagttatactagaagtctttgaaattgctcctacatttttcatggtggatattcagaaagcagctggagatgctggtgaatatctcaagttttacaagaatttttctagcaatcttgaggatatcatgtggaaaccgccccacgaaacaagcaaattaaggaactccaagaccaaagggcagtga

SEQ ID NO: 2300 - protein, 444 aa, Glycine max
MVLRKVGKYEIGRTVGEGTFAKVKFAQNTESGESVAMKVLDRSAIIKHKMVDQIKREISIMKLVRHPYVVRLHEVLASRTKIYIILEFITGGELFDKIVSHGRLSEAESRRYFQQLIDGVDFCHSKGVYHRDLKPENLLLDSQGNIKISDFGLSAFPEQGVSLLRTTCGTPNYVAPEVLSHKGYNGAPADVWSCGVILYVLLAGYLPFDELDLTTLYSKIEKAQFSCPPSFPVGAKSLIHTMLDPNPERRITIEQIRNDEWFQKEYVPVSLIEYEDVNLDDVNAAFDNDEDQRTNQQCENDDMGPLTLNAFDMIILSQGLNLATLFDRGQDSMKYETRFISQKPPKVILSSMEVVAQSMGFKTHIRNYKMRIESISTNKASYFSVILEVFEIAPTFFMVDIQKAAGDAGEYLKFYKNFSSNLEDIMWKPPHETSKLRNSKTKGQ

SEQ ID NO: 2301 - DNA, 1332 bp, Triticum aestivum
  CDS (1)..(1332)
atggcggcggcgggcggggggccgaggcggacgacgcgggtggggccgtacgagctcggcaagaccgtcggcgagggcagcttcgccaaggtcaagatcgccaaggacacccgcaacgccgccacctgcgccatcaaggtgctcgaccgcaaccacgtcctacgacacaagatggtcgagcagattaaaagggagatcgccacaatgaagctaataagacatcccaatgtggtccagctgcatgaggtgatggctagcaaatcaaagatatacatggttcttgagtttgtcgaaggaggcgagctttttgataagattgtcaattctgggaagctgggagaagatgaagcaagacgatacttccaccaacttataaatgcggtggattattgtcatagtcgtggagtgtaccatagagatctcaagccagaaaatctgctccttgattcatatggagctctcaaagtctcagacttcggcctcagcgcattttctccgcaaacaaaagaggatggacttctgcatactgcttgtggaactccaaattatgttgcacctgaggtgcttgctgataaaggttatgatggtatggctgctgatgtgtggtcctgtggcataatcttatttgtccttatggctggatatttgcccttcgatgatcccaacttaatgactctgtataaattgatctccagagctaatgtttcttgtccaccatggttttctaccggtgcaagaaatcttattaagcgcattctcgatcccaatcctcacacgaggataacaatcgcccaaattttggaagatgaatggttcaaaaaggactataaaccaccacattctgagcacaatgaagatgtgagccttgaagatgtcgatgctgcattcgatagttcagaggaacaccttgtggcggagagaagagagaaaccagaatccatgaatgcatttgctcttatttcaaggtcggaggggttcaacctcggaaatttgtttgagaaagagatgatggggatggtaaagcgggaaacatcctttgcgtcgcaacgtacaccacaagagatcatgtctaaaatagaggaagcctgtggccctcttggtttcaatgtgcggaaacaaaattataagatgaaactgaaaggtgacaagacaggaagaaaaggccatttatctgtagcaacggaggtttttgaggttgctccaacactccatatggttgaacttcgtaaaactggaggggacaccttggagtttcacagtttctacaagaatttctcatcagaactaaaagacattgtgtggaaaactgaatccaacacaatagcgaaatag

SEQ ID NO: 2302 - protein, 443 aa, Triticum aestivum
MAAAGGGPRRTTRVGPYELGKTVGEGSFAKVKIAKDTRNAATCAIKVLDRNHVLRHKMVEQIKREIATMKLIRHPNVVQLHEVMASKSKIYMVLEFVEGGELFDKIVNSGKLGEDEARRYFHQLINAVDYCHSRGVYHRDLKPENLLLDSYGALKVSDFGLSAFSPQTKEDGLLHTACGTPNYVAPEVLADKGYDGMAADVWSCGIILFVLMAGYLPFDDPNLMTLYKLISRANVSCPPWFSTGARNLIKRILDPNPHTRITIAQILEDEWFKKDYKPPHSEHNEDVSLEDVDAAFDSSEEHLVAERREKPESMNAFALISRSEGFNLGNLFEKEMMGMVKRETSFASQRTPQEIMSKIEEACGPLGFNVRKQNYKMKLKGDKTGRKGHLSVATEVFEVAPTLHMVELRKTGGDTLEFHSFYKNFSSELKDIVWKTESNTIAK

SEQ ID NO: 2303 - DNA, 1293 bp, Zea mays
  CDS (1)..(1293)
atggcgtacgcggcgaggcggaagaagcgggtgggccgctacgaggtgggccggaccatcggccagggcaccttcgccaaggtcaagttcgccgtcgacgccgacaccggcgcgcccgtcgccatgaaggtgctcgacaaggagaccatcttcgcccaccgcatgctccaccagatcaaaagggaaatatcaatcatgaagatcgtaagacatcccaacatagtcaggcttaatgaggtgttggcagggaagacgaagatatacataatcttggaacttgtcaatggaggcgaactgtttgataaaatagcccgatatgggaagctacgtgagaatgaagccaggaagtatttccagcagcttattgatgccattgattattgccacagcaaaggagtttatcatagggatttgaagcctgaaaacatgcttcttgactcacgtggaaacttaaaactttctgattttggacttagcacactgtctcaaaatggagcaggacttctacacacaacatgtggaacaccaaattatgttgcacctgaggtgctaagtagcaatggatatgacggacctgcagcagacatttggtcatgtggtgtcattctctatgttttaatggctggttaccttccctttgaggagaacgaccttccacatttgtatgaaaagataactgcagctcagtactcatgcccatattggttctctccaggagccaagtcattgatccagagaatacttgatccaaatccaagaactcgtatcactattgaagaaataagagaagacccatggtttaagaagaactacgtaactattagatgtggtgaagatgaaaatgtcagcctagacgatgttcaagctatttttgacaatattgaggacaagtatgtatcagacgaagtaacgcacaaggatggtggtcctcttatgatgaatgcctttgagatgattgcactatctcaaggtttggatctctcagcattgtttgataggcaacaggagtttgtcaagcgccaaacacgtttcgtctcaagaaagccagccaagactgtagtagctacaattgaggttgttgctgagtcaatgggtctcaaggtccactcccggaactacaaggtctttgaagttgctccttctctgttcatggtcgatgttcgaaaggttgccggtgacactccggaataccacaggttttacgagaacctatgcagcaaactttgcagcataatctggaggccaaccgaagtttctgccaaatctacgccgctgaggacgaccacctgctag

SEQ ID NO: 2304 - protein, 430 aa, Zea mays
MAYAARRKKRVGRYEVGRTIGQGTFAKVKFAVDADTGAPVAMKVLDKETIFAHRMLHQIKREISIMKIVRHPNIVRLNEVLAGKTKIYIILELVNGGELFDKIARYGKLRENEARKYFQQLIDAIDYCHSKGVYHRDLKPENMLLDSRGNLKLSDFGLSTLSQNGAGLLHTTCGTPNYVAPEVLSSNGYDGPAADIWSCGVILYVLMAGYLPFEENDLPHLYEKITAAQYSCPYWFSPGAKSLIQRILDPNPRTRITIEEIREDPWFKKNYVTIRCGEDENVSLDDVQAIFDNIEDKYVSDEVTHKDGGPLMMNAFEMIALSQGLDLSALFDRQQEFVKRQTRFVSRKPAKTVVATIEVVAESMGLKVHSRNYKVFEVAPSLFMVDVRKVAGDTPEYHRFYENLCSKLCSIIWRPTEVSAKSTPLRTTTC

SEQ ID NO: 2305 - DNA, 1347 bp, Zea mays
  CDS (1)..(1347)
atggcggagcccaaagcggcggcggcggcgaggaagacgcgggtgggcccgtacgaggtcggcaagaccatcggcgagggcagcttcgccaaggtcaagcacgcgcgcgactcccgcaccggcgccgtccgcgccatcaaggtgctcgaccgcaaccacgtcctccgccacaggatggtcgagcagatcaagcgggagatttcgactatgaagctgatcaaacatcccaatgtggtacagctgcatgaggttatggcgagcaaaacgaagatatacatggttcttgaatttgttgatggaggcgagctattcgataagatcgtcaattctggaaggctaggagaggatgaagctaggatatactttcatcaacttataaatgcagttgattattgccatagccgaggagtgtaccatagagacctgaagccagagaatttgcttctggattcaaatggagctcttaaagtttcagacttcggcctaagtgcatttgcaccacaaacaaatgaggatgggcttctgcatactacctgtggaactccaaactatgtagcacctgaggtgcttgctgataaaggctatgatggtatggctgcagatgtatggtcctgtggcataatcttatttgttcttatggctggatacttaccctttgatgatgccaatctgatgagactgtacaaactgatctgccaagcatatttttcttgcccaccatggttttcttctggagcgaagaagtttattaagcgcattctcgatcctaatcctgatacgaggataacaattgcagaaattttggaagatgaatggttcaaaaaagattataaaccaccacgttttgaacaaggtgaagatgttagccttgacgacattgatgctgcattcaatgattcagaggaccgtcttgtggcagagaaaagagagaaaccagaatccatgaacgcatttgctcttatttcgaggtcgcagggtttcaaccttggaaatttgtttgagaaggagatgatgggaatggtaaagagggaaacatctttcacgtctcaatgcacagcacaggagatcatgacaaaaatagaggatgcatgtgggccactcggtttcaacgtgcggaaacaaaattacaagatgaaattgaaaggtgacaaatctggaagaaaaggtcacttatctgttgcaactgaggtttttgaggttgccccatcacttcacatggttgagcttcgtaaaaccggaggagacacattggagttccacagcttctacaagaacttctcatcggagctgaaagatatcgtgtggaaagctgaatctgacgcaaataataaacagacgaataagtga

SEQ ID NO: 2306 - protein, 448 aa, Zea mays
MAEPKAAAAARKTRVGPYEVGKTIGEGSFAKVKHARDSRTGAVRAIKVLDRNHVLRHRMVEQIKREISTMKLIKHPNVVQLHEVMASKTKIYMVLEFVDGGELFDKIVNSGRLGEDEARIYFHQLINAVDYCHSRGVYHRDLKPENLLLDSNGALKVSDFGLSAFAPQTNEDGLLHTTCGTPNYVAPEVLADKGYDGMAADVWSCGIILFVLMAGYLPFDDANLMRLYKLICQAYFSCPPWFSSGAKKFIKRILDPNPDTRITIAEILEDEWFKKDYKPPRFEQGEDVSLDDIDAAFNDSEDRLVAEKREKPESMNAFALISRSQGFNLGNLFEKEMMGMVKRETSFTSQCTAQEIMTKIEDACGPLGFNVRKQNYKMKLKGDKSGRKGHLSVATEVFEVAPSLHMVELRKTGGDTLEFHSFYKNFSSELKDIVWKAESDANNKQTNK

SEQ ID NO: 2307 - DNA, 1596 bp, Zea mays
  CDS (1)..(1596)
atggggcagtgttgcagcagagctacggccccggactctggacggggaggtgccaatggttatggctattctaaccaggcaaagccggcgcaagcacctccgagttacaaccctcctcagcaggcggccgaggtgaggtacacaccatcggcgacgaactcttcggcagtcccacccgtggctgtgccgccgaagccaacggcggacacgattcttggcaagcagtacgaggacgtgcgctctgtctactccctcgggaaggagcttggccggggccagttcggggtgacatacctctgcacagagattgcctctggtaggcagtacgcctgcaagtccatctccaagcgcaagctcgtcagcaaggcagacagggaggacattcgaagggagatccagatcatgcagcacctgtctgggcagccaaacattgttgagttccggggagcatacgaggacaagagcaatgtccatgtggtgatggagctctgcgcaggtggggagctcttcgatcgcatcattgcaaaggggcactacacagaacgtgcggctgctacaatctgcagagcagttgtgaatgttgtcaacatttgccacttcatgggtgtgatgcatcgtgatctgaaacccgagaacttcttgcttgcgaccaaggaggagaatgcaatgctcaaggccactgattttgggctttctgtcttcattgaagaaggaaagatgtacagggacattgttggaagtgcttactatgttgctcctgaagtccttagacggagctatggaaaagagatagatgtttggagtgcgggtgttattttgtacattcttctcagtggcgtgcctccattttgggctgaaactgaaaaggggatatttgatgctattctgcatgaggagattgactttgaaagtcaaccttggccatcaatttctgagagtgctaaagacttggtgagaaagatgttgacacgagatccaaagaaaagactgacttcagcccaagttcttcaacatcagtggctcagagaaggtggggaggcatctgataagcctatcgacagtgctgttctttctagaatgaagcaattcagagcaatgaataagctgaaaaagatggccctaaaggttattgcttcaaaccttaacgaggaagagatcaaggggctaaagcaaatgttcatgaacatggacacagacaatagtggcacaatcacatacgaagaactcaaagcaggattagccaaacttggatcaaagctgtcagaagctgaagtaaagcagttgatggaggctgctgatgttgatgggaatggatctattgactatgttgagttcatcactgccacaatgcatagacacaagctcgaaagggacgagcatttgttcaaggcattccagtactttgacaaagataacagcggcttcatcacaagggatgaactggaatctgctttgattgagcatgagatgggcgacacgagtacaataaaggagatcatatcagaagttgacacagataatgatgggaggattaactatgaggagttttgtgcaatgatgagaggagggatgcagcagccaatgaggctcaagtag

SEQ ID NO: 2308 - protein, 531 aa, Zea mays
MGQCCSRATAPDSGRGGANGYGYSNQAKPAQAPPSYNPPQQAAEVRYTPSATNSSAVPPVAVPPKPTADTILGKQYEDVRSVYSLGKELGRGQFGVTYLCTEIASGRQYACKSISKRKLVSKADREDIRREIQIMQHLSGQPNIVEFRGAYEDKSNVHVVMELCAGGELFDRIIAKGHYTERAAATICRAVVNVVNICHFMGVMHRDLKPENFLLATKEENAMLKATDFGLSVFIEEGKMYRDIVGSAYYVAPEVLRRSYGKEIDVWSAGVILYILLSGVPPFWAETEKGIFDAILHEEIDFESQPWPSISESAKDLVRKMLTRDPKKRLTSAQVLQHQWLREGGEASDKPIDSAVLSRMKQFRAMNKLKKMALKVIASNLNEEEIKGLKQMFMNMDTDNSGTITYEELKAGLAKLGSKLSEAEVKQLMEAADVDGNGSIDYVEFITATMHRHKLERDEHLFKAFQYFDKDNSGFITRDELESALIEHEMGDTSTIKEIISEVDTDNDGRINYEEFCAMMRGGMQQPMRLK

SEQ ID NO: 2309 - DNA, 1332 bp, Zea mays
  CDS (1)..(1332)
atggaggatgcgatggcggcggacgggaagagcgtgctgcaggggcggtacgagctggggcgggtgctggggcacggcaacttcgggcgggtgcacgcggcgcgggacctgcgcacgggccgcagcgtcgcggtcaaggtggtggccaaggacaagctggagcgcgcgggcatggcggagcagatcaagcgggagatcgccgtcatgaagatggtgtcccaccccaacatcgtggagctgcacgaggtgatggccacccgctccaagatctacctcgcgctcgagctcgtccgcggcggggagctcttctcccgcatcgcgcgcgcggggcgggtccgggaggacgtggcgcgctgttacttccggcagctcgtcgccgcggtcgacttctgccacggccgcggggtgttccaccgagacctgaagctcgagaacctgctcctcgacgaggtaggcaacctcaaagtggcggactttgggctcagcgcgctcgccgggcacgcgcgctccgacgggctgctccataccgcctgtggcacgccgtcatacgtcgcccccgaggtgctcggcgggaagggctacgacggcgccaaggcggacctctggtcctgtggcgtcatcctctacgtgctcctcgttggcagcttgccattccacgaggacaacctcatggtcatgtaccggaagatgcagcgcggcgagttcctctgcccgccgtgggtctcagcggacgcccggaagctcatcggcgagctgctcgaccccgacccgagcacgcgcatcaccgtcgctcgcctcgtcgagacgccgtggtaccggaagccgttgcccgtcctgccgccgctcaacctcaaggagccaaccccggacgcgcgccgcgccacctctgacaaggaagagcccgaggtgctgaacgcgttccacctcatctctttctcggagggcttcgacctgtccccgctcttcgaccagggccgtggcggcggcgtagggaggtctagcgcgggcggcatccgtttcgtgacgcgcgaggccgccagcagcgtggtctcccgtctggagtcgctggtcaccggccgcggagccaacatgcgcgtgacaaagagcggctcgcggggcgttcgtttggaggccgtgtcgcgcgggcgctcgggggcgcggctggcagtggccgcggagatcttcagcgtggcgccgtcggtgctcctggtggacgtgaagaaggacggcggcgacacgatggagtaccggtcgttctgtagcgaggagctccggccggcgctcaaggacatcgtctgggcctccagccaggacacaccgggcgccgcttga

SEQ ID NO: 2310 - protein, 443 aa, Zea mays
MEDAMAADGKSVLQGRYELGRVLGHGNFGRVHAARDLRTGRSVAVKVVAKDKLERAGMAEQIKREIAVMKMVSHPNIVELHEVMATRSKIYLALELVRGGELFSRIARAGRVREDVARCYFRQLVAAVDFCHGRGVFHRDLKLENLLLDEVGNLKVADFGLSALAGHARSDGLLHTACGTPSYVAPEVLGGKGYDGAKADLWSCGVILYVLLVGSLPFHEDNLMVMYRKMQRGEFLCPPWVSADARKLIGELLDPDPSTRITVARLVETPWYRKPLPVLPPLNLKEPTPDARRATSDKEEPEVLNAFHLISFSEGFDLSPLFDQGRGGGVGRSSAGGIRFVTREAASSVVSRLESLVTGRGANMRVTKSGSRGVRLEAVSRGRSGARLAVAAEIFSVAPSVLLVDVKKDGGDTMEYRSFCSEELRPALKDIVWASSQDTPGAA

SEQ ID NO: 2311 - DNA, 1362 bp, Zea mays
  CDS (1)..(1362)
atggagaagaagccgaccatcctcatgaacaggtacgagctcgggcgcacgctcgggcagggcaccttcgccaaggtgtaccacggccggaacctcgcgtccggcgagagcgtggccatcaaggtcatcgacaaggagaaggtgatgcgcgtcggcatgatcgaccagatcaagcgcgagatctccgtcatgcgcctcgtccgccaccccaacgtcgtgcagctgcacgaggtgatggccagcaagagcaagatatacttcgccatggagtacgtccggggcggcgagctcttcgcccgcgtcgcccgcggccggctcaaggaggacgccgcgagaaggtacttccaccagctcgtcggcgccgtcgacttctgccacagccgcggcgtctaccaccgcgacctcaagcccgagaacctcctcgtcgacgagcacggcaacctcaaggtctccgacttcggcctcagcgcgctcagggagtgccagaagcaggacggcctgctgcacaccacctgcggcacccccgcgtacgtcgcgccggagatcatcaacaagaagggctacgacggggccaaggccgacatctggtcctgcggcgtcatcctcttcgtgctcctcgccggctacctcccgttccacgacgccaacctggtggagatgtaccgcaagatcagcagagccgacgtcaagtacccgcagtggttctcccctgagctccggcggttgatgcccaagctcctcgaaccgaacccaaacaacaggatcacgatcgagaagctggtcgagcacccctggttcaagaaggggtacaggccggccgtcatgctggcacagccgcacggctccagcagcctcaaggatgtccaggtcgccttcagcaacgccgaccacaaggacagcagcagcaaggtggaacagccggcggacagctccttgaagccggcgagcctgaacgcgttcgacatcatctcccactccagagggttcgacctgtcaagcctgttcgaggtggaccaagagcagaaggccagcaactcgcggttcatgacccagaagccggcgtcggcgatagtgtcaaagctggagcagatcgctgagacagagcgcttcatggtgaaaaaacaggacgggctggtgaagctgcaggggtccaagcaagggaggaaggggcagctcgcgatcgacgccgagatcttcgaggtgacaccggcctttcacgtcgtcgaggtgaagaagtcggcaggcgacacgctggagtatgagatgttctgcagcaagggcctaagaccttcactcagcgacatctgctggagcagccgatctgaggagaacatggctccttcagtggttcagccatcataa

SEQ ID NO: 2312 - protein, 453 aa, Zea mays
MEKKPTILMNRYELGRTLGQGTFAKVYHGRNLASGESVAIKVIDKEKVMRVGMIDQIKREISVMRLVRHPNVVQLHEVMASKSKIYFAMEYVRGGELFARVARGRLKEDAARRYFHQLVGAVDFCHSRGVYHRDLKPENLLVDEHGNLKVSDFGLSALRECQKQDGLLHTTCGTPAYVAPEIINKKGYDGAKADIWSCGVILFVLLAGYLPFHDANLVEMYRKISRADVKYPQWFSPELRRLMPKLLEPNPNNRITIEKLVEHPWFKKGYRPAVMLAQPHGSSSLKDVQVAFSNADHKDSSSKVEQPADSSLKPASLNAFDIISHSRGFDLSSLFEVDQEQKASNSRFMTQKPASAIVSKLEQIAETERFMVKKQDGLVKLQGSKQGRKGQLAIDAEIFEVTPAFHVVEVKKSAGDTLEYEMFCSKGLRPSLSDICWSSRSEENMAPSVVQPS

SEQ ID NO: 2313 - DNA, 1392 bp, Zea mays
  CDS (1)..(1392)
atggtgagcgacggcgcgcgcgggctgctgggcgcgtacgagctcgggcggacgctcggggagggcaacttcgggaaggtgaagcaggcgcggcaccgcggcagcggcgggcagtttgccgtgaagatcatggagcgcgccagggtgctgtcgcagcgcgcggacgagcagatatgccgcgagatcgccacgctcaagctgctcgcgcaccccaacgtcgtccgcctccacgaggtggctgccagcaagacgaagatctacatggtgcttgagctcgtcaacggcggcgagctgctggacaggattcaggcggccagtgagggaaagctcccggagcaggaggcaaggaggctcttccagcagctggttgatggtgtaagctactgccatgaaaagggcgtctgtcacagagacctcaagctggagaacgttcttgtcgaccggaagggaaacatcaagatctctgatttcgggctcagcgctttaccgcaacatctcgggaacgatgggttgctgcacacgacctgcggtagccccaactacattgcccctgaggttctgcagaacagagggtacgacgggtcgctatcggacatctggtcatgcggggtgattctctacgtgatgctcgtagggcacctcccgttcgacgaccggaacatcgtcgttctctaccagaagattttcaagggcgatgctcagatcccggagtggctctctcccggcgcacggaaccttctccggaggatccttgagcccgacccggcggagcggatcgccatggcagagatcaaggcgcacccatggttccaggagcactacgtccctgtccttcctccgtacgacgacgacgacgaccacgattcagtgaagcaaatcggtgcgggtagtaaaaccactcatcacatcaacgcgtttcagttgatcggaatggcgtcgtccctagacctctcagggttttttgaggaagaggacgtgtcccaaaggaagatcaggttcacgtccgcacaaccgcctgaggatttgttcgccgagatcgaacgctctgcgactgacatgggcttccatgttcacagagggcatagtaagcttaggctgacgcgaaactgcgaccggtcgaagaatcagaagaaccctatgtcgtcatcgtcgtcgtcgtttctagtctgcaccgaggtttttgagcttagcccctctttgtatgtcgtggagctcaacaagtcccatggcgaccctgcactgtacaggcagctctgtcagaggatctgcggtgacctaggtgtgctcgagatggaccagatctttgggacgaggccgccggtcgccgacgatctcgcgggcttggccttggcgttggagagacgatctgcgacgcctttggttgcgttgtga

SEQ ID NO: 2314 - protein, 463 aa, Zea mays
MVSDGARGLLGAYELGRTLGEGNFGKVKQARHRGSGGQFAVKIMERARVLSQRADEQICREIATLKLLAHPNVVRLHEVAASKTKIYMVLELVNGGELLDRIQAASEGKLPEQEARRLFQQLVDGVSYCHEKGVCHRDLKLENVLVDRKGNIKISDFGLSALPQHLGNDGLLHTTCGSPNYIAPEVLQNRGYDGSLSDIWSCGVILYVMLVGHLPFDDRNIVVLYQKIFKGDAQIPEWLSPGARNLLRRILEPDPAERIAMAEIKAHPWFQEHYVPVLPPYDDDDDHDSVKQIGAGSKTTHHINAFQLIGMASSLDLSGFFEEEDVSQRKIRFTSAQPPEDLFAEIERSATDMGFHVHRGHSKLRLTRNCDRSKNQKNPMSSSSSSFLVCTEVFELSPSLYVVELNKSHGDPALYRQLCQRICGDLGVLEMDQIFGTRPPVADDLAGLALALERRSATPLVAL

SEQ ID NO: 2315 - DNA, 1317 bp, Zea mays
  CDS (1)..(1317)
atggctgagaaagagaatattctaatgcagagatatgagatgggaaagttacttggaaaagggagttttgccaaagtttaccatgctcgcaatgttaagacttcagaaagcgttgctatcaaggtgattgacaaagataagatcaagaagtgtggtcttatggatcaaataattcaagagatttcggtgatgaagttggtaaaacatccaaacattgtccaattgtatgaggttatggctaccaaaaccaagatatattttgtgatagagtatgtcaagggaggagagttgttcaaaaaggttcaacgtggaaggttaaaagaagatgttgctcgtgcatatttccaacaattgatcagtgctgttgacttctgccatactagacaagtttatcatagagatctaaagcccgaaaatcttcttcttgacggaagtcacaacttaaagatttcagactttggtttgagtgcacttccaaactgcaagagaaaagatgggttactccacacaatttgtgggactcctgcatatgttgctccagaagtaattagtcaaaaaggatatgatggtgcaaaagctgacatatgggcttgtggagtgatcctctatgtgttgttggcgggctatcttcctttccaagacaagaacatgatggacatgtataagaaaatttgcaaagcagaactcaaatggccaagttggttttcttcagatgttcgaaagcttttgcggcgcatccttcatccaaaccctaatagacgaatatctattgaagaaataaggactcatccttggtttagaattggtcttgatgcaagattgtttgattctacaacgagagattatgtgcctagtgacatggatttggctttgaattccttaaatagcaatatggtcgagtgtaattcagcggcagagaaactgactattttgaatgcttttgatatcatctccctgtctaacgggtttgatctctctggtatatttgagaactcaaacaaggagtctaaatttatgtctaccaacacagctatgacaattatcacaaagctaatggaagttgcaaagagcctggatctgaaggttataacaaaaactggtggattgttgaatatggaagctgccaaatcaggaataaaaggtgtgatgtctataaatgctgagatatttcaaatcacaccaaattatcatctcgtggagatcaagaaaatcaatggtgacatccttgagtatcataactttatgaaccaaagcatgagaccggcactagaagatattgtgtgggcatggcatggtgaacaacctgacgagaagtag

SEQ ID NO: 2316 - protein, 438 aa, Zea mays
MAEKENILMQRYEMGKLLGKGSFAKVYHARNVKTSESVAIKVIDKDKIKKCGLMDQIIQEISVMKLVKHPNIVQLYEVMATKTKIYFVIEYVKGGELFKKVQRGRLKEDVARAYFQQLISAVDFCHTRQVYHRDLKPENLLLDGSHNLKISDFGLSALPNCKRKDGLLHTICGTPAYVAPEVISQKGYDGAKADIWACGVILYVLLAGYLPFQDKNMMDMYKKICKAELKWPSWFSSDVRKLLRRILHPNPNRRISIEEIRTHPWFRIGLDARLFDSTTRDYVPSDMDLALNSLNSNMVECNSAAEKLTILNAFDIISLSNGFDLSGIFENSNKESKFMSTNTAMTIITKLMEVAKSLDLKVITKTGGLLNMEAAKSGIKGVMSINAEIFQITPNYHLVEIKKINGDILEYHNFMNQSMRPALEDIVWAWHGEQPDEK

SEQ ID NO: 2317 - DNA, 1455 bp, Zea mays
  CDS (1)..(1455)
atggattgcctgcagagcagctcccctgcccctcgcagcggctactctacaggtctagcgactctttcgccatccatagagggaggaggcgcggcggagatggtgggcggtggcggcggcgggccgctgcggcgggtgggcaagtacgaggtgggacgcaccatcggggaaggcaccttcgccaaggtcaagttcgcgcagaacaccgagaccggggagagcgtcgccatgaaggtgctcgaccgctcctccatcctcaagaacaagatggccgaacagattaagagagaaatatccataatgaagcttgtcaggcatcccaatgtcgttaggctacacgaggttttggcaagccggaagaagatatttataattctggagttcatcactggcggcgagctattcgataaaattattcgtcatgggagactcagtgaagcagatgcccgcagatactttcagcagcttattgatggtgttgatttttgtcacaagaaaggagtctaccatcgagacttaaagcctgaaaatctcctccttgattcccaaggcaatcttaaaatttcagactttggactgagtgcatggcctgctcagggatctttccttctacgtacaacctgtgggactccgaactatgttgccccagaggttctcagtcataagggatataatggcgcacttgctgatacatggtcatgtggagtaattttatatgtattgttagcaggttatcttccatttgatgaagtggacctgactaccctttatggaaagattgagagtgcagaatattcattcccagcctggttttcaggtggtgcaaaatcactgattcgtagaattcttgacccaaatccagagacacgaatcaggatagaagagatcagaagcgatgaatggtttcagaaaaattatgaacctatcaaagaaatagaaaatgaggaagtcaatctcgatgatgtcaatgcagcttttgatgatcctgaggacgataatgaggatgctttcgaagatgaaacaggtcctctaacacttaatgcattcgacctaatcattctttcgcaaggattgaatcttgcagcgctctttgaccgcagacaggactgtgacaagcttcaaaatagattcttatcacgcaatccagcaaaggttatcttgtcaagcatggaggttgttgcgcaatcaatgggatttaagacacacattcgcaattataagatgagggtggaaggtctaaatgccgacaagactagtcatctctcagttatggttgaagttttcgaagttgctccatcaatcttcatggtagaactacaaagagcagcaggagatacttcagagtataacacgttcgtaaataactactgcggcaaattagatgatatcatctggaaatttccaactgagaagggaaaatcaaggataccccggttatcaaagtctcattcataa

SEQ ID NO: 2318 - protein, 484 aa, Zea mays
MDCLQSSSPAPRSGYSTGLATLSPSIEGGGAAEMVGGGGGGPLRRVGKYEVGRTIGEGTFAKVKFAQNTETGESVAMKVLDRSSILKNKMAEQIKREISIMKLVRHPNVVRLHEVLASRKKIFIILEFITGGELFDKIIRHGRLSEADARRYFQQLIDGVDFCHKKGVYHRDLKPENLLLDSQGNLKISDFGLSAWPAQGSFLLRTTCGTPNYVAPEVLSHKGYNGALADTWSCGVILYVLLAGYLPFDEVDLTTLYGKIESAEYSFPAWFSGGAKSLIRRILDPNPETRIRIEEIRSDEWFQKNYEPIKEIENEEVNLDDVNAAFDDPEDDNEDAFEDETGPLTLNAFDLIILSQGLNLAALFDRRQDCDKLQNRFLSRNPAKVILSSMEVVAQSMGFKTHIRNYKMRVEGLNADKTSHLSVMVEVFEVAPSIFMVELQRAAGDTSEYNTFVNNYCGKLDDIIWKFPTEKGKSRIPRLSKSHS

SEQ ID NO: 2319 - DNA, 1356 bp, Zea mays
  CDS (1)..(1356)
atggcagagcataaagggaacgttctcttgcacaagtatgagatggggaaattgcttggccaaggcacctttgccaaggtttaccatgctcgtaacacggcgacttcggaaagtgtcgcgatcaaagtgattgataaggagaaggttatgaaggttggtctcattgatcaaatccagcgagaaatttctgtgatgaagcttgttaggcatccaaacatcgtacagctctatgaggtcatggccaccaaaaccaaaatatactttgtgctggaacatgttaaaggtggagagctgttcaacaagattcagcgaggaaggctcaaggaagacgcagcgaggaagtacttccaacagctgatctgtgcggtggacttctgtcacagcaggggtgtctatcatcgagatttgaagccagaaaatcttttgctcgatgagaatagcaacctgaaggtatcagattttggtctaagcgcacttgctgaatgccatagacaagacggcctgctccacacgacttgtggcacgcctgcttatgttgccccagaggtgattaacagaaagggttatgatggtgcaaaggctgacatatggtcttgtggggtcatcctatttgtgctattggctggttatcttccgttccatgataagaacttgatggacatgtataagaagattgagaaagctgacttcaaatgtccaagttggttttctaccgatgttcggaggcttttgcaaaggattcttgatcctaaccctagtagaaggatctcggtggaaaaaatcatggagaacccatggtttaggaagggtttaggtgcaaagctacttaggtacgatttacagaataagaatgcccctcatgtggacaagaatgcagattttgattcactgagcaccaacgtaacaactgagagcaagcaacatgaagaaaagaagcctaccaacatgaatgcatttgatataatatctctatcaactggcttggacctctctggtttatttgaagaatctaacaagaagagagaatccaaattcacatctaccaacacaagctcgacaatcatatcgaagatcgaagatattgcaaagaatttgcggttgaatttgacaaagaaggatggtggtttgttaaagatggaagcttcaaagcccggaaggaaaggggtaatgggtatcgatgccgaagtatttgaggttagccctaactttcatcttgtggagataaagaagacgaatggcgacactctagagtatcaaaaggtcctgaaccaagaaatgaggcccgcactcaaggaaatagtgtgggcttggcaaggtgagcaatcaaagcaaaagcaggaacaacagtcgtgttaa

SEQ ID NO: 2320 - protein, 451 aa, Zea mays
MAEHKGNVLLHKYEMGKLLGQGTFAKVYHARNTATSESVAIKVIDKEKVMKVGLIDQIQREISVMKLVRHPNIVQLYEVMATKTKIYFVLEHVKGGELFNKIQRGRLKEDAARKYFQQLICAVDFCHSRGVYHRDLKPENLLLDENSNLKVSDFGLSALAECHRQDGLLHTTCGTPAYVAPEVINRKGYDGAKADIWSCGVILFVLLAGYLPFHDKNLMDMYKKIEKADFKCPSWFSTDVRRLLQRILDPNPSRRISVEKIMENPWFRKGLGAKLLRYDLQNKNAPHVDKNADFDSLSTNVTTESKQHEEKKPTNMNAFDIISLSTGLDLSGLFEESNKKRESKFTSTNTSSTIISKIEDIAKNLRLNLTKKDGGLLKMEASKPGRKGVMGIDAEVFEVSPNFHLVEIKKTNGDTLEYQKVLNQEMRPALKEIVWAWQGEQSKQKQEQQSC

SEQ ID NO: 2321 - DNA, 1350 bp, Zea mays
  CDS (1)..(1350)
atggcgtacgcggcgaggcggaagaagcgggtgggccgctacgaggtgggccggaccatcggccagggcaccttcgccaaggtcaagttcgccgtcgacgccgacaccggcgcgcccgtcgccatgaaggtgctcgacaaggagaccatcttcacccaccgcatgctccaccagatcaaaagggaaatatctatcatgaagatcgtaagacatcccaacatagttaggcttaatgaggtgttggccggcaggacaaagatatacatagtcttggaacttgtcactggaggtgaactgtttgatagaatagtccgccatgggaagctacgtgagaatgaagctaggaagtatttccagcagcttattgatgccattgattattgccacaacaaaggagtttatcatagagatttgaagcctcaaaacttgcttcttgactcacgtggaaacttaaaactttctgattttggacttagcacactgtctcaaaatggagtaggccttgtacacacgacatgtggaacaccaaattatgttgcacctgaggtgctaagtagcaatggatatgacggatctgcagcagacatttggtcgtgtggtgtcattctctatgttttaatggctggttaccttccctttgaggagaacgaccttccacatttgtatgaaaagataactgcagctcagtactcatgcccatattggttctctccaggagccaagtcattgatccagagaatacttgatccaaatccaagaactcgtatcactattgaagaaataagagaagacccatggtttaagaagaactacgtaactattagatgtggtgaagatgaaaatgtcagcctagacgatgttcaagctatttttgacaatattgaggacaagtatgtatcagacgaagtaacgcacaaggatggtggtcctcttatgatgaatgcctttgagatgattgcactatctcaaggtttggatctctcagcattgtttgataggcaacaggagtttgtcaagcgccaaacacgtttcgtctcaagaaagccagccaagactgtagtagctacaattgaggttgttgctgagtcaatgggtctcaaggtccactcccggaactacaaggtgaggcttgaaggtccagcgtcaaacagagcgagccaatttgctgttgttctagaggtctttgaagttgctccttctctgttcatggtcgatgttcgaaaggttgccggtgacactccggaataccacaggttttacgagaacctatgcagcaaactttgcagcataatctggaggccaaccgaagtttctgccaaatctacgccgctgaggacgaccacctgctag

SEQ ID NO: 2322 - protein, 449 aa, Zea mays
MAYAARRKKRVGRYEVGRTIGQGTFAKVKFAVDADTGAPVAMKVLDKETIFTHRMLHQIKREISIMKIVRHPNIVRLNEVLAGRTKIYIVLELVTGGELFDRIVRHGKLRENEARKYFQQLIDAIDYCHNKGVYHRDLKPQNLLLDSRGNLKLSDFGLSTLSQNGVGLVHTTCGTPNYVAPEVLSSNGYDGSAADIWSCGVILYVLMAGYLPFEENDLPHLYEKITAAQYSCPYWFSPGAKSLIQRILDPNPRTRITIEEIREDPWFKKNYVTIRCGEDENVSLDDVQAIFDNIEDKYVSDEVTHKDGGPLMMNAFEMIALSQGLDLSALFDRQQEFVKRQTRFVSRKPAKTVVATIEVVAESMGLKVHSRNYKVRLEGPASNRASQFAVVLEVFEVAPSLFMVDVRKVAGDTPEYHRFYENLCSKLCSIIWRPTEVSAKSTPLRTTTC

SEQ ID NO: 2323 - DNA, 1290 bp, Zea mays
  CDS (1)..(1290)
atggccaagagcaagtcgtccgccaaggccggccccccgctcctcggcaagtacgagctcggccacctcctcggccggggcaacttcgccaaggtataccacgcgcgctgcctcggcggaggcgaccccgtggccgtgaaggtgctggacaaggccgggctggccgccacgggcatggcgtcgcggctcctgcgcgaggtgtccgccatgcgccgcctgagccaccccaacgtgctccgcctccacgaggtgctggcgacgcgctccaaggtgtacctcgtgatggagctggccccgggcggggacctcctgtcccggctggcgtcgctgccgtcccgcaggctccccgagcacgcggcgcggcgcgtgttcctccagctggcgtcggcgctcatctacagccacgcgcgcggggtgttccaccgcgacgtgaagccgcagaacgtgctcctggacgccgagggcaacctcaaggtgtccgacttcggcctcgcggcgctcccggactcggtccgcgacgacgggcgcctgcacacggcgtgcggcaccccggcgttcgcggcgcccgaggtgctccggcgcagggcctacgacggcgccaaggcggacgcgtggtcctgcggggtcatcctcttcgtcctcctcgcgggccacctccccttcgacgacgccaacatcgccgacatgtgccgcagggcgcaccgccgggagtacacggtcccgcggtgggtgtcgcagccggcgcgccgcctcgtggcgcgcctgctggacccgaacccggcgacgcgcctcgccgtcgcggagctcgccggccacccctggttcaagcgctcgctcagcgtggactcccagctcggcggcctcctggacggccaggcggagcgcgagctggcgttccaggccccgccggcgttgaacgccttcgacatcatctccatgtcccccgggctggacctgtcgggcctgttcggcgagggcaggcgccgccgcgagaagcggttcatgacgacggcgtccccggagcgggcggtggagcggctcgcgcaggccggcgcgaggctcggctacttcattgtggggaagaagggggccgagcgcctgccgctgggcgtcctgccgggcctcgtggccatgtcgatggagatgtcggaggtgtcgccggagctgatgctggtggagctgaggctggagggcggccacggcgacgaggacgaggcgttcgggtgggaggagctccgggttgagctgggggacgtggtaacagcatggcacgtgagtgaagaaggttaa

SEQ ID NO: 2324 - protein, 429 aa, Zea mays
MAKSKSSAKAGPPLLGKYELGHLLGRGNFAKVYHARCLGGGDPVAVKVLDKAGLAATGMASRLLREVSAMRRLSHPNVLRLHEVLATRSKVYLVMELAPGGDLLSRLASLPSRRLPEHAARRVFLQLASALIYSHARGVFHRDVKPQNVLLDAEGNLKVSDFGLAALPDSVRDDGRLHTACGTPAFAAPEVLRRRAYDGAKADAWSCGVILFVLLAGHLPFDDANIADMCRRAHRREYTVPRWVSQPARRLVARLLDPNPATRLAVAELAGHPWFKRSLSVDSQLGGLLDGQAERELAFQAPPALNAFDIISMSPGLDLSGLFGEGRRRREKRFMTTASPERAVERLAQAGARLGYFIVGKKGAERLPLGVLPGLVAMSMEMSEVSPELMLVELRLEGGHGDEDEAFGWEELRVELGDVVTAWHVSEEG

SEQ ID NO: 2325 - DNA, 1383 bp, Zea mays
  CDS (1)..(1383)
atggtgaacggcgagcggcgggcggacgcggagtgcacgcgggcgtcgctgctggggaggtatgagatcgggcggaccctcggcgagggcaacttcggcaaggtgaagtacgcgcgccacatcgccagcggcggccacttcgccatcaagatcctcgaccgcagcaagatcctctccctccgcatcgacgaccagatcaggagggagatcgggacgctcaagctgctcaagcacccgaatgtcgtccgcttgcacgaggttgctgccagtaaaacgaagatctacatggtgcttgagtttgtcaacggcggcgagctcttcgacaagatcgctatcaaggggaaactgtccgaacacgagggcaggaggctcttccagcagctaatcgacggcgtcagctattgccatgacagaggtgtctaccaccgagacctcaagccagagaatgtccttgttgatcggaagggcaccatcaagatctctgacttcggcctcagcgctctacctcaacatctcgggagtgacggacttctgcacacaacatgtggcagccccaactacatagctcctgaggttctgcaaaacagaggctatgacggctccttgtcagatctctggtcgtgtggggtgatcctctacgtgatgcttgttggctgccttcccttcgacgacaggaacctcgtcgttctttatcagaagattttcaagggagactgtcagatccccaagtggctttcgcctgccgcgcaggaccttctcaagaggatcctccaaccgaatccgatgaagaggatcaacgtcgcggggatcagggagcacgagtggttcaagaaggactacgtgcctgctgttccgcacgatgatgacgaagacgtccttcctagtccagctccctcgataaagccaatcgatgagccggcgcaagagaagtgttctcctatcaacgcttttcagttgatcgggatggcctcttcccttgacctttctggtttcttcgaggaagaggatgcagcgcaaagaaagattcggttcacttcgacgcacccacccaaggatctatttgacaagatcgagagcgttgtcatggagatgggattcaaagtccataggggggcaggcaagctcaaggtcttgaagaatagcaagtgttccaggaacccgtcatcattgttggtgtgcaccgaggtgtttgagctcggtccatcattatatgtcgtagagcttaggaaatcccacggagactctacgttgtatagacagctgtgcgaaaggctctccgatgagctaggtgcctgcaagacagaccagatcgcgaggactgaatcatcgagtgacgacctctcgagcgtcgatggcgaagcgttccctctatctgggttctga

SEQ ID NO: 2326 - protein, 460 aa, Zea mays
MVNGERRADAECTRASLLGRYEIGRTLGEGNFGKVKYARHIASGGHFAIKILDRSKILSLRIDDQIRREIGTLKLLKHPNVVRLHEVAASKTKIYMVLEFVNGGELFDKIAIKGKLSEHEGRRLFQQLIDGVSYCHDRGVYHRDLKPENVLVDRKGTIKISDFGLSALPQHLGSDGLLHTTCGSPNYIAPEVLQNRGYDGSLSDLWSCGVILYVMLVGCLPFDDRNLVVLYQKIFKGDCQIPKWLSPAAQDLLKRILQPNPMKRINVAGIREHEWFKKDYVPAVPHDDDEDVLPSPAPSIKPIDEPAQEKCSPINAFQLIGMASSLDLSGFFEEEDAAQRKIRFTSTHPPKDLFDKIESVVMEMGFKVHRGAGKLKVLKNSKCSRNPSSLLVCTEVFELGPSLYVVELRKSHGDSTLYRQLCERLSDELGACKTDQIARTESSSDDLSSVDGEAFPLSGF

SEQ ID NO: 2327 - DNA, 1350 bp, Zea mays
  CDS (1)..(1350)
atgtatcgggctaagagggctgcattgtcaccgaaggtgaagcgccgcgtcggcaagtacgagctcgggcgcaccattggggaagggaccttcgccaaggtccggtttgcgaagaacaccgaaaacggggaacctgttgctatcaaaatccttgacaaggagaaggttaagaggcacagattggttgagcagattaagcgtgaaatttgtatcatgaaattagtaaggcaccctaatgttgttcgactgtttgaggtgatgggaagtaaagcaagaattttcatcgttctggaatatgttaccggcggagagctttttgaaatcattgctactaatggaaggttgaaggaagacgaagcacgtaaatacttccagcaactgattaatgctgttgattactgccacagtaggggagtgtatcacagagacttgaagctcgagaatttgctgcttgatgctgcaggaaatctcaaagtttctgactttggtttaagtgctttaaccgagcaagtgaaggctgatggtctgcttcatacaacatgtggaacccccaattatgttgcccctgaggtgatcgaggatggaggctatgatggtgcaactgcagatatttggtcttgcggagtaatcctctttgttcttcttgctggatatttacctttcgaggatgacaacatcatcgccctatacaagaagatttcagaagctcagtttagctgcccctcttggttttcagctggggccaagaacatgattaccagaattcttgatcccaatcctacaactagaatcacgatttctcagatactggagcatccttggttcaaaaaggggtacaagcctcctgtttttgacgagaaatatcaaactagcttggatgacgtggatgctgcttttggagattcagaagaccggcatgtgaaagaggaaactgaagatcagccaacctcaatgaatgcattcgaactgatttcactaaaccaggcactgaatctggagaatttgtttgaagcaaaggaggagtataaaagagagacaagattcacctcacagtgccccccgaaagagataatcacaaagatcgaagaagctgcaaagccgcttggctttgatgttcaaaagaaaaaatacaagatgcggatggagaacccgaaagcaggtagaaagggcaatctgaatgttgcaactgaggtcttccaaatagccccatccctgcatgtagtcgagctcaagaaggcgaagggggacactctggagttccaaaagttctacagaagcctgtcgacccagctgaaggatgttgtgtggaagtgcgacggcgaggtggacggcaacagcgcggcagcatga

SEQ ID NO: 2328 - protein, 449 aa, Zea mays
MYRAKRAALSPKVKRRVGKYELGRTIGEGTFAKVRFAKNTENGEPVAIKILDKEKVKRHRLVEQIKREICIMKLVRHPNVVRLFEVMGSKARIFIVLEYVTGGELFEIIATNGRLKEDEARKYFQQLINAVDYCHSRGVYHRDLKLENLLLDAAGNLKVSDFGLSALTEQVKADGLLHTTCGTPNYVAPEVIEDGGYDGATADIWSCGVILFVLLAGYLPFEDDNIIALYKKISEAQFSCPSWFSAGAKNMITRILDPNPTTRITISQILEHPWFKKGYKPPVFDEKYQTSLDDVDAAFGDSEDRHVKEETEDQPTSMNAFELISLNQALNLENLFEAKEEYKRETRFTSQCPPKEIITKIEEAAKPLGFDVQKKKYKMRMENPKAGRKGNLNVATEVFQIAPSLHVVELKKAKGDTLEFQKFYRSLSTQLKDVVWKCDGEVDGNSAAA

SEQ ID NO: 2329 - DNA, 1395 bp, Zea mays
  CDS (1)..(1395)
atggtgaacggcgagcagcgggcggacgcggagtgcacgcgggcgtcgctgctggggaggtatgagatcgggcggaccctcggcgagggcaacttcggcaaggtgaagtacgcgcgccacatcgccaccggcggccacttcgccatcaagatcctcgaccgcagcaagatcctctccctccgcatcgacgaccagatcaggagggagatcgggacgctcaagctgctcaagcacccgaatgtcgtccgcttgcacgaggttgctgccagtaaaacgaagatctacatggtgcttgagtttgtgaacggcggcgagctcttcgacaagatcgctatcaaggggaaactgtccgaacacgagggcaggaggctcttccagcagctaatcgacggcgtcagctattgccatgacagaggtgtctaccaccgagacctcaagccagagaatgtccttgttgatcggaagggcaccatcaagatctctgacttcggcctcagcgctctacctcaacatctcgggagtgacggacttctgcacacaacatgtggcagccccaactacatagctcctgaggttctgcaaaacagaggctatgacggctccttgtcagatctctggtcttgtggggtcatcctctacgtgatgcttgttggctgccttcccttcgacgacaggaacctcgtcgttctttatcagaagattttcaagggagactgccagatccccaagtggctttcgcctgccgcgcaggaccttctcaagaggatcctccaaccgaatccgatgaagaggatcaacgtcgcggggatcagggagcacgagtggttcaagaaggactacgtgcctgctgttccgcacgatgatgacgaagacgtccttcctagtccagctccctcgataaaggagccaatcgatgagccggcgcaggagaagtgtactcctatcaacgcttttcagttgatcgggatggcctcttcccttgatctttctggtttcttcgaggaagaggatgcagcgcaaagaaagattcggttcacttcgacgcacccacccaaggatctatttgacaagatcgagagcgttgtcatggagatgggattcaaagtccataggggggcaggcaagctcaaggtcttgaagaatagcaagtgttccaggaactccaggaacccgtcatcattgttggtgtgcaccgaggtgtttgagctcggtccatcattatatgtcgtagagcttaggaaatcccacggagactctacgttgtatagacagctgtgcgaaaggctctccgatgagctaggtgcctgcaagacagaccagatcgcgaggactgaatcatcgagtgacgatctttcgagcctcgatggcgaagcgttccctctatctgggttctga

SEQ ID NO: 2330 - protein, 464 aa, Zea mays
MVNGEQRADAECTRASLLGRYEIGRTLGEGNFGKVKYARHIATGGHFAIKILDRSKILSLRIDDQIRREIGTLKLLKHPNVVRLHEVAASKTKIYMVLEFVNGGELFDKIAIKGKLSEHEGRRLFQQLIDGVSYCHDRGVYHRDLKPENVLVDRKGTIKISDFGLSALPQHLGSDGLLHTTCGSPNYIAPEVLQNRGYDGSLSDLWSCGVILYVMLVGCLPFDDRNLVVLYQKIFKGDCQIPKWLSPAAQDLLKRILQPNPMKRINVAGIREHEWFKKDYVPAVPHDDDEDVLPSPAPSIKEPIDEPAQEKCTPINAFQLIGMASSLDLSGFFEEEDAAQRKIRFTSTHPPKDLFDKIESVVMEMGFKVHRGAGKLKVLKNSKCSRNSRNPSSLLVCTEVFELGPSLYVVELRKSHGDSTLYRQLCERLSDELGACKTDQIARTESSSDDLSSLDGEAFPLSGF

SEQ ID NO: 2331 - DNA, 1356 bp, Zea mays
  CDS (1)..(1356)
atggtgggcggtggcggcggcgggccgctgcggcgggtgggcaagtacgaggtgggacgcaccatcggggaaggcaccttcgccaaggtcaagttcgcgcagaacaccgagaccggggagagcgtcgccatgaaggtgctcgaccgctcctccatcctcaagaacaagatggccgaacagattaagagagaaatatccataatgaagcttgtcaggcatcccaatgtcgttaggctacacgaggttttggcaagccggaagaagatatttataattctggagttcatcactggcggcgagctattcgataaaattattcgtcatgggagactcagtgaagcagatgcccgcagatactttcagcagcttattgatggtgttgatttttgtcacaagaaaggagtctaccatcgagacttaaagcctgaaaatctcctccttgattcccaaggcaatcttaaaatttcagactttggactgagtgcatggcctgctcagggatctttccttctacgtacaacctgtgggactccgaactatgttgccccagaggttctcagtcataagggatataatggcgcacttgctgatacatggtcatgtggagtaattttatatgtattgttagcaggttatcttccatttgatgaagtggacctgactaccctttatggaaagattgagagtgcagaatattcattcccagcctggttttcaggtggtgcaaaatcactgattcgtagaattcttgacccaaatccagagacacgaatcaggatagaagagatcagaagcgatgaatggtttcagaaaaattatgaacctatcaaagaaatagaaaatgaggaagtcaatctcgatgatgtcaatgcagcttttgatgatcctgaggacgacaatgaggatgctttcgaagatgaaacaggtcctctaacacttaatgcattcgacctaatcattctttcgcaaggattgaatcttgcagcgctctttgaccgcagacaggactgtgacaagcttcaaaatagattcttatcacgcaatccagcaaaggttatcttgtcaagcatggaggttgttgcgcaatcaatgggatttaagacacacattcgcaattataagatgagggtggaaggtctaaatgccgacaagactagtcatctctcagttatggttgaagttttcgaagttgctccatcaatcttcatggtagaactacaaagagcagcaggagatacttcagagtataacacgttcgtaaataactactgcggcaaattagatgatatcatctggaaatttccaactgagaagggaaaatcaaggataccccggttatcaaagtctcattcataa

SEQ ID NO: 2332 - protein, 451 aa, Zea mays
MVGGGGGGPLRRVGKYEVGRTIGEGTFAKVKFAQNTETGESVAMKVLDRSSILKNKMAEQIKREISIMKLVRHPNVVRLHEVLASRKKIFIILEFITGGELFDKIIRHGRLSEADARRYFQQLIDGVDFCHKKGVYHRDLKPENLLLDSQGNLKISDFGLSAWPAQGSFLLRTTCGTPNYVAPEVLSHKGYNGALADTWSCGVILYVLLAGYLPFDEVDLTTLYGKIESAEYSFPAWFSGGAKSLIRRILDPNPETRIRIEEIRSDEWFQKNYEPIKEIENEEVNLDDVNAAFDDPEDDNEDAFEDETGPLTLNAFDLIILSQGLNLAALFDRRQDCDKLQNRFLSRNPAKVILSSMEVVAQSMGFKTHIRNYKMRVEGLNADKTSHLSVMVEVFEVAPSIFMVELQRAAGDTSEYNTFVNNYCGKLDDIIWKFPTEKGKSRIPRLSKSHS

SEQ ID NO: 2333 - DNA, 1557 bp, Zea mays
  CDS (1)..(1557)
atggccgccatcacgccgccgacgcagtcggagccgtcgccgcagacggggcgcccggcctcgtctgccgccgccgcggccaagcgtggagggggcggggctggtgccgccggcgggccgctgatggggaagtacgagctggggcgcctcctggggcacggcaccttcgcgaaggtgtaccacgcgcggcacgtcgacacgggggacaacgttgccatcaaggtgctcgacaaggagaaggccgtgaagagcgggctcgtcccgcacatcaagcgcgagatcgctgtgctacgccgcgtgcgccacccgaacatcgtgcacctgttcgaggttatggccacaaagactaagatctacttcgtcatggagctcgtccgcggcggcgagctcttctcccgcgtctccaagggccgactcagggaggacaccgcgcgccgctacttccagcagctcgtctccgccgtggggttctgccacgcccgcggcgtcttccaccgcgacctgaagcccgagaatctactcgtcgacgagcaggggaacctcaaggtatcggattttgggctctccgccgtcgccgagcagttccgtcccgacggcctgctccacaccttctgcggcacgccggcctatgtggcccccgaagtgctcggccgccgcgggtacgacggcgccaaggcagacgtgtggtcgtgcggtgtcatcctctttgtgctcatggccggatatctccctttccatgacaaaaacatcatggccatgtacaagaagatttacaagggcgagttccgctgtgcgaggtggttctccaaagaccttaccagcttgctgatgcgcattcttcacactaatcccaacactcggatcactttgccggagatcatggagtcccgctggttcaagaaaggattcaagcctgtcaagttctatatcgaggatgaccagctgcataacgttatagatgacgaagatggcctgttagatatgggacctgctggtcctgttcctccaccattgccacctccaccgccacctctacctccaccaaaggttgatggtgatgaatcagggtctgactcagactcgtcgatctcatcctgccctgcttcaatgttatctgatgagagccaaaggccccgtggctctctaccacgtccagcaagtcttaatgcctttgatatcatatcattttcaaggggatttaacttatcagggttatttgaggagaaaggggatgaagtgaggttcatctcggctgagcccatgtcagatatcataaccaaattggaggacatagcgaagctgaagagcttcaagttgcggaggaaggactggcgcatctgcctggagggtacaagggaaggagttaaggggccattaacaattggcgcggagatatttgaactcacacctccccttgtaatggtggaggtaaaaaagaaggcaggggataatgaagagtacgagaacttctgtgacaaggaattgaagccagggatgcagcaccttgtccaccatatggtccgagctccaagtatgctgcttactgatgccaagtag

SEQ ID NO: 2334 - protein, 518 aa, Zea mays
MAAITPPTQSEPSPQTGRPASSAAAAAKRGGGGAGAAGGPLMGKYELGRLLGHGTFAKVYHARHVDTGDNVAIKVLDKEKAVKSGLVPHIKREIAVLRRVRHPNIVHLFEVMATKTKIYFVMELVRGGELFSRVSKGRLREDTARRYFQQLVSAVGFCHARGVFHRDLKPENLLVDEQGNLKVSDFGLSAVAEQFRPDGLLHTFCGTPAYVAPEVLGRRGYDGAKADVWSCGVILFVLMAGYLPFHDKNIMAMYKKIYKGEFRCARWFSKDLTSLLMRILHTNPNTRITLPEIMESRWFKKGFKPVKFYIEDDQLHNVIDDEDGLLDMGPAGPVPPPLPPPPPPLPPPKVDGDESGSDSDSSISSCPASMLSDESQRPRGSLPRPASLNAFDIISFSRGFNLSGLFEEKGDEVRFISAEPMSDIITKLEDIAKLKSFKLRRKDWRICLEGTREGVKGPLTIGAEIFELTPPLVMVEVKKKAGDNEEYENFCDKELKPGMQHLVHHMVRAPSMLLTDAK

SEQ ID NO: 2335 - DNA, 1380 bp, Zea mays
  CDS (1)..(1380)
atgatggaagcagagaagaatggaaacattcttatgcaaaagtatgaggttggaaaattattggggcaaggaacatttgccaaggtataccatgctaggaacatagagacctctcaaagtgttgctatcaaggttattgacaaggacaaaatttttaaggttgggctaatggagcagatcaaacgagagatatcggtgatgaaactggtgaggcacccaaacatcgtgcaactttatgaggtcatggctactaaatcaaagatatactttgtgcttgaatatgtcaagggtggtgaattgtttaacaaaattgctaaaggaaagttaagagaagatgcttccaggaaatacttccagcaattggttagtgcggttgatttttgtcatagtaggggtgtgtatcatcgtgatttgaagccagaaaacctacttgttgatgagaatgggaatctaaaaatttcagattttggattgagtgctcttgctgaatcaagacgccaagatggtcttctacacacaacttgtggtactccagcatatgtggcgccagaggttattagccgaaaaggatatgatggcgcaaaggttgacacatggtcctgtggtgtgatcctatttgttcttatggctggatatcttcctttccaagattcaaatttgatggagatgtacagaaagattggaaaagcagatttcaaatgcccaccatggtttccatctgatgtacgcaagttagtgtcaagaattcttgatccaaatccaaggactagaatgccaattacaaaaatagtggaatgcttttggttcaaaaagggcattgacaacaagctaatccgaaagaatatcgagatgaaagggaaagtttcagctctcactgatgttaatgtagttttctcatccacgggtattggtagcaacaataacaaattggttgatgtggaacaagatgtagcaaagattaccaacctgaatgcttttgacattatttccctttcagaaggctttaatctttcaggcttatttgaagagtccgagaaaagaaaagaggcacggttcacatctagtcaatcagcttcaactattatctcaaaactagaagatgctgccacctgttcaaagatgacaataaagaaaaaagaaggtggtgtgctaaaaatggaaggtgcaaatgaaggaaggaaaggtgtactatctattgatgctgagatctttgaagttactcctgctttccatcttgtagagattaagaaaaataatggggatacactagaatatgaaaatttgtttaagcaggacatgaaaccagcgcttaaagacattgtttgggcatggcaaggtgagagtaaggaccaacaggccaaggatcacaatcaatcataa

SEQ ID NO: 2336 - protein, 459 aa, Zea mays
MMEAEKNGNILMQKYEVGKLLGQGTFAKVYHARNIETSQSVAIKVIDKDKIFKVGLMEQIKREISVMKLVRHPNIVQLYEVMATKSKIYFVLEYVKGGELFNKIAKGKLREDASRKYFQQLVSAVDFCHSRGVYHRDLKPENLLVDENGNLKISDFGLSALAESRRQDGLLHTTCGTPAYVAPEVISRKGYDGAKVDTWSCGVILFVLMAGYLPFQDSNLMEMYRKIGKADFKCPPWFPSDVRKLVSRILDPNPRTRMPITKIVECFWFKKGIDNKLIRKNIEMKGKVSALTDVNVVFSSTGIGSNNNKLVDVEQDVAKITNLNAFDIISLSEGFNLSGLFEESEKRKEARFTSSQSASTIISKLEDAATCSKMTIKKKEGGVLKMEGANEGRKGVLSIDAEIFEVTPAFHLVEIKKNNGDTLEYENLFKQDMKPALKDIVWAWQGESKDQQAKDHNQS

SEQ ID NO: 2337 - DNA, 1317 bp, Zea mays
  CDS (1)..(1317)
atggctgagaaagagaatattctaatgcagagatatgagatgggaaagttacttggaaaagggagttttgccaaagtttaccatgctcgcaatgttaagacttcagaaagcgttgctatcaaggtgattgacaaagataagatcaagaagtgtggtcttatggatcaaataattcaagagatttcagtgatgaagttggtaaaacatccaaacattgtccaattgtatgaggttatggctaccaaaaccaagatatattttgtgatagagtatgtcaagggaggagagttgttcaaaaaggttcaacgcggaaggttaaaagaagatgttgctcgtgcatatttccaacaattgatcagtgctgttgacttctgccatactagacaagtttatcatagagatctaaagcccgaaaatcttcttcttgacggaagtcgcaacttaaagatttcagactttggtttgagtgcacttccaaactgcaagagaaaagatgggttactccacacaatttgtgggactcctgcatatgttgctccagaagtaattagtcaaaaaggatatgatggtgcaaaagctgacatatgggcttgtggagtgatcctctatgtgttgttggcgggctatcttcctttccaagacaagaacatgatggacatgtataagaaaatttgcaaagcagaactcaaatggccaagttggttttcttcagatgttcgaaagcttttgcggcgcatccttcatccaaaccctaatagacgaatatctattgaagaaataaggacacatccttggtttagaattggtcttgatgcaagattgtttgattctacaacgagagattatgtgcctagtgacatggatttggctttgaattccttaaatagcaatatggtcgagtgtaattcagcggcagagaaactgactattttgaatgcttttgatatcatctccctgtctaacgggtttgatctctctggtatatttgagaactcaaacaaggagtctaaatttatgtctaccaacacagctatgacaattatcacaaagctaatggaagttgcaaagagcctggatctgaaggttataacaaaaactggtggattgttgaatatggaagctgccaaatcaggaataaaaggtgtgatgtctataaatgctgagatatttcaaatcacaccaaattatcatctcgtggagatcaagaaaatcaatggtgacatccttgagtatcataactttatgaaccaaagcatgagaccggcactagaagatattgtgtgggcatggcatggtgaacaacctgacgagaagtag

SEQ ID NO: 2338 - protein, 438 aa, Zea mays
MAEKENILMQRYEMGKLLGKGSFAKVYHARNVKTSESVAIKVIDKDKIKKCGLMDQIIQEISVMKLVKHPNIVQLYEVMATKTKIYFVIEYVKGGELFKKVQRGRLKEDVARAYFQQLISAVDFCHTRQVYHRDLKPENLLLDGSRNLKISDFGLSALPNCKRKDGLLHTICGTPAYVAPEVISQKGYDGAKADIWACGVILYVLLAGYLPFQDKNMMDMYKKICKAELKWPSWFSSDVRKLLRRILHPNPNRRISIEEIRTHPWFRIGLDARLFDSTTRDYVPSDMDLALNSLNSNMVECNSAAEKLTILNAFDIISLSNGFDLSGIFENSNKESKFMSTNTAMTIITKLMEVAKSLDLKVITKTGGLLNMEAAKSGIKGVMSINAEIFQITPNYHLVEIKKINGDILEYHNFMNQSMRPALEDIVWAWHGEQPDEK

SEQ ID NO: 2339 - DNA, 1350 bp, Zea mays
  CDS (1)..(1350)
atgagcgcatccgtgggccggacccgcgtggggcggtacgagctcggccggaccctcggcgaaggcaccttcgccaaggtcaagttcgccaggaacgtcgagaccggagagaatgtcgccatcaagatcctcgacaaggagaaggtcctcaagcacaagatgatcgcccagatcaagcgagagatctcgaccatgaagctcatcaggcaccccaacgtcatccggatgtatgaggtgatggccagcaagacaaagatatacatcgtcatggagctcgtcaccggtggcgaactcttcgacaaaatcgcctcgcgtggaaggctgaaagaggatgacgcaaggaagtacttccagcagctgatcaacgctgtcgattactgccatagccgaggcgtctaccaccgcgatctcaagcctgaaaatctcctgcttgatgctagcggcacgctcaaggtttcggattttggactgagcgcactatctcaacaagtccgagaggatggtctgctgcacacaacctgtggaactcccaactatgttgctcccgaggttataaacaataagggctatgatggagctaaggctgatctgtggtcatgtggagtgattctctttgtcctcatggcggggtacctcccatttgaagattcgaacctgatgtcgctctacaagaagatcttcaaagcggatttcagttgcccgtcctggttctccacaagcgcaaagaagctcatcaagaagatacttgaacctaatgctaacaatagaataactattgcagagctcattaacaacgagtggttcaagaaggggtatcagcctcccagatttgaaacagcagatgttaatctggatgacgtgaactccatcttcgatgaatccggggagccagcacagcttgttgttgagaggagagaagaaagaccatcagtgatgaacgctttcgagttaatctctacgtctcagggcctcaatctcgggacgctcttcgagaagcaaacgggttctgttaagcgagaaacaaggtttgcgtcaaggcttcctgcaaatgagatactgtcgaagatcgaagcagcagcaggacccatgggcttcaacgttcagaagcgcaactataagctgaagctgcaaggggagaaccctggaaggaaaggtcagctggccatcgcaacagaggttttcgaggtcacgccttccctgtacatggttgagctgcgcaagtccaacggcgacacccttgaattccacaagttctaccacaacatctcaaatggactgaaggacgtgatgtggaagccggagagcggcatcgtggaaggcgacgaggcgcggcaaaggaggtccccgtga

SEQ ID NO: 2340 - protein, 449 aa, Zea mays
MSASVGRTRVGRYELGRTLGEGTFAKVKFARNVETGENVAIKILDKEKVLKHKMIAQIKREISTMKLIRHPNVIRMYEVMASKTKIYIVMELVTGGELFDKIASRGRLKEDDARKYFQQLINAVDYCHSRGVYHRDLKPENLLLDASGTLKVSDFGLSALSQQVREDGLLHTTCGTPNYVAPEVINNKGYDGAKADLWSCGVILFVLMAGYLPFEDSNLMSLYKKIFKADFSCPSWFSTSAKKLIKKILEPNANNRITIAELINNEWFKKGYQPPRFETADVNLDDVNSIFDESGEPAQLVVERREERPSVMNAFELISTSQGLNLGTLFEKQTGSVKRETRFASRLPANEILSKIEAAAGPMGFNVQKRNYKLKLQGENPGRKGQLAIATEVFEVTPSLYMVELRKSNGDTLEFHKFYHNISNGLKDVMWKPESGIVEGDEARQRRSP

SEQ ID NO: 2341 - DNA, 1332 bp, Zea mays
  CDS (1)..(1332)
atggagtcgacaggaaagattttgatggagcggtatgaggtggggaggctactggggaaaggcacatttggcaaggtgcactacgcaaagaatcttgagtccaacgagagtgttgccattaagatgatggacaaggacaaagtgctcaaggccgggctttcggagcagataaggcgggagatcacaacgatgcggttggtggctcataagaacattgttgagcttcatgaggtcatggcgacgcggaacaacatctactttgtcatggagtatgtgaaaggcggagagctctttgacaagattggcaagagtggcaagctcacagaggccgctgcacacaagtacttccagcagctcattggtgcggtggattactgccacagccgaggtgtgtatcaccgggacttgaagcctgagaaccttctgttggatgagaatgagaacctcaaggtctcagattttggactgagtgcactttcagaatccaaggggcaagatggcttactccacaccacctgtgggactccagcatatgtagccccagaggtgatcagcaagacaggctatgatggggcaaagtcagacatctggtcctgtggtgttgttctatttgtactagttgctggttatcttcctttcagggccccaaacatgatggagatgtatcgcaagatacagaatggtgatttcaggtgccctagttggttttcacacaaactcaagaagctcttgtacaagatcctcgaccccagcccagacacaagaatttcagtgcagaagataaaagagtctacctggtttcgaaaaggccctgtggagacccgtacagtaaaggagaaaattctgagtgagaatgacaccacaaatgctgctccagccgttgctatgaggcgcaagaagaatgttcatgaagacgtgaagcccccgactgtcacaagcttaaacgcctttgaaattatatctttctccacaggattggacctctctggcctatttatcagaaaggagtgtaagaaggagacgcggttcacttctgataagggtgccgtgtccatcatctcgaagcttgaagatgttgcaaaagcactgaatctcagggtaaggaagaaggacaatggtgttgtcaagattcaggggaggaaggtggggaggaagggtgtcctggagttcgacactgaaatatttgagatcacggcatcctaccacctcatcgagatgaaacaaacgggcggtgattcacttgagtacaagaaactgttggaagaggacatccggccagcactgaaggacatagtctgggcctggcatggagatgaccagcaacaaaagtag

SEQ ID NO: 2342 - protein, 443 aa, Zea mays
MESTGKILMERYEVGRLLGKGTFGKVHYAKNLESNESVAIKMMDKDKVLKAGLSEQIRREITTMRLVAHKNIVELHEVMATRNNIYFVMEYVKGGELFDKIGKSGKLTEAAAHKYFQQLIGAVDYCHSRGVYHRDLKPENLLLDENENLKVSDFGLSALSESKGQDGLLHTTCGTPAYVAPEVISKTGYDGAKSDIWSCGVVLFVLVAGYLPFRAPNMMEMYRKIQNGDFRCPSWFSHKLKKLLYKILDPSPDTRISVQKIKESTWFRKGPVETRTVKEKILSENDTTNAAPAVAMRRKKNVHEDVKPPTVTSLNAFEIISFSTGLDLSGLFIRKECKKETRFTSDKGAVSIISKLEDVAKALNLRVRKKDNGVVKIQGRKVGRKGVLEFDTEIFEITASYHLIEMKQTGGDSLEYKKLLEEDIRPALKDIVWAWHGDDQQQK

SEQ ID NO: 2343 - DNA, 1383 bp, Zea mays
  CDS (1)..(1383)
atggtgaacggcgagcggcgggcggacgcggagtgcacgcgggcgtcgctgctggggaggtatgagatcgggcggaccctcggcgagggcaacttcggcaaggtgaagtacgcgcgccacatcgccagcggcggccacttcgccatcaagatcctcgaccgcagcaagatcctctccctccgcatcgacgaccagatcaggagggagatcgggacgctcaagctgctcaagcacccgaatgtcgtccgcttgcacgaggttgctgccagtaaaacgaagatctacatggtgcttgagtttgtcaacggcggcgagctcttcgacaagatcgctatcaaggggaaactgtccgaacacgagggcaggaggctcttccagcagctaatcgacggcgtcagctattgccatgacagaggtgtctaccaccgagacctcaagccagagaatgtccttgttgatcggaagggcaccatcaagatctctgacttcggcctcagcgctctacctcaacatctcgggagtgacggacttctgcacacaacatgtggcagccccaactacatagctcctgaggttctgcaaaacagaggctatgacggctccttgtcagatctctggtcgtgtggggtgatcctctacgtgatgcttgttggctgccttcccttcgacgacaggaacctcgtcgttctttatcagaagattttcaagggagactgtcagatccccaagtggctttcgcctgccgcgcaggaccttctcaagaggatcctccaaccgaatccgatgaagaggatcaacgtcgcggggatcagggagcacgagtggttcaagaaggactacgtgcctgctgttccgcacgatgatgacgaagacgtccttcctagtccagctccctcgataaagccaatcgatgagccggcgcaagagaagtgtactcctatcaacgcttttcagttgatcgggatggcctcttcccttgacctttctggtttcttcgaggaagaggatgcagcgcaaagaaagattcggttcacttcgacgcacccacccaaggatctatttgacaagatcgagagcgttgtcatggagatgggattcaaagtccataggggggcaggcaagctcaaggtcttgaagaatagcaagtgttccaggaacccgtcatcattgttggtgtgcaccgaggtgtttgagctcggtccatcattatatgtcgtagagcttaggaaatcccacggagactctacgttgtatagacagctgtgcgaaaggctctccgatgagctaggtgcctgcaagacagaccagatcgcgaggactgaatcatcgagtgacgacctctcgagcgtcgatggcgaagcgttccctctatctgggttctga

SEQ ID NO: 2344 - protein, 460 aa, Zea mays
MVNGERRADAECTRASLLGRYEIGRTLGEGNFGKVKYARHIASGGHFAIKILDRSKILSLRIDDQIRREIGTLKLLKHPNVVRLHEVAASKTKIYMVLEFVNGGELFDKIAIKGKLSEHEGRRLFQQLIDGVSYCHDRGVYHRDLKPENVLVDRKGTIKISDFGLSALPQHLGSDGLLHTTCGSPNYIAPEVLQNRGYDGSLSDLWSCGVILYVMLVGCLPFDDRNLVVLYQKIFKGDCQIPKWLSPAAQDLLKRILQPNPMKRINVAGIREHEWFKKDYVPAVPHDDDEDVLPSPAPSIKPIDEPAQEKCTPINAFQLIGMASSLDLSGFFEEEDAAQRKIRFTSTHPPKDLFDKIESVVMEMGFKVHRGAGKLKVLKNSKCSRNPSSLLVCTEVFELGPSLYVVELRKSHGDSTLYRQLCERLSDELGACKTDQIARTESSSDDLSSVDGEAFPLSGF

SEQ ID NO: 2345 - DNA, 1323 bp, Zea mays
  CDS (1)..(1323)
atgagtacaaccaaggtgaagagacgtgtgggcaagtatgagctcggccggaccataggcgagggcaccttcgcgaaggtcaggttcgcgagggacacggtcaccggcgaggccgtggccattaagatcctggacaaggagaaggtcctcaggcacaagatggttgagcagatcaagcgggagatctcgacgatgaagctgatcaagcaccctaacgtcgtccgcatatacgaggtgatgggaagtaaaacaaagatctacattgtgttagaattcgctaccggtggcgagctctttgatacaattgttaaccatggtcgaatgagggaagacgaggcaaggaggtacttccaacagttaatcaatgcagttgattattgtcatagcaggggtgtgtaccaccgggatttaaaacctgaaaatttgctgcttgattcatatggtaacctgaaggtctctgactttgggctcagcgcgctatctcagcaaatcaaggatgatggactgctgcacacaacttgtgggactccaaactatgttgcaccagaggtccttgaagatcaaggctacgatggagcaatggctgatctgtggtcatgtggagttatcctgtttgttctgctagcagggtatttgccgtttgaggattctaatctcatgactttgtataagaaaatatcaaatgcagaatttacatttccaccatggacatcttttcctgccaagaggttgttaacaagaatccttgatccaaatccaatgacgagaataacaatcccagaaatattagaggatgagtggttcaaaaagggctacaagcgcccagaatttgatgaacaatatgacaccacattggatgatgtggatgccgtcttcaatgattcagaagagcaccatgtgacagaaaagaaagaagaagaaccagtagctctgaacgcattcgaactgatttcgatgtcagcgggcctaaaccttggaaacttatttgactcagagcaggagttcaaaagagaaacaaggtttacatcaaaatgtccccccaaagaaattgtccgcaagatcgaggaagctgcaaaacctctaggatttgatgttcagaagaaaaattacaagttgaggctcgaaaaggtaaaggcagggaggaagggaaacctcaacgttgctactgagatactgcaagttgcgccctctctccacatggtagaagtccgaaaagcaaagggtgacactctggaatttcataagttctacaagaacctttccaagaccttgaaggacgtcgtctggaaatccgacgatcttcaaacgcaacatgcttcttag

SEQ ID NO: 2346 - protein, 440 aa, Zea mays
MSTTKVKRRVGKYELGRTIGEGTFAKVRFARDTVTGEAVAIKILDKEKVLRHKMVEQIKREISTMKLIKHPNVVRIYEVMGSKTKIYIVLEFATGGELFDTIVNHGRMREDEARRYFQQLINAVDYCHSRGVYHRDLKPENLLLDSYGNLKVSDFGLSALSQQIKDDGLLHTTCGTPNYVAPEVLEDQGYDGAMADLWSCGVILFVLLAGYLPFEDSNLMTLYKKISNAEFTFPPWTSFPAKRLLTRILDPNPMTRITIPEILEDEWFKKGYKRPEFDEQYDTTLDDVDAVFNDSEEHHVTEKKEEEPVALNAFELISMSAGLNLGNLFDSEQEFKRETRFTSKCPPKEIVRKIEEAAKPLGFDVQKKNYKLRLEKVKAGRKGNLNVATEILQVAPSLHMVEVRKAKGDTLEFHKFYKNLSKTLKDVVWKSDDLQTQHAS

SEQ ID NO: 2347 - DNA, 1332 bp, Zea mays
  CDS (1)..(1332)
atgcggcgtgcgtggacgcccgccgacgagcgagcagcgacgacgacgagcgagcaccggcggcggaggcggatggggaagtacgagatggggcggacgctcggggagggccacttcgggaaggtgaggctggcgcgggacgcgggcacgggccggtccttcgccatcaagatcctcgaccggcagcgcatcctcgccatgaagatcgacgagcagatcaagagggagatcgcgacgctgaagctgctcaagcaccccaacgtcgtccgcctgtacgaggtttcagctagcaagaccaagatatacatggtcctcgagtacgtgaacggaggagagctatttgacaaaatcgcactcaagggtaagctgacggagaaggaagggaggaaactgttccagcagctgatagacgccgtgggatactgccacgagaagggggtttgtcacagggacctcaagcctgagaatgtcctcgttgatgcaaagggaaacataaaggtttctgattttggactaagcgcccttccgcaaaaccaacgaaaagatggtttgttgcataccacatgtggcagccctaactacatagccccggaggtccttctgaacaaaggttacgatggctcggtatctgacgtgtggtcctgtggtgttattctatatgtaatgcttacagggagtcttccatttgacgaccaaaatatggttgtcctctatcagaagattctgaaagggaatgctcacattccaaagtggctctctcaaggtgcccaagatctactgcgaaagatcctggatcctaacccgatcacgcgcgtagatgtggatgggataagggcacacgattggttcaagcaaggctacgctccttctgcgccgtttaatgatgacgaagaagatatcaacgtggatgaagaagacagcctaaatatgactgagaatggcattcaagacaagatagcaatcaaccaaatcaatgctttccagctcattgggatgtcctcctgccttgatctatccggattttttgagaaagaggatgcttctgaaaggaaaatcagattcgcatcaaattatcccccagcttacttgtttgagaagatcgagagcattgtcagaaaaatgggtttccaggtacacaagagcaacggcaaggtgtttgagattaatgaatccctttacgttgtcgagctaaaaaagtcatctggagactgctccctgtacagaaagttgtgtgagacgctctcggaggacttgggcacatgcaaaagccagcaatttttaaagcaggattctatcagacaagagataggtagacataacagtagcttttaa

SEQ ID NO: 2348 - protein, 443 aa, Zea mays
MRRAWTPADERAATTTSEHRRRRRMGKYEMGRTLGEGHFGKVRLARDAGTGRSFAIKILDRQRILAMKIDEQIKREIATLKLLKHPNVVRLYEVSASKTKIYMVLEYVNGGELFDKIALKGKLTEKEGRKLFQQLIDAVGYCHEKGVCHRDLKPENVLVDAKGNIKVSDFGLSALPQNQRKDGLLHTTCGSPNYIAPEVLLNKGYDGSVSDVWSCGVILYVMLTGSLPFDDQNMVVLYQKILKGNAHIPKWLSQGAQDLLRKILDPNPITRVDVDGIRAHDWFKQGYAPSAPFNDDEEDINVDEEDSLNMTENGIQDKIAINQINAFQLIGMSSCLDLSGFFEKEDASERKIRFASNYPPAYLFEKIESIVRKMGFQVHKSNGKVFEINESLYVVELKKSSGDCSLYRKLCETLSEDLGTCKSQQFLKQDSIRQEIGRHNSSF

SEQ ID NO: 2349 - DNA, 1338 bp, Zea mays
  CDS (1)..(1338)
atgcggatgggcaagtacgagatggggcggacgctcggggagggccacttcggcaaggtgaggctggcgcggcacgcggacacgggccggcccttcgccatcaagatcctcgaccgccagcgcatcctcgccatgaagatccacgaccagatcaagagggagatcgcgacgctgaagctgctcaagcaccccaacgtcgtccgcctctacgaggtttccgcaagcaagaccaaaatatacatggtgcttgagtacgtcaatggaggagagctgtttgacaagatcgcgttgaagggtaagctgacggagaaggaagggaggaaactgttccagcagctcatagatgccgtgggatactgccacgagaagggggtttatcacagggacctcaagccagagaatgtccttgttgatgcaaaaggaaacataaaagtttctgatttcggattaagtgcccttccacagaaccaacaaaaagatggtttgttgcataccacatgtggcagccctaactacatagcccctgaggtccttctgaacaaaggttatgacggctcgatatctgacgtatggtcctgtggtgttattctatatgtaatgcttacagggaatcttccattcgacgaccaaaatgtggttgtcctttaccagaagattctcaaggggaatgctcacattccaaagtggctctcccaaggtgcccaagatatactgagaaaaatcctggatcctaacccggttacgcgcatagatgtggatggaataagggcacatgattggttcaagcaaggctatgctcctgctatgccatttagcgatgatgaagaagatatcagcatggatgaagacagcctaaacatcaccgagcataatgacatccaagacaagatagcaatcaaccaaatcaatgctttccagctcattggaatgtcctcctgccttgatctatccggattttttgagaaagaggatgtttctgaaaggaaaatcagatttgcatcaaattattccccagcttatttatttgagaagattgagagcattgtcagaaaaatggggttccaggtacataagagcaacggcaagctaaaagtgatccaagactgcaagggactagcaaattcaagagggcaagagtcattattaatttctgctgaggtgtttgagatcaatgaatctctttatgttgtcgaactaaagaagtcatctggagactgctccctgtacagaaagttgtgtgagacgctctcagaggacttgggcacatgcaaaagccagcaatttttaaagcaggactctatcagacaagatataggtagatataatagtagcttttaa

SEQ ID NO: 2350 - protein, 445 aa, Zea mays
MRMGKYEMGRTLGEGHFGKVRLARHADTGRPFAIKILDRQRILAMKIHDQIKREIATLKLLKHPNVVRLYEVSASKTKIYMVLEYVNGGELFDKIALKGKLTEKEGRKLFQQLIDAVGYCHEKGVYHRDLKPENVLVDAKGNIKVSDFGLSALPQNQQKDGLLHTTCGSPNYIAPEVLLNKGYDGSISDVWSCGVILYVMLTGNLPFDDQNVVVLYQKILKGNAHIPKWLSQGAQDILRKILDPNPVTRIDVDGIRAHDWFKQGYAPAMPFSDDEEDISMDEDSLNITEHNDIQDKIAINQINAFQLIGMSSCLDLSGFFEKEDVSERKIRFASNYSPAYLFEKIESIVRKMGFQVHKSNGKLKVIQDCKGLANSRGQESLLISAEVFEINESLYVVELKKSSGDCSLYRKLCETLSEDLGTCKSQQFLKQDSIRQDIGRYNSSF

SEQ ID NO: 2351 - DNA, 1596 bp, Zea mays
  CDS (1)..(1596)
atggggcagtgttacagcagagctacggccccggactctggacggggaggtgccaatggttatggctattctaaccaggcaaagccggcgcaagcacccccgagttacaaccctcctcagcaggcggccgaggtgaggtacacaccatcggcgacgaactcttcggcagtcccacccgtggctgtgccgccgaagccaacggcggacacgattcttggcaagcagtacgaggacgtgcgctctgtctactccctcgggaaggagcttggccggggccagttcggggtgacatacctctgcacagagattgcctctggtaggcagtacgcctgcaagtccatctccaagcgcaagctcgtcagcaaggcagacagggaggacattcgaagggagatccagatcatgcagcacctgtctgggcagccaaacattgttgagttccggggagcatacgaggacaagagcaatgtccatgtggtgatggagctctgcgcaggtggggagctcttcgatcgcatcattgccaaggggcactacacagagcgtgcagctgctacaatctgcagagcagttgtgaatgttgtcaacatttgccacttcatgggtgtgatgcaccgtgacctgaaaccggagaacttcttgcttgcgagcaaggaggagaatgcaatgctcaaggccactgattttgggctttccgtcttcatcgaagaaggaaagatgtacagggacatcgttggaagtgcttattatgttgcgcctgaagtccttaagcggagctatggaaaagagatagatgtttggagcgcaggtgttattttgtacattcttctcagtggtgtgcctccattttgggctgaaactgaaaaggggatatttgatgctattctgcatgaggagattgactttgaaagtcaaccttggccatcaatttctgagagtgctaaagacttggttagaaagatgttgacacgagatccaaagaaaagactgacttcagctcaagttcttcaacattcatggctcagagaaggtggaggtgcatctgataagcctatcgacagtactgttctttctagaatgaagcagttcagagcaatgaataagctgaaaaagatggccctaaaggttattgcctcaaaccttaacgaggaagagatcaaggggctaaagcaaatgttcatgaacatggacacagacaatagtggcacaatcacgtatgaagaactcaaagcaggactagccaaacttggatcaaagctgtcggaagctgaagtaaagcagttgatggaggctgctgatgttgatgggaatggatccatcgactatgttgagttcatcactgccacaatgcatagacacaagctcgaaagagacgagtatttgtttaaggcattccagtacttcgataaagataacagcggtttcatcacaagagatgagctggagtctgctttgatcgagcatgagatgggtgacacgagtacaataaaggagatcatatcagaagtggacacagacaatgatgggaggattaactatgaggagttctgcgcaatgatgagaggagggatgcagcagccaatgaggctcaagtag

SEQ ID NO: 2352 - protein, 531 aa, Zea mays
MGQCYSRATAPDSGRGGANGYGYSNQAKPAQAPPSYNPPQQAAEVRYTPSATNSSAVPPVAVPPKPTADTILGKQYEDVRSVYSLGKELGRGQFGVTYLCTEIASGRQYACKSISKRKLVSKADREDIRREIQIMQHLSGQPNIVEFRGAYEDKSNVHVVMELCAGGELFDRIIAKGHYTERAAATICRAVVNVVNICHFMGVMHRDLKPENFLLASKEENAMLKATDFGLSVFIEEGKMYRDIVGSAYYVAPEVLKRSYGKEIDVWSAGVILYILLSGVPPFWAETEKGIFDAILHEEIDFESQPWPSISESAKDLVRKMLTRDPKKRLTSAQVLQHSWLREGGGASDKPIDSTVLSRMKQFRAMNKLKKMALKVIASNLNEEEIKGLKQMFMNMDTDNSGTITYEELKAGLAKLGSKLSEAEVKQLMEAADVDGNGSIDYVEFITATMHRHKLERDEYLFKAFQYFDKDNSGFITRDELESALIEHEMGDTSTIKEIISEVDTDNDGRINYEEFCAMMRGGMQQPMRLK

SEQ ID NO: 2353 - DNA, 1356 bp, Zea mays
  CDS (1)..(1356)
atggcagagcataaagggaacgttctcttgcacaagtatgagatggggaaattgcttggccaaggcacctttgccaaggtttaccatgctcgtaacacggcgacttcggaaagtgtcgcgatcaaagtgattgataaggagaaggttatgaaggttggtctcattgatcaaatccagcgagaaatttctgtgatgaagcttgttaggcatccaaacatcgtacagctctatgaggtcatggccaccaaaaccaaaatatactttgtgctggaacatgttaaaggtggagagctgttcaacaagattcagcgaggaaggctcaaggaagacgcagcgaggaagtacttccagcagttgatctgtgcggtggacttctgccacagcaggggtgtctatcatcgagatttgaagccagaaaatcttttgctcgatgagaatagcaacctaaaggtatcagattttggtctaagcgcacttgctgaatgccatagacaagacggcctgctccacacgacttgtggcacgcctgcttatgttgccccagaggtgattaacagaaagggttatgatggtgcaaaggctgacatatggtcttgtggggtcatcctgtttgtgctattggctggttatcttccgttccatgataagaacttgatggacatgtataagaagattgagaaagctgacttcaaatgtccaagttggttttctaccgatgttcggaggcttttgcaaaggattcttgatcctaaccctagtagaaggatctcgatggaaaaaatcatggagaatccatggtttaggaagggtttaggtgcaaagctacttaggtacgatttacagaataagaatgcccctcatgtggacaagaatgcagattttgattcactgagcgccaacataacaactgagagcaagcaacatgaagaaaagaagcctatcaacatgaatgcatttgatataatctctctatcaactggcttggacctctctggtttatttgaagaatctaacaagaagagagaatccaaattcacatctaccaacacaagctcgacaatcatatcgaagatcgaagatattgcaaagaatttgcggttgaatttgacaaagaaggatggtggtttgttaaagatggaagcttcaaagcccggaaggaaaggggtaatgggtatcgatgccgaagtatttgaggttagccctaactttcatcttgtggagataaagaagacgaatggcgacactctagagtatcaaaaggtcctgaaccaagaaatgaggcccgcactcaaggaaatagtgtgggcttggcaaggtgagcaatcaaagcaaaagcaggaacaacagtcgtgttaa

SEQ ID NO: 2354 - protein, 451 aa, Zea mays
MAEHKGNVLLHKYEMGKLLGQGTFAKVYHARNTATSESVAIKVIDKEKVMKVGLIDQIQREISVMKLVRHPNIVQLYEVMATKTKIYFVLEHVKGGELFNKIQRGRLKEDAARKYFQQLICAVDFCHSRGVYHRDLKPENLLLDENSNLKVSDFGLSALAECHRQDGLLHTTCGTPAYVAPEVINRKGYDGAKADIWSCGVILFVLLAGYLPFHDKNLMDMYKKIEKADFKCPSWFSTDVRRLLQRILDPNPSRRISMEKIMENPWFRKGLGAKLLRYDLQNKNAPHVDKNADFDSLSANITTESKQHEEKKPINMNAFDIISLSTGLDLSGLFEESNKKRESKFTSTNTSSTIISKIEDIAKNLRLNLTKKDGGLLKMEASKPGRKGVMGIDAEVFEVSPNFHLVEIKKTNGDTLEYQKVLNQEMRPALKEIVWAWQGEQSKQKQEQQSC

SEQ ID NO: 2355 - DNA, 1344 bp, Zea mays
  CDS (1)..(1344)
atggagataaaagatatgaagaccagagggaagactttgacggagcggtacgagatggggaagctgctggggaaaggcgcgttcgggaaggtgcactatgcaagggacctcgagtccaaccagggtgttgctatcaagatcatggacaaggacagggtgctcaaggccgggctctcggagcaggtaaagcgtgagatcacgactatgcggctggtggaacacaaaaacatcgttcgtctccatgaggtcatggcgacacggaacaagatctacatcatcatggagtatgccaaagggggtgagctcttagacaaggttaagaggagcggcaggctgacggaggctgacacacacagatacttccaacagctcattggcgcactggatcactgccacagccgaggcgtgtaccaccgggacttgaagcctgagaatctgttgttggatgagaatggggaccttaaggtgtctgactttggactgagcgcgttttcagagtcgaggaggacagatgggctgctccatactgtctgtgggacaccagtgtatatagctccggaggtgatcaagaagacgggatacgatggtgcaaaatcagacatctggtcttgtggtgtcgtcctgtttgttctcgctgctggctacctccctttccagggcccaaacatgatggagatttatcgaaagatacatgatagtgatttcaggtgccccagttggttttcacacaaactcaagaggcttctatacaagattctgaaccccaaccctagcatgagaccttcaattcaggagataaaagagtctacctggtttcgaaaaggtcctagggagatcagtgcagtgaaggagaaagttcttagcgagaatgccaccgccacaaatgctgccccagtgcttgctgctaggcgcaaggagattgctcacgaagataagaccctggttgccacaaaactcaatgcctttgaaatcatcgcgttctcagcagggttggacctttctggtctgtttatcaaggattgcaggaaggagacaaggttcactttagataagcctgcattggccatcatctcaaagcttgaagatgtcgcgaaagcactgaatctcaggataaggaagaaggacaacaacactgtcatcattcaagggaggaagcatgggggcaatggtgtccttcagtttgacacgcagatctttgagatcacaccatcctgccatctcgttcagatgaaacaaactagtggcgatctacttgagtaccagaaactgttggaagagggcatccgaccagggctgaaggacgttgtctgggcttggcatggagatgatctgcagcagaagtag

SEQ ID NO: 2356 - protein, 447 aa, Zea mays
MEIKDMKTRGKTLTERYEMGKLLGKGAFGKVHYARDLESNQGVAIKIMDKDRVLKAGLSEQVKREITTMRLVEHKNIVRLHEVMATRNKIYIIMEYAKGGELLDKVKRSGRLTEADTHRYFQQLIGALDHCHSRGVYHRDLKPENLLLDENGDLKVSDFGLSAFSESRRTDGLLHTVCGTPVYIAPEVIKKTGYDGAKSDIWSCGVVLFVLAAGYLPFQGPNMMEIYRKIHDSDFRCPSWFSHKLKRLLYKILNPNPSMRPSIQEIKESTWFRKGPREISAVKEKVLSENATATNAAPVLAARRKEIAHEDKTLVATKLNAFEIIAFSAGLDLSGLFIKDCRKETRFTLDKPALAIISKLEDVAKALNLRIRKKDNNTVIIQGRKHGGNGVLQFDTQIFEITPSCHLVQMKQTSGDLLEYQKLLEEGIRPGLKDVVWAWHGDDLQQK

SEQ ID NO: 2357 - DNA, 1356 bp, Zea mays
  CDS (1)..(1356)
atggcgggcgcgggcgcgggcgggtggaagaagcgggtgggccgctacgaggtgggccggaccatcggccggggcaccttcgccaaggttaagttcgccgtcgacgccgacaccggcgcggctttcgccattaaggtgctcgacaaggagaccatcttcacccaccgcatgctccaccagatcaaaagggaaatatctatcatgaagatcgtaagacatcccaacatagttaggcttaatgaggtgttggccggcaggacaaagatatacatagtcttggaacttgtcactggaggtgaactgtttgatagaatagtccgccatgggaagctacgtgagaatgaagctaggaagtatttccagcagcttattgatgccattgattattgccacagcaaaggagtttatcatagagatttgaagcctcaaaacttgcttcttgactctcgtggaaacttgaaactttctgattttggacttagcacattgtctcaaaatggagtaggccttgtacacacgacatgtggaacaccaaattatgttgcacctgaggtgctaagtagcaatggatatgacggatctgcagcagacatttggtcgtgtggtgtcattctctatgttttaatggctggttaccttccctttgaggagaacgaccttccacatttgtatgaaaagataactgcagctcagtactcatgcccatattggttctctccaggagccaagtcattgatccagagaatacttgatccaaatccaagaactcgtatcactattgaagaaataagagaagacccatggtttaagaagaactatgtaactattagatgtggtgaagatgaaaatgtcagcctggacgatgttcaagctatttttgacaatattgaggacaagtatgtatcagacgaagtaactcacaaggatggtggtcctcttatgatgaatgcctttgagatgattgcactatctcaaggtttggatctctcagcattgtttgataggcaacaggagtttgtcaagcgccaaacacgtttcgtctcaagaaagccagccaagactgtagtagctacaattgaggttgttgctgagtcaatgggtctcaaggtccactcccggaactacaaggtgaggcttgaaggtccagcgtcaaacagagcgagccaatttgctgttgttctagaggtctttgaagttgctccttctctgttcatggtcgatgttcgaaaggttgccggtgacactccggaataccacaggttttacgagaacctatgcagcaaactttgcagcataatctggaggccaaccgaagtttctgccaaatctacgccgctgaggacgaccacctgctag

SEQ ID NO: 2358 - protein, 451 aa, Zea mays
MAGAGAGGWKKRVGRYEVGRTIGRGTFAKVKFAVDADTGAAFAIKVLDKETIFTHRMLHQIKREISIMKIVRHPNIVRLNEVLAGRTKIYIVLELVTGGELFDRIVRHGKLRENEARKYFQQLIDAIDYCHSKGVYHRDLKPQNLLLDSRGNLKLSDFGLSTLSQNGVGLVHTTCGTPNYVAPEVLSSNGYDGSAADIWSCGVILYVLMAGYLPFEENDLPHLYEKITAAQYSCPYWFSPGAKSLIQRILDPNPRTRITIEEIREDPWFKKNYVTIRCGEDENVSLDDVQAIFDNIEDKYVSDEVTHKDGGPLMMNAFEMIALSQGLDLSALFDRQQEFVKRQTRFVSRKPAKTVVATIEVVAESMGLKVHSRNYKVRLEGPASNRASQFAVVLEVFEVAPSLFMVDVRKVAGDTPEYHRFYENLCSKLCSIIWRPTEVSAKSTPLRTTTC

SEQ ID NO: 2359 - DNA, 1512 bp, Zea mays
  CDS (1)..(1512)
atggacgctaccccgccgtcgtcgcgggacctgtcgccgcagccccggcggccggcctcctccgcggggcccgccaagcgcgtgggccttctgctcggccgctacgagctgggccgcctgctcggccacggcaccttcgccaaggtctaccacgcccgccaagccgacaccggcgagaccgtcgccatcaaggtgctcgataaggagaaggccctccgcaacggcctcgtcccgcacatcaagcgcgagatcgccatcctccgccgcgtgcgccaccccaatatcgtccgcctcttcgaggtcatggccaccaagtccaagatctacttcgtcatggagttcgtccgcggcggggagctcttcgcgcgcgtcgccaagggccgcctcaaggaggataccgcgcgaaggtacttccagcagcttatctccgccgtcgggttctgccacgccaggggcgtcttccaccgcgacctcaagcccgagaatctgctcgtcgacgagcgcggcgacctcaaggtctccgattttggcctctcggcggtggccgatcagttccaccccgacggcctcctccacaccttctgtggcacgccctcctacgtcgccccggaggtgctcgcgcgccgcggttatgacggcgccaaggcggacatatggtcgtgtggtgtcatcctgttcgtgctgatggctggctaccttccttttcatgaccagaacctcatggcgatgtaccgtaagatctacaggggcgaattccggtgtccgaggtggttttccaaggatcttagcagtctattgattcgacttcttgacacgaacccagagaccaggatcaccgtggctcagataatggagagcaggtggtttaagaaagggttccgaccggtcagattctacgtcgaggatgaccaagtgcacagcttagcagacggtgaggatgaggtgccggaactggggcctagtgagcctccaactccacctcccccgccaccaccacagaaagaggacgacggtgatgattctggttgggaatcagactcgtctgtagcatcctgcccagccacattgtcatcagaggagaggagacggcctgctggatcgctcccacggccagtaagtctaaatgcatttgatatcatatcattctcaaggggattcaatctgtcggggttgtttgaggagcgaggcaatgaagtgagatttgtctcagcacatcccatgcaaacgattataacaaaattggaggagatcgcgaaggtgaagagctttgcagttcggcggaaggactggcgggttagcttggaaggcacgagagaaagtgaaaagggtccattgacaatcggggctgaagtatttgagctcacaccaagccttgtggtcgtggaggtgaggatgaaggcaggggacaggcaagaatatgaggatttttgtgagagggagttgaaacctgggatgcagcacctggtgcaccatacagcctcggttccagatataccttctgatactgattag

SEQ ID NO: 2360 - protein, 503 aa, Zea mays
MDATPPSSRDLSPQPRRPASSAGPAKRVGLLLGRYELGRLLGHGTFAKVYHARQADTGETVAIKVLDKEKALRNGLVPHIKREIAILRRVRHPNIVRLFEVMATKSKIYFVMEFVRGGELFARVAKGRLKEDTARRYFQQLISAVGFCHARGVFHRDLKPENLLVDERGDLKVSDFGLSAVADQFHPDGLLHTFCGTPSYVAPEVLARRGYDGAKADIWSCGVILFVLMAGYLPFHDQNLMAMYRKIYRGEFRCPRWFSKDLSSLLIRLLDTNPETRITVAQIMESRWFKKGFRPVRFYVEDDQVHSLADGEDEVPELGPSEPPTPPPPPPPQKEDDGDDSGWESDSSVASCPATLSSEERRRPAGSLPRPVSLNAFDIISFSRGFNLSGLFEERGNEVRFVSAHPMQTIITKLEEIAKVKSFAVRRKDWRVSLEGTRESEKGPLTIGAEVFELTPSLVVVEVRMKAGDRQEYEDFCERELKPGMQHLVHHTASVPDIPSDTD

SEQ ID NO: 2361 - DNA, 20 bp, Artificial sequence
  primer
atggaatcacttccccagcc

SEQ ID NO: 2362 - DNA, 23 bp, Artificial sequence
  primer
ttacatgatgtcattgtgccatg

SEQ ID NO: 2363 - protein, 616 aa, Artificial sequence
  consensus sequence
  Variant (3)..(3): Xaa in position 3 is any amino acid
  Variant (5)..(7): Xaa in position 5 to 7 is any amino acid
  Variant (9)..(9): Xaa in position 9 is any amino acid
  Variant (11)..(11): Xaa in position 11 is any amino acid
  Variant (13)..(13): Xaa in position 13 is any amino acid
  Variant (16)..(17): Xaa in position 16 to 17 is any amino acid
  Variant (19)..(27): Xaa in position 19 to 27 is any amino acid
  Variant (28)..(28): Xaa in position 28 is any or no amino acid
  Variant (30)..(30): Xaa in position 30 is any amino acid
  Variant (32)..(44): Xaa in position 32 to 44 is any amino acid
  Variant (45)..(61): Xaa in position 45 to 61 is any or no amino acid
  Variant (65)..(70): Xaa in position 65 to 70 is any amino acid
  Variant (71)..(72): Xaa in position 71 to 72 is any or no amino acid
  Variant (75)..(80): Xaa in position 75 to 80 is any amino acid
  Variant (83)..(86): Xaa in position 83 to 86 is any amino acid
  Variant (87)..(88): Xaa in position 87 to 88 is any or no amino acid
  Variant (90)..(93): Xaa in position 90 to 93 is any amino acid
  Variant (95)..(97): Xaa in position 95 to 97 is any amino acid
  Variant (98)..(98): Xaa in position 98 is any or no amino acid
  Variant (104)..(110): Xaa in position 104 to 110 is any amino acid
  Variant (111)..(118): Xaa in position 111 to 118 is any or no amino acid
  Variant (120)..(121): Xaa in position 120 to 121 is any amino acid
  Variant (124)..(125): Xaa in position 124 to 125 is any amino acid
  Variant (127)..(127): Xaa in position 127 is any amino acid
  Variant (130)..(131): Xaa in position 130 to 131 is any amino acid
  Variant (134)..(135): Xaa in position 134 to 135 is any amino acid
  Variant (138)..(139): Xaa in position 138 to 139 is any amino acid
  Variant (142)..(142): Xaa in position 142 is any amino acid
  Variant (151)..(151): Xaa in position 151 is any amino acid
  Variant (155)..(158): Xaa in position 155 to 158 is any amino acid
  Variant (159)..(163): Xaa in position 159 to 163 is any or no amino acid
  Variant (166)..(167): Xaa in position 166 to 167 is any amino acid
  Variant (174)..(179): Xaa in position 174 to 179 is any amino acid
  Variant (180)..(190): Xaa in position 180 to 190 is any or no amino acid
  Variant (192)..(192): Xaa in position 192 is any amino acid
  Variant (194)..(194): Xaa in position 194 is any amino acid
  Variant (197)..(197): Xaa in position 197 is any amino acid
  Variant (199)..(199): Xaa in position 199 is any amino acid
  Variant (201)..(201): Xaa in position 201 is any amino acid
  Variant (202)..(202): Xaa in position 202 is any or no amino acid
  Variant (207)..(210): Xaa in position 207 to 210 is any amino acid
  Variant (212)..(212): Xaa in position 212 is any amino acid
  Variant (213)..(214): Xaa in position 213 to 214 is any or no amino acid
  Variant (218)..(220): Xaa in position 218 to 220 is any amino acid
  Variant (222)..(222): Xaa in position 222 is any amino acid
  Variant (228)..(228): Xaa in position 228 is any amino acid
  Variant (230)..(230): Xaa in position 230 is any amino acid
  Variant (233)..(234): Xaa in position 233 to 234 is any amino acid
  Variant (236)..(236): Xaa in position 236 is any amino acid
  Variant (240)..(247): Xaa in position 240 to 247 is any amino acid
  Variant (248)..(248): Xaa in position 248 is any or no amino acid
  Variant (250)..(250): Xaa in position 250 is any amino acid
  Variant (251)..(253): Xaa in position 251 to 253 is any or no amino acid
  Variant (255)..(258): Xaa in position 255 to 258 is any amino acid
  Variant (259)..(261): Xaa in position 259 to 261 is any or no amino acid
  Variant (263)..(263): Xaa in position 263 is any amino acid
  Variant (264)..(269): Xaa in position 264 to 269 is any or no amino acid
  Variant (271)..(271): Xaa in position 271 is any amino acid
  Variant (273)..(277): Xaa in position 273 to 277 is any amino acid
  Variant (279)..(282): Xaa in position 279 to 282 is any amino acid
  Variant (284)..(285): Xaa in position 284 to 285 is any amino acid
  Variant (288)..(289): Xaa in position 288 to 289 is any amino acid
  Variant (291)..(299): Xaa in position 291 to 299 is any amino acid
  Variant (300)..(301): Xaa in position 300 to 301 is any or no amino acid
  Variant (303)..(316): Xaa in position 303 to 316 is any amino acid
  Variant (317)..(351): Xaa in position 317 to 351 is any or no amino acid
  Variant (353)..(362): Xaa in position 353 to 362 is any amino acid
  Variant (363)..(510): Xaa in position 363 to 510 is any or no amino acid
  Variant (514)..(515): Xaa in position 514 to 515 is any amino acid
  Variant (517)..(517): Xaa in position 517 is any amino acid
  Variant (518)..(524): Xaa in position 518 to 524 is any or no amino acid
  Variant (526)..(528): Xaa in position 526 to 528 is any amino acid
  Variant (530)..(531): Xaa in position 530 to 531 is any amino acid
  Variant (532)..(600): Xaa in position 532 to 600 is any or no amino acid
  Variant (602)..(605): Xaa in position 602 to 605 is any amino acid
  Variant (606)..(615): Xaa in position 606 to 615 is any or no amino acid
YEXGXXXGXGXFXKVXXAXXXXXXXXXXAXKXXXXXXXXXXXXXXXXXXXXXXXXXXXXXXREIXXXXXXXXHPXXXXXXEVXXXXXXIXXXXEXXXXGGELFXXXXXXXXXXXXXXXEXXARXXFXQLXXAVXXCHXXGVXHRDLKPENXLLDXXXXXXXXXLKXXDFGLSAXXXXXXXXXXXXXXXXXLXTXCGXPXYXXAPEVXXXXGXXXYDGXXXDXWSCGVXLXVLXXGXLPFXXXXXXXXXYXXXXIXXXXXXXPXXXXXXXWXSXXXXXLXXXXLXXNPXXRXXXXXXXXXXXWXXXXXXXXXXXXXXXXXXXXXXXXXXXXXXXXXXXXXXXXXXXXXXXXXFXXXXXXXXXXXXXXXXXXXXXXXXXXXXXXXXXXXXXXXXXXXXXXXXXXXXXXXXXXXXXXXXXXXXXXXXXXXXXXXXXXXXXXXXXXXXXXXXXXXXXXXXXXXXXXXXXXXXXXXXXXXXXXXXXXXXXXXXXXXXXXXXXXXXXXXXXXXXXXNAFXXIXXXXXXXXLXXXFXXXXXXXXXXXXXXXXXXXXXXXXXXXXXXXXXXXXXXXXXXXXXXXXXXXXXXXXXXXXXXXXXXXXXXXFXXXXXXXXXXXXXXE

SEQ ID NO: 2364 - protein, 24 aa, Artificial sequence
  protein pattern
  Variant (2)..(4): Xaa in position 2 to 4 is any amino acid
  Variant (6)..(6): Xaa in position 6 is any amino acid
  Variant (11)..(11): Xaa in position 11 is Ile or Val
  Variant (12)..(12): Xaa in position 12 is Phe, Ile or Val
  Variant (14)..(15): Xaa in position 14 to 15 is any amino acid
  Variant (16)..(16): Xaa in position 16 is any or no amino acid
  Variant (18)..(18): Xaa in position 18 is any amino acid
  Variant (19)..(19): Xaa in position 19 is any or no amino acid
  Variant (21)..(21): Xaa in position 21 is any amino acid
  Variant (22)..(22): Xaa in position 22 is Leu, Pro or Val
GXXXDXWSCGXXLXXXLXXGXXPF

SEQ ID NO: 2365 - protein, 15 aa, Artificial sequence
  protein pattern
  Variant (2)..(2): Xaa in position 2 is any amino acid
  Variant (3)..(3): Xaa in position 3 is Ile, Leu, Met or Val
  Variant (5)..(6): Xaa in position 5 to 6 is any amino acid
  Variant (7)..(7): Xaa in position 7 is Ile, Leu or Val
  Variant (9)..(9): Xaa in position 9 is any amino acid
  Variant (11)..(11): Xaa in position 11 is any amino acid
  Variant (13)..(13): Xaa in position 13 is Ala or Gly
YXXGXXXGXGXFXKV

SEQ ID NO: 2366 - protein, 9 aa, Artificial sequence
  protein pattern
  Variant (2)..(2): Xaa in position 2 is Ile or Val
  Variant (3)..(3): Xaa in position 3 is Ala, Ser or Thr
  Variant (9)..(9): Xaa in position 9 is Ala, Asn or Thr
KXXDFGLSX

SEQ ID NO: 2367 - DNA, 1809 bp, Arabidopsis thaliana
  CDS (1)..(1809)
atggcgagtgttgaaggtgatgatgatttcggaagttcttcgtcaaggtcttatcaagatcaactatacacagagctatggaaagtttgtgcaggtccattagtggaagttcctcgtgctcaagagagagttttctacttccctcagggtcacatggaacaacttgtggcgtcaactaatcaaggaatcaattcagaagaaatacctgtttttgatcttcctccaaagatactttgtcgagttcttgatgtcactttaaaggcggagcatgaaacagatgaggtttacgctcagatcacattacaaccagaggaagatcaaagtgaaccaacaagtcttgatccacctattgttggaccaactaagcaagagtttcattcgtttgttaagattttaacggcttcagatacaagcactcatggtggattctctgttcttcgtaaacacgccactgaatgcttgccttctttggatatgacacaagctactcctactcaagaacttgtgactagagatcttcatggctttgaatggaggtttaagcatatattcagaggacaaccacggaggcatttgcttactacgggttggagtacatttgtatcctcgaaaagacttgtagctggagatgcttttgtgttcttgaggggtgagaatggggatttacgggttggagtgagacgattagctcggcatcaaagcacaatgcctacttcggttatttcaagtcagagcatgcatttgggagttcttgctacagcttctcatgctgtgcgtacaacaacaatctttgttgtcttttacaagcctaggataagccaattcatagttggggtgaacaagtatatggaagctataaagcatggattttctctcggtacccgattcagaatgaggtttgaaggagaagagtctcctgagagaatatttactggtacgattgtgggaagtggagatctatcttcacaatggccagcttctaaatggaggtcattgcaggtacaatgggatgagccaacaacagttcagagaccagataaagtctcaccatgggagatagagcctttcttggcaacttccccaatttcaactcctgctcaacaaccacaatcgaaatgcaagcggtcaagacccatcgagccatcagttaaaacaccagccccacctagtttcttgtacagcctccctcagagccaagattccattaatgcatcccttaaactgtttcaagatccatcacttgagagaatttcaggtggatactcctcaaacaacagcttcaaacccgagactcctcctcctccaacgaattgtagctataggttgtttggatttgatctcacaagcaattctcctgctccaatccctcaagacaagcaaccgatggatacttgtggagctgccaagtgtcaagaacccatcactccaacctcaatgagtgagcagaagaagcaacaaacatcaagaagtcgaactaaagtgcaaatgcaaggcattgcggttggtcgtgcggttgatttaacactgttgaaatcttacgatgaactgattgatgagcttgaggagatgtttgagattcaaggacagcttcttgcccgagacaaatggatcgttgtcttcactgatgatgaaggagatatgatgcttgctggtgatgatccgtggaatgagttttgcaagatggcaaagaagatatttatatattcgagcgatgaggttaagaaaatgacaacgaaactgaagatttcttcgtcgttagagaatgaggaatatggtaatgaatcattcgaaaatcgtagtagggggtga

SEQ ID NO: 2368 - protein, 602 aa, Arabidopsis thaliana
MASVEGDDDFGSSSSRSYQDQLYTELWKVCAGPLVEVPRAQERVFYFPQGHMEQLVASTNQGINSEEIPVFDLPPKILCRVLDVTLKAEHETDEVYAQITLQPEEDQSEPTSLDPPIVGPTKQEFHSFVKILTASDTSTHGGFSVLRKHATECLPSLDMTQATPTQELVTRDLHGFEWRFKHIFRGQPRRHLLTTGWSTFVSSKRLVAGDAFVFLRGENGDLRVGVRRLARHQSTMPTSVISSQSMHLGVLATASHAVRTTTIFVVFYKPRISQFIVGVNKYMEAIKHGFSLGTRFRMRFEGEESPERIFTGTIVGSGDLSSQWPASKWRSLQVQWDEPTTVQRPDKVSPWEIEPFLATSPISTPAQQPQSKCKRSRPIEPSVKTPAPPSFLYSLPQSQDSINASLKLFQDPSLERISGGYSSNNSFKPETPPPPTNCSYRLFGFDLTSNSPAPIPQDKQPMDTCGAAKCQEPITPTSMSEQKKQQTSRSRTKVQMQGIAVGRAVDLTLLKSYDELIDELEEMFEIQGQLLARDKWIVVFTDDEGDMMLAGDDPWNEFCKMAKKIFIYSSDEVKKMTTKLKISSSLENEEYGNESFENRSRG

SEQ ID NO: 2369 - DNA, 2808 bp, Arabidopsis thaliana
  CDS (1)..(2808)
atgagattatcttcagctgggtttaatcctcaacctcatgaagttacaggagagaaaagagttcttaattctgagctctggcatgcttgtgctggtcctcttgtctcactacctcctgttggaagcagagttgtgtattttcctcaaggtcacagtgaacaggttgctgcttcgaccaacaaagaagtagatgctcatataccaaattatccgagcttgcatccgcagcttatctgtcagcttcataatgttacaatgcatgctgatgtggagactgatgaagtctatgcacagatgactttgcaaccgttgaatgcgcaagagcaaaaagatccttaccttcccgcggaattaggtgtcccaagtagacagcctacaaactatttctgtaaaactctgactgctagtgatacaagcactcacggaggtttttctgtacctcgccgagctgctgagaaagttttccctcccttggattactcgcagcagccaccagctcaagagttaatggcgagggatctgcatgataatgaatggaagttcaggcatattttccgaggccaaccaaagagacatctccttaccacgggttggagcgtatttgtgagtgctaaaaggcttgttgctggtgactctgttcttttcatctggaacgataagaatcaattacttcttggtataagacgagccaaccgaccacaaactgtcatgccttcatctgttttgtcaagtgacagtatgcatttaggccttcttgctgcagcagctcatgctgccgctacaaacagccgattcaccatcttctataacccgagggcgagtccatcagagtttgttatacccctggctaagtatgtgaaagcggtttatcacactcgcgtctctgttggtatgcggtttaggatgctgtttgaaactgaagaatctagtgttcgtcggtacatgggtacaataactggcatttgtgatctagatcctactcgttgggctaattcgcattggcgatctgtcaaggttgggtgggacgaatctactgcaggagagagacagccaagggtttcattgtgggagattgagcctttaacaacattccctatgtatccatctccttttcctctcaggcttaaacggccgtggcctcctggtctcccatctttccatggccttaaagaagatgatatgggtatgagtatgagttcaccgcttatgtgggatcgaggactccaatctctaaactttcaaggtatgggagtaaacccgtggatgcagccgagacttgatacgtcgggcttgcttggtatgcaaaatgatgtgtaccaagcaatggctgcagctgcccttcaagacatgagaggcattgatcctgcaaaagctgctgcttcacttcttcagttccaaaattcgccggggttctcaatgcaatctccgtccttagtgcagccgcagatgctgcagcagcaactctctcagcagcagcaacaactctctcagcagcagcagcagcagcaacagctctcccaacagcagcagcaacagctctctcaacagcagcagcagcagctctctcaacagcagcagcaacaactctctcagcagcagcagcaacaggcgtatcttggcgttcctgaaacccaccagcctcagtctcaggctcaatcacagtcaaacaatcatctttctcagcagcagcagcaagtagtggataatcataatccgtctgcgtccagtgctgctgttgtttccgctatgtctcaatttggttctgcttctcagcccaacacgtcaccactccagtccatgacctctctgtgtcatcagcaaagcttctccgataccaacggaggaaacaatcctatttctccacttcacactcttctcagtaacttctctcaagacgaatcttctcaactgctccacctcactagaacaaactctgcaatgacttcatccggttggccatcaaagcgtcctgcagttgattcatcgttccagcactctggagccggtaataataacactcaatccgtattggagcaactgggacagtcccacacaagcaacgttcctccaaacgctgtctcgttgcctccatttcccggtggtagagagtgctcgatcgagcaagaaggaagcgcctcagacccgcatagccatcttctctttggagtcaatatagattcatcttctcttttgatgccgaacggaatgtcaaaccttagaagcattggtattgaaggtggtgactccacgactttacccttcacatcatctaatttcaacaatgatttctcgggtaatcttgcaatgacaacaccttctagttgcatagatgaatcgggttttctacaatcctcagaaaacctcggttccgagaacccacaatctaacacctttgtgaaggtgtacaagtcagggtcttttggaagatcgttagatatatcaaagtttagcagctaccacgagctgcgaagcgagcttgctcgcatgtttggcctcgaaggccaattagaagaccctgtgagatcaggctggcagcttgtatttgttgaccgagagaacgacgttcttctcctcggcgatgacccttggccggagtttgtgagcagcgtgtggtgcattaagatactgtcaccacaagaagtgcaacaaatgggaaaaagaggccttgagcttctcaactccgcgccatcttccaacaatgtcgataagctcccgagcaacgggaactgtgacgactttgggaaccggtcagacccgaggaatctcggtaacggtatcgcatcagttgggggttcattcaactactag

SEQ ID NO: 2370 - protein, 935 aa, Arabidopsis thaliana
MRLSSAGFNPQPHEVTGEKRVLNSELWHACAGPLVSLPPVGSRVVYFPQGHSEQVAASTNKEVDAHIPNYPSLHPQLICQLHNVTMHADVETDEVYAQMTLQPLNAQEQKDPYLPAELGVPSRQPTNYFCKTLTASDTSTHGGFSVPRRAAEKVFPPLDYSQQPPAQELMARDLHDNEWKFRHIFRGQPKRHLLTTGWSVFVSAKRLVAGDSVLFIWNDKNQLLLGIRRANRPQTVMPSSVLSSDSMHLGLLAAAAHAAATNSRFTIFYNPRASPSEFVIPLAKYVKAVYHTRVSVGMRFRMLFETEESSVRRYMGTITGICDLDPTRWANSHWRSVKVGWDESTAGERQPRVSLWEIEPLTTFPMYPSPFPLRLKRPWPPGLPSFHGLKEDDMGMSMSSPLMWDRGLQSLNFQGMGVNPWMQPRLDTSGLLGMQNDVYQAMAAAALQDMRGIDPAKAAASLLQFQNSPGFSMQSPSLVQPQMLQQQLSQQQQQLSQQQQQQQQLSQQQQQQLSQQQQQQLSQQQQQQLSQQQQQQAYLGVPETHQPQSQAQSQSNNHLSQQQQQVVDNHNPSASSAAVVSAMSQFGSASQPNTSPLQSMTSLCHQQSFSDTNGGNNPISPLHTLLSNFSQDESSQLLHLTRTNSAMTSSGWPSKRPAVDSSFQHSGAGNNNTQSVLEQLGQSHTSNVPPNAVSLPPFPGGRECSIEQEGSASDPHSHLLFGVNIDSSSLLMPNGMSNLRSIGIEGGDSTTLPFTSSNFNNDFSGNLAMTTPSSCIDESGFLQSSENLGSENPQSNTFVKVYKSGSFGRSLDISKFSSYHELRSELARMFGLEGQLEDPVRSGWQLVFVDRENDVLLLGDDPWPEFVSSVWCIKILSPQEVQQMGKRGLELLNSAPSSNNVDKLPSNGNCDDFGNRSDPRNLGNGIASVGGSFNY

SEQ ID NO: 2371 - DNA, 1440 bp, Arabidopsis thaliana
  CDS (1)..(1440)
atggaaaataatggagaaatgaatgcacagcctgaattatcagttgatataaccaagacttatatgtatgagaaattatggaacatatgtgctggacctttgtgtgttcttccgaaacctggagaaaaagtttattactttcctcaagggcacatcgagctcattgagaattctacaagagatgaattggatcatatcaggccaatttttgatcttccatctaagcttcgatgtcgtgttgtggctattgatcgtaaggtagacaaaaatacagatgaagtctatgctcagatttcgttaatgcctgatacaacagaagttatgacccataatactactatggatactcgaagaccaatagtttatttttttagtaaaattttaacggcgtctgacgtcagtttaagtggtggattaattattcccaaacaatatgccattgagtgttttcctccgctggatatgtcccaaccaatatccacacaaaatcttgttgcaaaggatctctatggtcaagaatggagtttcaaacatgtctttagaggtacaccgcagagacatatgtttactagcggcggcggctggagcgtatttgcaacaacaaaaagattgattgttggggatatatttgtactccttagaggagagaatggggagttacgatttggtattaggcgagcaaagcatcaacaaggccacataccttcatcagtaatatcagcaaattgtatgcaacatggagtaatagcttcagtagtgaatgcttttaaaaccaaatgcatgttcaatgtggtttataagccaaggatgcagtttgagggtaaggatttttctgaaaaaagatacgatgggacgattattggtgtaaatgacatgtctcctcattggaaggattcagaatggcgaagcctaaaagtgcaatgggacgagctttcaccatttctaagacctaatcaggtttcaccttgggacatcgagcatctaattccttcgtcagatatctctcaatcaagtttgaaaaagaaaaaacattggcttcaattgaatgaaattggtgcaacattatcgaatctttggacatgccaagaaattggacaacggagcatgaattctcctataagtgttcctgagtttagttatcccaatgcaattgaagattcaaagtttctttctggtttgctactgaatcactcactcctagccatacctaatgaaaactataacagcgaccaaatgattcaaccaaggaaagaagatataacaactgaagcaaccactagttgcctcttgtttggagttgatctgaccaaagtatcaaagagcaaagattccatctgtccaattgaatcatgcaaaaaatcagaaatttcaaaactcaaaaatcaaaaagcaaccactagttgcctcaagataaaaagtttgaccaaacccaacctctga

SEQ ID NO: 2372 - protein, 479 aa, Arabidopsis thaliana
MENNGEMNAQPELSVDITKTYMYEKLWNICAGPLCVLPKPGEKVYYFPQGHIELIENSTRDELDHIRPIFDLPSKLRCRVVAIDRKVDKNTDEVYAQISLMPDTTEVMTHNTTMDTRRPIVYFFSKILTASDVSLSGGLIIPKQYAIECFPPLDMSQPISTQNLVAKDLYGQEWSFKHVFRGTPQRHMFTSGGGWSVFATTKRLIVGDIFVLLRGENGELRFGIRRAKHQQGHIPSSVISANCMQHGVIASVVNAFKTKCMFNVVYKPRMQFEGKDFSEKRYDGTIIGVNDMSPHWKDSEWRSLKVQWDELSPFLRPNQVSPWDIEHLIPSSDISQSSLKKKKHWLQLNEIGATLSNLWTCQEIGQRSMNSPISVPEFSYPNAIEDSKFLSGLLLNHSLLAIPNENYNSDQMIQPRKEDITTEATTSCLLFGVDLTKVSKSKDSICPIESCKKSEISKLKNQKATTSCLKIKSLTKPNL

SEQ ID NO: 2373 - DNA, 1869 bp, Arabidopsis thaliana
  CDS (1)..(1869)
atgagccaaacaagcttagagccacttataatttctattataaagcttcaaattttgcaactttggttgaaattgatagctgttggttggaatttagggtctaatgatgatgaattgtacacggagctatggaaagcttgtgcagggccacttgtggaagttcctcgttatggtgaaagagttttctacttccctcaaggtcacatggaacaattggttgcttcgactaatcaaggagttgttgatcaagagataccagtgtttaatcttcctccaaagatactttgtcgtgttcttagtgttacgttaaaagcagaacatgagaccgatgaggtttacgctcagatcacattacaaccagaagaagatcaaagtgaaccaacaagtcttgacccacctttagtagaaccagctaaaccaacggttgattcttttgtgaagattctaacagcttcagatacaagcacacatggtggattctctgttcttcgtaaacacgccactgagtgtttaccttcacttgatatgacacaacctacaccgactcaagaacttgtagctagagatcttcacggctatgaatggaggtttaagcatatatttagagggcaaccgaggaggcatttacttacaaccggttggagtacatttgtaacctcgaaaagacttgtagctggagatgcatttgtgttcttgaggggtgaaaccggggatttacgggttggtgtgaggcgtttagctaagcagcaaagcacgatgcccgcatccgttatttcgagtcagagtatgcgtttgggagttcttgctacagcttctcatgctgttaccacaacaactatatttgttgtcttctataaaccaaggataagccagtttataattagtgtgaacaagtatatgatggcgatgaagaacgggttttctctcggtatgcggtataggatgagattcgaaggagaagagtctcctgagagaatatttacaggtaccattattggcagtggagatctatcttctcaatggccagcttccaaatggaggtcattgcagatccaatgggacgagccatcttctatacagagaccaaacaaggtctcaccgtgggagatcgagcctttctcaccatccgcgcttacaccaacccctactcaacaacaatcaaagtccaaacggtccagaccaatctcagaaatcacagggagtcctgtagcttctagtttcttgagtagtttctcgcagagccacgagtctaatccatcggtcaaactgttgtttcaagatccagcaaccgagagaaactcaaacaaatcagtgttttcaagtggattacaatgcaagataaccgaggctccggtcacaagtagttgtaggttattcggattcgatctcacgagcaagcctgcttctgctacaattcctcatgacaagcagctaataagtgtggattcaaatatatctgattctaccaccaagtgtcaagatcctaactcttcaaactcaccaaaagagcagaaacaacaaacatccacaagaagccgaatcaaggtgcaaatgcaaggaacagcggttggacgcgcggttgatttaacattgttgagatcatacgatgaactaataaaagagctagagaaaatgtttgagattgaaggagaacttagtcctaaagacaaatgggctatcgtgtttacagacgatgaaggagataggatgcttgtaggagatgatccatggaatgagttctgtaaaatggcaaagaagttattcatatatccgagtgatgaggtcaagaaaatgaggtcgaagtcgttgttgggtgataaaggtacgatcgtaaatcttgaatcagatcagaggacagttcacgtttaa

SEQ ID NO: 2374 - protein, 622 aa, Arabidopsis thaliana
MSQTSLEPLIISIIKLQILQLWLKLIAVGWNLGSNDDELYTELWKACAGPLVEVPRYGERVFYFPQGHMEQLVASTNQGVVDQEIPVFNLPPKILCRVLSVTLKAEHETDEVYAQITLQPEEDQSEPTSLDPPLVEPAKPTVDSFVKILTASDTSTHGGFSVLRKHATECLPSLDMTQPTPTQELVARDLHGYEWRFKHIFRGQPRRHLLTTGWSTFVTSKRLVAGDAFVFLRGETGDLRVGVRRLAKQQSTMPASVISSQSMRLGVLATASHAVTTTTIFVVFYKPRISQFIISVNKYMMAMKNGFSLGMRYRMRFEGEESPERIFTGTIIGSGDLSSQWPASKWRSLQIQWDEPSSIQRPNKVSPWEIEPFSPSALTPTPTQQQSKSKRSRPISEITGSPVASSFLSSFSQSHESNPSVKLLFQDPATERNSNKSVFSSGLQCKITEAPVTSSCRLFGFDLTSKPASATIPHDKQLISVDSNISDSTTKCQDPNSSNSPKEQKQQTSTRSRIKVQMQGTAVGRAVDLTLLRSYDELIKELEKMFEIEGELSPKDKWAIVFTDDEGDRMLVGDDPWNEFCKMAKKLFIYPSDEVKKMRSKSLLGDKGTIVNLESDQRTVHV

SEQ ID NO: 2375 - DNA, 1911 bp, Arabidopsis thaliana
  CDS (1)..(1911)
atggcaaatcgcggaggtgaatatctgtacgatgagttatggaaattatgcgcgggacctcttgttgatgttcctcaagctcaagaaagagtttattattttcctcaaggtcacatggaacaactcgaagcgtcaacgcaacaagtcgacttaaatacgatgaagcctctttttgttcttcctcctaagattctctgcaatgttatgaacgttagtcttcaggcggagaaagatacggatgaggtctatgctcagattactttgatccctgttggaactgaagttgatgaacctatgagtcctgatccctctcctcctgagttgcaaaggccgaaagttcactctttcagcaaggttttgacagcgtctgatacaagcacccatggtggcttttctgttctaaggaaacatgccacggaatgtcttcctccgctggatatgactcagcaaaccccgacccaggagttagtagccgaagatgtgcacggttatcagtggaaattcaagcatatttttagaggccaaccacggaggcatctattgacgacagggtggagcacctttgttacatcaaagagattggttgctggggacacctttgtattcctgagaggggagaacggagagttgcgagttggagtcagacgtgctaatcttcaacagagcagtatgccttcatccgttatatcaagtcatagtatgcatctgggagtgcttgctactgcacgccatgctactcaaacgaaaactatgttcattgtatactataaaccaaggacaagccaattcatcattagcttgaacaaatatctagaagccatgagcaataagttctctgtagggatgagatttaagatgcgttttgagggagaggattcccctgaaagaagatattctggcacggttattggtgtgaaagactgctcccctcactggaaagactcaaaatggcgatgcttagaagttcattgggatgagcctgcatcgatttcaagacccaataaggtttcaccatgggaaattgaaccgtttgtaaattcagaaaacgttcccaaatcagttatgctgaagaacaaaaggccccgtcaagttagtgaagtatctgcacttggcataacagcttcaaacctttggagctctgttttgacgcaaccccatgagtttgcacaatcgtgcatcacctcacagtggagttctcctcagcaatgtcatcgtgatgcaaatgaggatgctaagaaatctgactggctaaataactcttactctgtgtcaaatgtagcaaaagactcaacactgaacgaccaaatggtttccccagtcgagcagaagaagcctgagacaaccgctaattatagattatttggaattgatctgatgagttcctccctagcggttcctgaggagaaaactgcacccatgcgaccaatcaacatatccaaaccgactatggacagccactcagacccaaaatcagagatttcaaaagtatcagaagagaaaaagcaggaacctgcggagggatcaccaaaagaggtccaaagcaagcaaagcagttctacaagaagccgtaccaaggtgcagatgcaaggcgtacctgtgggcagggctgtggatttaaatgcgctaaaggggtacaacgagctcatagatgacattgagaagctgtttgacataaaaggggaactgcggagtcgcaatcaatgggaaatagtgttcacagacgatgagggagatatgatgcttgtcggtgatgacccatggcctgagttctgcaacatggtgaagagaatattcatatggtcgaaagaggaagtgaagaaaatgacgcctgggaaccaactccggatgctgttaagggaagttgaaacaacactaacaacaacttccaaaacagataatcattccaactaa

SEQ ID NO: 2376 - protein, 636 aa, Arabidopsis thaliana
MANRGGEYLYDELWKLCAGPLVDVPQAQERVYYFPQGHMEQLEASTQQVDLNTMKPLFVLPPKILCNVMNVSLQAEKDTDEVYAQITLIPVGTEVDEPMSPDPSPPELQRPKVHSFSKVLTASDTSTHGGFSVLRKHATECLPPLDMTQQTPTQELVAEDVHGYQWKFKHIFRGQPRRHLLTTGWSTFVTSKRLVAGDTFVFLRGENGELRVGVRRANLQQSSMPSSVISSHSMHLGVLATARHATQTKTMFIVYYKPRTSQFIISLNKYLEAMSNKFSVGMRFKMRFEGEDSPERRYSGTVIGVKDCSPHWKDSKWRCLEVHWDEPASISRPNKVSPWEIEPFVNSENVPKSVMLKNKRPRQVSEVSALGITASNLWSSVLTQPHEFAQSCITSQWSSPQQCHRDANEDAKKSDWLNNSYSVSNVAKDSTLNDQMVSPVEQKKPETTANYRLFGIDLMSSSLAVPEEKTAPMRPINISKPTMDSHSDPKSEISKVSEEKKQEPAEGSPKEVQSKQSSSTRSRTKVQMQGVPVGRAVDLNALKGYNELIDDIEKLFDIKGELRSRNQWEIVFTDDEGDMMLVGDDPWPEFCNMVKRIFIWSKEEVKKMTPGNQLRMLLREVETTLTTTSKTDNHSN

SEQ ID NO: 2377 - DNA, 2100 bp, Oryza sativa (japonica cultivar-group)
  CDS (1)..(2100)
atgtcgtcgcaaggagcaggaggaggggtaggggacccggagctgttcgcggagctgtggcgggcctgcgcggggccgctggtggaggtgccgcagcgggacgagcgggtgttctacttcctccagggccacctcgagcagctgcaagagccgacggacccggcgctgctggcggagcaaatcaagatgttccaggtgccgtacaagatcctctgcaaggtcgtcaacgtcgagctcaaggccgagacggaaaccgacgaggtgttcgcgcagattaccctgcagcctgacccggatcaagagaatctgccaacattacctgacccgcccctgccggagcagccgaggcctgtggtgcactccttctgcaagatcctgaccccatccgacaccagcacccatggcgggttctccgtgctccgacggcatgccaacgagtgcctcccgccactggatatgtccatggcgacaccaacccaagagctcatcacaaaggaccttcatggatctgagtggaggtttaagcacatctacaggggccaaccccgtaggcatcttctgactactggatggagcacgtttgtgacatcgaagaagctgatttctggcgacgcgtttgtctacttgaggagtgagacaggagagcagcgtgtcggagtgaggcgtcttgtgcagaaacagagcacaatgccggcatctgttatatcaagccaaagcatgcatcttggtgtgcttgcaagtgcatctcatgctatcaagactaattcaattttcctagtgtactacaggccaaggttaagccaaagccaatatattgttagtgtgaataagtaccttgcggctagtaaggttggatttaatgtgggcatgaggttcaagatgagttttgaaggggaagacgtcccggttaaaaagttttctggaactatagttggtgaaggtgatctttctctgcagtggtcaggttctgaatggaagtccttgaaggtccaatgggatgaagtcacaaatgttaatggccctgagagggtttccccttgggaaattgaaacatgtgatggcactgcacctgccatcaatgtacccctgcagtcagcaacgaaaaacaagcggcctagggagccaagtgaaactattgaccttcaatcactggaaccagctcaagagttttggctatctggaatgccacaacagcatgagaagacaggtattggttccagtgaacctaattgtatctctggacatcaagttgtttggccaggcgagcatccaggatatggtgccgtgagtagttcagtttgtcagaatccgctagtacttgaaagttggttgaaggatttcaactcttcaaacaagggtgtctcccctaccttgtcagagatttctcagaaaatttttcaggttaccagcaatgaagcaagaattgctacatggcctgcacgttctgcttaccaagctgaggagcccacttccaagttgtcttcgaacaccgctgcctgtggttaccgaactgaagaagttgctccaaatgcgtccaaggttgttgaaggaaaaaaggaacctgccatgtttcgtctgtttggtgtggatttgatgaaatgtaccagcatatctactaccactgatgacaagtcaagtgtgggagcaggagaagcttcagccaaaggtactggttctcacgaagactctggtcagctgtcagcattctcaaaagtgacaaaagagcatattgctgcggatgaaagcccccaagagatccaaagccatcagaattacaccgctagaactcgcataaaggttcaaatgcatggaaatgctgtgggcagagctgtggatctagctaatctagacggatatgagcaactgatgaatgagctggaagagatgttcaatataaaggacctcaaacaaaaatggaaggtggctttcactgatgatgagggtgacacaatggaagttggagatgatccttggctggaattttgccagatggtcagaaagattgtgctctatcccattgaagacgagaagaagatcgagcctcacccgaagttactgtcttcagctaatccagagcaggatcagaagactgggttttag

SEQ ID NO: 2378 - protein, 699 aa, Oryza sativa (japonica cultivar-group)
MSSQGAGGGVGDPELFAELWRACAGPLVEVPQRDERVFYFLQGHLEQLQEPTDPALLAEQIKMFQVPYKILCKVVNVELKAETETDEVFAQITLQPDPDQENLPTLPDPPLPEQPRPVVHSFCKILTPSDTSTHGGFSVLRRHANECLPPLDMSMATPTQELITKDLHGSEWRFKHIYRGQPRRHLLTTGWSTFVTSKKLISGDAFVYLRSETGEQRVGVRRLVQKQSTMPASVISSQSMHLGVLASASHAIKTNSIFLVYYRPRLSQSQYIVSVNKYLAASKVGFNVGMRFKMSFEGEDVPVKKFSGTIVGEGDLSLQWSGSEWKSLKVQWDEVTNVNGPERVSPWEIETCDGTAPAINVPLQSATKNKRPREPSETIDLQSLEPAQEFWLSGMPQQHEKTGIGSSEPNCISGHQVVWPGEHPGYGAVSSSVCQNPLVLESWLKDFNSSNKGVSPTLSEISQKIFQVTSNEARIATWPARSAYQAEEPTSKLSSNTAACGYRTEEVAPNASKVVEGKKEPAMFRLFGVDLMKCTSISTTTDDKSSVGAGEASAKGTGSHEDSGQLSAFSKVTKEHIAADESPQEIQSHQNYTARTRIKVQMHGNAVGRAVDLANLDGYEQLMNELEEMFNIKDLKQKWKVAFTDDEGDTMEVGDDPWLEFCQMVRKIVLYPIEDEKKIEPHPKLLSSANPEQDQKTGF

SEQ ID NO: 2379 - DNA, 2427 bp, Oryza sativa (japonica cultivar-group)
  CDS (1)..(2427)
atgccgccggccgccatggctccccctcccccgccgcagggctcctccacaggggatccgctctacgacgagctgtggcacgcctgcgcggggccgctcgtcaccgtgccgcgggtgggcgacctcgtcttctacttcccgcaggggcacatcgagcaggtggaggcgtccatgaaccaggttgccgacagccagatgcgcctctacgatctgccctccaagctgctttgccgtgtcctcaacgtcgagctcaaggcggagcaagacaccgacgaggtctacgcgcaggtcatgctcatgccggagcccgagcaaaatgagatggcggtggagaagacgactcctacgtccggccctgtgcaggcaaggccgccggtgaggtccttctgcaagacgctcaccgcgtctgacaccagcacgcacggcggcttctctgtactccgccgccacgctgatgagtgcctccctcccctggatatgacccagtcgccacccacacaggagctcgtggccaaggatctgcacagcatggactggcgcttccgtcacatctttcgcgggcaaccgaggaggcatctccttcagagtggttggagtgtgtttgtcagttccaaaaggcttgttgctggggatgctttcattttcctcagaggagagaatggtgaactccgtgttggtgttagacgagctatgaggcagctgtccaatgtgccttcttcagtcatatctagccaaagcatgcacctgggagtccttgctactgcatggcatgctatcaacacgaagagtatgttcaccgtctactacaaacctaggacgagcccttcagagttcattataccatatgatcagtatatggagtccgtcaaaaacaattactctgttgggatgaggttcaggatgaggtttgaaggagaagaggcaccagagcagaggtttactggtactataattggcagtgagaatctcgacccagtgtggcctgaatcaagttggagatccctgaaggtgcggtgggatgaaccatcaactattccgcggccagatagagtctctccttggaaaatagagcctgcttcatcacctcctgttaacccccttcctctttctagggttaaaagacctaggccaaatgctcctccagcatctcctgaatctcctattcttacgaaagaagctgctactaaggttgacactgatcctgctcaagcacaacgaagtcaaaacagtacggtcttgcaaggtcaagaacaaatgaccttgaggagcaaccttactgagagtaatgactctgatgtcactgctcataagccaatgatgtggtctccatccccaaatgctgcaaaagcccaccccttgacatttcagcagagaccccctatggataattggatgcagttgggaaggcgtgaaactgactttaaggatgtccgttctggctctcaatcttttggtgattccccaggcttctttatgcagaattttgatgaggctcctaaccgtcttacttctttcaagaaccagtttcaggatcaaggttctgctcggcacttctctgacccatactactatgtatctccacagccttccctaactgttgaatcaagcacacagatgcacacagacagtaaggagttacatttctggaatggccagagtactgtgtatggtaattcgagagaccgaccacagaatttcagattcgaacagaactcatcaagttggttaaatcagtcatttgcccgacctgaacagccaagagtgattagaccgcatgcatcaatagctccagttgagttggaaaaaacagaaggcagtgggtttaagatttttgggtttaaagttgatacaaccaatgctcctaacaatcacttgagctccccgatggctgcaacacatgagcctatgcttcaaactccatcatcattgaatcagttgcaacctgtacaaactgattgcattcctgaggtatcagtaagcacagctggaacggcgactgagaatgagaaaagcggtcagcaagctcaacagagttcaaaagatgttcaaagcaagactcaggttgcttcgacgaggagttgtacaaaggtccataagcaaggcgttgcacttggcagatctgtggatctttcaaagttcagtaactatgatgaactcaaagctgagctagacaagatgtttgaattcgatggtgaattggtgtcttcaaacaaaaactggcaaattgtttatactgataatgagggtgatatgatgcttgttggagacgacccatgggaagaattctgcagcattgtgcggaagatttatatttacaccaaggaggaggtccagaagatgaattcgaaatcaaatgccccaaggaaagatgactcttcagaaaatgagaaaggtcatctgccgatgcccaacaaatcagataactag

SEQ ID NO: 2380 - protein, 808 aa, Oryza sativa (japonica cultivar-group)
MPPAAMAPPPPPQGSSTGDPLYDELWHACAGPLVTVPRVGDLVFYFPQGHIEQVEASMNQVADSQMRLYDLPSKLLCRVLNVELKAEQDTDEVYAQVMLMPEPEQNEMAVEKTTPTSGPVQARPPVRSFCKTLTASDTSTHGGFSVLRRHADECLPPLDMTQSPPTQELVAKDLHSMDWRFRHIFRGQPRRHLLQSGWSVFVSSKRLVAGDAFIFLRGENGELRVGVRRAMRQLSNVPSSVISSQSMHLGVLATAWHAINTKSMFTVYYKPRTSPSEFIIPYDQYMESVKNNYSVGMRFRMRFEGEEAPEQRFTGTIIGSENLDPVWPESSWRSLKVRWDEPSTIPRPDRVSPWKIEPASSPPVNPLPLSRVKRPRPNAPPASPESPILTKEAATKVDTDPAQAQRSQNSTVLQGQEQMTLRSNLTESNDSDVTAHKPMMWSPSPNAAKAHPLTFQQRPPMDNWMQLGRRETDFKDVRSGSQSFGDSPGFFMQNFDEAPNRLTSFKNQFQDQGSARHFSDPYYYVSPQPSLTVESSTQMHTDSKELHFWNGQSTVYGNSRDRPQNFRFEQNSSSWLNQSFARPEQPRVIRPHASIAPVELEKTEGSGFKIFGFKVDTTNAPNNHLSSPMAATHEPMLQTPSSLNQLQPVQTDCIPEVSVSTAGTATENEKSGQQAQQSSKDVQSKTQVASTRSCTKVHKQGVALGRSVDLSKFSNYDELKAELDKMFEFDGELVSSNKNWQIVYTDNEGDMMLVGDDPWEEFCSIVRKIYIYTKEEVQKMNSKSNAPRKDDSSENEKGHLPMPNKSDN

SEQ ID NO: 2381 - DNA, 2727 bp, Oryza sativa (japonica cultivar-group)
  CDS (1)..(2727)
atgaagctctcgccgtcggccggcggcgtctccgaccagccgccgtcgccgccggaagttgcagaggagcagaagtgcctaaattctgagttgtggcatgcatgcgccggccctctcgtttcgctgcctgcggtcggtagtcgggtggtttattttcctcaaggccacagtgagcaggtagctgcatcaacaaataaggaaatggagtctcagatccccaactatcctaacctgccgccgcagcttatatgccagctacataatgtgaccatgcacgccgatgcagagacggatgaagtctatgcgcaaatgacgctgcagccactcagcccgcaagagctcaaggatccattcctacccgccgagctaggcactgccagcaagcagccaacaaattatttctgcaaaacgttaactgctagtgacacaagtacacatggtggattctctgttccccgtcgagcagcagagaaagtatttcctccgctggatttcactcagcagcctccagctcaagagttgatggcgaaagacctccatggaaatgaatggaaattccgtcatatctttcgtggccaaccgaagcggcatcttctgactacgggttggagcgtctttgtaagtgcaaagagactggttgctggagactctgtcctttttatctggaatgacagtaatcagctgcttctgggaattcgtcgggcaaataggccacaaacggtcatgccatcatcagtattgtctagtgacagcatgcatattggtctgcttgctgcagctgctcacgccgcatcaacaaatagccggtttactattttctataatccaagagcaagcccttcggagtttgttataccactggctaaatatgtaaaggctgtctaccatacccgcatatcggtgggcatgcgtttccggatgctttttgaaacagaagaatccagtgttaggagatacatggggacaataacaggaataagtgatcttgatcctgttcgttggatgaactcacactggcgctctgtcaaggttggatgggatgagtcgactgctggagagagacagccaagggtgtctctttgggagatcgagcctctgacaactttcccgatgtatccatctccttttcctctcagactaaagcgtccatggccaacaggcttaccttctttatatggcggaaaggaggatgacttggcttcttctcttatgtggcttcgagatagtcaaaacacaggtttccaatctctgaattttggaggacttggtatgagtccgtggatgcagccaaggctggatagttccctacttggtctgcaacctgacatgtaccaaacgatagcggcggcggcggctttacagaacaccactaagcaagtatcacctgccatgctgcagttccagcagccgcaaaacattgtcggtagatcttctcttctatccagtcagattctgcagcaagcacagcctcaatttcagcagatgtaccaccaaaacatcaatggcaactcaatccaaggccatagtcagcctgagtacctccagcaaccgcttcaacattgccaatcatttaacgaacagaagcctcagttgcagccgcagcaacagcagcaagaatcacaccagcagcaacctcagcatcaacaaatgcaacaacagaaacacttgtccaactttcagactgtaccaaatgcattgtcggttttttcacagctttcctccacccctcagtctacaccctccacattgcagacagtttcaccattctcacagcaacataatttccctgacacaaatatcagttgtctctctccatccaatgtctcatccatgcacgatacactgagatcattcccttcagaagctgcttcagacctcccaggtgtgccaagaatcacccctgtacctgtctctgacccatggtcatctaagcgagttgcagtggaatctacgatcacttctcgcccacatgacatttcatcacagatagagaacttcgacttgacaccttctagtattcctcaaaactccacgttagcaccactgcctggaagggaatgcctggtggatcaagatgggagctctgatcctcaaaatcacttcttgtttggtgtaaatatagactcacagtcacttttgatgcaagatggcattccaagccttcacaatgaaaacagttcaagcacaattccatattccacatccaacttccttagcccttctcaagatgattatccattgagtcaaacactaactactccgggctgcttagatgaatcaggatatgttccatgttcagataatgctgatcaagtgaagcgaccgcatgcaacctttgtgaaggtttacaaatctggaaccgttggaaggttgctcgacatcactagatttagcagttatcatgaacttcgtagtgaggtagggcgcctttttggccttgagggccagttggaagaccctttgagatcaggctggcagcttgtatttgttgaccgagaggacgacgttcttctagttggcgatgatccgtggcaggaatttgtgaacagtgtgtcttgcataaagatactttcgccgcaggaggttcagcagatgggcaagccgggcattgaactcttctcgacttctgcaaggagacttggcaacagctgtgacaactacatgagcaggcaggaatcaagaagcctaagcactggaatcgcgtcggtgggctcagttgagttctga

SEQ ID NO: 2382 - protein, 908 aa, Oryza sativa (japonica cultivar-group)
MKLSPSAGGVSDQPPSPPEVAEEQKCLNSELWHACAGPLVSLPAVGSRVVYFPQGHSEQVAASTNKEMESQIPNYPNLPPQLICQLHNVTMHADAETDEVYAQMTLQPLSPQELKDPFLPAELGTASKQPTNYFCKTLTASDTSTHGGFSVPRRAAEKVFPPLDFTQQPPAQELMAKDLHGNEWKFRHIFRGQPKRHLLTTGWSVFVSAKRLVAGDSVLFIWNDSNQLLLGIRRANRPQTVMPSSVLSSDSMHIGLLAAAAHAASTNSRFTIFYNPRASPSEFVIPLAKYVKAVYHTRISVGMRFRMLFETEESSVRRYMGTITGISDLDPVRWMNSHWRSVKVGWDESTAGERQPRVSLWEIEPLTTFPMYPSPFPLRLKRPWPTGLPSLYGGKEDDLASSLMWLRDSQNTGFQSLNFGGLGMSPWMQPRLDSSLLGLQPDMYQTIAAAAALQNTTKQVSPAMLQFQQPQNIVGRSSLLSSQILQQAQPQFQQMYHQNINGNSIQGHSQPEYLQQPLQHCQSFNEQKPQLQPQQQQQESHQQQPQHQQMQQQKHLSNFQTVPNALSVFSQLSSTPQSTPSTLQTVSPFSQQHNFPDTNISCLSPSNVSSMHDTLRSFPSEAASDLPGVPRITPVPVSDPWSSKRVAVESTITSRPHDISSQIENFDLTPSSIPQNSTLAPLPGRECLVDQDGSSDPQNHFLFGVNIDSQSLLMQDGIPSLHNENSSSTIPYSTSNFLSPSQDDYPLSQTLTTPGCLDESGYVPCSDNADQVKRPHATFVKVYKSGTVGRLLDITRFSSYHELRSEVGRLFGLEGQLEDPLRSGWQLVFVDREDDVLLVGDDPWQEFVNSVSCIKILSPQEVQQMGKPGIELFSTSARRLGNSCDNYMSRQESRSLSTGIASVGSVEF

SEQ ID NO: 2383 - DNA, 2037 bp, Oryza sativa (japonica cultivar-group)
  CDS (1)..(2037)
atggctggctccgtcgttgctgctgctgccgccgccggcggtggcacagggagctcttgcgatgcgttgtacagggagctatggcatgcttgcgctgggccgttggtcacagtgcctcgccaaggcgaattggtttactacttcccccagggccatatggaacagcttgaggcatctacagaccaacagcttgaccagcatctgcctttgtttaacctgccatctaagatcctctgcaaagtggtcaatgtagaacttagggctgaaaccgattcagatgaggtttatgctcaaattatgctgcaaccagaagcagatcaaaatgaactcaccagcccaaaacctgagccacatgaacctgaaaaatgcaatgtccattccttctgcaagactttgactgcttcagatacaagcacccatggtggattttcagttcttaggaggcatgcagaagaatgtcttcctcccctggacatgactcagaatccaccatggcaagagcttgtggctagagatctccatggaaacgagtggcatttccgtcacatctttcgaggacaacctaggaggcatctgcttacaactggctggagtgtttttgttagctcaaaaagattagttgccggtgacgcattcatctttctgagaggtgagaatggagagctacgagttggtgtcaggaggctcatgaggcaactaaataacatgccatcatcagtaatatcaagtcatagtatgcatcttggagtcctagcaactgcatcacatgctatatccaccggaactctcttttctgttttctacaaaccaagaacaagtcagtctgagtttgttgtgagtgctaacaagtaccttgaagctaaaaacagcaagatatctgttggaatgaggtttaagatgagattcgagggcgatgaagctcctgaaagaaggtttagtggaacaattattggtgttgggagcatgtcaacgtctccatgggcaaattctgactggagatctttgaaggtccaatgggatgagccttctgtggttcctcgtccagatagagtttcaccatgggaactagagccacttgctgtgagtaattcacagccatcacctcagccaccggcaagaaataagcgggctcggcctcctgcttcgaattcaattgctccagaactacctccggtcttcggtttgtggaaatcttcagctgagtccacacaaggcttctcattttcgggactacagcgaacacaggaactatatccttcaagccccaatccgatcttctcaacatcattaaatgttggattcagtacaaagaatgagccatctgctctaagcaacaagcatttttactggccaatgagagagacaagagccaactcttactctgctagcatcagcaaagttccatctgaaaagaagcaagagcctagttcggctggctgcagattgtttggaatcgagataagctctgctgtggaagctacatctccactggctgctgtttctggtgttggtcaagaccaaccagctgcctcagtagatgctgagtctgatcagctctcacaaccatcacatgccaacaaatctgatgctccagcggcaagcagtgagccatctcctcatgagactcagagtcggcaagtgaggagctgcaccaaggtcatcatgcaaggaatggcagttggaagggcagtggacctgacaaggctccatggatatgatgatcttcgctgcaagttagaagagatgtttgatatccaaggagagctctctgctagcctaaagaaatggaaggttgtttacacagatgatgaggatgatatgatgctggttggggatgacccttggcctgaattttgcagcatggtgaaaaggatatacatctacacctacgaggaagccaagcaacttactcccaagtcgaagctgccgatcattggcgacgccatcaagccaaacccaaacaaacaatcgcccgagtctgacatgcctcacagtgacctggacagcaccgcccccgtcaccgataaggattgctga

SEQ ID NO: 2384 - protein, 678 aa, Oryza sativa (japonica cultivar-group)
MAGSVVAAAAAAGGGTGSSCDALYRELWHACAGPLVTVPRQGELVYYFPQGHMEQLEASTDQQLDQHLPLFNLPSKILCKVVNVELRAETDSDEVYAQIMLQPEADQNELTSPKPEPHEPEKCNVHSFCKTLTASDTSTHGGFSVLRRHAEECLPPLDMTQNPPWQELVARDLHGNEWHFRHIFRGQPRRHLLTTGWSVFVSSKRLVAGDAFIFLRGENGELRVGVRRLMRQLNNMPSSVISSHSMHLGVLATASHAISTGTLFSVFYKPRTSQSEFVVSANKYLEAKNSKISVGMRFKMRFEGDEAPERRFSGTIIGVGSMSTSPWANSDWRSLKVQWDEPSVVPRPDRVSPWELEPLAVSNSQPSPQPPARNKRARPPASNSIAPELPPVFGLWKSSAESTQGFSFSGLQRTQELYPSSPNPIFSTSLNVGFSTKNEPSALSNKHFYWPMRETRANSYSASISKVPSEKKQEPSSAGCRLFGIEISSAVEATSPLAAVSGVGQDQPAASVDAESDQLSQPSHANKSDAPAASSEPSPHETQSRQVRSCTKVIMQGMAVGRAVDLTRLHGYDDLRCKLEEMFDIQGELSASLKKWKVVYTDDEDDMMLVGDDPWPEFCSMVKRIYIYTYEEAKQLTPKSKLPIIGDAIKPNPNKQSPESDMPHSDLDSTAPVTDKDC

SEQ ID NO: 2385 - DNA, 2022 bp, Oryza sativa (japonica cultivar-group)
  CDS (1)..(2022)
atggccgccgcgatggagatggcggcgaatccaggtggttcaggaacctgcagcgatgcactattccgggagctatggcatgcttgtgctggtccgttggtcacggtcccgaagcgcggcgagcgcgtctactactttccccagggtcatatggaacagcttgaggcgtctacaaaccagcagcttgaccagtacctgccgatgttcaatctaccatccaagatcctatgcagcgtggtcaacgtagaactccgggcggaggctgattcagatgaagtttatgctcaaattatgctgcaaccagaagctgatcaaagtgaactcaccagtctggatcctgagcttcaagatcttgagaaatgcacagctcattccttttgcaagacattaacagcttcagatacaagcacacatggcggtttctctgttcttaggaggcatgctgaagaatgccttcctcagctggacatgtctcagaatccaccatgtcaagaactggttgccaaagatctccatggaactgagtggcatttccgtcacatctttcgtggacaacctaggaggcatctgcttacaaccggttggagtgtctttgttagctcaaaaagattggttgctggcgatgcatttatcttcctgaggggcgaaagtggtgagctacgggttggagtaaggagacttatgagacaagtaaataacatgccatcatctgtcatatcaagccacagcatgcatcttggagtccttgcaacagcttcccatgctatctccactggaaccctcttttctgttttctacaaacccagaacaagccggtctgagtttgttgtgagcgttaacaagtaccttgaagctaagaagcagaacttgtctgttggaatgaggtttaagatgagatttgaaggtgatgaagctcctgaaagaaggtttagtggaacaattattggtattgggagtgtgccagcaatgtcaaaatctccatgggcagattctgactggaaatctctgaaggtccaatgggatgaaccttcggctattgtccgtccagatagagtttcaccatgggaactggaaccattggatgcgagtaatccacaaccacctcagcctccattgaggaataagcgtgcaaggcctccagcttcaccttctgtggttgcggaacttcctccaagtttcggactatggaaacccccatctgaagcagcccaaactctctcattttcggaaccacaacgggctcgagagatatttccttcaattcctgcatcaatcttctcagcatcatcacatgttgaattcaattcaaagaacgagccatccatactaagcaatcagttctactggtcaatgagggattcaaaaactgattctttttctgctagcactaacaaaacaagagttgaaagaaagcaagaaccaactactatgggttgcagattatttggaattgaaataagctcagctgtagaagaagccctgcctgcagctactgtttcaggtgtcggttatgatcaaactgttctctctgtagatgtggactctgatcagatctcacagccatctaatggcaataaatccgatgcccctggaacaagcagtgaacgttctcctcttgagtcccaaagtcgtcaagtgaggagctgcacaaaggtaattatgcaaggtatggcagttgggagggctgtggacttgacaaaactaaatggttatggtgatcttcgcagcaagttggaggagatgtttgatatacagggggacttgtgtcccaccctgaagagatggcaagttgtttacaccgatgatgaggatgacatgatgcttgtcggggatgatccttgggatgaattttgtagcatggtgaaacggatttatatttactcctacgaggaggccaagctgctggctccaaagtctaagctgccagtcataggtgacaccatcaaattgagcagtatgaactcatcacatgaatccgtcgacctggacaatcatgcctcagttactaacagggactgctaa

SEQ ID NO: 2386 - protein, 673 aa, Oryza sativa (japonica cultivar-group)
MAAAMEMAANPGGSGTCSDALFRELWHACAGPLVTVPKRGERVYYFPQGHMEQLEASTNQQLDQYLPMFNLPSKILCSVVNVELRAEADSDEVYAQIMLQPEADQSELTSLDPELQDLEKCTAHSFCKTLTASDTSTHGGFSVLRRHAEECLPQLDMSQNPPCQELVAKDLHGTEWHFRHIFRGQPRRHLLTTGWSVFVSSKRLVAGDAFIFLRGESGELRVGVRRLMRQVNNMPSSVISSHSMHLGVLATASHAISTGTLFSVFYKPRTSRSEFVVSVNKYLEAKKQNLSVGMRFKMRFEGDEAPERRFSGTIIGIGSVPAMSKSPWADSDWKSLKVQWDEPSAIVRPDRVSPWELEPLDASNPQPPQPPLRNKRARPPASPSVVAELPPSFGLWKPPSEAAQTLSFSEPQRAREIFPSIPASIFSASSHVEFNSKNEPSILSNQFYWSMRDSKTDSFSASTNKTRVERKQEPTTMGCRLFGIEISSAVEEALPAATVSGVGYDQTVLSVDVDSDQISQPSNGNKSDAPGTSSERSPLESQSRQVRSCTKVIMQGMAVGRAVDLTKLNGYGDLRSKLEEMFDIQGDLCPTLKRWQVVYTDDEDDMMLVGDDPWDEFCSMVKRIYIYSYEEAKLLAPKSKLPVIGDTIKLSSMNSSHESVDLDNHASVTNRDC

SEQ ID NO: 2387 - DNA, 2763 bp, Oryza sativa (japonica cultivar-group)
  CDS (1)..(2763)
atggcgtcctcgcaggagaaggccaagacgggtgttctgagaaatgccgcagcgctgctcgacgaaatgcagctcatgggagaaacacagggtgccaagaaggtgatcaactcggagctctggcacgcttgtgccgggccgcttgtgtgcttgccgcagcgggggagcctcgtgtactacttccctcaggggcacagtgaacaggttgcagcgacaactagaaagattccaaattcccgcattccgaactacccaaacctgccatctcagttgctgtgtcaagttcacaacatcaccttgcatgccgacaaggacactgatgaagtttatgcacagatgacccttcagccagtaaactctgaaacggatgtattccctattccaactcttggtgcttataccaaaagcaagcaccccactgaatatttctgcaagaatttaaccgcaagtgatacgagtacacatggtggtttctcggtgccacgaagggctgcagagaagttgttcccacaactggattactcaatgcaacctcctaaccaggagcttattgttcgagatttgcatgataacatgtggacattccgtcacatttatcgtggacagccaaaacgacatcttctaacaactggatggagtctctttgttggggcaaagcgtctaaaagcaggggactctgtcttatttataagggatgagaagtcacaacttcttttgggtgttaggcgagccacgcgacaacaaacaatgttgtcatcttctgttctatctactgatagcatgcacattggcgttcttgctgctgcagctcatgccgcatcaagtggtagttcatttactatctactacaatcctaggacaagtccttcgccatttgtaattcctgtagcaaggtacaacaaggcaacatatatgcaaccatcagttggaatgagatttgcgatgatgtttgagacagaggagtcaagcaagcgcagatacacaggtacagttgtgggaataagtgactacgaccccatgagatggcccaattctaaatggcgcaacttacaggtcgaatgggatgaacatgggtatggagaaagacctgagcgtgtgagcatatgggatattgaaactccagaaaacactcttgtgttcccttcgtcgaccttgaattcaaagcggcaatgtcttcctggttatggagtttcagtgcctgggatggaaattggatcagcaaatatgtcatcatttccaagggctcagggtaatccctatggcagtttgcagcacattccagctgttggatcagaattggctatcatgcttctcaaccaatctggtcaaacccttgggagtccccttagttttcaccagtcctcatattctagtattatccaaaatgtgaagcaaaattatatccctcctctaacagttagcacttcagcttgtttgacaaagcaagaaagcctgccttcagatgatgcccagcaccagttccatatggcaaatatgcagaatggtgatcttgaaggctctgaagtccagcctgtcattgattcgatttctgagtcaaagttgaatgctacatcaagagatccaagaaacacagattcatacacaagtcgaagtacttcggagcaaaacagtaagggtgagcctagaggcaagactcgtaggagtaagaagggcttgcctcacaaaaccgtttcagagaaatctgacctttcttcagccccttcttggatctgtgacaatcagcaggttggtttagaatcgaaactggttggttgtgatgaacaagtaaactgtggaaatattgaagattcatcaggtgcacttactcaaggtaattttgttggacagccgcatggccatcaggttgaacaaaagggagtgctgtcgccaccaaaggtagaatcatcaaaatcacctgatggaggaaagtctgtcaattcgtttccaaaccaagggtgtttttcgcagttcattgatggtcttgattggatgactcagccttcctactaccaagactccaatgtaattcaaccagccggtgtgtcagagaacattttcagttcttctgcagatatacctccctcaatgattgctgatactatggagacttttcaggcttcatgtctttctgattgccttcctaattccatacaagaattcatctccagcccagatctgaattcactaacctttctttcacctgacatgcaaaatttggaggtccaactccagcatgatggaagcaatttgccaagcacgtccaactcgtttgtacagatgagtttttctgaagagagtgcaagtcagagtgcaaacttaagtggacttcacatggaatctacacacagaagcataaacaccacttcatgctctcaaccaatgtctactgggggctttgatgcagggatgtactcaaagttgccacgtttaaaagaatcccaaatcttgtctttgccagagattcataccaattccatgggaacatcagcttgcagtatggatgcaaccgagtacagccttgaccgaagtgcgaagccgatgaaaccaccagtgcggacatatacaaaggttcaaaagcaaggatcagttggaagatctatcgatgttacagggtttagaaattaccatgagttgagatctgccatcgcttgcatgtttggtctccaggggaaattggagcatcctggcagttcagagtggaagcttgtatatgtcgactacgaaaatgatgttcttcttgtcggagatgatccatgggagtaa

SEQ ID NO: 2388 - protein, 920 aa, Oryza sativa (japonica cultivar-group)
MASSQEKAKTGVLRNAAALLDEMQLMGETQGAKKVINSELWHACAGPLVCLPQRGSLVYYFPQGHSEQVAATTRKIPNSRIPNYPNLPSQLLCQVHNITLHADKDTDEVYAQMTLQPVNSETDVFPIPTLGAYTKSKHPTEYFCKNLTASDTSTHGGFSVPRRAAEKLFPQLDYSMQPPNQELIVRDLHDNMWTFRHIYRGQPKRHLLTTGWSLFVGAKRLKAGDSVLFIRDEKSQLLLGVRRATRQQTMLSSSVLSTDSMHIGVLAAAAHAASSGSSFTIYYNPRTSPSPFVIPVARYNKATYMQPSVGMRFAMMFETEESSKRRYTGTVVGISDYDPMRWPNSKWRNLQVEWDEHGYGERPERVSIWDIETPENTLVFPSSTLNSKRQCLPGYGVSVPGMEIGSANMSSFPRAQGNPYGSLQHIPAVGSELAIMLLNQSGQTLGSPLSFHQSSYSSIIQNVKQNYIPPLTVSTSACLTKQESLPSDDAQHQFHMANMQNGDLEGSEVQPVIDSISESKLNATSRDPRNTDSYTSRSTSEQNSKGEPRGKTRRSKKGLPHKTVSEKSDLSSAPSWICDNQQVGLESKLVGCDEQVNCGNIEDSSGALTQGNFVGQPHGHQVEQKGVLSPPKVESSKSPDGGKSVNSFPNQGCFSQFIDGLDWMTQPSYYQDSNVIQPAGVSENIFSSSADIPPSMIADTMETFQASCLSDCLPNSIQEFISSPDLNSLTFLSPDMQNLEVQLQHDGSNLPSTSNSFVQMSFSEESASQSANLSGLHMESTHRSINTTSCSQPMSTGGFDAGMYSKLPRLKESQILSLPEIHTNSMGTSACSMDATEYSLDRSAKPMKPPVRTYTKVQKQGSVGRSIDVTGFRNYHELRSAIACMFGLQGKLEHPGSSEWKLVYVDYENDVLLVGDDPWE

SEQ ID NO: 2389 - DNA, 2457 bp, Oryza sativa (japonica cultivar-group)
  CDS (1)..(2457)
atgagctcgtcgtcggcggccagcatcgggccgccgcagccgccgccgccccccgcgccgcccgaggaagagaagaagtgcctcaactcggagctatggcacgcctgcgccggcccgctcgtctgcctccccaccgtcggcacgcgcgtcgtctacttcccgcaaggccacagcgagcaggtggcggcgtcgacgaacaaggaggtggagggtcacatcccgaactaccccaacctgccggcgcagctgatctgccagctccacgatgtcacaatgcatgcggatgtggagactgacgaggtgtacgcgcagatgacgctccagccactgaacccacaggagcagaacgatgcgtaccttcccgcggagatggggataatgagcaagcagccgacgaattacttctgcaagacattgacggcgagcgacaccagcacgcacggggggttctccgtgccccgccgtgctgctgagcgcgtcttccctcctttggatttcacacagcagcctccagcccaggagctaattgcacgggatattcatgacatcgagtggaagttcaggcacatctttcgaggccaacccaaacgacacctgctaaccactggctggagcgtttttgtcagtgctaagagacttgttgctggagattctgtgcttttcatatggaacgagaaaaaccagcttttacttggaataagacgtgccagtcggccacagactgtgatgccttcctctgttctttcaagcgatagcatgcacataggtctccttgcagcagcagctcatgctgctgctacaaacagccgtttcactattttctacaacccccgggcaagtccatcagaatttgtcataccactgtcaaaatacatcaaggctgtttttcacacccggatatcggttgggatgcggttcaggatgttgtttgagactgaggaatcaagcgttcgcaggtatatggggactataactgaagttagtgatgcagacccagtccgttggcctagttcctattggagatctgtgaaggttggttgggatgaatcaactgcaggggaaagaccaccaagagtttctttatgggaaattgaaccattgacaacctttccaatgtatccatctctgttcccactgagagttaagcatccttggtattcaggagttgcttccctgcatgatgacagcaatgctttaatgtggctgagaggagttgctggtgagggaggttttcagtctctgaactttcagtcacctggtattggctcctggggacaacagaggctccatccatccttactgagcagcgatcacgatcagtaccaagcagtagttgctgctgctgctgcttcccaatctggtggttacttaaaacagcaattcttgcaccttcagcaacctatgcagtcccctcaagaacactgcaacctcaacccattattgcagcaacaaattctgcagcaagcaagccagcaacagataattaatcctgatgcccaaaatatccaaacgatgttgagcccaagtgctatacaacagcaactccagcaactacagcaaatgcagcaagttcagaatgatcagaagcagaagattcaaccagatcaaagctaccaagttcctacaagtgcagttctcccaagtccaacatcattaccgagtcatttgcgagaaaaatttggcttctctgatcctaatgcgaattcttcaagcttcatcacctctagcagtagtgataacatgttggattcgagcttccttcagggaagttcgaaagctgtggacttatctcgatttaatcagcctgtagctagtgagcagcagcagcagcagcaacaggcatggaagcagaagtttatgggttcacagtcagtgtcttttgggggctcggttttgcataactcacccacaagcaaagatggttctgttgaaaacaaaattggtcgtgatgtgcaaaaccagtccctttttagtccacaagttgactcttcatccctcctgtacaacatggttcctaatctgacttcgaatgtttcggatggcaacttatcaacgatcccttctggatcaacttatctgcagaatgcaatgtatggttgcttggacgactcttctggtttattgcaaaatacaggagagaacgatccagcaaccagaacatttgtgaaggtttacaagtcaggttcggttgggaggtcgttggacataacccggttctctaattatgctgaacttcgagaagaactgggtcagatgttcggcattaagggtcaattggacgaccctgatagatcaggctggcagcttgtattcgtcgacagggagaatgatgtgcttctccttggagacgacccttgggagtcctttgtgaatagtgtatggtacatcaagatactttcacctgaggatgtgcataagatgggaaagcaaggaaatgatccacggtatctgtcctga

SEQ ID NO: 2390 - protein, 818 aa, Oryza sativa (japonica cultivar-group)
MSSSSAASIGPPQPPPPPAPPEEEKKCLNSELWHACAGPLVCLPTVGTRVVYFPQGHSEQVAASTNKEVEGHIPNYPNLPAQLICQLHDVTMHADVETDEVYAQMTLQPLNPQEQNDAYLPAEMGIMSKQPTNYFCKTLTASDTSTHGGFSVPRRAAERVFPPLDFTQQPPAQELIARDIHDIEWKFRHIFRGQPKRHLLTTGWSVFVSAKRLVAGDSVLFIWNEKNQLLLGIRRASRPQTVMPSSVLSSDSMHIGLLAAAAHAAATNSRFTIFYNPRASPSEFVIPLSKYIKAVFHTRISVGMRFRMLFETEESSVRRYMGTITEVSDADPVRWPSSYWRSVKVGWDESTAGERPPRVSLWEIEPLTTFPMYPSLFPLRVKHPWYSGVASLHDDSNALMWLRGVAGEGGFQSLNFQSPGIGSWGQQRLHPSLLSSDHDQYQAVVAAAAASQSGGYLKQQFLHLQQPMQSPQEHCNLNPLLQQQILQQASQQQIINPDAQNIQTMLSPSAIQQQLQQLQQMQQVQNDQKQKIQPDQSYQVPTSAVLPSPTSLPSHLREKFGFSDPNANSSSFITSSSSDNMLDSSFLQGSSKAVDLSRFNQPVASEQQQQQQQAWKQKFMGSQSVSFGGSVLHNSPTSKDGSVENKIGRDVQNQSLFSPQVDSSSLLYNMVPNLTSNVSDGNLSTIPSGSTYLQNAMYGCLDDSSGLLQNTGENDPATRTFVKVYKSGSVGRSLDITRFSNYAELREELGQMFGIKGQLDDPDRSGWQLVFVDRENDVLLLGDDPWESFVNSVWYIKILSPEDVHKMGKQGNDPRYLS

SEQ ID NO: 2391 - DNA, 2754 bp, Oryza sativa (japonica cultivar-group)
  CDS (1)..(2754)
atgaggctttcgtcgtcgtccggcagcgtcctcccggctcaggcggcgtcgccggaagctgtagaagaacaaaaatgcctgaattcggagctctggcatgcgtgtgccggtccccttgtttcgttgcctgcagtgggtagccgagtggtttatttcccacagggtcacagcgaacaggtagctgcatcaacaaataaagaaatggagtctcagatccccaattatcctaacttgcctccacaacttatttgccaacttcacaatgtgacgatgcatgcagatgcagaaacagatgaggtttacgctcagatgacgctacaaccacttagcccgcaagagctcaaggacccatatctaccagctgaattaggttctgccaacaaacagccaacgaattatttttgcaaaacattaacggcaagtgacacaagtacgcatggcggattctctgttccccgtcgagcagctgagaaagtgttccctccgctggattttactcagcagcctccagcacaggagttaattgcaaaagatcttcatggcaatgagtggaagtttcgtcatatctttcgtggtcagccaaagcgacaccttctaactacaggctggagcgtctttgtaagtgcaaagagacttgtcgccggggattctgtcctatttatctggaatgacaacaaccagcttcttctgggaattcgtcgagctaaccgcccacaaactgttatgccatcttcagtcctatctagtgatagcatgcatattggtcttcttgctgcggctgctcatgctgcttcaacaaatagccggtttacaattttttataacccaagagcaagcccttcagagtttgttatcccactttctaaatatgttaaggctgtatatcatacccgtatatctgtgggcatgcgtttcaggatgctttttgagacagaagagtcaagtgtacggagatacatgggcacgataacaggaattagtgatcttgatgctgctcgttggccaaactcacattggcgttctgtaaaggttggctgggatgaatcaactgccggagagaggcagccaagggtgtcgctttgggagattgagcccttgacaactttcccaatgtacccatctccttttccactcagactgaagcgtccatggccaacaggcttgccttcattacatggtggtaaggatgacgacttgacttcttctctcatgtggctccgagacagcgcaaatcctggtttccaatcattgaatttcgggggtctcggtatgaatccttggatgcagccaaggtttgatgcttccttacttggtctgcaacctgacatgtatcaaacgatagctgcgactgctttccaggacccaacaaagcaggtctctcccacgatattgcagttccagcagccgcagaacataggtggcagagctaatacacttctgccaagtcagattttgcagcaagtgcagcctcagtttcagcagcagcaatacctccaaaacatcaacgagaccacaatccaagggcatgctcagtctgagttccttcagcagcagctccaacgctgccagtcgtttactgagcagaagccacagctgcaaacccagcaacaacagcaagaatcacagcaacaacagcagcagcaatcgcagtgtatgcaagtcccacaacatcagcaaatgcaacagcagaagaacatgaccaactatcagtctgtacctaatgcattgtcaccgttttctcaactctcctctccttctcagtcttcacctatgacactgcaaacagtattaccattctcccagccacagagctatccagacacgagtatgagctcattgtcaccatccaacacatccaccatgcataatgcattgaggccattttcatcggaagcaccttcgcacctaagcatgccaagaccgactgcagtacctgtccctgacccatggtcatcgaagcgagttgcagtggagtctttgcttccctctcgtcctcaggttacatcgcagatggagcagttggactcaacagcacctagtataccacaaagctctgcgttggcgccgcttcctggaagaggatgcttggtggatcaagatgggaactctgatcctcaaaaccatctgttatttggcgttaacatagattcacagtcacttctaatgcaaggtggcatcccaagcctccagggtgagaatgattcgacggcaattccttattccacctccaatttcctgagcccgtcgcagaatgatttccccttggatcaaacactaagtagtgcagactgcttagatgaatcaggatatgtgccgtgttcacagaattctgatcaagtgattaatcgaccacctgcgacctttgtgaaggtttacaaatcgggaacctatggaaggtcacttgatatcactagatttagtagctatcatgaacttcgtagagaactagggcgcctatttggccttgagggccagttggaaaaccctttgagatcaggctggcagcttgtattcgtcgaccgagaggatgatgtcctcctcgttggcgacgacccttggcaggaattcgtgaatagcgtctcctgcataaagatactttcaccacaggaggtgcagcagatgggcaagccctttgagcttttgagctcggctcccggaaagaggctaggtagcagctgtgatgactatgtgagcaggcaggaatcaagaagcctgagcacaggaattgcatctgtcggctcagttgaattctga

SEQ ID NO: 2392 - protein, 917 aa, Oryza sativa (japonica cultivar-group)
MRLSSSSGSVLPAQAASPEAVEEQKCLNSELWHACAGPLVSLPAVGSRVVYFPQGHSEQVAASTNKEMESQIPNYPNLPPQLICQLHNVTMHADAETDEVYAQMTLQPLSPQELKDPYLPAELGSANKQPTNYFCKTLTASDTSTHGGFSVPRRAAEKVFPPLDFTQQPPAQELIAKDLHGNEWKFRHIFRGQPKRHLLTTGWSVFVSAKRLVAGDSVLFIWNDNNQLLLGIRRANRPQTVMPSSVLSSDSMHIGLLAAAAHAASTNSRFTIFYNPRASPSEFVIPLSKYVKAVYHTRISVGMRFRMLFETEESSVRRYMGTITGISDLDAARWPNSHWRSVKVGWDESTAGERQPRVSLWEIEPLTTFPMYPSPFPLRLKRPWPTGLPSLHGGKDDDLTSSLMWLRDSANPGFQSLNFGGLGMNPWMQPRFDASLLGLQPDMYQTIAATAFQDPTKQVSPTILQFQQPQNIGGRANTLLPSQILQQVQPQFQQQQYLQNINETTIQGHAQSEFLQQQLQRCQSFTEQKPQLQTQQQQQESQQQQQQQSQCMQVPQHQQMQQQKNMTNYQSVPNALSPFSQLSSPSQSSPMTLQTVLPFSQPQSYPDTSMSSLSPSNTSTMHNALRPFSSEAPSHLSMPRPTAVPVPDPWSSKRVAVESLLPSRPQVTSQMEQLDSTAPSIPQSSALAPLPGRGCLVDQDGNSDPQNHLLFGVNIDSQSLLMQGGIPSLQGENDSTAIPYSTSNFLSPSQNDFPLDQTLSSADCLDESGYVPCSQNSDQVINRPPATFVKVYKSGTYGRSLDITRFSSYHELRRELGRLFGLEGQLENPLRSGWQLVFVDREDDVLLVGDDPWQEFVNSVSCIKILSPQEVQQMGKPFELLSSAPGKRLGSSCDDYVSRQESRSLSTGIASVGSVEF

SEQ ID NO: 2393 - DNA, 2103 bp, Oryza sativa (japonica cultivar-group)
  CDS (1)..(2103)
atgataactttcgtggattccgcggcgaaggagcgggagcgggagagtgacaagtgcttggacccgcagctgtggcacgcctgcgccggcggcatggtccagatgccgccggtgagctccaaggtgtactacttcccgcaaggccacgccgagcacgcgcaggggcatggccccgtcgagttcccgggcgggcgcgtcccggcgctcgtgctctgccgcgtcgcgggcgtcaggttcatggccgatccggacaccgacgaggtgttcgccaagatccgcctcgtccccgtccgcgccaacgagcagggctacgccggtgacgccgacgacggcattggcgccgccgcggccgcggcggcgcaggaggagaagcccgcgtcgttcgccaagacgctcacgcagtccgacgccaacaacggcggggggttctccgtgccgcgctactgcgccgagaccatcttcccgcgtctcgactactccgccgatccccccgtccagaccgtcctcgccaaggacgtccatggcgtggtctggaagttccgccacatctaccgcggcacgccgaggcgccacctcctcaccacggggtggagcaccttcgtgaaccagaagaagctcgtcgccggcgactccatcgtgttcatgcgcaccgagaacggggatctctgcgtcggcatccgccgcgccaagaaagggggcgtgggaggcccggagttcctgccgccgccgccgccgccgccgccgacacctgccgccggcggcaattacggcgggttctccatgttcctgaggggcgacgacgacggcaacaagatggcggcggcggccaggggcaaggtcagagcccgtgtccggccagaggaggtcgtcgaggcggccaatctcgccgtgagcgggcaaccattcgaggtcgtctactacccgagggcgagcacgccggagttctgcgtgaaggccggggcggtcagagcggcgatgcggacgcagtggttcgccggcatgaggttcaagatggcattcgagacggaggactcatcaaggatcagctggttcatgggcactgtatcggccgtgcaggttgctgaccccattagatggcctaattcaccatggaggcttcttcaggtttcatgggatgaaccggacttgttacagaatgtgaagagggtgagcccatggttggttgagcttgtgtcaaacatgccggccatccaccttgctccattctcgcctccacggaagaagctttgcgtgccgttgtaccccgagcttcccatcgacggccaatttccgacaccgatgttccatggaaacccgctcgcccgtggggttggtcctatgtgctatttcccggatggcactcctgcaggcatacagggagccaggcatgctcaatttggtatatctttatcagatctccaccttaacaaactgcagtcgagtctatcgccccacggccttcaccagcttgatcacggcatgcagccgaggatcgccgctggtctaattatcggtcatccggctgctcgggatgatatctcatgcttgttgaccattggtagcccccagaacaacaagaaatcagatggcaagaaggcgccagcccagctgatgcttttcggaaaacccatactcacagagcagcagatatccttgggtgatgctgcttcggtggatgttaagaagagctcttctgatggtaatgctgaaaatacggtgaataagagtaactccgatgtttcaagcccgagaagtaatcagaatggcaccacagataatttgtcatgtggaggagttccattgtgccaagacaacaaggtacttgatgttgggctggaaacagggcactgcaaggtattcatgcagtcggaggatgtcgggcgcacacttgatctctctgttgttggttcatatgaggaattataccggcggcttgctgacatgttcggcatcgagaaagctgagctgatgagtcatgttttctaccgtgatgcggctggggcactcaagcacactggagatgaacctttcagcgagttcacgaagacggcgcgtaggctgaatatactaacagatacaagcggcgataacttagcgaggtag

SEQ ID NO: 2394 - protein, 700 aa, Oryza sativa (japonica cultivar-group)
MITFVDSAAKERERESDKCLDPQLWHACAGGMVQMPPVSSKVYYFPQGHAEHAQGHGPVEFPGGRVPALVLCRVAGVRFMADPDTDEVFAKIRLVPVRANEQGYAGDADDGIGAAAAAAAQEEKPASFAKTLTQSDANNGGGFSVPRYCAETIFPRLDYSADPPVQTVLAKDVHGVVWKFRHIYRGTPRRHLLTTGWSTFVNQKKLVAGDSIVFMRTENGDLCVGIRRAKKGGVGGPEFLPPPPPPPPTPAAGGNYGGFSMFLRGDDDGNKMAAAARGKVRARVRPEEVVEAANLAVSGQPFEVVYYPRASTPEFCVKAGAVRAAMRTQWFAGMRFKMAFETEDSSRISWFMGTVSAVQVADPIRWPNSPWRLLQVSWDEPDLLQNVKRVSPWLVELVSNMPAIHLAPFSPPRKKLCVPLYPELPIDGQFPTPMFHGNPLARGVGPMCYFPDGTPAGIQGARHAQFGISLSDLHLNKLQSSLSPHGLHQLDHGMQPRIAAGLIIGHPAARDDISCLLTIGSPQNNKKSDGKKAPAQLMLFGKPILTEQQISLGDAASVDVKKSSSDGNAENTVNKSNSDVSSPRSNQNGTTDNLSCGGVPLCQDNKVLDVGLETGHCKVFMQSEDVGRTLDLSVVGSYEELYRRLADMFGIEKAELMSHVFYRDAAGALKHTGDEPFSEFTKTARRLNILTDTSGDNLAR

SEQ ID NO: 2395 - DNA, 2097 bp, Oryza sativa (japonica cultivar-group)
  CDS (1)..(2097)
atgaaggaggtgggggaggtggaggaggtgaggtgcttggacccgcagctatggcacgcgtgcgcgggcgggatggtgcagatgccggcgccgcgttcccgggtgtactacttcgcgcagggccacgccgagcacgccgacggcggaggcggggcggcggcggcggccgcggagctggggccgcgcgcgctcccgccgctcgtgctctgccgcgtcgaaggggtccagttcctggccgatcgggactccgacgaggtgtacgccaagatccgcctcgcgccggtcgcccccggggaggccgagttccgggagcccgacgagctctgcccgctcggcgccgccggcgacgcggcggagccgtcgccggagaagccgacctcgttcgccaagacgctcacgcagtccgacgccaacaacggcggcggcttctcggtgccccgctactgcgccgagaccatcttccccaagctggactacagggccgacccgccggtgcagacggtgctcgccaaggacgtccacggcgtggtctggaagttccgccacatctaccgcggcacgccgcgccggcatttgctcaccaccgggtggagcacgttcgtgaaccagaagaagctcgtcgcgggggactcgatcgtgttcctgcgcaccaggcacggggagctctgcgtcgggatacggcgggcgaagcggatggcgtgcggggggatggagtgcatgtcggggtggaacgcgccgggctatggcggcggcggcttctcggcgttcttaaaggaggaggagagtaagctgatgaagggccatggtggtggtgggtacatgaagggcaaggggaaggtgaggatggccgatgtcgtggaggccgctagcctcgcgtcgagcgggcagccgttcgaggtggcgtactacccgagggctagcaccccggattttgtcgtgaaggctgcgtcggtgcaggccgcaatgaggatccagtggtgctccgggatgaggttcaagatggcttttgagacagaggattcatcaaggattagctggtttatggggacaatatcttctgttcaggttgctgatcccaacagatggccgaattcgccgtggagacttcttcaggtgacatgggatgaaccggacctgttgcagaatgtgaaatgtgtcagcccatggcttgtggagcttgtgtcaagtattccaccaatccatttaggaccattttcgtcacctcgaaagaagttgcgggttcccccacatcctgacttcccatttgagggtcatcttctgaacccaattttccatgggaacccacttggtcctagcaacagcccactatgctgttacccggacaccgctcctgcaggcatacagggagccaggcatgctcaatttggtttaccactaacagaccaccagcttaacaagctgcaccttggtctgttacatagcggcagttttaacagacttgatgctattactccaccttcccggatatcaaagggctttgtggtcagtagtgcaccagcccatgacaatatctcttgtttgttgtcaatcagtacaccacaggtcgcagagaaatctgatgacagaaagacgacaccccatataatgctgtttggaaaggctatatttactgagcagcagataacttcaagcggatcaacagagacactctcccctggagttactggaaatagctcacctaatggcaatgcgcacaagacaggaaatgcatctgatggttctggttcatcaatttgcattggtttctcatctcaaggtcacgaggcttctgaccttggtttagaagctggtcactgcaaggtatttatggaatcggaggacgttggtcgcaccattgatttgtctgtctttgggtcatacgaagaactgtatggtcggctggctgacatgttcggaatcgagaaagaagaaatcataaaccatcttcatttccgtgacgcagctggtgtagtcaagcatccgggtgaggtaccattcagtgacttcatgaaagcggcacggaggcttacaataatagccggcgacagggagagaattgagagacctctcatcgaatgcttagttgagcaggcgtga

SEQ ID NO: 2396 - protein, 698 aa, Oryza sativa (japonica cultivar-group)
MKEVGEVEEVRCLDPQLWHACAGGMVQMPAPRSRVYYFAQGHAEHADGGGGAAAAAAELGPRALPPLVLCRVEGVQFLADRDSDEVYAKIRLAPVAPGEAEFREPDELCPLGAAGDAAEPSPEKPTSFAKTLTQSDANNGGGFSVPRYCAETIFPKLDYRADPPVQTVLAKDVHGVVWKFRHIYRGTPRRHLLTTGWSTFVNQKKLVAGDSIVFLRTRHGELCVGIRRAKRMACGGMECMSGWNAPGYGGGGFSAFLKEEESKLMKGHGGGGYMKGKGKVRMADVVEAASLASSGQPFEVAYYPRASTPDFVVKAASVQAAMRIQWCSGMRFKMAFETEDSSRISWFMGTISSVQVADPNRWPNSPWRLLQVTWDEPDLLQNVKCVSPWLVELVSSIPPIHLGPFSSPRKKLRVPPHPDFPFEGHLLNPIFHGNPLGPSNSPLCCYPDTAPAGIQGARHAQFGLPLTDHQLNKLHLGLLHSGSFNRLDAITPPSRISKGFVVSSAPAHDNISCLLSISTPQVAEKSDDRKTTPHIMLFGKAIFTEQQITSSGSTETLSPGVTGNSSPNGNAHKTGNASDGSGSSICIGFSSQGHEASDLGLEAGHCKVFMESEDVGRTIDLSVFGSYEELYGRLADMFGIEKEEIINHLHFRDAAGVVKHPGEVPFSDFMKAARRLTIIAGDRERIERPLIECLVEQA

SEQ ID NO: 2397 - DNA, 2523 bp, Oryza sativa (japonica cultivar-group)
  CDS (1)..(2523)
atggctgctgcagcgacggcggcggcctcgccggttgaggggctcaccggcggcggcggcggtggtggtggaggagtggacgggctgttcgtggagctgtggcgcgcgtgcgcggggccgctggtgacggtgcccgccgtcggggagagggtcttctacctcccgcagggccacatcgagcaggtggaggcatcgacgaaccaggtcgccgagcagcagggggctccgctctacaatctgccatggaagatcccgtgcaaggtcatgaacgtcgagctcaaggctgagcctgatacggatgaggtgtatgcgcagctcaccctgcttccggagaagcaggatgggaatgggagtggtaacgggaatgtgtccaaagacaaggtggaggaggaagaggtggtgccaccagctgcaactgagcggccccgggtgcactccttctgcaagacgctcactgcgtcggacacgagcacgcatggtggcttctcggtgctgcgccggcacgcggatgagtgcctcccaccactggatatgagtcagcatcccccaacacaagagctggtggccaaggatcttcatggggttgagtggcgcttccgtcacatcttccgaggtcagccacgaagacaccttctccagagtggttggagtgtttttgtgagtgccaaacgccttgttgctggagatgccttcatatttctcagaggtgagaatggggaactacgagttggagttcggcgtgcaatgagacaacaagctaatattccatcttcggtcatatcaagccacagtatgcatcttggtgttcttgcaactgcatggcatgcagtgaacactggaaccatgttcactgtgtactacaagccaaggactagtccatctgaatttgtggtaccacgtgatctgtacaaggaatctctgaaacgaaatcattcaatagggatgagattcaagatgacatttgaaggcgaagaggctgcagagcaaagattcactggcacaattgttggagtaggtgattctgacccatctggttgggctgactcaaaatggcgttcccttaaggtgcgatgggatgaagctgcttctgttcctcgtcctgatagggtttctccttggcaaatagaacctgctaacagcccttcccctgtcaaccctcttccagcaccccgaaccaagcgggctcgtccaaatgttttagcttcctcacctgacttgtctgctgtaaacaaagaagttgcttcaaaagtcatggcaaactcgcagcaaaatggtcttccaagggccttccacagtcaagaaaacatgaatttgagaagtcgttttggtgatagcaatgagctaaatacttcccaaaagcttaccatgtggtcttcaggaagcaatcaagagaaaaataatgtttctgtccagagggagctaggttcacagagttggatgcagatgagaaggcctgatggttcctctgagatattatctggatttcaaccactgaaagatacgcggaaccctctgagttcatttcctagtcagatatctggaaaccgttcaaatacgtggaacacaatcaatgttcattatcccgaccaaaatgccaatcataatatgtaccctggcacatggtctcttatgcctccaaacactggttttggtgtgaatcagcagaactacctaatgacgcctgacatcacactccctcaaaggtctcttaatgccaagtttggtgggaatggagcattcacttcgcttcgggcccatggcatagatcagcgctcctctggttggcttgggcatattgagccaagttctcacattgatgatgcctcatcgagtcttatcaagccacagcctttggttattgatcacaatgttcagaaagctaaaggctcttcatgcatgctatttgggatttctcttgacagccctgcaaaacctgaactattgatatccccaccaagtgttgcatttgatgggaagctccaacaggatgcacttgaagaggatgaatgctctgatccttccaagactgtgaagccacttgatggagctcagcacgattctgctagagagaaacatcagtcatgtccagatggtaccaaaaacattcagagtaaacagcaaaatggttcctcccgaagttgcaagaaggtccacaagcaaggaatcgcactcgggaggtcaatagatcttacaaagttcacttgctatgatgagttgattgctgaactggaccagatgtttgacttcaatggtgagctgaacagttcaagcaagaactggatggtcgtttacactgataatgagggtgacatgatgttggttggtgatgatccttggaatgaattctgcaacatggttcataaaatcttcatctacacgagggaggaggtccagaagatgaatccgggtgccctaaactcaaggtcagaggatagccggtctacttccgtggaacgagggctagttggcgaagggctccaaggtggtctatccaccccatcactgaattctgagaactgctaa

SEQ ID NO: 2398 - protein, 840 aa, Oryza sativa (japonica cultivar-group)
MAAAATAAASPVEGLTGGGGGGGGGVDGLFVELWRACAGPLVTVPAVGERVFYLPQGHIEQVEASTNQVAEQQGAPLYNLPWKIPCKVMNVELKAEPDTDEVYAQLTLLPEKQDGNGSGNGNVSKDKVEEEEVVPPAATERPRVHSFCKTLTASDTSTHGGFSVLRRHADECLPPLDMSQHPPTQELVAKDLHGVEWRFRHIFRGQPRRHLLQSGWSVFVSAKRLVAGDAFIFLRGENGELRVGVRRAMRQQANIPSSVISSHSMHLGVLATAWHAVNTGTMFTVYYKPRTSPSEFVVPRDLYKESLKRNHSIGMRFKMTFEGEEAAEQRFTGTIVGVGDSDPSGWADSKWRSLKVRWDEAASVPRPDRVSPWQIEPANSPSPVNPLPAPRTKRARPNVLASSPDLSAVNKEVASKVMANSQQNGLPRAFHSQENMNLRSRFGDSNELNTSQKLTMWSSGSNQEKNNVSVQRELGSQSWMQMRRPDGSSEILSGFQPLKDTRNPLSSFPSQISGNRSNTWNTINVHYPDQNANHNMYPGTWSLMPPNTGFGVNQQNYLMTPDITLPQRSLNAKFGGNGAFTSLRAHGIDQRSSGWLGHIEPSSHIDDASSSLIKPQPLVIDHNVQKAKGSSCMLFGISLDSPAKPELLISPPSVAFDGKLQQDALEEDECSDPSKTVKPLDGAQHDSAREKHQSCPDGTKNIQSKQQNGSSRSCKKVHKQGIALGRSIDLTKFTCYDELIAELDQMFDFNGELNSSSKNWMVVYTDNEGDMMLVGDDPWNEFCNMVHKIFIYTREEVQKMNPGALNSRSEDSRSTSVERGLVGEGLQGGLSTPSLNSENC

SEQ ID NO: 2399 - DNA, 2700 bp, Oryza sativa (japonica cultivar-group)
  CDS (1)..(2700)
atgaagctctctccgccggcgtcggcggatatgccgcaggccttgccggagaacgacggggaacaaagatgtctgaactcggagctgtggcatgcatgcgctgggccccttgtgtctttgccagtggtcaggagcagggtcgtctactttccacagggccatagcgagcaggttgcggcatcaactaataaggaagttgatgctcaaatcccaaattatccaaacttacctcctcagttaatctgccagcttcataatgtcaccatgcatgctgatgcagagacagatgaagtttatgctcagatgacattgcaaccattgagcccggaagagcaaaaggagcctttccttccaatggagttgggtgctgctagcaagcaacccactaattacttctgcaagacattgactgcaagtgacacgagcactcatggtggtttctctgttccccgccgggcagctgagaaagtcttccctccactagatttttcacagcagcctccggcacaggagctgattgcaagagatttgcatgataatgaatggaaatttcgccatatatttcgtggtcagcctaaaaggcatctcctgacaacaggctggagtgtgtttgtgagtgcgaaaagactagtagcaggagactctgttatatttatctggaatgataacaatcaacttcttttgggaatacgtcgtgcaaatcgccaacagactgttatgccctcttccgtgttgtcaagcgatagcatgcatataggtcttcttgcagcagcagctcatgctgcagccacaaatagtcgcttcactattttctataaccccagggctagcccttctgaatttgtgattccattggccaagtatgtgaaagctgtttaccacacacgtgtatctgttggaatgcgttttagaatgcttttcgagacagaggagtcaagtgtcaggcgatacatgggtacaatcaccagcataagtgatctagattcagtgcgctggccaaactcacactggcgttctgttaaggttggttgggatgagtccaccactggtgataaacagccaagggtttctctttgggagattgagcctttgacaacctttccgatgtaccccagtgcttttcctttaagacttaagcgtccgtgggcttcaggactgcctatgcatggcatgttcaatggtgggggaaatgacgattttgcacgctattcttctctcatgtggcttcgagacggaaatagaggaacccagtccctgaattttcaaggacatggagtctcaccatggcttcagccaagaatagattctccattgctgggccttaagccagacacgtaccagcaaatggctgcagcagcactggaagaaattcgatatggggacccttcaaagcagcatccagctactctgcaataccaacagactcataatctgaacagtggattaaattctctgtttgcaagccatgttctagggcaggtgcagtttcaacctcagcagtcacccctgcaagttgttcagcaaggccattgtcagaacactggtgactctgggttccttcaaggtcagcttccacggctgcagttgcataacactcagcagctgctaaaggagcaagagttgcagcagcagcaaagacagcatgttttacaagagcaatctagtcaagagatgcaacagcagctcccatctagtgatcatcatgttgctgatgtagcttctgagtctggatctgctcctcaggcacaatcatcattgcttagtggatcatcattctacaatcagaacctcttagaaggaaatagtgatccccctttacatctacacaacaatttccacaacttctctaaccaggaagcctcaaaccttcttattttgcctcgaagtagccaattaatggcatcagatgggtggccttcaaagcgattaactttagaatctgctgttcatcctgaagctccgtccatgcaccccaagattgagaaagtaaatcaccagggtatatctcattttcctggcgcctttccaccacaatcagcaagaggctgttccatcgtccaggattgcagggcagatgctgagaaccgcctactttcatcatcatttgaactccaggatggcatgacaagcatcataactgatgctaacagagaaactgatactatggccatacctttgttgagatatagtggtgcagatttgacaactgaaaacaccttagcaacctccaattgtttaggtgaatctggaacgttcaatcctcttaataacatatctgtaaatccatcacaaggagcaacctttgtgaaggtttacaaatcagggtcccttgggagatcacttgacatctccagattcagcagctactgcgagttacgtagtgagcttgagcgtctctttggtcttgaaggccaactggaggaccctgtaagatcaggctggcagcttgtatttgtcgaccgggaaaatgacattcttctcgtcggcgacgatccatggcaggagtttgcaaatagcgtatggtgcatcaaaatactctcgccacaggaggtgcagcagttggttcgtggtggagacggccttctgtcctcacctggagcaaggatgcagcagagcaatgcctgcgacgactattctgcaagccacaacatgcagaatatcgccggaaacattgcatctgtagcgcctctggactactga

SEQ ID NO: 2400 - protein, 899 aa, Oryza sativa (japonica cultivar-group)
MKLSPPASADMPQALPENDGEQRCLNSELWHACAGPLVSLPVVRSRVVYFPQGHSEQVAASTNKEVDAQIPNYPNLPPQLICQLHNVTMHADAETDEVYAQMTLQPLSPEEQKEPFLPMELGAASKQPTNYFCKTLTASDTSTHGGFSVPRRAAEKVFPPLDFSQQPPAQELIARDLHDNEWKFRHIFRGQPKRHLLTTGWSVFVSAKRLVAGDSVIFIWNDNNQLLLGIRRANRQQTVMPSSVLSSDSMHIGLLAAAAHAAATNSRFTIFYNPRASPSEFVIPLAKYVKAVYHTRVSVGMRFRMLFETEESSVRRYMGTITSISDLDSVRWPNSHWRSVKVGWDESTTGDKQPRVSLWEIEPLTTFPMYPSAFPLRLKRPWASGLPMHGMFNGGGNDDFARYSSLMWLRDGNRGTQSLNFQGHGVSPWLQPRIDSPLLGLKPDTYQQMAAAALEEIRYGDPSKQHPATLQYQQTHNLNSGLNSLFASHVLGQVQFQPQQSPLQVVQQGHCQNTGDSGFLQGQLPRLQLHNTQQLLKEQELQQQQRQHVLQEQSSQEMQQQLPSSDHHVADVASESGSAPQAQSSLLSGSSFYNQNLLEGNSDPPLHLHNNFHNFSNQEASNLLILPRSSQLMASDGWPSKRLTLESAVHPEAPSMHPKIEKVNHQGISHFPGAFPPQSARGCSIVQDCRADAENRLLSSSFELQDGMTSIITDANRETDTMAIPLLRYSGADLTTENTLATSNCLGESGTFNPLNNISVNPSQGATFVKVYKSGSLGRSLDISRFSSYCELRSELERLFGLEGQLEDPVRSGWQLVFVDRENDILLVGDDPWQEFANSVWCIKILSPQEVQQLVRGGDGLLSSPGARMQQSNACDDYSASHNMQNIAGNIASVAPLDY

SEQ ID NO: 2401 - DNA, 2559 bp, Oryza sativa (japonica cultivar-group)
  CDS (1)..(2559)
atggcgacggcggaggtcggcggcggcggcggtgagggggatgctgctgccgcggcggtggcgcgaggcggcggcggcggaggaggaggaggaggaggggaggacgcgctgttcacggagctgtggagcgcgtgcgcggggccgctggtgacggtgccgagggttggggagaaggtgttctacttcccgcaggggcacatcgagcaggtggaggcctcgaccaaccaggtaggcgagcagcggatgcagttgtacaatctcccatggaagatcctgtgtgaggttatgaacgttgagctgaaggccgagccagacaccgacgaggtttatgctcagctcactctgcttcctgaatcgaagcaacaagaagataacggctctactgaggaggaggtgccttctgctccagcagctgggcatgttaggccacgggtgcactcattctgcaagacattgaccgcctcggacacgagcacacatggcggcttctcggtgctgcgacgccacgcggacgaatgcctcccaccactggatatgagccgtcagcctccaacacaagagctggtggccaaggatctgcacggtgtggaatggcgctttcgtcacatattcagaggtcaaccacgaagacaccttttgcagagtggctggagtgtgtttgttagtgccaaacggcttgttgctggggatgcctttatctttctcagaggtgagaacggggaactgcgtgttggagtcaggcgtgcaatgaggcagcaaactaatgttccatcttcagtgatatcaagccacagcatgcatcttggggttcttgccacagcatggcatgctgttaacacagggaccatgttcactgtctactacaagcctaggacaagtccagccgagtttgtggtcccttacgatcgctatatggaatcactgaaacaaaattactccattgggatgagatttaagatgaggtttgaaggtgaagaggctccagagcaaagattcactgggactattgtcggaatgggggattctgatccagctggctggcctgaatcaaaatggcgctcccttaaggtgagatgggatgaagcttcttccatacctcgccctgaaagagtttctccctggcaaatagaacctgctgtaagccctcctcctgtcaacccactaccagttccaagaaccaagaggcttcgtccgaatgctaccgctttgccggctgactcttctgctatagcaaaagaagctgctacgaaagttgtggtcgagtctgaaccaaatggtacgcaaaggaccttccagacacaagagaatgcaaccccaaaaagtggtttcggcaatagcagcgagttagaaagtgctcagaaatcaatcatgcgtccatctggatttgatcgtgagaaaaataacactcccatacagtggaagctaggttcagatggtcggatgcagatgagcaagcctgagagttacagtgagatgctatctggatttcagccacctaaagatgtacaaatcccacagggtttctgttctttacctgagcagattactgcaggccattctaacttctggcacacagtaaatgctcagtatcaagatcaacagagcaatcacaatatgttccccagctcatggtccttcatgcctccaaatactcgccttggattaaacaaacagaactattcaatgattcaggaagctggtgtgttgtctcaaaggcctggaaatacaaagtttgggaatggagtttatgctgcactgccaggccgaggtactgagcaatactcagggggttggtttggccatatgatgccaaattcccacatggatgatacacagccacgcctgatcaagcctaaacctctggttgttgcccatggtgatgttcagaaagctaaaggtgcttcatgcaaactatttggaattcaccttgacagcccagcgaaatctgaacctttgaaatctccatcaagtgttgtatatgatgggacgccacaaacaccaggtgctactgaatggcgccgaccagatgtaactgaagtagagaaatgttctgatccttctaaggccatgaagccacttgatactccgcaaccagactctgttcctgagaagccttcttctcagcaagcttcacgaaacatgtcgtgcaaatcacaaggtgtatcaactagaagctgcaagaaggtccacaagcaaggcattgcacttggcaggtctgtggaccttacaaagtttaatggctatgaagagttgattgctgagctggatgacatgtttgatttcaatggtgaactgaagggtcctaagaaggagtggatggttgtctacactgacaacgaaggtgacatgatgctagttggggatgatccctggattgaattctgcgacatggttcacaagatcttcatctacacaagagaagaggttcagcggatgaatccgggaaccctgaactcaagatcagaagatagtcatgctaattcaatggaaaggggctcagtcggcagagaaatgcgaggctgcttgtcaacctcgtctcttaattctgagaactgctaa

SEQ ID NO: 2402 - protein, 852 aa, Oryza sativa (japonica cultivar-group)
MATAEVGGGGGEGDAAAAAVARGGGGGGGGGGGEDALFTELWSACAGPLVTVPRVGEKVFYFPQGHIEQVEASTNQVGEQRMQLYNLPWKILCEVMNVELKAEPDTDEVYAQLTLLPESKQQEDNGSTEEEVPSAPAAGHVRPRVHSFCKTLTASDTSTHGGFSVLRRHADECLPPLDMSRQPPTQELVAKDLHGVEWRFRHIFRGQPRRHLLQSGWSVFVSAKRLVAGDAFIFLRGENGELRVGVRRAMRQQTNVPSSVISSHSMHLGVLATAWHAVNTGTMFTVYYKPRTSPAEFVVPYDRYMESLKQNYSIGMRFKMRFEGEEAPEQRFTGTIVGMGDSDPAGWPESKWRSLKVRWDEASSIPRPERVSPWQIEPAVSPPPVNPLPVPRTKRLRPNATALPADSSAIAKEAATKVVVESEPNGTQRTFQTQENATPKSGFGNSSELESAQKSIMRPSGFDREKNNTPIQWKLGSDGRMQMSKPESYSEMLSGFQPPKDVQIPQGFCSLPEQITAGHSNFWHTVNAQYQDQQSNHNMFPSSWSFMPPNTRLGLNKQNYSMIQEAGVLSQRPGNTKFGNGVYAALPGRGTEQYSGGWFGHMMPNSHMDDTQPRLIKPKPLVVAHGDVQKAKGASCKLFGIHLDSPAKSEPLKSPSSVVYDGTPQTPGATEWRRPDVTEVEKCSDPSKAMKPLDTPQPDSVPEKPSSQQASRNMSCKSQGVSTRSCKKVHKQGIALGRSVDLTKFNGYEELIAELDDMFDFNGELKGPKKEWMVVYTDNEGDMMLVGDDPWIEFCDMVHKIFIYTREEVQRMNPGTLNSRSEDSHANSMERGSVGREMRGCLSTSSLNSENC

SEQ ID NO: 2403 - DNA, 2322 bp, Arabidopsis thaliana
  CDS (1)..(2322)
atgaagctgtcaacatctggattgggtcaacagggtcatgaaggagagaagtgtctgaattctgagctatggcatgcttgtgctggaccattagtctctcttccatcatctggtagtcgagttgtttactttccacagggtcacagtgaacaggtagctgctacaactaataaggaagttgatggtcacatacccaattacccaagcctaccaccacaattgatatgccagctccataatgttacaatgcatgcagatgttgagacggatgaagtctatgctcaaatgacacttcaaccattgacaccggaggagcagaaggaaacatttgtaccgattgagttggggataccgagtaagcaacctagtaattatttttgtaagactctcacagctagtgataccagtacacatggagggttttctgttcctagacgtgctgctgagaaagtgtttcctccattggattacacactgcagccaccagctcaagaactgattgcaagggatctccatgatgttgaatggaagtttaggcatatctttcggggacagcccaaacggcatctcctaactactggatggagtgtctttgtcagtgccaagcgactagtagctggagattctgtcattttcatcaggaatgaaaagaatcaactctttttgggaattcgtcatgccactcggccgcagactattgtaccatcatctgttttatctagtgatagcatgcatattggactccttgctgctgctgcacatgcttctgcaactaatagctgtttcactgttttctttcatccaagggctagccaatctgagtttgtgatacaactttccaagtacattaaagccgtttttcacacgcgtatttcagttgggatgcgctttcgcatgctcttcgagacagaagagtcgagtgtccgcaggtacatgggtactataactggtattagtgatctagattctgttcgttggccaaactctcattggcgatctgtgaaggttggttgggatgaatcgactgcaggggagagacagccaagggtttctttatgggagattgagcctctgactacctttcctatgtatccatctctttttcctctcagactaaaacgtccatggcatgctggcacatcatctttgcctgatggaaggggtgatttgggaagtggtctaacatggctaagagggggaggtggagagcagcaaggtttgcttcctctaaattatccatctgttggtttgtttccatggatgcaacaaaggctggatctcagtcaaatggggactgataataatcagcaataccaagcaatgttagctgctgggttgcagaacatcggcggtggagatcctttaagacagcagtttgtacagctgcaagagcctcaccaccaatatcttcaacaatcagcttcccataattctgatttgatgcttcagcagcaacagcagcaacaagcgtcacgccatctcatgcatgctcaaacacagattatgagtgagaatcttccgcagcagaatatgcgacaagaagttagtaaccaaccagctggacagcagcaacagctacagcaaccggaccaaaatgcatatcttaatgctttcaaaatgcaaaatggccatcttcaacagtggcagcagcaatcagagatgccatctccctcgttcatgaagtcagattttactgactcaagcaacaaatttgcaacaactgctagtccggcttctggagatggcaatcttttgaatttttctataaccggtcagtctgtactccctgagcagttaacaacagagggctggtctccaaaagcatccaacactttttctgaaccgttgtcacttccacaagcctatcctgggaagagtcttgctctagaacccggaaatccgcagaatccctctcttttcggtgttgatcccgactctggactcttcctccccagtacggttccccgctttgcttcttcatcaggagatgctgaagcttcccctatgtcactaacagattcaggatttcagaattccttatatagctgcatgcaagacacaactcatgagttattgcatggagctggacagattaactcgtccaaccaaaccaagaactttgtaaaggtttataaatctggttcggttgggcgttcattagacatctcccgattcagcagctaccacgagctgcgagaagagttagggaagatgtttgctatcgaagggttgttggaagacccccttagatcaggctggcagcttgtattcgttgacaaggaaaatgatattcttctccttggtgatgacccatgggagtaa

SEQ ID NO: 2404 - protein, 773 aa, Arabidopsis thaliana
MKLSTSGLGQQGHEGEKCLNSELWHACAGPLVSLPSSGSRVVYFPQGHSEQVAATTNKEVDGHIPNYPSLPPQLICQLHNVTMHADVETDEVYAQMTLQPLTPEEQKETFVPIELGIPSKQPSNYFCKTLTASDTSTHGGFSVPRRAAEKVFPPLDYTLQPPAQELIARDLHDVEWKFRHIFRGQPKRHLLTTGWSVFVSAKRLVAGDSVIFIRNEKNQLFLGIRHATRPQTIVPSSVLSSDSMHIGLLAAAAHASATNSCFTVFFHPRASQSEFVIQLSKYIKAVFHTRISVGMRFRMLFETEESSVRRYMGTITGISDLDSVRWPNSHWRSVKVGWDESTAGERQPRVSLWEIEPLTTFPMYPSLFPLRLKRPWHAGTSSLPDGRGDLGSGLTWLRGGGGEQQGLLPLNYPSVGLFPWMQQRLDLSQMGTDNNQQYQAMLAAGLQNIGGGDPLRQQFVQLQEPHHQYLQQSASHNSDLMLQQQQQQQASRHLMHAQTQIMSENLPQQNMRQEVSNQPAGQQQQLQQPDQNAYLNAFKMQNGHLQQWQQQSEMPSPSFMKSDFTDSSNKFATTASPASGDGNLLNFSITGQSVLPEQLTTEGWSPKASNTFSEPLSLPQAYPGKSLALEPGNPQNPSLFGVDPDSGLFLPSTVPRFASSSGDAEASPMSLTDSGFQNSLYSCMQDTTHELLHGAGQINSSNQTKNFVKVYKSGSVGRSLDISRFSSYHELREELGKMFAIEGLLEDPLRSGWQLVFVDKENDILLLGDDPWE

SEQ ID NO: 2405 - DNA, 1518 bp, Arabidopsis thaliana
  CDS (1)..(1518)
atggaaaataatggagaaatgaatgcacagcctgaattatcagttgatataaccaagacttatatgtatgagaaattatggaacatatgtgctggacctttgtgtgttcttccgaaacctggagaaaaagtttattactttcctcaagggcacatcgagctcattgagaattctacaagagatgaattggatcatatcaggccaatttttgatcttccatctaagcttcgatgtcgtgttgtggctattgatcgtaaggtagacaaaaatacagatgaagtctatgctcagatttcgttaatgcctgatacaacagaagttatgacccataatactactatggatactcgaagaccaatagtttatttttttagtaaaattttaacggcgtctgacgtcagtttaagtggtggattaattattcccaaacaatatgccattgagtgttttcctccgctggatatgtcccaaccaatatccacacaaaatcttgttgcaaaggatctctatggtcaagaatggagtttcaaacatgtctttagaggtacaccgcagagacatatgtttactagcggcggcggctggagcgtatttgcaacaacaaaaagattgattgttggggatatatttgtactccttagaggagagaatggggagttacgatttggtattaggcgagcaaagcatcaacaaggccacataccttcatcagtaatatcagcaaattgtatgcaacatggagtaatagcttcagtagtgaatgcttttaaaaccaaatgcatgttcaatgtggtttataagccaagttcaagtcaatttgttataagctatgacaaatttgttgatgcaatgaacaataattacattgttggttcgagatttaggatgcagtttgagggtaaggatttttctgaaaaaagatacgatgggacgattattggtgtaaatgacatgtctcctcattggaaggattcagaatggcgaagcctaaaagtgcaatgggacgagctttcaccatttctaagacctaatcaggtttcaccttgggacatcgagcatctaattccttcgtcagatatctctcaatcaagtttgaaaaagaaaaaacattggcttcaattgaatgaaattggtgcaacattatcgaatctttggacatgccaagaaattggacaacggagcatgaattctcctataagtgttcctgagtttagttatcccaatgcaattgaagattcaaagtttctttctggtttgctactgaatcactcactcctagccatacctaatgaaaactataacagcgaccaaatgattcaaccaaggaaagaagatataacaactgaagcaaccactagttgcctcttgtttggagttgatctgaccaaagtatcaaagagcaaagattccatctgtccaattgaatcatgcaaaaaatcagaaatttcaaaactcaaaaatcaaaaagcaaccactagttgcctcaagataaaaagtttgaccaaacccaacctctga

SEQ ID NO: 2406 - protein, 505 aa, Arabidopsis thaliana
MENNGEMNAQPELSVDITKTYMYEKLWNICAGPLCVLPKPGEKVYYFPQGHIELIENSTRDELDHIRPIFDLPSKLRCRVVAIDRKVDKNTDEVYAQISLMPDTTEVMTHNTTMDTRRPIVYFFSKILTASDVSLSGGLIIPKQYAIECFPPLDMSQPISTQNLVAKDLYGQEWSFKHVFRGTPQRHMFTSGGGWSVFATTKRLIVGDIFVLLRGENGELRFGIRRAKHQQGHIPSSVISANCMQHGVIASVVNAFKTKCMFNVVYKPSSSQFVISYDKFVDAMNNNYIVGSRFRMQFEGKDFSEKRYDGTIIGVNDMSPHWKDSEWRSLKVQWDELSPFLRPNQVSPWDIEHLIPSSDISQSSLKKKKHWLQLNEIGATLSNLWTCQEIGQRSMNSPISVPEFSYPNAIEDSKFLSGLLLNHSLLAIPNENYNSDQMIQPRKEDITTEATTSCLLFGVDLTKVSKSKDSICPIESCKKSEISKLKNQKATTSCLKIKSLTKPNL

SEQ ID NO: 2407 - DNA, 1773 bp, Arabidopsis thaliana
  CDS (1)..(1773)
atggaaactggcaacgttgtgaatgcacaacctgaattatcaggcataattgatggatccaagagctatatgtacgagcagttatggaaactctgtgcgggacctttgtgtgatattccaaaacttggagaaaatgtttattactttcctcaaggcaatatagagcttgttgatgcatctacaagagaagagttgaatgagttacaaccaatttgtgatcttccttctaagcttcaatgccgtgttattgcaattcatcttaaggtggaaaacaatagtgatgagacttatgctgagatcactttgatgccagatacaactcaagttgtaatccctactcagagtgaaaatcaatttaggccattagttaattcctttacgaaggttttaacggcctctgatacaagcgcttatggtggattctttgttccgaaaaaacatgccattgaatgtctccctccactgcctctaccggcacaagaacttcttgctaaagatctccatggtaatcaatggagattcagacacagctatagaggtacaccgcaaagacattcgttaacaactggttggaatgaattcacaacatcgaaaaagttggttaaaggagatgttattgtattcgttaggggagagactggagagttacgagttggtatcagacgagcaagacatcaacaagggaatataccttcatcaatagtatcaatagattgtatgagacatggggtaattgcttccgcaaagcatgctcttgataaccaatgtatattcattgtggtttacaagccaagtatcaggtcaagtcaatttattgtcagttacgacaaattcttagacgctatgaacaataagttcattgtcggttcaagatttacaatgcggtttgagggtgatgatttctctgaaagaagatattttgggacaattattggagttaatgatttctctcctcattggaagtgttcagagtggcgcagcttagaagttcagtgggatgaatttgcatcattttcgagacctaataaagtgtcaccctgggagatcgaacatttaatgtctgcgttaaatgttccgcgatcatctttgctcaagaacaagcgtttacgagaagttaatgaattcggacaagaaattggacaactaagcgtcgcctccccgatgaatacttctcttcgttatcgtgatacaactgaagatgctatgaatccttctagattgctaatgagctaccctgtccaaccaatgcccaaactaaattacaataaccaaatggttacacaaatagaagaaaatataacaaccaaggcagtcactaattttaggctgtttggagtctctctagccattcctctagtgatcaaagatcccattgaagaaattggctcggatatttcgaaacttactgaaggaaaaaagtttggtcaaagccaaactttgagatcaccaatagagatccaaagcaagcagtttggttctactagaacttgtaccaaagttcaaatgcaaggtgtaacaataggaagagctgtggatttaagtgttcttaatggatatgatcagctaatactagaattggagaagctctttgatctcaaaggccaactacaaactcgcaaccaatggaaaatagctttcacagatagtgacgggtatgagatgcttgttggagacgatccatggcctgaattctgcaaaatggtgaagaagatattgatatattcaaaagaggaggtcaaaaacctaaagtccagtaagagtctctcaagttga

SEQ ID NO: 2408 - protein, 590 aa, Arabidopsis thaliana
METGNVVNAQPELSGIIDGSKSYMYEQLWKLCAGPLCDIPKLGENVYYFPQGNIELVDASTREELNELQPICDLPSKLQCRVIAIHLKVENNSDETYAEITLMPDTTQVVIPTQSENQFRPLVNSFTKVLTASDTSAYGGFFVPKKHAIECLPPLPLPAQELLAKDLHGNQWRFRHSYRGTPQRHSLTTGWNEFTTSKKLVKGDVIVFVRGETGELRVGIRRARHQQGNIPSSIVSIDCMRHGVIASAKHALDNQCIFIVVYKPSIRSSQFIVSYDKFLDAMNNKFIVGSRFTMRFEGDDFSERRYFGTIIGVNDFSPHWKCSEWRSLEVQWDEFASFSRPNKVSPWEIEHLMSALNVPRSSLLKNKRLREVNEFGQEIGQLSVASPMNTSLRYRDTTEDAMNPSRLLMSYPVQPMPKLNYNNQMVTQIEENITTKAVTNFRLFGVSLAIPLVIKDPIEEIGSDISKLTEGKKFGQSQTLRSPIEIQSKQFGSTRTCTKVQMQGVTIGRAVDLSVLNGYDQLILELEKLFDLKGQLQTRNQWKIAFTDSDGYEMLVGDDPWPEFCKMVKKILIYSKEEVKNLKSSKSLSS

SEQ ID NO: 2409 - DNA, 1797 bp, Arabidopsis thaliana
  CDS (1)..(1797)
atggaaactggcaacgttgtgaatgcacaacctgaattatcaggcataattgatagatccaagagctatatgtacgagcagttatggaaactctgtgcgggacctttgtgtgatattccaaaacttggagaaaaggtttattactttcctcaaggcaatatagagcttgttgaggcatctacaagagaagagttgaatgagttacaaccaatttgtgatcttccttctaagcttcaatgtcgtgttattgcaattcatcttaaggtggaaaacaatagtgatgagacttatgctaagatcactttgatgccagatacaactgtaagtgaaaatttacaagttgtaatccctactcagaatgaaaatcaatttaggccattagttaattcctttacaaaggttttaactgcctctgatataagtgctaatggtgtattttctgttccgaaaaaacatgccattgaatgtctccctcctctggatatgtctcagcctctaccggcacaagaacttcttgctatagatctccatggtaatcaatggagcttcagacacagctatagaggtacaccgcaaagacatttattaacaactggttggaatgaatttacaacatcaaaaaaattggttaaaggagatgttattgtattcgttaggggagagactggagagttacgagttggtatcagacgagcaagacatcaacaagggaatataccttcatcaatagtatcaatagattgtatgagacatggggtaattgcttccgcaaagcatgcttttgataaccaatgtatgttcattgtggtttacaagccaaggtcaagtcaatttattgtcagttacgacaaattcttagacgctgtgaacaataagttcaatgtcggttcaagatttacaatgcggtttgagggtgatgatttatctgaaagaagatattttgggacaattattggagttagtaatttctctcctcattggaagtgttcagactggcgcagcttagaagtgcagtgggatgaatttgcatcatttttgagacctaataaagtgtcaccctgggagatcgaacatttaatgcctgcgttaaatgttccgcgatcatcttttctcaagaacaagcgtttacgagaagttaatgaattcggttcttcatcatcacatctcttgcctcctatattgacacaaggacaagaaattggacaactaagcgtggcctccccgatgaatatttctcttctttatcgtgaaacaacagaagatgctatgaatccttctagattgctaatgagctaccctgtccaaccaatgcccaaacgaaattacaataaccaaatggttacacaaatagaagaaaatataacaaccaaggcaggcactaattttaggttgtttggagtctctctggccactcctccggtgatcaaagatcccattgaacaaattggctcggatatttcgaaacttactgaaggaaaaaagtttggtcaaagccaaactttgagatcaccaacaaaaatccaaagcaagcagttcagttctactagaacttgtacgaaagttcaaatgcaaggtgtaacaataggaagagctgtggatttaagtgttcttaatggatatgatcagctaatactagaattggagaagctcttcgatctcaaaggccaattacaaactcgcaaccaatggaaaataattttcacaggtagtgacgaggatgagatgcttgttggagacgatccatggcctgaattctgcaacatggtgaagaggatatatattcaaaagaggaggtaa

SEQ ID NO: 2410 - protein, 598 aa, Arabidopsis thaliana
METGNVVNAQPELSGIIDRSKSYMYEQLWKLCAGPLCDIPKLGEKVYYFPQGNIELVEASTREELNELQPICDLPSKLQCRVIAIHLKVENNSDETYAKITLMPDTTVSENLQVVIPTQNENQFRPLVNSFTKVLTASDISANGVFSVPKKHAIECLPPLDMSQPLPAQELLAIDLHGNQWSFRHSYRGTPQRHLLTTGWNEFTTSKKLVKGDVIVFVRGETGELRVGIRRARHQQGNIPSSIVSIDCMRHGVIASAKHAFDNQCMFIVVYKPRSSQFIVSYDKFLDAVNNKFNVGSRFTMRFEGDDLSERRYFGTIIGVSNFSPHWKCSDWRSLEVQWDEFASFLRPNKVSPWEIEHLMPALNVPRSSFLKNKRLREVNEFGSSSSHLLPPILTQGQEIGQLSVASPMNISLLYRETTEDAMNPSRLLMSYPVQPMPKRNYNNQMVTQIEENITTKAGTNFRLFGVSLATPPVIKDPIEQIGSDISKLTEGKKFGQSQTLRSPTKIQSKQFSSTRTCTKVQMQGVTIGRAVDLSVLNGYDQLILELEKLFDLKGQLQTRNQWKIIFTGSDEDEMLVGDDPWPEFCNMVKRIYIQKRR

SEQ ID NO: 2411 - DNA, 3453 bp, Arabidopsis thaliana
  CDS (1)..(3453)
atgaaagctccttcatcaaatggagtttctcctaatcctgttgaaggagaaaggagaaatataaactcagagctatggcacgcttgtgctgggccattgatttcgttgcctccagcaggaagtcttgttgtttacttccctcaaggtcacagtgagcaagtcgcggcttcaatgcagaagcagactgatttcataccaagttacccgaatcttccttccaagctcatatgcatgctccacaatgttacactgaatgctgatcctgagacggatgaggtctatgcgcagatgactcttcagccagtaaacaaatatgacagagatgcattgcttgcttctgacatgggtcttaagctaaacagacaacctaatgaatttttctgcaaaaccctcacggcgagtgacacaagtactcacggtggattttctgtaccccgacgagctgctgagaaaatctttcctgctctggatttctcgatgcaaccaccttgtcaggagcttgttgctaaggatattcatgacaacacatggactttcagacatatttatcgaggtcaaccaaaaaggcacttgctaactacaggctggagtgtgtttgtcagcacgaaaaggctctttgctggagactctgttctttttataagagatggaaaggcgcaacttctgttggggataagacgtgcaaatagacaacagcctgcactttcttcatctgtaatatcaagtgatagcatgcacatcggagttcttgcagctgcagctcatgctaatgctaataacagtcctttcaccattttctacaacccgaggtgggctgctcctgctgagtttgtggttcctttagccaagtataccaaagcgatgtacgctcaagtttccctcggtatgcggtttagaatgatatttgagactgaagaatgtggagttcgtcggtatatgggtacagttaccggtatcagtgatcttgatccagtgagatggaaaaactctcagtggcggaatcttcagattggatgggatgagtcagctgctggtgataggcccagtcgagtttcagtttgggacattgaaccggttttaactcctttctacatatgtcctcctccatttttccgacctcgcttttctggacaacctggaatgccagatgatgagactgacatggagtctgcactgaagagagcaatgccatggcttgataatagcttagagatgaaagacccttcgagtactatctttcctggtctgagtttagttcagtggatgaatatgcagcagcagaacggccagctaccctctgctgctgcacagccaggtttcttcccatcaatgctttcgccaaccgcggcgctgcacaacaatcttggcggcactgatgatccctccaagttactgagctttcagacgccgcacggggggatttcctcctcaaatctccaatttaacaaacagaatcagcaagccccaatgtctcagttgcctcagccaccaactacgttgtcccaacaacagcagctgcagcaattgttgcactcctctttgaaccatcaacaacagcaatcgcagtctcaacaacagcaacaacaacaacagttgctgcagcagcaacaacaattgcagtctcaacaacacagcaacaacaatcaatcgcagtctcagcaacaacaacaattgctccagcagcaacaacaacaacaactgcagcaacaacatcaacaaccgttacagcaacagactcagcagcagcagctaagaacacagccattgcaatctcactcgcatccacagccacaacagttacaacaacataagttgcagcaacttcaggttccacagaatcagctttacaatggtcaacaagcagcgcagcagcatcagtcgcaacaagcatctacacatcatttgcaaccacaattagtttcgggatcaatggcaagcagtgtcatcacgcctccgtccagctcccttaatcaaagctttcaacagcaacaacaacagtctaagcaacttcaacaagcacatcaccatttaggtgctagcactagccagagtagtgtaattgaaaccagcaagtcttcatccaatctgatgtccgcaccgccgcaagagacacagttttcacgacaagtagaacagcagcagcctcctggtctcaacgggcagaatcagcaaacacttttgcagcagaaagctcaccaggcacaggcccaacagatattccagcagagtctcttggaacagccgcatatacagtttcagctgttacagagattacaacagcaacagcagcagcaatttctttcgccgcagtctcagttaccacaccatcaattgcaaagccagcagttgcaacagctgcctactctctctcaaggtcatcagtttccgtcatcttgcactaacaatggcttatcgacgttgcaaccacctcaaatgctggtgagccgacctcaggaaaaacaaaacccaccggttgggggaggggtcaaagcttattcaggcatcacagatggaggagatgcaccttcctcttcaacgtcgccttccaccaacaactgtcagatctcttcttcaggctttctcaacagaagccaaagcgggccagcgatcttgatacctgatgcagcgattgatatgtctggtaatcttgttcaggatctttacagcaaatccgatatgcggctaaaacaagaactcgtgggtcagcaaaagtccaaagctagtttaacagatcatcaactagaagcatctgcctctggaacttcttacggtttagatggaggcgaaaacaacagacaacaaaatttcttggctccaacttttggccttgacggtgattccaggaacagcttgctcggtggagctaatgttgataatggctttgtgcctgacacgctactctcgaggggatatgactcccagaaagatcttcagaacatgctttcaaactatggaggagtgacaaatgacattggtacagagatgtctacttcagctgtaagaactcaatcttttggtgtccccaatgtgcccgccatttcgaacgatctagctgtcaacgatgctggagttcttggtggtggattgtggccagctcagactcagcgaatgcgaacttatacaaaggtgcaaaaacgaggctcagtggggagatcaatagacgtcaaccgttacagaggttacgatgagctgaggcatgatctagcgcgcatgtttgggatcgaaggacagctcgaagatcctcaaacatctgactggaaacttgtttatgtcgatcatgaaaatgacatcctcctcgtcggcgatgatccatgggaagaattcgtaaactgtgttcagagcattaagatcctttcatcagctgaggttcagcagatgagcttagacgggaactttgccggtgtaccagttactaatcaagcttgtagtggcgccacttcgtttaaccggtga

SEQ ID NO: 2412 - protein, 1150 aa, Arabidopsis thaliana
MKAPSSNGVSPNPVEGERRNINSELWHACAGPLISLPPAGSLVVYFPQGHSEQVAASMQKQTDFIPSYPNLPSKLICMLHNVTLNADPETDEVYAQMTLQPVNKYDRDALLASDMGLKLNRQPNEFFCKTLTASDTSTHGGFSVPRRAAEKIFPALDFSMQPPCQELVAKDIHDNTWTFRHIYRGQPKRHLLTTGWSVFVSTKRLFAGDSVLFIRDGKAQLLLGIRRANRQQPALSSSVISSDSMHIGVLAAAAHANANNSPFTIFYNPRWAAPAEFVVPLAKYTKAMYAQVSLGMRFRMIFETEECGVRRYMGTVTGISDLDPVRWKNSQWRNLQIGWDESAAGDRPSRVSVWDIEPVLTPFYICPPPFFRPRFSGQPGMPDDETDMESALKRAMPWLDNSLEMKDPSSTIFPGLSLVQWMNMQQQNGQLPSAAAQPGFFPSMLSPTAALHNNLGGTDDPSKLLSFQTPHGGISSSNLQFNKQNQQAPMSQLPQPPTTLSQQQQLQQLLHSSLNHQQQQSQSQQQQQQQQLLQQQQQLQSQQHSNNNQSQSQQQQQLLQQQQQQQLQQQHQQPLQQQTQQQQLRTQPLQSHSHPQPQQLQQHKLQQLQVPQNQLYNGQQAAQQHQSQQASTHHLQPQLVSGSMASSVITPPSSSLNQSFQQQQQQSKQLQQAHHHLGASTSQSSVIETSKSSSNLMSAPPQETQFSRQVEQQQPPGLNGQNQQTLLQQKAHQAQAQQIFQQSLLEQPHIQFQLLQRLQQQQQQQFLSPQSQLPHHQLQSQQLQQLPTLSQGHQFPSSCTNNGLSTLQPPQMLVSRPQEKQNPPVGGGVKAYSGITDGGDAPSSSTSPSTNNCQISSSGFLNRSQSGPAILIPDAAIDMSGNLVQDLYSKSDMRLKQELVGQQKSKASLTDHQLEASASGTSYGLDGGENNRQQNFLAPTFGLDGDSRNSLLGGANVDNGFVPDTLLSRGYDSQKDLQNMLSNYGGVTNDIGTEMSTSAVRTQSFGVPNVPAISNDLAVNDAGVLGGGLWPAQTQRMRTYTKVQKRGSVGRSIDVNRYRGYDELRHDLARMFGIEGQLEDPQTSDWKLVYVDHENDILLVGDDPWEEFVNCVQSIKILSSAEVQQMSLDGNFAGVPVTNQACSGATSFNR

SEQ ID NO: 2413 - DNA, 1989 bp, Arabidopsis thaliana
  CDS (1)..(1989)
atggcagcttccaatcattcatctggtaaacctggaggagttttaagtgatgctttatgtagggagctctggcatgcctgtgctggacctcttgtaaccctacctcgtgaaggggaacgagtttattatttccctgaaggccacatggagcagctcgaggcatcaatgcaccaaggtttggagcaacagatgccttccttcaacctcccatctaagatcctctgtaaagttatcaacatccagcgcagggcagagcccgagactgacgaagtatatgcgcaaataaccttattgccagaactggatcaaagcgaacccactagcccagatgcccctgttcaagaacctgaaaagtgcaccgtacattcattttgcaagacactaactgcttcagacacaagcacacatggtggcttctcggtgctacggagacatgcagatgattgtctcccacccttggatatgtcccaacaaccaccgtggcaagaattggttgcaactgatttgcacaatagtgaatggcattttaggcacattttccgaggccaaccaaggcgtcatttgctaacaactggatggagtgtttttgttagctcgaagaaactagtggctggtgatgctttcatattcttaaggggtgagaatgaagagctccgagtaggtgttaggcggcacatgagacaacagactaatatcccgtcatctgtcatttcaagtcatagcatgcatattggggtccttgcaacagcagctcatgccattacaacaggaacaatcttttctgtcttctacaagccaaggacaagtaggtcagagtttattgtgagcgtcaataggtatctcgaagctaagacccagaagctgtctgtaggcatgcgtttcaagatgagattcgagggggaagaagctcccgagaaaaggttcagtggcacaatagttggtgttcaggaaaataagtcttcggtctggcatgattctgaatggagatcgctaaaggttcaatgggacgaaccctcatctgtatttcgtcctgaaagagtttcaccttgggaacttgagcccctagttgcaaatagtactccgtcttcacaacctcagcctccgcaaaggaacaaacgaccaagacctcctggtttaccttcaccagccactggtccatctggtcctgatggtgtgtggaaatccccggcagacactccttcctcagtgccattattctctcctcctgccaaagctgctacgtttggtcatggtgggaacaaatcatttggagtatctattggatcagccttttggcccaccaatgcagatagtgcagctgaatcctttgcttcagcgtttaacaatgaatctactgaaaagaaacaaactaatggaaatgtctgtaggctttttgggtttgagctagttgaaaatgttaatgtggatgaatgtttctctgctgcctctgtgtctggtgctgtcgctgtagatcaacctgtcccatccaacgagtttgactctggccagcaatctgagccattaaacatcaaccaatctgatattccttcggggagtggtgaccctgagaaatcctctttgaggtctcctcaagaatcacaaagtagacagatacgtagctgcacaaaggtgcacatgcaaggcagtgcagtaggcagagctattgatttgacaaggtcagagtgttatgaagatctgttcaagaagctggaagagatgtttgatatcaagggtgaactcttagaatctaccaaaaaatggcaagtcgtttacaccgatgatgaagatgacatgatgatggttggtgatgatccatggaatgagttctgtggaatggtgaggaagatattcatctacacacctgaggaagtgaagaaactttcaccgaagaacaaactcgcagtcaatgcaaggatgcagctcaaagctgatgcagaggaaaatgggaatacagagggcagatcatcatctatggcgggatcaagatga

SEQ ID NO: 2414 - protein, 662 aa, Arabidopsis thaliana
MAASNHSSGKPGGVLSDALCRELWHACAGPLVTLPREGERVYYFPEGHMEQLEASMHQGLEQQMPSFNLPSKILCKVINIQRRAEPETDEVYAQITLLPELDQSEPTSPDAPVQEPEKCTVHSFCKTLTASDTSTHGGFSVLRRHADDCLPPLDMSQQPPWQELVATDLHNSEWHFRHIFRGQPRRHLLTTGWSVFVSSKKLVAGDAFIFLRGENEELRVGVRRHMRQQTNIPSSVISSHSMHIGVLATAAHAITTGTIFSVFYKPRTSRSEFIVSVNRYLEAKTQKLSVGMRFKMRFEGEEAPEKRFSGTIVGVQENKSSVWHDSEWRSLKVQWDEPSSVFRPERVSPWELEPLVANSTPSSQPQPPQRNKRPRPPGLPSPATGPSGPDGVWKSPADTPSSVPLFSPPAKAATFGHGGNKSFGVSIGSAFWPTNADSAAESFASAFNNESTEKKQTNGNVCRLFGFELVENVNVDECFSAASVSGAVAVDQPVPSNEFDSGQQSEPLNINQSDIPSGSGDPEKSSLRSPQESQSRQIRSCTKVHMQGSAVGRAIDLTRSECYEDLFKKLEEMFDIKGELLESTKKWQVVYTDDEDDMMMVGDDPWNEFCGMVRKIFIYTPEEVKKLSPKNKLAVNARMQLKADAEENGNTEGRSSSMAGSR

SEQ ID NO: 2415 - DNA, 3498 bp, Arabidopsis thaliana
  CDS (1)..(3498)
atgaaagctccttcatcaaatggagtttctcctaatcctgttgaaggagaaaggagaaatataaactcagagctatggcacgcttgtgctgggccattgatttcgttgcctccagcaggaagtcttgttgtttacttccctcaaggtcacagtgagcaagtcgcggcttcaatgcagaagcagactgatttcataccaagttacccgaatcttccttccaagctcatatgcatgctccacaatgttacactgaatgctgatcctgagacggatgaggtctatgcgcagatgactcttcagccagtaaacaaatatgacagagatgcattgcttgcttctgacatgggtcttaagctaaacagacaacctaatgaatttttctgcaaaaccctcacggcgagtgacacaagtactcacggtggattttctgtaccccgacgagctgctgagaaaatctttcctgctctggatttctcgatgcaaccaccttgtcaggagcttgttgctaaggatattcatgacaacacatggactttcagacatatttatcgaggtcaaccaaaaaggcacttgctaactacaggctggagtgtgtttgtcagcacgaaaaggctctttgctggagactctgttctttttataagagatggaaaggcgcaacttctgttggggataagacgtgcaaatagacaacagcctgcactttcttcatctgtaatatcaagtgatagcatgcacatcggagttcttgcagctgcagctcatgctaatgctaataacagtcctttcaccattttctacaacccgaggtgggctgctcctgctgagtttgtggttcctttagccaagtataccaaagcgatgtacgctcaagtttccctcggtatgcggtttagaatgatatttgagactgaagaatgtggagttcgtcggtatatgggtacagttaccggtatcagtgatcttgatccagtgagatggaaaaactctcagtggcggaatcttcagattggatgggatgagtcagctgctggtgataggcccagtcgagtttcagtttgggacattgaaccggttttaactcctttctacatatgtcctcctccatttttccgacctcgcttttctggacaacctggaatgccagatgatgagactgacatggagtctgcactgaagagagcaatgccatggcttgataatagcttagagatgaaagacccttcgagtactatctttcctggtctgagtttagttcagtggatgaatatgcagcagcagaacggccagctaccctctgctgctgcacagccaggtttcttcccatcaatgctttcgccaaccgcggcgctgcacaacaatcttggcggcactgatgatccctccaagttactgagctttcagacgccgcacggggggatttcctcctcaaatctccaatttaacaaacagaatcagcaagccccaatgtctcagttgcctcagccaccaactacgttgtcccaacaacagcagctgcagcaattgttgcactcctctttgaaccatcaacaacagcaatcgcagtctcaacaacagcaacaacaacaacagttgctgcagcagcaacaacaattgcagtctcaacaacacagcaacaacaatcaatcgcagtctcagcaacaacaacaattgctccagcagcaacaacaacaacaactgcagcaacaacatcaacaaccgttacagcaacagactcagcagcagcagctaagaacacagccattgcaatctcactcgcatccacagccacaacagttacaacaacataagttgcagcaacttcaggttccacagaatcagctttacaatggtcaacaagcagcgcagcagcatcagtcgcaacaagcatctacacatcatttgcaaccacaattagtttcgggatcaatggcaagcagtgtcatcacgcctccgtccagctcccttaatcaaagctttcaacagcaacaacaacagtctaagcaacttcaacaagcacatcaccatttaggtgctagcactagccagagtagtgtaattgaaaccagcaagtcttcatccaatctgatgtccgcaccgccgcaagagacacagttttcacgacaagtagaacagcagcagcctcctggtctcaacgggcagaatcagcaaacacttttgcagcagaaagctcaccaggcacaggcccaacagatattccagcagagtctcttggaacagccgcatatacagtttcagctgttacagagattacaacagcaacagcagcagcaatttctttcgccgcagtctcagttaccacaccatcaattgcaaagccagcagttgcaacagctgcctactctctctcaaggtcatcagtttccgtcatcttgcactaacaatggcttatcgacgttgcaaccacctcaaatgctggtgagccgacctcaggaaaaacaaaacccaccggttgggggaggggtcaaagcttattcaggcatcacagatggaggagatgcaccttcctcttcaacgtcgccttccaccaacaactgtcagatctcttcttcaggctttctcaacagaagccaaagcgggccagcgatcttgatacctgatgcagcgattgatatgtctggtaatcttgttcaggatctttacagcaaatccgatatgcggctaaaacaagaactcgtgggtcagcaaaagtccaaagctagtttaacagatcatcaactagaagcatctgcctctggaacttcttacggtttagatggaggcgaaaacaacagacaacaaaatttcttggctccaacttttggccttgacggtgattccaggaacagcttgctcggtggagctaatgttgataatggctttgtgcctgacacgctactctcgaggggatatgactcccagaaagatcttcagaacatgctttcaaactatggaggagtgacaaatgacattggtacagagatgtctacttcagctgtaagaactcaatcttttggtgtccccaatgtgcccgccatttcgaacgatctagctgtcaacgatgctggagttcttggtggtggattgtggccagctcagactcagcgaatgcgaacttatacaaaggtgcaaaaacgaggctcagtggggagatcaatagacgtcaaccgttacagaggttacgatgagctgaggcatgatctagcgcgcatgtttgggatcgaaggacagctcgaagatcctcaaacatctgactggaaacttgtttatgtcgatcatgaaaatgacatcctcctcgtcggcgatgatccatgggaagaattcgtaaactgtgttcagagcattaagatcctttcatcagctgaggttcagcagatgagcttagacgggaactttgccggtgtaccagttactaatcaagcttgtagtggcggtgacagtggcaatgcttggagaggtcattatgatgataactcagccacttcgtttaaccggtga

SEQ ID NO: 2416 - protein, 1165 aa, Arabidopsis thaliana
MKAPSSNGVSPNPVEGERRNINSELWHACAGPLISLPPAGSLVVYFPQGHSEQVAASMQKQTDFIPSYPNLPSKLICMLHNVTLNADPETDEVYAQMTLQPVNKYDRDALLASDMGLKLNRQPNEFFCKTLTASDTSTHGGFSVPRRAAEKIFPALDFSMQPPCQELVAKDIHDNTWTFRHIYRGQPKRHLLTTGWSVFVSTKRLFAGDSVLFIRDGKAQLLLGIRRANRQQPALSSSVISSDSMHIGVLAAAAHANANNSPFTIFYNPRWAAPAEFVVPLAKYTKAMYAQVSLGMRFRMIFETEECGVRRYMGTVTGISDLDPVRWKNSQWRNLQIGWDESAAGDRPSRVSVWDIEPVLTPFYICPPPFFRPRFSGQPGMPDDETDMESALKRAMPWLDNSLEMKDPSSTIFPGLSLVQWMNMQQQNGQLPSAAAQPGFFPSMLSPTAALHNNLGGTDDPSKLLSFQTPHGGISSSNLQFNKQNQQAPMSQLPQPPTTLSQQQQLQQLLHSSLNHQQQQSQSQQQQQQQQLLQQQQQLQSQQHSNNNQSQSQQQQQLLQQQQQQQLQQQHQQPLQQQTQQQQLRTQPLQSHSHPQPQQLQQHKLQQLQVPQNQLYNGQQAAQQHQSQQASTHHLQPQLVSGSMASSVITPPSSSLNQSFQQQQQQSKQLQQAHHHLGASTSQSSVIETSKSSSNLMSAPPQETQFSRQVEQQQPPGLNGQNQQTLLQQKAHQAQAQQIFQQSLLEQPHIQFQLLQRLQQQQQQQFLSPQSQLPHHQLQSQQLQQLPTLSQGHQFPSSCTNNGLSTLQPPQMLVSRPQEKQNPPVGGGVKAYSGITDGGDAPSSSTSPSTNNCQISSSGFLNRSQSGPAILIPDAAIDMSGNLVQDLYSKSDMRLKQELVGQQKSKASLTDHQLEASASGTSYGLDGGENNRQQNFLAPTFGLDGDSRNSLLGGANVDNGFVPDTLLSRGYDSQKDLQNMLSNYGGVTNDIGTEMSTSAVRTQSFGVPNVPAISNDLAVNDAGVLGGGLWPAQTQRMRTYTKVQKRGSVGRSIDVNRYRGYDELRHDLARMFGIEGQLEDPQTSDWKLVYVDHENDILLVGDDPWEEFVNCVQSIKILSSAEVQQMSLDGNFAGVPVTNQACSGGDSGNAWRGHYDDNSATSFNR

SEQ ID NO: 2417 - DNA, 2040 bp, Oryza sativa subsp
  CDS (1)..(2040)
atgtcgtcgcaaggtgacgcgctgcctctggttcttgttttgttcttgttcttgtttttgttttgttttgtttgccgggagctgcaagagccgacggacccggcgctgctggcggagcaaatcaagatgttccaggtgccgtacaagatcctctgcaaggtcgtcaacgtcgagctcaaggccgagacggaaaccgacgaggtgttcgcgcagattaccctgcagcctgacccggatcaagagaatctgccaacattacctgacccgcccctgccggagcagccgaggcctgtggtgcactccttctgcaagatcctgaccccatccgacaccagcacccatggcgggttctccgtgctccgacggcatgccaacgagtgcctcccgccactggatatgtccatggcgacaccaacccaagagctcatcacaaaggaccttcatggatctgagtggaggtttaagcacatctacaggggccaaccccgtaggcatcttctgactactggatggagcacgtttgtgacatcgaagaagctgatttctggcgacgcgtttgtctacttgaggagtgagacaggagagcagcgtgtcggagtgaggcgtcttgtgcagaaacagagcacaatgccggcatctgttatatcaagccaaagcatgcatcttggtgtgcttgcaagtgcatctcatgctatcaagactaattcaattttcctagtgtactacaggccaaggttaagccaaagccaatatattgttagtgtgaataagtaccttgcggctagtaaggttggatttaatgtgggcatgaggttcaagatgagttttgaaggggaagacgtcccggttaaaaagttttctggaactatagttggtgaaggtgatctttctctgcagtggtcaggttctgaatggaagtccttgaaggtccaatgggatgaagtcacaaatgttaatggccctgagagggtttccccttgggaaattgaaacatgtgatggcactgcacctgccatcaatgtacccctgcagtcagcaacgaaaaacaagcggcctagggagccaagtgaaactattgaccttcaatcactggaaccagctcaagagttttggctatctggaatgccacaacagcatgagaagacaggtattggttccagtgaacctaattgtatctctggacatcaagttgtttggccaggcgagcatccaggatatggtgccgtgagtagttcagtttgtcagaatccgctagtacttgaaagttggttgaaggatttcaactcttcaaacaagggtgtctcccctaccttgtcagagatttctcagaaaatttttcaggttaccagcaatgaagcaagaattgctacatggcctgcacgttctgcttaccaagctgaggagcccacttccaagttgtcttcgaacaccgctgcctgtggttaccgaactgaagaagttgctccaaatgcgtccaaggttgttgaaggaaaaaaggaacctgccatgtttcgtctgtttggtgtggatttgatgaaatgtaccagcatatctactaccactgatgacaagtcaagtgtgggagcaggagaagcttcagccaaaggtactggttctcacgaagactctggtcagctgtcagcattctcaaaagtgacaaaagagcatattgctgcggatgaaagcccccaagagatccaaagccatcagaattacaccgctagaactcgcataaaggttcaaatgcatggaaatgctgtgggcagagctgtggatctagctaatctagacggatatgagcaactgatgaatgagctggaagagatgttcaatataaaggacctcaaacaaaaatggaaggtggctttcactgatgatgagggtgacacaatggaagttggagatgatccttggctggaattttgccagatggtcagaaagattgtgctctatcccattgaagacgagaagaagatcgagcctcacccgaagttactgtcttcagctaatccagagcaggatcagaagactgggttttag

SEQ ID NO: 2418 - protein, 679 aa, Oryza sativa subsp
MSSQGDALPLVLVLFLFLFLFCFVCRELQEPTDPALLAEQIKMFQVPYKILCKVVNVELKAETETDEVFAQITLQPDPDQENLPTLPDPPLPEQPRPVVHSFCKILTPSDTSTHGGFSVLRRHANECLPPLDMSMATPTQELITKDLHGSEWRFKHIYRGQPRRHLLTTGWSTFVTSKKLISGDAFVYLRSETGEQRVGVRRLVQKQSTMPASVISSQSMHLGVLASASHAIKTNSIFLVYYRPRLSQSQYIVSVNKYLAASKVGFNVGMRFKMSFEGEDVPVKKFSGTIVGEGDLSLQWSGSEWKSLKVQWDEVTNVNGPERVSPWEIETCDGTAPAINVPLQSATKNKRPREPSETIDLQSLEPAQEFWLSGMPQQHEKTGIGSSEPNCISGHQVVWPGEHPGYGAVSSSVCQNPLVLESWLKDFNSSNKGVSPTLSEISQKIFQVTSNEARIATWPARSAYQAEEPTSKLSSNTAACGYRTEEVAPNASKVVEGKKEPAMFRLFGVDLMKCTSISTTTDDKSSVGAGEASAKGTGSHEDSGQLSAFSKVTKEHIAADESPQEIQSHQNYTARTRIKVQMHGNAVGRAVDLANLDGYEQLMNELEEMFNIKDLKQKWKVAFTDDEGDTMEVGDDPWLEFCQMVRKIVLYPIEDEKKIEPHPKLLSSANPEQDQKTGF

SEQ ID NO: 2419 - DNA, 2562 bp, Oryza sativa subsp
  CDS (1)..(2562)
atggctccccctcccccgccgcagggctcctccacaggggatccgctctacgacgagctgtggcacgcctgcgcggggccgctcgtcaccgtgccgcgggtgggcgacctcgtcttctacttcccgcaggggcacatcgagcaggtggaggcgtccatgaaccaggttgccgacagccagatgcgcctctacgatctgccctccaagctgctttgccgtgtcctcaacgtcgagctcaaggcggagcaagacaccgacgaggtctacgcgcaggtcatgctcatgccggagcccgagcaaaatgagatggcggtggagaagacgactcctacgtccggccctgtgcaggcaaggccgccggtgaggtccttctgcaagacgctcaccgcgtctgacaccagcacgcacggcggcttctctgtactccgccgccacgctgatgagtgcctccctcccctggatatgacccagtcgccacccacacaggagctcgtggccaaggatctgcacagcatggactggcgcttccgtcacatctttcgcgggcaaccgaggaggcatctccttcagagtggttggagtgtgtttgtcagttccaaaaggcttgttgctggggatgctttcattttcctcagaggagagaatggtgaactccgtgttggtgttagacgagctatgaggcagctgtccaatgtgccttcttcagtcatatctagccaaagcatgcacctgggagtccttgctactgcatggcatgctatcaacacgaagagtatgttcaccgtctactacaaacctaggacgagcccttcagagttcattataccatatgatcagtatatggagtccgtcaaaaacaattactctgttgggatgaggttcaggatgaggtttgaaggagaagaggcaccagagcagaggtttactggtactataattggcagtgagaatctcgacccagtgtggcctgaatcaagttggagatccctgaaggtgcggtgggatgaaccatcaactattccgcggccagatagagtctctccttggaaaatagagcctgcttcatcacctcctgttaacccccttcctctttctagggttaaaagacctaggccaaatgctcctccagcatctcctgaatctcctattcttacgaaagaagctgctactaaggttgacactgatcctgctcaagcacaacgaagtcaaaacagtacggtcttgcaaggtcaagaacaaatgaccttgaggagcaaccttactgagagtaatgactctgatgtcactgctcataagccaatgatgtggtctccatccccaaatgctgcaaaagcccaccccttgacatttcagcagagaccccctatggataattggatgcagttgggaaggcgtgaaactgactttaaggatgtccgttctggctctcaatcttttggtgattccccaggcttctttatgcagaattttgatgaggctcctaaccgtcttacttctttcaagaaccagtttcaggatcaaggttctgctcggcacttctctgacccatactactatgtatctccacagccttccctaactgttgaatcaagcacacagatgcacacagacagtaaggagttacatttctggaatggccagagtactgtgtatggtaattcgagagaccgaccacagaatttcagattcgaacagaactcatcaagttggttaaatcagtcatttgcccgacctgaacagccaagagtgattagaccgcatgcatcaatagctccagttgagttggaaaaaacagaaggcagtgggtttaagatttttgggtttaaagttgatacaaccaatgctcctaacaatcacttgagctccccgatggctgcaacacatgagcctatgcttcaaactccatcatcattgaatcagttgcaacctgtacaaactgattgcattcctgaggtatcagtaagcacagctggaacggcgactgagaatgagaaaagcggtcagcaagctcaacagagttcaaaagatgttcaaagcaagactcaggttgcttcgacgaggagttgtacaaagcacatgaagttttttcttctcgtagttgacatgctgaagttctcgttttgcaaatttcttgcaaaatctcagttttatcccctttgtggtatggtccataagcaaggcgttgcacttggcagatctgtggatctttcaaagttcagtaactatgatgaactcaaagctgagctagacaagatgtttgaattcgatggtgaattggtgtcttcaaacaaaaactggcaaattgtttatactgataatgagggtgatatgatgcttgttggagacgacccatgggaagaattctgcagcattgtgcggaagatttatatttacaccaaggaggaggtccagaagatgaattcgaaatcaaatgccccaaggaaagatgactcttcagaaaatgagaaaggttcagtgaagcgagatgatacaagagatggaggagtactccagaaagctgcctccgctagtgtgctctcaatactgcgctacagtagctag

SEQ ID NO: 2420 - protein, 853 aa, Oryza sativa subsp
MAPPPPPQGSSTGDPLYDELWHACAGPLVTVPRVGDLVFYFPQGHIEQVEASMNQVADSQMRLYDLPSKLLCRVLNVELKAEQDTDEVYAQVMLMPEPEQNEMAVEKTTPTSGPVQARPPVRSFCKTLTASDTSTHGGFSVLRRHADECLPPLDMTQSPPTQELVAKDLHSMDWRFRHIFRGQPRRHLLQSGWSVFVSSKRLVAGDAFIFLRGENGELRVGVRRAMRQLSNVPSSVISSQSMHLGVLATAWHAINTKSMFTVYYKPRTSPSEFIIPYDQYMESVKNNYSVGMRFRMRFEGEEAPEQRFTGTIIGSENLDPVWPESSWRSLKVRWDEPSTIPRPDRVSPWKIEPASSPPVNPLPLSRVKRPRPNAPPASPESPILTKEAATKVDTDPAQAQRSQNSTVLQGQEQMTLRSNLTESNDSDVTAHKPMMWSPSPNAAKAHPLTFQQRPPMDNWMQLGRRETDFKDVRSGSQSFGDSPGFFMQNFDEAPNRLTSFKNQFQDQGSARHFSDPYYYVSPQPSLTVESSTQMHTDSKELHFWNGQSTVYGNSRDRPQNFRFEQNSSSWLNQSFARPEQPRVIRPHASIAPVELEKTEGSGFKIFGFKVDTTNAPNNHLSSPMAATHEPMLQTPSSLNQLQPVQTDCIPEVSVSTAGTATENEKSGQQAQQSSKDVQSKTQVASTRSCTKHMKFFLLVVDMLKFSFCKFLAKSQFYPLCGMVHKQGVALGRSVDLSKFSNYDELKAELDKMFEFDGELVSSNKNWQIVYTDNEGDMMLVGDDPWEEFCSIVRKIYIYTKEEVQKMNSKSNAPRKDDSSENEKGSVKRDDTRDGGVLQKAASASVLSILRYSS

SEQ ID NO: 2421 - DNA, 3435 bp, Oryza sativa subsp
  CDS (1)..(3435)
atggcgagcatgaagcagcagcagacgccggcgagctccgcggtgaccgcggcggcggcggcctcctcctccgccaccgccgccgtggccgcatgcgaaggggagcggaaggcggcggcgatcaactcggagctgtggcacgcgtgcgccggcccgctcgtgtcgctgccgccggtgggcagcctcgtcgtctacttcccgcaaggccacagcgagcagctactaataactgtacttgttcattaccaaagtggttgggagcattgggcctactggcttcccttttctgttgacctactagtatggtcaatagacagtcttgggaggactaatcctgcaattattcgtgcatttctttttagaaagatgagaaaaaaggtgtacaaaagtaacataatattaagaaatgctttctccatgctattggaaacagcagaatatctacttaatctaagctttttgtttcaggttgcagcttctatgcaaaaggatgtggatgcacatgttccaagctacccaaatcttccctccaagttgatatgtcttcttcacggtgtcaatttgcatgcagacccagatactgatgaagtttatgcacagatgactcttcaaccagtgaatacatatggaaaagaggcgttgcaactatcagagcttgcactaaaacaagcaaggccacaaatggaattcttctgtaagacactcaccgcaagtgatacaagtacacatggaggattctctgtgcctcgccgtgccgcagagaagatattccctcccctggacttctctatgcaacctccagctcaagaactgcaagctagagatatacatgacaatgtgtggacatttcgtcatatatatcgaggtcaaccaaaaagacatttacttactactggttggagccttttcgtgagtggcaagagattatttgctggtgattctgttattgttgtgagaaggcactgtgatagtaatcagatatctttaggaatgcggtttcgcatgatgtttgaaaccgaggaattaggaacaagaaggtacatgggtacaataactggaataagtgacctagatcctgttggctgggatgagtctgcagctggtgaaaggaggaacagagtttcaatctgggagattgaaccggttgcagctcccttttttctatgtccccaacctttttttggtgtgaagcgccccaggcaattagatgacgagtcagagatggaaaaccttttcaagagggcaatgccttggcttggtgaggaggtatgcataaaggatactcaaaaccagaacagtacagcacctggtctaagtttggttcagtggatgaacatgaacaggcagcagagctcatcattggctaacaccgctgcgcagtctgagtacctgcaagctctaggtaaccctgccatgcaaaaccttgctgctgatgaacttgcaaggcaactatatgtccagaacaatctccttcaacagaactgcatacagtttaattctcccaagctccctcagcaaatgcaaaccatgaacgatctgtccaaggcggcaattccgttgaatcagcttggtgctatcatcaatcctcaagatcagaaacaagatgctgtcaaccatcagagacagcagaactccatacaagtgattcccctgagccaagctcaatctaatctcgtccaggctcaggtgattgttcagaatcagatgcaacagcagaagccatctccaactcaaaacccgcaaaggattaatggccagcggctgcttttgtctcatcaacagaaggatcaaaatttacagctgcaacagcagcttttacttcagcaaaaacaacagttacagcagcagcagcagcagcaacaacagaatcagcagcagctaaataagtcccttggacagttggtaaatctggcaagtcagcagtctaagttgtttgatgaggagcttcagttgcagatattacagaaactgcagcagcaatcactgatgtcacaatccacatcaacactctcacagccacctctgatccaagaacagcaaaagttaatcacggacatgcaaaagcagttgtcaaattcacattcacttgctcagcaacaaatgatgccccaacaagaaatcaagccttcattgcaagcaacaccattgctacccacggtccagcaagagcaacagcagaagcttttacagaaacaagtctcacttgcagatgtgtcaggagttgcttttcaaccaatttcatcaaccaatgtgatccccaaaactggaggtgctatgatcatttcgggtgctacacaatctgtagttacagaggaaatgccctcttgttcaacatctccatccacagctaatggaaaccactttacacaatcaaccaaaaacagacattgcatcaacacagaaaggctgccaccgtccactgctccaatgttgatcccaacctccattgacgctgtaacagcaactccactaatgaccaaggaattgccaaagccgaataataatgtgaagcaaagtgttgtcaactcaaaattaccaaatgttgctcctggcccacaaaattgtataaaccatgcattgcaaacagacaacttggaaacatcttcatcagcaacttcattatgtccttcccgaacagatggacttgtgcatcaaggtttcccctcttctaacttcaatcaacaccagatgttcaaagatgcacttcctgatgtagaaatggaaggtgtggatccaagtaacagttgcttgtttgggatcaacaatgataacctgttaggattcccaatagaaacagaggacttgctgataaatgcacttgattctgtcaagtatcagaatcacatatcaactgatgttgaaaacaactacccgatgcaaaaggatgcactgcaagaaatatcaacctccatggtttcccagtcatttggtcagtcggatatggcttttaattccattgattctgcgatcaatgatggtgccttcttgaacaaaaattcctggcccgctgcccctctgctgcagagaatgcggacattcaccaaggtgtacaaacgaggagctgtaggccggtctattgacatcggcaggtactctggatatgaagagttgaagcatgctttggctcgcatgtttggtatagagggtcaacttgaagatcgacagagaataggctggaaactggtctacaaggatcacgaggatgacatcctgcttcttggtgatgacccatgggaggagtttgtgaactgtgtaagatgcattaggattctatcacctcaagaagtgcaacagatgagcttggatggtgatctggggagcaatgtcctccccaaccaggcttgcagcagctcagatggggtgaatggttggaggcctcgctgtgaccagaaccccgggaacccttccatcggcccgtatgatcaattcgaatga

SEQ ID NO: 2422 - protein, 1144 aa, Oryza sativa subsp
MASMKQQQTPASSAVTAAAAASSSATAAVAACEGERKAAAINSELWHACAGPLVSLPPVGSLVVYFPQGHSEQLLITVLVHYQSGWEHWAYWLPFSVDLLVWSIDSLGRTNPAIIRAFLFRKMRKKVYKSNIILRNAFSMLLETAEYLLNLSFLFQVAASMQKDVDAHVPSYPNLPSKLICLLHGVNLHADPDTDEVYAQMTLQPVNTYGKEALQLSELALKQARPQMEFFCKTLTASDTSTHGGFSVPRRAAEKIFPPLDFSMQPPAQELQARDIHDNVWTFRHIYRGQPKRHLLTTGWSLFVSGKRLFAGDSVIVVRRHCDSNQISLGMRFRMMFETEELGTRRYMGTITGISDLDPVGWDESAAGERRNRVSIWEIEPVAAPFFLCPQPFFGVKRPRQLDDESEMENLFKRAMPWLGEEVCIKDTQNQNSTAPGLSLVQWMNMNRQQSSSLANTAAQSEYLQALGNPAMQNLAADELARQLYVQNNLLQQNCIQFNSPKLPQQMQTMNDLSKAAIPLNQLGAIINPQDQKQDAVNHQRQQNSIQVIPLSQAQSNLVQAQVIVQNQMQQQKPSPTQNPQRINGQRLLLSHQQKDQNLQLQQQLLLQQKQQLQQQQQQQQQNQQQLNKSLGQLVNLASQQSKLFDEELQLQILQKLQQQSLMSQSTSTLSQPPLIQEQQKLITDMQKQLSNSHSLAQQQMMPQQEIKPSLQATPLLPTVQQEQQQKLLQKQVSLADVSGVAFQPISSTNVIPKTGGAMIISGATQSVVTEEMPSCSTSPSTANGNHFTQSTKNRHCINTERLPPSTAPMLIPTSIDAVTATPLMTKELPKPNNNVKQSVVNSKLPNVAPGPQNCINHALQTDNLETSSSATSLCPSRTDGLVHQGFPSSNFNQHQMFKDALPDVEMEGVDPSNSCLFGINNDNLLGFPIETEDLLINALDSVKYQNHISTDVENNYPMQKDALQEISTSMVSQSFGQSDMAFNSIDSAINDGAFLNKNSWPAAPLLQRMRTFTKVYKRGAVGRSIDIGRYSGYEELKHALARMFGIEGQLEDRQRIGWKLVYKDHEDDILLLGDDPWEEFVNCVRCIRILSPQEVQQMSLDGDLGSNVLPNQACSSSDGVNGWRPRCDQNPGNPSIGPYDQFE

SEQ ID NO: 2423 - DNA, 2064 bp, Oryza sativa subsp
  CDS (1)..(2064)
atggctggctccgtcgttgctgctgctgctgccggcggcggtggcacagggagctcttgcgatgcgttgtacagggagctatggcatgcttgcgctgggccgttggtcacagtgcctcgccaaggcgaattggtttactacttcccccagggccatatggaacagcttgaggcatctacagaccaacagcttgaccagcatctgcctttgtttaacctgccatctaagatcctctgcaaagtggtcaatgtagaacttagggctgaaaccgattcagatgaggtttatgctcaaattatgctgcaaccagaagcagatcaaaatgaactcaccagcccaaaacctgagccacatgaacctgaaaaatgcaatgtccattccttctgcaagactttgactgcttcagatacaagcacccatggtggattttcagttcttaggaggcatgcagaagaatgtcttcctcccctggacatgactcagaatccaccatggcaagagcttgtggctagagatctccatggaaacgagtggcatttccgtcacatctttcgagggtccccccaccactcccttattttaggacaacctaggagacatctgcttacaactggctggagtgtttttgttagctcaaaaagattagttgctggtgacgcattcatctttctgagaggtgagaatggagagctacgagttggtgtcaggaggctcatgaggcaacttaataacatgccatcatcagtaatatcaagtcatagtatgcatcttggagtcctagcaactgcatcacatgctatatccactggaactctcttttctgttttctacaaaccaagaacaagtcagtctgagtttgttgtgagtgctaacaagtaccttgaagctaaaaacagcaagatatctgttggaatgaggtttaagatgagattcgagggcgatgaagctcctgaaagaaggtttagtggaacaattattggtgttgggagcatgtcaacgtctccatgggcaaattctgactggagatctttgaaggtccaatgggatgagccttctgtggttcctcgtccagatagagtttcaccatgggaactagagccacttgctgtgagtaattcacagccatcacctcagccaccggcaagaaataagcgggctcggcctcctgcttcgagttcaattgctccagaactacctccggtcttcggtttgtggaaatcttcagctgagtccacacaaggcttctcattttcgggactacagcgaacacaggaactatatccttcaagccccaatccgatcttctcaacatcattaaatgttggattcagtacaaagaatgagccatctgctctaagcaacaagcatttttactggccaatgagagagacaagagccgactcttactctgctagcatcagcaaagttccatctgaaaagaagcaagagcctagttcggctggctgcagattgtttggaatcgagataagctctgctgtggaagctacatctccactggctgctgtttctggtgttggtcaagaccaactagctgcctcagtagatgctgagtctgatcagctctcacaaccatcacatgccaacaaatctgatgctccagcggcaagcagtgagccatctccccatgagactcagagtcggcaagtgaggagctgcaccaaggtcatcatgcaaggaatggcagttggaagggcagtggacctgacaaggctccatggatatgatgatcttcgctgcaagttagaagagatgtttgatatccaaggagagctctctgctagcctaaagaaatggaaggttgtttacacagatgatgaggatgatatgatgctggttggggatgacccttggcctgaattttgcagcatggtgaaaaggatatacatctacacctacgaggaagccaagcaacttactcccaagtcgaagctgccgatcattggcgacgccatcaagccaaacccaaacaaacaatcgcccgagtctgacatgcctcacagtgacctggacagcactgcccccgtcaccgataaggattgctga

SEQ ID NO: 2424 - protein, 687 aa, Oryza sativa subsp
MAGSVVAAAAAGGGGTGSSCDALYRELWHACAGPLVTVPRQGELVYYFPQGHMEQLEASTDQQLDQHLPLFNLPSKILCKVVNVELRAETDSDEVYAQIMLQPEADQNELTSPKPEPHEPEKCNVHSFCKTLTASDTSTHGGFSVLRRHAEECLPPLDMTQNPPWQELVARDLHGNEWHFRHIFRGSPHHSLILGQPRRHLLTTGWSVFVSSKRLVAGDAFIFLRGENGELRVGVRRLMRQLNNMPSSVISSHSMHLGVLATASHAISTGTLFSVFYKPRTSQSEFVVSANKYLEAKNSKISVGMRFKMRFEGDEAPERRFSGTIIGVGSMSTSPWANSDWRSLKVQWDEPSVVPRPDRVSPWELEPLAVSNSQPSPQPPARNKRARPPASSSIAPELPPVFGLWKSSAESTQGFSFSGLQRTQELYPSSPNPIFSTSLNVGFSTKNEPSALSNKHFYWPMRETRADSYSASISKVPSEKKQEPSSAGCRLFGIEISSAVEATSPLAAVSGVGQDQLAASVDAESDQLSQPSHANKSDAPAASSEPSPHETQSRQVRSCTKVIMQGMAVGRAVDLTRLHGYDDLRCKLEEMFDIQGELSASLKKWKVVYTDDEDDMMLVGDDPWPEFCSMVKRIYIYTYEEAKQLTPKSKLPIIGDAIKPNPNKQSPESDMPHSDLDSTAPVTDKDC

SEQ ID NO: 2425 - DNA, 1563 bp, Oryza sativa subsp
  CDS (1)..(1563)
atggagatggcggcgaatccaggtggttcaggaacctgcagcgatgcactattccgggagctatggcatgcttgtgctggtccgttggtcacggtcccgaagcgcggcgagcgcgtctactactttccccagggtcatatggaacagcttgaggcgtctacaaaccagcagcttgaccagtacctgccgatgttcaatctaccatccaagatcctatgcagcgtggtcaacgtagaactccgggcggaggctgattcagatgaagtttatgctcaaattatgctgcaaccagaagctgatcaaagtgaactcaccagtctggatcctgagcttcaagatcttgagaaatgcacagctcattccttttgcaagacattaacagcttcagatacaagcacacatggcggtttctctgttcttaggaggcatgctgaagaatgccttcctcagctggacatgtctcagaatccaccatgtcaagaactggttgccaaagatctccatggaactgagtggcatttccgtcacatctttcgtggacaacctaggaggcatctgcttacaaccggttggagtgtctttgttagctcaaaaagattggttgctggcgatgcatttatcttcctgaggggtgaaagtggtgagctacgggttggagtaaggagacttatgagacaagtaaataacatgccatcatctgtcatatcaagccacagcatgcatcttggagtccttgcaacagcttcccatgctatctccactggaaccctcttttctgttttctacaaacccagaacaagccggtctgagtttgttgtgagcgttaacaagtaccttgaagctaagaagcagaacttgtctgttggaatgaggtttaagatgagatttgaaggtgatgaagctcctgaaagaaggtttagtggaacaattattggtattgggagtgtgccagcaatgtcaaaatctccatgggcagattctgactggaaatctctgaaggtccaatgggatgaaccttcggctattgtctgtccagatagagtttcaccatgggaactggaaccattggatgcgagtaatccacaaccacctcagcctccattgaggaataagcgtgcaaggcctccagcttcaccttctgtggttgcggaacttcctccaagtttcgatgtggactctgatcagatctcacagccatctaatggcaataaatccgatgcccctggaacaagcagtgaacgttctcctctgagtcccaaagtcgtcaacaagttggaggagatgtttgatatacagggggacttgtgtcccaccctgaagagatggcaagttgtttacaccgatgatgaggatgacatgatgcttgtcggggatgatccttgggatgaattttgtagcatggtgaaacggatttatatttactcctacgaggaggccaagctgctggctccaaagtctaagctgccagtcataggtgacaccatcaaattgagcagtatgaactcatcacatgaatccgtcgacctggacaatcatgcctcagttactaacagggactgctaa

SEQ ID NO: 2426 - protein, 520 aa, Oryza sativa subsp
MEMAANPGGSGTCSDALFRELWHACAGPLVTVPKRGERVYYFPQGHMEQLEASTNQQLDQYLPMFNLPSKILCSVVNVELRAEADSDEVYAQIMLQPEADQSELTSLDPELQDLEKCTAHSFCKTLTASDTSTHGGFSVLRRHAEECLPQLDMSQNPPCQELVAKDLHGTEWHFRHIFRGQPRRHLLTTGWSVFVSSKRLVAGDAFIFLRGESGELRVGVRRLMRQVNNMPSSVISSHSMHLGVLATASHAISTGTLFSVFYKPRTSRSEFVVSVNKYLEAKKQNLSVGMRFKMRFEGDEAPERRFSGTIIGIGSVPAMSKSPWADSDWKSLKVQWDEPSAIVCPDRVSPWELEPLDASNPQPPQPPLRNKRARPPASPSVVAELPPSFDVDSDQISQPSNGNKSDAPGTSSERSPLSPKVVNKLEEMFDIQGDLCPTLKRWQVVYTDDEDDMMLVGDDPWDEFCSMVKRIYIYSYEEAKLLAPKSKLPVIGDTIKLSSMNSSHESVDLDNHASVTNRDC

SEQ ID NO: 2427 - DNA, 1980 bp, Oryza sativa subsp
  CDS (1)..(1980)
atgagagttttggattggcaagtttggtgggtgagcggtgatcgcatttgggggttggagatgaaggaggtgggggaggtggaggaggtgaggtgcttggacccgcagctatggcacgcgtgcgcgggcgggatggtgcagatgccggcgccgcgttcccgggtgtactacttcgcgcagggccacgccgagcacgccgacggcggaggcggggcggcggcggcagccgcggagctggggccgcgcgcgctcccgccgctcgtgctctgccgcgtcgaaggggtccagttcctggccgatcgggactccgacgaggtgtacgccaagatccgcctcgcgccggtcgcccccggggaggccgagttccgggagcccgacgagctctgcccgctcggcgccgccggcgacgcggcggagccgtcgccggaaaagccgacctcgttcgccaagacgctcacgcagtccgacgccaacaacggcggcggcttctcggtgccccgctactgcgccgagaccatcttccccaagctggactacagggccgacccaccggtgcagacggtgctcgccaaggacgtccacggcgtggtctggaagttccgccacatctaccgcggcacgccgcgccggcatttgctcaccaccgggtggagcacgttcgtgaaccagaagaagctcgtcgcgggggactcgatcgtgttcctgcgcaccaggcacggggagctctgcgtcgggatacggcgggcgaagcggatggcgtgcggggggatggagtgcatgtcggggtggaacgcgccgggctatggcggcggcggcttctcggcgttcttgaaggaggaggagagtaagctgatgaagggccatggtggtggtgggtacatgaagggcaaggggaaggtgaggatggccgatgtcgtggaggccgctagcctcgcgtcgagcgggcagccgttcgaggtggcgtactacccgagggctagcaccccggattttgtcgtgaaggccgcgtcggtgcaggccgcaatgaggatccagtggtgctccgggatgaggttcaagatggcttttgagacagaggattcatcaaggattagctggtttatggggacaatatcttctgttcaggttgctgatcccaacagatggccgaattcgccgtggagacttcttcaggtgacatgggatgaaccggacctgttgcagaatgtgaaatgtgtcagcccatggcttgtggagcttgtgtcaagtattccaccaatccatttaggaccattttcgtcacctcgaaagaagttgcgggttcccccacatcctgacttcccatttgagggtcatcttctgaacccaattttccatgggaacccacttggtcctagcaacagcccactatgctgttacccggacaccgctcctgcaggcatacagggagccaggcatgctcaatttggtttaccactaacagaccaccagcttaacaagctgcaccttggtctgttacatagcggcagttttaacagacttgatgctattactccgccttcccggatatcaaagggctttgtgaaagacgacaccccatataatgctgtttggaaaggtatatttactgagcagcagataacttcaagcggatcaacggagacactctcccccggagttactggaaatagcgcacctaatggcaatgcgcacaagacaggaaatgcatctgatggttctggttcatcaatttgcattggtttctcatctcaaggtcacgaggcttctgaccttggtttagaagctggtcactgcaaggtatttatggaatcggaggacgttggtcgcaccattgatttgtctgtctttgggtcatacgaagaactgtatggtcggctggctgacatgttcggaatcgagaaagaagaaatcataaaccatcttcatttccatgacgcagctggtgtagtcaagcatccgggtgaggtaccattcaggtga

SEQ ID NO: 2428 - protein, 659 aa, Oryza sativa subsp
MRVLDWQVWWVSGDRIWGLEMKEVGEVEEVRCLDPQLWHACAGGMVQMPAPRSRVYYFAQGHAEHADGGGGAAAAAAELGPRALPPLVLCRVEGVQFLADRDSDEVYAKIRLAPVAPGEAEFREPDELCPLGAAGDAAEPSPEKPTSFAKTLTQSDANNGGGFSVPRYCAETIFPKLDYRADPPVQTVLAKDVHGVVWKFRHIYRGTPRRHLLTTGWSTFVNQKKLVAGDSIVFLRTRHGELCVGIRRAKRMACGGMECMSGWNAPGYGGGGFSAFLKEEESKLMKGHGGGGYMKGKGKVRMADVVEAASLASSGQPFEVAYYPRASTPDFVVKAASVQAAMRIQWCSGMRFKMAFETEDSSRISWFMGTISSVQVADPNRWPNSPWRLLQVTWDEPDLLQNVKCVSPWLVELVSSIPPIHLGPFSSPRKKLRVPPHPDFPFEGHLLNPIFHGNPLGPSNSPLCCYPDTAPAGIQGARHAQFGLPLTDHQLNKLHLGLLHSGSFNRLDAITPPSRISKGFVKDDTPYNAVWKGIFTEQQITSSGSTETLSPGVTGNSAPNGNAHKTGNASDGSGSSICIGFSSQGHEASDLGLEAGHCKVFMESEDVGRTIDLSVFGSYEELYGRLADMFGIEKEEIINHLHFHDAAGVVKHPGEVPFR

SEQ ID NO: 2429 - DNA, 2064 bp, Oryza sativa subsp
  CDS (1)..(2064)
atggctggctccgtcgttgctgctgctgccgccgccggcggtggcacagggagctcttgcgatgcgttgtacagggagctatggcatgcttgcgctgggccgttggtcacagtgcctcgccaaggcgaattggtttactacttcccccagggccatatggaacagcttgaggcatctacagaccaacagcttgaccagcatctgcctttgtttaacctgccatctaagatcctctgcaaagtggtcaatgtagaacttagggctgaaaccgattcagatgaggtttatgctcaaattatgctgcaaccagaagcagatcaaaatgaactcaccagcccaaaacctgagccacatgaacctgaaaaatgcaatgtccattccttctgcaagactttgactgcttcagatacaagcacccatggtggattttcagttcttaggaggcatgcagaagaatgtcttcctcccctggacatgactcagaatccaccatggcaagagcttgtggctagagatctccatggaaacgagtggcatttccgtcacatctttcgagggtccccccaccactcccttattttaggacaacctaggaggcatctgcttacaactggctggagtgtttttgttagctcaaaaagattagttgccggtgacgcattcatctttctgagaggtgagaatggagagctacgagttggtgtcaggaggctcatgaggcaactaaataacatgccatcatcagtaatatcaagtcatagtatgcatcttggagtcctagcaactgcatcacatgctatatccaccggaactctcttttctgttttctacaaaccaagaacaagtcagtctgagtttgttgtgagtgctaacaagtaccttgaagctaaaaacagcaagatatctgttggaatgaggtttaagatgagattcgagggcgatgaagctcctgaaagaaggtttagtggaacaattattggtgttgggagcatgtcaacgtctccatgggcaaattctgactggagatctttgaaggtccaatgggatgagccttctgtggttcctcgtccagatagagtttcaccatgggaactagagccacttgctgtgagtaattcacagccatcacctcagccaccggcaagaaataagcgggctcggcctcctgcttcgaattcaattgctccagaactacctccggtcttcggtttgtggaaatcttcagctgagtccacacaaggcttctcattttcgggactacagcgaacacaggaactatatccttcaagccccaatccgatcttctcaacatcattaaatgttggattcagtacaaagaatgagccatctgctctaagcaacaagcatttttactggccaatgagagagacaagagccaactcttactctgctagcatcagcaaagttccatctgaaaagaagcaagagcctagttcggctggctgcagattgtttggaatcgagataagctctgctgtggaagctacatctccactggctgctgtttctggtgttggtcaagaccaaccagctgcctcagtagatgctgagtctgatcagctctcacaaccatcacatgccaacaaatctgatgctccagcggcaagcagtgagccatctcctcatgagactcagagtcggcaagtgaggagctgcaccaaggtcatcatgcaaggaatggcagttggaagggcagtggacctgacaaggctccatggatatgatgatcttcgctgcaagttagaagagatgtttgatatccaaggagagctctctgctagcctaaagaaatggaaggttgtttacacagatgatgaggatgatatgatgctggttggggatgacccttggcctgaattttgcagcatggtgaaaaggatatacatctacacctacgaggaagccaagcaacttactcccaagtcgaagctgccgatcattggcgacgccatcaagccaaacccaaacaaacaatcgcccgagtctgacatgcctcacagtgacctggacagcaccgcccccgtcaccgataaggattgctga

SEQ ID NO: 2430 - protein, 687 aa, Oryza sativa subsp
MAGSVVAAAAAAGGGTGSSCDALYRELWHACAGPLVTVPRQGELVYYFPQGHMEQLEASTDQQLDQHLPLFNLPSKILCKVVNVELRAETDSDEVYAQIMLQPEADQNELTSPKPEPHEPEKCNVHSFCKTLTASDTSTHGGFSVLRRHAEECLPPLDMTQNPPWQELVARDLHGNEWHFRHIFRGSPHHSLILGQPRRHLLTTGWSVFVSSKRLVAGDAFIFLRGENGELRVGVRRLMRQLNNMPSSVISSHSMHLGVLATASHAISTGTLFSVFYKPRTSQSEFVVSANKYLEAKNSKISVGMRFKMRFEGDEAPERRFSGTIIGVGSMSTSPWANSDWRSLKVQWDEPSVVPRPDRVSPWELEPLAVSNSQPSPQPPARNKRARPPASNSIAPELPPVFGLWKSSAESTQGFSFSGLQRTQELYPSSPNPIFSTSLNVGFSTKNEPSALSNKHFYWPMRETRANSYSASISKVPSEKKQEPSSAGCRLFGIEISSAVEATSPLAAVSGVGQDQPAASVDAESDQLSQPSHANKSDAPAASSEPSPHETQSRQVRSCTKVIMQGMAVGRAVDLTRLHGYDDLRCKLEEMFDIQGELSASLKKWKVVYTDDEDDMMLVGDDPWPEFCSMVKRIYIYTYEEAKQLTPKSKLPIIGDAIKPNPNKQSPESDMPHSDLDSTAPVTDKDC

SEQ ID NO: 2431 - DNA, 4944 bp, Oryza sativa subsp
  CDS (1)..(4944)
atggagatggcggcgaatccaggtggttcaggaacctgcagcgatgcactattccgggagctatggcatgcttgtgctggtccgttggtcacggtcccgaagcgcggcgagcgcgtctactactttccccagggtcatatggaacagcttgaggcgtctacaaaccagcagcttgaccagtacctgccgatgttcaatctaccatccaagatcctatgcagcgtggtcaacgtagaactccgggcggaggctgattcagatgaagtttatgctcaaattatgctgcaaccagaagctgatcaaagtgaactcaccagtctggatcctgagcttcaagatcttgagaaatgcacagctcattccttttgcaagacattaacagcttcagatacaagcacacatggcggtttctctgttcttaggaggcatgctgaagaatgccttcctcagctggacatgtctcagaatccaccatgtcaagaactggttgccaaagatctccatggaactgagtggcatttccgtcacatctttcgtggacaacctaggaggcatctgcttacaaccggttggagtgtctttgttagctcaaaaagattggttgctggcgatgcatttatcttcctgaggggcgaaagtggtgagctacgggttggagtaaggagacttatgagacaagtaaataacatgccatcatctgtcatatcaagccacagcatgcatcttggagtccttgcaacagcttcccatgctatctccactggaaccctcttttctgttttctacaaacccagaacaagccggtctgagtttgttgtgagcgttaacaagtaccttgaagctaagaagcagaacttgtctgttggaatgaggtttaagatgagatttgaaggtgatgaagctcctgaaagaaggtttagtggaacaattattggtattgggagtgtgccagcaatgtcaaaatctccatgggcagattctgactggaaatctctgaaggtccaatgggatgaaccttcggctattgtccgtccagatagagtttcaccatgggaactggaaccattggatgcgagtaatccacaaccacctcagcctccattgaggaataagcgtgcaaggcctccagcttcaccttctgtggttgcggaacttcctccaagtttcgatgtggactctgatcagatctcacagccatctaatggcaataaatccgatgcccctggaacaagcagtgaacgttctcctcttgagtcccaaagtcgtcaagtgaggagctgcacaaaggtaattatgcaaggtatggcagttgggagggctgtggacttgacaaaactaaatggttatggtgatcttcgcagcaagttggaggagatgtttgatatacagggggacttgtgtcccaccctgaagagatggcaagttgtttacaccgatgatgaggatgacatgatgcttgtcggggatgatccttgggagaaattccaatgtttcttcattactgcttcctgtgctgaagacgcaacgcccttttgtcttgaattgtggtggtatttgaactgcaagtgccaggaagttcccaagactggcaagaccgcctggaagaggcattctggcaaatgcatgccgttccaaattgttttgtgttttggtaggagccttggcgttcttgtctggtgcccagatttaggcgattcggtcggcggcggcgcggagaggcggcgaaccggcggcgtggagaggcggcggagggagcccgtgactcggcggagaggcggcaaggagaggcgacgacccagctggcgggctctggcggcgaaccggcggcgcggagaggcggcaaaccagcgacgcggagaggcggcgacccagcgtggaggcagcgacccagctggcgggctccgacggcgcggagaggcggcgaaacggcggcacggagaggcggcaaaccggtggcgcgaagaggcggtgaggagaggcggcgacccatcggagaggtggcgaaccggcggcgtggagaggcggcgaaggggagcccgcgactcggcggactggctccagcggcgtgggcttcttccacgcgtcgtcatcgtcgctcattgccggagcgaatggcggcagcgacggcggtggcggagctcgaactttgagttggggaacgtggtggcggcgacttggcaggctggctccgacagtggcgctgggttggggaaccgccggcgcagcaccctcgtcctcccgcacgtccgatctgcccccttccacgccgtggttccgggagctgtggggggtcaacgccgacaaatagtagcagccgccgtcgccgaagctgatggtaatgaaaacggaaataagcatttcacttgtcacagggagaatgcaaactatggtctaaaatctgcatctgaaaataaaattgagctgctgaggggtgctcatagttgggccgacagtaatttaattgaggatgtactggcctctgtgaacaatgatgttggtgaagcatctgctttgttgaaagctatggcgtctccttgttttccaataagggaggatggactacctgatcagctttcttctgagattaataaaacacatggtttaccatcaggaaatggtacagcagaaaataatcttgtaaatgactcgcagttgttgcctctgccaatgaatatgtcgtctgtacccatagaaccggaagtggaagagctcgatgacgattactttaaccacaggaaagatgcattgaagattatgagggctgccacgaagcattctcaggctgcgagtaatgctttcttgagaggtgaccatgctgctgccaaggaactttccctcagagctcaagaagagcgatccgctgctgaagagctgaacaagaaggcagcaaaagaaatatttcgcctcaggaacagcaataatagcatttggaagctagacatgcatggtctacatgcatcagaggctgtggaagtactggaacggcatcttcacaggatagaattccagccaccagggaataatgcagcttcatctgatgaagtagctaggtctgaacccagagtgtctggtccaagcattgagcccggcccagggaaggtggtgtttgttcgtcccatacaggctatcttagaggtgatcacagggattggcaagcacagcaaagggcaggcctcactacctgttgcagtcaggggcttcctcattgaaaatgggtaccgatttgatgagctgcggcctgggcataagcttctcacttctcagcctgaagttaaaaatcacaaaggaatcaaggggcattcgccttcgaatctaggcttccgaagatcgggattgcagttaaaggttactgcaatttttgggtggattaagggagacacaagaacacgtgaattgaacccatctgctgaatcatatacgcttacagggtcagcctcagaggcagacaccaagccacgtgaggtttctgttgctgttgtttcttctattatggacattccttcagcagattgggatgcctgtgcagttgattcagttgatcctgacaattttaatccttttctgacccacgcattcctctcaagcttagaggaatcgggttctgcagtgaaggaaacagggtggttacctctgcatgttgttgcacgggatgagaatgaaactgtcgttggtgttgtcccactttacctgaaaagccattcaaggggagagtttgtatttgatcaatcatgggcagaagcttactatagctatggactcgaatactaccccaagttgcagtcttgtgtgccttttactccagtaactggtcaaagaatattagttcgagatacaccatacagggatcaagtttttgaagctttagtgaaagaattgaagagtttgactaccaagctgaaggtgtcatcgttacatataacatttccatctgaaggtgaattcagcaagttgaaggatagtgagttcttgcagagaatcgggatgcagtatcactggagaaatcgagattacagaagttttgacgagtttttaatggatttgaagcaacccaaacggaagaatatcagacaagaacgtaaaaagattcctgctcaaaatttgaaaatgaagcgacttcgtggagatgagataaaggattattttttgtgtgctttcagctggggcagaccatacttgacaagggaattctttcaccgcttgggagaaaagatgggtgacaaggtgatgcttattgttgctgaacatgacgataaacatgttgccggggctcttaaccttattggaggtgacacattgtttggccgcttatggggctgtctgccagatgcttatttccccaatttgcattttgaagcttgctattatcagaatatacatactactcaggcaattgaagcagctatagaactgaacctgagtaaggtggaggcaggtgctcaaggagagcacaagatccagcgtggttacctcccagtgacaacatacagctgccactacttcttagatcctggttttggggcagctataggaaattatcttgtacatgagacggctcaggtgaggagttgccatcggcgaaaggaaagggcaaggaaaaagctctctgaatgtcacatcgacatatcagccaagatcccaaccaaaaaggacatcagatactgcctcattatgctttttgtacaaggatacaaggattggttcttcctccctcctctcatcaatcaaaggccaagaagaaccaagctccagtgcagaaagctatcgcaaacaagaaagagctttgccagttgcagcctgcctttgcatttggactgcaccggttgcttcattcgtcaagcacaccacaggttgaggaagcagccgtttgaccatctgtgcagcagctcacccaggcacaggatggcgtacaccagcaggatgaacttgaagaggaaagggaagtaa

SEQ ID NO: 2432 - protein, 1647 aa, Oryza sativa subsp
MEMAANPGGSGTCSDALFRELWHACAGPLVTVPKRGERVYYFPQGHMEQLEASTNQQLDQYLPMFNLPSKILCSVVNVELRAEADSDEVYAQIMLQPEADQSELTSLDPELQDLEKCTAHSFCKTLTASDTSTHGGFSVLRRHAEECLPQLDMSQNPPCQELVAKDLHGTEWHFRHIFRGQPRRHLLTTGWSVFVSSKRLVAGDAFIFLRGESGELRVGVRRLMRQVNNMPSSVISSHSMHLGVLATASHAISTGTLFSVFYKPRTSRSEFVVSVNKYLEAKKQNLSVGMRFKMRFEGDEAPERRFSGTIIGIGSVPAMSKSPWADSDWKSLKVQWDEPSAIVRPDRVSPWELEPLDASNPQPPQPPLRNKRARPPASPSVVAELPPSFDVDSDQISQPSNGNKSDAPGTSSERSPLESQSRQVRSCTKVIMQGMAVGRAVDLTKLNGYGDLRSKLEEMFDIQGDLCPTLKRWQVVYTDDEDDMMLVGDDPWEKFQCFFITASCAEDATPFCLELWWYLNCKCQEVPKTGKTAWKRHSGKCMPFQIVLCFGRSLGVLVWCPDLGDSVGGGAERRRTGGVERRRREPVTRRRGGKERRRPSWRALAANRRRGEAANQRRGEAATQRGGSDPAGGLRRRGEAAKRRHGEAANRWREEAVRRGGDPSERWRTGGVERRRRGARDSADWLQRRGLLPRVVIVAHCRSEWRQRRRWRSSNFELGNVVAATWQAGSDSGAGLGNRRRSTLVLPHVRSAPFHAVVPGAVGGQRRQIVAAAVAEADGNENGNKHFTCHRENANYGLKSASENKIELLRGAHSWADSNLIEDVLASVNNDVGEASALLKAMASPCFPIREDGLPDQLSSEINKTHGLPSGNGTAENNLVNDSQLLPLPMNMSSVPIEPEVEELDDDYFNHRKDALKIMRAATKHSQAASNAFLRGDHAAAKELSLRAQEERSAAEELNKKAAKEIFRLRNSNNSIWKLDMHGLHASEAVEVLERHLHRIEFQPPGNNAASSDEVARSEPRVSGPSIEPGPGKVVFVRPIQAILEVITGIGKHSKGQASLPVAVRGFLIENGYRFDELRPGHKLLTSQPEVKNHKGIKGHSPSNLGFRRSGLQLKVTAIFGWIKGDTRTRELNPSAESYTLTGSASEADTKPREVSVAVVSSIMDIPSADWDACAVDSVDPDNFNPFLTHAFLSSLEESGSAVKETGWLPLHVVARDENETVVGVVPLYLKSHSRGEFVFDQSWAEAYYSYGLEYYPKLQSCVPFTPVTGQRILVRDTPYRDQVFEALVKELKSLTTKLKVSSLHITFPSEGEFSKLKDSEFLQRIGMQYHWRNRDYRSFDEFLMDLKQPKRKNIRQERKKIPAQNLKMKRLRGDEIKDYFLCAFSWGRPYLTREFFHRLGEKMGDKVMLIVAEHDDKHVAGALNLIGGDTLFGRLWGCLPDAYFPNLHFEACYYQNIHTTQAIEAAIELNLSKVEAGAQGEHKIQRGYLPVTTYSCHYFLDPGFGAAIGNYLVHETAQVRSCHRRKERARKKLSECHIDISAKIPTKKDIRYCLIMLFVQGYKDWFFLPPLINQRPRRTKLQCRKLSQTRKSFASCSLPLHLDCTGCFIRQAHHRLRKQPFDHLCSSSPRHRMAYTSRMNLKRKGK

SEQ ID NO: 2433 - DNA, 2781 bp, Oryza sativa subsp
  CDS (1)..(2781)
atggcgtcctcgcaggagaaggccaagacgggtgttctgagaaatgccgcagcgctgctcgacgaaatgcagctcatgggagaaacacagggtgccaagaaggtgatcaactcggagctctggcacgcttgtgccgggccgcttgtgtgcttgccgcagcgggggagcctcgtgtactacttccctcaggggcacagtgaacaggttgcagcgacaactagaaagattccaaattcccgcattccgaactacccaaacctgccatctcagttgctgtgtcaagttcacaacatcaccttgcatgccgacaaggacactgatgaagtttatgcacagatgacccttcagccagtaaactctgaaacggatgtattccctattccaactcttggtgcttataccaaaagcaagcaccccactgaatatttctgcaagaatttaaccgcaagtgatacgagtacacatggtggtttctcggtgccacgaagggctgcagagaagttgttcccacaactggattactcaatgcaacctcctaaccaggagcttattgttcgagatttgcatgataacatgtggacattccgtcacatttatcgtggacagccaaaacgacatcttctaacaactggatggagtctctttgttggggcaaagcgtctaaaagcaggggactctgtcttatttataagcatgcacattggcgttcttgctgctgcagctcatgccgcatcaagtggtagttcatttactatctactacaatcctaggacaagtccttcgccatttgtaattcctgtagcaaggtacaacaaggcaacatatatgcaaccatcagttggaatgagatttgcgatgatgtttgagacagaggagtcaagcaagcgcagatacacaggtacagttgtgggaataagtgactacgaccccatgagatggcccaattctaaatggcgcaacttacaggtcgaatgggatgaacatgggtatggagaaagacctgagcgtgtgagcatatgggatattgaaactccagaaaacactcttgtgttcccttcgtcgaccttgaattcaaagcggcaatgtcttcctggttatggagtttcagtgcctgggatggaaattggatcagcaaatatgtcatcatttccaagggctcagggtaatccctatggcagtttgcagcacattccagctgttggatcagaattggctatcatgcttctcaaccaatctggtcaaacccttgggagtccccttagttttcaccagtcctcatattctagtattatccaaaatgtgaagcaaaattatatccctcctctaacagttagcacttcagcttgtttgacaaagcaagaaagcctgccttcagatgatgcccagcaccagttccatatggcaaatatgcagaatggtgatcttgaaggctctgaagtccagcctgtcattgattcgatttctgagtcaaagttgaatgctacatcaagagatccaagaaacacagattcatacacaagtcgaagtacttcggagcaaaacagtaagggtgagcctagaggcaagactcgtaggagtaagaagggcttgcctcacaaaaccgtttcagagaaatctgacctttcttcagccccttcttggatctgtgacaatcagcaggttggtttagaatcgaaactggttggttgtgatgaacaagtaaactgtggaaatattgaagattcatcaggtgcacttactcaaggtaattttgttggacagccgcatggccatcaggttgaacaaaagggagtgctgtcgccaccaaaggtagaatcatcaaaatcacctgatggaggaaagtctgtcaattcgtttccaaaccaagggtgtttttcgcagttcattgatggtcttgattggatgactcagccttcctactaccaagactccaatgtaattcaaccagccggtgtgtcagagaacattttcagttcttctgcagatatacctccctcaatgattgctgatactatggagacttttcaggcttcatgtctttctgattgccttcctaattccatacaagaattcatctccagcccagatctgaattcactaacctttctttcacctgacatgcaaaatttggaggtccaactccagcatgatggaagcaatttgccaagcacgtccaactcgtttgtacagatgagtttttctgaagagagtgcaagtcagagtgcaaacttaagtggacttcacatggaatctacacacagaagcataaacaccacttcatgctctcaaccaatgtctactgggggctttgatgcagggatgtactcaaagttgccacgtttaaaagaatcccaaatcttgtctttgccagagattcataccaattccatgggaacatcagcttgcagtatggatgcaaccgagtacagccttgaccgaagtgcgaagccgatgaaaccaccagtgcggacatatacaaaggttcaaaagcaaggatcagttggaagatctatcgatgttacagggtttagaaattaccatgagttgagatctgccatcgcttgcatgtttggtctccaggggaaattggagcatcctggcagttcagagtggaagcttgtatatgtcgactacgaaaatgatgttcttcttgtcggagatgatccatgggaggaattcatcaactgtgtccggtgcatccggattttgtcaccttcagaagtacaacagatgagcgagaatggcatgcatgttttgaacgactgtattcaagcagcttag

SEQ ID NO: 2434 - protein, 926 aa, Oryza sativa subsp
MASSQEKAKTGVLRNAAALLDEMQLMGETQGAKKVINSELWHACAGPLVCLPQRGSLVYYFPQGHSEQVAATTRKIPNSRIPNYPNLPSQLLCQVHNITLHADKDTDEVYAQMTLQPVNSETDVFPIPTLGAYTKSKHPTEYFCKNLTASDTSTHGGFSVPRRAAEKLFPQLDYSMQPPNQELIVRDLHDNMWTFRHIYRGQPKRHLLTTGWSLFVGAKRLKAGDSVLFISMHIGVLAAAAHAASSGSSFTIYYNPRTSPSPFVIPVARYNKATYMQPSVGMRFAMMFETEESSKRRYTGTVVGISDYDPMRWPNSKWRNLQVEWDEHGYGERPERVSIWDIETPENTLVFPSSTLNSKRQCLPGYGVSVPGMEIGSANMSSFPRAQGNPYGSLQHIPAVGSELAIMLLNQSGQTLGSPLSFHQSSYSSIIQNVKQNYIPPLTVSTSACLTKQESLPSDDAQHQFHMANMQNGDLEGSEVQPVIDSISESKLNATSRDPRNTDSYTSRSTSEQNSKGEPRGKTRRSKKGLPHKTVSEKSDLSSAPSWICDNQQVGLESKLVGCDEQVNCGNIEDSSGALTQGNFVGQPHGHQVEQKGVLSPPKVESSKSPDGGKSVNSFPNQGCFSQFIDGLDWMTQPSYYQDSNVIQPAGVSENIFSSSADIPPSMIADTMETFQASCLSDCLPNSIQEFISSPDLNSLTFLSPDMQNLEVQLQHDGSNLPSTSNSFVQMSFSEESASQSANLSGLHMESTHRSINTTSCSQPMSTGGFDAGMYSKLPRLKESQILSLPEIHTNSMGTSACSMDATEYSLDRSAKPMKPPVRTYTKVQKQGSVGRSIDVTGFRNYHELRSAIACMFGLQGKLEHPGSSEWKLVYVDYENDVLLVGDDPWEEFINCVRCIRILSPSEVQQMSENGMHVLNDCIQAA

SEQ ID NO: 2435 - DNA, 2613 bp, Oryza sativa subsp
  CDS (1)..(2613)
atggtggcgatctccgagctcggatgcttgttgtgggtgtgggtgttggtggtggtggtgcagaatgcggccgatttgaggagggggatggggttttcgggtggatttgaggaggagatgagctcgtcgtcggcggccagcatcgggccgccgcagccgccgccgccccccgcgccgcccgaggaagagaagaagtgcctcaactcggagctatggcacgcctgcgccggcccgctcgtctgcctccccaccgtcggcacgcgcgtcgtctacttcccgcaaggccacagcgagcaggtggcggcgtcgacgaacaaggaggtggagggtcacatcccgaactaccccaacctgccggcgcagctgatctgccagctccacgatgtcacaatgcatgcggatgtggagactgacgaggtgtacgcgcagatgacgctccagccactgaacccagtaaggcgcctggggtttttgcatgatgtttgcagtgctgaggttttgatgcaggagcagaacgatgcgtaccttcccgcggagatggggataatgagcaagcagccgacgaattacttctgcaagacattgacggcgagcgacaccagcacgcacggggggttctccgtgccccgccgtgctgctgagcgcgtcttccctcctttggatttcacacagcagcctccagcccaggagctaattgcacgggatattcatgacatcgagtggaagttcaggcacatctttcgaggccaacccaaacgacacctgctaaccactggctggagcgtttttgtcagtgctaagagacttgttgctggagattctgtgcttttcatatggaacgagaaaaaccagcttttacttggaataagacgtgccagtcggccacagactgtgatgccttcctctgttctttcaagcgatagcatgcacataggtctccttgcagcagcagctcatgctgctgctacaaacagccgtttcactattttctacaacccccggtatatggggactataactgaagttagtgatgcagacccagtccgttggcctagttcctattggagatctgtgaaggttggttgggatgaatcaactgcaggggaaagaccaccaagagtttctttatgggaaattgaaccattgacaacctttccaatgtatccatctctgttcccactgagagttaagcatccttggtattcaggagttgcttccctgcatgatgacagcaatgctttaatgtggctgagaggagttgctggtgagggaggttttcagtctctgaactttcagtcacctggtattggctcctggggacaacagaggctccatccatccttactgagcagcgatcacgatcagtaccaagcagtagttgctgctgctgctgcttcccaatctggtggttacttaaaacagcaattcttgcaccttcagcaacctatgcagtcccctcaagaacactgcaacctcaacccattattgcagcaacaaattctgcagcaagcaagccagcaacagataattaatcctgatgcccaaaatatccaaacgatgttgagcccaagtgctatacaacagcaactccagcaactacagcaaatgcagcaagttcagaatgatcagaagcagaagattcaaccagatcaaagctaccaagttcctacaagtgcagttctcccaagtccaacatcattaccgagtcatttgcgagaaaaatttggcttctctgatcctaatgcgaattcttcaagcttcatcacctctagcagtagtgataacatgttggattcgagcttccttcagggaagttcgaaagctgtggacttatctcgatttaatcagcctgtagctagtgagcagcagcagcagcagcaacaggcatggaagcagaagtttatgggttcacagtcagtgtcttttgggggctcggttttgcataactcacccacaagcaaagatggttctgttgaaaacaaaattggtcgtgatgtgcaaaaccagtccctttttagtccacaagttgactcttcatccctcctgtacaacatggttcctaatctgacttcgaatgtttcggatggcaacttatcaacgatcccttctggatcaacttatctgcagaatgcaatgtatggttgcttggacgactcttctggtttattgcaaaatacaggagagaacgatccagcaaccagaacatttgtgaaggtttacaagtcaggttcggttgggaggtcgttggacataacccggttctctaattatgctgaacttcgagaagaactgggtcagatgttcggcattaagggtcaattggacgaccctgatagatcaggctggcagcttgtattcgtcgacagggagaatgatgtgcttctccttggagacgacccttgggaattcattaacatctatatgaatgtgagcaatgctaaaaagtcttacattatgaaacggagggagtacaatactttggtttcctggtttccacaactaatagcttatcgaggaaagactgttcttccttcaataatatgtgttggtcagtcactatatgttgatgctcagttacccaagacccttcgtgagagtaaacatcagacatga

SEQ ID NO: 2436 - protein, 870 aa, Oryza sativa subsp
MVAISELGCLLWVWVLVVVVQNAADLRRGMGFSGGFEEEMSSSSAASIGPPQPPPPPAPPEEEKKCLNSELWHACAGPLVCLPTVGTRVVYFPQGHSEQVAASTNKEVEGHIPNYPNLPAQLICQLHDVTMHADVETDEVYAQMTLQPLNPVRRLGFLHDVCSAEVLMQEQNDAYLPAEMGIMSKQPTNYFCKTLTASDTSTHGGFSVPRRAAERVFPPLDFTQQPPAQELIARDIHDIEWKFRHIFRGQPKRHLLTTGWSVFVSAKRLVAGDSVLFIWNEKNQLLLGIRRASRPQTVMPSSVLSSDSMHIGLLAAAAHAAATNSRFTIFYNPRYMGTITEVSDADPVRWPSSYWRSVKVGWDESTAGERPPRVSLWEIEPLTTFPMYPSLFPLRVKHPWYSGVASLHDDSNALMWLRGVAGEGGFQSLNFQSPGIGSWGQQRLHPSLLSSDHDQYQAVVAAAAASQSGGYLKQQFLHLQQPMQSPQEHCNLNPLLQQQILQQASQQQIINPDAQNIQTMLSPSAIQQQLQQLQQMQQVQNDQKQKIQPDQSYQVPTSAVLPSPTSLPSHLREKFGFSDPNANSSSFITSSSSDNMLDSSFLQGSSKAVDLSRFNQPVASEQQQQQQQAWKQKFMGSQSVSFGGSVLHNSPTSKDGSVENKIGRDVQNQSLFSPQVDSSSLLYNMVPNLTSNVSDGNLSTIPSGSTYLQNAMYGCLDDSSGLLQNTGENDPATRTFVKVYKSGSVGRSLDITRFSNYAELREELGQMFGIKGQLDDPDRSGWQLVFVDRENDVLLLGDDPWEFINIYMNVSNAKKSYIMKRREYNTLVSWFPQLIAYRGKTVLPSIICVGQSLYVDAQLPKTLRESKHQT

SEQ ID NO: 2437 - DNA, 2661 bp, Oryza sativa subsp
  CDS (1)..(2661)
atgggggaagggtttgggttttcccaattgctttttttactactggttactactactactgcgggggtggaggcatcgacgaaccaggtcgccgagcagcagggggctccgctctacaatctgccatggaagatcccgtgcaaggtcatgaacgtcgagctcaaggctgagcctgatacggatgaggtgtatgcgcagctcaccctgcttccggagaagcagcaggatgggaatgggagtggtaacgggaatgtgtccaaagacaaggtggaggaggaagaggtggtgccaccagctgcaactgagcggccccgggtgcactccttctgcaagacgctcactgcgtcggacacgagcacgcatggtggcttctcggtgctgcgccggcacgcggatgagtgcctcccaccactgtacagcttttttgataggctaattgtagcaatgcctttgacgtcgctgcttgatcaggatatgagtcagcatcccccaacacaagagctggtggccaaggatcttcatggggttgagtggcgcttccgtcacatcttccgaggtcagccacgaagacaccttctccagagtggttggagtgtttttgtgagtgccaaacgccttgttgctggagatgccttcatatttctcagaggtgagaatggggaactacgagttggagttcggcgtgcaatgagacaacaagctaatattccatcttcggtcatatcaagccacagtatgcatcttggtgttcttgcaactgcatggcatgcagtgaacactggaaccatgttcactgtgtactacaagccaaggactagtccatctgaatttgtggtaccacgtgatctgtacaaggaatctctgaaacgaaatcattcaatagggatgagattcaagatgacatttgaaggcgaagaggctgcagagcaaagattcactggcacaattgttggagtaggtgattctgacccatctggttgggctgactcaaaatggcgttcccttaaggtgcgatgggatgaagctgcttctgttcctcgtcctgatagggtttctccttggcaaatagaacctgctaacagcccttcccctgtcaaccctcttccagcaccccgaaccaagcgggctcgtccaaatgttttagcttcctcacctgacttgtctgctgtaaacaaagaagttgcttcaaaagtcatggcaaactcgcagcaaaatggtcttccaagggccttccacagtcaagaaaacatgaatttgagaagtcgttttggtgatagcaatgagctaaatacttcccaaaagcttaccatgtggtcttcaggaagcaatcaagagaaaaataatgtttctgtccagagggagctaggttcacagagttggatgcagatgagaaggcctgatggttcctctgagatattatctggatttcaaccactgaaagatacgcggaaccctctgagttcatttcctagtcagatatctggaaaccgttcaaatacgtggaacacaatcaatgttcattatcccgaccaaaatgccaatcataatatgtaccctggcacatggtctcttatgcctccaaacactggttttggtgtgaatcagcagaactacctaatgacgcctgacatcacactccctcaaaggtctcttaatgccaagtttggtgggaatggagcattcacttcgcttcgggcccatggcatagatcagcgctcctctggttggcttgggcatattgagccaagttctcacattgatgatgcctcatcgagtcttatcaagccacagcctttggttattgatcacaatgttcagaaagctaaaggctcttcatgcatgctatttgggatttctcttgacagccctgcaaaacctgaactattgatatccccaccaagtgttgcatttgatgggaagctccaacaggatgcacttgaagaggatgaatgctctgatccttccaagactgtgaagccacttgatggagctcagcacgattctgctagagagaaacatcagtcatgtccagatggtaccaaaaacattcagagtaaacagcaaaatggttcctcccgaagttgcaagaaggtccacaagcaaggaatcgcactcgggaggtcaatagatcttacaaagttcacttgctatgatgagttgattgctgaactggaccagatgtttgacttcaatggtgagctgaacagttcaagcaagaactggatggtcgtttacactgataatgagggtgacatgatgttggttggtgatgatccttggaatgaattctgcaacatggttcataaaatcttcatctacacgagggaggaggtccagaagatgaatccgggtgccctaaactcaaggtcttttgtggtttgcaagaacagaagacgacatatccatggtaggaaggaatcttttcgtggtgtagtagtagtagctggtgctttatatgtatcgggtaagccccgcagtaccccatttgtagatggtgcttgtcctggtatcagttgcccgctcttcgttttcgacaagttttgggtgtgctttgttgaggttttaagttattgtatgatatgccccgtagtagtgaaaggtgctgaggccaagctgccgcgcccggtgcgcttgcttgcttgcgctcttcctccctcctaa

SEQ ID NO: 2438 - protein, 886 aa, Oryza sativa subsp
MGEGFGFSQLLFLLLVTTTTAGVEASTNQVAEQQGAPLYNLPWKIPCKVMNVELKAEPDTDEVYAQLTLLPEKQQDGNGSGNGNVSKDKVEEEEVVPPAATERPRVHSFCKTLTASDTSTHGGFSVLRRHADECLPPLYSFFDRLIVAMPLTSLLDQDMSQHPPTQELVAKDLHGVEWRFRHIFRGQPRRHLLQSGWSVFVSAKRLVAGDAFIFLRGENGELRVGVRRAMRQQANIPSSVISSHSMHLGVLATAWHAVNTGTMFTVYYKPRTSPSEFVVPRDLYKESLKRNHSIGMRFKMTFEGEEAAEQRFTGTIVGVGDSDPSGWADSKWRSLKVRWDEAASVPRPDRVSPWQIEPANSPSPVNPLPAPRTKRARPNVLASSPDLSAVNKEVASKVMANSQQNGLPRAFHSQENMNLRSRFGDSNELNTSQKLTMWSSGSNQEKNNVSVQRELGSQSWMQMRRPDGSSEILSGFQPLKDTRNPLSSFPSQISGNRSNTWNTINVHYPDQNANHNMYPGTWSLMPPNTGFGVNQQNYLMTPDITLPQRSLNAKFGGNGAFTSLRAHGIDQRSSGWLGHIEPSSHIDDASSSLIKPQPLVIDHNVQKAKGSSCMLFGISLDSPAKPELLISPPSVAFDGKLQQDALEEDECSDPSKTVKPLDGAQHDSAREKHQSCPDGTKNIQSKQQNGSSRSCKKVHKQGIALGRSIDLTKFTCYDELIAELDQMFDFNGELNSSSKNWMVVYTDNEGDMMLVGDDPWNEFCNMVHKIFIYTREEVQKMNPGALNSRSFVVCKNRRRHIHGRKESFRGVVVVAGALYVSGKPRSTPFVDGACPGISCPLFVFDKFWVCFVEVLSYCMICPVVVKGAEAKLPRPVRLLACALPPS

SEQ ID NO: 2439 - DNA, 1944 bp, Gossypium hirsutum
  CDS (1)..(1944)
atgaggaaagaggcagaaaagagcttggatcctcagctatggcatgcctgtgctggatccatggttcaaattccaccagtgaactccaaagtcttctactttcctcaaggccatgccgaacactctttatatccggtcgatttttcatcttctcctccaatcccggctctacttctttgccgggtggcttctgtcaaattcttggctgatgctgaaaccgatgaagtgtatgccaagatcatgcttgtaccattgcccaacactgagcctgatctcgagaacgatgccgttttcggtggtgggtctgataatgtggaaaagcctgcttcttttgctaagacattgactcaatccgatgcaaacaacggaggtggtttttcggttcccagatattgtgctgaaaccatatttccgagactggattacactgccgatcctccggttcaaactgtgattgccagggatgttcatggtgagatttggaagtttaggcatatctataggggaacccctaggagacatttattgactactggctggagtagtttcgttaaccataagaaacttgttgctggggactccattgtgttcttgagagccgaaaacggtgagctttgtgttgggataaggcgggccaagcgtgggaatgatactggagctgaatctggtcttggaaatggaaacgacgttagtccttatggagggttttcaggtttcttgaaggaggatgagagtaagataacccgaaaacggagtccgagagggaagggaaaagtgagagcagaggctgttgtggaggcagtggcgcttgccgctaatggccagccttttgagatagtttactatccgagagcaagcacaccggagttttgtgttaaggcatctgcagtaagggcggcaatgagggttccttggtgttctttgatgaggttcaagatggctttcgagaccgaggattgttctaggattagttggttcatggggactgtatcttctgttcatattgcagacccccttcgttggcctaattccccgtggcgccttcttcaggtaacatgggatgaaccagatttgctgcaaaatgttgaacgcgtgagtccctggttggttgaattggtaccgaacatgcttcccgtccacctgtcacccttctcaacagtgacccccagaaagaagttgaggcttcctaagcacctcgatttcccccttgtcgaacaatttccgatgccaccgttttctggtcatcccctcaggtcaagcaaccccttacgttgtttatctgataatgctcctgcaggcatacagggagccaggcatgctcaattcagattatcttcatcagatcctcatcttaataaactgaagtccggactgtttccgtctggcttccagctgtttgatccgcaagctcgagttcctaatggcatctcaatgacaaagcacacagacagtaacgatgataatctatcttgcttattaacagtagggaattccagtccaaagaagaaatctgaaaacggaaagagacaccagtttttactctttggtcagccaatacttaccgagcagcagctctctcgtagctgttcaactggagtaaaaactgctctcgagaatgaagacaaaagaaaagattattccaatggttcagaatctgctctcgagaatcaattgtctccagagaagtcatttactaccagattattgtggcagcaggactatcaagccccagaacctggctcagccactggtcattgcaaggtattcttggaatctgaggatgtgggacgaactcttgacctcacagttctcggttcttatgaagagctatacatgaggttggctaacatgtttggaagagaaagatcagagatgttgggccatgtcttgtatcgagatgcaacaggtgctgtcaaacaaactggagatgaaccattcaggtaa

SEQ ID NO: 2440 - protein, 647 aa, Gossypium hirsutum
MRKEAEKSLDPQLWHACAGSMVQIPPVNSKVFYFPQGHAEHSLYPVDFSSSPPIPALLLCRVASVKFLADAETDEVYAKIMLVPLPNTEPDLENDAVFGGGSDNVEKPASFAKTLTQSDANNGGGFSVPRYCAETIFPRLDYTADPPVQTVIARDVHGEIWKFRHIYRGTPRRHLLTTGWSSFVNHKKLVAGDSIVFLRAENGELCVGIRRAKRGNDTGAESGLGNGNDVSPYGGFSGFLKEDESKITRKRSPRGKGKVRAEAVVEAVALAANGQPFEIVYYPRASTPEFCVKASAVRAAMRVPWCSLMRFKMAFETEDCSRISWFMGTVSSVHIADPLRWPNSPWRLLQVTWDEPDLLQNVERVSPWLVELVPNMLPVHLSPFSTVTPRKKLRLPKHLDFPLVEQFPMPPFSGHPLRSSNPLRCLSDNAPAGIQGARHAQFRLSSSDPHLNKLKSGLFPSGFQLFDPQARVPNGISMTKHTDSNDDNLSCLLTVGNSSPKKKSENGKRHQFLLFGQPILTEQQLSRSCSTGVKTALENEDKRKDYSNGSESALENQLSPEKSFTTRLLWQQDYQAPEPGSATGHCKVFLESEDVGRTLDLTVLGSYEELYMRLANMFGRERSEMLGHVLYRDATGAVKQTGDEPFR

SEQ ID NO: 2441 - DNA, 2013 bp, Medicago truncatula
  CDS (1)..(2013)
atgtgtttcagtattacctttacagggtcaactaatgatgctttatacaaggaattgtggcatgcctgtgctggaccccttgtcactcttcctcgtgaaggggagagagtgtattacttccctcaaggtcacatggaacagctcgaggcatctatgaatcagggattagagcagcaaatgccttcctttaatctgccctctaaaatattgtgtaaagtggtcaatattcatcttcgggctgaacctgaaacagatgaagtatatgcacagataactctgctacctgaaaccgatcaaagtgaggtgacaagcccagacgatcctctgcctgaacctccaaggtgtacagttcattcattttgcaagacacttacggcttctgacactagcactcacggaggtttctctgttcttcgaagacatgcagatgattgtctaccaccactggacatgactcagcagccaccatggcaagaactggttgcaactgatttgcatggaaatgagtggcattttcgacatatttttcgcggacaacccaggcgccacttactaaccactgggtggagtgtctttgtcagttccaaaaagttagtggctggcgacgcatttatattcttaaggcaagttgttctgggtgaaaatggagagctccgagttggagtcaggaggctcatgagacagcaaagcaatatgccatcttctgtcatatctagtcacagcatgcatcttggtgttttggccactgcatctcatgccatttccactggaacgttgttttctgtgttttacaagcccagaacaagccggtcagagtttattgtaagtattaacaagtatcttgaagctcgaaatcacaaactttctgttgggatgcgattcaaaatgaggttcgagggtgatgaagtacctgaaagaaggttcagtggtacaattgtgggtgttgaagataataaatcatctgtctgggctgattccgagtggcgatcgttaaaggttcaatgggatgaaccgtcatcaattttgcgtccagatagagtttctccatgggagttggagccacttgtatctacccctccagcaaactcccagccaacccaacgaaacaagagatcacggcctcctattctaccttcaacaatgaccgattcttctctgcaaggcatatggaaatcaccagctgactctccacctttcccttatcgcgaccctcaacatggaagagacctctatccatcaccaagattcagctctactgcgactagctttcttggttttggtgggaacagccctgcttctaacaagtcaatgtattggtctagtagattggaaaactctacagaacctttttcacctgtagcacttgaagaatctggagagaagagacaaggcactggaaatggctgtaggctctttgggattcagttacttgagaattctaatgcagaagaaagtctgcaaactgctcctttgtcaggaagggtgggggatgataggtctgttccgtccttggatgtcgagtctgaccaacattctgaaccatcaaatgttaatcggtctgatattccttcagtaagttgtgatgctgacaaatcatgcctgcggtctcctcaggagtcacaaagcagacagataagaagctgcacaaaggttcacatgcaaggtatggctgttggaagggctgttgatttaacacgttttgatggatatgaggatctgcttaggaaattggaagagatgtttgacattgagggtgagctctgtggagcaacaaaaaaatggctggtagtttacactgacaatgaagatgatatgatgatggttggggatgatccgtggcttgaattttgtagcgttgtgaggaaaatgttcatctacacaccagaggaggtgaagaagctttcaccgaaaataggtcttccgagcaatgaagaaggtaaaccaagcaaactggattctgaagcagttgtcaatcccgaggaccggtcatctattgtggggcctggttgctaa

SEQ ID NO: 2442 - protein, 670 aa, Medicago truncatula
MCFSITFTGSTNDALYKELWHACAGPLVTLPREGERVYYFPQGHMEQLEASMNQGLEQQMPSFNLPSKILCKVVNIHLRAEPETDEVYAQITLLPETDQSEVTSPDDPLPEPPRCTVHSFCKTLTASDTSTHGGFSVLRRHADDCLPPLDMTQQPPWQELVATDLHGNEWHFRHIFRGQPRRHLLTTGWSVFVSSKKLVAGDAFIFLRQVVLGENGELRVGVRRLMRQQSNMPSSVISSHSMHLGVLATASHAISTGTLFSVFYKPRTSRSEFIVSINKYLEARNHKLSVGMRFKMRFEGDEVPERRFSGTIVGVEDNKSSVWADSEWRSLKVQWDEPSSILRPDRVSPWELEPLVSTPPANSQPTQRNKRSRPPILPSTMTDSSLQGIWKSPADSPPFPYRDPQHGRDLYPSPRFSSTATSFLGFGGNSPASNKSMYWSSRLENSTEPFSPVALEESGEKRQGTGNGCRLFGIQLLENSNAEESLQTAPLSGRVGDDRSVPSLDVESDQHSEPSNVNRSDIPSVSCDADKSCLRSPQESQSRQIRSCTKVHMQGMAVGRAVDLTRFDGYEDLLRKLEEMFDIEGELCGATKKWLVVYTDNEDDMMMVGDDPWLEFCSVVRKMFIYTPEEVKKLSPKIGLPSNEEGKPSKLDSEAVVNPEDRSSIVGPGC

SEQ ID NO: 2443 - DNA, 2331 bp, Arabidopsis thaliana
  CDS (330)..(2135)
ggtttcgtaactgaaactgaaaaagctttaagagaaaacccggaaaaaaaaaaaagagaaatattttaatcaattcttctttatcacaaagagtgcctttgtattaatgaattttgatgttgtgtaatgaatacagacataaccgtcgtgtctcgtcgttaaagaaacgagagtttttcagctctttacttaccttttcttcttacccttctttcatgactcttcttctttgatgggttaataatgctttgagcttgatgatttcgattttagtttcctgttagtgtttgttttcttctgtaaagcttggattttttttggtttcttcgatggcgaatgtggaagctgatttcagaacatcagggtctaatgatgatgaattgtacacggagctatggaaagcttgtgcagggccacttgtggaagttcctcgttatggtgaaagagttttctacttccctcaaggtcacatggaacaattggttgcttcgactaatcaaggagttgttgatcaagagataccagtgtttaatcttcctccaaagatactttgtcgtgttcttagtgttacgttaaaagcagaacatgagaccgatgaggtttacgctcagatcacattacaaccagaagaagatcaaagtgaaccaacaagtcttgacccacctttagtagaaccagctaaaccagcggttgattcttttgtgaagattctaacagcttcagatacaagcacacatggtggattctctgttcttcgtaaacacgccactgagtgtttaccttcacttgatatgacacaacctacaccgactcaagaacttgtagctagagatcttcacggctatgaatggaggtttaagcatatatttagagggcaaccgaggaggcatttacttacaaccggttggagtacatttgtaacctcgaaaagacttgtagctggagatgcatttgtgttcttgaggggtgaaaccggggatttacgggttggtgtgaggcgtttagctaagcagcaaagcacgatgcccgcatccgttatttcgagtcagagtatgcgtttgggagttcttgctacagcttctcatgctgttaccacaacaactatatttgttgtcttctataaaccaaggataagccagtttataattagtgtgaacaagtatatgatggcgatgaagaacgggttttctctcggtatgcggtataggatgagattcgaaggagaagagtctcctgagagaatatttacaggtaccattattggcagtggagatctatcttctcaatggccagcttccaaatggaggtcattgcagatccaatgggacgagccatcttctatacagagaccaaacaaggtctcaccgtgggagatcgagcctttctcaccatccgcgcttacaccaacccctactcaacaacaatcaaagtccaaacggtccagaccaatctcagaaatcacagggagtcctgtagcttctagtttcttgagtagtttctcgcagagccacgagtctaatccatcggtcaaactgttgtttcaagatccagcaaccgagagaaactcaaacaaatcagtgttttcaagtggattacaatgcaagataaccgaggctccggtcacaagtagttgtaggttattcggattcgatctcacgagcaagcctgcttctgctacaattcctcatgacaagcagctaataagtgtggattcaaatatatctgattctaccaccaagtgtcatgatcctaactcttcaaactcaccaaaagagcagaaacaacaaacatccacaagaagccgaatcaaggtgcaaatgcaaggaacagcggttggacgcgcggttgatttaacattgttgagatcatacgatgaactaataaaagagctagagaaaatgtttgagattgaaggagaacttagtcctaaagacaaatgggctatcgtgtttacagacgatgaaggagataggatgcttgtaggagatgatccatggaatgagttctgtaaaatggcaaagaagttattcatatatccgagtgatgaggtcaagaaaatgaggtcgaagtcgttgttgggtgataaaggtacgatcgtaaatcttgaatcagatcagaggacagttcacgtttaactatcaagttgttgatttcttactttcttggagactctctcaagtctcaccaagtccgagagttaggtggtttttttttttggttttttttttggcgttaggtgggtttgttatttacttgtttaacataaagactataaaatatacagttattatatacgagtatatcgtattaggtttcaaacgaaaaaaaaaa

SEQ ID NO: 2444 - protein, 601 aa, Arabidopsis thaliana
MANVEADFRTSGSNDDELYTELWKACAGPLVEVPRYGERVFYFPQGHMEQLVASTNQGVVDQEIPVFNLPPKILCRVLSVTLKAEHETDEVYAQITLQPEEDQSEPTSLDPPLVEPAKPAVDSFVKILTASDTSTHGGFSVLRKHATECLPSLDMTQPTPTQELVARDLHGYEWRFKHIFRGQPRRHLLTTGWSTFVTSKRLVAGDAFVFLRGETGDLRVGVRRLAKQQSTMPASVISSQSMRLGVLATASHAVTTTTIFVVFYKPRISQFIISVNKYMMAMKNGFSLGMRYRMRFEGEESPERIFTGTIIGSGDLSSQWPASKWRSLQIQWDEPSSIQRPNKVSPWEIEPFSPSALTPTPTQQQSKSKRSRPISEITGSPVASSFLSSFSQSHESNPSVKLLFQDPATERNSNKSVFSSGLQCKITEAPVTSSCRLFGFDLTSKPASATIPHDKQLISVDSNISDSTTKCHDPNSSNSPKEQKQQTSTRSRIKVQMQGTAVGRAVDLTLLRSYDELIKELEKMFEIEGELSPKDKWAIVFTDDEGDRMLVGDDPWNEFCKMAKKLFIYPSDEVKKMRSKSLLGDKGTIVNLESDQRTVHV

SEQ ID NO: 2445 - DNA, 2697 bp, Musa acuminata
  CDS (1)..(2697)
atgttgattctgattcttgctgttttcgtgccctcgtatacagaggaaccacggtgtcttaactcagagttatggcatgcatgtgctggacctctggtgtcattacctgctgttggaagtcgggtggctgcatcaaccaacaaggaagttgattctcaaataccaaactacccaagcttgcctcctcagctgatctgtcagctgcataatgttactatgcatgctgatgtggagaccgacgaagtttatgctcagatgaccttgcaaccattgagtgctcaagagcaaaaagatccctatctccctgctgatttgggtacccccagcaaacaaccaacgaattacttctgtaagacactgaccgcaagtgacaccagtacacacggtggattttcagttccccgtcgagcagcagaaaaagttttccctccattggatttttcacagcagcctcctgcacaggagttggttgctagagaccttcatggcaatgagtggaagttccgccacatttttcgtggtcagccaaagaggcatctgcttactacaggatggagtgtttttgtgagtgcaaagagactcgttgcaggggattctgttctttttatctggaatgagaacaatcagttgctattgggtattcggcgtgccaatcgacctcaaacagttatgccttcttctgtattgtctagcgatagcatgcacataggccttcttgctgcagctgctcatgctgctgctacaaacagccgattcaccatattctataacccaagggcaagcccttctgaatttgtaatcccactaacgaagtatgttaaagcagtctatcacacccgtgtttctgtgggtatgcgtttccggatgctgtttgaaaccgaagaatcaagcgttagacgatacatgggtacgattactgggatcagtgatcttgaccctgtccgttggccaaattcacattggcgttctgtaaaggttggctgggatgagtcaacggcaggagagaagcagcctagggtatcactttgggaaattgaacctctaacgacttttcccatgtatccgtcttcctttcctctccggtttaagcgcccatggcccaccggattgcccttcttccatggtggaagagatgatgagttcagtctaaattcaccactgatgtggcttagagatggtggaaatccagcacttcagtcattgaatttccagggtgttggtgtgacaccttggatgcagccaagacttggtacttctatgcttgctctacaacctgacatgcatcagacagtggctgcagtagcccttcaggaaatgcagaccatggatcttactaaacaggtaacccctgcaatgcttcaatttcagcaacctcagaacacaaccagcagatccacacccatactgcagagtcagatcctacagcatgcacagcctcaatctcaccagcccctccttcacactattcaaggaaatcagatgcaaagccaggctcagtctcagtttcttcagcatcatttgcaacaggggcattcgtttgctgaacaacagcagcagcagcagcataatctgcagctacagataccagagcatcaacaatttcagcagcaaagagttttgcctgcttatcagcaagttccttatggtgcagccaatctgtctcagctcagctctagttctcaatcccaatcaaccactttgaacatgatatctccatcctcacagttgaaggactttccagattctaatggtaactctgtttcggcatctagtgtctccccccttgataacattttacatcaaatttctccagaagaaacatcacaacttcttagtttgccaagatatgcccaaccagttacttcgaatccctggtcgtcgaagcgaattgcagttgaatcaatgcttccttcgggagctcaaagtgtactctcacaggtggaacaaataggttctggacagcctaatatccccttacaatctgtagtgctaccaccatttccgggaagagagtgctcaatgaatcaagatggcaatatggatatccaaaaccagcacatgtttggtgtcaatattgactcatcgatttcagtacagaatggcatccgaagtcttggtactggtgtcaatggaactaattcaacaaacataccatatgctgcatgcaatttattgaggtctgctggaaatgattttcctatcaatcaagcagtaaatgggtcgaatggtctggatgaatcaggacttttgcagtctactgagaatgttgatcgagtgaactcacagagtggaacatttgttaaggtttataaatcaggttcatttgggaggtcactggacatcacgaggtttagcagctaccacgagttgcgaagtgagcttgggcacctgtttggcctggaaggccaattggaggaccctttgagatcaggctggcagcttgtattcgtcgaccgggaggatgatgttcttcttgtcggcgatgatccatggcaggagtttgtcaacagtgtatcgtgcataaagatactttcacccgaagaagtgcaacagatgggcaaacaaggtgtagattttgtgaattcagcccccatcaaaaggcttcaaagtaatgggtgtgatgactatgtaagtcagcagcattcaagaaatctcagtgccgccaggatcacatcggtcgggtcgttcaaatactga

SEQ ID NO: 2446 - protein, 898 aa, Musa acuminata
MLILILAVFVPSYTEEPRCLNSELWHACAGPLVSLPAVGSRVAASTNKEVDSQIPNYPSLPPQLICQLHNVTMHADVETDEVYAQMTLQPLSAQEQKDPYLPADLGTPSKQPTNYFCKTLTASDTSTHGGFSVPRRAAEKVFPPLDFSQQPPAQELVARDLHGNEWKFRHIFRGQPKRHLLTTGWSVFVSAKRLVAGDSVLFIWNENNQLLLGIRRANRPQTVMPSSVLSSDSMHIGLLAAAAHAAATNSRFTIFYNPRASPSEFVIPLTKYVKAVYHTRVSVGMRFRMLFETEESSVRRYMGTITGISDLDPVRWPNSHWRSVKVGWDESTAGEKQPRVSLWEIEPLTTFPMYPSSFPLRFKRPWPTGLPFFHGGRDDEFSLNSPLMWLRDGGNPALQSLNFQGVGVTPWMQPRLGTSMLALQPDMHQTVAAVALQEMQTMDLTKQVTPAMLQFQQPQNTTSRSTPILQSQILQHAQPQSHQPLLHTIQGNQMQSQAQSQFLQHHLQQGHSFAEQQQQQQHNLQLQIPEHQQFQQQRVLPAYQQVPYGAANLSQLSSSSQSQSTTLNMISPSSQLKDFPDSNGNSVSASSVSPLDNILHQISPEETSQLLSLPRYAQPVTSNPWSSKRIAVESMLPSGAQSVLSQVEQIGSGQPNIPLQSVVLPPFPGRECSMNQDGNMDIQNQHMFGVNIDSSISVQNGIRSLGTGVNGTNSTNIPYAACNLLRSAGNDFPINQAVNGSNGLDESGLLQSTENVDRVNSQSGTFVKVYKSGSFGRSLDITRFSSYHELRSELGHLFGLEGQLEDPLRSGWQLVFVDREDDVLLVGDDPWQEFVNSVSCIKILSPEEVQQMGKQGVDFVNSAPIKRLQSNGCDDYVSQQHSRNLSAARITSVGSFKY

SEQ ID NO: 2447 - DNA, 2424 bp, Medicago truncatula
  CDS (1)..(2424)
atggaaattgatctaaacaatgaagtgattgaggttgagaagaatgcattgtgccataaggaatgtgaaaaaggtttttgtttctgtgtttcttgtttgtctccttcaacttgttcatcttcaagttcaacttcaccacttgtttcttcttcttatcttgaattatggcatgcttgtgctggtcctcttacctcacttcctaagaaaggaaatgttgtggtgtattttccacaaggtcacttggaacaatttgcttctttttctccttttaagcaattggagataccaaactatgatcttcagcctcagatcttttgcagggttgtcaatgtccaactacttgccaacaaggagaatgatgaggtttatacgcaagttactctgctacctcaggctgagttggcagggatgcatatggaaggaaaagaagttgaggaattagaaggagatgaagagggagatggagggtcgcctacaaaatcaacccctcacatgttctgcaagacactaactgtctctgataccagcactcatggtggattctctgtgcctcgtagagctgctgaagattgttttcctcctttggactataagctgcagagaccctctcaagagcttgttgccaaagacctgcatggtgtggagtggaaatttcgccatatttatagaggtcagccaaggcggcatctactcactactggctggagcatttttgtgaaccaaaagaatcttgtttctggtgatgctgtgctctttctaagggggcaagactgcgtacatctatcttctccagacctcacctggggtcaaaatggagagctgagattgggaatcagaagagctgttagacctagaaacggtcttcctgaatcaatcgttggtaatcagaattgttatcccaatttcctttcatctgttgcaaatgctatatccaccaaaagcatgtttcatgttttctatagtccaagagcaagccatgccgaatttgttgttccctaccaaaaatatgttaaaagcatcaagaatccaatgaccatagggacaagattcaaaatgagaattgaaatggacgaatcgcctgaaagaaggtgtagtagtggtatgttgattggaataaatgacttggatccctatagatggcctaaatcaaaatggaggtgcttgatggtaagatgggatgatgatactgagactaatcatcaagaccgagtatctccatgggagatcgatccttcttctcctcagcctcccctaagcattcagtcttccccaagactgaagaaaccgcggaccggtctactggttgcctcacccaatcacctcatcactggtatgaatcctaatgcaggaatcagtggaatgatgggttttgaggagtcagtaagatcaccaaaggtcttgcaaggtcaagaaaatacaggttttatgtcactatactatggatgtgacaaagtaaccaaccagccaggttttgagttgagcacttcaagtcatcatcaaaaccttgcatcaactggaataggaaaagtagttacctcttctgagcttatgagtgttcatcctttcagttatgcaggctttatggaaagtaacaactttccaagggtcttgcaaggtcaagaaatatgtaaactgaaatccctttcaggaaaagttgatttcaacattggagcttggggaaccaagcccagttttcaatctgcatgttttccttatggagatattgacaaatccaatcaagctagcatgtttagctcaaaacacaccagtttcatgagtgataatgtcccgtttaacacgccatcgatagtggcaggggacattagaaaagaagttggaagatctggatctaatctccttccaaatgagcataagctgcaggacaatgtttctgcttctgcttcattagtggatactaatagaaatgctccaaatgataacaatgtcaagggaaaggcaaattcctgcaaactattcggctttcctttgtctggcgaacctagtagccaaaatttacagaacacggcaaaaaggagttgcacaaaggttcacaagcaaggaagcttagttggaagagccattgatctctctaggttgagcggctacaatgatcttctgagtgaactggagaaactatttggcatggaaggacttcttagagattctgataagggatggaggatcctctacactgacagtgagaatgacataatggttgtgggggatgatccatggcatgagttttgtgatgtggtgtcgaagatccatatatataccaaagaagaagtggagaagatgacatttgggatgatgaccaatgatgatactcatagctgtttggatcaggcaccagttattattgaaccttcaaagtcttcctcagttggtcagccagattattctccaacagtagtaagagtctaa

SEQ ID NO: 2448 - protein, 807 aa, Medicago truncatula
MEIDLNNEVIEVEKNALCHKECEKGFCFCVSCLSPSTCSSSSSTSPLVSSSYLELWHACAGPLTSLPKKGNVVVYFPQGHLEQFASFSPFKQLEIPNYDLQPQIFCRVVNVQLLANKENDEVYTQVTLLPQAELAGMHMEGKEVEELEGDEEGDGGSPTKSTPHMFCKTLTVSDTSTHGGFSVPRRAAEDCFPPLDYKLQRPSQELVAKDLHGVEWKFRHIYRGQPRRHLLTTGWSIFVNQKNLVSGDAVLFLRGQDCVHLSSPDLTWGQNGELRLGIRRAVRPRNGLPESIVGNQNCYPNFLSSVANAISTKSMFHVFYSPRASHAEFVVPYQKYVKSIKNPMTIGTRFKMRIEMDESPERRCSSGMLIGINDLDPYRWPKSKWRCLMVRWDDDTETNHQDRVSPWEIDPSSPQPPLSIQSSPRLKKPRTGLLVASPNHLITGMNPNAGISGMMGFEESVRSPKVLQGQENTGFMSLYYGCDKVTNQPGFELSTSSHHQNLASTGIGKVVTSSELMSVHPFSYAGFMESNNFPRVLQGQEICKLKSLSGKVDFNIGAWGTKPSFQSACFPYGDIDKSNQASMFSSKHTSFMSDNVPFNTPSIVAGDIRKEVGRSGSNLLPNEHKLQDNVSASASLVDTNRNAPNDNNVKGKANSCKLFGFPLSGEPSSQNLQNTAKRSCTKVHKQGSLVGRAIDLSRLSGYNDLLSELEKLFGMEGLLRDSDKGWRILYTDSENDIMVVGDDPWHEFCDVVSKIHIYTKEEVEKMTFGMMTNDDTHSCLDQAPVIIEPSKSSSVGQPDYSPTVVRV

SEQ ID NO: 2449 - DNA, 3363 bp, Medicago truncatula
  CDS (1)..(3363)
atgaaggctccaaacaatggatacatgcccaattcaggagaaggggaaaggaagaccatcaattcagaattatggcatgcttgtgctggacctttggtttccttgccacccgttggaagtcttgtggtttacttccctcaaggacacagcgagcaagttgcggcttccatgcaaaaacagaccgacttcatacccagttaccccaatcttccatccaagttgatttgcatgcttcacaatgttgccctgcatgctgatcctgaaactgacgaggtctacgcacaaatgacacttcaacctgtaaacaaatatgacaaggatgcaatattggcatcagattttggtctcaaacaaaaccgtcaacctaccgaattcttttgcaaaactctaactgctagtgacacaagcactcatggtggattttctgttcctcgtagagcagctgagaaaatattcccacctttggatttttccatgcaacctcccgctcaggagcttgttgctaaagatctacatgacaatacatgggcatttagacatatttatagagggcaaccaaagagacatctgttgactactggttggagtgtatttatcagcacaaagagactttttgctggagattctgttctttttatcagagatgaaaaacagcaacttcttttaggcttgaggcgcgctaatagacagcagccagcgctttcttcatcagtaatatccagtgacagtatgcatattggcattttagctgctgccgctcatgctgctgcaaataacagtccatttactatatattacaatccaagggccagcccctccgaatttgttgttccattggccaagtataacaaagccatgtacactcaagtgtctcttggaatgagatttagaatgatgtttgaaacagaggagtctggagtacgtagatatatgggtacagttacaggaattagtgacttggatcctgtccgatggaaaaattcacaatggcgcaatcttcaggttggatgggatgaatcgacagctggtgaacgcccaagcagagtttcaatttgggatattgaaccagtagtgactcctttctatatttgtccacctccttttttcaggcaaaacttccctggccaccctggcatgccagatgacgggtctgatgtagaaaattctttcaagagagctatgccctggcttggagatgactttggcatgaaggatgcctcaagttcagtcttccctggtttgagtttagtgcagtggatgagcatgcagcagaaaaatcagttttcaggtgctcaatcaggatgtttcccatccatgctctcgtctaatactctgcatagtaatcttagcaccgatgacccatccaaattattaagtttccaagctccagccctctctgcaccaaatcttcaatttaacaaacctaatttaccaaatcaaatcaaccaattgcaacagtccccaacatcatggcctcagcagcaacagcagcagcagcagccgctgcagcaacaacagcagcagcaacaacaacagcaacagcagctgcagtcattgtcacaaataccaatgaaccagttccagcaacaaaggcaacagcagctgcctgaatcacaaaatctgacactgctacaacaacaaattactcatcagctacagaaacagccacagtcatctcaacatgctattatgaataatggtgtagttgcttctaaccagattacaaatcagtttcaacaaccgcaaccactagcttacgctcagcttcagcaacaacaacagttgctccagggaagtatcccactccagcaaagtatccaatcagccagtaagaatgcattcccactgacatccctgccacatgactcacaatttcatcaacagatagaccagcaagcgagtctctcacagaggcagcagcaacagacacaatcacaacaatcttcactgcaggcgctgcaacaaagccagccacagagggtgcaaccaaatcttcaagcaactcaaatgtctcaacaaaacacctcggagcaacaactgcagctacagtttttgcaaaaattgcagcagcagcagcaacaacaacaacttctttcgacgtctaacccacttttgcaatctcagcttctacagcaacaaaatactaaccaacaaaaccagcaattatcacagcttcctatatcccaacatcacaatcaacagtttggcaataatgcattttcgacggagaagcttctcaacagcaacaatttgtcttcttcgtctcttatgcaatcacagcagctttctgtgaatcaaacccgaaatacacagaagccactcacaattactagagttccctctacacttacagatggagaggctccatcatgctcaacatcgccatctactaataactgccgtataactcaaccaaacctcctgaagagaaatcaacaagtaccaactacaataggcgggatcttggcagtggagcccaccagtaatctgatacatgaccttcagagtaagtctgacatgcatatcaaacacgagttctcaaatgtaaaaggatctgaccagctaaaatataaaggtacaactactgatcaactggaagcttcttctggaacatcatactgtctggatcctggcaacgttcaacagaatttgccactatccaacttctgcatggaaggggatgtccaatcaaaccctcgaatcaatctgccgtttgactctaatcttgatggtctaatgtctgatactatgctttcaaggggttttgactctcaaaaagatcttcaaaatttgttgtctaattatgatgctgctccaagagacattgaaaccgagctgtccactgctgacatcagctcacagtcatttggattgccagacatgtcttttaagcctggttgctcaaatgatgttggcattaatgatacttctggggttttgaacaatggcttgcgggcaaatcaaaatcaacgaatgcgaacatatactaaggttcaaaagcgtggctctgttggaaggtgtattgacgtcacccgttacaagggatatgatgaactccggtatgatttagcacgaatgtttgggattgaagggcaactagaagatcctcaaaggactgactggaagttagtatatgtggatcatgaaaatgacattcttcttgttggtgatgatccttgggaggaatttgtaagttgtgttcagagtataaagatattgtcatctgctgaggtgcagcaaatgagtttggatggggatttaggtaatgttacaatcccaaatcaagcatccagtgggacagatagtggcaatgcatggaggggacagtatgatgataactctgcagcctcattcaataggtga

SEQ ID NO: 2450 - protein, 1120 aa, Medicago truncatula
MKAPNNGYMPNSGEGERKTINSELWHACAGPLVSLPPVGSLVVYFPQGHSEQVAASMQKQTDFIPSYPNLPSKLICMLHNVALHADPETDEVYAQMTLQPVNKYDKDAILASDFGLKQNRQPTEFFCKTLTASDTSTHGGFSVPRRAAEKIFPPLDFSMQPPAQELVAKDLHDNTWAFRHIYRGQPKRHLLTTGWSVFISTKRLFAGDSVLFIRDEKQQLLLGLRRANRQQPALSSSVISSDSMHIGILAAAAHAAANNSPFTIYYNPRASPSEFVVPLAKYNKAMYTQVSLGMRFRMMFETEESGVRRYMGTVTGISDLDPVRWKNSQWRNLQVGWDESTAGERPSRVSIWDIEPVVTPFYICPPPFFRQNFPGHPGMPDDGSDVENSFKRAMPWLGDDFGMKDASSSVFPGLSLVQWMSMQQKNQFSGAQSGCFPSMLSSNTLHSNLSTDDPSKLLSFQAPALSAPNLQFNKPNLPNQINQLQQSPTSWPQQQQQQQQPLQQQQQQQQQQQQQLQSLSQIPMNQFQQQRQQQLPESQNLTLLQQQITHQLQKQPQSSQHAIMNNGVVASNQITNQFQQPQPLAYAQLQQQQQLLQGSIPLQQSIQSASKNAFPLTSLPHDSQFHQQIDQQASLSQRQQQQTQSQQSSLQALQQSQPQRVQPNLQATQMSQQNTSEQQLQLQFLQKLQQQQQQQQLLSTSNPLLQSQLLQQQNTNQQNQQLSQLPISQHHNQQFGNNAFSTEKLLNSNNLSSSSLMQSQQLSVNQTRNTQKPLTITRVPSTLTDGEAPSCSTSPSTNNCRITQPNLLKRNQQVPTTIGGILAVEPTSNLIHDLQSKSDMHIKHEFSNVKGSDQLKYKGTTTDQLEASSGTSYCLDPGNVQQNLPLSNFCMEGDVQSNPRINLPFDSNLDGLMSDTMLSRGFDSQKDLQNLLSNYDAAPRDIETELSTADISSQSFGLPDMSFKPGCSNDVGINDTSGVLNNGLRANQNQRMRTYTKVQKRGSVGRCIDVTRYKGYDELRYDLARMFGIEGQLEDPQRTDWKLVYVDHENDILLVGDDPWEEFVSCVQSIKILSSAEVQQMSLDGDLGNVTIPNQASSGTDSGNAWRGQYDDNSAASFNR

SEQ ID NO: 2451 - DNA, 2748 bp, Medicago truncatula
  CDS (1)..(2748)
atgagactctcttcagctagttttagtcctccaccccaagaaggggaaaagagagttctagattcagaactttggcatgcatgtgctggccctcttgtctctttgccagcagttggaagtagagttgtgtactttccacaaggccacagtgaacaagtggctgtgtcaactaacaaggaagtcgatgcacatatcccaaactatccaagcttacctcctcagcttatttgtcaacttcataatttgactatgcatgctgatgtggagaccgatgaagtgtatgcgcagatgaccttgcaacctctgaatgctcaagagcaaaaagaggcttaccttccagcagagttgggaactccaagtaaacagccgacaaactacttttgcaagaccttgactgctagtgacacaagcactcacgggggattctctgttcctcgccgggcggctgaaaaagtgtttcctcctttggatttctcccaacagcctcctgctcaagagttaatagcaagggacttgcatggtaacgaatggaaattcagacatatcttccgaggccagcccaaaagacatctacttacaactggatggagtgtttttgtgagtgctaaaagacttgttgctggtgattctgtgctgtttatctggcaatgcatcttcttcaataggaatgaaaagaaccaattgcttcttggtattcgccgtgctagccgaccacaaactgtgatgccttcctcagtattgtcaagtgatagtatgcacttgggacttcttgctgcagcagctcatgcggctgcaaccaatagccgtttcactattttctataacccacgtgcgtgtccatccgaatttgtcatacccttggcgaagtatgttaaagctgtgtatcatactcgagtttcagttggtatgcgtttcaggatgctctttgaaacagaggagtctagtgtgcgacgatacatgggtacaataactggcatttgtgacctagattctgtccggtggcctaactcacattggcgctcggtaaaggttggttgggatgaatccactgccggagaaaggcaacctagagtgtctttgtgggaaatcgagccattaacaacgtttcctatgtatccgtcaccattccctcttaggcttaaacgaccatggcctcctggattgccttcgttccatggcatgaaagatgatgattttggcatgagttctcctttgatgtggctccgagacacggatagagggcttcaatctcttaattatcaagggattggggttaatccttggatgcagccaaggtttgatcccgccatgctgaatatgcaaaccgatatgtatcaagctgtggctgctgctgcacttcaggacatgaggactgtagtagatccttccaaacagcttcctggttccttgcttcaatttcagcaaccaccgaacttcccgaacaggaccgctgctttaatgcaggctcagatgttgcaacagtcgcaacctcaacaggcttttcaaaataataatcaggagaatcaaaatctgtcgcaatctcagccacaagctcagactaatcctcaacagcatccacagcatcagcattcattcaataatcaactccatcatcatagccagcagcaacaacaaactcaacagcaagtggtggataataatcagcagatttctggttcggtctctacaatgtctcagtttgtttcagcgactcaacctcaatcaccaccacccatgcaagctctctcttctctatgccatcagcagagtttttctgattcaaatgtgaactcttcaactactattgtttctcctttgcacagtatcatgggttcatcgtttccgcatgatgaatcatccctccttatgagtcttccaagaacaagctcttgggttcctgttcaaaattcaactggttggccatccaaacgcattgcagtggatccactcctctcttcgggagcatctcaatgtattctgcctcaggtggagcagctagggcaggcacggaattcgatgtctcaaaatgctattacattgccaccatttcctggtagggagtgctcaatagaccaagaagggagcaatgatccgcaaagtaatcttttattcggtgtcaatatagatccctcatctcttctactgcataatgggatgtcgaactttaaggggatcagtggcaacaacaatgattcctcaaccatgtcctaccatcaatcttctagttacatgaacaccgcaggcgctgattcttcgttgaatcatggagtaacgcctagtattggtgaatctggtttcttgcatacccaggaaaacggggagcaaggaaacaacccactgaacaagacctttgtgaaggtttataaatcagggtccttcggaagatcgttggatatcactaaattcagcagctacaatgagctgcgtagtgagctcgcccgaatgttcggactggaaggcgagttggaggaccctgtgagatcaggctggcagcttgtattcgttgaccgagagaatgatgttcttctcctcggtgatggcccttggccggaatttgtgaatagtgtatggtgcatcaagatactttcgcctgaggaagtgcagcaaatgggcaacactggcctcgggcttttgaactcggttccaattcaaaggctctcaaatagcatttgtgatgactatgtgagccgtcaagattcaagaaatctaagcagcgggataacaaccgtgggatctctagactactaa

SEQ ID NO: 2452 - protein, 915 aa, Medicago truncatula
MRLSSASFSPPPQEGEKRVLDSELWHACAGPLVSLPAVGSRVVYFPQGHSEQVAVSTNKEVDAHIPNYPSLPPQLICQLHNLTMHADVETDEVYAQMTLQPLNAQEQKEAYLPAELGTPSKQPTNYFCKTLTASDTSTHGGFSVPRRAAEKVFPPLDFSQQPPAQELIARDLHGNEWKFRHIFRGQPKRHLLTTGWSVFVSAKRLVAGDSVLFIWQCIFFNRNEKNQLLLGIRRASRPQTVMPSSVLSSDSMHLGLLAAAAHAAATNSRFTIFYNPRACPSEFVIPLAKYVKAVYHTRVSVGMRFRMLFETEESSVRRYMGTITGICDLDSVRWPNSHWRSVKVGWDESTAGERQPRVSLWEIEPLTTFPMYPSPFPLRLKRPWPPGLPSFHGMKDDDFGMSSPLMWLRDTDRGLQSLNYQGIGVNPWMQPRFDPAMLNMQTDMYQAVAAAALQDMRTVVDPSKQLPGSLLQFQQPPNFPNRTAALMQAQMLQQSQPQQAFQNNNQENQNLSQSQPQAQTNPQQHPQHQHSFNNQLHHHSQQQQQTQQQVVDNNQQISGSVSTMSQFVSATQPQSPPPMQALSSLCHQQSFSDSNVNSSTTIVSPLHSIMGSSFPHDESSLLMSLPRTSSWVPVQNSTGWPSKRIAVDPLLSSGASQCILPQVEQLGQARNSMSQNAITLPPFPGRECSIDQEGSNDPQSNLLFGVNIDPSSLLLHNGMSNFKGISGNNNDSSTMSYHQSSSYMNTAGADSSLNHGVTPSIGESGFLHTQENGEQGNNPLNKTFVKVYKSGSFGRSLDITKFSSYNELRSELARMFGLEGELEDPVRSGWQLVFVDRENDVLLLGDGPWPEFVNSVWCIKILSPEEVQQMGNTGLGLLNSVPIQRLSNSICDDYVSRQDSRNLSSGITTVGSLDY

SEQ ID NO: 2453 - DNA, 3291 bp, Medicago truncatula
  CDS (1)..(3291)
atgactaccacgctggaagaaggtccctccgccgccatcgccgccgtagcttccgaaggagaagacaagaatgacggcggcgtaaacagtgagctatggcaagcttgtgctggtcctcttgtcaatcttcctttacctggtacccatgtcgtttacttccctcaaggccactccgaacaagttgcagcatctttgaagaaagatggggatgtccaagtaccaaactattccaatcttccctccaagttgccttgtactcttcacagtctcaccttacatgcagattcagacacagacgaagtatatgcccggatgacacttcagccagtgtctagttttgacatggatgccatattaagatcagatatttctctcaagtcgaacaagccacaacctgagtttttctgcaagcaattgacagctagtgatacgagtactcatggaggtttctctgtaccccgccgtgctgcagagaagattttccccccacttgatttctcagcgcagcctcctgctcaagaacttgtggcaaaggatttgcatggaaatgtttggaagttccgccatatataccgtggacaaccgaaacgccacttgcttacaaccggatggagtctatttatcagtgggaagaggcttttagctggagactctgttttatttatacgagatgaaaagcagcagttgcttttgggtatcagacgagcaaacaggcaaccgactaatttatcttcctcagtactgtcaagtgatagtatgcacattggaatcctggctgcagcagctcatgctagtgcaaacaatagtcccttcaccgtgttttataatcctagggccagtccctcagaatttgttattccattggccaagtactacagggcagtatacagccaccaaatatcacctggcatgcgctttagaatgatgtttgaaacagaagactcaggaacaagaagatatatgggtacagttattggtgttagtgatctggattccgtgagatggaaaaactcgcagtggcgtaatttgcaggttggttgggatgaagccaccgctggggaaaggcggagtagggtctcaatctgggaaattgaacctgttactgctccatttttcatctgtccacctccattcttcagacccaagagaccaagacaacccggaatgcctgacgatgagtcatttgatttcagtaaccttttcaagaatacaatgccttggcttggtgatgatatgtgtatgaaggatccccaggctttccctggcatgagcttagctcaatggatgaacatacagcaaaatcctgctatggttagctcattgcaaccaaatcatgtgccttccatgcctgcatctgttgtacagaatcttcctggatccgatattgcccatcaattgggattttctactcaacaaatctctcaatcaaacaatgtagccttcaatgcaccggggatgcctcagatgccactatccacttctagtggattgggagcagtcatgcagccagaacaacattctagacagaacttggcatatcaaactctaccgcagagtcaagttcagacccaacttcttaatccccagagtattgtccaaacgaacaatattcttcaatcacaacaaccatccattcaaaacaatcaactccatagaagtctctctcagaacccactgcaacagtttcaacagactataattgggcaaaaccaaccgcaaaatatgattaggcccactatgccagatcatattaatcaacagttgcatatgtctgataatcaggtccggcttcagttgttacagaagcttcaacagcaacaacagacactcttgtctcagcaatctgcattgcagcagcctgctcagattattcaaaaccatgaccagcagaggcaagaattagacgtcacacacaactctagggcaataactccccgtcaagtgtttgaaattcctcatacgcttcaaaactcactgctcgaggctaattctatgaaccatcagatgacagatcatagtagccagaacaatgttcagttctcccatccagccaagcaacaaaagcttcaacatcaacaacagcaaacacaacccggctcactgtctaaaatgtctagtcatgttggacttccttctgcaactactgctaatcagttatctgcttccggttgcagtatacggactgtagcaactgggacagtgccatcggtaaatactgatcatgctccatcttgttctacttcgccttccacaaataactgtgttggtgcgcttcctccagtgaccacatcccagatccttatgagcacaataggggatgacgttgctcagtctgctgtgaccatcttgagtcaaagttctaatgcaaatgtggtaaaatatgcacagccaaattatgatgttaagccttgtttaaacatttccgaaaatcacaacccagtgaatttttaccctcagacttgcttgaatggtgctgctatccagacagattgtttggatacgtcgtcttctacaacttcagtttgcctttctcagagtgattcacgctttcatcagactgacagaccggtatcttactatcctcagtcaatgttttctagagacaacattcaaaacgtggaagttcaggctgatgctaggtgcaatgttgcatatggcaacagcatgaatgggcaaatgagaatgccactgaatctagattctacggtaaccaaaggcacagcaagactgggcaaggatttgtcaaatgatttctcttcgggaggcttgctcgggggctatgaaaataacggtgatgcccagccagaactttcatcttccatggtttcacaaacatggggagtccctgatatgacctttaattcgattgattccactataaatgatagtggtttcttggatagtggtccatgggctccgcggccgccgccacatcaatttcaacggattagaacatataccaaggtatataaacgcggagctgtgggaaggtccatagacataacaagatattcaggttacgatgagcttaaacatgatctggctcgtaggtttggtattgagggacaactagaggatagacaacgagtaggttggaaacttgtttatgtagatcatgaaaatgatgttctgctagtgggagatgacccttgggaggagtttgtcaattgtgtccgctgtattaaaatactttctcctcaagaagttcaacagatgagcttagatggagattttggcaatggtggccttccaagacaggccagtagtagctctgatggtgggattgcttaa

SEQ ID NO: 2454 - protein, 1096 aa, Medicago truncatula
MTTTLEEGPSAAIAAVASEGEDKNDGGVNSELWQACAGPLVNLPLPGTHVVYFPQGHSEQVAASLKKDGDVQVPNYSNLPSKLPCTLHSLTLHADSDTDEVYARMTLQPVSSFDMDAILRSDISLKSNKPQPEFFCKQLTASDTSTHGGFSVPRRAAEKIFPPLDFSAQPPAQELVAKDLHGNVWKFRHIYRGQPKRHLLTTGWSLFISGKRLLAGDSVLFIRDEKQQLLLGIRRANRQPTNLSSSVLSSDSMHIGILAAAAHASANNSPFTVFYNPRASPSEFVIPLAKYYRAVYSHQISPGMRFRMMFETEDSGTRRYMGTVIGVSDLDSVRWKNSQWRNLQVGWDEATAGERRSRVSIWEIEPVTAPFFICPPPFFRPKRPRQPGMPDDESFDFSNLFKNTMPWLGDDMCMKDPQAFPGMSLAQWMNIQQNPAMVSSLQPNHVPSMPASVVQNLPGSDIAHQLGFSTQQISQSNNVAFNAPGMPQMPLSTSSGLGAVMQPEQHSRQNLAYQTLPQSQVQTQLLNPQSIVQTNNILQSQQPSIQNNQLHRSLSQNPLQQFQQTIIGQNQPQNMIRPTMPDHINQQLHMSDNQVRLQLLQKLQQQQQTLLSQQSALQQPAQIIQNHDQQRQELDVTHNSRAITPRQVFEIPHTLQNSLLEANSMNHQMTDHSSQNNVQFSHPAKQQKLQHQQQQTQPGSLSKMSSHVGLPSATTANQLSASGCSIRTVATGTVPSVNTDHAPSCSTSPSTNNCVGALPPVTTSQILMSTIGDDVAQSAVTILSQSSNANVVKYAQPNYDVKPCLNISENHNPVNFYPQTCLNGAAIQTDCLDTSSSTTSVCLSQSDSRFHQTDRPVSYYPQSMFSRDNIQNVEVQADARCNVAYGNSMNGQMRMPLNLDSTVTKGTARLGKDLSNDFSSGGLLGGYENNGDAQPELSSSMVSQTWGVPDMTFNSIDSTINDSGFLDSGPWAPRPPPHQFQRIRTYTKVYKRGAVGRSIDITRYSGYDELKHDLARRFGIEGQLEDRQRVGWKLVYVDHENDVLLVGDDPWEEFVNCVRCIKILSPQEVQQMSLDGDFGNGGLPRQASSSSDGGIA

SEQ ID NO: 2455 - DNA, 2451 bp, Oryza sativa
  CDS (1)..(2451)
atgagctcgtcgtcggcggccagcatcgggccgccgcagccgccgccgccccccgcgccgcccgaggaagagaagaagtgcctcaactcggagctatggcacgcctgcgccggcccgctcgtctgcctccccaccgtcggcacgcgcgtcgtctacttcccgcaaggccacagcgagcaggtggcggcgtcgacgaacaaggaggtggagggtcacatcccgaactaccccaacctgccggcgcagctgatctgccagctccacgatgtcacaatgcatgcggatgtggagactgacgaggtgtacgcgcagatgacgctccagccactgaacccacaggagcagaacgatgcgtaccttcccgcggagatggggataatgagcaagcagccgacgaattacttctgcaagacattgacggcgagcgacaccagcacgcacggggggttctccgtgccccgccgtgctgctgagcgcgtcttccctcctctggatttcacacagcagcctccagcccaggagctaattgcacgggatattcatgacatcgagtggaagttcaggcacatctttcgaggccaacccaaacgacacctgctaaccactggctggagcgtttttgtcagtgctaagagacttgttgctggagattctgtgcttttcatatggaacgagaaaaaccagcttttacttggaataagacgtgccagtcggccacagactgtgatgccttcctctgttctttcaagcgatagcatgcacataggtctccttgcagcagcagctcatgctgctgctacaaacagccgtttcactattttctacaacccccgggcaagtccatcagaatttgtcataccactgtcaaaatacatcaaggctgtttttcacacccggatatcggttgggatgcggttcaggatgttgtttgagactgaggaatcaagcgttcgcaggtatatggggactataactgaagttagtgatgcagacccagtccgttggcctagttcctattggagatctgtgaaggttggttgggatgaatcaactgcaggggaaaggccaccaagagtttctttatgggaaattgaaccattgacaacctttccaatgtatccatctctgttcccactgagagttaagcatccttggtattcaggagttgcttccctgcatgatgacagcaatgctttaatgtggctgagaggagttgctggtgagggaggttttcagtctctgaactttcagtcacctggtattggctcctggggacaacagaggctccatccatccttactgagcagcgatcacgatcagtaccaagcagtagttgctgctgctgctgcttcccaatctggtggttacttaaaacagcaattcttgcaccttcagcaacctatgcagtcccctcaagaacactgcaacctcaacccattattgcagcaacaaattctgcagcaagcaagccagcaacagataattaatcctgatgcccaaaatatccaaacgatgttgagcccaagtgctatacaacagcaactccagcaactacagcaaatgcagcaagttcagaatgatcagaagcagaagattcaaccagatcaaagctaccaagttcctacaagtgcagttctcccaagtccaacatcattaccgagtcatttgcgagaaaaatttggcttctctgatcctaatgcgaattcttcaagcttcatcacctctagcagtagtgataacatgttggattcgagcttccttcagggaagttcgaaagctgtggacttatctcgatttaatcagcctgtagctagtgagcagcagcagcaacaggcatggaagcagaagtttatgggttcacagtcagtgtcttttgggggctcggttttgcataactcacccacaagcaaagatggttctgttgaaaacaaaattggtcgtgatgtgcaaaaccagtccctttttagtccacaagttgactcttcatccctcctgtacaacatggttcctaatctgacttcgaatgtttcggatggcaacttatcaacgatcccttctggatcaacttatctgcagaatgcaatgtatggttgcttggacgactcttctggtttattgcaaaatacaggagagaacgatccagcaaccagaacatttgtgaaggtttacaagtcaggttcggttgggaggtcgttggacatcacccggttctctaattatgctgaacttcgagaagaactgggtcagatgttcggcattaagggtcaattggacgaccctgatagatcaggctggcagcttgtattcgtcgacagggagaatgatgtgcttctccttggagacgacccttgggagtcctttgtgaatagtgtatggtacatcaagatactttcacctgaggatgtgcataagatgggaaagcaaggaaatgatccacggtatctgtcctga

SEQ ID NO: 2456 - protein, 816 aa, Oryza sativa
MSSSSAASIGPPQPPPPPAPPEEEKKCLNSELWHACAGPLVCLPTVGTRVVYFPQGHSEQVAASTNKEVEGHIPNYPNLPAQLICQLHDVTMHADVETDEVYAQMTLQPLNPQEQNDAYLPAEMGIMSKQPTNYFCKTLTASDTSTHGGFSVPRRAAERVFPPLDFTQQPPAQELIARDIHDIEWKFRHIFRGQPKRHLLTTGWSVFVSAKRLVAGDSVLFIWNEKNQLLLGIRRASRPQTVMPSSVLSSDSMHIGLLAAAAHAAATNSRFTIFYNPRASPSEFVIPLSKYIKAVFHTRISVGMRFRMLFETEESSVRRYMGTITEVSDADPVRWPSSYWRSVKVGWDESTAGERPPRVSLWEIEPLTTFPMYPSLFPLRVKHPWYSGVASLHDDSNALMWLRGVAGEGGFQSLNFQSPGIGSWGQQRLHPSLLSSDHDQYQAVVAAAAASQSGGYLKQQFLHLQQPMQSPQEHCNLNPLLQQQILQQASQQQIINPDAQNIQTMLSPSAIQQQLQQLQQMQQVQNDQKQKIQPDQSYQVPTSAVLPSPTSLPSHLREKFGFSDPNANSSSFITSSSSDNMLDSSFLQGSSKAVDLSRFNQPVASEQQQQQAWKQKFMGSQSVSFGGSVLHNSPTSKDGSVENKIGRDVQNQSLFSPQVDSSSLLYNMVPNLTSNVSDGNLSTIPSGSTYLQNAMYGCLDDSSGLLQNTGENDPATRTFVKVYKSGSVGRSLDITRFSNYAELREELGQMFGIKGQLDDPDRSGWQLVFVDRENDVLLLGDDPWESFVNSVWYIKILSPEDVHKMGKQGNDPRYLS

SEQ ID NO: 2457 - DNA, 2433 bp, Medicago truncatula
  CDS (1)..(2433)
atggaaattgatctgaatgattccataactgaagttaagaagaatgtgtgtagcaatggtaaatgtgagaaaagtgtttgttgtgtttgcactttatcttcttcttcatcaccaacatgttcatcttctagttccacttcagctattgtgtcttcatcttatcttgaactatggcatgcttgtgctggacctttaacatcacttccaaagaaagggaatgttgtagtttattttccacaaggtcatttggaacaagttgcatctttgtctctcttttcttcattggaaattccaacatatggtcttcaaccacaaatactttgtagggttgtcaatgttcaattacttgccaataaggagaatgatgaggtttacacacaggttgctttgcttccacaggcagagttagcagggatgtgtttggatgacaaagagcctgaaggtttggaagcagatgatgagggaaatggaagatcccctacaaagttagcttctcacatgttttgcaaaacactcactgcctctgataccagcactcatggagggttttcggttccacgtagagctgctgaagattgttttcctcctttggattataagcagcagaggccctctcaagagcttgttgcaaaagacctgcatggtgtggggtggaaatttcgccatatttaccgaggtcagccaaggaggcatctgctcactactggctggagtatttttgttagccaaaagaatcttgtttctggggatgcagttctctttctaaggggtgaaaacggagagttaagattgggaatcagaagagctgctcgaccgagaaacggtcttcctgaatcaattattggtaaccagagttgttctcctagtttcctttcttctgtggctaatgctatctccgcaaaaagcatgtttcatgttttctacagtccaagagcaagtcatgccgatttcgttgtgccttaccaaaagtatgctaaaagcatcaggaacccagtgaccatagggacaagattcaaaatgaaatttgaaatggatgaatctccagaaagaaggtgtagtagcggtatcgtgactggaatgagtgatttggatccgtataaatggcccaagtcaaaatggagatgcttgatggtcagatgggatgaggatattggggctaatcatcaagatagagtctctccttgggagattgatccgtctacttctctccctcccttgaacattcaatcttctcgaaggctgaagaaactgcggacgggtctgcatgttgaatcaccgagtcactttatcactgctggagacagtgggtttatggactttgatgagtctataagatcatccaaggtcttgcaaggtcaagaaaaaacaagttttatgtcactatattatggatgtgacacagtaactaagcagaaagaatttgatatcaattctctaagacatactaatcttgcatcaaatggagcaagaaaaattacttcttctgagtttacgaggattcaaccttctagttatgcagacttcacggaaatgaaccggtttcctagggtcttgcaagctcaagaaatatatccattgagatccctgacaggaaaggttgatctaaaccttaactcttggggtaaaaccaatgttagttacacaaaatataacctgcataatgcaaccaaacttaactttcactcattaggatcagaagttcttcaaaattcctcttttccatatggtgatatacacaaagttggtcaaggtagcagcatgctgtgctccaaaccaaccaatttccaactagggaatgtttcatttaatactccttcatctcagataggtgcattgagaaatgaagttggactgtctagtttcaaaatccgaaatgaacagaagctgcagaacgatatttcggctgctacttctctagatgcaaacatcaggatttcaaatgacgaaaatttcaaggagatggtaaatccttgtaaactgtttggattttccttatcggcagcagcggaaaccacctcacaaaatctacaaaactctgctaaaagaagttgcacaaaggttcacaagcaaggtagcttagttggaagagccattgatctgtcaagattgagcagctacaatgatctggtgagtgaactagagagactatttggcatggaaggtcttctaagagatcctgacaaaggatggagaatcctctacactgacagtgaaaatgacattatggttgttggggatgatccatggcatgagttctgtgatatggtatcaaaaatccatatatatacacaagaagaagtggagaagatgacaattgggatgatgaatgatgataaccagagctgtttggaacagacaccattgattatggaggcttcaaaatcttcctcggtgggacagccggattcttctacaacagtagttagaatctag

SEQ ID NO: 2458 - protein, 810 aa, Medicago truncatula
MEIDLNDSITEVKKNVCSNGKCEKSVCCVCTLSSSSSPTCSSSSSTSAIVSSSYLELWHACAGPLTSLPKKGNVVVYFPQGHLEQVASLSLFSSLEIPTYGLQPQILCRVVNVQLLANKENDEVYTQVALLPQAELAGMCLDDKEPEGLEADDEGNGRSPTKLASHMFCKTLTASDTSTHGGFSVPRRAAEDCFPPLDYKQQRPSQELVAKDLHGVGWKFRHIYRGQPRRHLLTTGWSIFVSQKNLVSGDAVLFLRGENGELRLGIRRAARPRNGLPESIIGNQSCSPSFLSSVANAISAKSMFHVFYSPRASHADFVVPYQKYAKSIRNPVTIGTRFKMKFEMDESPERRCSSGIVTGMSDLDPYKWPKSKWRCLMVRWDEDIGANHQDRVSPWEIDPSTSLPPLNIQSSRRLKKLRTGLHVESPSHFITAGDSGFMDFDESIRSSKVLQGQEKTSFMSLYYGCDTVTKQKEFDINSLRHTNLASNGARKITSSEFTRIQPSSYADFTEMNRFPRVLQAQEIYPLRSLTGKVDLNLNSWGKTNVSYTKYNLHNATKLNFHSLGSEVLQNSSFPYGDIHKVGQGSSMLCSKPTNFQLGNVSFNTPSSQIGALRNEVGLSSFKIRNEQKLQNDISAATSLDANIRISNDENFKEMVNPCKLFGFSLSAAAETTSQNLQNSAKRSCTKVHKQGSLVGRAIDLSRLSSYNDLVSELERLFGMEGLLRDPDKGWRILYTDSENDIMVVGDDPWHEFCDMVSKIHIYTQEEVEKMTIGMMNDDNQSCLEQTPLIMEASKSSSVGQPDSSTTVVRI

SEQ ID NO: 2459 - DNA, 2436 bp, Solanum lycopersicum
  CDS (1)..(2436)
atggaaattgatctgaatcatgcattagtgagtgaagtggagaagaatgtatgttgtaatgaagaatgtgataaagggggtggtgggggttgtgttaattgctctttgtacacttccactacttcttcttgttcttcaaatgtatcttcatcttcttcacttgctcttacctcaatttataaagagctttggcatgcttgtgctggtcctcttactagtttacccaagaaaggaaatgtagtggtttatttccctcaaggtcatatggaagaagctgtttctgcttttccattttcacctgtcaagattgatttaccaacttttggtcttcagcctcagatcttctgtagagtggaagatgtccaattgcttgcaaataaggaaaatgatgaggtgtatacacagctcactcttcttcctcttccagagtcaatggctataagcttagaggggaaagaacatgaagattcggggacggatgaggaagggaatggagtcaatccagggaaatcagcttctcacatgttctgtaaaacgctgactgcttcggataccaccacccatggtggcttttcagttccccgtcgagcagctgaagactgcttcccccctctggattacaaagagcaaagaccctcacaggagctaattgctaaggatctgcacggagtagagtggaaatttcgtcacatttatagaggccagccaaggcgacatttgctcactactggatggagtatctttgtcagccaaaagaatcttgtctcaggggatgcagttctcttcttgaggggagaaggtggaaatctcagactgggaataagaagagctgcaagacctagaaatgggcttcctgaatcgataatcaaaagtcaatattctggaccggatgttctttcgtcagttgctacagccctatcagcaaagagcactttccatgttttctatagcccaagggcaagtcatgctgatttcgttgtaccttaccaaaagtacgtgaaagccatcaactctcggattcctgttgggacaagatttaaaatgaaatttgatttggatgattcacctgaaagaaggtacagcggtgtagtgactgggataagcgatatggatccctttagatggcccaactctaaatggagatgcttgatggtcagatgggatgaagatataatgagtaatcatcaggaacgggtttctccttgggaaattgattcttcagtttccttaccaccactgagcattcagtcctcaccaagactgaagaaactgcggactagtcagcaggcaccatcagtactggacagccattttgctggagggagtgctcttttagactttgaggagtcaataagatcctccaaggtcttgcaaggtcaagaaaatttaggtctgatatcacctccctatggttgtgataaaccagtccgcccactggatttcgagctgcaaagagtagctcgtcacaatctcatgccaaatggtgtagagaacattattgttggtgactttgtgaaaactcagcctccaacaacctacacaggctttctggaatccaataggtttccaaaggtcttgcaaggtcaagaaatttgctcgttgagatcccttactggaaaaggtgatgttaattttggtgcttggggaaaacctgaatttggttgcaatgttttcggcacatatcagaggccgagagccaatttctatcctctcgcttctgaaggggcgaggaatgtgtttttaccttacaatgcgatgtatagagctggacaagatcccgtggttccctcctacagtactaatttccaaagagaaaatcctaccttgaaccagaattcaatccaaaatgtggttaggagggaagaagttggaatgccaaagtttgtaaatgagcagaggccaccggagatgtctaaagtgtccattccagagaaccatttcaagaatgaaaatgacgactccttcaatgcacaggctccatgtaaactgtttggcttttccttgacgaaagaaccatctactcctagctcgcagagttctggtaagaggagctgtactaaggttcacaaacaaggcagcttggttggacgagccattgatctctcgagattgaatggctatgacgacttgctggttgagttggagaggcttttcaacatggaagacctcttaagagatcccaacaaggggtggcgaatcttgtacactgacagtgagaatgacatgatggttgtcggagatgatccatggcatgagttctgtgaggtagtatccaagatccatatatacactcaagaagaagtggagaaaatgactattgaggggatcagcgatgacactcaaagttgtttggaggaggcaccagcaatcatggatgtctcaaagtcttcttcagttggccagcctgattcatctccaactgtaatcaggatttga

SEQ ID NO: 2460 - protein, 811 aa, Solanum lycopersicum
MEIDLNHALVSEVEKNVCCNEECDKGGGGGCVNCSLYTSTTSSCSSNVSSSSSLALTSIYKELWHACAGPLTSLPKKGNVVVYFPQGHMEEAVSAFPFSPVKIDLPTFGLQPQIFCRVEDVQLLANKENDEVYTQLTLLPLPESMAISLEGKEHEDSGTDEEGNGVNPGKSASHMFCKTLTASDTTTHGGFSVPRRAAEDCFPPLDYKEQRPSQELIAKDLHGVEWKFRHIYRGQPRRHLLTTGWSIFVSQKNLVSGDAVLFLRGEGGNLRLGIRRAARPRNGLPESIIKSQYSGPDVLSSVATALSAKSTFHVFYSPRASHADFVVPYQKYVKAINSRIPVGTRFKMKFDLDDSPERRYSGVVTGISDMDPFRWPNSKWRCLMVRWDEDIMSNHQERVSPWEIDSSVSLPPLSIQSSPRLKKLRTSQQAPSVLDSHFAGGSALLDFEESIRSSKVLQGQENLGLISPPYGCDKPVRPLDFELQRVARHNLMPNGVENIIVGDFVKTQPPTTYTGFLESNRFPKVLQGQEICSLRSLTGKGDVNFGAWGKPEFGCNVFGTYQRPRANFYPLASEGARNVFLPYNAMYRAGQDPVVPSYSTNFQRENPTLNQNSIQNVVRREEVGMPKFVNEQRPPEMSKVSIPENHFKNENDDSFNAQAPCKLFGFSLTKEPSTPSSQSSGKRSCTKVHKQGSLVGRAIDLSRLNGYDDLLVELERLFNMEDLLRDPNKGWRILYTDSENDMMVVGDDPWHEFCEVVSKIHIYTQEEVEKMTIEGISDDTQSCLEEAPAIMDVSKSSSVGQPDSSPTVIRI

SEQ ID NO: 2461 - DNA, 2541 bp, Solanum lycopersicum
  CDS (1)..(2541)
atggctgcttcggaggtgtcgattcaaggttacagcgagccgagtgatggttctaggccggtttcagagactggtaggagtagttccggtgtcggaatagttgatgctgatacggcgttgtacacggagctttggcgttcatgtgccggtccacttgtgacggtaccgcgagagggtgagctggtgtactatttccctcaaggacatatcgagcaggttgaagcatcaactaatcaagtggctgaccagcagatgcctttgtataatcttccatctaagattctatgccgtgttgtgaatgtcctgttaaaggctgaaccagatactgatgaggtgtatgcacaagtgactttgatgccggagccaaatcaagatgagaatgcagtgaagaaggaacctatgcgccctcctccaccacgatttcatgtacactctttttgtaagactctaacagcctctgatacaagcactcacggtggattttccgtcttgagacgacatgctgatgaatgcctcccccaactggacatgtctcggcagcctcccacacaggagttggtggccaaagatttacatggaaatgagtggcgattcaggcatatattccggggccagcctaggaggcatcttcttcagagtggttggagtgtctttgttagttcgaagaggcttgttgctggggatgcattcatatttcttagaggtgagaatggggagcttcgtgttggtgttagacgtgccatgagacagcaaggaaatgctccatcatcggtgatatccagtcatagcatgcatcttggtgtacttgcaacagcttggcatgccattcaaacaaaaacgatgttcactgtgtattacaagcccaggacaagccctgctgagtttatagttccatatgaccactatatggaatctgtgaagaataattactctattggaatgaggtttaagatgaggttcgaaggtgaagaagctccagagcaaaggtttactggaactattgttggcattgaagatgctgatccccaaaggtggcttgaatctaagtggagatgtctgaaggtacggtgggatgaaaattcaagcattccaaggccagaccgagtttcaccgtggaaaatagaaccagctcttagccctcctgcacttaatgtacctccagttgcaaggccaaaaaggcctagatccagtattttgcccacatctcctgattcatctgtccttactagggaaggttcatcaagagcgacagcagaccattcccaagccagtgggtttccgagggtcttgcaaggtcaagagttatcgacctttagaggcggttttgcagaaattaatgagacagacttgtctgagaaaccaatgatatggcaaacatcagtgaatgatgaaaagaatgatattcattctgcatcaaagagatatcttccagataaatggctacctttagggaggcctgagtcatctctcacagatttgttatcaggttttggctcctcccatgggttctgtttaccctctgcggaccaagctgcgtttggtgctagattggtgaagcaacaaacacaagatcaggaaaaggattttagcttattgggaaagccatggtctcttctgtcttccggtctctctcttaatctgatggattctggttcaaaagctcctggcatagggggtgatactccctatcaaatgcggggagatgctaggtatagtggttatggtgagttttcagtactccccggtcatagggttgcaaatcagcagggaagctggattatgcctcaaccagtgtcgccttacatgcagctctcctctcattcaagagaaatgatgcataaaccctctgtagtaaagcaacccgaggctgtgaaacccaaagagggtaactacaaactatttggcattcctcttacaagtaatgtttgcacagatgctgttatgatgcggaaaagttcattgattgatccagcaagtgacatgaatattggtatacaccctcatcaatcccttgccactgattctgatcaaaggtctgagcaatcaaagggatcaaaggtggatgatggagttgcagctaatgatcatgacaaacaatttcatacctttcatcttgctgctagagataaggatggcaaagggcatagtagttctacaaggagctgcacaaaggttcataaacagggtacagcactcggaaggtccgtagatcttgcaaagttcaacaattatgacgaattgattgctgaactggatcaactttttgattttaatggtgaactcaaggctcggagtaagagttggctggttgtatacactgatgatgagggtgacatgatgcttgttggagatgatccatggcaggaattttgtggtatggttcgcaagattttcatctatacaaaagaggaggtgcagcgtatgaatccagggacccttaattcaaaaggtgaggacacttcttctgttgctgagggctcagacgctaaagaagtgaagaatctgcaacttccttctgaatctggtcaagcagaatcttag

SEQ ID NO: 2462 - protein, 846 aa, Solanum lycopersicum
MAASEVSIQGYSEPSDGSRPVSETGRSSSGVGIVDADTALYTELWRSCAGPLVTVPREGELVYYFPQGHIEQVEASTNQVADQQMPLYNLPSKILCRVVNVLLKAEPDTDEVYAQVTLMPEPNQDENAVKKEPMRPPPPRFHVHSFCKTLTASDTSTHGGFSVLRRHADECLPQLDMSRQPPTQELVAKDLHGNEWRFRHIFRGQPRRHLLQSGWSVFVSSKRLVAGDAFIFLRGENGELRVGVRRAMRQQGNAPSSVISSHSMHLGVLATAWHAIQTKTMFTVYYKPRTSPAEFIVPYDHYMESVKNNYSIGMRFKMRFEGEEAPEQRFTGTIVGIEDADPQRWLESKWRCLKVRWDENSSIPRPDRVSPWKIEPALSPPALNVPPVARPKRPRSSILPTSPDSSVLTREGSSRATADHSQASGFPRVLQGQELSTFRGGFAEINETDLSEKPMIWQTSVNDEKNDIHSASKRYLPDKWLPLGRPESSLTDLLSGFGSSHGFCLPSADQAAFGARLVKQQTQDQEKDFSLLGKPWSLLSSGLSLNLMDSGSKAPGIGGDTPYQMRGDARYSGYGEFSVLPGHRVANQQGSWIMPQPVSPYMQLSSHSREMMHKPSVVKQPEAVKPKEGNYKLFGIPLTSNVCTDAVMMRKSSLIDPASDMNIGIHPHQSLATDSDQRSEQSKGSKVDDGVAANDHDKQFHTFHLAARDKDGKGHSSSTRSCTKVHKQGTALGRSVDLAKFNNYDELIAELDQLFDFNGELKARSKSWLVVYTDDEGDMMLVGDDPWQEFCGMVRKIFIYTKEEVQRMNPGTLNSKGEDTSSVAEGSDAKEVKNLQLPSESGQAES

SEQ ID NO: 2463 - DNA, 2244 bp, Solanum lycopersicum
  CDS (1)..(2244)
atgatgtgtggacttattgatctgaatactgtggataacgatgatgccggagaagaaacgacggcgccggtgtcattggattcaccggcgtcgtcgtcggcggcatcaggaagttcggatttaacgtcgtcaactacgccagcggtggcatcggtgtgtatggagctttggcatgcgtgtgctggaccgttgatttcgctgccgaagaaaggaagtgcggttgtgtacctgcctcaaggtcacttggaacatttatctgagtacccgtccatagcctgtaatctccctcctcatgtgttttgtcgcgttgtagatgtgaagctacaagcagatgcggctactgatgaggtctatgcacaagtctcactagttcctgacaatcagcagattgagcagaaatggaaggatggagacattgatgctgatattgaagaagaggaaatagaaggtgctggaaaatcaataacaccacacatgttctgcaaaactcttactgcatcggataccagcactcatggtggtttctctgtccctcggcgggcagcagaagattgttttgctcccttggattacagacaacagaggccctcgcaggagctggtagccaaagatctacatggtatagagtggaaatttcggcatatctatcggggtcagccacggcggcatctgctcactacaggatggagtgcatttgtaaacaagaagaagcttgtttctggtgacgctgttcttttcttgaggactggtgatggagagcttaggttaggagtgagacgagctgcccaagcaaaaacatgttctagttatctggctccttgtagcaaaccgttgaatgttagtggcattgtagatgctgttaacgttatatctagcagaaatgctttcaacatttgttacaacccaagggatagctcatcggatttcattgtaccttaccacaaattctctaagactcttgcacatcccttttcagctggaatgaggtttaaaatgcgtgtcgaaacagaagatgcagctgagcaaaggttcactggactagttgtgggagtcagcaatgtagatccagttcgatggccaggttctaaatggaggtgcctattggtcagatgggatgatcttgatgtttctagacataatagggtttcaccatgggagattgagccatctggttcagctcctgtgcccagcagcttggtgatgccttctgctaagaggaccagggttggcttccctatttcaaaggcagattttccaattcctagagaaggaattgcagtatcagactttggggaaccttctaggttccagaaggtcttgcaaggtcaagaaattttgaggatgcatgctccttatggcggacttgatgctcggagtcctcgtccagcaggcacaagatgctttcctggttttcctagttctgggatatctagaatgggaaacagcatcagacccctgtttggtgacactgacaagtcccatgaaagcattggctttagtgaatctcttcgattcaataaggtcttgcaaggtcaagaaatttttacaagccctccttatgggagagctcaagctggtatccaaatgcaggagaaaagtaggaccggtatttttgtcggtattcaggttccaaaccatggaaacaggtggcctgctccaaatcaggataataacactccttgcaagccaattaatcctgtctcagcatcatcaccgccttctgcactcaattttcagcatccgagccctccagcatcaaagttccaggctatgttcaatcataaacatgatcttgttaaccaggcttcgttagatctgtctgagaactgttgtaggtatccgtatctctcatctggttcacataccgaggacatcagtcagaaggaaggtactcaaggaatcagctcgtttggtttcttaaaggagcaaaagcaaacaggactttcatatctttctcctgggacacagtcgtcattcaaaggcaatcaaaacttagtttccacttgtaaaactggttgcaggatctttgggttccccttgaccgagagtaaaataagtgcaactagagcggatactccctctgaagctgtatactcacatggtctagaaactacatttctcccttccagtgatggaaagttgcagccggggccaccattgatgactaacgttgtggggacaaattttaccaaagtaaatgacctctatgcagcaagagatgtgcttcttgatattgctctgtag

SEQ ID NO: 2464 - protein, 747 aa, Solanum lycopersicum
MMCGLIDLNTVDNDDAGEETTAPVSLDSPASSSAASGSSDLTSSTTPAVASVCMELWHACAGPLISLPKKGSAVVYLPQGHLEHLSEYPSIACNLPPHVFCRVVDVKLQADAATDEVYAQVSLVPDNQQIEQKWKDGDIDADIEEEEIEGAGKSITPHMFCKTLTASDTSTHGGFSVPRRAAEDCFAPLDYRQQRPSQELVAKDLHGIEWKFRHIYRGQPRRHLLTTGWSAFVNKKKLVSGDAVLFLRTGDGELRLGVRRAAQAKTCSSYLAPCSKPLNVSGIVDAVNVISSRNAFNICYNPRDSSSDFIVPYHKFSKTLAHPFSAGMRFKMRVETEDAAEQRFTGLVVGVSNVDPVRWPGSKWRCLLVRWDDLDVSRHNRVSPWEIEPSGSAPVPSSLVMPSAKRTRVGFPISKADFPIPREGIAVSDFGEPSRFQKVLQGQEILRMHAPYGGLDARSPRPAGTRCFPGFPSSGISRMGNSIRPLFGDTDKSHESIGFSESLRFNKVLQGQEIFTSPPYGRAQAGIQMQEKSRTGIFVGIQVPNHGNRWPAPNQDNNTPCKPINPVSASSPPSALNFQHPSPPASKFQAMFNHKHDLVNQASLDLSENCCRYPYLSSGSHTEDISQKEGTQGISSFGFLKEQKQTGLSYLSPGTQSSFKGNQNLVSTCKTGCRIFGFPLTESKISATRADTPSEAVYSHGLETTFLPSSDGKLQPGPPLMTNVVGTNFTKVNDLYAARDVLLDIAL

SEQ ID NO: 2465 - DNA, 3300 bp, Gossypium arboreum
  CDS (1)..(3300)
atggggaaaagcgagttgacagatggttgcttgagtgatgatgcaggtgaagcgccggagagaaggcacatcaacccggagctatggcaggcgtgtgctgggccgctggtgaacctgccggctgctgggacccatgttgtctactttcctcaaggccacagtgaacaggttgcagcatctatgaagagagatgtggatgctcaaattccgaactacccaaatcttccttctaagctattatgtctccttcataatgtcaccttgcatgcagacccagagacagatgaagtctatgctcagatgaccctccaacctgtttcttcgtttgataaggaggcgttactgagatcagatctttctctgaagtcaaataagccacaacctgaattcttctgtaagacgttgacagcaagtgatacaagcactcatggaggtttttctgttcctcgacgtgccgccgaaaagattttccctcctcttgatttctcgatgcaaacacctgctcaagaacttgtggccagggatctgcatgaaaatgtctggaagttccgccatatctatcgtggaaaaccaaagcgccacttgcttacaacaggatggagtctatttgttagtggaaagagactttttgctggtgattcagttttattcattagagatgaaacacagcagcttctcttgggtataaggcgtgctaacaggcaacctgccaatctatcatcatcagtactgtctagtgatagcatgcatattggcatcctcgctgcagctgctcatgcagcagcaaacaatagcccttttaccgtgttttataacccaagggctagcctatctgaatttgttattcctttagccaagtactataaagcagtgtacaaccatcaaatatcacctggcatgcgctttcgaatgatgtttgaaactgaagagtcaggaacaagaaggtatatgggtacaattacaggaatcagcgatattgaccctgtaagatggaaaaactcacaatggcgtaatttgcaggttggctgggacgagtcaactgctggcgaaagacgtaatagagtatccatttgggaaatcgaaccagttacagctccatttttcatctgtccatctccattgttcagatctaagcgtcctaggcaacctggaatgctggctgatgaatactctgacttagataatctattcaagaggccaatgccttggcttggtgatgatatatgcctgaaggattccgatgctcatccagggcttagcttggttcagtggatgaacatgcagcaaaatcctctactggcaaactctatgcagccaaatttcatgcagtctctggctgggtctactatgcaaaactttgacggagcagatctttcccaccaaatgggcctttcagcaccacaaatgcctcagcccaacaacttacagttcaatgctcataggctacctcagaaagtgcagcaacttgatcaagttccaaagctaccatctacaatgaactcactgggatccattattcagccgcaacagctgaatgacatgactcagcagtcaaggcaaaatttggttgctcagactctaccctctagtcaagttttgcagcctcaagcccttgtccgaagtaacaatatccttcatcagcagcaaacatctaatccaactcatcaactccctctaagtcttcctcaaaacctgcagcagcagcagcagtatcttgtgggcccaaatcatccgcaaaacctaatgcattcccagctgcctgatccactcaaccagcatttacaagtgcctgacaaccaggtccagtttcaactgatgcagaaacttcagcagcaacaacagttgcttttggcacagcaatctgcacttcagcagcctggtctacttgcccaaccccaagatcaacaaaggcagctgttagatgcgtctcagagcttctctagttctgtgacagctagccaagtgttagagatgcctcaaaacatacctaccttgctacctcaatctaatgttgccccacagcagatgcctaaaaataacagccaggcaaatgtttggttctctcagccgcctctgcagtcaaaagttcagcaacaacaaactggaatgctacctgaagttcctggtcttgtaggtcccttccaaactacagcaacaaatcaattctccacagctgttagtagtgtaatgacgtctgctgctgtagccgcaccttctgtgattactgatgataatccatcatgctccacttcaccatctacaaactgtccaagtgttcttcaaccaatgatagacagcagagtccacaggagtgctgggttaggagatgacatcagtcagtctgctgccacagtattgaatcctaatgccttggagacaatgtcaactaaggctaatatggttaaagaacagcagcaaaagtctgttaaacccttgttgaatatctccaagagtcaaaaccaaggctcttttgccccgcaaaactgtatcaatggtgctacagcacatgcagattgtttggacacatcatcttctacaacttcagtttgcctttctcaaagtgatgctcatttgcaccaaaacacactgtcttacaaccctcaaacaatgttgttgagagatacaagtcaagagggagaagttcgggcatatccaaggaataatgtttcatatggcaataatatggatagccaaattgagatgcccatgaattctgacactttgtctgcgaaaggcatgatgggactggggaaggatttttcgaatcacctctcttcgggagggatactcgccagctatgaaaaccctaaagatgctcagcaagaactttcttcgtcaatggtttcccagccatatagagttccagatatggcgtttaactccattgatcccactataaaccatagcagcttcataaaccgcaatgcatggaccccaccatcacaatttcagagattgcgaacatataccaaggtttacaaacgtggagctgttggaagatcaatagatataactcgttattcaggttatgatgagctcaaacaagatttggctcgtaggtttggaattgaggggcagctggaagaccgtgggagagtaggctggaaactagtctatgtggatcacgagaacgatgttctgctagtaggagatgacccatgggaggagtttatcaactgtgtccgatgcatcaaaatactctcccctcaggaagtccagcagatgagcatggatggagagtttgggaactctgtcctgcctaatcaagactgtagcagctctggcaatgggaatgcataa

SEQ ID NO: 2466 - protein, 1099 aa, Gossypium arboreum
MGKSELTDGCLSDDAGEAPERRHINPELWQACAGPLVNLPAAGTHVVYFPQGHSEQVAASMKRDVDAQIPNYPNLPSKLLCLLHNVTLHADPETDEVYAQMTLQPVSSFDKEALLRSDLSLKSNKPQPEFFCKTLTASDTSTHGGFSVPRRAAEKIFPPLDFSMQTPAQELVARDLHENVWKFRHIYRGKPKRHLLTTGWSLFVSGKRLFAGDSVLFIRDETQQLLLGIRRANRQPANLSSSVLSSDSMHIGILAAAAHAAANNSPFTVFYNPRASLSEFVIPLAKYYKAVYNHQISPGMRFRMMFETEESGTRRYMGTITGISDIDPVRWKNSQWRNLQVGWDESTAGERRNRVSIWEIEPVTAPFFICPSPLFRSKRPRQPGMLADEYSDLDNLFKRPMPWLGDDICLKDSDAHPGLSLVQWMNMQQNPLLANSMQPNFMQSLAGSTMQNFDGADLSHQMGLSAPQMPQPNNLQFNAHRLPQKVQQLDQVPKLPSTMNSLGSIIQPQQLNDMTQQSRQNLVAQTLPSSQVLQPQALVRSNNILHQQQTSNPTHQLPLSLPQNLQQQQQYLVGPNHPQNLMHSQLPDPLNQHLQVPDNQVQFQLMQKLQQQQQLLLAQQSALQQPGLLAQPQDQQRQLLDASQSFSSSVTASQVLEMPQNIPTLLPQSNVAPQQMPKNNSQANVWFSQPPLQSKVQQQQTGMLPEVPGLVGPFQTTATNQFSTAVSSVMTSAAVAAPSVITDDNPSCSTSPSTNCPSVLQPMIDSRVHRSAGLGDDISQSAATVLNPNALETMSTKANMVKEQQQKSVKPLLNISKSQNQGSFAPQNCINGATAHADCLDTSSSTTSVCLSQSDAHLHQNTLSYNPQTMLLRDTSQEGEVRAYPRNNVSYGNNMDSQIEMPMNSDTLSAKGMMGLGKDFSNHLSSGGILASYENPKDAQQELSSSMVSQPYRVPDMAFNSIDPTINHSSFINRNAWTPPSQFQRLRTYTKVYKRGAVGRSIDITRYSGYDELKQDLARRFGIEGQLEDRGRVGWKLVYVDHENDVLLVGDDPWEEFINCVRCIKILSPQEVQQMSMDGEFGNSVLPNQDCSSSGNGNA

SEQ ID NO: 2467 - DNA, 2734 bp, Gossypium barbadense
  CDS (352)..(2373)
  misc_feature (1941)..(1941): n is a, g, c or t
aaatttaagtcaatgatataaaagagtgggaaaaagactaaatctatatttatttatgataataatggggatttctttaaaatttttataggtgtatttagaagagagaggaagaaataagggcagaaaacaaaagaaaaaacctagagagagagtgtatgtgtgtaagaaaaagaacagaaaaagaggcagccatagccaaaagagctcttgtcggcttcgaccgaacattgacgcaaacaaacttatttacactattgaacagagagcactcaaagtgttgtatcctttaatacaaccaatcttcagcacagggtttccattgagtgatttcttttggagggcgtttctatggcttttccggcatcagatattccatctgctgaacaacaagcagatgatcctttatatcgtgaactatggcatgcctgtgctggacctcttgtcacacttcctcgtgtaggggagcgtgtttattacttcccacaaggtcacatggaacaacttgaggcgtcaatgcatcaagggttagaacaccaaatgccttcattcgatctgccatctaaaatactttgcaaagtggcttctgttcagcgtaaggctgaacctgatacagatgaagtttatgcccaaataaccctggtacctgaagtagatcaaagtgaggttatgagcccagatgatccacttcaagaacctgaaaggtgcatagtccattcattttgcaagactcttactgcttctgacactagcacccatggtggattctcagttttgcgccggcatgcagatgattgtctgcccccgctggacatgacacagcagccaccatggcaggaactgattgcaactgatctgcatggaaatgagtggcactttcggcatatttttcgaggacaacctaggcgccacttgctcactactgggtggagtgtctttgttagttccaaaaagctagtagctggagatgctttcatattcctgaggggtgctaatggggatctgcgtgttggagtgaggaggcttatgagacaacaggcaaatatgccttcttctgttatatctagtcatagcatgcatcttggggtgcttgccactgcatcttatgccctctctacgcgaagtatgttttccatcttctacaagcccagaacaagtttgtctgagttcatagtgagtgtaaacaaatatcttgaagctcgaagccataagctatcagttgggatgaggttcaaaatgagatttgagggtgaagaggtacctgaaagaagattcagtggcacaattgttggtgttgaggctgataaatcatctggatgggctgattctgagtggagatctctcaaggttcaatgggatgaaccttcatccatcatacgtcctgatagggtgtccccatgggaattagagcctcttgttgcaactagtaactcttccatctcacaacctgcacaaaggaacaagcgggctaggccacccgttctaccttcaccatcttcagatctttcttcacttggtatatggaaatcaccagttgaatctcctttctcgtattgtgatgcacaacgtgggcaaccgtcacctaaattatcctccactgcaaagcctaattctgttggctttagtgggaatagctccctggctgcagtttctagcagctctaagtattggcctaaccgagttgagaatgttacagaatctgttgcaccagttgtgaacaaagaatctagtgaaagaaagcagggaactgggaatggctgcagactttttggtattcagttgattgacaatataaacatggaagaaaattcacctttggctacaatttctgggactggtgttaatgaccagccacttcattcactagatgctaactctgaccagcagtctgatccatcaaatcttaatcagtctgatcttccttctataagttgtgaaccngagaagtgcctgagatctcctcaggagtcacagagcaagcaaattcggagctgcacaaaggttcacatgcaaggtatggcagttggaagggctgttgatttgacacgatttgactgttatgaggatttgctaaagaagctggaatacatgtttgacattaaaggtcagctttgtggatcaacaaagaattggcaggttgtctacaccgatgatgaagatgacatgatgatggttggggatgatccctggaatgagttttgcagcatggtgaggaaaatttttatctatacatcagaggaagtccggaagttatcacctaagataaaacttccagtgaatgatgatgatgatgatagcaaagcaaccaaggctggggttgacacagttatcaaccctgaagatcgttcatcaatcgttggtcaagggtgctaaagtaaccacacctttacgcacgtcaggaacatagtgcttccatagaagagttttgagaaaaaaggaagctagtgctcaagattttgtttatatatatatatgcattacccagatgatatatcactattgacatcgcaagtctgaaacagcatctatatctaggaaactgctgttgtgtcaacaaattcatctggaatgtgagatttgcattgcctgaaagatgatggggttcaggtttagattttttctttttcctttttttaattcttctttaaagtttttgctaaagcaactctcatagggtggattgttcatttggatttgaaatagtccggaaagtttatttctttttgccttatta

SEQ ID NO: 2468 - protein, 673 aa, Gossypium barbadense
MAFPASDIPSAEQQADDPLYRELWHACAGPLVTLPRVGERVYYFPQGHMEQLEASMHQGLEHQMPSFDLPSKILCKVASVQRKAEPDTDEVYAQITLVPEVDQSEVMSPDDPLQEPERCIVHSFCKTLTASDTSTHGGFSVLRRHADDCLPPLDMTQQPPWQELIATDLHGNEWHFRHIFRGQPRRHLLTTGWSVFVSSKKLVAGDAFIFLRGANGDLRVGVRRLMRQQANMPSSVISSHSMHLGVLATASYALSTRSMFSIFYKPRTSLSEFIVSVNKYLEARSHKLSVGMRFKMRFEGEEVPERRFSGTIVGVEADKSSGWADSEWRSLKVQWDEPSSIIRPDRVSPWELEPLVATSNSSISQPAQRNKRARPPVLPSPSSDLSSLGIWKSPVESPFSYCDAQRGQPSPKLSSTAKPNSVGFSGNSSLAAVSSSSKYWPNRVENVTESVAPVVNKESSERKQGTGNGCRLFGIQLIDNINMEENSPLATISGTGVNDQPLHSLDANSDQQSDPSNLNQSDLPSISCEPEKCLRSPQESQSKQIRSCTKVHMQGMAVGRAVDLTRFDCYEDLLKKLEYMFDIKGQLCGSTKNWQVVYTDDEDDMMMVGDDPWNEFCSMVRKIFIYTSEEVRKLSPKIKLPVNDDDDDSKATKAGVDTVINPEDRSSIVGQGC

SEQ ID NO: 2469 - DNA, 2580 bp, Arabidopsis thaliana
  CDS (1)..(2580)
atggcgagttcggaggtttcaatgaaaggtaatcgtggaggagataacttctcctcctctggttttagtgaccctaaggagactagaaatgtctccgtcgccggcgaggggcaaaaaagtaattctacccgatccgctgcggctgagcgtgctttggaccctgaggctgctctttacagagagctatggcacgcttgtgctggtccgcttgtgacggttcctagacaagacgaccgagtcttctattttcctcaaggacacatcgagcaggtggaggcttcgacgaaccaggcggcagaacaacagatgcctctctatgatcttccgtcaaagcttctctgtcgagttattaatgtagatttaaaggcagaggcagatacagatgaagtttatgcgcagattactcttcttcctgaggctaatcaagacgagaatgcaattgagaaagaagcgcctcttcctccacctccgaggttccaggtgcattcgttctgcaaaaccttgactgcatccgacacaagtacacatggtggattttctgttcttaggcgacatgcggatgaatgtctcccacctctggatatgtctcgacagcctcccactcaagagttagttgcaaaggatttgcatgcaaatgagtggcgattcagacatatattccggggtcaaccacggaggcatttgctacagagtgggtggagtgtgtttgttagctccaaaaggctagttgcaggcgatgcgtttatatttctaaggggcgagaatggagaattaagagttggtgtaaggcgtgcgatgcgacaacaaggaaacgtgccgtcttctgttatatctagccatagcatgcatcttggagtactggccaccgcatggcatgccatttcaacagggactatgtttacagtctactacaaacccaggacgagcccatctgagtttattgttccgttcgatcagtatatggagtctgttaagaataactactctattggcatgagattcaaaatgagatttgaaggcgaagaggctcctgagcagaggtttactggcacaatcgttgggattgaagagtctgatcctactaggtggccaaaatcaaagtggagatccctcaaggtgagatgggatgagacttctagtattcctcgacctgatagagtatctccgtggaaagtagagccagctcttgctcctcctgctttgagtcctgttccaatgcctaggcctaagaggcccagatcaaatatagcaccttcatctcctgactcttcgatgcttaccagagaaggtacaactaaggcaaacatggaccctttaccagcaagcggactttcaagggtcttgcaaggtcaagaatactcgaccttgaggacgaaacatactgagagtgtagagtgtgatgctcctgagaattctgttgtctggcaatcttcagcggatgatgataaggttgacgtggtttcgggttctagaagatatggatctgagaactggatgtcctcagccaggcatgaacctacttacacagatttgctctccggctttgggactaacatagatccatcccatggtcagcggatacctttttatgaccattcatcatcaccttctatgcctgcaaagagaatcttgagtgattcagaaggcaagttcgattatcttgctaaccagtggcagatgatacactctggtctctccctgaagttacatgaatctcctaaggtacctgcagcaactgatgcgtctctccaagggcgatgcaatgttaaatacagcgaatatcctgctcttaatggtctatcgactgagaatgctggtggtaactggccaatacgtccacgtgctttgaattattatgaggaagtggtcaatgctcaagcgcaagctcaggctagggagcaagtaacaaaacaacccttcacgatacaagaggagacagcaaagtcaagagaagggaactgcaggctctttggcattcctctgaccaacaacatgaatgggacagactcaaccatgtctcagagaaacaacttgaatgatgctgcggggcttacacagatagcatcaccaaaggttcaggacctttcagatcagtcaaaagggtcaaaatcaacaaacgatcatcgtgaacagggaagaccattccagactaataatcctcatccgaaggatgctcaaacgaaaaccaactcaagtaggagttgcacaaaggttcacaagcagggaattgcacttggccgttcagtggatctttcaaagttccaaaactatgaggagttagtcgctgagctggacaggctgtttgagttcaatggagagttgatggctcctaagaaagattggttgatagtttacacagatgaagagaatgatatgatgcttgttggtgacgatccttggcaggagttttgttgcatggttcgcaaaatcttcatatacacgaaagaggaagtgaggaagatgaacccggggactttaagctgtaggagcgaggaagaagcagttgttggggaaggatcagatgcaaaggacgccaagtctgcatcaaatccttcattgtccagcgctgggaactcttaa

SEQ ID NO: 2470 - protein, 859 aa, Arabidopsis thaliana
MASSEVSMKGNRGGDNFSSSGFSDPKETRNVSVAGEGQKSNSTRSAAAERALDPEAALYRELWHACAGPLVTVPRQDDRVFYFPQGHIEQVEASTNQAAEQQMPLYDLPSKLLCRVINVDLKAEADTDEVYAQITLLPEANQDENAIEKEAPLPPPPRFQVHSFCKTLTASDTSTHGGFSVLRRHADECLPPLDMSRQPPTQELVAKDLHANEWRFRHIFRGQPRRHLLQSGWSVFVSSKRLVAGDAFIFLRGENGELRVGVRRAMRQQGNVPSSVISSHSMHLGVLATAWHAISTGTMFTVYYKPRTSPSEFIVPFDQYMESVKNNYSIGMRFKMRFEGEEAPEQRFTGTIVGIEESDPTRWPKSKWRSLKVRWDETSSIPRPDRVSPWKVEPALAPPALSPVPMPRPKRPRSNIAPSSPDSSMLTREGTTKANMDPLPASGLSRVLQGQEYSTLRTKHTESVECDAPENSVVWQSSADDDKVDVVSGSRRYGSENWMSSARHEPTYTDLLSGFGTNIDPSHGQRIPFYDHSSSPSMPAKRILSDSEGKFDYLANQWQMIHSGLSLKLHESPKVPAATDASLQGRCNVKYSEYPALNGLSTENAGGNWPIRPRALNYYEEVVNAQAQAQAREQVTKQPFTIQEETAKSREGNCRLFGIPLTNNMNGTDSTMSQRNNLNDAAGLTQIASPKVQDLSDQSKGSKSTNDHREQGRPFQTNNPHPKDAQTKTNSSRSCTKVHKQGIALGRSVDLSKFQNYEELVAELDRLFEFNGELMAPKKDWLIVYTDEENDMMLVGDDPWQEFCCMVRKIFIYTKEEVRKMNPGTLSCRSEEEAVVGEGSDAKDAKSASNPSLSSAGNS

SEQ ID NO: 2471 - DNA, 2580 bp, Arabidopsis thaliana
  CDS (1)..(2580)
atggcgagttcggaggtttcaatgaaaggtaatcgtggaggagataacttctcctcctctggttttagtgaccctaaggagactagaaatgtctccgtcgccggcgaggggcaaaaaagtaattctacccgatccgctgcggctgagcgtgctttggaccctgaggctgctctttacagagagctatggcacgcttgtgctggtccgcttgtgacggttcctagacaagacgaccgagtcttctattttcctcaaggacacatcgagcaggtggaggcttcgacgaaccaggcggcagaacaacagatgcctctctatgatcttccgtcaaagcttctctgtcgagttattaatgtagatttaaaggcagaggcagatacagatgaagtttatgcgcagattactcttcttcctgaggctaatcaagacgagaatgcaattgagaaagaagcgcctcttcctccacctccgaggttccaggtgcattcgttctgcaaaaccttgactgcatccgacacaagtacacatggtggattttctgttcttaggcgacatgcggatgaatgtctcccacctctggatatgtctcgacagcctcccactcaagagttagttgcaaaggatttgcatgcaaatgagtggcgattcagacatatattccggggtcaaccacggaggcatttgctacagagtgggtggagtgtgtttgttagctccaaaaggctagttgcaggcgatgcgtttatatttctaaggggcgagaatggagaattaagagttggtgtaaggcgtgcgatgcgacaacaaggaaacgtgccgtcttctgttatatctagccatagcatgcatcttggagtactggccaccgcatggcatgccatttcaacagggactatgtttacagtctactacaaacccaggacgagcccatctgagtttattgttccgttcgatcagtatatggagtctgttaagaataactactctattggcatgagattcaaaatgagatttgaaggcgaagaggctcctgagcagaggtttactggcacaatcgttgggattgaagagtctgatcctactaggtggccaaaatcaaagtggagatccctcaaggtgagatgggatgagacttctagtattcctcgacctgatagagtatctccgtggaaagtagagccagctcttgctcctcctgctttgagtcctgttccaatgcctaggcctaagaggcccagatcaaatatagcaccttcatctcctgactcttcgatgcttaccagagaaggtacaactaaggcaaacatggaccctttaccagcaagcggactttcaagggtcttgcaaggtcaagaatactcgaccttgaggacgaaacatactgagagtgtagagtgtgatgctcctgagaattctgttgtctggcaatcttcagcggatgatgataaggttgacgtggtttcgggttctagaagatatggatctgagaactggatgtcctcagccaggcatgaacctacttacacagatttgctctccggctttgggactaacatagatccatcccatggtcagcggatacctttttatgaccattcatcatcaccttctatgcctgcaaagagaatcttgagtgattcagaaggcaagttcgattatcttgctaaccagtggcagatgatacactctggtctctccctgaagttacatgaatctcctaaggtacctgcagcaactgatgcgtctctccaagggcgatgcaatgttaaatacagcgaatatcctgttcttaatggtctatcgactgagaatgctggtggtaactggccaatacgtccacgtgctttgaattattatgaggaagtggtcaatgctcaagcgcaagctcaggctagggagcaagtaacaaaacaacccttcacgatacaagaggagacagcaaagtcaagagaagggaactgcaggctctttggcattcctctgaccaacaacatgaatgggacagactcaaccatgtctcagagaaacaacttgaatgatgctgcggggcttacacagatagcatcaccaaaggttcaggacctttcagatcagtcaaaagggtcaaaatcaacaaacgatcatcgtgaacagggaagaccattccagactaataatcctcatccgaaggatgctcaaacgaaaaccaactcaagtaggagttgcacaaaggttcacaagcagggaattgcacttggccgttcagtggatctttcaaagttccaaaactatgaggagttagtcgctgagctggacaggctgtttgagttcaatggagagttgatggctcctaagaaagattggttgatagtttacacagatgaagagaatgatatgatgcttgttggtgacgatccttggcaggagttttgttgcatggttcgcaaaatcttcatatacacgaaagaggaagtgaggaagatgaacccggggactgtaagctgtaggagcgaggaagaagcagttgttggggaaggatcagatgcaaaggacgccaagtctgcatcaaatccttcattgtccagcgctgggaactcttaa

SEQ ID NO: 2472 - protein, 859 aa, Arabidopsis thaliana
MASSEVSMKGNRGGDNFSSSGFSDPKETRNVSVAGEGQKSNSTRSAAAERALDPEAALYRELWHACAGPLVTVPRQDDRVFYFPQGHIEQVEASTNQAAEQQMPLYDLPSKLLCRVINVDLKAEADTDEVYAQITLLPEANQDENAIEKEAPLPPPPRFQVHSFCKTLTASDTSTHGGFSVLRRHADECLPPLDMSRQPPTQELVAKDLHANEWRFRHIFRGQPRRHLLQSGWSVFVSSKRLVAGDAFIFLRGENGELRVGVRRAMRQQGNVPSSVISSHSMHLGVLATAWHAISTGTMFTVYYKPRTSPSEFIVPFDQYMESVKNNYSIGMRFKMRFEGEEAPEQRFTGTIVGIEESDPTRWPKSKWRSLKVRWDETSSIPRPDRVSPWKVEPALAPPALSPVPMPRPKRPRSNIAPSSPDSSMLTREGTTKANMDPLPASGLSRVLQGQEYSTLRTKHTESVECDAPENSVVWQSSADDDKVDVVSGSRRYGSENWMSSARHEPTYTDLLSGFGTNIDPSHGQRIPFYDHSSSPSMPAKRILSDSEGKFDYLANQWQMIHSGLSLKLHESPKVPAATDASLQGRCNVKYSEYPVLNGLSTENAGGNWPIRPRALNYYEEVVNAQAQAQAREQVTKQPFTIQEETAKSREGNCRLFGIPLTNNMNGTDSTMSQRNNLNDAAGLTQIASPKVQDLSDQSKGSKSTNDHREQGRPFQTNNPHPKDAQTKTNSSRSCTKVHKQGIALGRSVDLSKFQNYEELVAELDRLFEFNGELMAPKKDWLIVYTDEENDMMLVGDDPWQEFCCMVRKIFIYTKEEVRKMNPGTVSCRSEEEAVVGEGSDAKDAKSASNPSLSSAGNS

SEQ ID NO: 2473 - DNA, 2976 bp, Oryza sativa subsp
  CDS (1)..(2976)
atgatgaagcaggcgcagcagcagccgccgccgccaccggcgagctctgcggcgacgacgaccaccgcgatggcagccgctgcggcggcggcggtggtggggagcgggtgcgaaggggagaagacgaaggcgccggcgatcaactcggagctgtggcacgcctgcgcggggccgctggtgtcgctgccgccggcgggcagcctcgtcgtctacttcccccagggccacagcgagcaggttgcagcctctatgcaaaaggatgttgatgcacatgttccaagctacccaaatctgccttcaaagttgatttgccttctgcataacgtcactttacatgcggacccagaaacagatgaagtgtatgcacaaatgactcttcagccagttacttcatatgggaaggaggccctgcagttatcagagcttgcactcaaacaagcgagaccacagacagaattcttttgcaagacactgactgcaagtgatacaagtactcatggaggcttctctgtgcctcgtcgagctgcagaaaagatatttcctccactggacttctcaatgcaaccacctgcacaagaactacaggccagggatttgcatgataatgtgtggacattccgtcacatatatcggggtcagccaaaaaggcatctgcttaccactggctggagtctatttgtaagcggcaagaggttatttgctggagattctgtcatttttgtcagggatgaaaagcagcaacttctattaggaatcaggcgtgctaaccgacagccaactaacatatcatcatctgtcctttcaagtgacagcatgcacatagggattcttgctgctgcagcccatgctgctgccaacaatagcccatttaccatcttttataaccctagggccagtcctactgaatttgttatcccatttgctaagtatcagaaggcagtctatggtaatcaaatatctttagggatgcgctttcgcatgatgtttgagactgaggaattaggaacacgaagatacatgggaacaataactggcataagtgatctagatccagtaagatggaaaaactcgcagtggcgcaacttacaggttggttgggatgaatccgcagccggtgaaaggcgaaatagggtttctatctgggagattgaaccggtcgctgctccatttttcatatgtcctccaccattttttggtgcgaagcggcccaggcaattagatgacgagtcctcggaaatggagaatctcttaaagagggctatgccttggcttggtgaggaaatatgcataaaggatcctcagactcagaacaccataatgcctgggctgagcttggttcagtggatgaacatgaacatgcaacagagctcctcatttgcgaatacagccatgcagtctgagtaccttcgatcattgagcaaccccaacatgcaaaatcttggtgccgccgatctctctaggcaattatgcctgcagaaccagcttcttcaacagaacaatatacagtttaatactcccaaactttctcagcaaatgcagccagtcaatgagttagcaaaggcaggcattccgttgaatcagcttggtgtgagcaccaaacctcaggaacagattcatgatgctagcaaccttcagaggcaacaaccttccatgaaccatatgcttcctttgagccaagctcaaaccaatcttggccaagctcaggtccttgtccaaaatcaaatgcaacagcaacatgcatcttcaactcaaggtcaacaaccagctaccagccagcccttgcttctgccccagcagcagcaacagcagcagcagcagcagcaacaacaacaacaacagcaacaacaacaaaaattgctacaacagcagcagcaacagcttttgctccagcaacagcagcaattgagtaagatgcctgcacagttgtcaagtctggcgaatcagcagtttcagctaactgatcaacagcttcagctgcaactgttacaaaaactacagcaacaacagcagtcattgctttcacaacctgcagtcacccttgcacaattacctctgatccaagaacagcagaagttacttctggatatgcaacagcagctgtcaaactcccaaacactttcccaacaacaaatgatgcctcaacaaagtaccaaggttccatcacagaatgatggacttctacatcaaaatttccctatgtccaacttcaaccagccacagatgttcaaagatgctcctcctgatgctgaaattcatgctgctaatacaagtaacaatgcattgtttggaatcaatggtgatggtccgctgggcttccctataggactaggaacagatgatttcctgtcgaatggaattgatgctgccaagtacgagaaccatatctcaacagaaattgataatagctacagaattccgaaggatgcccagcaagaaatatcatcctcaatggtttcacagtcatttggtgcatcagatatggcatttaattcaattgattccacgatcaacgatggtggctttttgaaccggagttcttggcctcctgccgctcccttaaagaggatgaggacattcaccaaggtatataagcgaggagctgtaggccggtccattgacatgagtcagttctctggatatgatgaattaaagcatgctctggcacggatgttcagtatagaggggcaacttgaggaacggcagagaattggttggaagctcgtttacaaggatcatgaagatgacatcctacttcttggcgacgacccatgggaggaatttgtcggttgcgtgaaatgcattaggatcctttcacctcaagaagttcagcagatgagcttggagggttgtgatctcgggaacaacattcccccgaatcaggcctgcagcagctcagacggagggaatgcatggagggctcgctgcgatcagaactccggtaacccttccaatggttcatatgaacaattcgaatga

SEQ ID NO: 2474 - protein, 991 aa, Oryza sativa subsp
MMKQAQQQPPPPPASSAATTTTAMAAAAAAAVVGSGCEGEKTKAPAINSELWHACAGPLVSLPPAGSLVVYFPQGHSEQVAASMQKDVDAHVPSYPNLPSKLICLLHNVTLHADPETDEVYAQMTLQPVTSYGKEALQLSELALKQARPQTEFFCKTLTASDTSTHGGFSVPRRAAEKIFPPLDFSMQPPAQELQARDLHDNVWTFRHIYRGQPKRHLLTTGWSLFVSGKRLFAGDSVIFVRDEKQQLLLGIRRANRQPTNISSSVLSSDSMHIGILAAAAHAAANNSPFTIFYNPRASPTEFVIPFAKYQKAVYGNQISLGMRFRMMFETEELGTRRYMGTITGISDLDPVRWKNSQWRNLQVGWDESAAGERRNRVSIWEIEPVAAPFFICPPPFFGAKRPRQLDDESSEMENLLKRAMPWLGEEICIKDPQTQNTIMPGLSLVQWMNMNMQQSSSFANTAMQSEYLRSLSNPNMQNLGAADLSRQLCLQNQLLQQNNIQFNTPKLSQQMQPVNELAKAGIPLNQLGVSTKPQEQIHDASNLQRQQPSMNHMLPLSQAQTNLGQAQVLVQNQMQQQHASSTQGQQPATSQPLLLPQQQQQQQQQQQQQQQQQQQQKLLQQQQQQLLLQQQQQLSKMPAQLSSLANQQFQLTDQQLQLQLLQKLQQQQQSLLSQPAVTLAQLPLIQEQQKLLLDMQQQLSNSQTLSQQQMMPQQSTKVPSQNDGLLHQNFPMSNFNQPQMFKDAPPDAEIHAANTSNNALFGINGDGPLGFPIGLGTDDFLSNGIDAAKYENHISTEIDNSYRIPKDAQQEISSSMVSQSFGASDMAFNSIDSTINDGGFLNRSSWPPAAPLKRMRTFTKVYKRGAVGRSIDMSQFSGYDELKHALARMFSIEGQLEERQRIGWKLVYKDHEDDILLLGDDPWEEFVGCVKCIRILSPQEVQQMSLEGCDLGNNIPPNQACSSSDGGNAWRARCDQNSGNPSNGSYEQFE

SEQ ID NO: 2475 - DNA, 2046 bp, Oryza sativa subsp
  CDS (1)..(2046)
atgatcacgttcgcggacctggcggagccggcgcccggcgccgagcggtgcgtcgaccggcagctgtggctggcgtgcgcggggggcatgtgcaccgtgccgccggtgggcgccgccgtgtactacttcccgcaggggcacgccgagcacgcgctcggcctcgccgcgccggagctctccgcggcgcgcgtcccggcgctcgtgccctgccgcgtcgcgtccgtgcggtacatggccgacccggacaccgacgaggtgttcgccaggatccgcctcgtgccgctccgcgccgcggaggatggggacgtcgaggaggatggcgccgcggcaggcgaggagcacgagaagccggcgtcgttcgccaagacgctgacgcagtcggatgccaacaacggcggggggttctcggtgcccaggtactgcgccgagaccatcttcccgcgcctggactacgccgccgacccgcccgtgcagaccgtcgtcgccaaggacgtccatggagtcgcctggaacttccgccacatctacaggggcacgccgcgccggcacctgctcaccacggggtggagcacgttcgtgaaccagaagaagctcgtggccggcgactccatcgtgttcctccgcggcgacggaggggacctgcacgtcggcatccggcgcgccaagcgcgggttttgcggcggcggaggcggagccgaggaggcctccctgcccgggtgggaccagtacggcggcctgatgcgaggcaatgcgagcccgtgcgcggccgccaaggggcggggcaaggtgcgcgcggaggacctcgtcgaggcggcgaggctggcgaacggcgggcagccgttcgaggtcgtgtactacccgcgcgccagcacgccggagttctgcgtgcgcgcggcggcggtccgcgcggcgatgcgggtgcagtggtgccccgggatgcggttcaagatggcgttcgagaccgaggactcctcccggatcagctggttcatgggcaccgtcgccagcgtccaggtcgccgaccccatccgttggccgcagtcgccgtggcggcttctccaggtgacctgggacgaaccggacctcctccagaacgtgaagcgggtgagcccatggttggtcgagctggtgtcgagcatgccggccatcaacctctcgtctttctcgccgccgcgcaagaagccccggattctggcgtacccggagttccccttcgaggggcagctcctcaacccggcgttcccgccaaacccgctggcacacggccaccaccattaccatcacaaccacccgtccttcttcccgttccccgacgttagtgctcctgcaggcatacagggagccaggcatgcgcaatttggtccatctttatcagatctccaccttacccacctgcagtcgagcctcatgtacccggggctccgccgccccgatcatgtcggtccaacatccatcccgccaccaagaatcagcactgacctgacaatgggcagctcgccgccggcgcgcgctctgtccatgggcgccaagaagcccgacgacgccaagccgccggggctaatgctgttcgggcagaggatactgaccgagcgccagatgagccttagcggcaccacctcgccggcggccaccgggaacagctctctcaactggaacaccgagaaaggtgcctcggagggctcgggctccggcgtcatccagaacagccccaccgacaacacgtcgtcggagaggctccagtggttcagggagaacagcaccgtctccgagctcgggctggagcccgggcagtgcaaggtgttcatcgagtccgacacggtcggccgcaacctcgacctctcgtcgctggcctcgttcgagcagctctacggccggctgtccgagatgttctgcatcgacagcgcggagctgaggagccgtgtgctctaccgtggcgccaccggcgaagtgaggcacgccggcgacgagccattcagcgagttcattaagttggcgaggaggcttaccatactaaccgacgccgggagcgacaacttagggagctag

SEQ ID NO: 2476 - protein, 681 aa, Oryza sativa subsp
MITFADLAEPAPGAERCVDRQLWLACAGGMCTVPPVGAAVYYFPQGHAEHALGLAAPELSAARVPALVPCRVASVRYMADPDTDEVFARIRLVPLRAAEDGDVEEDGAAAGEEHEKPASFAKTLTQSDANNGGGFSVPRYCAETIFPRLDYAADPPVQTVVAKDVHGVAWNFRHIYRGTPRRHLLTTGWSTFVNQKKLVAGDSIVFLRGDGGDLHVGIRRAKRGFCGGGGGAEEASLPGWDQYGGLMRGNASPCAAAKGRGKVRAEDLVEAARLANGGQPFEVVYYPRASTPEFCVRAAAVRAAMRVQWCPGMRFKMAFETEDSSRISWFMGTVASVQVADPIRWPQSPWRLLQVTWDEPDLLQNVKRVSPWLVELVSSMPAINLSSFSPPRKKPRILAYPEFPFEGQLLNPAFPPNPLAHGHHHYHHNHPSFFPFPDVSAPAGIQGARHAQFGPSLSDLHLTHLQSSLMYPGLRRPDHVGPTSIPPPRISTDLTMGSSPPARALSMGAKKPDDAKPPGLMLFGQRILTERQMSLSGTTSPAATGNSSLNWNTEKGASEGSGSGVIQNSPTDNTSSERLQWFRENSTVSELGLEPGQCKVFIESDTVGRNLDLSSLASFEQLYGRLSEMFCIDSAELRSRVLYRGATGEVRHAGDEPFSEFIKLARRLTILTDAGSDNLGS

SEQ ID NO: 2477 - DNA, 2547 bp, Brassica napus
  CDS (1)..(2547)
atggcgagttcggaggtttctatgaaaggaaatcgtggacgaggagaaaacttctcctccgctggttacagtgacccgacggtcgccggcgaggcgcagaaaactcagtctaaccgatctgtggctgcagagcgcgttgtcgacccggaagctgctctctaccgtgagctgtggcacgcttgtgctggtcctctcgtgacagtccctcgacaagatgaccgagtcttctacttccctcaggggcacatcgagcaggtggaagcatcgacaaatcaagctgcagaacagcagatgcctctctatgatcttccttcgaagatcctttgtcgtgtcattaatgttgatttaaaggcagaggcagacaccgacgaagtttatgcgcagattactcttcttccggagcctgttcaagacgagaattcaatagagaaagaggcgcctcctcctccgcccccaaggttccaagtgcactccttctgcaaaaccttgactgcatcggacacaagtacacatggtggattttctgtgcttaggcggcatgcggatgaatgtctcccacctctggatatgtcacgtcaacctcctactcaggagttagttgcaaaagatctgcatgcaagcgagtggcgtttccgacatattttccgaggtcaaccacgaaggcatttgcttcagagtggatggagcgtgtttgttagctccaagaggctggtcgcaggcgatgcttttatatttctaaggggcgagaatggagaattacgtgtgggtgtaaggcgtgcaatgcggcagcaaggaaatgtgccatcctctgttatatcaagccacagcatgcatctcggagtattggccactgcctggcacgctatttcaactggaaccatgtttacagtctactataaaccgaggactagtccttcagagtttattgttccgtttgatcagtatacggagtccgtgaagattaactactccataggcatgagatttaaaatgagatttgaaggcgaagaggctcccgagcagaggtttactggcacaatcgttgggattgaagactctgaccccacgaggtgggcaaaatcaaaatggagatccctcaaggtacggtgggatgagaccactagtattcctcgccctgatagagtatccccgtggaagatagagccagctctttctcctcctgctttgagccctgtaccaatgcctaggcctaagaggcccagatctaatctagcttcttcaactccggactcttccatgcgcataagggaaggctcatctaaggcaaacatggaccctttaccggcaagtggactatcaagggtcttgcaaggtcaagaatacccgaccttgagaacgaaacatgttgagagtgtagaatgcgatgctcctgaaaattcggttgtgtggcaatcgtcaactgatgatgacaaggttgatgtgatttcagcttctaggagatatgagaactggatatcctcaggtaggcatggacctacttgcacggatttgctttctggctttgggacaaacatagaaccacctcacggtcatcagatacctttttatgaccgtttatcatcaccaccttctgtggctgcaaggaaaatcctcagcgaccaggatggcaagtttgaatatcttgctaaccagtggatgatgcactcaggcctttccctgaagttacatgaatctcctaaagtccctgccgcatctgatgcctctttccaagggataggcaatcccaattacggcgaatatgctttgcctcgtgcagtgacgactgagaatgctgctggcaactggccaatacgtccacgtgctctaaattattttgaagaagcggttcatgctcaggctagagagcatgtgacaaaacgtcctgcggtcgtacaagaggaggcagcaaagccaagagacgggaactgcaggctttttggcattcctctggtgaacaacgtgaatgggacagatacaactttgtctcagagaaacaatttgaatgaccctgcggggcctacgcagatggcatcaccaaaggttcaggatctttctgaccagtccaaagggtcaaaatcgacaaatgatcatcgtgagcaaggacgaccattcccggttagtaaaccccatccgaaagacgttcaaaccaaaacaaactcatgtaggagctgcacgaaggttcagaagcaggggattgcacttggccggtcagtggatctctcaaagttccagaactatgaggagttggttactgaattggataggctgtttgagttcaatggagagttgatggctcctaagaaagattggctgatagtttacacagatgatgagaatgatatgatgcttgttggagacgatccttggcaggagttttgttgcatggttcgtaaaatcttcatatacacgaaagaggaggtcaggaagatgaacccgggaactctatgctgtaggaacgaggaagaaccagttgttggggaaggatcagatgcaaaggacgcgaagtctgcatcaaatccttcattgtccagcgccggaaactcttaa

SEQ ID NO: 2478 - protein, 848 aa, Brassica napus
MASSEVSMKGNRGRGENFSSAGYSDPTVAGEAQKTQSNRSVAAERVVDPEAALYRELWHACAGPLVTVPRQDDRVFYFPQGHIEQVEASTNQAAEQQMPLYDLPSKILCRVINVDLKAEADTDEVYAQITLLPEPVQDENSIEKEAPPPPPPRFQVHSFCKTLTASDTSTHGGFSVLRRHADECLPPLDMSRQPPTQELVAKDLHASEWRFRHIFRGQPRRHLLQSGWSVFVSSKRLVAGDAFIFLRGENGELRVGVRRAMRQQGNVPSSVISSHSMHLGVLATAWHAISTGTMFTVYYKPRTSPSEFIVPFDQYTESVKINYSIGMRFKMRFEGEEAPEQRFTGTIVGIEDSDPTRWAKSKWRSLKVRWDETTSIPRPDRVSPWKIEPALSPPALSPVPMPRPKRPRSNLASSTPDSSMRIREGSSKANMDPLPASGLSRVLQGQEYPTLRTKHVESVECDAPENSVVWQSSTDDDKVDVISASRRYENWISSGRHGPTCTDLLSGFGTNIEPPHGHQIPFYDRLSSPPSVAARKILSDQDGKFEYLANQWMMHSGLSLKLHESPKVPAASDASFQGIGNPNYGEYALPRAVTTENAAGNWPIRPRALNYFEEAVHAQAREHVTKRPAVVQEEAAKPRDGNCRLFGIPLVNNVNGTDTTLSQRNNLNDPAGPTQMASPKVQDLSDQSKGSKSTNDHREQGRPFPVSKPHPKDVQTKTNSCRSCTKVQKQGIALGRSVDLSKFQNYEELVTELDRLFEFNGELMAPKKDWLIVYTDDENDMMLVGDDPWQEFCCMVRKIFIYTKEEVRKMNPGTLCCRNEEEPVVGEGSDAKDAKSASNPSLSSAGNS

SEQ ID NO: 2479 - DNA, 2202 bp, Cucumis sativus
  CDS (1)..(2202)
atggaaattgatctgaaccaaacagccagtgaggtggggaagaatgcatattgctatggaaattgtgaagagggtctttgcaattgttgtttatcctcctcaacttcttcttgttcctcaaattcatcgtcaactcccgtctcttcttcaacctatttggagctttggcatgcttgtgctggtcctctcacctcattgcccaagaaaggaaatgtagttgtctatttcccacaaggtcacttggagcaaattgcctcggcgtctcccttttcccccatggagatgcgcacttttgaccttcagccacatatcctctgcagggtcatcaatgttcacctactcgccaataaggagaatgatgaggtctatacgcaacttactctccgtcccttgccagagttattaggcactggtgtagcgggcaaagagctggaggagttggcgttgaatggagctgatggagatgggagcggggggtcgcctactaaatctacacctcacatgttctgcaaaacacttacagcgtctgacaccagcacccatggaggattctctgttcctcgcagagctgctgaagactgtttccctcctctggattacactcagcttaggccgtctcaagagctaatagccaaggacctgcatggcgtggagtggagatttagacatatttacagaggtcaacctaggcggcatctgctcactactggatggagtatttttgtaagccaaaagaatcttatttctggtgatgcagtgctctttttaaggggtgagaatggagagttaagattgggaataaggcgagctgttcggcctagaaatggtcttcctgattcaattgttggcaaccaaaattcttgtgcaaatgatcttgctcgtgtggtgaaagcaatatccaccaagagcacatttgatgtgttttataatccaagggcatatcatgcacaatttattatatcttgtcagaagtatgtgaagagcatcaataatccagtgagtgtaggcacaagattcaaaatgagatttgagatggatgattcaccagaaagaaagtttaatggtgtagttgttggaattagtgacatggattcctttagatggccgaactcaaaatggagatgcttaacggtccgatgggataaagacagtgatcatcaagaacgtgtgtcaccctgggagatcgatccttctgtttctcttccgcctttgagtgttcagtcttctccaaggctgaagaaactgaggactagtctgcaggcagccccgcctaacaacgcctttactgggaggggcggttttatggactttgaagattcagttagatcctctaaggtcttgcaaggtcaagaaatatgctcattgaggccaccaactagtaaaccagaatatagtttaggtgtttggggaaagttcaatcttagtgacaactcttttaacacatttcaatcaccaaactccaatttttatcacatggcgtctaacagcgcccaaaagatgtatttccctcgtagtgagatgcacagtactggccaagcggccatgatgctctcaaatgatagcaactttccaagagagagtgccttgttcaacccatctgctgttggtgctaatgttatcaggactaaaatggaaaggactagtcgttctcttgatcgggaatctctacatctggcatctgctcctccaactttagggtcgaatatgcggaattccaaggatgaacatgtgaatgataatgcaactggctgtaaactttttggcttttccttgactacggaaactgctacaaacgtgcaaagttcaggaaagagaagttgtaccaaagttcacaaacaaggcagcttggtgggaagagctatcgatctctctaggctgaatggctatactgatctgatttctgaactggagcggctgtttagcatggaaggtctcttaaaagatcccgataaaggatggcgagttttgtacacagacaacgagaacgatgtaatggttgttggggattatccatggcatgacttctgtgatgcggtttcgaaaatccacatatacactcaagaagaagtggaaaagatgacaaatggagtgatcagcgatgatactcaaagctgcttagaccaggctcctttatgtatggaagcatcaaaatcctcttcagtgggccaacctgattctcctccaacggcagtaagaggttaa

SEQ ID NO: 2480 - protein, 733 aa, Cucumis sativus
MEIDLNQTASEVGKNAYCYGNCEEGLCNCCLSSSTSSCSSNSSSTPVSSSTYLELWHACAGPLTSLPKKGNVVVYFPQGHLEQIASASPFSPMEMRTFDLQPHILCRVINVHLLANKENDEVYTQLTLRPLPELLGTGVAGKELEELALNGADGDGSGGSPTKSTPHMFCKTLTASDTSTHGGFSVPRRAAEDCFPPLDYTQLRPSQELIAKDLHGVEWRFRHIYRGQPRRHLLTTGWSIFVSQKNLISGDAVLFLRGENGELRLGIRRAVRPRNGLPDSIVGNQNSCANDLARVVKAISTKSTFDVFYNPRAYHAQFIISCQKYVKSINNPVSVGTRFKMRFEMDDSPERKFNGVVVGISDMDSFRWPNSKWRCLTVRWDKDSDHQERVSPWEIDPSVSLPPLSVQSSPRLKKLRTSLQAAPPNNAFTGRGGFMDFEDSVRSSKVLQGQEICSLRPPTSKPEYSLGVWGKFNLSDNSFNTFQSPNSNFYHMASNSAQKMYFPRSEMHSTGQAAMMLSNDSNFPRESALFNPSAVGANVIRTKMERTSRSLDRESLHLASAPPTLGSNMRNSKDEHVNDNATGCKLFGFSLTTETATNVQSSGKRSCTKVHKQGSLVGRAIDLSRLNGYTDLISELERLFSMEGLLKDPDKGWRVLYTDNENDVMVVGDYPWHDFCDAVSKIHIYTQEEVEKMTNGVISDDTQSCLDQAPLCMEASKSSSVGQPDSPPTAVRG

SEQ ID NO: 2481 - DNA, 2751 bp, Cucumis sativus
  CDS (1)..(2751)
atgaggctttcaactgctggttttagtcctcaggctccggaaggggagaggagagttcttaactcggagctttggcatgcatgtgctggcccacttgtttctctacctgctgttggaagtcgggttgtttattttccacagggtcatagcgagcaggttgccatatcaaccaacagagaagttgatgcccatataccaagttatccaagcttgccaccacagctaatctgccagcttcacaatgttacaatgcatgcagatattgagacagatgaagtgtatgcccaaatgaccttgcaaccgctcactgctcaagagcaaaaggagccttatcttccagctgagttgggtgcccccagcaaacaaccaaccaactatttttgtaaaacattgacagcaagtgacactagtacacatggaggattttctgttcctcgtcgtgcagctgagaaagtgtttcctccattggacttctctcagcagcctcctgcacaggagttaattgcaagggatctgcatgataatgagtggaaatttaggcatatctttcgtggccaaccgaaaaggcatctccttacaactggatggagtgtgtttgtaagtgctaagaggcttgttgctggcgattcggttatctttatttggaatgaaaagaatcaattactgttggggatccgtcgagctaatcgaccacaaacagtgatgccctcgtcggttctgtccagtgacagcatgcacttggggcttcttgctgctgcagcacatgcagctgctacaaatagtcggttcacgatattttataatccaagggctagcccatcagagttcatcatacctctggccaagtatgtcaaagctgtgtaccatacccgtgtttctgttggtatgcgttttagaatgctatttgaaacagaagaatcaagtgttcgtcgttacatgggcactattactggtatcagtgatttagattctacccggtggccaaattcacactggcgctcagtcaaggttggatgggatgaatctacagctggggagagacagccaagggtttccttatgggagatcgagccacttacaaccttcccaatgtatccttctccatttcccctcaggcttaagcgcccctggccaactggatttccctctttccatggtcttaaagaggacgatctgggattaaattctcaactaatgtggcttcggggagatggtctagatcgtggaattcaacctctgaacttccctggaattggagttgcaccatggatgcagccaaggcttgatgcttctatggtcggtctgcagccggagatatatcaagcaatggctgctgctgcactacaggagatgagaaccgtagatcctgctaaggcgcaggctgcttcgcttcttcaattccaacaaactcaaaatcttcccaacaggcctgctaatttcatgccacctcagatgttgcagcagcctcagcctcagcctcagcctccacagacctttcttcaaggtgatgaaaaccaacatctctctcattctcaggcccaaagccagcctactgctgttcttcagcaggagataaagcatcaaacattcaacaaccacccccagcagcagcagcagcagcaacaacaacaacaacagcagcaacagcaaccacaacagcaagtgtttgatcaccatcaaattccaagtcccatgtctacaatgtctcagttcagttctgcttcccaatcccaagcccaatccctgcaaactattcctccattatgtcggcaacagagtttttctgattcaaatcccaaccatgtgacaagtcccatcatttcacccttgcacagcctattaggtggttcattttcacaagatgaatcatctcagatgcttaaccttcctcgaaacaatcccatgatacattcatctacatggccgtcaaagcgagctgcaatcgatcctcttctctcttcaggaaattctcagtttgttctttcccaaggggaaaatatagggacaactccggctaatatctctcagaatgcttttacattgccgccttttcctgggagagagtgttcattagatcaagggaatgtcgatccgcagagtaatcttctgtttggtgtcaatatagagccttcatctcttctaatgcagaatggcatgccaaatcttaggggaatttgcagtgacagtgactcaacagctatacctttttcttcgaattatgtgaatactgctggtaccaacttctctgccaatccaactgggacagggacaccttccaattgcaatgaggattcaggtttcttgcattctccagaaaacactggccaagtaaacccaccaaccacaacctttgtaaaggtttacaagtcggggtccttcggtagatcactggatatttccaaattcagtagataccatcagctacgcagtgagcttgctcacatgttcggccttgaaggcgaattggaggaccctttgagatcaggttggcagcttgtattcgttgaccgggaaaatgacgtccttcttcttggggacgatccctggccggagtttgtcaacagcgtgtggtgtatcaaaatactatcaccacaggaagtgcaggacatgggcaaacgtggcctagagctcttgaactctgtcccgattcagaggctctcaaatggcagttgtgataactacgccaacagacaggagtcatccagaaatatgaattctgggattacttctgtcgggtctcttgagtactga

SEQ ID NO: 2482 - protein, 916 aa, Cucumis sativus
MRLSTAGFSPQAPEGERRVLNSELWHACAGPLVSLPAVGSRVVYFPQGHSEQVAISTNREVDAHIPSYPSLPPQLICQLHNVTMHADIETDEVYAQMTLQPLTAQEQKEPYLPAELGAPSKQPTNYFCKTLTASDTSTHGGFSVPRRAAEKVFPPLDFSQQPPAQELIARDLHDNEWKFRHIFRGQPKRHLLTTGWSVFVSAKRLVAGDSVIFIWNEKNQLLLGIRRANRPQTVMPSSVLSSDSMHLGLLAAAAHAAATNSRFTIFYNPRASPSEFIIPLAKYVKAVYHTRVSVGMRFRMLFETEESSVRRYMGTITGISDLDSTRWPNSHWRSVKVGWDESTAGERQPRVSLWEIEPLTTFPMYPSPFPLRLKRPWPTGFPSFHGLKEDDLGLNSQLMWLRGDGLDRGIQPLNFPGIGVAPWMQPRLDASMVGLQPEIYQAMAAAALQEMRTVDPAKAQAASLLQFQQTQNLPNRPANFMPPQMLQQPQPQPQPPQTFLQGDENQHLSHSQAQSQPTAVLQQEIKHQTFNNHPQQQQQQQQQQQQQQQQPQQQVFDHHQIPSPMSTMSQFSSASQSQAQSLQTIPPLCRQQSFSDSNPNHVTSPIISPLHSLLGGSFSQDESSQMLNLPRNNPMIHSSTWPSKRAAIDPLLSSGNSQFVLSQGENIGTTPANISQNAFTLPPFPGRECSLDQGNVDPQSNLLFGVNIEPSSLLMQNGMPNLRGICSDSDSTAIPFSSNYVNTAGTNFSANPTGTGTPSNCNEDSGFLHSPENTGQVNPPTTTFVKVYKSGSFGRSLDISKFSRYHQLRSELAHMFGLEGELEDPLRSGWQLVFVDRENDVLLLGDDPWPEFVNSVWCIKILSPQEVQDMGKRGLELLNSVPIQRLSNGSCDNYANRQESSRNMNSGITSVGSLEY

SEQ ID NO: 2483 - DNA, 3324 bp, Cucumis sativus
  CDS (1)..(3324)
atgaagacgccggcgaacggtgccgccggtgccgccgccgcgcctaattctaacgaaggtggattggagaagaagatcataaatccggagttatggcaagcgtgcgccggtccactggtgaacctaccgccggccggttaccacgtggtgtattttcctcaaggtcatagcgaacaggtagcagcatctttgaggaaagatgtggatggccaagtccctaattacccaagtcttgcttccaagttactatgtttgcttcataatgtaacattacatgctgatccagaaacagatgaagtatatgctcaaatgaccctgctgccagttctttcttttgacaaggatgcattgttgagatcagatctagctctcaagtctaataagcctcaaccagagttcttctgtaaaacattgactgcaagtgacacaagcactcatggcgggttctccgtgccacgccgtgctgcagagaagatcttcccccctcttgatttctcaatgcaaccccctgcacaagagcttgttgctaaggatttgcatgataatgtatggactttccgtcacatatatcgagggcaacccaaacgccatttgctaacaactggttggagcttatttgttagtggaaagagacttcttgctggcgattcagttttgttcataagagatgaaaaacaacagcttctattgggcattaggcgagcgaacaggcaaccgacaaacttatcatcatcagtgttgtcaagtgatagtatgcatattggtattcttgcagctgctgcacatgctgctgcaaacaatagccctttcaccgtcttctacaacccaagagcaagtccttcagaatttgtcattcctctggccaaatattacaaggcagtgtctgcaaaccaaatatcactcggaatgcgcttcagaatgatgtttgaaactgaagagtctggaaccagaaggtatatgggcactattactggtataagtgatcttgatcctgttcgatggaagggctcacagtggcgtaatctacaggttgggtgggatgagtcgactggaggagaaagacgtaatcgagtctccgtatgggagattgagcctgttattgctccatttttcatttgtccccctccttttttgagatcgaaacgtccgaggcaaccgggaatgccagatgacgactcctccgatttggatggtatatttaaaagaacaatgtttggtgacgatttttgcatgaaagatccacagggatatcctggcctaaacttagttcaatggatgaatatgcaaaacccttcactttctaattcaatgcagcaaaattatatgcattcgttttctgggtctatgcttccaaaccttggtagtgtcgatatttctcgacaacttggtttgtcaaatgcacaacttcctcaatcaaacaacatacagttcaatgcacaaaggctactttctcaggctcaacagttagatcagctacctaagctaccgacaagtatgaactcgttggggtccgttgtgcagccaccacagcagttggatgatatgtctcagcagacgcgacaaaatttgattaaccaaaacgcagtctcgagtcagattcaggctcaaataatgcagcagcctcacactaatgggatcctacaacagcaaactgctttgcaaaaccagcagcttcagagaaatgcccctcagaatttgcaaatgcagcagcatcagcaaattttgagtcagaatcaacaacagaatatgaatccgtcaccgcacctggaacagttaaatcatcagttgcaaatgtcggacaatcaggttcatatacagatgttgcagaagtttcaacagcagccgcaatcacttttggctcagcagtctgctcttcagccttctcaactcgtccaattaccagatcagcagagacagtcggtagatgcgtcccaaagcttttccaggtccatgtcatctaaccaaatgctcgacattcctcaatccaccccagctgcaggccctccatcaaatgcattaccacagcaggcagcaaattgcaatggccagacgaataatcggttctcgaatcagcatttgcagccgaaacttccacaactacagcaaccagcttcatctactgtactttctgatatgtctaggccaatgggacttcctcctgcccaaataaacaatcagctctctgcagctacaagtagtttgataacaggagtggcaggagctggccaatctggaatcacggacgacattccgtcgtgctccacgtcaccttccacaaacaattgttccagtttggttcaaccagtagccaacggaagggttcatcgaaccacaggattggttgaggatgttgctcaatcaactgcaacaatattcagttcaaatacattggataacatgtcaccaaatgccaacttagttcataaagatttgccacaaaagactgctgttaaaccttcactgaacatttccaagaatcaaagccatggaatttttgctcaacaaactttcttaagtggtgttgttgctcaaacggatttcttggatacgtcatcctctacaacctcggcttgcctttctcagaatgatgctcaattgcagcagaataacatgatgtctttcaactcacagccaatgttatttaaagataattctcaagatttggaagtaccaaccgatctccataacattccgtacgggaatcatgtcgatggacaaatggtagcgcagttaagttccgatcctttgttagacaaaggcattggaggtttggggaaagatttctccaataatttctcttctggggccatgctcaccacctatgatgcacagaaagatcctcaacaggaaatttcttcatctatagtttcccaatcatttggtattccagacatgacatttaattctatggattcaacgataaatgataataccttcttgaatagaaaccaatgggcccctccgcctccattccagcgtatgcgaacctacaccaaggtttacaaacgtggagctgttgggagatctattgatatcgctcgttactcgggttatgatgagcttaagcaagaccttgcccgtaggtttggtatcgagggacaattagaggacaggcaaaagataggctggaaacttgtctatgtggatcatgaaaatgacgttttgctcgtaggggacgacccttgggatgactttgtgaactgtgtacggagcatcaagatcctctctccacaggaagtccaacaaatgagcttggacggagatattggtaatggggtcctaccgaaccaagcctgcagtagttctgatggtggaaatgcttaa

SEQ ID NO: 2484 - protein, 1107 aa, Cucumis sativus
MKTPANGAAGAAAAPNSNEGGLEKKIINPELWQACAGPLVNLPPAGYHVVYFPQGHSEQVAASLRKDVDGQVPNYPSLASKLLCLLHNVTLHADPETDEVYAQMTLLPVLSFDKDALLRSDLALKSNKPQPEFFCKTLTASDTSTHGGFSVPRRAAEKIFPPLDFSMQPPAQELVAKDLHDNVWTFRHIYRGQPKRHLLTTGWSLFVSGKRLLAGDSVLFIRDEKQQLLLGIRRANRQPTNLSSSVLSSDSMHIGILAAAAHAAANNSPFTVFYNPRASPSEFVIPLAKYYKAVSANQISLGMRFRMMFETEESGTRRYMGTITGISDLDPVRWKGSQWRNLQVGWDESTGGERRNRVSVWEIEPVIAPFFICPPPFLRSKRPRQPGMPDDDSSDLDGIFKRTMFGDDFCMKDPQGYPGLNLVQWMNMQNPSLSNSMQQNYMHSFSGSMLPNLGSVDISRQLGLSNAQLPQSNNIQFNAQRLLSQAQQLDQLPKLPTSMNSLGSVVQPPQQLDDMSQQTRQNLINQNAVSSQIQAQIMQQPHTNGILQQQTALQNQQLQRNAPQNLQMQQHQQILSQNQQQNMNPSPHLEQLNHQLQMSDNQVHIQMLQKFQQQPQSLLAQQSALQPSQLVQLPDQQRQSVDASQSFSRSMSSNQMLDIPQSTPAAGPPSNALPQQAANCNGQTNNRFSNQHLQPKLPQLQQPASSTVLSDMSRPMGLPPAQINNQLSAATSSLITGVAGAGQSGITDDIPSCSTSPSTNNCSSLVQPVANGRVHRTTGLVEDVAQSTATIFSSNTLDNMSPNANLVHKDLPQKTAVKPSLNISKNQSHGIFAQQTFLSGVVAQTDFLDTSSSTTSACLSQNDAQLQQNNMMSFNSQPMLFKDNSQDLEVPTDLHNIPYGNHVDGQMVAQLSSDPLLDKGIGGLGKDFSNNFSSGAMLTTYDAQKDPQQEISSSIVSQSFGIPDMTFNSMDSTINDNTFLNRNQWAPPPPFQRMRTYTKVYKRGAVGRSIDIARYSGYDELKQDLARRFGIEGQLEDRQKIGWKLVYVDHENDVLLVGDDPWDDFVNCVRSIKILSPQEVQQMSLDGDIGNGVLPNQACSSSDGGNA

SEQ ID NO: 2485 - DNA, 3246 bp, Cucumis sativus
  CDS (1)..(3246)
atgaaagctccctcaaatgggtttctagccaattctggagaaggtgaaaggaagaatattaattctgagttatggcatgcttgtgctgggcctcttgtttcgttacctccagtaggaagtcttgtggtttacttccctcaaggccacagtgaacaagttgcagcatcgatgaataaggagactgatttcattccaaactaccctaaccttccttcaaagttgatctgcatgctacacaatgtcacattacatgctgatcctgagactgatgaggtgtatgcacaaatgacccttcaaccagtgaataaatatgaaaaagaagctttgttggcatctgatattggcctcaagcaaagtaggcagcctgcagaattcttctgcaaaactctaacagctagtgacactagcacccacggtggattttctgtgcctcgtcgtgcagccgagaagattttccccccattagactactcgatgcaaccccctgctcaggaactagtggctagagatttgcatgataattcatggacattcagacatatttaccgtggccaaccaaaacgacaccttctgaccactggttggagtgtttttgtgagcacaaaacgactctttgctggagactctgtgctctttataagagatgaaaagtcacagcttctcttaggcataaggcgtgctaacaggcagcagcctgctctctcttcatcagtcatatcaagtgatagcatgcacataggaatccttgcttctgcggctcatgctgctgcaaataacagtccttttactatattttacaaccccagggccagtccttctgaatttgtgatacctttggccaagtataataaagcaatgtatacgcaagtttcacttggcatgcgatttaggatgatgtttgaaactgaggagtcgggagtacgaagatatatgggtacaattactggtatcagcgacatggattctgtaagatggaaaaattcacagtggcggaatcttcaggttggatgggatgaatccgcagctggtgaacgacctaatcgagtttcaatatgggaagttgagcctgttgtgactcccttctacatatgtccgcctccgttcttcagacccaaatttcctaaacaacaagggatgccagatgacgaatctgatattgaaaatgcttttaagagagccatgccatggtttggtgatgactttggcatgaaagatacgccaagctcaatctttcctggtttaagtttagtgcagtggatgagcatgcaacataataatcaattcccagcagcacaatctggaattttgccgtctatggttgcgcctagtgctctgcatggaactcttaccaatgatgacccatccaaattattgagttttcaagcaccagtactgtcttcaccaaatctccaattcagcaaagcaaatcaacagaaccaagttggccaatttcctccaactacatggtcccaacagcagcagctgcagcaattattacaagtttctgcaagccaacagttacagcagcagcaattgccaccccaggaacaacagcagcagctgccccagcagcagcaactccagtcacaacagtcacagcggcaacagcagacctcacaatccgttcttctgaacaacagtgtaactgctgctaaccatttgccaaatccaagtatgcaacaaccgcttgtatactctcagctacaacagcagcaattgcttgcaagcaatattcaatcccatcaaactagtcaaccatctaataagaattcatttcagactacatctttatcagaagaaacacagcttcagccacaaatagagcagcaatctagccttcttccgagacaacagcagccgacacaatttcaacaggccccactacaattattgcaacaaagtctgtctcaaaaagcacaacagcatcctcaagttcagcaattttcacagccaatcccgactgagcaacaacttcaattgcagctgctacagaagctccagcaacaacaccagcagcaaccattgttctccccggctagcccattattaccgcctcagctgctacagcagcaacacattcatccgcagaaccagcagttaccaccattgccgttgcccaatcagcagcagttcaatactagtggaggcagcttacaaacagaaaaacttaatagcaatggcttcgcaagtttaggtctcatgcaatcacagcaggttcccataacccaatcccatagtcaattcaaaccaaccacggcaattagagcatactctggactgactgaaggagatgctccatcttgttctacctcaccttccagtaataattgcccagttcctgtgtcaaacctgctcaataagaaccaacaaggagcagccacacttggtggagattcagtagttgagcctgcaactaacctggcacaggagctacatagcaaacctgatttgcggatcaaacatgagtttcctaactcaaaaggattagaccaactaaagtataaaggcactgttcctgatcagttagaagggtcttcttctgggacatcatattgtttggatgctggcaccattcagcaggctctcccactccctacatgtttggataatgatgtacaatcacatccacgtaacaacatccctttcagtaatagcattgatggattgacaccagataccttattgtcgaggggatatgactctcaaaaagatcttcagaacttactttctaactatggtgggggtgtgccaagagatattgaaacagagttgtcaactgctgcaatcagctctcagtcctttggggttccaaacctgcctttcaagcctggctgctcaaatgatgtcaacataaatgaagctggagctttgagtagtggattgtgggcaaaccacagtcaacgcatgcgtacatatacaaaggttcaaaagcgtggatcagtgggtagatgtatcgatgtcactcgctacaaaggatatgacgagcttaggcatgatcttgcccgcatgtttggcattgaagggcagttagaagatcctcaacgaactgattggaaacttgtttatgtggaccatgaaaatgatatacttctagttggtgatgatccttgggatgagtttgtgagctgtgttcagagcataaagatcctgtcatccgctgaagtacagcagatgagtttggatgagtttggatgggaatttgggtcacattcaggctcccaatcaagcttgcagtgggacggatag

SEQ ID NO: 2486 - protein, 1081 aa, Cucumis sativus
MKAPSNGFLANSGEGERKNINSELWHACAGPLVSLPPVGSLVVYFPQGHSEQVAASMNKETDFIPNYPNLPSKLICMLHNVTLHADPETDEVYAQMTLQPVNKYEKEALLASDIGLKQSRQPAEFFCKTLTASDTSTHGGFSVPRRAAEKIFPPLDYSMQPPAQELVARDLHDNSWTFRHIYRGQPKRHLLTTGWSVFVSTKRLFAGDSVLFIRDEKSQLLLGIRRANRQQPALSSSVISSDSMHIGILASAAHAAANNSPFTIFYNPRASPSEFVIPLAKYNKAMYTQVSLGMRFRMMFETEESGVRRYMGTITGISDMDSVRWKNSQWRNLQVGWDESAAGERPNRVSIWEVEPVVTPFYICPPPFFRPKFPKQQGMPDDESDIENAFKRAMPWFGDDFGMKDTPSSIFPGLSLVQWMSMQHNNQFPAAQSGILPSMVAPSALHGTLTNDDPSKLLSFQAPVLSSPNLQFSKANQQNQVGQFPPTTWSQQQQLQQLLQVSASQQLQQQQLPPQEQQQQLPQQQQLQSQQSQRQQQTSQSVLLNNSVTAANHLPNPSMQQPLVYSQLQQQQLLASNIQSHQTSQPSNKNSFQTTSLSEETQLQPQIEQQSSLLPRQQQPTQFQQAPLQLLQQSLSQKAQQHPQVQQFSQPIPTEQQLQLQLLQKLQQQHQQQPLFSPASPLLPPQLLQQQHIHPQNQQLPPLPLPNQQQFNTSGGSLQTEKLNSNGFASLGLMQSQQVPITQSHSQFKPTTAIRAYSGLTEGDAPSCSTSPSSNNCPVPVSNLLNKNQQGAATLGGDSVVEPATNLAQELHSKPDLRIKHEFPNSKGLDQLKYKGTVPDQLEGSSSGTSYCLDAGTIQQALPLPTCLDNDVQSHPRNNIPFSNSIDGLTPDTLLSRGYDSQKDLQNLLSNYGGGVPRDIETELSTAAISSQSFGVPNLPFKPGCSNDVNINEAGALSSGLWANHSQRMRTYTKVQKRGSVGRCIDVTRYKGYDELRHDLARMFGIEGQLEDPQRTDWKLVYVDHENDILLVGDDPWDEFVSCVQSIKILSSAEVQQMSLDEFGWEFGSHSGSQSSLQWDG

SEQ ID NO: 2487 - DNA, 3342 bp, Oryza sativa subsp
  CDS (1)..(3342)
atggcgagctccggcggagggggtggtggtggggaggagggggagggcaggggggcgaccaaggtgaaccaggagctgtggtacgcgtgcgcggggccgctcgtctcgctgccgccgcaggggagcctcatcgtctacttcccccagggtcacagcgagcaggttgcagcatctatgcgaaaggacgcagatgcgcaaattccaagctatccaaatcttccatcaaagctgatatgcatcctccacagtgtcaccatgcttgctgatcctgacacagatgaggtttatgctcgaatgactctccagccagtgacccagtgtgacaaggagacattgctagcatcagagcttgcgctgaagcaaaccaggccacaaacagaattcttttgcaaaacactgaccgccagtgatacaagcactcatggaggtttctctgtgccacgccgtgccgctgagaggatttttcctcgtcttgacttctccatgcagcctcctgcccaggaactgcaggcccgggatttgcatgataatgtttggacatttcgtcatatataccggggtcagcctaaaaggcatttactgactacgggctggagcctatttgtcagtggaaagagattacttgctggtgattcagtcttgtttattagggatgcaaaacagcagctcctcttggggatcagacgagcaaataggcaacctacgaacctctcatcatctgtcttatctagtgatagtatgcatattggaattcttgctgcagcagcccatgctgcagcgaataacagccaatttacaatatattataacccaagggccagtacttccgaatttgtgattccttttgccaaataccagaaggcagtgtatggtaaccaattatctcttggcatgcggttcagaatgatgtttgaaactgaagagtcaggaacaagaaggtacatgggtacaataactggtataagtgatctggatccagtaaggtggaaaacatctcattggcgcaatattcaggttgcatgggatgaagcggcaccaactgagagacgcaccagggtttccctctgggagatagagcctatcattgctccattcttcatctacccctcaccattattcaccgcaaaacgtccaaggctacctgggatgacagatgacgagactgaaatggacggtcttctcaagagggccatgccatgggttggtgaggagatttgcaagaaagatctgaatattcagaacagtgtagtgcctggtctaaatctagctcagtggatgaacatgcagcacagctcctcgcttcctggcacggttgtgcaaccagagttactaaactcattaagtggaaaacctgtacaaaatttggctgcagctgatttatcaaggcaaatcagttttcacccgcagttcttgcaacaaaacaacatccagttcaacactgcgttggtacctcaacaaaaccaacagacagaacaattagcgaaagttatccctacaccaaaccaattgggaagtgttataataccgcagaaggtggttcaggattgcaactctgaacaaaggcagcatgtggttactcaaccagtgcaaggcagccagccaaacataaacattccacagcctcagcttgttgttcaggctcagcttcagcaaccgcaagtcattctccaggcgcaactgcagcaacctcaagttgttgtccaggcccaactccagcaaacgcaaccttcggtccaaagtcacactgtcttacaaggaggtcttcaacaaatccagcttctccagcagcaacagccacatgtgcagcaccagcagataccgcaacagttacatcatcagcagcagcaaacacaacagttgcaacctgtccagcaggttcagcagtcagtacaggaacatcagcaaataaagatacaacctgttcatgtttccatggatgcaagtatgaatacgcaggtggcagatcatcaaatgaaactacaactactcaaggctttacagccacagcagcctctgatctcagagcagcagaagatgcttttggatttgcagcagcaagtgataaattcacagtcagctcctcagcagtgtgtacaggtaacaaaccaagctattagtttacataacagtaacactattcaatacccgacacagcaaaaggttcagtctcaccaagttcaagacttaactgggaatgtcattcctaattcaaaatcagacatcgctacttccatgggtgctagttctttgcatgtagctggtggacgccaattattgaagacagatgatgttccgtctacttcaacatcaccatccactaacagcaatcctgttcttctgcaatccatcccaagtagctccaagaaccaaagtttaactacagcaggaaagacatctcaatcatctgttgtgttgggtcctacgatcgaacaggacacaaagccatatcaaaatgtaaagcaaacagttatgattcccaagacgacagaacaaaggccagctactggacaagactgcataaataacaatcctcaaatggattacttggacacatcctcttcagctacttcggtttgcctttcccaggctgatggatcattgcaacaaaactttccaccttcatccttccaccagcatcacttgctaaaagacacagttccagatagcgagtttgaggttacagatccaagaaataaccttctatttggggtgaatattgatggtcaactgggtttaccacttaatgcagacctgcttgcgaatgacattggaaccgataaatacatggatcagttgccaggaaatggcatttctaacttcatttcatcaaaggattctcaacaagagttatcatcttcaatgatttcacattcatttggagttgctgatatggcattcaattctatagattctgcaatcaatgataccccattcttaaatagaaattcccggtctgcagcaggtcctgcacatcaacggatgagaacctacaccaaggtacacaagcgtggtgcggtgggaagatcaattgacatcaatcgatattctggatatgatgagctgaaacatgacgttgctcggatgtttggtattgaggggcagcttggtgatcaaaatagagttggctggaagctagtatatgaagatcacgagaaggatgttctactagttggtgatgatccatgggaggactttgtgaaatgtgtacgatgtatcaggattctttctccacaggaagaaatgcagatgagattagtcggcgactttggagacagctttctacccaaccaagcttgcagcagctctgatgggggtcatccctggaggataaccggcgactag

SEQ ID NO: 2488 - protein, 1113 aa, Oryza sativa subsp
MASSGGGGGGGEEGEGRGATKVNQELWYACAGPLVSLPPQGSLIVYFPQGHSEQVAASMRKDADAQIPSYPNLPSKLICILHSVTMLADPDTDEVYARMTLQPVTQCDKETLLASELALKQTRPQTEFFCKTLTASDTSTHGGFSVPRRAAERIFPRLDFSMQPPAQELQARDLHDNVWTFRHIYRGQPKRHLLTTGWSLFVSGKRLLAGDSVLFIRDAKQQLLLGIRRANRQPTNLSSSVLSSDSMHIGILAAAAHAAANNSQFTIYYNPRASTSEFVIPFAKYQKAVYGNQLSLGMRFRMMFETEESGTRRYMGTITGISDLDPVRWKTSHWRNIQVAWDEAAPTERRTRVSLWEIEPIIAPFFIYPSPLFTAKRPRLPGMTDDETEMDGLLKRAMPWVGEEICKKDLNIQNSVVPGLNLAQWMNMQHSSSLPGTVVQPELLNSLSGKPVQNLAAADLSRQISFHPQFLQQNNIQFNTALVPQQNQQTEQLAKVIPTPNQLGSVIIPQKVVQDCNSEQRQHVVTQPVQGSQPNINIPQPQLVVQAQLQQPQVILQAQLQQPQVVVQAQLQQTQPSVQSHTVLQGGLQQIQLLQQQQPHVQHQQIPQQLHHQQQQTQQLQPVQQVQQSVQEHQQIKIQPVHVSMDASMNTQVADHQMKLQLLKALQPQQPLISEQQKMLLDLQQQVINSQSAPQQCVQVTNQAISLHNSNTIQYPTQQKVQSHQVQDLTGNVIPNSKSDIATSMGASSLHVAGGRQLLKTDDVPSTSTSPSTNSNPVLLQSIPSSSKNQSLTTAGKTSQSSVVLGPTIEQDTKPYQNVKQTVMIPKTTEQRPATGQDCINNNPQMDYLDTSSSATSVCLSQADGSLQQNFPPSSFHQHHLLKDTVPDSEFEVTDPRNNLLFGVNIDGQLGLPLNADLLANDIGTDKYMDQLPGNGISNFISSKDSQQELSSSMISHSFGVADMAFNSIDSAINDTPFLNRNSRSAAGPAHQRMRTYTKVHKRGAVGRSIDINRYSGYDELKHDVARMFGIEGQLGDQNRVGWKLVYEDHEKDVLLVGDDPWEDFVKCVRCIRILSPQEEMQMRLVGDFGDSFLPNQACSSSDGGHPWRITGD

SEQ ID NO: 2489 - DNA, 3420 bp, Oryza sativa subsp
  CDS (1)..(3420)
atgaagcagcagcagacgccggcgagctccgcggtgaccgcggcggcggcggcctcctcctccgccaccgccgccgtggccgcatgcgaaggggagcggaaggcggcggcgatcaactcggagctgtggcacgcgtgcgccggcccgctcgtgtcgctgccgccggtgggcagcctcgtcgtctacttcccgcaaggccacagcgagcaggttgcagcttctatgcaaaaggatgtggatgcacatgttccaagctacccaaatcttccctccaagttgatatgtcttcttcacggtgtcaatttgcatgcagacccagatactgatgaagtttatgcacagatgactcttcaaccagtgaatacatatggaaaagaggcgttgcaaatatcagagcttgcactaaaacaagcaaggccacaaatggaattcttctgtaagacactcaccgcaagtgatacaagtacacatggaggattctctgtgcctcgccgtgccgcagagaagatattccctcccctggacttctctatgcaacctccagctcaagaactgcaagctagagatatacatgacaatgtgtggacatttcgtcatatatatcgaggtcaaccaaaaagacatttacttactactggttggagccttttcgtgagtggcaagaggttatttgctggtgattctgttattgttgtgagggatgaaaagcatcaacttctactaggaatcaggcgtgctaacagacaaccgactaatatatcatcttcagtactttcaagcgacagtatgcacataggagtccttgctgcggctgcccatgctgctgccaacagtagcccttttaccatattttataaccctagggccagtcctactgaatttgttatcccatttgcaaaataccagaaggcactgtatagtaatcagatatctttaggaatgcggtttcgcatgatgtttgaaaccgaggaattaggaacaagaaggtacatgggtacaataactggaataagtgacctagatcctgtgagatggaaaaactcccaatggcgcaatttacaggttggctgggatgagtctgcagctggtgaaaggaggaacagagtttcaatctgggagattgaaccggttgcagctcccttttttctatgtccccaacctttttttggtgtgaagcgccccaggcaattagatgacgagtcagagatggaaaaccttttcaagagggcaatgccttggcttggtgaggaggtatgcataaaggatactcaaaaccagaacagtacagcacctggtctaagtttggttcagtggatgaacatgaacaggcagcagagctcatcattggctaacaccgctgcgcagtctgagtacctgcaagctctaggtaaccctgccatgcaaaaccttgctgctgatgaacttgcaaggcaactatatgtccagaacaatctccttcaacagaactgcatacagtttaattctcccaagctccctcagcaaatgcaaaccatgaacgatctgtccaaggcggcaattccgttgaatcagcttggtgctatcatcaatcctcaagatcagaaacaagatgctgtcaaccatcagagacagcagaactccatacaagtgattcccctgagccaagctcaatctaatctcgtccaggctcaggtgattgttcagaatcagatgcaacagcagaagccatctccaactcaaaacccgcaaaggattaatggccagcggctgcttttgtctcatcaacagaaggatcaaaatttacagctgcaacagcagcttttacttcagcaaaaacaacagttacagcagcagcagcagcagcaacaacagaatcagcagcagctaaataagtcccttggacagttggtaaatctggcaagtcagcagtctaagttgtttgatgaggagcttcagttgcagatattacagaaactgcagcagcaatcactgatgtcacaatccacatcaacactctcacagccacctctgatccaagaacagcaaaagttaatcacggacatgcaaaagcagttgtcaaattcacattcacttgctcagcaacaaatgatgccccaacaagaaatcaagccttcattgcaagcaacaccattgctacccacggtccagcaagagcaacagcagaagcttttacagaaacaagtctcacttgcagatgtgtcaggagttgcttttcaaccaatttcatcaaccaatgtgatccccaaaactggaggtgctatgatcatttcgggtgctacacaatctgtagttacagaggaaatgccctcttgttcaacatctccatccacagctaatggaaaccactttacacaatcaaccaaaaacagacattgcatcaacacagaaaggctgccaccgtccactgctccaatgttgatcccaacctccattgacgctgtaacagcaactccactaatgaccaaggaattgccaaagccgaataataatgtgaagcaaagtgttgtcaactcaaaattaccaaatgttgctcctggcccacaaaattgtataaaccatgcattgcaaacagacaacttggaaacatcttcatcagcaacttcattatgtccttcccgaacagatggacttgtgcatcaaggtttcccctcttctaacttcaatcaacaccagatgttcaaagatgcacttcctgatgtagaaatggaaggtgtggatccaagtaacagtggcttgtttgggatcaacaatgataacctgttaggattcccaatagaaacagaggacttgctgataaatgcacttgattctgtcaagtatcagaatcacatatcaactgatgttgaaaacaactacccgatgcaaaaggatgctctgcaagaaatatcaacctccatggtttcccagtcatttggtcagtcggatatggcttttaattccattgattctgcgatcaatgatggtgccttcttgaacaaaaattcctggcccgctgcccctctgctgcagagaatgcggacattcaccaaggtgtacaaacgaggagctgtaggccggtctattgacatcggcaggtactctggatatgaagagttgaagcatgctttggctcgcatgtttggtatagagggtcaacttgaagatcgacagagaataggctggaaactggtctacaaggatcacgaggatgacatcctgcttcttggtgatgacccatgggaggagtttgtgaactgtgtaagatgcattaggattctatcacctcaagaagtgcaacagatgagcttggatggtgatctggggagcaatgtcctccccaaccaggcttgcagcagctcagatggggtgaatggttggaggcctcgctgtgaccagaaccccgggaacccttccatcggcccgtatgatcaattcgaatga

SEQ ID NO: 2490 - protein, 1139 aa, Oryza sativa subsp
MKQQQTPASSAVTAAAAASSSATAAVAACEGERKAAAINSELWHACAGPLVSLPPVGSLVVYFPQGHSEQVAASMQKDVDAHVPSYPNLPSKLICLLHGVNLHADPDTDEVYAQMTLQPVNTYGKEALQISELALKQARPQMEFFCKTLTASDTSTHGGFSVPRRAAEKIFPPLDFSMQPPAQELQARDIHDNVWTFRHIYRGQPKRHLLTTGWSLFVSGKRLFAGDSVIVVRDEKHQLLLGIRRANRQPTNISSSVLSSDSMHIGVLAAAAHAAANSSPFTIFYNPRASPTEFVIPFAKYQKALYSNQISLGMRFRMMFETEELGTRRYMGTITGISDLDPVRWKNSQWRNLQVGWDESAAGERRNRVSIWEIEPVAAPFFLCPQPFFGVKRPRQLDDESEMENLFKRAMPWLGEEVCIKDTQNQNSTAPGLSLVQWMNMNRQQSSSLANTAAQSEYLQALGNPAMQNLAADELARQLYVQNNLLQQNCIQFNSPKLPQQMQTMNDLSKAAIPLNQLGAIINPQDQKQDAVNHQRQQNSIQVIPLSQAQSNLVQAQVIVQNQMQQQKPSPTQNPQRINGQRLLLSHQQKDQNLQLQQQLLLQQKQQLQQQQQQQQQNQQQLNKSLGQLVNLASQQSKLFDEELQLQILQKLQQQSLMSQSTSTLSQPPLIQEQQKLITDMQKQLSNSHSLAQQQMMPQQEIKPSLQATPLLPTVQQEQQQKLLQKQVSLADVSGVAFQPISSTNVIPKTGGAMIISGATQSVVTEEMPSCSTSPSTANGNHFTQSTKNRHCINTERLPPSTAPMLIPTSIDAVTATPLMTKELPKPNNNVKQSVVNSKLPNVAPGPQNCINHALQTDNLETSSSATSLCPSRTDGLVHQGFPSSNFNQHQMFKDALPDVEMEGVDPSNSGLFGINNDNLLGFPIETEDLLINALDSVKYQNHISTDVENNYPMQKDALQEISTSMVSQSFGQSDMAFNSIDSAINDGAFLNKNSWPAAPLLQRMRTFTKVYKRGAVGRSIDIGRYSGYEELKHALARMFGIEGQLEDRQRIGWKLVYKDHEDDILLLGDDPWEEFVNCVRCIRILSPQEVQQMSLDGDLGSNVLPNQACSSSDGVNGWRPRCDQNPGNPSIGPYDQFE

SEQ ID NO: 2491 - DNA, 2865 bp, Oryza sativa subsp
  CDS (1)..(2865)
atggcgtcctcgcaggagaaggccaagacgggtgttctgagaaatgccgcagcgctgctcgacgaaatgcagctcatgggagaaacacagggtgccaagaaggtgatcaactcggagctctggcacgcttgtgccgggccgcttgtgtgcttgccgcagcgggggagcctcgtgtactacttccctcaggggcacagtgaacaggttgcagcgacaactagaaagattccaaattcccgcattccgaactacccaaacctgccatctcagttgctgtgtcaagttcacaacatcaccttgcatgccgacaaggacactgatgaagtttatgcacagatgacccttcagccagtaaactctgaaacggatgtattccctattccaactcttggtgcttataccaaaagcaagcaccccactgaatatttctgcaagaatttaaccgcaagtgatacgagtacacatggtggtttctcggtgccacgaagggctgcagagaagttgttcccacaactggattactcaatgcaacctcctaaccaggagcttattgttcgagatttgcatgataacatgtggacattccgtcacatttatcgtggacagccaaaacgacatcttctaacaactggatggagtctctttgttggggcaaagcgtctaaaagcaggggactctgtcttatttataagggatgagaagtcacaacttcttttgggtgttaggcgagccacgcgacaacaaacaatgttgtcatcttctgttctatctactgatagcatgcacattggcgttcttgctgctgcagctcatgccgcatcaagtgcatttggtcattcatggaatctccataggacaagtccttcgccatttgtaattcctgtagcaaggtacaacaaggcaacatatatgcaaccatcagttggaatgagatttgcgatgatgtttgagacagaggagtcaagcaagcgcagatacacaggtacagttgtgggaataagtgactacgaccccatgagatggcccaattctaaatggcgcaacttacaggtcgaatgggatgaacatgggtatggagaaagacctgagcgtgtgagcatatgggatattgaaactccagaaaacactcttgtgttcccttcgtcgaccttgaattcaaagcggcaatgtcttcctggttatggagtttcagtgcctgggatggaaattggatcagcaaatatgtcatcatttccaagggctcagggtaatccctatggcagtttgcagcacattccagctgttggatcagaattggctatcatgcttctcaaccaatctggtcaaacccttgggagtccccttagttttcaccagtcctcatattctagtattatccaaaatgtgaagcaaaattatatccctcctctaacagttagcacttcagcttgtttgacaaagcaagaaagcctgccttcagatgatgcccagcaccagttccatatggcaaatatgcagaatggtgatcttgaaggctctgaagtccagcctgtcattgattcgatttctgagtcaaagttgaatgctacatcaagagatccaagaaacacagattcatacacaagtcgaagtacttcggagcaaaacagtaagggtgagcctagaggcaagactcgtaggagtaagaagggcttgcctcacaaaaccgtttcagagaaatctgacctttcttcagccccttcttggatctgtgacaatcagcaggttggtttagaatcgaaactggttggttgtgatgaacaagtaaactgtggaaatattgaagattcatcaggtgcacttactcaaggtaattttgttggacagccgcatggccatcaggttgaacaaaagggagtgctgtcgccaccaaaggtagaatcatcaaaatcacctgatggaggaaagtctgtcaattcgtttccaaaccaagggtgtttttcgcagttcattgatggtcttgattggatgactcagccttcctactaccaagactccaatgtaattcaaccagccggtgtgtcagagaacattttcagttcttctgcagatatacctccctcaatgattgctgatactatggagacttttcaggcttcatgtctttctgattgccttcctaattccatacaagaattcatctccagcccagatctgaattcactaacctttctttcacctgacatgcaaaatttggaggtccaactccagcatgatggaagcaatttgccaagcacgtccaactcgtttgtacagatgagtttttctgaagagagtgcaagtcagagtgcaaacttaagtggacttcacatggaatctacacacagaagcataaacaccacttcatgctctcaaccaatgtctactgggggctttgatgcagggatgtactcaaagttgccacgtttaaaagaatcccaaatcttgtctttgccagagattcataccaattccatgggaacatcagcttgcagtatggatgcaaccgagtacagccttgaccgaagtgcgaagccgatgaaaccaccagtgcggacatatacaaaggttcaaaagcaaggatcagttggaagatctatcgatgttacagggtttagaaattaccatgagttgagatctgccatcgcttgcatgtttggtctccaggggaaattggagcatcctggcagttcagagtggaagcttgtatatgtcgactacgaaaatgatgttcttcttgtcggagatgatccatgggaggaattcatcaactgtgtccggtgcatccggattttgtcaccttcagaagtacaacagatgagcgagaatggcatgcatgttttgaacgactgtattcaagcagcttag

SEQ ID NO: 2492 - protein, 954 aa, Oryza sativa subsp
MASSQEKAKTGVLRNAAALLDEMQLMGETQGAKKVINSELWHACAGPLVCLPQRGSLVYYFPQGHSEQVAATTRKIPNSRIPNYPNLPSQLLCQVHNITLHADKDTDEVYAQMTLQPVNSETDVFPIPTLGAYTKSKHPTEYFCKNLTASDTSTHGGFSVPRRAAEKLFPQLDYSMQPPNQELIVRDLHDNMWTFRHIYRGQPKRHLLTTGWSLFVGAKRLKAGDSVLFIRDEKSQLLLGVRRATRQQTMLSSSVLSTDSMHIGVLAAAAHAASSAFGHSWNLHRTSPSPFVIPVARYNKATYMQPSVGMRFAMMFETEESSKRRYTGTVVGISDYDPMRWPNSKWRNLQVEWDEHGYGERPERVSIWDIETPENTLVFPSSTLNSKRQCLPGYGVSVPGMEIGSANMSSFPRAQGNPYGSLQHIPAVGSELAIMLLNQSGQTLGSPLSFHQSSYSSIIQNVKQNYIPPLTVSTSACLTKQESLPSDDAQHQFHMANMQNGDLEGSEVQPVIDSISESKLNATSRDPRNTDSYTSRSTSEQNSKGEPRGKTRRSKKGLPHKTVSEKSDLSSAPSWICDNQQVGLESKLVGCDEQVNCGNIEDSSGALTQGNFVGQPHGHQVEQKGVLSPPKVESSKSPDGGKSVNSFPNQGCFSQFIDGLDWMTQPSYYQDSNVIQPAGVSENIFSSSADIPPSMIADTMETFQASCLSDCLPNSIQEFISSPDLNSLTFLSPDMQNLEVQLQHDGSNLPSTSNSFVQMSFSEESASQSANLSGLHMESTHRSINTTSCSQPMSTGGFDAGMYSKLPRLKESQILSLPEIHTNSMGTSACSMDATEYSLDRSAKPMKPPVRTYTKVQKQGSVGRSIDVTGFRNYHELRSAIACMFGLQGKLEHPGSSEWKLVYVDYENDVLLVGDDPWEEFINCVRCIRILSPSEVQQMSENGMHVLNDCIQAA

SEQ ID NO: 2493 - DNA, 2496 bp, Oryza sativa
  CDS (1)..(2496)
atgagctcgtcgtcggcggccagcatcgggccgccgcagccgccgccgccccccgcgccgcccgaggaagagaagaagtgcctcaactcggagctatggcacgcctgcgccggcccgctcgtctgcctccccaccgtcggcacgcgcgtcgtctacttcccgcaaggccacagcgagcaggtggcggcgtcgacgaacaaggaggtggagggtcacatcccgaactaccccaacctgccggcgcagctgatctgccagctccacgatgtcacaatgcatgcggatgtggagactgacgaggtgtacgcgcagatgacgctccagccactgaacccagtaaggcgcctggggtttttgcatgatgtttgcagtgctgaggttttgatgcaggagcagaacgatgcgtaccttcccgcggagatggggataatgagcaagcagccgacgaattacttctgcaagacattgacggcgagcgacaccagcacgcacggggggttctccgtgccccgccgtgctgctgagcgcgtcttccctcctttggatttcacacagcagcctccagcccaggagctaattgcacgggatattcatgacatcgagtggaagttcaggcacatctttcgaggccaacccaaacgacacctgctaaccactggctggagcgtttttgtcagtgctaagagacttgttgctggagattctgtgcttttcatatggaacgagaaaaaccagcttttacttggaataagacgtgccagtcggccacagactgtgatgccttcctctgttctttcaagcgatagcatgcacataggtctccttgcagcagcagctcatgctgctgctacaaacagccgtttcactattttctacaacccccggtatatggggactataactgaagttagtgatgcagacccagtccgttggcctagttcctattggagatctgtgaaggttggttgggatgaatcaactgcaggggaaagaccaccaagagtttctttatgggaaattgaaccattgacaacctttccaatgtatccatctctgttcccactgagagttaagcatccttggtattcaggagttgcttccctgcatgatgacagcaatgctttaatgtggctgagaggagttgctggtgagggaggttttcagtctctgaactttcagtcacctggtattggctcctggggacaacagaggctccatccatccttactgagcagcgatcacgatcagtaccaagcagtagttgctgctgctgctgcttcccaatctggtggttacttaaaacagcaattcttgcaccttcagcaacctatgcagtcccctcaagaacactgcaacctcaacccattattgcagcaacaaattctgcagcaagcaagccagcaacagataattaatcctgatgcccaaaatatccaaacgatgttgagcccaagtgctatacaacagcaactccagcaactacagcaaatgcagcaagttcagaatgatcagaagcagaagattcaaccagatcaaagctaccaagttcctacaagtgcagttctcccaagtccaacatcattaccgagtcatttgcgagaaaaatttggcttctctgatcctaatgcgaattcttcaagcttcatcacctctagcagtagtgataacatgttggattcgagcttccttcagggaagttcgaaagctgtggacttatctcgatttaatcagcctgtagctagtgagcagcagcagcagcagcaacaggcatggaagcagaagtttatgggttcacagtcagtgtcttttgggggctcggttttgcataactcacccacaagcaaagatggttctgttgaaaacaaaattggtcgtgatgtgcaaaaccagtccctttttagtccacaagttgactcttcatccctcctgtacaacatggttcctaatctgacttcgaatgtttcggatggcaacttatcaacgatcccttctggatcaacttatctgcagaatgcaatgtatggttgcttggacgactcttctggtttattgcaaaatacaggagagaacgatccagcaaccagaacatttgtgaaggtttacaagtcaggttcggttgggaggtcgttggacataacccggttctctaattatgctgaacttcgagaagaactgggtcagatgttcggcattaagggtcaattggacgaccctgatagatcaggctggcagcttgtattcgtcgacagggagaatgatgtgcttctccttggagacgacccttgggaattcattaacatctatatgaatgtgagcaatgctaaaaagtcttacattatgaaacggagggagtacaatactttggtttcctggtttccacaactaatagcttatcgaggaaagactgttcttccttcaataatatgtgttggtcagtcactatatgttgatgctcagttacccaagacccttcgtgagagtaaacatcagacatga

SEQ ID NO: 2494 - protein, 831 aa, Oryza sativa
MSSSSAASIGPPQPPPPPAPPEEEKKCLNSELWHACAGPLVCLPTVGTRVVYFPQGHSEQVAASTNKEVEGHIPNYPNLPAQLICQLHDVTMHADVETDEVYAQMTLQPLNPVRRLGFLHDVCSAEVLMQEQNDAYLPAEMGIMSKQPTNYFCKTLTASDTSTHGGFSVPRRAAERVFPPLDFTQQPPAQELIARDIHDIEWKFRHIFRGQPKRHLLTTGWSVFVSAKRLVAGDSVLFIWNEKNQLLLGIRRASRPQTVMPSSVLSSDSMHIGLLAAAAHAAATNSRFTIFYNPRYMGTITEVSDADPVRWPSSYWRSVKVGWDESTAGERPPRVSLWEIEPLTTFPMYPSLFPLRVKHPWYSGVASLHDDSNALMWLRGVAGEGGFQSLNFQSPGIGSWGQQRLHPSLLSSDHDQYQAVVAAAAASQSGGYLKQQFLHLQQPMQSPQEHCNLNPLLQQQILQQASQQQIINPDAQNIQTMLSPSAIQQQLQQLQQMQQVQNDQKQKIQPDQSYQVPTSAVLPSPTSLPSHLREKFGFSDPNANSSSFITSSSSDNMLDSSFLQGSSKAVDLSRFNQPVASEQQQQQQQAWKQKFMGSQSVSFGGSVLHNSPTSKDGSVENKIGRDVQNQSLFSPQVDSSSLLYNMVPNLTSNVSDGNLSTIPSGSTYLQNAMYGCLDDSSGLLQNTGENDPATRTFVKVYKSGSVGRSLDITRFSNYAELREELGQMFGIKGQLDDPDRSGWQLVFVDRENDVLLLGDDPWEFINIYMNVSNAKKSYIMKRREYNTLVSWFPQLIAYRGKTVLPSIICVGQSLYVDAQLPKTLRESKHQT

SEQ ID NO: 2495 - DNA, 5022 bp, Oryza sativa subsp
  CDS (1)..(5022)
atggagatggcggcgaatccaggtggttcaggaacctgcagcgatgcactattccgggagctatggcatgcttgtgctggtccgttggtcacggtcccgaagcgcggcgagcgcgtctactactttccccagggtcatatggaacagcttgaggcgtctacaaaccagcagcttgaccagtacctgccgatgttcaatctaccatccaagatcctatgcagcgtggtcaacgtagaactccgggcggaggctgattcagatgaagtttatgctcaaattatgctgcaaccagaagctgatcaaagtgaactcaccagtctggatcctgagcttcaagatcttgagaaatgcacagctcattccttttgcaagacattaacagcttcagatacaagcacacatggcggtttctctgttcttaggaggcatgctgaagaatgccttcctcagctggacatgtctcagaatccaccatgtcaagaactggttgccaaagatctccatggaactgagtggcatttccgtcacatctttcgtggacaacctaggaggcatctgcttacaaccggttggagtgtctttgttagctcaaaaagattggttgctggcgatgcatttatcttcctgaggggcgaaagtggtgagctacgggttggagtaaggagacttatgagacaagtaaataacatgccatcatctgtcatatcaagccacagcatgcatcttggagtccttgcaacagcttcccatgctatctccactggaaccctcttttctgttttctacaaacccagaacaagccggtctgagtttgttgtgagcgttaacaagtaccttgaagctaagaagcagaacttgtctgttggaatgaggtttaagatgagatttgaaggtgatgaagctcctgaaagaaggtttagtggaacaattattggtattgggagtgtgccagcaatgtcaaaatctccatgggcagattctgactggaaatctctgaaggtccaatgggatgaaccttcggctattgtccgtccagatagagtttcaccatgggaactggaaccattggatgcgagtaatccacaaccacctcagcctccattgaggaataagcgtgcaaggcctccagcttcaccttctgtggttgcggaacttcctccaagtttcgatgtggactctgatcagatctcacagccatctaatggcaataaatccgatgcccctggaacaagcagtgaacgttctcctcttgagtcccaaagtcgtcaagtgaggagctgcacaaaggtaattatgcaaggtatggcagttgggagggctgtggacttgacaaaactaaatggttatggtgatcttcgcagcaagttggaggagatgtttgatatacagggggacttgtgtcccaccctgaagagatggcaagttgtttacaccgatgatgaggatgacatgatgcttgtcggggatgatccttgggagaaattccaatgtttcttcattactgcttcctgtgctgaagacgcaacgcccttttgtcttgaattgtggtggtatttgaactgcaagtgccaggaagttcccaagactggcaagaccgcctggaagaggcattctggcaaatgcatgccgttccaaattgttttgtgttttggtaggagccttggcgttcttgtctggtgcccagatttaggcgattcggtcggcggcggcgcggagaggcggcgaaccggcggcgtggagaggcggcggagggagcccgtgactcggcggagaggcggcaaggagaggcgacgacccagctggcgggctctggcggcgaaccggcggcgcggagaggcggcaaaccagcgacgcggagaggcggcgacccagcgtggaggcagcgacccagctggcgggctccgacggcgcggagaggcggcgaaacggcggcacggagaggcggcaaaccggtggcgcgaagaggcggtgaggagaggcggcgacccatcggagaggtggcgaaccggcggcgtggagaggcggcgaagggagcccgcgactcggcggactggctccagcggcgtgggcttcttccacgcgtcgtcatcgtcgctcattgccggagcgaatggcggcagcgacggcggtggcggagctcgaactttgagttggggaacgtggtggcggcgacttggcaggctggctccgacagtggcgctgggttggtgtgggcgctggagcacgagagaggaggggattattgacgtggggaagagaatccatgtggggccaccatttggcgaggggaaccgccggcgcagcaccctcgtcctcccgcacgtccgatctgcccccttccacgccgtggttccgggagctgtggggggtcaacgccgacaaatagtagcagccgccgtcgccgaagctgatggtaatgaaaacggaaataagcatttcacttgtcacagggagaatgcaaactatggtctaaaatctgcatctgaaaataaaattgagctgctgaggggtgctcatagttgggccgacagtaatttaattgaggatgtactggcctctgtgaacaatgatgttggtgaagcatctgctttgttgaaagctatggcgtctccttgttttccaataagggaggatggactacctgatcagctttcttctgagattaataaaacacatggtttaccatcaggaaatggtacagcagaaaataatcttgtaaatgactcgcagttgttgcctctgccaatgaatatgtcgtctgtacccatagaaccggaagtggaagagctcgatgacgattactttaaccacaggaaagatgcattgaagattatgagggctgccacgaagcattctcaggctgcgagtaatgctttcttgagaggtgaccatgctgctgccaaggaactttccctcagagctcaagaagagcgatccgctgctgaagagctgaacaagaaggcagcaaaagaaatatttcgcctcaggaacagcaataatagcatttggaagctagacatgcatggtctacatgcatcagaggctgtggaagtactggaacggcatcttcacaggatagaattccagccaccagggaataatgcagcttcatctgatgaagtagctaggtctgaacccagagtgtctggtccaagcattgagcccggcccagggaaggtggtgtttgttcgtcccatacaggctatcttagaggtgatcacagggattggcaagcacagcaaagggcaggcctcactacctgttgcagtcaggggcttcctcattgaaaatgggtaccgatttgatgagctgcggcctgggcataagcttctcacttctcagcctgaagttaaaaatcacaaaggaatcaaggggcattcgccttcgaatctaggcttccgaagatcgggattgcagttaaaggttactgcaatttttgggtggattaagggagacacaagaacacgtgaattgaacccatctgctgaatcatatacgcttacagggtcagcctcagaggcagacaccaagccacgtgaggtttctgttgctgttgtttcttctattatggacattccttcagcagattgggatgcctgtgcagttgattcagttgatcctgacaattttaatccttttctgacccacgcattcctctcaagcttagaggaatcgggttctgcagtgaaggaaacagggtggttacctctgcatgttgttgcacgggatgagaatgaaactgtcgttggtgttgtcccactttacctgaaaagccattcaaggggagagtttgtatttgatcaatcatgggcagaagcttactatagctatggactcgaatactaccccaagttgcagtcttgtgtgccttttactccagtaactggtcaaagaatattagttcgagatacaccatacagggatcaagtttttgaagctttagtgaaagaattgaagagtttgactaccaagctgaaggtgtcatcgttacatataacatttccatctgaaggtgaattcagcaagttgaaggatagtgagttcttgcagagaatcgggatgcagtatcactggagaaatcgagattacagaagttttgacgagtttttaatggatttgaagcaacccaaacggaagaatatcagacaagaacgtaaaaagattcctgctcaaaatttgaaaatgaagcgacttcgtggagatgagataaaggattattttttgtgtgctttcagctggggcagaccatacttgacaagggaattctttcaccgcttgggagaaaagatgggtgacaaggtgatgcttattgttgctgaacatgacgataaacatgttgccggggctcttaaccttattggaggtgacacattgtttggccgcttatggggctgtctgccagatgcttatttccccaatttgcattttgaagcttgctattatcagaatatacatactactcaggcaattgaagcagctatagaactgaacctgagtaaggtggaggcaggtgctcaaggagagcacaagatccagcgtggttacctcccagtgacaacatacagctgccactacttcttagatcctggttttggggcagctataggaaattatcttgtacatgagacggctcaggtgaggagttgccatcggcgaaaggaaagggcaaggaaaaagctctctgaatgtcacatcgacatatcagccaagatcccaaccaaaaaggacatcagatactgcctcattatgctttttgtacaaggatacaaggattggttcttcctccctcctctcatcaatcaaaggccaagaagaaccaagctccagtgcagaaagctatcgcaaacaagaaagagctttgccagttgcagcctgcctttgcatttggactgcaccggttgcttcattcgtcaagcacaccacaggttgaggaagcagccgtttgaccatctgtgcagcagctcacccaggcacaggatggcgtacaccagcaggatgaacttgaagaggaaagggaagtaa

SEQ ID NO: 2496 - protein, 1673 aa, Oryza sativa subsp
MEMAANPGGSGTCSDALFRELWHACAGPLVTVPKRGERVYYFPQGHMEQLEASTNQQLDQYLPMFNLPSKILCSVVNVELRAEADSDEVYAQIMLQPEADQSELTSLDPELQDLEKCTAHSFCKTLTASDTSTHGGFSVLRRHAEECLPQLDMSQNPPCQELVAKDLHGTEWHFRHIFRGQPRRHLLTTGWSVFVSSKRLVAGDAFIFLRGESGELRVGVRRLMRQVNNMPSSVISSHSMHLGVLATASHAISTGTLFSVFYKPRTSRSEFVVSVNKYLEAKKQNLSVGMRFKMRFEGDEAPERRFSGTIIGIGSVPAMSKSPWADSDWKSLKVQWDEPSAIVRPDRVSPWELEPLDASNPQPPQPPLRNKRARPPASPSVVAELPPSFDVDSDQISQPSNGNKSDAPGTSSERSPLESQSRQVRSCTKVIMQGMAVGRAVDLTKLNGYGDLRSKLEEMFDIQGDLCPTLKRWQVVYTDDEDDMMLVGDDPWEKFQCFFITASCAEDATPFCLELWWYLNCKCQEVPKTGKTAWKRHSGKCMPFQIVLCFGRSLGVLVWCPDLGDSVGGGAERRRTGGVERRRREPVTRRRGGKERRRPSWRALAANRRRGEAANQRRGEAATQRGGSDPAGGLRRRGEAAKRRHGEAANRWREEAVRRGGDPSERWRTGGVERRRREPATRRTGSSGVGFFHASSSSLIAGANGGSDGGGGARTLSWGTWWRRLGRLAPTVALGWCGRWSTREEGIIDVGKRIHVGPPFGEGNRRRSTLVLPHVRSAPFHAVVPGAVGGQRRQIVAAAVAEADGNENGNKHFTCHRENANYGLKSASENKIELLRGAHSWADSNLIEDVLASVNNDVGEASALLKAMASPCFPIREDGLPDQLSSEINKTHGLPSGNGTAENNLVNDSQLLPLPMNMSSVPIEPEVEELDDDYFNHRKDALKIMRAATKHSQAASNAFLRGDHAAAKELSLRAQEERSAAEELNKKAAKEIFRLRNSNNSIWKLDMHGLHASEAVEVLERHLHRIEFQPPGNNAASSDEVARSEPRVSGPSIEPGPGKVVFVRPIQAILEVITGIGKHSKGQASLPVAVRGFLIENGYRFDELRPGHKLLTSQPEVKNHKGIKGHSPSNLGFRRSGLQLKVTAIFGWIKGDTRTRELNPSAESYTLTGSASEADTKPREVSVAVVSSIMDIPSADWDACAVDSVDPDNFNPFLTHAFLSSLEESGSAVKETGWLPLHVVARDENETVVGVVPLYLKSHSRGEFVFDQSWAEAYYSYGLEYYPKLQSCVPFTPVTGQRILVRDTPYRDQVFEALVKELKSLTTKLKVSSLHITFPSEGEFSKLKDSEFLQRIGMQYHWRNRDYRSFDEFLMDLKQPKRKNIRQERKKIPAQNLKMKRLRGDEIKDYFLCAFSWGRPYLTREFFHRLGEKMGDKVMLIVAEHDDKHVAGALNLIGGDTLFGRLWGCLPDAYFPNLHFEACYYQNIHTTQAIEAAIELNLSKVEAGAQGEHKIQRGYLPVTTYSCHYFLDPGFGAAIGNYLVHETAQVRSCHRRKERARKKLSECHIDISAKIPTKKDIRYCLIMLFVQGYKDWFFLPPLINQRPRRTKLQCRKLSQTRKSFASCSLPLHLDCTGCFIRQAHHRLRKQPFDHLCSSSPRHRMAYTSRMNLKRKGK

SEQ ID NO: 2497 - DNA, 2523 bp, Mangifera indica
  CDS (1)..(2523)
atgatggctactgcttcttcggagttgtcaataaagtcttcaaacgagactagtaagagtcctatggaagaggataaagatttgaacctcgaaacggcgctgtacaaagagctctggcatgcatgcgcgggtcctttagtcaccgtgcctcgtcaaggcgagcgcgtgtactactttcctcaaggccacatagagcaggtcgaagcgtcaaccaatcaattcgctgaccagcaaatgccaatttatgatcttcgttcaaagatactttgtcgcgtgattaacgtgcaattaaaggctaaaccggacactgacgaggtttttgcgcaaatcactttacttcctgagccaaaccaagatgagaacgctgtagagaaagaaccacctcctccactgctgccaagatttcatgtgcattcattttgtaagacgctaaccgcgtcagacacgagtactcatggtgggttttcggttcttagacgacatgctgaagaatgtcttccagaattggacatgtcacagcagccccctacacaggacttggttgcaaaggatttgcatggaaatgagtggcggttccggcatatctttaggggtcaaccacgtagacacttgctacaaagtggatggagtgtttttgttagctcaaaaaggctagtagcgggggatgcatttatatttctgaggtgtgagaaggaactccgtgttggcgtgagacgcgcaatgaggcaacagggtaatgttccgtcctctgtcatatccagtcacagcatgcatcttggtgtccttgccactgcatggcatgcagtctccactggaaccatgtttacagtttactacaagcctaggataagcccggcagaattcattgttccctttgatcagtacatggaatctgttaaaagcaattattcaattggaatgggattcgaaatgagatttgaaggcgaggaagctcctgagcagaggtatactggcaccattgttggaattgaagatgctgacccccaaaggtggccagattccaaatggagatgccttaaggtgagatgggatgagacatctactgtacctaggcctgagagagtttctccttggaagatagagcctgcattggctcctcttgccctcaatccgcttccattgtctaggcccaagaggccgagatcaaacatggttccctcttcacctgactcttctgttctgacaagggaaggttcatttaaagtaaatgtagacccttcatcagctactggattttcaagggtcttgcaaggtcaagaattctcgaccttgcgaggcaattttgctgagagagatagcaacgagtttgatactgcagaaaagtctgttgtccggccgtcttcacttgatgataagaagattgatgtggtttttgcttcaagaagatatgggtttgagaactgtgtgccagcagggaggagtgaaccgatgtgtacagatttgctgtcaggccttgggacgaattctgattctgtccatgggtatagtccatccattgatcagtctttagcatcggctgttccagtgaggaaaagcttgctgagtcaagagggcaagtttaacatgcttggtagtccatggtctttgatgccctctagtctttcacttaagatgccagaaactaatgcaaaggttcaagttcaaggtggtgatataaattatctagtacaaggcaatgctagatatggtgggctcagcgactatcccactcttcagagtcatagagttgggccatctaatggaaactggtttatgcctcctttagtctcatctcattttgaaaatttagttccttcgagagagttgatggagaaacctatatcagtacaacaccacgaggctggtaaaaccaaagactgcaaactctttggtattcccctcgtcagtagtagttgtgtcacaccagaaccaattttattgcatcaaaactcaatgaatgagccagttggccatatgaatcaccaacttggtgtgcttgaatctgatcccaagtctgaacaatctaaaagcccaacattggcaaatgatagtaattgtgttagtgagcagggcaaaccatcacagacttgtcagcctcatgtaaaggatgttcatagcaagcctcagagtgggtcttcaaggagttgtactaaggttcacaagcagggaattgcacttggtaggtctgtggacctttctaagtttaataactatgaggagttgattgctgaattagatcggttgtttgaatttggtggtgaactaatgactccaaaaaagaactggctcattatatatactgatgatgagggtgacattatgcttgttggagatgatccgtggaaggaattttgtggcatggtccgcaaaatttttatctatacaagagaggaggtccagaagatgaaaccaggatcctcgctctcaaagggtgacgagaatttgtccattggggaaggtacagaagcaaaagaagtgaaacatcagtcggtcccttcagcatgtaatgatgaaaattgttag

SEQ ID NO: 2498 - protein, 840 aa, Mangifera indica
MMATASSELSIKSSNETSKSPMEEDKDLNLETALYKELWHACAGPLVTVPRQGERVYYFPQGHIEQVEASTNQFADQQMPIYDLRSKILCRVINVQLKAKPDTDEVFAQITLLPEPNQDENAVEKEPPPPLLPRFHVHSFCKTLTASDTSTHGGFSVLRRHAEECLPELDMSQQPPTQDLVAKDLHGNEWRFRHIFRGQPRRHLLQSGWSVFVSSKRLVAGDAFIFLRCEKELRVGVRRAMRQQGNVPSSVISSHSMHLGVLATAWHAVSTGTMFTVYYKPRISPAEFIVPFDQYMESVKSNYSIGMGFEMRFEGEEAPEQRYTGTIVGIEDADPQRWPDSKWRCLKVRWDETSTVPRPERVSPWKIEPALAPLALNPLPLSRPKRPRSNMVPSSPDSSVLTREGSFKVNVDPSSATGFSRVLQGQEFSTLRGNFAERDSNEFDTAEKSVVRPSSLDDKKIDVVFASRRYGFENCVPAGRSEPMCTDLLSGLGTNSDSVHGYSPSIDQSLASAVPVRKSLLSQEGKFNMLGSPWSLMPSSLSLKMPETNAKVQVQGGDINYLVQGNARYGGLSDYPTLQSHRVGPSNGNWFMPPLVSSHFENLVPSRELMEKPISVQHHEAGKTKDCKLFGIPLVSSSCVTPEPILLHQNSMNEPVGHMNHQLGVLESDPKSEQSKSPTLANDSNCVSEQGKPSQTCQPHVKDVHSKPQSGSSRSCTKVHKQGIALGRSVDLSKFNNYEELIAELDRLFEFGGELMTPKKNWLIIYTDDEGDIMLVGDDPWKEFCGMVRKIFIYTREEVQKMKPGSSLSKGDENLSIGEGTEAKEVKHQSVPSACNDENC

SEQ ID NO: 2499 - DNA, 2511 bp, Oryza sativa
  CDS (1)..(2511)
atggcgacggcggaggtcggcggcggcggcggaggaggaggaggaggaggggaggacgcgctgttcacggagctgtggagcgcgtgcgcggggccgctggtgacggtgccgagggttggggagaaggtgttctacttcccgcaggggcacatcgagcaggtggaggcctcgaccaaccaggtaggcgagcagcggatgcagttgtacaatctcccatggaagatcctgtgtgaggttatgaacgttgagctgaaggccgagccagacaccgacgaggtttatgctcagctcactctgcttcctgaatcgaagcaacaagaagataacggctctactgaggaggaggtgccttctgctccagcagctgggcatgttaggccacgggtgcactcattctgcaagacattgaccgcctcggacacgagcacacatggcggcttctcggtgctgcgacgccacgcggacgaatgcctcccaccactggatatgagccgtcagcctccaacacaagagctggtggccaaggatctgcacggtgtggaatggcgctttcgtcacatattcagaggtcaaccacgaagacaccttttgcagagtggctggagtgtgttcgttagtgccaaacggcttgttgctggggatgcctttatctttctcagaggtgagaacggggaactgcgtgttggagtcaggcgtgcaatgaggcagcaaactaatgttccatcttcagtgatatcaagccacagcatgcatcttggggttcttgccacagcatggcatgctgttaacacagggaccatgttcactgtctactacaagcctaggacaagtccagccgagtttgtggtcccttacgatcgctatatggaatcactgaaacaaaattactccattgggatgagatttaagatgaggtttgaaggtgaagaggctccagagcaaagattcactgggactattgtcggaatgggggattctgatccagctggctggcctgaatcaaaatggcgctcccttaaggtgagatgggatgaagcttcttccatacctcgccctgaaagagtttctccctggcaaatagaacctgctgtaagccctcctcctgtcaacccactaccagttccaagaaccaagaggcttcgtccgaatgctaccgctttgccggctgactcttccgctatagcaaaagaagctgctacgaaagttgtggtcgagtctgaaccaaatggtacgcaaaggaccttccagacacaagagaatgcaaccccaaaaagtggtttcggcaatagcagcgagttagaaagtgctcagaaatcaatcatgcgtccatctggatttgatcgtgagaaaaataacactcccatacagtggaagctaggttcagatggtcggatgcagatgagcaagcctgagagttacagtgagatgctatctggatttcagccacctaaagatgtacaaatcccacagggtttctggtctttacctgagcagattactgcaggccattctaacttctggcacacagtaaatgctcagtatcaagatcaacagagcaatcacaatatgttccccagctcatggtccttcatgcctccaaatactcgccttggattaaacaaacaaaactattcaatgattcaggaagctggtgtgttgtctcaaaggcctggaaatacaaagtttgggaatggagtttatgctgcactgccaggccgaggtactgagcaatactcagggggttggtttggccatatgatgccaaattcccacatggatgatacacagccacgcctgatcaagcctaaacctctggttgttgcccatggtgatgttcagaaagctaaaggtgcttcatgcaaactatttggaattcaccttgacagcccagcgaaatctgaacctttgaaatctccatcaagtgttgtatatgatgggacgccacaaacaccaggtgctactgaatggcgccgaccagatgtaactgaagtagagaaatgttctgatccttctaaggccatgaagccacttgatactccgcaaccagactctgttcccgagaagccttcttctcagcaagcttcacgaaacatgtcgtgcaaatcacaaggtgtatcaactagaagctgcaagaaggtccacaagcaaggcattgcacttggcaggtctgtggaccttacaaagtttaatggctatgaagagttgattgctgagctggatgacatgtttgatttcaatggtgaactgaagggtcctaagaaggagtggatggttgtctacactgacaacgaaggtgacatgatgctagttggggatgatccctggattgaattctgcgacatggttcacaagatcttcatctacacaagagaagaggttcagcggatgaatccgggaaccctgaactcaagatcagaagatagtcatgctaattcaatggaaaggggctcagtcggcagagaaatgcgaggctgcttgtcaacctcgtctcttaattctgagaactgctaa

SEQ ID NO: 2500 - protein, 836 aa, Oryza sativa
MATAEVGGGGGGGGGGGEDALFTELWSACAGPLVTVPRVGEKVFYFPQGHIEQVEASTNQVGEQRMQLYNLPWKILCEVMNVELKAEPDTDEVYAQLTLLPESKQQEDNGSTEEEVPSAPAAGHVRPRVHSFCKTLTASDTSTHGGFSVLRRHADECLPPLDMSRQPPTQELVAKDLHGVEWRFRHIFRGQPRRHLLQSGWSVFVSAKRLVAGDAFIFLRGENGELRVGVRRAMRQQTNVPSSVISSHSMHLGVLATAWHAVNTGTMFTVYYKPRTSPAEFVVPYDRYMESLKQNYSIGMRFKMRFEGEEAPEQRFTGTIVGMGDSDPAGWPESKWRSLKVRWDEASSIPRPERVSPWQIEPAVSPPPVNPLPVPRTKRLRPNATALPADSSAIAKEAATKVVVESEPNGTQRTFQTQENATPKSGFGNSSELESAQKSIMRPSGFDREKNNTPIQWKLGSDGRMQMSKPESYSEMLSGFQPPKDVQIPQGFWSLPEQITAGHSNFWHTVNAQYQDQQSNHNMFPSSWSFMPPNTRLGLNKQNYSMIQEAGVLSQRPGNTKFGNGVYAALPGRGTEQYSGGWFGHMMPNSHMDDTQPRLIKPKPLVVAHGDVQKAKGASCKLFGIHLDSPAKSEPLKSPSSVVYDGTPQTPGATEWRRPDVTEVEKCSDPSKAMKPLDTPQPDSVPEKPSSQQASRNMSCKSQGVSTRSCKKVHKQGIALGRSVDLTKFNGYEELIAELDDMFDFNGELKGPKKEWMVVYTDNEGDMMLVGDDPWIEFCDMVHKIFIYTREEVQRMNPGTLNSRSEDSHANSMERGSVGREMRGCLSTSSLNSENC

SEQ ID NO: 2501 - DNA, 2865 bp, Prunus persica
  CDS (1)..(2865)
atgataatgggctcagttgaggagaagattaaagcagggggcttgcttagtggtgcacaatcaagcatacttgatgagatgaagctattgaaagagcttcaggatcattctgggtcccggaaggctataaattcagagttatggcatgcctgcgccggcccacttgtttgtttgcctcaggtgggaagtctttcatattacttccctcaaggacacagcgaacaggtggcggtttccacgaaaagaacggcaacctcacagattcccaactatccgaatctcccatctcagttgctatgtcaagttcaaaatgttacactgcatgcagacaaagaaaccgatgaaatctacgcacagatgagtcttaaaccagtgaactctgaaaaggatgtcttcccggtaccagactttggactaaagcctagcaaacatccaagtgaatttttctgcaaaactttaactgcaagtgatacaagcacacatgggggcttctctgtgccgcgcagagcagcagaaaagctcttccctccactagatttcacaatgcaaccaccaagccaagaacttgttgtccgagacttgcatgataatagctggacatttcgccatatttatcgcgggcagccgaagcggcaccttctcacaactggatggagtttgtttgttggtgcaaagaggcttagagcgggtgattcggtgctgtttatcagggatgagaagtcacagctaatgattggtgtgagacgagcaaatcgtcagcaaacaacattgccgtcatcagttctatctgctgatagcatgcacattggtgtccttgctgctgcagctcatgctgcagccaatcgaagtccattcactatattctacaatccaagggcatgcccttcagaatttgtcatacctttggctacataccaaaaggccatatatgggacccagctctcagttggaatgaggtttggaatgatgttcgagacagaagagtcgggtaagcgcaggtatatgggtacaatagtcagtactagtgatttagatccactgagatggcctggttcaaagtggcggaatcttcaggtagagtgggatgagccagggtgttgtgataaacagaacagggttagttcatgggaaattgagactcctgaaaatattttcatatttccttctctgacttcgagtcttaaacggccatcacacactggattcttgggagcagaaactgagtggggaaatttgattaaaagaccatttatccgtgttcctgagattggaaatgggaactcatttccgtactcgatttcaaatctatgttcggaacagctagtcaatatgctactgaaacctcaacttgttaatcatgctggaactttagctgctctacaacagcaatcacctgctaatggagatctaatagcagatatgaaggccatgcaggcaaaactcatccaaaagaatccgggtgtcttttcagaaggtacatctctacagagtcaaaaccctccccaatcatctctggatcaatctgctacaatagacgtgaatacaacatctcatgcaattctaccaggaaagctgaacaacctaacaaagtttggaagtcaagcaccagttggaaatagcactgacaagacaaaattagaaactgatttttctgccgatcagttaagccagttgaattctacaggactgggaattgaagataaattggctgcagggtttgttagtccctataaccttgtgaaccagctgacatttgccaaccaaaaccaaagtgcagcgcaactacaaactagcccacggcctatgcagccgcctttggaatcattactttaccactcccaacaaactgatatgcctaattcagatttcaatagcacaaatggttcgcttccattcctagacaatgatgaatgcatattttaccagtcttatcaaccctttgccgggacacttagatcacaggggcctttgtctgtgtttggtttgcaagattcttcagctgttttaactgaagcaaataattcctccctaacttcaattggtcaggaaatgtgggataatagcctgaataattgtaggcttttaccccaagtggatcagctcacttcatcccatcaaggtcctggtagccttaattgtatttctaactcaagcagtctcagagatttgtcagatgagagcaacaatcaaagtgggatttatggttgtccaaacgttgatgttggtagtggtgtaagcgctgttattgacccttctgtttcaagcaccatactggatgagttttctacattaaagaatgcagatttccacaacccctcagattgcttgcttggtaacttgagctcgagccaggatcttcagtctcagattacctctgcaagcctaggagactcccaggctttctccaggcaagacctggcagacaactcaggcggtacatcctcaagcaatatagatcttgatgagagcagtctactgcagaacaacggttcatggcatcaagtggttccacctgtgcgaacctatacaaaagtacaaaagacgggatctgttggaaggtcaattgatgttactagtttcaaaaactatgaagaactatgttctgcaattgaatgcatgtttggactggaagggctgctaaatgacccaagaggttcagggtggaaattggtttatgtggattatgagaatgacgttctacttgttggggatgatccttgggaggaattcgttggttgtgttcgctgtatcaggatcctttcacctacagaagttcagcagatgagcgaggagggaataaagcttctgaatagtgctgcaatgcaagggattaatggcaccatgtccgaaggtggccgtacttaa

SEQ ID NO: 2502 - protein, 954 aa, Prunus persica
MIMGSVEEKIKAGGLLSGAQSSILDEMKLLKELQDHSGSRKAINSELWHACAGPLVCLPQVGSLSYYFPQGHSEQVAVSTKRTATSQIPNYPNLPSQLLCQVQNVTLHADKETDEIYAQMSLKPVNSEKDVFPVPDFGLKPSKHPSEFFCKTLTASDTSTHGGFSVPRRAAEKLFPPLDFTMQPPSQELVVRDLHDNSWTFRHIYRGQPKRHLLTTGWSLFVGAKRLRAGDSVLFIRDEKSQLMIGVRRANRQQTTLPSSVLSADSMHIGVLAAAAHAAANRSPFTIFYNPRACPSEFVIPLATYQKAIYGTQLSVGMRFGMMFETEESGKRRYMGTIVSTSDLDPLRWPGSKWRNLQVEWDEPGCCDKQNRVSSWEIETPENIFIFPSLTSSLKRPSHTGFLGAETEWGNLIKRPFIRVPEIGNGNSFPYSISNLCSEQLVNMLLKPQLVNHAGTLAALQQQSPANGDLIADMKAMQAKLIQKNPGVFSEGTSLQSQNPPQSSLDQSATIDVNTTSHAILPGKLNNLTKFGSQAPVGNSTDKTKLETDFSADQLSQLNSTGLGIEDKLAAGFVSPYNLVNQLTFANQNQSAAQLQTSPRPMQPPLESLLYHSQQTDMPNSDFNSTNGSLPFLDNDECIFYQSYQPFAGTLRSQGPLSVFGLQDSSAVLTEANNSSLTSIGQEMWDNSLNNCRLLPQVDQLTSSHQGPGSLNCISNSSSLRDLSDESNNQSGIYGCPNVDVGSGVSAVIDPSVSSTILDEFSTLKNADFHNPSDCLLGNLSSSQDLQSQITSASLGDSQAFSRQDLADNSGGTSSSNIDLDESSLLQNNGSWHQVVPPVRTYTKVQKTGSVGRSIDVTSFKNYEELCSAIECMFGLEGLLNDPRGSGWKLVYVDYENDVLLVGDDPWEEFVGCVRCIRILSPTEVQQMSEEGIKLLNSAAMQGINGTMSEGGRT

SEQ ID NO: 2503 - DNA, 2868 bp, Oryza sativa
  CDS (1)..(2868)
atggcgtcctcgcaggagaaggccaagacgggtgttctgagaaatgccgcagcgctgctcgacgaaatgcagctcatgggagaaacacagggtgccaagaaggtgatcaactcggagctctggcacgcttgtgccgggccgcttgtgtgcttgccgcagcgggggagcctcgtgtactacttccctcaggggcacagtgaacaggttgcagcgacaactagaaagattccaaattcccgcattccgaactacccaaacctgccatctcagttgctgtgtcaagttcacaacatcaccttgcatgccgacaaggacactgatgaagtttatgcacagatgacccttcagccagtaaactctgaaacggatgtattccctattccaactcttggtgcttataccaaaagcaagcaccccactgaatatttctgcaagaatttaaccgcaagtgatacgagtacacatggtggtttctcggtgccacgaagggctgcagagaagttgttcccacaactggattactcaatgcaacctcctaaccaggagcttattgttcgagatttgcatgataacatgtggacattccgtcacatttatcgtggacagccaaaacgacatcttctaacaactggatggagtctctttgttggggcaaagcgtctaaaagcaggggactctgtcttatttataagggatgagaagtcacaacttcttttgggtgttaggcgagccacgcgacaacaaacaatgttgtcatcttctgttctatctactgatagcatgcacattggcgttcttgctgctgcagctcatgccgcatcaagtggtagttcatttactatctactacaatcctaggacaagtccttcgccatttgtaattcctgtagcaaggtacaacaaggcaacatatatgcaaccatcagttggaatgagatttgcgatgatgtttgagacagaggagtcaagcaagcgcagatacacaggtacagttgtgggaataagtgactacgaccccatgagatggcccaattctaaatggcgcaacttacaggtcgaatgggatgaacatgggtatggagaaagacctgagcgtgtgagcatatgggatattgaaactccagaaaacactcttgtgttcccttcgtcgaccttgaattcaaagcggcaatgtcttcctggttatggagtttcagtgcctgggatggaaattggatcagcaaatatgtcatcatttccaagggctcagggtaatccctatggcagtttgcagcacattccagctgttggatcagaattggctatcatgcttctcaaccaatctggtcaaacccttgggagtccccttagttttcaccagtcctcatattctagtattatccaaaatgtgaagcaaaattatatccctcctctaacagttagcacttcagcttgtttgacaaagcaagaaagcctgccttcagatgatgcccagcaccagttccatatggcaaatatgcagaatggtgatcttgaaggctctgaagtccagcctgtcattgattcgatttctgagtcaaagttgaatgctacatcaagagatccaagaaacacagattcatacacaagtcgaagtacttcggagcaaaacagtaagggtgagcctagaggcaagactcgtaggagtaagaagggcttgcctcacaaaaccgtttcagagaaatctgacctttcttcagccccttcttggatctgtgacaatcagcaggttggtttagaatcgaaactggttggttgtgatgaacaagtaaactgtggaaatattgaagattcatcaggtgcacttactcaaggtaattttgttggacagccgcatggccatcaggttgaacaaaagggagtgctgtcgccaccaaaggtagaatcatcaaaatcacctgatggaggaaagtctgtcaattcgtttccaaaccaagggtgtttttcgcagttcattgatggtcttgattggatgactcagccttcctactaccaagactccaatgtaattcaaccagccggtgtgtcagagaacattttcagttcttctgcagatatacctccctcaatgattgctgatactatggagacttttcaggcttcatgtctttctgattgccttcctaattccatacaagaattcatctccagcccagatctgaattcactaacctttctttcacctgacatgcaaaatttggaggtccaactccagcatgatggaagcaatttgccaagcacgtccaactcgtttgtacagatgagtttttctgaagagagtgcaagtcagagtgcaaacttaagtggacttcacatggaatctacacacagaagcataaacaccacttcatgctctcaaccaatgtctactgggggctttgatgcagggatgtactcaaagttgccacgtttaaaagaatcccaaatcttgtctttgccagagattcataccaattccatgggaacatcagcttgcagtatggatgcaaccgagtacagccttgaccgaagtgcgaagccgatgaaaccaccagtgcggacatatacaaaggttcaaaagcaaggatcagttggaagatctatcgatgttacagggtttagaaattaccatgagttgagatctgccatcgcttgcatgtttggtctccaggggaaattggagcatcctggcagttcagagtggaagcttgtatatgtcgactacgaaaatgatgttcttcttgtcggagatgatccatgggaggaattcatcaactgtgtccggtgcatccggattttgtcaccttcagaagtacaacagatgagcgagaatggcatgcatgttttgaacgactgtattcaagcagcttag

SEQ ID NO: 2504 - protein, 955 aa, Oryza sativa
MASSQEKAKTGVLRNAAALLDEMQLMGETQGAKKVINSELWHACAGPLVCLPQRGSLVYYFPQGHSEQVAATTRKIPNSRIPNYPNLPSQLLCQVHNITLHADKDTDEVYAQMTLQPVNSETDVFPIPTLGAYTKSKHPTEYFCKNLTASDTSTHGGFSVPRRAAEKLFPQLDYSMQPPNQELIVRDLHDNMWTFRHIYRGQPKRHLLTTGWSLFVGAKRLKAGDSVLFIRDEKSQLLLGVRRATRQQTMLSSSVLSTDSMHIGVLAAAAHAASSGSSFTIYYNPRTSPSPFVIPVARYNKATYMQPSVGMRFAMMFETEESSKRRYTGTVVGISDYDPMRWPNSKWRNLQVEWDEHGYGERPERVSIWDIETPENTLVFPSSTLNSKRQCLPGYGVSVPGMEIGSANMSSFPRAQGNPYGSLQHIPAVGSELAIMLLNQSGQTLGSPLSFHQSSYSSIIQNVKQNYIPPLTVSTSACLTKQESLPSDDAQHQFHMANMQNGDLEGSEVQPVIDSISESKLNATSRDPRNTDSYTSRSTSEQNSKGEPRGKTRRSKKGLPHKTVSEKSDLSSAPSWICDNQQVGLESKLVGCDEQVNCGNIEDSSGALTQGNFVGQPHGHQVEQKGVLSPPKVESSKSPDGGKSVNSFPNQGCFSQFIDGLDWMTQPSYYQDSNVIQPAGVSENIFSSSADIPPSMIADTMETFQASCLSDCLPNSIQEFISSPDLNSLTFLSPDMQNLEVQLQHDGSNLPSTSNSFVQMSFSEESASQSANLSGLHMESTHRSINTTSCSQPMSTGGFDAGMYSKLPRLKESQILSLPEIHTNSMGTSACSMDATEYSLDRSAKPMKPPVRTYTKVQKQGSVGRSIDVTGFRNYHELRSAIACMFGLQGKLEHPGSSEWKLVYVDYENDVLLVGDDPWEEFINCVRCIRILSPSEVQQMSENGMHVLNDCIQAA

SEQ ID NO: 2505 - DNA, 2574 bp, Oryza sativa subsp
  CDS (1)..(2574)
atggcgacggcggaggtcggcggcggcggcggtgagggggatgctgctgccgcggcggtggcgcgagcaggcggcggcggcggcggaggaggaggaggggaggacgcgctgttcacggagctgtggagcgcgtgcgcggggccgctggtgacggtgccgagggttggggagaaggagttctacttcccgcaggggcacatcgagcaggtggaggcctcgaccaaccaggtaggcgagcagcggatgcagttgtacaatctcccatggaagatcctgtgtgaggttatgaacgttgagctgaaggccgagccagacaccgacgaggtttatgctcagctcactctgcttcctgaattgaagcgacaagaagataacggctctactgaggaggaggtgccttctgctccagcagctgggcatgttaggccacgggtgcactcattctgcaagacattgaccgcctcggacacgagcacacatggcggcttctcggtgctgcgacgccacgcggacgaatgcctcccaccactggatatgagccgtcagcctccaacacaagagctggtggccaaggatctgcacggtgtggaatggcgctttcgtcacatattcagaggtcaaccacgaagacaccttttgcagagtggctggagtgtgtttgttagtgccaaacggcttgttgctggggatgcctttatctttctcagaggtgagaacggggaactgcgtgttggagtcaggcgtgcaatgaggcagcaaactaatgttccatcttcagtgatatcaagccacagcatgcatcttggggttcttgccacagcatggcatgctgttaacacagggaccatgttcactgtctactacaagcctaggacaagtccagccgagtttgtggtcccttacgatcgctatatggaatcactgaaacgaaattactccattgggatgagatttaagatgaggtttgaaagtgaagaggctccagagcaaagattcactgggactattgtcggaatgggggattctgatccagctggctggcctgaatcaaaatggcgctcccttaaggtgagatgggatgaagcttcttccatacctcgccctgaaagagtttctccctggcaaatagaacctgctgtaagccctcctcctgtcaacccactaccagttccaagaaccaagaggcttcgtccgaatgctaccgctttgccggctgactcttctgctatagcaaaagaagctgctacgaaagttgtggtcgagtctgaaccaaatggtacgcaaaggaccttccagacacaagagaatgcaaccccaaaaagtggtttcggcaatagcagcgagttagaaagtgctcagaaatcaatcatgcgtccatctggatttgatcgtgagaaaaataacactcccatacagtggaagctaggttcagatggtcggatgcagatgagcaagcctgagagttacagtgagatgctatctggatttcagccacctaaagatgtacaaaccccacagggtttctgttctttacctgagcagattactgcaggccattctaacttctggcacacagtaaatgctcagtatcaagatcaacagagcaatcacaatatgttccccagctcatggtccttcatgcctccaaatactcgccttggattaaacaaacagaactattcaatgattcaggaagctggtgtgttgtctcaaaggcctggaaatacaaagtttgggaatggagtttatgctgcactgccaggccgaggtactgagcaatactcagggggttggtttggccttatgatgccaaattcccacatggatgatacacagccacgcctgatcaagcctaaacctctggttgttgcccatggtgatgttcagaaagctaaaggtgcttcatgcaaactatttggaattcaccttgacagcccagcgaaatctgaaccttcgaaatctccatcaagtgttgtatatgatgggacgccacaaacaccaggtgctactgaatggcgccgaccagatgtaactgaagtagagaaatgttctgatccttctaaggccatgaagccacttgatactccgcaaccagactctgttcctgagaagccttcttctcagcaagcttcttctcagcaagcttcacgaaacatgtcgtgcaaatcacaaggtgtatcaactagaagctgcaagaaggtccacaagcaaggcattgcacttggcaggtctgtggaccttacaaagtttaatggctatgaagagttgattgctgagttggatgacatgtttgatttcaacggtgaactgaagggtcctaagaaggagtggatggttgtctacactgacaacgaaggtgacatgatgctagttggggatgatccctggattgaattctgcgacatggttcacaagatcttcatctacacaagagaagaggtccagcggatgaatccgggaaccctgaacttaagatcagaagatagtcatgctaattcaatggaaaggggctcagtcggcagagaaatgcgaggctgcttgtcaacctcgtctcttaattctgagaactgctaa

SEQ ID NO: 2506 - protein, 857 aa, Oryza sativa subsp
MATAEVGGGGGEGDAAAAAVARAGGGGGGGGGGEDALFTELWSACAGPLVTVPRVGEKEFYFPQGHIEQVEASTNQVGEQRMQLYNLPWKILCEVMNVELKAEPDTDEVYAQLTLLPELKRQEDNGSTEEEVPSAPAAGHVRPRVHSFCKTLTASDTSTHGGFSVLRRHADECLPPLDMSRQPPTQELVAKDLHGVEWRFRHIFRGQPRRHLLQSGWSVFVSAKRLVAGDAFIFLRGENGELRVGVRRAMRQQTNVPSSVISSHSMHLGVLATAWHAVNTGTMFTVYYKPRTSPAEFVVPYDRYMESLKRNYSIGMRFKMRFESEEAPEQRFTGTIVGMGDSDPAGWPESKWRSLKVRWDEASSIPRPERVSPWQIEPAVSPPPVNPLPVPRTKRLRPNATALPADSSAIAKEAATKVVVESEPNGTQRTFQTQENATPKSGFGNSSELESAQKSIMRPSGFDREKNNTPIQWKLGSDGRMQMSKPESYSEMLSGFQPPKDVQTPQGFCSLPEQITAGHSNFWHTVNAQYQDQQSNHNMFPSSWSFMPPNTRLGLNKQNYSMIQEAGVLSQRPGNTKFGNGVYAALPGRGTEQYSGGWFGLMMPNSHMDDTQPRLIKPKPLVVAHGDVQKAKGASCKLFGIHLDSPAKSEPSKSPSSVVYDGTPQTPGATEWRRPDVTEVEKCSDPSKAMKPLDTPQPDSVPEKPSSQQASSQQASRNMSCKSQGVSTRSCKKVHKQGIALGRSVDLTKFNGYEELIAELDDMFDFNGELKGPKKEWMVVYTDNEGDMMLVGDDPWIEFCDMVHKIFIYTREEVQRMNPGTLNLRSEDSHANSMERGSVGREMRGCLSTSSLNSENC

SEQ ID NO: 2507 - DNA, 1998 bp, Arabidopsis thaliana
  CDS (1)..(1998)
atggcagcttccaatcattcatctggtaaacctggaggagttttaagtgatgctttatgtagggagctctggcatgcctgtgctggacctcttgtaaccctacctcgtgaaggggaacgagtttattatttccctgaaggccacatggagcagctcgaggcatcaatgcaccaaggtttggagcaacagatgccttccttcaacctcccatctaagatcctctgtaaagttatcaacatccagcgcagggcagagcccgagactgacgaagtatatgcgcaaataaccttattgccagaactggatcaaagcgaacccactagcccagatgcccctgttcaagaacctgaaaagtgcaccgtacattcattttgcaagacactaactgcttcagacacaagcacacatggtggcttctcggtgctacggagacatgcagatgattgtctcccacccttggatatgtcccaacaaccaccgtggcaagaattggttgcaactgatttgcacaatagtgaatggcattttaggcacattttccgaggccaaccaaggcgtcatttgctaacaactggatggagtgtttttgttagctcgaagaaactagtggctggtgatgctttcatattcttaaggggtgagaatgaagagctccgagtaggtgttaggcggcacatgagacaacagactaatatcccgtcatctgtcatttcaagtcatagcatgcatattggggtccttgcaacagcagctcatgccattacaacaggaacaatcttttctgtcttctacaagccaaggacaagtaggtcagagtttattgtgagcgtcaataggtatctcgaagctaagacccagaagctgtctgtaggcatgcgtttcaagatgagattcgagggggaagaagctcccgagaaaaggttcagtggcacaatagttggtgttcaggaaaataagtcttcggtctggcatgattctgaatggagatcgctaaaggttcaatgggacgaaccctcatctgtatttcgtcctgaaagagtttcaccttgggaacttgagcccctagttgcaaatagtactccgtcttcacaacctcagcctccgcaaaggaacaaacgaccaagacctcctggtttaccttcaccagccactggtccatctggtcctgttactccagatggtgtgtggaaatccccggcagacactccttcctcagtgccattattctctcctcctgccaaagctgctacgtttggtcatggtgggaacaaatcatttggagtatctattggatcagccttttggcccaccaatgcagatagtgcagctgaatcctttgcttcagcgtttaacaatgaatctactgaaaagaaacaaactaatggaaatgtctgtaggctttttgggtttgagctagttgaaaatgttaatgtggatgaatgtttctctgctgcctctgtgtctggtgctgtcgctgtagatcaacctgtcccatccaacgagtttgactctggccagcaatctgagccattaaacatcaaccaatctgatattccttcggggagtggtgaccctgagaaatcctctttgaggtctcctcaagaatcacaaagtagacagatacgtagctgcacaaaggtgcacatgcaaggcagtgcagtaggcagagctattgatttgacaaggtcagagtgttatgaagatctgttcaagaagctggaagagatgtttgatatcaagggtgaactcttagaatctaccaaaaaatggcaagtcgtttacaccgatgatgaagatgacatgatgatggttggtgatgatccatggaatgagttctgtggaatggtgaggaagatattcatctacacacctgaggaagtgaagaaactttcaccgaagaacaaactcgcagtcaatgcaaggatgcagctcaaagctgatgcagaggaaaatgggaatacagagggcagatcatcatctatggcgggatcaagatga

SEQ ID NO: 2508 - protein, 665 aa, Arabidopsis thaliana
MAASNHSSGKPGGVLSDALCRELWHACAGPLVTLPREGERVYYFPEGHMEQLEASMHQGLEQQMPSFNLPSKILCKVINIQRRAEPETDEVYAQITLLPELDQSEPTSPDAPVQEPEKCTVHSFCKTLTASDTSTHGGFSVLRRHADDCLPPLDMSQQPPWQELVATDLHNSEWHFRHIFRGQPRRHLLTTGWSVFVSSKKLVAGDAFIFLRGENEELRVGVRRHMRQQTNIPSSVISSHSMHIGVLATAAHAITTGTIFSVFYKPRTSRSEFIVSVNRYLEAKTQKLSVGMRFKMRFEGEEAPEKRFSGTIVGVQENKSSVWHDSEWRSLKVQWDEPSSVFRPERVSPWELEPLVANSTPSSQPQPPQRNKRPRPPGLPSPATGPSGPVTPDGVWKSPADTPSSVPLFSPPAKAATFGHGGNKSFGVSIGSAFWPTNADSAAESFASAFNNESTEKKQTNGNVCRLFGFELVENVNVDECFSAASVSGAVAVDQPVPSNEFDSGQQSEPLNINQSDIPSGSGDPEKSSLRSPQESQSRQIRSCTKVHMQGSAVGRAIDLTRSECYEDLFKKLEEMFDIKGELLESTKKWQVVYTDDEDDMMMVGDDPWNEFCGMVRKIFIYTPEEVKKLSPKNKLAVNARMQLKADAEENGNTEGRSSSMAGSR

SEQ ID NO: 2509 - DNA, 2580 bp, Arabidopsis thaliana
  CDS (1)..(2580)
atggcgagttcggaggtttcaatgaaaggtaatcgtggaggagataacttctcctcctctggttttagtgaccctaaggagactagaaatgtctccgtcgccggcgaggggcaaaaaagtaattctacccgatccgctgcggctgagcgtgctttggaccctgaggctgctctttacagagagctatggcacgcttgtgctggtccgcttgtgacggttcctagacaagacgaccgagtcttctattttcctcaaggacacatcgagcaggtggaggcttcgacgaaccaggcggcagaacaacagatgcctctctatgatcttccgtcaaagcttctctgtcgagttattaatgtagatttaaaggcagaggcagatacagatgaagtttatgcgcagattactcttcttcctgaggctaatcaagacgagaatgcaattgagaaagaagcgcctcttcctccacctccgaggttccaggtgcattcgttctgcaaaaccttgactgcatccgacacaagtacacatggtggattttctgttcttaggcgacatgcggatgaatgtctcccacctctggatatgtctcgacagcctcccactcaagagttagttgcaaaggatttgcatgcaaatgagtggcgattcagacatatattccggggtcaaccacggaggcatttgctacagagtgggtggagtgtgtttgttagctccaaaaggctagttgcaggcgatgcgtttatatttctaaggggcgagaatggagaattaagagttggtgtaaggcgtgcgatgcgacaacaaggaaacgtgccgtcttctgttatatctagccatagcatgcatcttggagtactggccaccgcatggcatgccatttcaacagggactatgtttacagtctactacaaacccaggacgagcccatctgagtttattgttccgttcgatcagtatatggagtctgttaagaataactactctattggcatgagattcaaaatgagatttgaaggcgaagaggctcctgagcagaggtttactggcacaatcgttgggattgaagagtctgatcctactaggtggccaaaatcaaagtggagatccctcaaggtgagatgggatgagacttctagtattcctcgacctgatagagtatctccgtggaaagtagagccagctcttgctcctcctgctttgagtcctgttccaatgcctaggcctaagaggcccagatcaaatatagcaccttcatctcctgactcttcgatgcttaccagagaaggtacaactaaggcaaacatggaccctttaccagcaagcggactttcaagggtcttgcaaggtcaagaatactcgaccttgaggacgaaacatactgagagtgtagagtgtgatgctcctgagaattctgttgtctggcaatcttcagcggatgatgataaggttgacgtggtttcgggttctagaagatatggatctgagaactggatgtcctcagccaggcatgaacctacttacacagatttgctctccggctttgggactaacatagatccatcccatggtcagcggatacctttttatgaccattcatcatcaccttctatgcctgcaaagagaatcttgagtgattcagaaggcaagttcgattatcttgctaaccagtggcagatgatacactctggtctctccctgaagttacatgaatctcctaaggtacctgcagcaactgatgcgtctctccaagggcgatgcaatgttaaatacagcgaatatcctgttcttaatggtctatcgactgagaatgctggtggtaactggccaatacgtccacgtgctttgaattattatgaggaagtggtcaatgctcaagcgcaagctcaggctagggagcaagtaacaaaacaacccttcacgatacaagaggagacagcaaagtcaagagaagggaactgcaggctctttggcattcctctgaccaacaacatgaatgggacagactcaaccatgtctcagagaaacaacttgaatgatgctgcggggcttacacagatagcatcaccaaaggttcaggacctttcagatcagtcaaaagggtcaaaatcaacaaacgatcatcgtgaacagggaagaccattccagactaataatcctcatccgaaggatgctcaaacgaaaaccaactcaagtaggagttgcacaaaggttcacaagcagggaattgcacttggccgttcagtggatctttcaaagttccaaaactatgaggagttagtcgctgagctggacaggctgtttgagttcaatggagagttgatggctcctaagaaagattggttgatagtttacacagatgaagagaatgatatgatgcttgttggtgacgatccttggcaggagttttgttgcatggttcgcaaaatcttcatatacacgaaagaggaagtgaggaagatgaacccggggactttaagctgtaggagcgaggaagaagcagttgttggggaaggatcagatgcaaaggacgccaagtctgcatcaaatccttcattgtccagcgctgggaactcttaa

SEQ ID NO: 2510 - protein, 859 aa, Arabidopsis thaliana
MASSEVSMKGNRGGDNFSSSGFSDPKETRNVSVAGEGQKSNSTRSAAAERALDPEAALYRELWHACAGPLVTVPRQDDRVFYFPQGHIEQVEASTNQAAEQQMPLYDLPSKLLCRVINVDLKAEADTDEVYAQITLLPEANQDENAIEKEAPLPPPPRFQVHSFCKTLTASDTSTHGGFSVLRRHADECLPPLDMSRQPPTQELVAKDLHANEWRFRHIFRGQPRRHLLQSGWSVFVSSKRLVAGDAFIFLRGENGELRVGVRRAMRQQGNVPSSVISSHSMHLGVLATAWHAISTGTMFTVYYKPRTSPSEFIVPFDQYMESVKNNYSIGMRFKMRFEGEEAPEQRFTGTIVGIEESDPTRWPKSKWRSLKVRWDETSSIPRPDRVSPWKVEPALAPPALSPVPMPRPKRPRSNIAPSSPDSSMLTREGTTKANMDPLPASGLSRVLQGQEYSTLRTKHTESVECDAPENSVVWQSSADDDKVDVVSGSRRYGSENWMSSARHEPTYTDLLSGFGTNIDPSHGQRIPFYDHSSSPSMPAKRILSDSEGKFDYLANQWQMIHSGLSLKLHESPKVPAATDASLQGRCNVKYSEYPVLNGLSTENAGGNWPIRPRALNYYEEVVNAQAQAQAREQVTKQPFTIQEETAKSREGNCRLFGIPLTNNMNGTDSTMSQRNNLNDAAGLTQIASPKVQDLSDQSKGSKSTNDHREQGRPFQTNNPHPKDAQTKTNSSRSCTKVHKQGIALGRSVDLSKFQNYEELVAELDRLFEFNGELMAPKKDWLIVYTDEENDMMLVGDDPWQEFCCMVRKIFIYTKEEVRKMNPGTLSCRSEEEAVVGEGSDAKDAKSASNPSLSSAGNS

SEQ ID NO: 2511 - DNA, 1827 bp, Arabidopsis thaliana
  CDS (1)..(1827)
atgggtggtttaatcgatctgaacgtgatggagacggaggaagacgaaacgcaaacgcaaacaccgtcttcagcttctgggtctgtctctcctacttcgtcttcttcagcttctgtgtctgtggtgtcttcgaattctgctggtggaggggtttgtttggagctgtggcatgcttgtgctggaccccttatctctctaccaaaaagaggaagccttgtgttgtatttccctcagggacatttggaacaagcccccgatttctccgccgcgatttacgggctccctcctcacgtgttctgtcgtattctcgatgttaagcttcacgcagagacgactacagatgaagtttatgctcaagtctctcttcttcctgagtcagaggacattgagaggaaggtgcgtgaaggaattatagatgttgatggtggagaggaagattatgaagtgcttaagaggtctaatactcctcacatgttttgcaaaacccttactgcttctgatacaagcacccatggtggtttctctgttcctcgccgagctgctgaggattgcttccctcctctggactatagccagccccggccttctcaggagcttcttgctagggatcttcatggcctggagtggcgatttcgccacatttatcgagggcaacctaggaggcatttgctcactaccgggtggagtgcgtttgtgaacaagaagaagcttgtctctggtgatgctgtgcttttccttagaggagatgatggcaaactgcgactgggagttagaagagcttctcaaatcgaaggcaccgctgctctctcggctcaatataatcagaatatgaaccacaacaatttctctgaagtagctcatgccatatcgacccatagcgttttcagcatttcctacaaccccaaggcaagctggtcaaacttcataatccctgcaccaaagttcttgaaggttgttgactatcccttttgcattgggatgagatttaaagcgagggttgaatctgaagatgcatctgagagaagatcccctgggattataagtggtatcagcgacttggatccaatcaggtggcctggttcaaaatggagatgccttttggtaaggtgggacgacattgtggcaaatgggcatcaacagcgtgtctcgccatgggagatcgaaccatctggttccatctccaattcaggcagcttcgtaacaactggtcccaagagaagcaggattggcttttcctcaggaaagcctgatatccctgtctctgaggggattcgcgccacagactttgaggaatcattgagattccagagggtcttgcaaggtcaagaaatttttccgggttttatcaacacttgttcggatggtggagccggtgccaggagaggccgcttcaaaggaacagaatttggtgactcttatggtttccataaggtcttgcaaggtcaagaaacagttcccgcctactcaataaccgatcatcggcagcagcacgggttgagccagaggaacatttggtgtgggccgttccagaactttagtacacgtatcctccccccatctgtatcatcatcaccctcttccgtcttgcttaccaactcgaacagtcctaacggacgtctggaagaccatcacggaggttcaggcagatgcaggctgtttggtttcccattaaccgacgaaaccacagcagttgcatctgcgacggctgtcccctgcgttgaagggaattccatgaaaggtgcgtcagctgttcaaagcaatcatcatcattcgcaaggaagggacatctatgcaatgagagacatgttgctagacattgctctctag

SEQ ID NO: 2512 - protein, 608 aa, Arabidopsis thaliana
MGGLIDLNVMETEEDETQTQTPSSASGSVSPTSSSSASVSVVSSNSAGGGVCLELWHACAGPLISLPKRGSLVLYFPQGHLEQAPDFSAAIYGLPPHVFCRILDVKLHAETTTDEVYAQVSLLPESEDIERKVREGIIDVDGGEEDYEVLKRSNTPHMFCKTLTASDTSTHGGFSVPRRAAEDCFPPLDYSQPRPSQELLARDLHGLEWRFRHIYRGQPRRHLLTTGWSAFVNKKKLVSGDAVLFLRGDDGKLRLGVRRASQIEGTAALSAQYNQNMNHNNFSEVAHAISTHSVFSISYNPKASWSNFIIPAPKFLKVVDYPFCIGMRFKARVESEDASERRSPGIISGISDLDPIRWPGSKWRCLLVRWDDIVANGHQQRVSPWEIEPSGSISNSGSFVTTGPKRSRIGFSSGKPDIPVSEGIRATDFEESLRFQRVLQGQEIFPGFINTCSDGGAGARRGRFKGTEFGDSYGFHKVLQGQETVPAYSITDHRQQHGLSQRNIWCGPFQNFSTRILPPSVSSSPSSVLLTNSNSPNGRLEDHHGGSGRCRLFGFPLTDETTAVASATAVPCVEGNSMKGASAVQSNHHHSQGRDIYAMRDMLLDIAL

SEQ ID NO: 2513 - DNA, 2367 bp, Arabidopsis thaliana
  CDS (1)..(2367)
atggaatttgacttgaatactgagattgcggaggtggaagaggaggagaatgatgatgtaggagtaggagtaggaggaggaacaagaattgacaagggtaggcttggaatttcaccatcttcttcttcttcatgctcttccggatcatcatcgtcatcatcttctacaggctctgcatcttccatttactctgagctttggcatgcttgtgctggtcctctcacttgtcttcccaagaaaggcaatgtagttgtctatttccctcaaggtcatttggagcaagatgctatggtttcatattcgtctcctcttgaaatccccaaatttgaccttaatccccaaatcgtctgcagggtggttaatgtccagttgcttgctaataaggacaccgatgaggtctacactcaagtcactctgcttccacttcaagagttttcgatgctaaatggggaggggaaagaggtcaaggagttaggaggggaggaagagaggaacggaagctcatccgtcaagcggacacctcatatgttctgtaaaaccttaacagcgtctgacacaagcacacatggaggcttctctgtacctagaagagccgctgaagattgttttgctcctcttgactacaaacaacagaggccatctcaagagctcattgcaaaggacctccatggagtagagtggaagtttcgccatatctatagaggtcaaccaaggaggcatctactcaccactggttggagtatctttgtcagtcaaaaaaatctcgtctctggtgatgcggttctctttctgagagacgaaggaggagagctgagattaggaatcagaagagcagcacggccaagaaatggacttcctgactcaatcattgagaagaattcatgttcaaacattctgtctcttgtggctaatgctgtatctacaaaaagcatgtttcatgtgttctacagtccacgagcgacgcatgcagagtttgtgattccttatgagaagtatatcacaagcatcaggagtcctgtttgcataggcacaagatttagaatgcgatttgaaatggacgattctcctgagagaagatgcgctggtgtagtgactggagtctgtgacttggacccgtataggtggccaaactctaaatggaggtgcttgttggtgcgatgggatgagtcttttgtgagtgatcatcaagaaagagtttcaccttgggagattgatccctcggtttctctcccacacttgagcattcagtcatctccaaggcctaaaaggccatgggcaggtttactggatactaccccacccggaaaccccataacaaaaaggggtggttttttggactttgaggagtcggttagaccctctaaggtcttgcaaggtcaagaaaatataggttctgcatcaccctcacaggggtttgatgttatgaaccgccggatactggattttgcgatgcagtctcatgcaaatccagttcttgtgtcgagtagagtcaaggatcgatttggtgagtttgtagatgctactggcgtgaacccagcttgttcaggtgttatggacctggataggtttccaagggtcttgcaaggtcaagaaatttgctcgcttaaatcattcccgcaatttgctggtttcagtccagctgctgctcctaatccctttgcttaccaagccaacaagtcaagttactatccgctagctttgcatgggattaggagcactcatgttccgtatcagaatccatacaatgcgggaaaccaatcctcgggtcccccttcacgtgcaataaactttggtgaagagactagaaagtttgatgcacaaaatgaaggtggcctaccaaataatgttacagctgatttgccattcaagattgatatgatgggaaaacagaaaggcagtgagttgaatatgaatgcttcatcaggatgtaaacttttcggattctccttaccagtggagacacctgcatctaagccgcaaagctcgagcaaaagaatctgtacaaaggtccacaagcaaggaagccaagtggggagagctattgatttgtcgcgacttaacgggtatgatgatctccttatggagcttgaacggctgttcaacatggaagggcttctcagggatcctgaaaaaggatggaggatcttatatactgatagtgagaacgatatgatggtcgttggcgatgatccatggcatgatttctgcaatgtggtgtggaagatacacttatacacgaaagaggaagtggagaatgcgaatgacgataacaagagttgtttagagcaagctgctctcatgatggaagcatcaaagtcatcttctgtgagccagcctgattcttctcctacaatcactagggtttga

SEQ ID NO: 2514 - protein, 788 aa, Arabidopsis thaliana
MEFDLNTEIAEVEEEENDDVGVGVGGGTRIDKGRLGISPSSSSSCSSGSSSSSSSTGSASSIYSELWHACAGPLTCLPKKGNVVVYFPQGHLEQDAMVSYSSPLEIPKFDLNPQIVCRVVNVQLLANKDTDEVYTQVTLLPLQEFSMLNGEGKEVKELGGEEERNGSSSVKRTPHMFCKTLTASDTSTHGGFSVPRRAAEDCFAPLDYKQQRPSQELIAKDLHGVEWKFRHIYRGQPRRHLLTTGWSIFVSQKNLVSGDAVLFLRDEGGELRLGIRRAARPRNGLPDSIIEKNSCSNILSLVANAVSTKSMFHVFYSPRATHAEFVIPYEKYITSIRSPVCIGTRFRMRFEMDDSPERRCAGVVTGVCDLDPYRWPNSKWRCLLVRWDESFVSDHQERVSPWEIDPSVSLPHLSIQSSPRPKRPWAGLLDTTPPGNPITKRGGFLDFEESVRPSKVLQGQENIGSASPSQGFDVMNRRILDFAMQSHANPVLVSSRVKDRFGEFVDATGVNPACSGVMDLDRFPRVLQGQEICSLKSFPQFAGFSPAAAPNPFAYQANKSSYYPLALHGIRSTHVPYQNPYNAGNQSSGPPSRAINFGEETRKFDAQNEGGLPNNVTADLPFKIDMMGKQKGSELNMNASSGCKLFGFSLPVETPASKPQSSSKRICTKVHKQGSQVGRAIDLSRLNGYDDLLMELERLFNMEGLLRDPEKGWRILYTDSENDMMVVGDDPWHDFCNVVWKIHLYTKEEVENANDDNKSCLEQAALMMEASKSSSVSQPDSSPTITRV

SEQ ID NO: 2515 - DNA, 2709 bp, Arabidopsis thaliana
  CDS (1)..(2709)
atgatggcttcattgtcttgtgttgaagacaagatgaaaacaagttgtttggttaatggtggaggaactataacaacaacaacatctcaatctaccttgcttgaagagatgaagctgttgaaagaccagtcaggtacaagaaagccggtaataaactcggagctatggcacgcttgtgcaggccctttggtgtgtctccctcaagttgggagcttagtgtattacttctcacaaggtcatagcgagcaggttgctgtttcaaccagaagatcagcaacaacacaagttcctaattatccgaaccttccatctcagttgatgtgtcaagtccataatgttactcttcatgctgacaaagacagtgacgaaatctatgctcagatgagtcttcaacctgttcactctgagagagatgtgttccctgtaccagactttggaatgctgagaggaagtaagcacccgactgagtttttctgcaaaacacttactgcaagtgacacaagcacacatggaggtttctcagtgccacgtagagctgcagagaagctatttccaccattggattactcagcacagccgccaacgcaagagcttgtagttcgagatcttcatgagaatacttggacatttcgccatatctaccgagggcaaccaaagagacatctcctaactacaggatggagtttgttcgttggatcgaagagattgagagctggggattctgttttgttcatcagggatgagaagtcacaacttatggtcggtgttaggcgtgccaatcgccaacaaacagcacttccttcatcagttctctcagcggatagtatgcacatcggtgttcttgctgctgctgctcacgcaaccgccaaccgtactccttttttgatattctataatccaagagcttgtccagcagagttcgtgatccctctagctaagtaccgtaaggcgatatgcgggtctcagctctcagttggtatgagatttggaatgatgtttgaaactgaagattccgggaaacgaaggtacatgggaactattgttggaatcagcgatttggatccgttgagatggcctggttctaagtggcgtaaccttcaggtagaatgggatgagcctggatgtaatgataaacctactcgggtcagtccatgggatatcgaaacacctgaaagtctcttcatttttccttctctgacctcaggactcaaacgtcagctccatccatcttactttgctggtgaaactgaatggggtagcttgataaaacggccacttatacgtgttcctgattccgcgaatgggattatgccatatgcatctttccctagtatggcttcggagcagcttatgaaaatgatgatgaggcctcacaacaaccaaaatgtaccatctttcatgtctgagatgcagcagaatattgtaatggggaatggaggtttgctaggagatatgaagatgcagcaacccctgatgatgaaccagaaatctgagatggtgcagccacaaaacaagctaacagtgaacccatctgcttctaatacgagtggccaagaacagaatctttcacagagtatgagtgctcctgctaaacctgagaactctacactctctggttgcagctctggtagagtccaacatggacttgagcagtcaatggaacaggcaagccaggttactacatccacagtgtgtaatgaggaaaaggttaatcagctacttcagaaaccgggtgcttcgtcgcctgtacaagctgatcaatgtcttgacattactcatcagatttaccaaccacagtctgatccaataaatggattctctttcctggaaactgatgagctgacatcacaagtctcttccttccagtctcttgccggatcatacaagcaaccattcattctatcctcccaggattcttcagctgttgtgttaccggattccacaaactcaccgctgtttcatgatgtgtgggacactcagttgaacggtctcaagtttgaccagttcagtcccttgatgcagcaggacctttatgctagtcagaatatctgtatgagtaatagcacaaccagtaacattctagatcctccactctcaaacacagtccttgatgacttctgtgccatcaaagacactgatttccagaaccacccttctggttgtttggttggaaacaacaacactagctttgctcaagatgtccagtcgcagatcacatcagctagctttgcagactcacaggccttctctcgccaagattttccagataattctggaggcactggtacatcttcaagcaatgttgattttgatgattgtagtctgcggcaaaatagtaaaggctcatcatggcagaaaattgcgacaccccgcgtccgaacctacactaaggttcaaaaaaccgggtcagtcgggagatcaattgatgtcacaagctttaaagactacgaggagctaaaatctgctatcgaatgcatgtttggattggaaggactactaactcacccacaaagctcgggttggaagcttgtatatgttgattatgagagtgatgttctgcttgtaggagatgatccatgggaagagtttgtgggatgcgtaaggtgcataaggatattgtcgccaactgaggtccagcagatgagtgaagaagggatgaagcttttgaacagcgcaggcattaacgatcttaagacttctgtttcataa

SEQ ID NO: 2516 - protein, 902 aa, Arabidopsis thaliana
MMASLSCVEDKMKTSCLVNGGGTITTTTSQSTLLEEMKLLKDQSGTRKPVINSELWHACAGPLVCLPQVGSLVYYFSQGHSEQVAVSTRRSATTQVPNYPNLPSQLMCQVHNVTLHADKDSDEIYAQMSLQPVHSERDVFPVPDFGMLRGSKHPTEFFCKTLTASDTSTHGGFSVPRRAAEKLFPPLDYSAQPPTQELVVRDLHENTWTFRHIYRGQPKRHLLTTGWSLFVGSKRLRAGDSVLFIRDEKSQLMVGVRRANRQQTALPSSVLSADSMHIGVLAAAAHATANRTPFLIFYNPRACPAEFVIPLAKYRKAICGSQLSVGMRFGMMFETEDSGKRRYMGTIVGISDLDPLRWPGSKWRNLQVEWDEPGCNDKPTRVSPWDIETPESLFIFPSLTSGLKRQLHPSYFAGETEWGSLIKRPLIRVPDSANGIMPYASFPSMASEQLMKMMMRPHNNQNVPSFMSEMQQNIVMGNGGLLGDMKMQQPLMMNQKSEMVQPQNKLTVNPSASNTSGQEQNLSQSMSAPAKPENSTLSGCSSGRVQHGLEQSMEQASQVTTSTVCNEEKVNQLLQKPGASSPVQADQCLDITHQIYQPQSDPINGFSFLETDELTSQVSSFQSLAGSYKQPFILSSQDSSAVVLPDSTNSPLFHDVWDTQLNGLKFDQFSPLMQQDLYASQNICMSNSTTSNILDPPLSNTVLDDFCAIKDTDFQNHPSGCLVGNNNTSFAQDVQSQITSASFADSQAFSRQDFPDNSGGTGTSSSNVDFDDCSLRQNSKGSSWQKIATPRVRTYTKVQKTGSVGRSIDVTSFKDYEELKSAIECMFGLEGLLTHPQSSGWKLVYVDYESDVLLVGDDPWEEFVGCVRCIRILSPTEVQQMSEEGMKLLNSAGINDLKTSVS

SEQ ID NO: 2517 - DNA, 2802 bp, Arabidopsis thaliana
  CDS (1)..(2802)
atgagattatcttcagctgggtttaatcctcaacctcatgaaggagagaaaagagttcttaattctgagctctggcatgcttgtgctggtcctcttgtctcactacctcctgttggaagcagagttgtgtattttcctcaaggtcacagtgaacaggttgctgcttcgaccaacaaagaagtagatgctcatataccaaattatccgagcttgcatccgcagcttatctgtcagcttcataatgttacaatgcatgctgatgtggagactgatgaagtctatgcacagatgactttgcaaccgttgaatgcgcaagagcaaaaagatccttaccttcccgcggaattaggtgtcccaagtagacagcctacaaactatttctgtaaaactctgactgctagtgatacaagcactcacggaggtttttctgtacctcgccgagctgctgagaaagttttccctcccttggattactcgcagcagccaccagctcaagagttaatggcgagggatctgcatgataatgaatggaagttcaggcatattttccgaggccaaccaaagagacatctccttaccacgggttggagcgtatttgtgagtgctaaaaggcttgttgctggtgactctgttcttttcatctggaacgataagaatcaattacttcttggtataagacgagccaaccgaccacaaactgtcatgccttcatctgttttgtcaagtgacagtatgcatttaggccttcttgctgcagcagctcatgctgccgctacaaacagccgattcaccatcttctataacccgagggcgagtccatcagagtttgttatacccctggctaagtatgtgaaagcggtttatcacactcgcgtctctgttggtatgcggtttaggatgctgtttgaaactgaagaatctagtgttcgtcggtacatgggtacaataactggcatttgtgatctagatcctactcgttgggctaattcgcattggcgatctgtcaaggttgggtgggacgaatctactgcaggagagagacagccaagggtttcattgtgggagattgagcctttaacaacattccctatgtatccatctccttttcctctcaggcttaaacggccgtggcctcctggtctcccatctttccatggccttaaagaagatgatatgggtatgagtatgagttcaccgcttatgtgggatcgaggactccaatctctaaactttcaaggtatgggagtaaacccgtggatgcagccgagacttgatacgtcgggcttgcttggtatgcaaaatgatgtgtaccaagcaatggctgcagctgcccttcaagacatgagaggcattgatcctgcaaaagctgctgcttcacttcttcagttccaaaattcgccggggttctcaatgcaatctccgtccttagtgcagccgcagatgctgcagcagcaactctctcagcagcagcaacaactctctcagcagcagcagcagcagcaacagctctcccaacagcagcagcaacagctctctcaacagcagcagcagcagctctctcaacagcagcagcaacaactctctcagcagcagcagcaacaggcgtatcttggcgttcctgaaacccaccagcctcagtctcaggctcaatcacagtcaaacaatcatctttctcagcagcagcagcaagtagtggataatcataatccgtctgcgtccagtgctgctgttgtttccgctatgtctcaatttggttctgcttctcagcccaacacgtcaccactccagtccatgacctctctgtgtcatcagcaaagcttctccgataccaacggaggaaacaatcctatttctccacttcacactcttctcagtaacttctctcaagacgaatcttctcaactgctccacctcactagaacaaactctgcaatgacttcatccggttggccatcaaagcgtcctgcagttgattcatcgttccagcactctggagccggtaataataacactcaatccgtattggagcaactgggacagtcccacacaagcaacgttcctccaaacgctgtctcgttgcctccatttcccggtggtagagagtgctcgatcgagcaagaaggaagcgcctcagacccgcatagccatcttctctttggagtcaatatagattcatcttctcttttgatgccgaacggaatgtcaaaccttagaagcattggtattgaaggtggtgactccacgactttacccttcacatcatctaatttcaacaatgatttctcgggtaatcttgcaatgacaacaccttctagttgcatagatgaatcgggttttctacaatcctcagaaaacctcggttccgagaacccacaatctaacacctttgtgaaggtgtacaagtcagggtcttttggaagatcgttagatatatcaaagtttagcagctaccacgagctgcgaagcgagcttgctcgcatgtttggcctcgaaggccaattagaagaccctgtgagatcaggctggcagcttgtatttgttgaccgagagaacgacgttcttctcctcggcgatgacccttggccggagtttgtgagcagcgtgtggtgcattaagatactgtcaccacaagaagtgcaacaaatgggaaaaagaggccttgagcttctcaactccgcgccatcttccaacaatgtcgataagctcccgagcaacgggaactgtgacgactttgggaaccggtcagacccgaggaatctcggtaacggtatcgcatcagttgggggttcattcaactactag

SEQ ID NO: 2518 - protein, 933 aa, Arabidopsis thaliana
MRLSSAGFNPQPHEGEKRVLNSELWHACAGPLVSLPPVGSRVVYFPQGHSEQVAASTNKEVDAHIPNYPSLHPQLICQLHNVTMHADVETDEVYAQMTLQPLNAQEQKDPYLPAELGVPSRQPTNYFCKTLTASDTSTHGGFSVPRRAAEKVFPPLDYSQQPPAQELMARDLHDNEWKFRHIFRGQPKRHLLTTGWSVFVSAKRLVAGDSVLFIWNDKNQLLLGIRRANRPQTVMPSSVLSSDSMHLGLLAAAAHAAATNSRFTIFYNPRASPSEFVIPLAKYVKAVYHTRVSVGMRFRMLFETEESSVRRYMGTITGICDLDPTRWANSHWRSVKVGWDESTAGERQPRVSLWEIEPLTTFPMYPSPFPLRLKRPWPPGLPSFHGLKEDDMGMSMSSPLMWDRGLQSLNFQGMGVNPWMQPRLDTSGLLGMQNDVYQAMAAAALQDMRGIDPAKAAASLLQFQNSPGFSMQSPSLVQPQMLQQQLSQQQQQLSQQQQQQQQLSQQQQQQLSQQQQQQLSQQQQQQLSQQQQQQAYLGVPETHQPQSQAQSQSNNHLSQQQQQVVDNHNPSASSAAVVSAMSQFGSASQPNTSPLQSMTSLCHQQSFSDTNGGNNPISPLHTLLSNFSQDESSQLLHLTRTNSAMTSSGWPSKRPAVDSSFQHSGAGNNNTQSVLEQLGQSHTSNVPPNAVSLPPFPGGRECSIEQEGSASDPHSHLLFGVNIDSSSLLMPNGMSNLRSIGIEGGDSTTLPFTSSNFNNDFSGNLAMTTPSSCIDESGFLQSSENLGSENPQSNTFVKVYKSGSFGRSLDISKFSSYHELRSELARMFGLEGQLEDPVRSGWQLVFVDRENDVLLLGDDPWPEFVSSVWCIKILSPQEVQQMGKRGLELLNSAPSSNNVDKLPSNGNCDDFGNRSDPRNLGNGIASVGGSFNY

SEQ ID NO: 2519 - DNA, 3495 bp, Arabidopsis thaliana
  CDS (1)..(3495)
atgaaagctccttcatcaaatggagtttctcctaatcctgttgaaggagaaaggagaaatataaactcagagctatggcacgcttgtgctgggccattgatttcgttgcctccagcaggaagtcttgttgtttacttccctcaaggtcacagtgagcaagtcgcggcttcaatgcagaagcagactgatttcataccaagttacccgaatcttccttccaagctcatatgcatgctccacaatgttacactgaatgctgatcctgagacggatgaggtctatgcgcagatgactcttcagccagtaaacaaatatgacagagatgcattgcttgcttctgacatgggtcttaagctaaacagacaacctaatgaatttttctgcaaaaccctcacggcgagtgacacaagtactcacggtggattttctgtaccccgacgagctgctgagaaaatctttcctgctctggatttctcgatgcaaccaccttgtcaggagcttgttgctaaggatattcatgacaacacatggactttcagacatatttatcgaggtcaaccaaaaaggcacttgctaactacaggctggagtgtgtttgtcagcacgaaaaggctctttgctggagactctgttctttttataagagatggaaaggcgcaacttctgttggggataagacgtgcaaatagacaacagcctgcactttcttcatctgtaatatcaagtgatagcatgcacatcggagttcttgcagctgcagctcatgctaatgctaataacagtcctttcaccattttctacaacccgagggctgctcctgctgagtttgtggttcctttagccaagtataccaaagcgatgtacgctcaagtttccctcggtatgcggtttagaatgatatttgagactgaagaatgtggagttcgtcggtatatgggtacagttaccggtatcagtgatcttgatccagtgagatggaaaaactctcagtggcggaatcttcagattggatgggatgagtcagctgctggtgataggcccagtcgagtttcagtttgggacattgaaccggttttaactcctttctacatatgtcctcctccatttttccgacctcgcttttctggacaacctggaatgccagatgatgagactgacatggagtctgcactgaagagagcaatgccatggcttgataatagcttagagatgaaagacccttcgagtactatctttcctggtctgagtttagttcagtggatgaatatgcagcagcagaacggccagctaccctctgctgctgcacagccaggtttcttcccatcaatgctttcgccaaccgcggcgctgcacaacaatcttggcggcactgatgatccctccaagttactgagctttcagacgccgcacggggggatttcctcctcaaatctccaatttaacaaacagaatcagcaagccccaatgtctcagttgcctcagccaccaactacgttgtcccaacaacagcagctgcagcaattgttgcactcctctttgaaccatcaacaacagcaatcgcagtctcaacaacagcaacaacaacaacagttgctgcagcagcaacaacaattgcagtctcaacaacacagcaacaacaatcaatcgcagtctcagcaacaacaacaattgctccagcagcaacaacaacaacaactgcagcagcaacatcaacaaccgttacagcaacagactcagcagcagcagctaagaacacagccattgcaatctcactcgcatccacagccacaacagttacaacaacataagttgcagcaacttcaggttccacagaatcagctttacaatggtcaacaagcagcgcagcagcatcagtcgcaacaagcatctacacatcatttgcaaccacaattagtttcgggatcaatggcaagcagtgtcatcacgcctccgtccagctcccttaatcaaagctttcaacagcaacaacaacagtctaagcaacttcaacaagcacatcaccatttaggtgctagcactagccagagtagtgtaattgaaaccagcaagtcttcatccaatctgatgtccgcaccgccgcaagagacacagttttcacgacaagtagaacagcagcagcctcctggtctcaacgggcagaatcagcaaacacttttgcagcagaaagctcaccaggcacaggcccaacagatattccagcagagtctcttggaacagccgcatatacagtttcagctgttacagagattacaacagcaacagcagcagcaatttctttcgccgcagtctcagctaccacaccatcaattgcaaagccagcagttgcaacagctgcctactctctctcaaggtcatcagtttccgtcatcttgcactaacaatggcttatcgacgttgcaaccacctcaaatgctggtgagccgacctcaggaaaaacaaaacccaccggttgggggaggggtcaaagcttattcaggcatcacagatggaggagatgcaccttcctcttcaacgtcgccttccaccaacaactgtcagatctcttcttcaggctttctcaacagaagccaaagcgggccagcgatcttgatacctgatgcagcgattgatatgtctggtaatcttgttcaggatctttacagcaaatccgatatgcggctaaaacaagaactcgtgggtcagcaaaagtccaaagctagtttaacagatcatcaactagaagcatctgcctctggaacttcttacggtttagatggaggcgaaaacaacagacaacaaaatttcttggctccaacttttggccttgacggtgattccaggaacagcttgctcggtggagctaatgttgataatggctttgtgcctgacacgctactctcgaggggatatgactcccagaaagatcttcagaacatgctttcaaactatggaggagtgacaaatgacattggtacagagatgtctacttcagctgtaagaactcaatcttttggtgtccccaatgtgcccgccatttcgaacgatctagctgtcaacgatgctggagttcttggtggtggattgtggccagctcagactcagcgaatgcgaacttatacaaaggtgcaaaaacgaggctcagtggggagatcaatagacgtcaaccgttacagaggttacgatgagctgaggcatgatctagcgcgcatgtttgggatcgaaggacagctcgaagatcctcaaacatctgactggaaacttgtttatgtcgatcatgaaaatgacatcctcctcgtcggcgatgatccatgggaagaattcgtaaactgtgttcagagcattaagatcctttcatcagctgaggttcagcagatgagcttagacgggaactttgccggtgtaccagttactaatcaagcttgtagtggcggtgacagtggcaatgcttggagaggtcattatgatgataactcagccacttcgtttaaccggtga

SEQ ID NO: 2520 - protein, 1164 aa, Arabidopsis thaliana
MKAPSSNGVSPNPVEGERRNINSELWHACAGPLISLPPAGSLVVYFPQGHSEQVAASMQKQTDFIPSYPNLPSKLICMLHNVTLNADPETDEVYAQMTLQPVNKYDRDALLASDMGLKLNRQPNEFFCKTLTASDTSTHGGFSVPRRAAEKIFPALDFSMQPPCQELVAKDIHDNTWTFRHIYRGQPKRHLLTTGWSVFVSTKRLFAGDSVLFIRDGKAQLLLGIRRANRQQPALSSSVISSDSMHIGVLAAAAHANANNSPFTIFYNPRAAPAEFVVPLAKYTKAMYAQVSLGMRFRMIFETEECGVRRYMGTVTGISDLDPVRWKNSQWRNLQIGWDESAAGDRPSRVSVWDIEPVLTPFYICPPPFFRPRFSGQPGMPDDETDMESALKRAMPWLDNSLEMKDPSSTIFPGLSLVQWMNMQQQNGQLPSAAAQPGFFPSMLSPTAALHNNLGGTDDPSKLLSFQTPHGGISSSNLQFNKQNQQAPMSQLPQPPTTLSQQQQLQQLLHSSLNHQQQQSQSQQQQQQQQLLQQQQQLQSQQHSNNNQSQSQQQQQLLQQQQQQQLQQQHQQPLQQQTQQQQLRTQPLQSHSHPQPQQLQQHKLQQLQVPQNQLYNGQQAAQQHQSQQASTHHLQPQLVSGSMASSVITPPSSSLNQSFQQQQQQSKQLQQAHHHLGASTSQSSVIETSKSSSNLMSAPPQETQFSRQVEQQQPPGLNGQNQQTLLQQKAHQAQAQQIFQQSLLEQPHIQFQLLQRLQQQQQQQFLSPQSQLPHHQLQSQQLQQLPTLSQGHQFPSSCTNNGLSTLQPPQMLVSRPQEKQNPPVGGGVKAYSGITDGGDAPSSSTSPSTNNCQISSSGFLNRSQSGPAILIPDAAIDMSGNLVQDLYSKSDMRLKQELVGQQKSKASLTDHQLEASASGTSYGLDGGENNRQQNFLAPTFGLDGDSRNSLLGGANVDNGFVPDTLLSRGYDSQKDLQNMLSNYGGVTNDIGTEMSTSAVRTQSFGVPNVPAISNDLAVNDAGVLGGGLWPAQTQRMRTYTKVQKRGSVGRSIDVNRYRGYDELRHDLARMFGIEGQLEDPQTSDWKLVYVDHENDILLVGDDPWEEFVNCVQSIKILSSAEVQQMSLDGNFAGVPVTNQACSGGDSGNAWRGHYDDNSATSFNR

SEQ ID NO: 2521 - DNA, 2436 bp, Arabidopsis thaliana
  CDS (1)..(2436)
atgaagctgtcaacatctggattgggtcaacagggtcatgaaggagagaagtgtctgaattctgagctatggcatgcttgtgctggaccattagtctctcttccatcatctggtagtcgagttgtttactttccacagggtcacagtgaacaggtagctgctacaactaataaggaagttgatggtcacatacccaattacccaagcctaccaccacaattgatatgccagctccataatgttacaatgcatgcagatgttgagacggatgaagtctatgctcaaatgacacttcaaccattgacaccggaggagcagaaggaaacatttgtaccgattgagttggggataccgagtaagcaacctagtaattatttttgtaagactctcacagctagtgataccagtacacatggagggttttctgttcctagacgtgctgctgagaaagtgtttcctccattggattacacactgcagccaccagctcaagaactgattgcaagggatctccatgatgttgaatggaagtttaggcatatctttcggggacagcccaaacggcatctcctaactactggatggagtgtctttgtcagtgccaagcgactagtagctggagattctgtcattttcatcaggaatgaaaagaatcaactctttttgggaattcgtcatgccactcggccgcagactattgtaccatcatctgttttatctagtgatagcatgcatattggactccttgctgctgctgcacatgcttctgcaactaatagctgtttcactgttttctttcatccaagggctagccaatctgagtttgtgatacaactttccaagtacattaaagccgtttttcacacgcgtatttcagttgggatgcgctttcgcatgctcttcgagacagaagagtcgagtgtccgcaggtacatgggtactataactggtattagtgatctagattctgttcgttggccaaactctcattggcgatctgtgaaggttggttgggatgaatcgactgcaggggagagacagccaagggtttctttatgggagattgagcctctgactacctttcctatgtatccatctctttttcctctcagactaaaacgtccatggcatgctggcacatcatctttgcctgatggaaggggtgatttgggaagtggtctaacatggctaagagggggaggtggagagcagcaaggtttgcttcctctaaattatccatctgttggtttgtttccatggatgcaacaaaggctggatctcagtcaaatggggactgataataatcagcaataccaagcaatgttagctgctgggttgcagaacatcggcggtggagatcctttaagacagcagtttgtacagctgcaagagcctcaccaccaatatcttcaacaatcagcttcccataattctgatttgatgcttcagcagcaacagcagcaacaagcgtcacgccatctcatgcatgctcaaacacagattatgagtgagaatcttccgcagcagaatatgcgacaagaagttagtaaccaaccagctggacagcagcaacagctacagcaaccggaccaaaatgcatatcttaatgctttcaaaatgcaaaatggccatcttcaacagtggcagcagcaatcagagatgccatctccctcgttcatgaagtcagattttactgactcaagcaacaaatttgcaacaactgctagtccggcttctggagatggcaatcttttgaatttttctataaccggtcagtctgtactccctgagcagttaacaacagagggctggtctccaaaagcatccaacactttttctgaaccgttgtcacttccacaagcctatcctgggaagagtcttgctctagaacccggaaatccgcagaatccctctcttttcggtgttgatcccgactctggactcttcctccccagtacggttccccgctttgcttcttcatcaggagatgctgaagcttcccctatgtcactaacagattcaggatttcagaattccttatatagctgcatgcaagacacaactcatgagttattgcatggagctggacagattaactcgtccaaccaaaccaagaactttgtaaaggtttataaatctggttcggttgggcgttcattagacatctcccgattcagcagctaccacgagctgcgagaagagttagggaagatgtttgctatcgaagggttgttggaagacccccttagatcaggctggcagcttgtattcgttgacaaggaaaatgatattcttctccttggtgatgacccatgggagtcatttgtgaataacgtttggtacataaagatactatcaccagaagatgtgcatcaaatgggagatcatggagaaggcagtggtgggttattcccgcaaaacccgacccatctctag

SEQ ID NO: 2522 - protein, 811 aa, Arabidopsis thaliana
MKLSTSGLGQQGHEGEKCLNSELWHACAGPLVSLPSSGSRVVYFPQGHSEQVAATTNKEVDGHIPNYPSLPPQLICQLHNVTMHADVETDEVYAQMTLQPLTPEEQKETFVPIELGIPSKQPSNYFCKTLTASDTSTHGGFSVPRRAAEKVFPPLDYTLQPPAQELIARDLHDVEWKFRHIFRGQPKRHLLTTGWSVFVSAKRLVAGDSVIFIRNEKNQLFLGIRHATRPQTIVPSSVLSSDSMHIGLLAAAAHASATNSCFTVFFHPRASQSEFVIQLSKYIKAVFHTRISVGMRFRMLFETEESSVRRYMGTITGISDLDSVRWPNSHWRSVKVGWDESTAGERQPRVSLWEIEPLTTFPMYPSLFPLRLKRPWHAGTSSLPDGRGDLGSGLTWLRGGGGEQQGLLPLNYPSVGLFPWMQQRLDLSQMGTDNNQQYQAMLAAGLQNIGGGDPLRQQFVQLQEPHHQYLQQSASHNSDLMLQQQQQQQASRHLMHAQTQIMSENLPQQNMRQEVSNQPAGQQQQLQQPDQNAYLNAFKMQNGHLQQWQQQSEMPSPSFMKSDFTDSSNKFATTASPASGDGNLLNFSITGQSVLPEQLTTEGWSPKASNTFSEPLSLPQAYPGKSLALEPGNPQNPSLFGVDPDSGLFLPSTVPRFASSSGDAEASPMSLTDSGFQNSLYSCMQDTTHELLHGAGQINSSNQTKNFVKVYKSGSVGRSLDISRFSSYHELREELGKMFAIEGLLEDPLRSGWQLVFVDKENDILLLGDDPWESFVNNVWYIKILSPEDVHQMGDHGEGSGGLFPQNPTHL

SEQ ID NO: 2523 - DNA, 1917 bp, Arabidopsis thaliana
  CDS (1)..(1917)
atggcaaatcgcggaggtgaatatctgtacgatgagttatggaaattatgcgcgggacctcttgttgatgttcctcaagctcaagaaagagtttattattttcctcaaggtcacatggaacaactcgaagcgtcaacgcaacaagtcgacttaaatacgatgaagcctctttttgttcttccccctaagattctctgcaatgttatgaacgttagtcttcaggcggagaaagatacggatgaggtctatgctcagattactttgatccctgttggaactgaagttgatgaacccatgagtcctgatccctctcctcctgagttgcaaaggccgaaagttcactctttcagcaaggttttgacagcgtctgatacaagcacccatggtggcttttctgttctaaggaaacatgccacggaatgtcttcctccgctggatatgactcagcaaaccccgacccaggagttagtagccgaagatgtgcacggttatcagtggaaattcaagcatatttttagaggccaaccacggaggcatctattgacgacagggtggagcacctttgttacatcaaagagattggttgctggggacacctttgtattcctgagaggggagaacggagagttgcgagttggagtcagacgtgctaatcttcaacagagcagtatgccttcatccgttatatcaagtcatagtatgcatctgggagtgcttgctactgcacgccatgctactcaaacgaaaactatgttcattgtatactataaaccaaggacaagccaattcatcattagcttgaacaaatatctagaagccatgagcaataagttctctgtagggatgagatttaagatgcgttttgagggagaggattcccctgaaagaagatattctggcacggttattggtgtgaaagactgctcccctcactggaaagactcaaaatggcgatgcttagaagttcattgggatgagcctgcatcgatttcaagacccaataaggtttcaccatgggaaattgaaccgtttgtaaattcagaaaacgttcccaaatcagttatgctgaagaacaaaaggccccgtcaagttagtgaagtatctgcacttgatgtaggcataacagcttcaaacctttggagctctgttttgacgcaaccccatgagtttgcacaatcgtgcatcacctcacagtggagttctcctcagcaatgtcatcgtgatgcaaatgaggatgctaagaaatctgactggctaaataactcttactctgtgtcaaatgtagcaaaagactcaacactgaacgaccaaatggtttccccagtcgagcagaagaagcctgagacaaccgctaattatagattatttggaattgatctgatgagttcctccctagcggttcctgaggagaaaactgcacccatgcgaccaatcaacatatccaaaccgactatggacagccactcagacccaaaatcagagatttcaaaagtatcagaagagaaaaagcaggaacctgcggagggatcaccaaaagaggtccaaagcaagcaaagcagttctacaagaagccgtaccaaggtgcagatgcaaggcgtacctgtgggcagggctgtggatttaaatgcgctaaaggggtacaacgagctcatagatgacattgagaagctgtttgacataaaaggggaactgcggagtcgcaatcaatgggaaatagtgttcacagacgatgagggagatatgatgcttgtcggtgatgacccatggcctgagttctgcaacatggtgaagagaatattcatatggtcgaaagaggaagtgaagaaaatgacgcctgggaaccaactccggatgctgttaagggaagttgaaacaacactaacaacaacttccaaaacagataatcattccaactaa

SEQ ID NO: 2524 - protein, 638 aa, Arabidopsis thaliana
MANRGGEYLYDELWKLCAGPLVDVPQAQERVYYFPQGHMEQLEASTQQVDLNTMKPLFVLPPKILCNVMNVSLQAEKDTDEVYAQITLIPVGTEVDEPMSPDPSPPELQRPKVHSFSKVLTASDTSTHGGFSVLRKHATECLPPLDMTQQTPTQELVAEDVHGYQWKFKHIFRGQPRRHLLTTGWSTFVTSKRLVAGDTFVFLRGENGELRVGVRRANLQQSSMPSSVISSHSMHLGVLATARHATQTKTMFIVYYKPRTSQFIISLNKYLEAMSNKFSVGMRFKMRFEGEDSPERRYSGTVIGVKDCSPHWKDSKWRCLEVHWDEPASISRPNKVSPWEIEPFVNSENVPKSVMLKNKRPRQVSEVSALDVGITASNLWSSVLTQPHEFAQSCITSQWSSPQQCHRDANEDAKKSDWLNNSYSVSNVAKDSTLNDQMVSPVEQKKPETTANYRLFGIDLMSSSLAVPEEKTAPMRPINISKPTMDSHSDPKSEISKVSEEKKQEPAEGSPKEVQSKQSSSTRSRTKVQMQGVPVGRAVDLNALKGYNELIDDIEKLFDIKGELRSRNQWEIVFTDDEGDMMLVGDDPWPEFCNMVKRIFIWSKEEVKKMTPGNQLRMLLREVETTLTTTSKTDNHSN

SEQ ID NO: 2525 - DNA, 2082 bp, Arabidopsis thaliana
  CDS (1)..(2082)
atggagcaagagaaaagcttggatccacaactatggcatgcttgtgcaggatcaatggttcaaatcccttcactgaattcaacggttttttacttcgctcaaggccacacagagcacgctcacgcgcctcctgattttcacgcgccgcgcgttccacctcttatcctctgtcgtgtcgtctccgtgaagttcctcgccgacgctgaaacagacgaagtttttgctaaaattacgcttttgccacttccgggaaacgacttggatctagaaaacgacgccgttttgggtctaactcctccttcttctgacggtaacggtaacggtaaagagaaaccggcgtctttcgctaaaacgttaacgcagtctgacgctaataacggcggtggtttctccgttccacgttattgcgccgagacgattttcccgcggcttgattactcggcggagccaccggttcaaaccgtgattgctaaagacatccacggcgagacttggaaattccggcatatttacagaggaacacctcgccgtcatctcctaaccaccggttggagcactttcgttaaccagaagaaactaatcgccggagactcaatcgtcttcctccgttctgaatccggtgacctctgcgtcggaatccgccgcgctaaacgcggcggtctcggatctaacgcaggatccgacaatccttaccctggattctccggtttcctccgtgacgacgagtcaacaacaacaacatcgaagctaatgatgatgaaacgcaacggaaacaacgacggaaacgccgcggctacagggagggttagagtagaagcagtagcggaagcggtggcgcgtgcagcgtgtggacaagcgtttgaggttgtttattatccacgcgctagtacaccggagttttgcgtaaaagcagctgatgttagatcagcaatgaggataagatggtgtagtggtatgcgttttaaaatggcgtttgaaacagaggattcttctagaatcagttggtttatgggtactgtctccgccgttcaagtcgctgatccaattcgttggcctaattcaccatggcgtctccttcaggtagcttgggacgaaccggatttgttacaaaacgttaagcgggttagtccgtggttagtcgaattggtatcgaacatgcctacaatacatttatctccattctctccgaggaagaagattaggattccgcagccatttgagtttccattccacggtactaaattcccgattttctccccgggattcgccaacaatggcggtggcgagtccatgtgttatctgtcaaacgacaacaataatgctcctgcaggaatacagggagccaggcaagctcaacaactcttcggatcaccatctccgtctttgttgtctgatctcaatcttagtagttacaccggtaacaacaagttacattctccggcgatgtttctatcgagtttcaacccgaggcatcatcattatcaggctagggatagtgagaatagtaataacatttcgtgttctttaactatggggaatcctgctatggttcaggataagaagaagtctgttggttcggttaagactcatcagttcgtgttgttcggtcaaccgattttaaccgaacagcaagttatgaaccgaaaacggtttttggaagaagaggcggaagcggaggaggagaaaggtttagtggctcgtgggttaacatggaattatagtttgcaaggacttgagacgggtcattgtaaagttttcatggaatctgaggatgttggacgcacactcgatctctcggttattggctcgtaccaagaattgtaccggaaattggctgagatgtttcatatagaagagaggtcggatttgttgactcatgttgtgtaccgggatgcaaatggtgttatcaaacgtattggagacgaacctttcagtgatttcatgaaagcaactaaacggctaacaatcaagatggatattggtggcgacaacgtgagaaagacgtggataaccggaatcaggactggtgaaaatggtatagacgcttctacgaagactggtccgctcagcatcttcgcttga

SEQ ID NO: 2526 - protein, 693 aa, Arabidopsis thaliana
MEQEKSLDPQLWHACAGSMVQIPSLNSTVFYFAQGHTEHAHAPPDFHAPRVPPLILCRVVSVKFLADAETDEVFAKITLLPLPGNDLDLENDAVLGLTPPSSDGNGNGKEKPASFAKTLTQSDANNGGGFSVPRYCAETIFPRLDYSAEPPVQTVIAKDIHGETWKFRHIYRGTPRRHLLTTGWSTFVNQKKLIAGDSIVFLRSESGDLCVGIRRAKRGGLGSNAGSDNPYPGFSGFLRDDESTTTTSKLMMMKRNGNNDGNAAATGRVRVEAVAEAVARAACGQAFEVVYYPRASTPEFCVKAADVRSAMRIRWCSGMRFKMAFETEDSSRISWFMGTVSAVQVADPIRWPNSPWRLLQVAWDEPDLLQNVKRVSPWLVELVSNMPTIHLSPFSPRKKIRIPQPFEFPFHGTKFPIFSPGFANNGGGESMCYLSNDNNNAPAGIQGARQAQQLFGSPSPSLLSDLNLSSYTGNNKLHSPAMFLSSFNPRHHHYQARDSENSNNISCSLTMGNPAMVQDKKKSVGSVKTHQFVLFGQPILTEQQVMNRKRFLEEEAEAEEEKGLVARGLTWNYSLQGLETGHCKVFMESEDVGRTLDLSVIGSYQELYRKLAEMFHIEERSDLLTHVVYRDANGVIKRIGDEPFSDFMKATKRLTIKMDIGGDNVRKTWITGIRTGENGIDASTKTGPLSIFA

SEQ ID NO: 2527 - DNA, 2276 bp, Arabidopsis thaliana
  CDS (173)..(1978)
gttaaagaaacgagagtttttcagctctttacttaccttttcttcttacccttctttcatgactcttcttctttgatgggttaataatgctttgagcttgatgatttcgattttagtttcctgttagtgtttgttttcttctgtaaagcttggattttttttggtttcttcgatggcgaatgtggaagctgatttcagaacatcagggtctaatgatgatgaattgtacacggagctatggaaagcttgtgcagggccacttgtggaagttcctcgttatggtgaaagagttttctacttccctcaaggtcacatggaacaattggttgcttcgactaatcaaggagttgttgatcaagagataccagtgtttaatcttcctccaaagatactttgtcgtgttcttagtgttacgttaaaagcagaacatgagaccgatgaggtttacgctcagatcacattacaaccagaagaagatcaaagtgaaccaacaagtcttgacccacctttagtagaaccagctaaaccaacggttgattcttttgtgaagattctaacagcttcagatacaagcacacatggtggattctctgttcttcgtaaacacgccactgagtgtttaccttcacttgatatgacacaacctacaccgactcaagaacttgtagctagagatcttcacggctatgaatggaggtttaagcatatatttagagggcaaccgaggaggcatttacttacaaccggttggagtacatttgtaacctcgaaaagacttgtagctggagatgcatttgtgttcttgaggggtgaaaccggggatttacgggttggtgtgaggcgtttagctaagcagcaaagcacgatgcccgcatccgttatttcgagtcagagtatgcgtttgggagttcttgctacagcttctcatgctgttaccacaacaactatatttgttgtcttctataaaccaaggataagccagtttataattagtgtgaacaagtatatgatggcgatgaagaacgggttttctctcggtatgcggtataggatgagattcgaaggagaagagtctcctgagagaatatttacaggtaccattattggcagtggagatctatcttctcaatggccagcttccaaatggaggtcattgcagatccaatgggacgagccatcttctatacagagaccaaacaaggtctcaccgtgggagatcgagcctttctcaccatccgcgcttacaccaacccctactcaacaacaatcaaagtccaaacggtccagaccaatctcagaaatcacagggagtcctgtagcttctagtttcttgagtagtttctcgcagagccacgagtctaatccatcggtcaaactgttgtttcaagatccagcaaccgagagaaactcaaacaaatcagtgttttcaagtggattacaatgcaagataaccgaggctccggtcacaagtagttgtaggttattcggattcgatctcacgagcaagcctgcttctgctacaattcctcatgacaagcagctaataagtgtggattcaaatatatctgattctaccaccaagtgtcaagatcctaactcttcaaactcaccaaaagagcagaaacaacaaacatccacaagaagccgaatcaaggtgcaaatgcaaggaacagcggttggacgcgcggttgatttaacattgttgagatcatacgatgaactaataaaagagctagagaaaatgtttgagattgaaggagaacttagtcctaaagacaaatgggctatcgtgtttacagacgatgaaggagataggatgcttgtaggagatgatccatggaatgagttctgtaaaatggcaaagaagttattcatatatccgagtgatgaggtcaagaaaatgaggtcgaagtcgttgttgggtgataaaggtacgatcgtaaatcttgaatcagatcagaggacagttcacgtttaactatcaagttgttgatttcttactttcttggagactctctcaagtctcaccaagtccgagagttaggtggtttttttttttttggttttttttttggcgttaggtgggtttgttatttacttgtttaacataaagactataaaatatacagttattatatacgagtatatcgtattaggtttcaaacgacgtcgtttatgtaaagtgtttgcttttccgacgtggctttcgtcgtcatgactaatgaatgatgtgttagcaataacttaaaaaaggtcatatttttctaaaaaaaaaa

SEQ ID NO: 2528 - protein, 601 aa, Arabidopsis thaliana
MANVEADFRTSGSNDDELYTELWKACAGPLVEVPRYGERVFYFPQGHMEQLVASTNQGVVDQEIPVFNLPPKILCRVLSVTLKAEHETDEVYAQITLQPEEDQSEPTSLDPPLVEPAKPTVDSFVKILTASDTSTHGGFSVLRKHATECLPSLDMTQPTPTQELVARDLHGYEWRFKHIFRGQPRRHLLTTGWSTFVTSKRLVAGDAFVFLRGETGDLRVGVRRLAKQQSTMPASVISSQSMRLGVLATASHAVTTTTIFVVFYKPRISQFIISVNKYMMAMKNGFSLGMRYRMRFEGEESPERIFTGTIIGSGDLSSQWPASKWRSLQIQWDEPSSIQRPNKVSPWEIEPFSPSALTPTPTQQQSKSKRSRPISEITGSPVASSFLSSFSQSHESNPSVKLLFQDPATERNSNKSVFSSGLQCKITEAPVTSSCRLFGFDLTSKPASATIPHDKQLISVDSNISDSTTKCQDPNSSNSPKEQKQQTSTRSRIKVQMQGTAVGRAVDLTLLRSYDELIKELEKMFEIEGELSPKDKWAIVFTDDEGDRMLVGDDPWNEFCKMAKKLFIYPSDEVKKMRSKSLLGDKGTIVNLESDQRTVHV

SEQ ID NO: 2529 - DNA, 1782 bp, Arabidopsis thaliana
  CDS (1)..(1782)
atggaaagtggcaacgttgtgaatgcacaacctgaattatcaggcataattgatggatccaagagctatgtttacgagcagttatggaaactctgtgcgggacctttgtgtgatattccaaaacttggagaaaaggtttattactttcctcaaggtcacatagagcttgttgagacatctacaagagaagagttgaatgagttacaaccaatttgtgatcttccttctaagcttcaatgtcgtgttattgctattcatcttaaggtggaaaacaatagtgatgagacttatgctgagatcactttgatgccagatacaactcaagttgtaatccctactcagaatgaaaatcaatttagaccattagttaattcctttacgaaggttttaacggcctcagatacaagcgctcatggtggattctttgtaccgaaaaaacatgccattgaatgtctcccttcgctggatatgtctcaacctttacctgcacaagaacttcttgctatagatctccatggtaatcaatggagattcaaccacaactatagaggtacaccgcaaagacatttgttaacaactggttggaatgcattcacaacatcaaaaaaattggttgcaggggatgtcatcgtattcgttaggggagagactggagagttacgagttggtatcagacgagcaagacatcaacaagggaatataccttcatcaatagtatcaatagattgtatgagacatggggtagttgcttccgcaaagcatgcttttgataaccaatgtatgttcactgtggtttacaagccaaggtcaagtaaatttattgtcagttacgacaaattcttggacgctgtgaacaataagttcaatgtcggttcaagatttacaatgcggttagagggtgatgatttctctgaaagaagatgttttgggacaattattggagttagtgatttctctcctcattggaaatgttcagagtggcgcagcttagaagtgcagtgggatgaatttacatcatttccgggacctaaaaaagtgtcaccctgggacatcgaacatttaatgcctgcaataaatgttccgcgatcatttttgctcaagaacaagcgtttacgagaagttaatgaaatcggttcttcatcatcacatctcttacctcctatattgacacaaggacaagaaaatgaacaactaagtgttgcctctccgatgaatatttctcttcgttatcgtgatgcaactgaagatgctatgaatccttctaaattgctaatgagctaccctgtccaaccaatgcccaaactaaattacaataaccaaatggttacagaaatggaagaaaatataacaaccaagacaggcactaattttaggctgtttggagtcactctggacactcctccggtgatcaaagatcccattgaagaaattggctcggagatttcgaaacttactgaaggaaaaaagtttggtctaagccaaactttaagatcaccaacagagatccaaaacaagcagttcagttctagtagaacttgtaccaaagttcaaatgcaaggtgtaacaataggaagagctgtggatttaagtgttcttaatggatatgatcagctaatactagaattggagaagctctttgatatcaaaggtcaattgcaaactcgcaaccaatgggaaatagctttcacagatagtgacgaagataagatgcttgttggagacgatccatggcctgaattctgcaacatggtgaagaagatattcattcaaaagaggaggtaa

SEQ ID NO: 2530 - protein, 593 aa, Arabidopsis thaliana
MESGNVVNAQPELSGIIDGSKSYVYEQLWKLCAGPLCDIPKLGEKVYYFPQGHIELVETSTREELNELQPICDLPSKLQCRVIAIHLKVENNSDETYAEITLMPDTTQVVIPTQNENQFRPLVNSFTKVLTASDTSAHGGFFVPKKHAIECLPSLDMSQPLPAQELLAIDLHGNQWRFNHNYRGTPQRHLLTTGWNAFTTSKKLVAGDVIVFVRGETGELRVGIRRARHQQGNIPSSIVSIDCMRHGVVASAKHAFDNQCMFTVVYKPRSSKFIVSYDKFLDAVNNKFNVGSRFTMRLEGDDFSERRCFGTIIGVSDFSPHWKCSEWRSLEVQWDEFTSFPGPKKVSPWDIEHLMPAINVPRSFLLKNKRLREVNEIGSSSSHLLPPILTQGQENEQLSVASPMNISLRYRDATEDAMNPSKLLMSYPVQPMPKLNYNNQMVTEMEENITTKTGTNFRLFGVTLDTPPVIKDPIEEIGSEISKLTEGKKFGLSQTLRSPTEIQNKQFSSSRTCTKVQMQGVTIGRAVDLSVLNGYDQLILELEKLFDIKGQLQTRNQWEIAFTDSDEDKMLVGDDPWPEFCNMVKKIFIQKRR

SEQ ID NO: 2531 - DNA, 1818 bp, Arabidopsis thaliana
  CDS (1)..(1818)
atggaaagtggcaacgttgtgaatacacaacctgaattatcaggcataattgatggatccaagagttatatgtacgagcagttatggaaactctgtgcgggacctttgtgtgatattccaaaacttggagaaaaggtttattactttcctcaaggccatatagagcttgttgaggcatctacaagagaagagttgaatgagttacaaccaatttgtgattttccttctaagcttcaatgtcgtgttattgctattcaacttaaggtggaaaacaatagtgatgagacttatgctgagatcactttgatgccagatacaactcaagttgtaatccctactcagaatcaaaatcaatttaggccattagttaattcctttacgaaggttttaacggcctcagatacaagcgttcatggtggattctctgttccgaaaaaacatgccattgaatgtctccctccgctggatatgtcacagcctctaccgacacaagaaattcttgctatagatcttcatggtaatcaatggagattcagacacatctatagaggtacagcgcaaagacatttgttaacaattggttggaatgcattcacaacatcaaaaaaattggttgaaggagatgttattgtattcgttaggggagagactggagagttacgagttggtatcagacgagcaggacatcaacaagggaatataccttcatcaatagtatcaatagaaagtatgagacatgggataattgcttctgcaaagcatgcttttgataaccaatgtatgttcattgtggtttacaagccaaggtcaagtcaatttattgtcagttacgacaaattcttagacgttgtgaacaataagttcaatgtcggttcaagatttacaatgcggtttgagggtgatgatttctctgaaagaagatcttttgggacaattattggagttagtgatttctctcctcattggaagtgttcagagtggcgcagcttagaagtgcagtgggatgaatttgcatcatttccgagaccaaaccaagtttcaccatgggacatcgaacatttaacgccttggtcaaatgtttccaggtcatcttttctcaagaacaagcgttcacgagaagttaatgaaatcggttcttcctcatcacatctcttgcctcctacattgacacaaggacaagaaattggacaacaaagcatggccaccccgatgaatatttctcttcgttatcgtgatattactgaagatgctatgactccttctagattgctaatgagctaccctgtccaaccaatggccaaactaaattacaataatgtggttacaccaatagaagaaaatataacaaccaatgcagtcgctagttttaggttgtttggagtctctctggccactccttcggtgatcaaagatcccgttgaacaaattggcttggagatttctagacttactcaggaaaaaaagtttggtcaaagccaaattttgagatcaccaacagagatccaaagcaagcagttcagttctaccagaacttgtaccaaagttcaaatgcaaggtgtaacaataggaagagctgtggatttaagtgttcttaatggatatgatcagttaatactagaattggagaagctcttcgatctcaaaggccaattgcaagctcgcaaccaatgggaaatagctttcacaaataatgaagaggataagatgcttgttggagaagatccatggcctgaattctgcaacatggtgaagaagatattcatatattcaaaagaggaggtcaaaaacttgaagtccaggaagagtctctcaagttga

SEQ ID NO: 2532 - protein, 605 aa, Arabidopsis thaliana
MESGNVVNTQPELSGIIDGSKSYMYEQLWKLCAGPLCDIPKLGEKVYYFPQGHIELVEASTREELNELQPICDFPSKLQCRVIAIQLKVENNSDETYAEITLMPDTTQVVIPTQNQNQFRPLVNSFTKVLTASDTSVHGGFSVPKKHAIECLPPLDMSQPLPTQEILAIDLHGNQWRFRHIYRGTAQRHLLTIGWNAFTTSKKLVEGDVIVFVRGETGELRVGIRRAGHQQGNIPSSIVSIESMRHGIIASAKHAFDNQCMFIVVYKPRSSQFIVSYDKFLDVVNNKFNVGSRFTMRFEGDDFSERRSFGTIIGVSDFSPHWKCSEWRSLEVQWDEFASFPRPNQVSPWDIEHLTPWSNVSRSSFLKNKRSREVNEIGSSSSHLLPPTLTQGQEIGQQSMATPMNISLRYRDITEDAMTPSRLLMSYPVQPMAKLNYNNVVTPIEENITTNAVASFRLFGVSLATPSVIKDPVEQIGLEISRLTQEKKFGQSQILRSPTEIQSKQFSSTRTCTKVQMQGVTIGRAVDLSVLNGYDQLILELEKLFDLKGQLQARNQWEIAFTNNEEDKMLVGEDPWPEFCNMVKKIFIYSKEEVKNLKSRKSLSS

SEQ ID NO: 2533 - DNA, 2013 bp, Arabidopsis thaliana
  CDS (1)..(2013)
atgataaatgtgatgaatccaatgaaaggtggaacagagaaaggtttagatcctcagctatggcatgcatgtgctggtggtatggttcgtatgcctcctatgaactctaaagtcttttactttcctcaaggtcacgccgaaaacgcttacgattgtgtcgatttcggtaatctccctattcctcccatggttttgtgtcgtgttttagccattaagtatatggctgatgctgaatctgacgaggttttcgctaaactgagattgattcctttgaaagatgatgagtatgttgatcacgagtatggtgatggtgaagatagtaacggtttcgagagtaatagtgagaaaacgccttcgtttgctaagactttgactcagtctgatgctaataacggtgggggtttctctgttcctcgttattgcgctgagacgattttcccgaggttggattataacgccgagccgccggttcagaccattcttgctaaggatgttcatggtgatgtttggaagttcagacatatttatagagggacgcctcggcgtcaccttcttacaaccggatggagtaattttgtaaaccagaagaagcttgtggcgggagattcgattgtcttcatgagagcggagaatggagatctttgtgtaggtattaggagggctaagagaggagggataggtaatggacccgaatattcagcgggttggaatccgatcggtggaagttgcggctactcttctctgttaagggaagatgaaagcaatagtttgaggagaagtaattgttcccttgcggataggaaggggaaagtgacggctgaatctgttatagaagcagccactcttgctattagcggaagaccgtttgaggttgtgtactatccgagagctagcacttcagagttttgtgtcaaggcattagatgctcgagctgccatgcggattccgtggtgctcaggtatgaggtttaagatggcttttgagacagaggattcgtctcggataagttggtttatggggactgtttcagctgttaatgtctctgatcctatccgttggcctaactctccttggcggcttctacaggtggcgtgggatgagccagatttactccaaaacgtgaagcgagttaacccgtggttggtggaattggtatcaaacgtacatccgatcccgcttacttcgttttcgccaccgaggaaaaagatgcggctacctcagcatccagattacaacaatctgatcaattcgattccagtaccttcattcccaagcaatccccttattagatcaagcccgttaagctctgttctggacaatgttcccgtgggtttacagggagccaggcataatgctcatcagtactacgggttatcatcttcggatcttcaccattactacttgaatagaccacctcctcctcctcctccatcctctctccaactttctccttctctcggtctccgaaacatcgataccaaaaacgaaaaaggattttgctttttgacaatgggaacaacaccatgcaatgataccaaatctaaaaagtcccatattgtattgttcggcaagcttatactacccgaggaacagctatcagaaaaaggctcaacggataccgcaaacatagagaaaacgcagatttcatcaggcgggtcgaaccaaaacggcgttgcgggaagggagttttcttcgtcagatgaaggatcaccttgctctaagaaagttcatgatgcatcaggtttggaaacagggcattgtaaagtgtttatggagtcagacgatgtaggtcgaaccttagacctatcggttcttggttcatacgaagaattgagtcggaaactctctgacatgtttggaatcaaaaagtctgagatgttaagctctgttctctatagggatgcatcaggagccatcaaatacgcaggaaacgaacctttcagtgagttcttgaagacagctcgaagattgacaattctgacggaacaaggaagtgagagcgttgtagtataa

SEQ ID NO: 2534 - protein, 670 aa, Arabidopsis thaliana
MINVMNPMKGGTEKGLDPQLWHACAGGMVRMPPMNSKVFYFPQGHAENAYDCVDFGNLPIPPMVLCRVLAIKYMADAESDEVFAKLRLIPLKDDEYVDHEYGDGEDSNGFESNSEKTPSFAKTLTQSDANNGGGFSVPRYCAETIFPRLDYNAEPPVQTILAKDVHGDVWKFRHIYRGTPRRHLLTTGWSNFVNQKKLVAGDSIVFMRAENGDLCVGIRRAKRGGIGNGPEYSAGWNPIGGSCGYSSLLREDESNSLRRSNCSLADRKGKVTAESVIEAATLAISGRPFEVVYYPRASTSEFCVKALDARAAMRIPWCSGMRFKMAFETEDSSRISWFMGTVSAVNVSDPIRWPNSPWRLLQVAWDEPDLLQNVKRVNPWLVELVSNVHPIPLTSFSPPRKKMRLPQHPDYNNLINSIPVPSFPSNPLIRSSPLSSVLDNVPVGLQGARHNAHQYYGLSSSDLHHYYLNRPPPPPPPSSLQLSPSLGLRNIDTKNEKGFCFLTMGTTPCNDTKSKKSHIVLFGKLILPEEQLSEKGSTDTANIEKTQISSGGSNQNGVAGREFSSSDEGSPCSKKVHDASGLETGHCKVFMESDDVGRTLDLSVLGSYEELSRKLSDMFGIKKSEMLSSVLYRDASGAIKYAGNEPFSEFLKTARRLTILTEQGSESVVV

SEQ ID NO: 2535 - DNA, 3261 bp, Arabidopsis thaliana
  CDS (1)..(3261)
atgaaagctccatcaaatggatttcttccaagttccaacgaaggagagaagaagccaatcaattctcaactatggcacgcttgtgcagggcctttagtttcattacctcctgtgggaagtcttgtggtttacttccctcaaggacacagcgagcaagttgcagcatcgatgcagaagcaaacagattttataccaaattacccaaatcttccttctaagctgatttgcttgcttcacagtgttacattacatgctgataccgaaacagatgaagtctatgcacaaatgactcttcaacctgtgaataagtatgatagagaagcattgctagcttctgatatgggcttgaagctaaacagacaacctactgagtttttttgcaagactcttactgcaagtgacacaagcactcatggtggattctctgtaccgcgtcgtgcagctgagaaaatattccctcctcttgatttctcgatgcaaccgcctgcgcaagagattgtagctaaagatttacatgatactacatggactttcagacatatctatcgaggccaaccaaaaagacacttgcttaccacaggttggagcgtttttgttagcacaaagagactatttgcgggtgattcagttttgtttgtaagagatgagaaatcacagctgatgttgggtataagacgtgcaaatagacaaactccgactctttcctcatcggtcatatccagcgacagtatgcacattgggatacttgcagctgcagctcatgctaatgccaatagtagcccttttaccatcttcttcaatccaagggcaagtccttcagagtttgtagttcctttagccaaatacaacaaagccttatacgctcaagtatctctaggaatgagattccggatgatgtttgagactgaggattgtggggttcgtagatatatgggtacagtcacaggtattagtgatcttgaccctgtaagatggaaaggctcacaatggcgtaatcttcaggtaggatgggatgaatcaacagctggagataggccaagccgagtatccatatgggaaatcgaacccgtcataactcctttttacatatgtcctcctccatttttcagacctaagtacccgaggcaacccgggatgccagatgatgagttagacatggaaaatgctttcaaaagagcaatgccttggatgggagaagactttgggatgaaggacgcacagagttcgatgttccctggtttaagtctagttcaatggatgagtatgcagcaaaacaatccattgtcaggttctgctactcctcagctcccgtccgcgctctcatcttttaacctaccaaacaattttgcttccaacgacccttccaagctgttgaacttccaatccccaaacctctcttccgcaaattcccaattcaacaaaccgaacacggttaaccatatcagccaacagatgcaagcacaaccagccatggtgaaatctcaacaacaacaacaacaacaacaacaacaacaccaacaccaacaacaacaactgcaacaacaacaacaactacagatgtcacagcaacaggtgcagcaacaagggatttataacaatggtacgattgctgttgctaaccaagtctcttgtcaaagtccaaaccaacctactggattctctcagtctcagcttcagcagcagtcaatgctccctactggtgctaaaatgacacaccagaacataaattctatggggaataaaggcttgtctcaaatgacatcgtttgcgcaagaaatgcagtttcagcagcaactggaaatgcataacagtagccagttattaagaaaccagcaagaacagtcctctctccattcattacaacaaaatctgtcccaaaatcctcagcaactccaaatgcaacaacaatcatcaaaaccaagtccttcacaacagcttcagttgcagctactgcagaagctacagcagcagcaacagcagcagtcgattcctccagtaagctcatccttacagccacaattatcagcgttgcagcagacacaaagccatcaattgcaacaacttctgtcgtctcaaaatcaacagcccttggcacatggtaataacagcttcccagcttcaactttcatgcagcctccacagattcaggtgagtcctcagcagcaaggacagatgagtaacaaaaatcttgtagccgctggaagatcacattctggccacacagatggagaagctccttcttgttcaacctcaccttccgccaataacacgggacatgataatgtttcaccgacaaatttcctgagcagaaatcaacagcaaggacaagctgcatctgtatctgcatctgattcagtctttgagcgcgcaagcaatccggtccaagagctttatacaaaaactgagagccggatcagtcaaggcatgatgaatatgaagagtgctggtgaacatttcagatttaaaagcgcggtaacagatcaaatcgatgtatccacagcgggaacgacgtactgtcctgatgttgttggccctgtacagcagcaacaaactttcccactaccatcatttggttttgatggagactgccaatctcatcatccaagaaacaacttagctttccctggtaatctcgaagccgtaacttctgatccactctattctcaaaaggactttcaaaacttggttcccaactatggcaacacaccaagagacattgagacggagctgtccagtgctgcaatcagttctcagtcatttggtattcccagcattccctttaagcccggatgttcaaatgaggttggcggcatcaatgattcaggaatcatgaatggtggaggactgtggcccaatcagactcaacgaatgcgaacatatacaaaggttcaaaaacgagggtcagtaggtagatcaatagatgttacccgttatagcggctatgatgaacttaggcatgacttagcgagaatgtttggcatcgaaggacagctcgaagatccgctaacctctgattggaaactcgtctacaccgatcacgaaaacgatattttactagttggtgatgatccttgggaagagtttgtgaactgcgtgcagaacataaagatactatcatcagtagaagttcagcaaatgagcttagacggagatcttgcagctatcccaaccacaaaccaagcctgcagcgaaacagacagcggaaatgcttggaaagtacactatgaagacacttctgctgcagcttctttcaacagatag

SEQ ID NO: 2536 - protein, 1086 aa, Arabidopsis thaliana
MKAPSNGFLPSSNEGEKKPINSQLWHACAGPLVSLPPVGSLVVYFPQGHSEQVAASMQKQTDFIPNYPNLPSKLICLLHSVTLHADTETDEVYAQMTLQPVNKYDREALLASDMGLKLNRQPTEFFCKTLTASDTSTHGGFSVPRRAAEKIFPPLDFSMQPPAQEIVAKDLHDTTWTFRHIYRGQPKRHLLTTGWSVFVSTKRLFAGDSVLFVRDEKSQLMLGIRRANRQTPTLSSSVISSDSMHIGILAAAAHANANSSPFTIFFNPRASPSEFVVPLAKYNKALYAQVSLGMRFRMMFETEDCGVRRYMGTVTGISDLDPVRWKGSQWRNLQVGWDESTAGDRPSRVSIWEIEPVITPFYICPPPFFRPKYPRQPGMPDDELDMENAFKRAMPWMGEDFGMKDAQSSMFPGLSLVQWMSMQQNNPLSGSATPQLPSALSSFNLPNNFASNDPSKLLNFQSPNLSSANSQFNKPNTVNHISQQMQAQPAMVKSQQQQQQQQQQHQHQQQQLQQQQQLQMSQQQVQQQGIYNNGTIAVANQVSCQSPNQPTGFSQSQLQQQSMLPTGAKMTHQNINSMGNKGLSQMTSFAQEMQFQQQLEMHNSSQLLRNQQEQSSLHSLQQNLSQNPQQLQMQQQSSKPSPSQQLQLQLLQKLQQQQQQQSIPPVSSSLQPQLSALQQTQSHQLQQLLSSQNQQPLAHGNNSFPASTFMQPPQIQVSPQQQGQMSNKNLVAAGRSHSGHTDGEAPSCSTSPSANNTGHDNVSPTNFLSRNQQQGQAASVSASDSVFERASNPVQELYTKTESRISQGMMNMKSAGEHFRFKSAVTDQIDVSTAGTTYCPDVVGPVQQQQTFPLPSFGFDGDCQSHHPRNNLAFPGNLEAVTSDPLYSQKDFQNLVPNYGNTPRDIETELSSAAISSQSFGIPSIPFKPGCSNEVGGINDSGIMNGGGLWPNQTQRMRTYTKVQKRGSVGRSIDVTRYSGYDELRHDLARMFGIEGQLEDPLTSDWKLVYTDHENDILLVGDDPWEEFVNCVQNIKILSSVEVQQMSLDGDLAAIPTTNQACSETDSGNAWKVHYEDTSAAASFNR

SEQ ID NO: 2537 - DNA, 1821 bp, Arabidopsis thaliana
  CDS (1)..(1821)
atggaaagtggcaacattgtgaatgcacaacctaaattatcaggcataattgatggatccaagagctatatgtacgagcagttatggaaactctgtgcagggcctttgtgtgatattccaaaacttggagaaaatgtttattactttcctcaaggcaatatagagcttgttcaggcatctacaagagaagagttgaatgagttacaaccaatttgtgatcttccttctaagcttcaatgtcgtgttattgcaattcatcttaaggtggaaaacaatagtgatgagatttatgctgagatcactttgatgccagatacaactcaagttgtaatccctactcagagtgaaaatcgatttaggccattagttaattcctttacaaaggttttaacggcctcagatacaagcgcttatggtggattctctgttccgaaaaaacatgccattgaatgtctccctccgctggatatgtctcagcctctaccggcacaagaaattcttgctatagatctccatgataatcaatggagattcagacacaactatagaggtacaccgcaaagacattcgttaacaactggttggaatgaattcataacatcaaagaaattggttaaaggagatgttattgtattcgttaggggagagactggagagttacgagttggtatcagacgagcaagacatcaacaagggaatataccttcatcaatagtatcaatagattgtatgagacatggggtaattgcttccgcaaagcatgcttttgataaccaatgtatattcattgtggtttacaagccaaggtcaagtcaatttattgtcagttatgacaaattcttagacgctgtgaacaataagtttaatgtcggttcaagatttacaatgcggtttgagggtgatgatttctctgaaagaagatattttgggacaattattggagttagtgatttctctcctcattggaagtgttcagagtggcgcagcttagaagtgcagtgggatgaatttgcatcattttcgagacctaataaagtgtcaccctgggagatcgaacatttagtgcctgcgttaaatgttccgcgatcatctttgctcaagaacaagcgtttacgagaagttaatgaattcggttcttcatcatcacatctcttgcctcctatattgacacaaggacaagaaattggacaactaagcgtggcctccccgatgaatatttctcttcgttatcgtgatacaactgaagctgctatgaatccttctagattgctaatgagctaccctgtccaaccaatgcccaaactaaattacaataaccaaatggttacacaaatagaagaaaatataacaaccaaggcaggcactaattttaggctgtttggagtcactctggacactcctccgatgatcaaagatcccattaaacaaattggctcggatatttcgaaacttactgaaagaaaaaagtttggtcaaagccaaactttgagatcaccaatagagatccaaagcaagcagttcagttcttctaggacttgtaccaaagttcaaatgcaaggtgtaacaataggaagagctgtggatttaagtgttcttaatggatatgatcagctaatactagaattggagaagctctttgatatcaaaggccaattacaaactcgcaaccaatggaaaatagctttcacagatagtgacgggtatgagatgcttgttggagacgatccatggcctgaattctgcaaaatggtgaagaagatattgatatattcaaaagaggaggtcaaaaacctgaagtccagtaagagtctctcaagttga

SEQ ID NO: 2538 - protein, 606 aa, Arabidopsis thaliana
MESGNIVNAQPKLSGIIDGSKSYMYEQLWKLCAGPLCDIPKLGENVYYFPQGNIELVQASTREELNELQPICDLPSKLQCRVIAIHLKVENNSDEIYAEITLMPDTTQVVIPTQSENRFRPLVNSFTKVLTASDTSAYGGFSVPKKHAIECLPPLDMSQPLPAQEILAIDLHDNQWRFRHNYRGTPQRHSLTTGWNEFITSKKLVKGDVIVFVRGETGELRVGIRRARHQQGNIPSSIVSIDCMRHGVIASAKHAFDNQCIFIVVYKPRSSQFIVSYDKFLDAVNNKFNVGSRFTMRFEGDDFSERRYFGTIIGVSDFSPHWKCSEWRSLEVQWDEFASFSRPNKVSPWEIEHLVPALNVPRSSLLKNKRLREVNEFGSSSSHLLPPILTQGQEIGQLSVASPMNISLRYRDTTEAAMNPSRLLMSYPVQPMPKLNYNNQMVTQIEENITTKAGTNFRLFGVTLDTPPMIKDPIKQIGSDISKLTERKKFGQSQTLRSPIEIQSKQFSSSRTCTKVQMQGVTIGRAVDLSVLNGYDQLILELEKLFDIKGQLQTRNQWKIAFTDSDGYEMLVGDDPWPEFCKMVKKILIYSKEEVKNLKSSKSLSS

SEQ ID NO: 2539 - DNA, 1797 bp, Arabidopsis thaliana
  CDS (1)..(1797)
atggaaagtggcaacattgtgaatgcacaacctgaattatcaggcataattgatggatccaagagttatatgtacgagcagttatggaaactctgtgcggggcctttgtgtgatattccaaaacttggagaaaagatttattactttcctcaaggcaatatagagcttgttgaggcatctacaagagaagagttgaatgagttaaaaccaatttgtgatcttccttctaagcttcaatgtcgtgttattgctattcaacttaaggtggaaaacaatagtgatgagacttatgctgagatcactttgatgccagatacaactcaagttgtaatccctactcaaaatgaaaatcaatttagaccattagttaattcctttacgaaggttttaacggcctcggatacaagcggtggattctttgttccaaaaaaacatgccattgaatgtcttcctcccctggatatgtctcagcctctaccgacacaagaacttcttgctacagatctccatggtaatcaatggagattcaaccacaactatagaggtacaccgcaaagacatttgttaacaactggttggaatgcattcacaacatcaaaaaaattggttgcaggggatgttattgtattcgttaggggagagactggagagttacgagttggtatcagacgagcaggacatcaacaagggaatataccttcatcaataatatcaatagaaagtatgagacatggggtgattgcttccgcaaagcatgcttttgataaccaatgtatgttcattgtggtttacaagccaagatcaagtcaatttattgtcagttacgacaaattcttagatgctgtgaacaataagttcaatgttggttcaagatttacaatgcggtttgagggtgatgatttctctgaaagaagatattttgggacaattattggagttagtgatttctctcctcattggaagtgttcagagtggcgcaacttagaagtgcagtgggatgaatttgcatcattttcgagacctaataaagtgtcaccctgggagatcgaacatttaatgcctgcgttaaatgttccgcgaccatctttgctcaagaacaagcgtttacgagaagttaatgaaatcggttcttcatcatcacatctcttgcctcctatattgacacaaggacaagaaattggccaactaagcgtggcctccccgatgaatatttctctcacttatcgtgatacaactgaagatgttatgaatccttctagattgctaatgagctaccctgtccaaccaatgcccaaactaaattacaataaccaaatggttacacaaatagaagaaaatataacaaccaagactggcactaattttaggctgtttggagtctcactggtcactccttcagtgatcaaagatcccattgaagaaattggctcggagatttcgaaacttactgaaggaaaaaagtttggtcaaagccaaactttgagatcaccaacagagatccaaagcaagcagttcagttctactagaacttgtaccaaagttcaaatgcaaggtgtaacaatagaaagagctgtggatttaagtgttctgaatggatatgatcagctaatactagaattggaggagctcttcgatctcaaaggccaattacaaactcgcaaccaatgggaaatagctttcacagatagtgacgatgataagatgcttgttggagacgatccatggcctgaattctgcaacatggtgaagaagatattgatattcaaaagaggaggtcaaaaacttgaagtccagtaa

SEQ ID NO: 2540 - protein, 598 aa, Arabidopsis thaliana
MESGNIVNAQPELSGIIDGSKSYMYEQLWKLCAGPLCDIPKLGEKIYYFPQGNIELVEASTREELNELKPICDLPSKLQCRVIAIQLKVENNSDETYAEITLMPDTTQVVIPTQNENQFRPLVNSFTKVLTASDTSGGFFVPKKHAIECLPPLDMSQPLPTQELLATDLHGNQWRFNHNYRGTPQRHLLTTGWNAFTTSKKLVAGDVIVFVRGETGELRVGIRRAGHQQGNIPSSIISIESMRHGVIASAKHAFDNQCMFIVVYKPRSSQFIVSYDKFLDAVNNKFNVGSRFTMRFEGDDFSERRYFGTIIGVSDFSPHWKCSEWRNLEVQWDEFASFSRPNKVSPWEIEHLMPALNVPRPSLLKNKRLREVNEIGSSSSHLLPPILTQGQEIGQLSVASPMNISLTYRDTTEDVMNPSRLLMSYPVQPMPKLNYNNQMVTQIEENITTKTGTNFRLFGVSLVTPSVIKDPIEEIGSEISKLTEGKKFGQSQTLRSPTEIQSKQFSSTRTCTKVQMQGVTIERAVDLSVLNGYDQLILELEELFDLKGQLQTRNQWEIAFTDSDDDKMLVGDDPWPEFCNMVKKILIFKRGGQKLEVQ

SEQ ID NO: 2541 - DNA, 2331 bp, Oryza sativa
  CDS (1)..(2331)
atgccgccggccgccatggctccccctcccccgccgcagggctcctccacaggggatccgctctacgacgagctgtggcacgcctgcgcggggccgctcgtcaccgtgccgcgggtgggcgacctcgtcttctacttcccgcaggggcacatcgagcaggtggaggcgtccatgaaccaggttgccgacagccagatgcgcctctacgatctgccctccaagctgctttgccgtgtcctcaacgtcgagctcaaggcggagcaagacaccgacgaggtctacgcgcaggtcatgctcatgccggagcccgagcaaaatgagatggcggtggagaagacgactcctacgtccggccctgtgcaggcaaggccgccggtgaggtccttctgcaagacgctcaccgcgtctgacaccagcacgcacggcggcttctctgtactccgccgccacgctgatgagtgcctccctcccctggatatgacccagtcgccacccacacaggagctcgtggccaaggatctgcacagcatggactggcgcttccgtcacatctttcgcgggcaaccgaggaggcatctccttcagagtggttggagtgtgtttgtcagttccaaaaggcttgttgctggggatgctttcattttcctcagaggagagaatggtgaactccgtgttggtgttagacgagctatgaggcagctgtccaatgtgccttcttcagtcatatctagccaaagcatgcacctgggagtccttgctactgcatggcatgctatcaacacgaagagtatgttcaccgtctactacaaacctaggacgagcccttcagagttcattataccatatgatcagtatatggagtccgtcaaaaacaattactctgttgggatgaggttcaggatgaggtttgaaggagaagaggcaccagagcagaggtttactggtactataattggcagtgagaatctcgacccagtgtggcctgaatcaagttggagatccctgaaggtgcggtgggatgaaccatcaactattccgcggccagatagagtctctccttggaaaatagagcctgcttcatcacctcctgttaacccccttcctctttctagggttaaaagacctaggccaaatgctcctccagcatctcctgaatctcctattcttacgaaagaagctgctactaaggttgacactgatcctgctcaagcacaacgaagtcaaaacagtacggtcttgcaaggtcaagaacaaatgaccttgaggagcaaccttactgagagtaatgactctgatgtcactgctcataagccaatgatgtggtctccatccccaaatgctgcaaaagcccaccccttgacatttcagcagagaccccctatggataattggatgcagttgggaaggcgtgaaactgactttaaggattttcaggatcaaggttctgctcggcacttctctgacccatactactatgtatctccacagccttccctaactgttgaatcaagcacacagatgcacacagacagtaaggagttacatttctggaatggccagagtactgtgtatggtaattcgagagaccgaccacagaatttcagattcgaacagaactcatcaagttggttaaatcagtcatttgcccgacctgaacagccaagagtgattagaccgcatgcatcaatagctccagttgagttggaaaaaacagaaggcagtgggtttaagatttttgggtttaaagttgatacaaccaatgctcctaacaatcacttgagctccccgatggctgcaacacatgagcctatgcttcaaactccatcatcattgaatcagttgcaacctgtacaaactgattgcattcctgaggtatcagtaagcacagctggaacggcgactgagaatgagaaaagcggtcagcaagctcaacagagttcaaaagatgttcaaagcaagactcaggttgcttcgacgaggagttgtacaaaggtccataagcaaggcgttgcacttggcagatctgtggatctttcaaagttcagtaactatgatgaactcaaagctgagctagacaagatgtttgaattcgatggtgaattggtgtcttcaaacaaaaactggcaaattgtttatactgataatgagggtgatatgatgcttgttggagacgacccatgggaagaattctgcagcattgtgcggaagatttatatttacaccaaggaggaggtccagaagatgaattcgaaatcaaatgccccaaggaaagatgactcttcagaaaatgagaaaggtcatctgccgatgcccaacaaatcagataactag

SEQ ID NO: 2542 - protein, 776 aa, Oryza sativa
MPPAAMAPPPPPQGSSTGDPLYDELWHACAGPLVTVPRVGDLVFYFPQGHIEQVEASMNQVADSQMRLYDLPSKLLCRVLNVELKAEQDTDEVYAQVMLMPEPEQNEMAVEKTTPTSGPVQARPPVRSFCKTLTASDTSTHGGFSVLRRHADECLPPLDMTQSPPTQELVAKDLHSMDWRFRHIFRGQPRRHLLQSGWSVFVSSKRLVAGDAFIFLRGENGELRVGVRRAMRQLSNVPSSVISSQSMHLGVLATAWHAINTKSMFTVYYKPRTSPSEFIIPYDQYMESVKNNYSVGMRFRMRFEGEEAPEQRFTGTIIGSENLDPVWPESSWRSLKVRWDEPSTIPRPDRVSPWKIEPASSPPVNPLPLSRVKRPRPNAPPASPESPILTKEAATKVDTDPAQAQRSQNSTVLQGQEQMTLRSNLTESNDSDVTAHKPMMWSPSPNAAKAHPLTFQQRPPMDNWMQLGRRETDFKDFQDQGSARHFSDPYYYVSPQPSLTVESSTQMHTDSKELHFWNGQSTVYGNSRDRPQNFRFEQNSSSWLNQSFARPEQPRVIRPHASIAPVELEKTEGSGFKIFGFKVDTTNAPNNHLSSPMAATHEPMLQTPSSLNQLQPVQTDCIPEVSVSTAGTATENEKSGQQAQQSSKDVQSKTQVASTRSCTKVHKQGVALGRSVDLSKFSNYDELKAELDKMFEFDGELVSSNKNWQIVYTDNEGDMMLVGDDPWEEFCSIVRKIYIYTKEEVQKMNSKSNAPRKDDSSENEKGHLPMPNKSDN

SEQ ID NO: 2543 - DNA, 1668 bp, Brassica napus
  CDS (1)..(1668)
atggcgaatgtagatggagacgatctcagaacctctctctcaaggtcttataacgatgagctatacacagagctatggaaagcttgtgcaggtccattggtggaggttcctcttgctggagagaaagttttctacttccctcagggtcacatggaacaacttgtggcttcaactaatcagggaattgaatcagaggagatacctgatttcaaacttcctccaaagatactttgtcgagttctcagtgtcatgttaaaggctgagcatgacacagatgaagtttacgctcagatcacattaaaaccagaggaagatcaaagtgaacttacaagtcttgatccaccccttgttgaaccaacaaaacaaatgttccactcgtttgtaaagattctaacggcgtcagatacaagcactcatggtggattctctgttcttcgtaaacacgccactgaatgcttgcctgccttggacatgggacaagctactcctactcaagagcttgtgactagagatcttcatgggtttgaatggaggtttaagcatatattccgaggacaacctaggaggcatttgcttacaacgggttggagtacatttgtatcctccaaaagacttgtagctggagatgcctttgtgttcttgaggggtgagaatggggatttaagagttggagtgaggcgcttagctaggcatcagagcacaatgcctacttcggttatctcaagtcagagcatgcatttgggagtccttgctacagcttctcatgctgttgttaccaaaactatcttccttgtgttttacaagcctaggataagccagttcatagtgggagcgaacaagtatatggaagctatgaagcatggattctctcttggtaccagattcagaatgagatttgaaggagaagagtctcctgaaagaatgtttactggtactattgtgggaattggagatctatcttcacaatggccagcttctacatggagatcattgcaggtccaatgggatgagccaacaacatttcagagaccagacagagtctcaccatgggagattgagcctttcttgtcatctcccccagtttcaacacctgctcagcaatcacaacccaaatgcaaacggtcaagacctgtggaatcatcagttttgactccagctccgcccactttcttgtatggctttcctcagagccaagagactcctcctcctcctcctccctctgcgagtagttgctataggttgtttggatttgatctcacaagcaaccctcctgctccaattcctccagacaagtgtcaagaacccatcactccaagcgcagctaatgagcctaagaagcaacaaaaacaaaggacaagaaccaaagtaatcatgcaaggggtggctgttggtcgtgcagttgatttaacgctgttgaaatcgtataatgaactgattaaggagcttgaggagatgtttgagatcaaaggacagcttcttactcgagagaaatgggtcgttgtcttcacggatgatgaaggtgacatgatgcttgctggagatgatccatggaatgagttttgcaagatggctaagaagatatttatatattcgagcgatgaggttaagaagatgacaacgatgttgaagagctcttcgtcgttagagaatgatgaaagtatggattaa

SEQ ID NO: 2544 - protein, 555 aa, Brassica napus
MANVDGDDLRTSLSRSYNDELYTELWKACAGPLVEVPLAGEKVFYFPQGHMEQLVASTNQGIESEEIPDFKLPPKILCRVLSVMLKAEHDTDEVYAQITLKPEEDQSELTSLDPPLVEPTKQMFHSFVKILTASDTSTHGGFSVLRKHATECLPALDMGQATPTQELVTRDLHGFEWRFKHIFRGQPRRHLLTTGWSTFVSSKRLVAGDAFVFLRGENGDLRVGVRRLARHQSTMPTSVISSQSMHLGVLATASHAVVTKTIFLVFYKPRISQFIVGANKYMEAMKHGFSLGTRFRMRFEGEESPERMFTGTIVGIGDLSSQWPASTWRSLQVQWDEPTTFQRPDRVSPWEIEPFLSSPPVSTPAQQSQPKCKRSRPVESSVLTPAPPTFLYGFPQSQETPPPPPPSASSCYRLFGFDLTSNPPAPIPPDKCQEPITPSAANEPKKQQKQRTRTKVIMQGVAVGRAVDLTLLKSYNELIKELEEMFEIKGQLLTREKWVVVFTDDEGDMMLAGDDPWNEFCKMAKKIFIYSSDEVKKMTTMLKSSSSLENDESMD

SEQ ID NO: 2545 - DNA, 2046 bp, Glycine max
  CDS (1)..(2046)
atggcttccgctgcgccaggtgcaaccaatgatgctttatacaaggaattgtggcatgcctgtgctggaccccttgtcactcttccgcgtgaaggggagagagtttattacttcccgcaaggtcatatggaacaggaacaacttgctctcggcatggcatctcaaatcatgactttaattgaacttgaggcatccatgaatcagggattggagcagcaaatgccttccttcaatctgccgtctaaaattttatgtaaagtggtcaatgttcatcttcgagctgaacctgaaacagatgaagtatatgcacaaataactttgcttcctgaagcagatcaaagcgaggtgacaagccctgatgatcccctgcccgaatctccaaggtgtacagtccattcattttgcaagacactcactgcttctgacactagcactcatggaggtttctctgttcttcgaagacatgcagatgattgcctgccaccactggatatgactcaacagccaccatggcaagaattagttgcaactgatctgcatgggaatgaatggcattttagacatatttttcgaggacaacccaggcgccacttactgaccactgggtggagtgtctttgtcagttccaaaaaattagtggctggtgatgcatttatattcttaaggggtgaaaatggagagctgcgagttggagttaggagactcatgagacagcaaagcaacatgccatcttctgttatatccagtcacagtatgcatctgggtgtcctggctactgcatctcacgccattgccacaggaacattgttttctgtattttacaagcccagaactagccggtctgagtttattgtgagtgtcaacaaataccttgaagctcaaagtcataaactttctgttgggatgagattcaaaatgagatttgagggtgatgaagttcctgaaagaaggttcagtggaacgattgtgggtgttgaagataacaaatcatcagtctgggctgattctgagtggcgatcattaaaggttcaatgggatgaaccatcgtctattttgcgtcctgatagagtttctccatgggaattggagccacttgtgtctacccctcctacaaacccccagccatcccaaagaaacaagagatcgcggcctcccattctaccttcaacaatgcctgattcttctctgcaaggtgtatggaaatcaccagttgaatctgcaccattctcttattgtgaccatcaacatgggcgagatgtctatccatcaaccaatttcaattccactgcaactggttttcttggttttggtgggaactgctatgcttccaacaagtcaatatattggtccagtaggatggaaaactccacagaatctttttctcctgtagcacttaaagaatttggagagaagagacaagggactgcaaatggctgtagactctttaggattcagttacatgacaattctaattctaatgaagaaagtctaccaatggtcactttgtcaggaaggatgggtgatgatggcccccttccatctttggatgctgagtctgaccagcattctgaaccatcaaatgttaatcgatctgatatcccttcggtaagctgtgatgctgaaaaatcatgcctgcggtctccccaggagtcacagagcaggcaaataagaagttgcacaaaggtccacatgcaaggtatggctgttggaagggctgtggatttaacacggtttgatggatatgaggatctgctaaggaaattggaagagatgtttgacatcactggtgagctctgcggatcgacaaaaaaatggcaggttgtgtacactgataatgaagatgatatgatgatggttggggatgatccatggcttgaattttgtagcattgtgaggaaaattttcatctacactgcagaggaggtgaggaagctttcacccaaaataggacttccaatcagtgaagaagttaaacccagcaaaatggactctgaagcagtagccaatcctgaggatcagtcatctattgtggggcctggttgctaa

SEQ ID NO: 2546 - protein, 681 aa, Glycine max
MASAAPGATNDALYKELWHACAGPLVTLPREGERVYYFPQGHMEQEQLALGMASQIMTLIELEASMNQGLEQQMPSFNLPSKILCKVVNVHLRAEPETDEVYAQITLLPEADQSEVTSPDDPLPESPRCTVHSFCKTLTASDTSTHGGFSVLRRHADDCLPPLDMTQQPPWQELVATDLHGNEWHFRHIFRGQPRRHLLTTGWSVFVSSKKLVAGDAFIFLRGENGELRVGVRRLMRQQSNMPSSVISSHSMHLGVLATASHAIATGTLFSVFYKPRTSRSEFIVSVNKYLEAQSHKLSVGMRFKMRFEGDEVPERRFSGTIVGVEDNKSSVWADSEWRSLKVQWDEPSSILRPDRVSPWELEPLVSTPPTNPQPSQRNKRSRPPILPSTMPDSSLQGVWKSPVESAPFSYCDHQHGRDVYPSTNFNSTATGFLGFGGNCYASNKSIYWSSRMENSTESFSPVALKEFGEKRQGTANGCRLFRIQLHDNSNSNEESLPMVTLSGRMGDDGPLPSLDAESDQHSEPSNVNRSDIPSVSCDAEKSCLRSPQESQSRQIRSCTKVHMQGMAVGRAVDLTRFDGYEDLLRKLEEMFDITGELCGSTKKWQVVYTDNEDDMMMVGDDPWLEFCSIVRKIFIYTAEEVRKLSPKIGLPISEEVKPSKMDSEAVANPEDQSSIVGPGC

SEQ ID NO: 2547 - DNA, 1926 bp, Glycine max
  CDS (1)..(1926)
atgtcgttgaactgtggtggctgcggtggagaagaagatgagctctatgagcaactatggaaggcgtgcgcaggaccccatgtggaagttccacgtacaggccaaagggtcttctattttcctcagggtcacatggaacaattagaagtatcaacaaatcaggaactaaaccaacggattccactgttcaagctttcctccaagatcctttgtcgtgtcgtcaacgtccatttactggctgaacaagaaacagatgaggtttatgcacagattactctggtgccggaatctaatcaaactgagcctacgagccccgatccatgccctgctgaacttccaaggccaagagttcactccttctgtaaggtcttaactgcctctgatacaagcacccatggtggcttctctgtcctcaggaagcatgccactgaatgccttccagcattggacatgtctaaatcaacaccaactcaggaattggttgccaaggatctccagggctttgaatggcgctttaagcatatatttagaggtcagccacgtagacacttgctcacaactggatggagtacttttgtgacttccaagagattagttgctggagacacctttgtgtttctgagagggaacaatggagaattgcgggttggagtgaggcgtattgctcctctgcagagcagcatgccatcatctgtgatttctagtcagagcatgcacctaggagttcttgcaactgcatctcatgctgtagcaactcagactctttttgttgtatattataagccaaggacaagccagttcattgttagtgtgaacaagtatttagaggctatcaaccaaaaatgtaatgttggtatgagattcaagatgaggtttgaaggggatgaatcccctgaaaatgacaaaagattttcgggcacaatacttggagtagaggatatttcccctcactgggtgaattcaaattggcgatctcttaaggttcaatgggatgaacctgcatcttttccaagacctgatagagtttcatcatgggagatagaacacattctggcttgtgttcctactacgtcatctcaacctgctgttataaagaataaaaggcctcgacaagcaagtgaaatgacacaacttagggtcatgaccgaaagcaaaaggagtgacagcagttcccacatgaggcatcataacagtaaaagcaacaacaatggtatatcaatgaatcagacagaagcaagttggctatcttctcctcaattatatcaggacacaaccgatgataacaagagcatcttagcttggcctatttcgaaacctcactcagaaagattgaacaatgatcatttccttgaccaggttgacaagaacatcaacaaagtagaggctgctacaagctatagattgtttgggattgaccttattgatcatgcaaggaacaactctctttctgtagagaatgcgtctggagtcgcctctgagtgcaaaactgatgtaaaccacgagtctgatctctcaaaggcttctaaagaatggaaccaagaacaactactagtatctccaaaagagactcaaagcaaacaagtttgtagcagaagttgcactaaggttcaaatgcagggggttgcggtcggtcgtgctgtggatttgaccacattggatggatatgatcaacttgtagatgaattggagaagatgtttgacataaagggacagcttcaacacaggaataagtgggaaactgtcttcactgatgatgaaggggatatgatgcttgttggtgatgatccatggcctgaattctgcaatatggtgaaaagaatcttcatttgttcaagccaggatgtgcacaaattgagctcagggagcaaactacctatctcttctatgggagagattgtaataagcttaaacacaaccgagacctga

SEQ ID NO: 2548 - protein, 641 aa, Glycine max
MSLNCGGCGGEEDELYEQLWKACAGPHVEVPRTGQRVFYFPQGHMEQLEVSTNQELNQRIPLFKLSSKILCRVVNVHLLAEQETDEVYAQITLVPESNQTEPTSPDPCPAELPRPRVHSFCKVLTASDTSTHGGFSVLRKHATECLPALDMSKSTPTQELVAKDLQGFEWRFKHIFRGQPRRHLLTTGWSTFVTSKRLVAGDTFVFLRGNNGELRVGVRRIAPLQSSMPSSVISSQSMHLGVLATASHAVATQTLFVVYYKPRTSQFIVSVNKYLEAINQKCNVGMRFKMRFEGDESPENDKRFSGTILGVEDISPHWVNSNWRSLKVQWDEPASFPRPDRVSSWEIEHILACVPTTSSQPAVIKNKRPRQASEMTQLRVMTESKRSDSSSHMRHHNSKSNNNGISMNQTEASWLSSPQLYQDTTDDNKSILAWPISKPHSERLNNDHFLDQVDKNINKVEAATSYRLFGIDLIDHARNNSLSVENASGVASECKTDVNHESDLSKASKEWNQEQLLVSPKETQSKQVCSRSCTKVQMQGVAVGRAVDLTTLDGYDQLVDELEKMFDIKGQLQHRNKWETVFTDDEGDMMLVGDDPWPEFCNMVKRIFICSSQDVHKLSSGSKLPISSMGEIVISLNTTET

SEQ ID NO: 2549 - DNA, 2106 bp, Glycine max
  CDS (1)..(2106)
atgaaggaaggtgaaaaggtattggatccgcagctatggcacgcgtgtgcaggtggcatggttcagatgccgcaaatgaactccaaagtcttctacttcccacagggtcacgccgaacacgcccacaccaacattcatctgaggcttccaccattcattttatgcaacgttgaagcagttaagttcatggcgaacccagaaaccgacgaagtgttcgcgaagctgagtttgcttcctctcagaaactcggaactcggtgctgactcggacggtgctggtggtgatgacgtggcagaaccttcttgttgtgaaaagcctgcgtctttcgctaagactctgactcagagcgacgccaacaatggtggggggttttcggttccgcggtactgcgcggagacaattttcccgcgtctggactacacggcggagccgccggtgcagacggtggtggcgaaagacgtgcacggcgagacctggaggttccggcacatctaccgagggacgccacgtaggcacttgctgaccacagggtggagcagtttcgtgaaccagaagaaactcgtggctggggattccgttgtgtttctgagggctgagaatggtgatttgtgtgttgggattcggagggcaaaaaagggaattagcgagggttcaggttcaggttcatcatctgtgtggagttcagcttctgggtctggaaatggaaattgtgggattgggccttatgggcctttttcttttttcttgaaagaagaaaacaaaatgttaaggaatggttgtggtgggaatttgagtggaagggtgaaagtgagggctgaggatgttgttgaagctgtgactcttgctgctagtaataagccttttgaggttgtgtattacccaagagctagtactcctgagttttgtgttaaggcttctgctgtgagggctgctatgaggattcagtggtgttctgggatgaggttcaagatggcctttgagactgaggatgcttcaaggataagttggttcatgggaaccattgcttctgttcaggttgttgaccccatccgctggcctaattccccttggaggcttcttcaggttacttgggatgagccagatttactacaaaatgtgaagcgtgttagcccgtggcttgttgagttggtatctaacattccactcattaatttcacacccttctctccaccaagaaagaagctgcggccacaacacccagacttcccccttgatgttcaatttccaataccaatgttttcaggcaaccagcttgggcctaacagccccttgtgtggtttttcggataatgctcctgcagggatacagggagccaggcatgctcaatttggaaaatctctatcagatctccaccttaacaataaactgcagttggggatgcttccaactaatatccatcaacttggagtgtataatgagatttcaaatggtaacatgatgaccaaccatgataagagcaaagaaagtttatcatgctttctgaccatggggaaatctaccaagagtttggagaaatctgatgatgttaagaaacaccagtttttgctttttggtcaaccaattctcactgagcaacaaatttctagctgttctggagatgtgttgtctcaccgaaaaagatcggtaagtgatgataaggacaaagcgaagtgccttatggatgactcgcaatctacactctcacagcagttttcaccaggaaaagcatcttctgctgagttctcttggcaacttggcttggatactggtcattgcaaagttttcttggagtcggaagatgtaggaaggaccctagacctatcgctgtttggttcttatgaagatctgtataggagacttgccatcatgtttgggattgaaaggtctgagattttgaaccatgtgctctaccatgatgcagctggtgctgctaagaaaaccggagaagaacccttcagtgacttcatgaagacagcaaaaagattgacaattctgacggattcaagcagcaaaaacattaaaagggcctttattacaggaactcgtaatggtgaacatggactagatgcatcaaacaaaacaggccctctgagcatatttgcttaa

SEQ ID NO: 2550 - protein, 701 aa, Glycine max
MKEGEKVLDPQLWHACAGGMVQMPQMNSKVFYFPQGHAEHAHTNIHLRLPPFILCNVEAVKFMANPETDEVFAKLSLLPLRNSELGADSDGAGGDDVAEPSCCEKPASFAKTLTQSDANNGGGFSVPRYCAETIFPRLDYTAEPPVQTVVAKDVHGETWRFRHIYRGTPRRHLLTTGWSSFVNQKKLVAGDSVVFLRAENGDLCVGIRRAKKGISEGSGSGSSSVWSSASGSGNGNCGIGPYGPFSFFLKEENKMLRNGCGGNLSGRVKVRAEDVVEAVTLAASNKPFEVVYYPRASTPEFCVKASAVRAAMRIQWCSGMRFKMAFETEDASRISWFMGTIASVQVVDPIRWPNSPWRLLQVTWDEPDLLQNVKRVSPWLVELVSNIPLINFTPFSPPRKKLRPQHPDFPLDVQFPIPMFSGNQLGPNSPLCGFSDNAPAGIQGARHAQFGKSLSDLHLNNKLQLGMLPTNIHQLGVYNEISNGNMMTNHDKSKESLSCFLTMGKSTKSLEKSDDVKKHQFLLFGQPILTEQQISSCSGDVLSHRKRSVSDDKDKAKCLMDDSQSTLSQQFSPGKASSAEFSWQLGLDTGHCKVFLESEDVGRTLDLSLFGSYEDLYRRLAIMFGIERSEILNHVLYHDAAGAAKKTGEEPFSDFMKTAKRLTILTDSSSKNIKRAFITGTRNGEHGLDASNKTGPLSIFA

SEQ ID NO: 2551 - DNA, 2019 bp, Zea mays
  CDS (1)..(2019)
atggcgagcgccggcgtggcgggctgctcagggagtgctggcgatgctttgttcagggaactctggcatgcttgtgctgggccgttggtcacagtgcctcgccaaggcgagctggtttactacttcccacagggtcatatggaacagcttgaagcatctacagatcaacaacttgatcagcacttacctttgtttgatctaccacccaagattctctgcaaggtggtcaatgtagaacttagagctgaaactgattctgatgaagtttatgctcaaattatgctgcaaccagaagcagatcaaagtgagcccaccagcccagattctgagccaccggagcctgaaagatgcaacgtctattccttctgcaagaccttgactgcttcagatacaagtacacatggtggattctctgtcctcaggaggcatgctgaagaatgtttgccccaactggacatgactcagaatccaccatggcaagaactgctggctaaagatctccatggaaatgaatggcatttccgtcacatctttcgagggcaaccaaggaggcatctacttacgacaggttggagtgtttttgttagctcaaaaagattggttgctggtgacgcgtttatctttttgagaggtgagaacggagagctgagagttggggtaaggaggctcatgaggcaactaaataacatgccatcttcggttatctcaagccacaacatgcatcttggagtcctagcaactgcatctcatgccatctccacaggaactctcttttctgttttctacaaacctagaacaagtcgatcggaatttgtcgttagtgtaaataagtaccttgaagctaagaatcacaaggtgtctgttggcatgaggtttaaaatgagatttgagggtgatgaatctcctgaaagaagattaagtgggacaattattggtctgggaagcatgccagctaactcaacttctccatgggctaactctgattggagatctttgagggtccaatgggacgagccttctgctattctgcgtccagatagagtttcaccatgggaactagaaccccttgatgcaactaatccacaaccacctcaacctcatttacggaataagcgtgcacgaccccctgctttactttctattgctccagaacttcctcaagtttttggttttttgaaatccccagctgagcctgcccaagctttctcattttcaagaccgcagcaaactcaggaattataccattcaaatcccagttcaatcttctcatcatcgttgaatgtaggattcagttcaaagaatgaccgttctactccaatcaacagtcatttgtactggacaatgaggcagacaagaactgaatcctactctgctagcgttaacaaagctcctactgaaaagaagcaagaatctgctacttctggctgcagattgtttggcattgagataggttctgcagtatcaccagtggctactgttgctagtgttggccaggatcagccacctgctctctcagtagacgttgaatctgatcagctgtcacagccatccaatgccaacaaaacggatgccccagtggcaagcagcgagcgctctcttaacgagtcagagagccggcaagtcaggagctgcaccaaggtaatcatgcaaggaatggcggttggcagggcagtggacttgacaaggttagatgggtatgctgatctccaccgcaagttggaggagatgtttgatatccagggagagctttctgccaacctcaagaaatggaaggtcatttacacagatgacgaggatgatacgatgctggtcggggacgatccatggaatgaattcctcaggatggtaaaaaggatatacatttactcttacgaggaggccaagtctttgactcgcaaggcgaagccgccggttgttggtgacaccatcaagccagacccaaacaaattgccaccggaatctgacgtgccacatgactcaaacaacaatgctcccgttgctgctgattatcaggactga

SEQ ID NO: 2552 - protein, 672 aa, Zea mays
MASAGVAGCSGSAGDALFRELWHACAGPLVTVPRQGELVYYFPQGHMEQLEASTDQQLDQHLPLFDLPPKILCKVVNVELRAETDSDEVYAQIMLQPEADQSEPTSPDSEPPEPERCNVYSFCKTLTASDTSTHGGFSVLRRHAEECLPQLDMTQNPPWQELLAKDLHGNEWHFRHIFRGQPRRHLLTTGWSVFVSSKRLVAGDAFIFLRGENGELRVGVRRLMRQLNNMPSSVISSHNMHLGVLATASHAISTGTLFSVFYKPRTSRSEFVVSVNKYLEAKNHKVSVGMRFKMRFEGDESPERRLSGTIIGLGSMPANSTSPWANSDWRSLRVQWDEPSAILRPDRVSPWELEPLDATNPQPPQPHLRNKRARPPALLSIAPELPQVFGFLKSPAEPAQAFSFSRPQQTQELYHSNPSSIFSSSLNVGFSSKNDRSTPINSHLYWTMRQTRTESYSASVNKAPTEKKQESATSGCRLFGIEIGSAVSPVATVASVGQDQPPALSVDVESDQLSQPSNANKTDAPVASSERSLNESESRQVRSCTKVIMQGMAVGRAVDLTRLDGYADLHRKLEEMFDIQGELSANLKKWKVIYTDDEDDTMLVGDDPWNEFLRMVKRIYIYSYEEAKSLTRKAKPPVVGDTIKPDPNKLPPESDVPHDSNNNAPVAADYQD

SEQ ID NO: 2553 - DNA, 2034 bp, Zea mays
  CDS (1)..(2034)
atggcggaggccggcgtggcacgcggctcagggagtgctggcgatgctttgttcagggaactctggcatgcttgtgctgggccattggtcacagtgcctcgccaaggcgagctggtttattacttcccgcagggtcatatggaacagcttgaagcatctacagatcaacaacttgatcagcacttgcctttgtttaatctaccgcacaagatcctctgcaaggtggtcaatgtagaacttagagctgaaactgattctgatgaagtttatgctcaaattatgctgcaaccacaaacagagcaaagtgagcccaccagcccagatcctgaaccacctgagcctgaaagatgcaacattcattccttctgcaagaccttgactgcttcagatacaagtacccatggtggattctctgtcctcaggaggcatgctgaagaatgtttgccccaactggacatgactcagaatccaccgtggcaagaactagtggctaaagatctccatggaaatgaatggcatttccgtcacatctttcgagggcaaccaaggaggcatctacttacgacaggctggagtgtttttgttagctcaaaaagattggttgcgggtgacgcgtttatcttcttgagaggtgagaacggagagctgcgagtcggggtaaggaggctcatgagacaactaaataacatgccgtcttcggttatctcaagccacagcatgcatcttggagtcctagcaactgcatctcatgccatctccactggaactctcttttctgttttctacaaacccagaacaagtagatctgaatttgtcgttagtgtaaacaagtacctcgaagctaagaatcacaagatgtctgttggtatgaggtttaaaatgagatttgagggtgatgaatcccctgaaagaagattcagtgggacaattattggtatgggatgcatgccagctaactccacatctccatgggctaactctgaatggagatcattgaaggtccaatgggacgagccttctgctattctgcgtccagatagagtttcaccatgggaagtagaaccccttgatcgaactaatccacagccacctcaacctcctttacggaataagcgagcacggcctcctgcttcaccttcgattgctccagaacttgctccagtttttggtttttggaagtccccagctgagcctgcccaagctttctcattctcaggactgcagcgaactcaggagctataccattcaagccccagttcaatgttctcatcgtcgttgaatgtgggattcaatccaaagtacgagggtcccactccaaacaccaaccatttgtactggacaatgagagagacaagaactgaatcctactccgctagcatcaacaaagctccaactgaaaagaagcaagaatccactacttctggctgcagattgttcggtatcgagataggttcttctgcagtgtcacccgtggttactgttgctagcgtcgggcatgatcctccgccacctgctctctcagtagacgctgaatcagaccagctgtcacagccgtcccatgccaacaaagcaatggatgccccagcggcaagcagcgatcgctctcctaacgagacagagagccggcaagccaggagctgcaccaaggtaatcatgcaaggggtggcggttggcagggcggtggacttgacgaggctagatgggtacgatgacctccgccgcaagttggaggagatgttcgatatcccgggagagctttgcgccagcatcaagaaatggaaggtgatctacacagatgacgaggacgatatgatgctggtcggggacgatccatggagtgaattttgcaggatggtaaaaaggatatacatttattcctacgaggaggccaagtctttgactcccaaggcgaagctgccggccatcggtggtgacaccggcgtcaagccggacccaagcaaactgccaccagaatctgacgtgccacagagcgactccgacaacagtgctcccgttgctgctgataaggactga

SEQ ID NO: 2554 - protein, 677 aa, Zea mays
MAEAGVARGSGSAGDALFRELWHACAGPLVTVPRQGELVYYFPQGHMEQLEASTDQQLDQHLPLFNLPHKILCKVVNVELRAETDSDEVYAQIMLQPQTEQSEPTSPDPEPPEPERCNIHSFCKTLTASDTSTHGGFSVLRRHAEECLPQLDMTQNPPWQELVAKDLHGNEWHFRHIFRGQPRRHLLTTGWSVFVSSKRLVAGDAFIFLRGENGELRVGVRRLMRQLNNMPSSVISSHSMHLGVLATASHAISTGTLFSVFYKPRTSRSEFVVSVNKYLEAKNHKMSVGMRFKMRFEGDESPERRFSGTIIGMGCMPANSTSPWANSEWRSLKVQWDEPSAILRPDRVSPWEVEPLDRTNPQPPQPPLRNKRARPPASPSIAPELAPVFGFWKSPAEPAQAFSFSGLQRTQELYHSSPSSMFSSSLNVGFNPKYEGPTPNTNHLYWTMRETRTESYSASINKAPTEKKQESTTSGCRLFGIEIGSSAVSPVVTVASVGHDPPPPALSVDAESDQLSQPSHANKAMDAPAASSDRSPNETESRQARSCTKVIMQGVAVGRAVDLTRLDGYDDLRRKLEEMFDIPGELCASIKKWKVIYTDDEDDMMLVGDDPWSEFCRMVKRIYIYSYEEAKSLTPKAKLPAIGGDTGVKPDPSKLPPESDVPQSDSDNSAPVAADKD

SEQ ID NO: 2555 - DNA, 2019 bp, Zea mays
  CDS (1)..(2019)
atggcgaacgccggcgtggcacgcggctcagggagtgctggcgatgctttgttcagggaactctggcatgcttgtgctgggccgttggtcacagtgcctcgccaaggcgagctggtttactacttcccacagggtcatatggaacagcttgaagcatctacagatcaacaacttgatcagcacttacctttgtttaatctaccacacaagatcctctgcaaggtggtcaatgtagaacttagagctgaaactgattctgatgaagtttatgctcaaattatgctgcaaccagaagcagatcaaagtgagcccaccagcccagattctgagccaccggagcctgaaagatgcaacgtctattccttctgcaagaccttgactgcttcagatacaagtacccatggtggattctctgtcctcaggaggcatgctgaagaatgtttgccccaactggacatgactcagaatccaccatggcaagaactactggctaaagatctccatggaaatgaatggcatttccgtcacatctttcgagggcaaccaaggaggcatctacttacaacaggctggagtgtttttgttagctcaaaaagattggttgcgggtgacgcgtttatcttcttgagaggtgagaacggagagctgagagtcggggtaaggaggctcatgagacaactaaataacatgccatcttcggttatctcaagccacaacatgcatcttggagtcctagcaactgcatctcatgccatctccacaggaactctcttttctgttttctacaaacctagaacaagtcgatcggaatttgtcgttagtgtaaataagtaccttgaagctaagaatcacaaggtgtctgttggcatgaggtttaaaatgagatttgagggtgatgaatctcctgaaagaagattaagtgggacaattattggtctgggaagcatgccagctaactcaacttctccatgggctaactctgattggagatctttgaaggtccaatgggacgagccttctgctattctgcgtccagatagagtttcaccatgggaactagaaccccttgatgcaactaatccacaaccacctcaacctcatttacggaataagcgtgcacgaccccctgctttactttctattgctccagaacttcctcaagtttttggtttttggaaatccccagctgagcctgcccaagctttctcattttcaagaccacagcaaactcaggaattataccattcaaatcccagttcaatcttctcatcatcgttgaatgtaggattcagttcaaagaatgaccgttctactccaatcaacagtcatttgtactggacaatgaggcagacaagaactgaatcctactctgctagcattaacaaagctcctactgaaaagaagcaagaatctgctacttctggctgcagattgtttggcattgagataggttctgcagtatcaccagtggctactgttgctagtgttggccaggatcagccacctgctctctcagtagacgttgaatctgatcagctgtcacagccatccaatgccaacaaaacggatgccccagtggcaagcagcgagcgctctcttaacgagtcagagagccggcaagtcaggagctgcaccaaggtaatcatgcaaggaatggcggttggcagggcagtggacttgacaaggttagatgggtatgctgatctccaccgcaagttggaggagatgtttgatatccagggagagctttctgccaacctcaagaaatggaaggtcatttacacagatgacgaggatgatacgatgctggtcggggacgatccatggaatgaattcctcaggatggtaaaaaggatatacatttactcttacgaggaggccaagtctttgactcgcaaggcgaagccgccggttgttggtgacaccatcaagccagacccaaacaaattgccaccggaatctgacgtgccacatgactcaaacaacaatgctcccgttgctgctgattatcaggactga

SEQ ID NO: 2556 - protein, 672 aa, Zea mays
MANAGVARGSGSAGDALFRELWHACAGPLVTVPRQGELVYYFPQGHMEQLEASTDQQLDQHLPLFNLPHKILCKVVNVELRAETDSDEVYAQIMLQPEADQSEPTSPDSEPPEPERCNVYSFCKTLTASDTSTHGGFSVLRRHAEECLPQLDMTQNPPWQELLAKDLHGNEWHFRHIFRGQPRRHLLTTGWSVFVSSKRLVAGDAFIFLRGENGELRVGVRRLMRQLNNMPSSVISSHNMHLGVLATASHAISTGTLFSVFYKPRTSRSEFVVSVNKYLEAKNHKVSVGMRFKMRFEGDESPERRLSGTIIGLGSMPANSTSPWANSDWRSLKVQWDEPSAILRPDRVSPWELEPLDATNPQPPQPHLRNKRARPPALLSIAPELPQVFGFWKSPAEPAQAFSFSRPQQTQELYHSNPSSIFSSSLNVGFSSKNDRSTPINSHLYWTMRQTRTESYSASINKAPTEKKQESATSGCRLFGIEIGSAVSPVATVASVGQDQPPALSVDVESDQLSQPSNANKTDAPVASSERSLNESESRQVRSCTKVIMQGMAVGRAVDLTRLDGYADLHRKLEEMFDIQGELSANLKKWKVIYTDDEDDTMLVGDDPWNEFLRMVKRIYIYSYEEAKSLTRKAKPPVVGDTIKPDPNKLPPESDVPHDSNNNAPVAADYQD

SEQ ID NO: 2557 - DNA, 1986 bp, Zea mays
  CDS (1)..(1986)
atggccgcggcgatggacgcgcccaaccctggagcggctgctggcccaggaatgcctagtgacgccctgtaccaggagctgtggcatgcgtgtgctggcccgttggtcacagtacctagacaaggcgagcgtgtctattacttccctcagggccatatggagcagctcgaggcgtctgcacaccaccagcagcttgatcagtacttaccgatgttcgatctaccacccaagatcctatgcagagtagtcaacgtggaactacgggccgaagctgattcagatgaagtttatgctcaaattatgttgcagccagaagctgatcaaaatgaactcaccagcctggacgctgaaccacaagaacgtgaaaaatgcactgcccattccttctgcaagacactgacagcttcagatacgagcactcacggcgggttttctgttcttcggaggcatgctgaggaatgtcttcctcagctggacatgtctcaaaatccaccttgccaagaactggttgccaaagagcgccatggcactgaatggcattttcggcacatttttcgagggcaacccaagaggcatctccttaccaccggctggagtgtctttgttagctcaaaaagattggtttctggggatgcattcatcttcatgagaggtgaaaatggtgagctacgggttggtgtaaggaggctcatgagacaagtaaatagcatgccgtcatctgtcatatcaagccacagcatgcatcttggagtattggccacagcctcccatgccatctccactggaaccctcttttctgttttctacaaaccaagaactagtcgctctgattttattgtgagtgtgaacaagtaccttgaagctaagaagcagaaaatatctgttggaatgaggtttaagatgagatttgaaggtgatgatgctcctgaaagaaggttcagcggaacaatcattggcatcgggagtttgccggcaatgtcaaaatctctgtgggcagattctgactggagatctctaaaggttcaatgggatgaaccttcatccattcttcgtccagatagaatctcaccatgggaagtggagccactggatgcagctaatccacaatcccctcaacctccactaagggctaagcgtccacgacccccagcttcaccttgtatggtttcggaactgccttcaggttttggactctggaaatccccaattgaatcatcctgtacactctcattttcggaacctcaacgggctcgagagttatttccttcaatccccacgtcaaccttgtcatcttcatcaaatgtcagttttaattcaaagaatgagccgtccatgctaaccagtcagttctactggtcagcaaggcatacaagagctgactcctgcgctgctagcaccaacacagtcgtaattgaaaagaagcaagagccaagttctggtggttgtagattgtttggaattaatatatgctcagctgaggaagaagtattacctgaggttactgctccaggtgttggttatgagcagactgctgcctctgtagagttgaactcggataagctctcacagccatctgatgtcaacaattctgatgccctagcagctagcagtgaacgttcacctcttgaatcccaaagccggcaagtgaggagctgtaccaaggtaattatgcaaggaatggcagtaggaagggctgtagacctgacaaagcttagtggctacagcgatctttgccagaagctggaggagatgtttgacatccagggggagctgggttccacactaaagaaatggcgggtcattttcactgatgatgaggatgacatgatgcttgttggagatgatccttgggatgagttttgcaggatggtgaaaaggatttacatttacacatacgaggaggcaaagaagctgacatccaagtcaaagttaccggttagcagtgacagcagcaagctgagcgctgcgaactcactgtctgaatga

SEQ ID NO: 2558 - protein, 661 aa, Zea mays
MAAAMDAPNPGAAAGPGMPSDALYQELWHACAGPLVTVPRQGERVYYFPQGHMEQLEASAHHQQLDQYLPMFDLPPKILCRVVNVELRAEADSDEVYAQIMLQPEADQNELTSLDAEPQEREKCTAHSFCKTLTASDTSTHGGFSVLRRHAEECLPQLDMSQNPPCQELVAKERHGTEWHFRHIFRGQPKRHLLTTGWSVFVSSKRLVSGDAFIFMRGENGELRVGVRRLMRQVNSMPSSVISSHSMHLGVLATASHAISTGTLFSVFYKPRTSRSDFIVSVNKYLEAKKQKISVGMRFKMRFEGDDAPERRFSGTIIGIGSLPAMSKSLWADSDWRSLKVQWDEPSSILRPDRISPWEVEPLDAANPQSPQPPLRAKRPRPPASPCMVSELPSGFGLWKSPIESSCTLSFSEPQRARELFPSIPTSTLSSSSNVSFNSKNEPSMLTSQFYWSARHTRADSCAASTNTVVIEKKQEPSSGGCRLFGINICSAEEEVLPEVTAPGVGYEQTAASVELNSDKLSQPSDVNNSDALAASSERSPLESQSRQVRSCTKVIMQGMAVGRAVDLTKLSGYSDLCQKLEEMFDIQGELGSTLKKWRVIFTDDEDDMMLVGDDPWDEFCRMVKRIYIYTYEEAKKLTSKSKLPVSSDSSKLSAANSLSE

SEQ ID NO: 2559 - DNA, 1935 bp, Zea mays
  CDS (1)..(1935)
atgaaggaggcgggcgaggagaggtgccttgacccgcagctgtggcacgcgtgcgccggcggcatggtgcagatgccccccgtgcgctcccgtgtctactacttcccgcagggccacgcggaacacgcgcacggcggcggcggcgccacggacctcgccggggcgcgggcgcgacctctcccgccgctcgtgctctgcaccgtcgccggggtgcgcttcctggccgatccggagaccgacgaggtcttcgccaagatccgcctcgtgccggccgcgcccggcgaggtggagttcggagagccccgcgagttcggcatcgaccccgaggacgcccgggagaagctgtcctccttcgccaagacgctcacgcagtccgacgccaacaacggcggcggcttctccgtgccgcgctactgcgccgagaccatcttccccaagctcgactaccgggccgacccgccggtgcagacggtgctcgccaaggacgtgcacggggaggtctggaagttccgccacattttccggggcacgccgcgccggcatttgctcaccacgggatggagcgcgttcgtcaaccagaagaagctcgtcgccggggactccatcgtattcctgcgcaccgagcatggcgagctgtgcgtcgggatacgccgtgccaagcgggtgtcctgtggtggcatggagtgcatctctggctggaacgccccggtgtacggggccttgtcggcgttcttgaaggacgaggaaggtaagatcactaagggtcctggtgggtacatgagaggcagggggaaggtggagatcacggacgttgttgaggccgcaagcttagccgcgagcgggcagccatttgaggtggtgtactacccgagagctagcactccagagtttgttgtgaaggctgcatcggtacagaacgcgatgaggaaccagtggtgccctgggatgaggttcaagatggcatttgagacagaggattcgtcaaggatcagctggtttatggggacgatagcttctgctcaggttgctgacccaatcagatggccaaattcaccgtggaggcttcttcaggtgtcatgggatgaaccagacttgctgcagaatgtgaaatgtgtcaatccatggcttgtggagattgtatcaagcattccaccgattcacctagggacattttctccacctagaaagaagttgcgggtggcccaacatccagactttccatttgagggtcagctgttgaatccaattttccatggcaacccacttggtccaagcaacagcccacttcgctgtttctcggacatcgctcctgcaggcatacagggagccaggcatgctcaatttggtttacccctaacagactaccagcttaaccagctgcacctcggtttcaaccggcttggtgctatgactccgacgccccgtatatccaagggttttgtgatcagcagcgcaccagccagtgagagtgtctcttgcttgctgacaatcggcacaccacaggccacagagaaatctgatgacataaagagaccccacataatgctgttcggaaagcctatccttactgagcagcagatggattctggaggatcgagggaaggcctatcccaagaccgcaaggcttctgagcttgggctagaagacgggcactgcaaggtgtttatggaatcagaggatgttggccgcaccattgacctatctgtctttggttcgtacgaagagctgtacggccagttagcggacatgtttggaattgagaaggcggaaataatgaggcacctttgctaccgtgatgctgctggtgctgtcaggcatactggtgaagagccgttcaatgacttcatgaaagtagcacggaggctcaccattatagagggcacggaggggagactgcagaaacctctcgtggaatacatggtcgagcgggcttga

SEQ ID NO: 2560 - protein, 644 aa, Zea mays
MKEAGEERCLDPQLWHACAGGMVQMPPVRSRVYYFPQGHAEHAHGGGGATDLAGARARPLPPLVLCTVAGVRFLADPETDEVFAKIRLVPAAPGEVEFGEPREFGIDPEDAREKLSSFAKTLTQSDANNGGGFSVPRYCAETIFPKLDYRADPPVQTVLAKDVHGEVWKFRHIFRGTPRRHLLTTGWSAFVNQKKLVAGDSIVFLRTEHGELCVGIRRAKRVSCGGMECISGWNAPVYGALSAFLKDEEGKITKGPGGYMRGRGKVEITDVVEAASLAASGQPFEVVYYPRASTPEFVVKAASVQNAMRNQWCPGMRFKMAFETEDSSRISWFMGTIASAQVADPIRWPNSPWRLLQVSWDEPDLLQNVKCVNPWLVEIVSSIPPIHLGTFSPPRKKLRVAQHPDFPFEGQLLNPIFHGNPLGPSNSPLRCFSDIAPAGIQGARHAQFGLPLTDYQLNQLHLGFNRLGAMTPTPRISKGFVISSAPASESVSCLLTIGTPQATEKSDDIKRPHIMLFGKPILTEQQMDSGGSREGLSQDRKASELGLEDGHCKVFMESEDVGRTIDLSVFGSYEELYGQLADMFGIEKAEIMRHLCYRDAAGAVRHTGEEPFNDFMKVARRLTIIEGTEGRLQKPLVEYMVERA

SEQ ID NO: 2561 - DNA, 22 bp, Artificial sequence
  primer
atggcgagtgttgaaggtgatg

SEQ ID NO: 2562 - DNA, 21 bp, Artificial sequence
  primer
tcaccccctactacgattttc

SEQ ID NO: 2563 - protein, 1301 aa, Artificial sequence
  consensus sequence
  Variant (3)..(3): Xaa in position 3 is any amino acid
  Variant (11)..(12): Xaa in position 11 to 12 is any amino acid
  Variant (14)..(15): Xaa in position 14 to 15 is any amino acid
  Variant (17)..(17): Xaa in position 17 is any amino acid
  Variant (18)..(18): Xaa in position 18 is any or no amino acid
  Variant (20)..(20): Xaa in position 20 is any amino acid
  Variant (27)..(27): Xaa in position 27 is any amino acid
  Variant (29)..(30): Xaa in position 29 to 30 is any amino acid
  Variant (31)..(113): Xaa in position 31 to 113 is any or no amino acid
  Variant (115)..(120): Xaa in position 115 to 120 is any amino acid
  Variant (121)..(130): Xaa in position 121 to 130 is any or no amino acid
  Variant (133)..(136): Xaa in position 133 to 136 is any amino acid
  Variant (138)..(141): Xaa in position 138 to 141 is any amino acid
  Variant (143)..(145): Xaa in position 143 to 145 is any amino acid
  Variant (147)..(150): Xaa in position 147 to 150 is any amino acid
  Variant (157)..(158): Xaa in position 157 to 158 is any amino acid
  Variant (160)..(160): Xaa in position 160 is any amino acid
  Variant (162)..(182): Xaa in position 162 to 182 is any amino acid
  Variant (183)..(203): Xaa in position 183 to 203 is any or no amino acid
  Variant (205)..(205): Xaa in position 205 is any amino acid
  Variant (207)..(207): Xaa in position 207 is any amino acid
  Variant (222)..(222): Xaa in position 222 is any amino acid
  Variant (224)..(225): Xaa in position 224 to 225 is any amino acid
  Variant (227)..(230): Xaa in position 227 to 230 is any amino acid
  Variant (232)..(232): Xaa in position 232 is any amino acid
  Variant (234)..(234): Xaa in position 234 is any amino acid
  Variant (235)..(252): Xaa in position 235 to 252 is any or no amino acid
  Variant (254)..(255): Xaa in position 254 to 255 is any amino acid
  Variant (256)..(258): Xaa in position 256 to 258 is any or no amino acid
  Variant (260)..(260): Xaa in position 260 is any amino acid
  Variant (264)..(264): Xaa in position 264 is any amino acid
  Variant (266)..(266): Xaa in position 266 is any amino acid
  Variant (268)..(268): Xaa in position 268 is any amino acid
  Variant (270)..(272): Xaa in position 270 to 272 is any amino acid
  Variant (274)..(274): Xaa in position 274 is any amino acid
  Variant (279)..(279): Xaa in position 279 is any amino acid
  Variant (282)..(290): Xaa in position 282 to 290 is any amino acid
  Variant (293)..(293): Xaa in position 293 is any amino acid
  Variant (301)..(302): Xaa in position 301 to 302 is any amino acid
  Variant (305)..(305): Xaa in position 305 is any amino acid
  Variant (308)..(309): Xaa in position 308 to 309 is any amino acid
  Variant (311)..(311): Xaa in position 311 is any amino acid
  Variant (313)..(313): Xaa in position 313 is any amino acid
  Variant (317)..(319): Xaa in position 317 to 319 is any amino acid
  Variant (321)..(321): Xaa in position 321 is any amino acid
  Variant (323)..(326): Xaa in position 323 to 326 is any amino acid
  Variant (327)..(341): Xaa in position 327 to 341 is any or no amino acid
  Variant (343)..(344): Xaa in position 343 to 344 is any amino acid
  Variant (346)..(346): Xaa in position 346 is any amino acid
  Variant (349)..(350): Xaa in position 349 to 350 is any amino acid
  Variant (351)..(401): Xaa in position 351 to 401 is any or no amino acid
  Variant (403)..(404): Xaa in position 403 to 404 is any amino acid
  Variant (406)..(406): Xaa in position 406 is any amino acid
  Variant (407)..(408): Xaa in position 407 to 408 is any or no amino acid
  Variant (410)..(411): Xaa in position 410 to 411 is any amino acid
  Variant (413)..(413): Xaa in position 413 is any amino acid
  Variant (416)..(416): Xaa in position 416 is any amino acid
  Variant (418)..(418): Xaa in position 418 is any amino acid
  Variant (421)..(426): Xaa in position 421 to 426 is any amino acid
  Variant (428)..(430): Xaa in position 428 to 430 is any amino acid
  Variant (432)..(432): Xaa in position 432 is any amino acid
  Variant (435)..(435): Xaa in position 435 is any amino acid
  Variant (436)..(436): Xaa in position 436 is any or no amino acid
  Variant (438)..(438): Xaa in position 438 is any amino acid
  Variant (439)..(440): Xaa in position 439 to 440 is any or no amino acid
  Variant (442)..(447): Xaa in position 442 to 447 is any amino acid
  Variant (448)..(459): Xaa in position 448 to 459 is any or no amino acid
  Variant (464)..(464): Xaa in position 464 is any amino acid
  Variant (466)..(466): Xaa in position 466 is any amino acid
  Variant (469)..(471): Xaa in position 469 to 471 is any amino acid
  Variant (472)..(480): Xaa in position 472 to 480 is any or no amino acid
  Variant (483)..(484): Xaa in position 483 to 484 is any amino acid
  Variant (486)..(492): Xaa in position 486 to 492 is any amino acid
  Variant (493)..(496): Xaa in position 493 to 496 is any or no amino acid
  Variant (498)..(499): Xaa in position 498 to 499 is any amino acid
  Variant (501)..(501): Xaa in position 501 is any amino acid
  Variant (504)..(504): Xaa in position 504 is any amino acid
  Variant (506)..(506): Xaa in position 506 is any amino acid
  Variant (508)..(508): Xaa in position 508 is any amino acid
  Variant (512)..(517): Xaa in position 512 to 517 is any amino acid
  Variant (518)..(519): Xaa in position 518 to 519 is any or no amino acid
  Variant (523)..(523): Xaa in position 523 is any amino acid
  Variant (525)..(526): Xaa in position 525 to 526 is any amino acid
  Variant (528)..(592): Xaa in position 528 to 592 is any amino acid
  Variant (593)..(1219): Xaa in position 593 to 1219 is any or no amino acid
  Variant (1222)..(1223): Xaa in position 1222 to 1223 is any amino acid
  Variant (1225)..(1230): Xaa in position 1225 to 1230 is any amino acid
  Variant (1232)..(1232): Xaa in position 1232 is any amino acid
  Variant (1233)..(1233): Xaa in position 1233 is any or no amino acid
  Variant (1235)..(1237): Xaa in position 1235 to 1237 is any amino acid
  Variant (1239)..(1241): Xaa in position 1239 to 1241 is any amino acid
  Variant (1243)..(1245): Xaa in position 1243 to 1245 is any amino acid
  Variant (1246)..(1247): Xaa in position 1246 to 1247 is any or no amino acid
  Variant (1249)..(1256): Xaa in position 1249 to 1256 is any amino acid
  Variant (1257)..(1262): Xaa in position 1257 to 1262 is any or no amino acid
  Variant (1264)..(1264): Xaa in position 1264 is any amino acid
  Variant (1266)..(1266): Xaa in position 1266 is any amino acid
  Variant (1268)..(1271): Xaa in position 1268 to 1271 is any amino acid
  Variant (1277)..(1277): Xaa in position 1277 is any amino acid
  Variant (1278)..(1278): Xaa in position 1278 is any or no amino acid
  Variant (1280)..(1285): Xaa in position 1280 to 1285 is any amino acid
  Variant (1286)..(1300): Xaa in position 1286 to 1300 is any or no amino acid
LWXACAGPLVXXPXXGXXVXYFPQGHXEXXXXXXXXXXXXXXXXXXXXXXXXXXXXXXXXXXXXXXXXXXXXXXXXXXXXXXXXXXXXXXXXXXXXXXXXXXXXXXXXXXXXXAXXXXXXXXXXXXXXXXLPXXXXCXXXXVXXXAXXXXDEVYAQXXLXPXXXXXXXXXXXXXXXXXXXXXXXXXXXXXXXXXXXXXXXXXXFXKXLTASDTSTHGGFSVXRXXAXXXXPXLXXXXXXXXXXXXXXXXXXXDXXXXXPXQELXAXDXHXXXWXFRHIXRGXXXXXXXXXQPXRHLLTTGXXWSXFVXXKXLXAGDXXXFXRXXXXXXXXXXXXXXXXXXXLXXGXRRXXXXXXXXXXXXXXXXXXXXXXXXXXXXXXXXXXXXXXXXXXXXXXXXXXXXXSXXSXXXMXXGXLAXAXHAXXXXXXFXXXYXPRXXSXXXFXXXXXXXXXXXXXXXXXXGMRFXMXFEXXXXXXXXXXXXGTXXGXXXXXXXXXXXWXXSXWRXLXVXWDEXXXXXXXXRVSXWXXEXXXXXXXXXXXXXXXXXXXXXXXXXXXXXXXXXXXXXXXXXXXXXXXXXXXXXXXXXXXXXXXXXXXXXXXXXXXXXXXXXXXXXXXXXXXXXXXXXXXXXXXXXXXXXXXXXXXXXXXXXXXXXXXXXXXXXXXXXXXXXXXXXXXXXXXXXXXXXXXXXXXXXXXXXXXXXXXXXXXXXXXXXXXXXXXXXXXXXXXXXXXXXXXXXXXXXXXXXXXXXXXXXXXXXXXXXXXXXXXXXXXXXXXXXXXXXXXXXXXXXXXXXXXXXXXXXXXXXXXXXXXXXXXXXXXXXXXXXXXXXXXXXXXXXXXXXXXXXXXXXXXXXXXXXXXXXXXXXXXXXXXXXXXXXXXXXXXXXXXXXXXXXXXXXXXXXXXXXXXXXXXXXXXXXXXXXXXXXXXXXXXXXXXXXXXXXXXXXXXXXXXXXXXXXXXXXXXXXXXXXXXXXXXXXXXXXXXXXXXXXXXXXXXXXXXXXXXXXXXXXXXXXXXXXXXXXXXXXXXXXXXXXXXXXXXXXXXXXXXXXXXXXXXXXXXXXXXXXXXXXXXXXXXXXXXXXXXXXXXXXXXXXXXXXXXXXXXXXXXXXXXXXXXXXXXXXXXXXXXXXXXXXXXXXXXXXXXXXXXXXXXXXXXXXXXXXXXXXXXXXXXXXXXXXXXXXXXXXXXXXXXXXXXXXXXXXXXXXXXXXXXXXXXXXXXXGRXXDXXXXXXYXXLXXXLXXXFXXXXXLXXXXXXXXXXXXXXDXEXDXXXXGDDPWXXFXXXXXXXXXXXXXXXXXXXXXI

SEQ ID NO: 2564 - protein, 34 aa, Artificial sequence
  protein pattern
  Variant (2)..(2): Xaa in position 2 is Glu or Thr
  Variant (3)..(3): Xaa in position 3 is Leu or Val
  Variant (4)..(4): Xaa in position 4 is Ile, Leu, Met or Val
  Variant (5)..(5): Xaa in position 5 is Ala, Thr or Val
  Variant (6)..(6): Xaa in position 6 is any amino acid
  Variant (8)..(8): Xaa in position 8 is Ile, Leu or Val
  Variant (10)..(10): Xaa in position 10 is Ala, Asp, Glu, Gly, Asn or Ser
  Variant (11)..(12): Xaa in position 11 to 12 is any amino acid
  Variant (14)..(14): Xaa in position 14 is any amino acid
  Variant (16)..(16): Xaa in position 16 is Lys or Arg
  Variant (19)..(19): Xaa in position 19 is Phe or Tyr
  Variant (22)..(22): Xaa in position 22 is any amino acid
  Variant (24)..(24): Xaa in position 24 is any or no amino acid
  Variant (26)..(26): Xaa in position 26 is any or no amino acid
  Variant (30)..(30): Xaa in position 30 is Gln or Thr
  Variant (31)..(31): Xaa in position 31 is Ser or Thr
QXXXXXDXHXXXWXFXHIXRGXPXRXHLLXXGWS

SEQ ID NO: 2565 - protein, 15 aa, Artificial sequence
  protein pattern
  Variant (2)..(2): Xaa in position 2 is Cys, Ser, Thr or Val
  Variant (4)..(4): Xaa in position 4 is any amino acid
  Variant (12)..(12): Xaa in position 12 is Ala, Thr or Val
FXKXLTASDTSXHGG

SEQ ID NO: 2566 - protein, 16 aa, Artificial sequence
  protein pattern
  Variant (2)..(3): Xaa in position 2 to 3 is any amino acid
  Variant (4)..(6): Xaa in position 4 to 6 is any or no amino acid
  Variant (8)..(8): Xaa in position 8 is Phe or Val
  Variant (9)..(9): Xaa in position 9 is Ala or Ser
  Variant (12)..(12): Xaa in position 12 is Ala, Ser, Thr or Val
  Variant (13)..(13): Xaa in position 13 is Phe, Ile or Val
  Variant (14)..(14): Xaa in position 14 is Ile, Leu or Val
  Variant (15)..(15): Xaa in position 15 is Phe or Val
  Variant (16)..(16): Xaa in position 16 is Ile, Leu, Met or Val
FXXXXXLXXGDXXXXX

SEQ ID NO: 2567 - protein, 15 aa, Artificial sequence
  protein pattern
  Variant (2)..(3): Xaa in position 2 to 3 is any amino acid
  Variant (5)..(5): Xaa in position 5 is any amino acid
  Variant (8)..(8): Xaa in position 8 is any amino acid
  Variant (9)..(9): Xaa in position 9 is Leu or Val
  Variant (10)..(10): Xaa in position 10 is any amino acid
  Variant (12)..(12): Xaa in position 12 is any amino acid
WXXSXWRXXXVXWDE

SEQ ID NO: 2568 - protein, 22 aa, Artificial sequence
  protein pattern
  Variant (2)..(4): Xaa in position 2 to 4 is any amino acid
  Variant (5)..(6): Xaa in position 5 to 6 is any or no amino acid
  Variant (8)..(8): Xaa in position 8 is Asp, Glu or Asn
  Variant (9)..(9): Xaa in position 9 is any amino acid
  Variant (10)..(10): Xaa in position 10 is Ala, Asp, Glu or Thr
  Variant (11)..(11): Xaa in position 11 is Asn, Ser or Thr
  Variant (14)..(14): Xaa in position 14 is Ile or Val
  Variant (15)..(15): Xaa in position 15 is Phe or Tyr
  Variant (16)..(16): Xaa in position 16 is Ala or Thr
  Variant (17)..(17): Xaa in position 17 is any amino acid
  Variant (18)..(18): Xaa in position 18 is Ile, Leu, Met or Val
  Variant (19)..(19): Xaa in position 19 is any amino acid
  Variant (21)..(21): Xaa in position 21 is any amino acid
VXXXXXAXXXXDEXXXXXXLXP

SEQ ID NO: 2569 - protein, 12 aa, Artificial sequence
  protein pattern
  Variant (2)..(2): Xaa in position 2 is any amino acid
  Variant (5)..(5): Xaa in position 5 is any amino acid
  Variant (7)..(7): Xaa in position 7 is any amino acid
  Variant (10)..(10): Xaa in position 10 is Gly or Thr
  Variant (11)..(12): Xaa in position 11 to 12 is Asp or Glu
GXRFXMXFEXXX

SEQ ID NO: 2570 - protein, 13 aa, Artificial sequence
  protein pattern
  Variant (2)..(2): Xaa in position 2 is any or no amino acid
  Variant (4)..(4): Xaa in position 4 is any or no amino acid
  Variant (6)..(6): Xaa in position 6 is any amino acid
  Variant (7)..(7): Xaa in position 7 is Leu or Met
  Variant (8)..(8): Xaa in position 8 is Leu, Met or Val
  Variant (9)..(9): Xaa in position 9 is Ala, Leu or Val
  Variant (12)..(12): Xaa in position 12 is any amino acid
DXEXDXXXXGDXP

SEQ ID NO: 2571 - protein, 10 aa, Artificial sequence
  protein pattern
  Variant (2)..(2): Xaa in position 2 is any amino acid
  Variant (3)..(3): Xaa in position 3 is Leu or Val
  Variant (5)..(5): Xaa in position 5 is Ile or Val
  Variant (8)..(8): Xaa in position 8 is Ala or Leu
  Variant (9)..(9): Xaa in position 9 is any amino acid
  Variant (10)..(10): Xaa in position 10 is His, Lys or Arg
LXXGXRRXXX

SEQ ID NO: 2572 - protein, 28 aa, Artificial sequence
  protein pattern
  Variant (2)..(2): Xaa in position 2 is any amino acid
  Variant (3)..(3): Xaa in position 3 is Ile, Leu or Val
  Variant (5)..(5): Xaa in position 5 is Ile, Leu, Met or Val
  Variant (6)..(6): Xaa in position 6 is Ala, Gly, Asn, Ser or Thr
  Variant (7)..(10): Xaa in position 7 to 10 is any amino acid
  Variant (12)..(12): Xaa in position 12 is any amino acid
  Variant (13)..(13): Xaa in position 13 is Asp, Glu or Gln
  Variant (15)..(17): Xaa in position 15 to 17 is any amino acid
  Variant (18)..(18): Xaa in position 18 is Ile, Leu or Val
  Variant (19)..(19): Xaa in position 19 is Ala, Asp, Glu or Gly
  Variant (20)..(21): Xaa in position 20 to 21 is any amino acid
  Variant (23)..(23): Xaa in position 23 is Ala, Asp, Glu, Gly, Asn or Ser
  Variant (24)..(24): Xaa in position 24 is Phe, Ile, Leu or Met
  Variant (25)..(25): Xaa in position 25 is any amino acid
  Variant (27)..(27): Xaa in position 27 is any amino acid
RXXDXXXXXXYXXLXXXXXXXFXXXGXL

SEQ ID NO: 2573 - DNA, 309 bp, Arabidopsis thaliana
  CDS (1)..(309)
atggaaagcgttagaagtttagttgaagacaaaccagtggtgatattcagcaaaagctcttgctgcatgagccactcaattcaaacactgatctcagggtttggggcaaagatgacggtctacgagctagaccaattctcaaacggtcaggagatcgagaaggcattggtacagatggggtgtaaacccagtgtaccagctgtgttcatagggcaacaattcatcggtggtgctaaccaagtaatgactcttcaggtcaagaaccagctagccgcaatgctaagaagagccggagccatatgggtgtaa

SEQ ID NO: 2574 - protein, 102 aa, Arabidopsis thaliana
MESVRSLVEDKPVVIFSKSSCCMSHSIQTLISGFGAKMTVYELDQFSNGQEIEKALVQMGCKPSVPAVFIGQQFIGGANQVMTLQVKNQLAAMLRRAGAIWV

SEQ ID NO: 2575 - DNA, 511 bp, Glycine max
  CDS (108)..(416)
ctctgctacatgctcttcatctcttttctctgatcacatatctcatacacaaataacttctctacctaattcaagtaaccttacacttactatatatagatatatagatggatcgtgtggcgaaattggcatcacaaaaggcagtggtgatcttcagcaagagttcatgtgggatgtgccacgcgataaagcgactattctacgagcttggggtgggtcccacaatatatgaggtggacgaggagtcgagagggaaggaaatagagtggtgtctgatgagactagggtgcaacccttctgtgccagcagtgtttattggtggcaagtttgtgggtgcacccaacacagtgatgacccttcacctcaatggctcactaaagaaaatgctcagagatgctggagcactgtggctttaattggaacatgcatgctaattgagttgtacgtccttcttttattatattttctttacacaaccttcttttagaaaaagataaaattaagtattaac

SEQ ID NO: 2576 - protein, 102 aa, Glycine max
MDRVAKLASQKAVVIFSKSSCGMCHAIKRLFYELGVGPTIYEVDEESRGKEIEWCLMRLGCNPSVPAVFIGGKFVGAPNTVMTLHLNGSLKKMLRDAGALWL

SEQ ID NO: 2577 - DNA, 309 bp, Glycine max
  CDS (1)..(309)
atggagagggtgacaaagatggtatcagagaggccagtggtgatcttcagcaagagctcgtgctgcatgagccacaccatcaagaccctcttctgtgactttggggtgaatccagcggttcatgagctcgatgagatcccaagaggcagagacattgagcaagctctttccaggctaggttgtagtccctctgtgcctgctgtcttcattgcaggtgacctcattggtggagccaatgaagtcatgagccttcaccttaatcgctccttgattccaatgcttaagaaagcaggtgctctttgggtttaa

SEQ ID NO: 2578 - protein, 102 aa, Glycine max
MERVTKMVSERPVVIFSKSSCCMSHTIKTLFCDFGVNPAVHELDEIPRGRDIEQALSRLGCSPSVPAVFIAGDLIGGANEVMSLHLNRSLIPMLKKAGALWV

SEQ ID NO: 2579 - DNA, 309 bp, Glycine max
  CDS (1)..(309)
atggatagggtaagagagttggcatcaaagaaggcagcagttatattcaccaagagttcatgttacatgtgccacagcatcacgcaactgttctatgagcttggagcaagcccagcagtgcatgagctagacaaggatgcatatgggagggaaatggagtgggctttgaggagcatggggtgcaacccttcagtgccagcagtgttcattggtggaaaatttgtaggctcttcaaaggatgtcatatccctccatgttgatggctctctcaaacaaatgctcatggctgcaaaagccatatggttctag

SEQ ID NO: 2580 - protein, 102 aa, Glycine max
MDRVRELASKKAAVIFTKSSCYMCHSITQLFYELGASPAVHELDKDAYGREMEWALRSMGCNPSVPAVFIGGKFVGSSKDVISLHVDGSLKQMLMAAKAIWF

SEQ ID NO: 2581 - DNA, 312 bp, Sorghum bicolor
  CDS (1)..(312)
atggaccgggtgacaaagctggcttctcagcgtgcggtggtcatcttcagcacgagctcctgctgcatgtgccacacggtgacgcgcctgttccgcgagctcggggtgaacccgacggtggtggagctggaccaggaccccagggggaaggagatggacaaggcactggccaggctgctgggccgcaaccccgcggtgccggcggtgttcatcggcggcaggctcgtcggctccaccgacagggtgatgtcgcttcacctcagcggcaacctcgtcccgcttctgcgcaatgccggcgcgctctgggtgtag

SEQ ID NO: 2582 - protein, 103 aa, Sorghum bicolor
MDRVTKLASQRAVVIFSTSSCCMCHTVTRLFRELGVNPTVVELDQDPRGKEMDKALARLLGRNPAVPAVFIGGRLVGSTDRVMSLHLSGNLVPLLRNAGALWV

SEQ ID NO: 2583 - DNA, 315 bp, Zea mays
  CDS (1)..(315)
atggcggagagggtgtcgagactatcgacggagaaggcggtggtgatcttcacgacgagccagtgcccgatgtgccacacggtgtcgagcctcttctccgagctgggcgtgtgcgcggcggtgcacgagctggacaaggacccgcgcggccgcgacatggagcgcgacctcgcccgccgcctcggacgcgcgccgcccgtccccgccgtcttcatcggcggcaggctcgtcggctccaccgacaagatcatgtccctgcacctcgccggcaagctcgtgcccatgctcaagggcgccggcgccatatggctctga

SEQ ID NO: 2584 - protein, 104 aa, Zea mays
MAERVSRLSTEKAVVIFTTSQCPMCHTVSSLFSELGVCAAVHELDKDPRGRDMERDLARRLGRAPPVPAVFIGGRLVGSTDKIMSLHLAGKLVPMLKGAGAIWL

SEQ ID NO: 2585 - DNA, 312 bp, Zea mays
  CDS (1)..(312)
atggaccgggtgacgaaactggcttctcagcgcgcggtggtcatcttcagcacgagctcctgctgtatgtgccacacggtgacgcgcctgttccgcgagctcggggtgaacccgacggtggtggagctggacgaggaccccagggggaaggagatggagaaggcactggcgaggctgctcgggcgcaaccccgctgtgccggcagtgttcatcggcggcaggctcgtcggctccaccgacaaggtcatgtcgcttcacctgagcggcaacctcgttccgcttctgcgcaatgccggcgcgctctgggtgtag

SEQ ID NO: 2586 - protein, 103 aa, Zea mays
MDRVTKLASQRAVVIFSTSSCCMCHTVTRLFRELGVNPTVVELDEDPRGKEMEKALARLLGRNPAVPAVFIGGRLVGSTDKVMSLHLSGNLVPLLRNAGALWV

SEQ ID NO: 2587 - DNA, 315 bp, Zea mays
  CDS (1)..(315)
atggagcgcgtgatgaagatcgcgtcggagcgcgcggtggtggtgttcactctgagcagctgctgcatgtgccacacggtgacgaggctgatggcggacctgggcgtgaacgcgctggtgcacgagctggacagcgaccccaggggcaaggacatggagcgcgcgctgctcaagatgctgggagggaggggccccgccgtccccgccgtcttcatcggcggcaagcttgtcggcggaactaacagggtcatgtcgctccacctcgccggcgagctcgtgcccatgctcaagagcgccggtgcgctctggttgtag

SEQ ID NO: 2588 - protein, 104 aa, Zea mays
MERVMKIASERAVVVFTLSSCCMCHTVTRLMADLGVNALVHELDSDPRGKDMERALLKMLGGRGPAVPAVFIGGKLVGGTNRVMSLHLAGELVPMLKSAGALWL

SEQ ID NO: 2589 - DNA, 318 bp, Glycine max
  CDS (1)..(318)
atggacttgctggcaactttgactgctgacaagccagtggtgatcttcagcaagagcacttgtgccattagccattctgtgaaagctctcatatgcagctttggtgccaaccctacggttatcgagattgacaaaatgacaaatggtcagcaaatagagagggcactgattcaggttggttgccacccaactgtaccagcagtgttcattggacaacaacttataggtggtgctgacgaagtcatatgcctcaacgtccaaaacaggcttgcccagttgcttttgagggctagagctatatttatctggagttcatag

SEQ ID NO: 2590 - protein, 105 aa, Glycine max
MDLLATLTADKPVVIFSKSTCAISHSVKALICSFGANPTVIEIDKMTNGQQIERALIQVGCHPTVPAVFIGQQLIGGADEVICLNVQNRLAQLLLRARAIFIWSS

SEQ ID NO: 2591 - DNA, 351 bp, Bombyx mori
  CDS (1)..(351)
atgggttctcagtctggaaaaattacgcgttcatctaaaatggccggatctatagacattcaacagtttatcaaggaagctatctccaaagacaaagttgtagtgttctccaaatcttactgtccttactgtaagctggcaaaagatgtttttgagaaagtgaagcaaccaattaaagttattgagttgaatgaacgtgatgatggaaacaccattcaagataatctcgcacaactgactggtttcagaactgtacctcaagtctttataaatggcaactgtgtgggaggtggctctgatgttaaagcattgtatgaatctggaaaattagaacctatgttaataggataa

SEQ ID NO: 2592 - protein, 116 aa, Bombyx mori
MGSQSGKITRSSKMAGSIDIQQFIKEAISKDKVVVFSKSYCPYCKLAKDVFEKVKQPIKVIELNERDDGNTIQDNLAQLTGFRTVPQVFINGNCVGGGSDVKALYESGKLEPMLIG

SEQ ID NO: 2593 - DNA, 405 bp, Oryza sativa (japonica cultivar-group)
  CDS (1)..(405)
atggcggagagggtggcgcggctgtcgtcgcagagggcggtggtgatcttcggggcgagcaactgcttcatgtgccacgtggtgaagacgctcttctcggagctcggggtgagctgggcggtgcacgaggtggacaaggaccccaacggcaaggacgtcgagagggcgctcgccggaatggtcggccggacgccgccggtgccggccgtcttcatcggcggcaagctcgtcgggcccaccgaccaggtcatgtcgctccacctcgccggcaagctcgtcccgctcctccgcgaagccggcgccctctggctcagagatacgaacacgtactgtaccaaactgcagcagaagcagcagttgctgacctgtcgtcctggacggtttgccggcgtgatcaatttctag

SEQ ID NO: 2594 - protein, 134 aa, Oryza sativa (japonica cultivar-group)
MAERVARLSSQRAVVIFGASNCFMCHVVKTLFSELGVSWAVHEVDKDPNGKDVERALAGMVGRTPPVPAVFIGGKLVGPTDQVMSLHLAGKLVPLLREAGALWLRDTNTYCTKLQQKQQLLTCRPGRFAGVINF

SEQ ID NO: 2595 - DNA, 477 bp, Oryza sativa (japonica cultivar-group)
  CDS (1)..(477)
atgccgatgagcatgcactcacgcgaccaagtacagcgcctgccggcaggctttgttcatcacttggactccaactacggcgcggcggcggcggagcaggcgtggtacatgccggcggcggcgatggtggtggcagcggcggcggagacggcggcggagcgggtggagaggctggcgtcggagagcgcggtggtggtgttcagcgtgagcagctgctgcatgtgccacgccgtgaagcgcctcttctgcggcatgggcgtgcacccggcggtgcacgagctggacctcgacccgcgcggccgcgacctggagcgcgccctggcgcgcctcgtcggcgccggcggcgccgccgctgccgccgtgcccgtcgtgttcatcggcggcaagctggtcggcgccatggaccgcgtcatggccgcgcacatcaacggctccctcgtgccgctgctcaaggaggccggcgcgctctggctttag

SEQ ID NO: 2596 - protein, 158 aa, Oryza sativa (japonica cultivar-group)
MPMSMHSRDQVQRLPAGFVHHLDSNYGAAAAEQAWYMPAAAMVVAAAAETAAERVERLASESAVVVFSVSSCCMCHAVKRLFCGMGVHPAVHELDLDPRGRDLERALARLVGAGGAAAAAVPVVFIGGKLVGAMDRVMAAHINGSLVPLLKEAGALWL

SEQ ID NO: 2597 - DNA, 309 bp, Arabidopsis thaliana
  CDS (1)..(309)
atggatgtggtagcaagattagcgtcgcaaagagcggtggtgatattcagcaagagtacgtgttgcatgtctcatgcaattaaacggttgttttacgagcaaggtgtgagcccggcaattgtagagatcgaccaagacatgtatgggaaagatatcgagtgggccttggcccgattaggctgtagccctacggttcctgcggtttttgttggagggaaattcgtaggaacggccaatactgtcatgactcttcatctcaatggatcattgaaaatattgctcaaggaggctggtgctttgtggctttag

SEQ ID NO: 2598 - protein, 102 aa, Arabidopsis thaliana
MDVVARLASQRAVVIFSKSTCCMSHAIKRLFYEQGVSPAIVEIDQDMYGKDIEWALARLGCSPTVPAVFVGGKFVGTANTVMTLHLNGSLKILLKEAGALWL

SEQ ID NO: 2599 - DNA, 351 bp, Drosophila melanogaster
  CDS (1)..(351)
atgggtacggtggtcagcaccctgcagcgacccactctctacgtgagcatggacagctcgcatgcgcagttcgtgcgggacacaatcagcggcaacaaggtggtgatctttagcaagagctactgcccctactgcagcatggccaaggaacagttccgaaagatcaacgtcaaggcaacggtgattgagctggaccagcgggatgatggcaacgagatccaggcggttcttggcgagatgacgggctcgaggaccgttccacgttgcttcatcgatggcaagttcgtgggtggcggcaccgacgtgaagcggctatacgaacagggcatactgcagaagtattttcagtga

SEQ ID NO: 2600 - protein, 116 aa, Drosophila melanogaster
MGTVVSTLQRPTLYVSMDSSHAQFVRDTISGNKVVIFSKSYCPYCSMAKEQFRKINVKATVIELDQRDDGNEIQAVLGEMTGSRTVPRCFIDGKFVGGGTDVKRLYEQGILQKYFQ

SEQ ID NO: 2601 - DNA, 297 bp, Apis mellifera
  CDS (1)..(297)
atgcctacaacaaaagaggaagttaaccaacttattgcatctcatagcattgtgatattttctaaaacgagttgtccattttgcaaaatggctaaacaagtatttcataatttgcaaaaagaatatactgctatcgaactgaatgaaaggaatgatggagatgaaattcaaagtatattaggagaaatgactggagctagaacagtacctagagtatttgtaaatggagtatgcttaggaggtggaacagatgtgaagaaactttatgaaacaggagaattgcaaaaaatgttttaa

SEQ ID NO: 2602 - protein, 98 aa, Apis mellifera
MPTTKEEVNQLIASHSIVIFSKTSCPFCKMAKQVFHNLQKEYTAIELNERNDGDEIQSILGEMTGARTVPRVFVNGVCLGGGTDVKKLYETGELQKMF

SEQ ID NO: 2603 - DNA, 312 bp, Strongylocentrotus purpuratus
  CDS (1)..(312)
atggcacagacttttgtagatgctcagatacgtgacaataaggtggtgatgttttccaaaactttttgcccttactgcaagatggcaaaggattctctagctagcgctggtcttaaggattacaaggtggttgagttggaaaatcataacatgtgtgctgaaattcaggattatctgaacaagttgactggagctagatcggttccccgtgtgttcattggagggaagtgcatcggtggcggctctgaaaccaaagcgttgcaggaaagcgggaaattaaccaccatgctccaacagaatggtgcaatgtaa

SEQ ID NO: 2604 - protein, 103 aa, Strongylocentrotus purpuratus
MAQTFVDAQIRDNKVVMFSKTFCPYCKMAKDSLASAGLKDYKVVELENHNMCAEIQDYLNKLTGARSVPRVFIGGKCIGGGSETKALQESGKLTTMLQQNGAM

SEQ ID NO: 2605 - DNA, 381 bp, Strongylocentrotus purpuratus
  CDS (1)..(381)
atgactcactttgatgactggtctcttcaatccatgttgggtctggccagcctagtccaagggctcatcaaaggccatcggatcatgcttttttccaagagctactgcccgttctgcctgatggctaaatctgttctacaagatgttggtgctaatccggttaaggttctagagattgaagaaaggtctgatgaacaagaaatccaggatgttctgttggatctgacaggagtaagaacagttcctagtgtgtttatagaccaggactaccttggaggaggctcagatctgcagaggatgatggaagaagggcacttacaaaaactcctcagagaaaagggacttctgaatgccggaaatgaaagctcagcagacagataa

SEQ ID NO: 2606 - protein, 126 aa, Strongylocentrotus purpuratus
MTHFDDWSLQSMLGLASLVQGLIKGHRIMLFSKSYCPFCLMAKSVLQDVGANPVKVLEIEERSDEQEIQDVLLDLTGVRTVPSVFIDQDYLGGGSDLQRMMEEGHLQKLLREKGLLNAGNESSADR

SEQ ID NO: 2607 - DNA, 321 bp, Strongylocentrotus purpuratus
  CDS (1)..(321)
atggagggcaaagaggcaacgtacatcaaaggtatcacacatgataaatgtgtagtagtcttctccaagactcactgtccattttgccataaagtcaagacaatctttgaggacttcggtgccagctacgaagtggtggagatggataaacgttccgatacgagtgcaatgcaagctgtacttggaaagatgacgggtgcttccacggttccgcgagtattcatccagggcaagtgcgtaggcggttacgatgacaccaagagactacaggactcgggccgtctagaagagatgctacgggattgcaacgccatagagtaa

SEQ ID NO: 2608 - protein, 106 aa, Strongylocentrotus purpuratus
MEGKEATYIKGITHDKCVVVFSKTHCPFCHKVKTIFEDFGASYEVVEMDKRSDTSAMQAVLGKMTGASTVPRVFIQGKCVGGYDDTKRLQDSGRLEEMLRDCNAIE

SEQ ID NO: 2609 - DNA, 297 bp, Nasonia vitripennis
  CDS (1)..(297)
atgccgatcacccgtgaagctgtggaccagctaattgcctccgacaaggtggtaattttctcaaagaccacttgcccatactgcaaaatggccaaagaggtgtttgataaactgaagcaatcatacactgccatcgaattggacaagagagacgatgctgatgaaatccaagacattcttggtgaaatcactggagctcgaacagtcccaagggtattcttgaacaaggaattcatcggaggaggtactgatgtgaagaaactgtatgagagcggcgaacttgccaagaagttgtag

SEQ ID NO: 2610 - protein, 98 aa, Nasonia vitripennis
MPITREAVDQLIASDKVVIFSKTTCPYCKMAKEVFDKLKQSYTAIELDKRDDADEIQDILGEITGARTVPRVFLNKEFIGGGTDVKKLYESGELAKKL

SEQ ID NO: 2611 - DNA, 339 bp, Anopheles gambiae str. PEST
  CDS (1)..(339)
atgggttcattggttagccgaagcgttccagcaaacatgagcggtcccgtagcggaatttgtgaagagcgctatcgcgaaggataaggtggttatcttctccaagacctactgcccttactgtaccatggcaaaggagcccttcaagaagctgaaccaggagtacgcctgctacgagctggacaagcgtaacgatggtgacgagattcagtccgtcctcggcgagctgaccggtgcccgcacggtgccgcgcgtgttcattggcggcaattttgtcggtggcggtaccgacatcaagaagatgtacgacgacggtcggttacagaaaatgttggcctaa

SEQ ID NO: 2612 - protein, 112 aa, Anopheles gambiae str. PEST
MGSLVSRSVPANMSGPVAEFVKSAIAKDKVVIFSKTYCPYCTMAKEPFKKLNQEYACYELDKRNDGDEIQSVLGELTGARTVPRVFIGGNFVGGGTDIKKMYDDGRLQKMLA

SEQ ID NO: 2613 - DNA, 309 bp, Magnaporthe grisea 70-15
  CDS (1)..(309)
atgtctgaagcagcaaagcaaaaggctcaaaagctcattgacgagaacgccgttatggtgttcagcaagtcatactgcccctactgcaccgccaccaagtcgaagctcaaggatataggcgcaaagtacaacgtcctcgagctggaccagattgatgacggcagcgccatccaggatgcacttcaggagatcaccggccagcgctcggttcccaacattttcatcggccagaagcacattggcggcaactcggacttccaggcactcggcaactcggaaagcttgatcaaggcggcaggtgctttgtga

SEQ ID NO: 2614 - protein, 102 aa, Magnaporthe grisea 70-15
MSEAAKQKAQKLIDENAVMVFSKSYCPYCTATKSKLKDIGAKYNVLELDQIDDGSAIQDALQEITGQRSVPNIFIGQKHIGGNSDFQALGNSESLIKAAGAL

SEQ ID NO: 2615 - DNA, 843 bp, Magnaporthe grisea 70-15
  CDS (1)..(843)
atgccgtccccacggcgcttgcgtctcctgtgcatcgtcgccgttgccgttcttttcactcttctcttcacatcccgcctccgccaggccagcgataccgatgcaaactctattcaggggctttaccacaagactaggaccgccatcgacagagcccgcgctgatgggcaagccgccttgcagagatctaaaaatggagcagccaaggggcatctaactttggacaaggatgccgacggtgatattgatcaagacgacgaggtttttgcccaagaaatgtcagaccgcctgagggccgccgagcaaaaagccaaagatttagcaaactccaagtcgcccaacaagcccgacgcacccagacacattgtcggtgtcggcagctccgcgggtggccagactgcaaagaagaagacaaccaagccggcactggccgaggcggaagcagatgagaagtcaatggtggcgacgagcgaggacaaggaagccaaggcagagctcgacacaatacttcgaaaatccccagttgtcatcttttcgaaatcatactgtccgtactccaagcgagccaagggcatactgttggaaaagtacagcatacagccagccccgtacgtcgtcgaattggaccagcaccccctcggcccacaaatccagcagatgctgggtgacatgaccaaccggaaaaccgtgcccaacattctcgtcaacggcaagtccatcggcggtggagatgagattaccgagctcgacgcctcccagaagcttataacgactgtcaatttttgcggcgacaagcacattacaatgaaggagcgctttcccgaaaaggaggctgcggcatga

SEQ ID NO: 2616 - protein, 280 aa, Magnaporthe grisea 70-15
MPSPRRLRLLCIVAVAVLFTLLFTSRLRQASDTDANSIQGLYHKTRTAIDRARADGQAALQRSKNGAAKGHLTLDKDADGDIDQDDEVFAQEMSDRLRAAEQKAKDLANSKSPNKPDAPRHIVGVGSSAGGQTAKKKTTKPALAEAEADEKSMVATSEDKEAKAELDTILRKSPVVIFSKSYCPYSKRAKGILLEKYSIQPAPYVVELDQHPLGPQIQQMLGDMTNRKTVPNILVNGKSIGGGDEITELDASQKLITTVNFCGDKHITMKERFPEKEAAA

SEQ ID NO: 2617 - DNA, 321 bp, Gibberella zeae PH-1
  CDS (1)..(321)
atgtctcaagcatctaccaaggttcagcagcttatcgacaacaactctgttgttgtcttctccaagtcttactgcccctactgcaagcagaccaagaagactctggatgatttgaacaccgagtacgagctccttgagctcgacgaagttgccgatggctctgctctccaggacgctctcgagaagatctctggccagcgtaccgtccccaacgtctacatcaagcagcagcacattggtggtaactcagacctccagagcctgaactctggcggaaagctcaagaaccttctcaaggaggccaatgccttgaaggcgtaa

SEQ ID NO: 2618 - protein, 106 aa, Gibberella zeae PH-1
MSQASTKVQQLIDNNSVVVFSKSYCPYCKQTKKTLDDLNTEYELLELDEVADGSALQDALEKISGQRTVPNVYIKQQHIGGNSDLQSLNSGGKLKNLLKEANALKA

SEQ ID NO: 2619 - DNA, 636 bp, Kluyveromyces lactis NRRL Y-1140
  CDS (1)..(636)
atgttgagtaagagaagtttgaggctggtaagtctcaccggtatggtgattttcgttcttttcttcatcaggcacaatgcagagtccgtgacgcgttcttacgtggggaaagaatctagcaacctcgcgaatgatgccaaggtcgagagtgacatcaacaatatccaagaaggtattgctgaaaccaagagtaacgcggttgttgctgataccagcaacgcagttaaaaatatggctgggcccaacggtgtgaaagactctgatttcgctgctgaagtagaaacatacaacgctgaagctgagtacaagaatatcctttctcaatcaccaatcgtggtgttttctaagagttactgtcctttcagtacgaggctcaagaacttgttgaaggagtatgaatttgatccaatttatactatcgttgaattggataagcatgagaatggagctgaactacagaaatatatcggtagcaagacaggaaggtctactgttcctaacgttattatcaatggtatatctcgtggtggtagcgatgaatttgctggattacatgaggataattcattattacagagcttgaagacatgggccggatctactttatccgtgaagaaagctgctgctgcgacttaa

SEQ ID NO: 2620 - protein, 211 aa, Kluyveromyces lactis NRRL Y-1140
MLSKRSLRLVSLTGMVIFVLFFIRHNAESVTRSYVGKESSNLANDAKVESDINNIQEGIAETKSNAVVADTSNAVKNMAGPNGVKDSDFAAEVETYNAEAEYKNILSQSPIVVFSKSYCPFSTRLKNLLKEYEFDPIYTIVELDKHENGAELQKYIGSKTGRSTVPNVIINGISRGGSDEFAGLHEDNSLLQSLKTWAGSTLSVKKAAAAT

SEQ ID NO: 2621 - DNA, 342 bp, Debaryomyces hansenii CBS767
  CDS (1)..(342)
atgttcgaatatattaagtcatggttcgtttcacctccagtatcgcctgtaataaaggctgaagttcaaaatttaattgatagtaataaaatcttaattttcctgaagtcatattgtccatactgtgattccaccaaagacttaatcaagtccataacgtccgactttaaagtggttgagttgaatacttcggctaatggtagaacgatacaagatgctttacgtgaaatgacaggacaaaacactgttccaaatatttttatcaataggaaacatatcggtggcaattcagatctccaggctttacaaggagccggcaaacttaagtcattagttaactaa

SEQ ID NO: 2622 - protein, 113 aa, Debaryomyces hansenii CBS767
MFEYIKSWFVSPPVSPVIKAEVQNLIDSNKILIFLKSYCPYCDSTKDLIKSITSDFKVVELNTSANGRTIQDALREMTGQNTVPNIFINRKHIGGNSDLQALQGAGKLKSLVN

SEQ ID NO: 2623 - DNA, 315 bp, Debaryomyces hansenii CBS767
  CDS (1)..(315)
atggtctctcaacatactaccgacaaggttcaacaattgattaaaactaagccagttttcatcgcttcaaagtcctactgtccatactgtgctaagactaagaataccatttcgtccatcactaaggatgcttacatcattgaattagatgaagtggaagatggtagtgaaattcaagaagctttatacgaattaactggacaaaagaccgttccaaatgttttcattggaggtgaacacattggtggtaactctgatgttcaagaattgagttccggtgataaattggaaagcaagatcaaggctgtcttataa

SEQ ID NO: 2624 - protein, 104 aa, Debaryomyces hansenii CBS767
MVSQHTTDKVQQLIKTKPVFIASKSYCPYCAKTKNTISSITKDAYIIELDEVEDGSEIQEALYELTGQKTVPNVFIGGEHIGGNSDVQELSSGDKLESKIKAVL

SEQ ID NO: 2625 - DNA, 318 bp, Yarrowia lipolytica CLIB122
  CDS (1)..(318)
atggccaccgagtccgctatcaagaccatcaaggagcacattgccaaggacaaggtcttcgtggcctccaagtcctactgcccctactgcaagcagaccaagcagctgctttcccagttcaaggaggccaagcccgtgattctcgagctcgacgagcttgacgatggtgccgagctccaggctgctctcgccgagatcactggccagcgaaccgttcccaacgttttcattggaggccagcacattggtggcaactccgatctgcaggttcttgcccagaaggacgagctggccgataagatcaaggctgccctttaa

SEQ ID NO: 2626 - protein, 105 aa, Yarrowia lipolytica CLIB122
MATESAIKTIKEHIAKDKVFVASKSYCPYCKQTKQLLSQFKEAKPVILELDELDDGAELQAALAEITGQRTVPNVFIGGQHIGGNSDLQVLAQKDELADKIKAAL

SEQ ID NO: 2627 - DNA, 630 bp, Yarrowia lipolytica CLIB122
  CDS (1)..(630)
atggtctccaccagaagaacccgagttctcattcttacagccatcctcttcacagtgggtcttttgatcttcgccgttcacggaccgcgatacgatctggctgtggacccgcgttcgtccagccaaaaaaccgtcaaaactacggacaacaacatcgacaaggaggtgctggaggtcaacgaggatgagggagtggcccacaagagcgagaaggaaaagacagaaaaaatcgtcaagggcgaggaaaaggccgacttgaccacgtcccagggcgaggagttcaaccccgagaaggaataccagtcgattctcaagttggcaccagtcattgtcttctccaagtcatactgcccccattcgcagtttgtcaaggacctgttgcaaaaggaatacgccatcacgcccgacctgcagattgtcgagctggataagcaccccagcggcccggagctgcaggcatatgtgaaacagaagaccggacgaggaaccgtgcccaatgtgattgtggccggcaagtctcttggaggaggagacgagatgcgagctctgcataaggatggcgagctcgcagagacattccatgaggccggacccaaggccctgaccgtcgttagaagatcccctttgtag

SEQ ID NO: 2628 - protein, 209 aa, Yarrowia lipolytica CLIB122
MVSTRRTRVLILTAILFTVGLLIFAVHGPRYDLAVDPRSSSQKTVKTTDNNIDKEVLEVNEDEGVAHKSEKEKTEKIVKGEEKADLTTSQGEEFNPEKEYQSILKLAPVIVFSKSYCPHSQFVKDLLQKEYAITPDLQIVELDKHPSGPELQAYVKQKTGRGTVPNVIVAGKSLGGGDEMRALHKDGELAETFHEAGPKALTVVRRSPL

SEQ ID NO: 2629 - DNA, 309 bp, Aspergillus nidulans FGSC A4
  CDS (1)..(309)
atgtcttccgcaaaggtcaaggcccagcaaatcattgatgagaacggcgttgtcgtcttctccaagtcctactgcccctactgcaaggccagcaagagcctcctgagcgaactgggcgccaaatactacgcgcttgagctggataccatcgatgacggagctgacctccagaacgcccttgaggaaatcagcggccagcgcaccgttcccaacatctacattgccaaaaagcacattggtggaaactcggacctccagggtatcaagaaggatctgcccgcgctgttaaaggatgctggagctctgtaa

SEQ ID NO: 2630 - protein, 102 aa, Aspergillus nidulans FGSC A4
MSSAKVKAQQIIDENGVVVFSKSYCPYCKASKSLLSELGAKYYALELDTIDDGADLQNALEEISGQRTVPNIYIAKKHIGGNSDLQGIKKDLPALLKDAGAL

SEQ ID NO: 2631 - DNA, 690 bp, Candida albicans SC5314
  CDS (1)..(690): transl_table=12
atggctggagttagacaattaagaataatagcattaacggcctttgtccttggtttaatttttactttacataaagttggatccaacgctgcatccttggttcatgcacaagcatcagaccaacaaccaaacaaacataacaccaaaagtactacatataccgccactaatgacgaatcagttgccaatctcattgattctaaaaatgatcctcaaactgatgacaaaataaatcaaaaaatatcacaagatcaagatgaagccatcaatggtaataaagacactaataaagacaccaccaaagtcaaaccagataatggtgaatatgacccaatatctgatttgataaaaattagatcattatcaccaatgacaattttcagtaaatcatattgtccatattcaaaaaagattaaacaattgttattagaaaaatatgatataacaccagcaccaaatgttgttgaattagatcgatatgaatatggagctgaattacaaagttatttgacagagaagagtgggagaagaactgtgccaaacgtattggttggtaaatcatttgaaagtaggggtggttgtgatgaatttgaaaaacttcataaagataatgatttgattaaattgttagttgaatgggggtctggtcgtttacaagttgcaaagaagaataccccatcaaatgcctaa

SEQ ID NO: 2632 - protein, 229 aa, Candida albicans SC5314
MAGVRQLRIIALTAFVLGLIFTLHKVGSNAASLVHAQASDQQPNKHNTKSTTYTATNDESVANLIDSKNDPQTDDKINQKISQDQDEAINGNKDTNKDTTKVKPDNGEYDPISDLIKIRSLSPMTIFSKSYCPYSKKIKQLLLEKYDITPAPNVVELDRYEYGAELQSYLTEKSGRRTVPNVLVGKSFESRGGCDEFEKLHKDNDLIKLLVEWGSGRLQVAKKNTPSNA

SEQ ID NO: 2633 - DNA, 360 bp, Candida albicans SC5314
  CDS (1)..(360): transl_table=12
atgtttcgtacattattaaccaaaagactattcaatacatcaacaatggtttcatctcaagttaagaacaaggtcgaacaattgatcaaaaccaaaccagttttcattgcctccaaatcctattgtccatactgtaaggctaccaaaagcacaattgaagctataacaaaggatgcttacattcttgaattagacgaagttgacgacggtgctgaaatccaagaagcattattggaaatcactggtcaaagaaccgttccaaatgtctttattggtggtcaacatattggtggcaattccgatgtgcaagctttgaagtctagtgacaaattagatgacaaaatcaaagctgctttataa

SEQ ID NO: 2634 - protein, 119 aa, Candida albicans SC5314
MFRTLLTKRLFNTSTMVSSQVKNKVEQLIKTKPVFIASKSYCPYCKATKSTIEAITKDAYILELDEVDDGAEIQEALLEITGQRTVPNVFIGGQHIGGNSDVQALKSSDKLDDKIKAAL

SEQ ID NO: 2635 - DNA, 309 bp, Ustilago maydis 521
  CDS (1)..(309)
atggcggctaaacaggcagctgaaaagctcatctcggagcacctcgtggcggtcttcagcaagagctattgtccttactgctcacaggccaagagtgtcatagaaaagctcggtctggacaagagcaaagtcggaattctcgagctcgaccagatgggttccgaaggcagcgacatccaggcttacctcctcgacaagaccagccagcgtacggtccccaacatctttatcaaccagaaacacctcggtggctgctccgacctgctcgacgctcagaagagtggaaagctccaacagctcctccagtag

SEQ ID NO: 2636 - protein, 102 aa, Ustilago maydis 521
MAAKQAAEKLISEHLVAVFSKSYCPYCSQAKSVIEKLGLDKSKVGILELDQMGSEGSDIQAYLLDKTSQRTVPNIFINQKHLGGCSDLLDAQKSGKLQQLLQ

SEQ ID NO: 2637 - DNA, 441 bp, Cryptococcus neoformans var. neoformans B-3501A
  CDS (1)..(441)
atgtcttttactgctcttcatcgtctctcaacactctcaacccacattatcagagcacccatttctactaggtatttcgctactacccaaaccgccaagataggatcatccatttcaactcccaacatgaccgccgacgttaaatctttggtcgacaaggccatcgccgataacaaggtcgtcgtattttccaagacctactgcccttactgcaagcgggccaaatcttacctcgctgaggacactaaggacatcgagatccttgagctcgacgagcgtgaggacggcgctgccatccaggcttacctcaaggaactcaacggccaaggcactgttccccatgtctacatcaacaaggagttcatcggcggttccagcgacctcctcaaactctcccacgagcaggtcaagcagaagatctctgctgccgcgtccgcttag

SEQ ID NO: 2638 - protein, 146 aa, Cryptococcus neoformans var. neoformans B-3501A
MSFTALHRLSTLSTHIIRAPISTRYFATTQTAKIGSSISTPNMTADVKSLVDKAIADNKVVVFSKTYCPYCKRAKSYLAEDTKDIEILELDEREDGAAIQAYLKELNGQGTVPHVYINKEFIGGSSDLLKLSHEQVKQKISAAASA

SEQ ID NO: 2639 - DNA, 471 bp, Candida albicans SC5314
  CDS (1)..(471): transl_table=12
atggactatttccaaacagaaaagacaacagaaacaagacaacaacgacaacaaaaaaaaagacccgtgagaaactcaatcatttgtactctttctttatcttatcaaccaaattttgtcatgagcctgcttattggatggttatcatcgtggttccaaaatgaaccaatcaccccagaattgaagaaagagatagaatccaacattaattcacacaaggtacttgtttattccaaatcttattgtccttattgtacttcaacaaaaacattattgcaaagcttaaaccaagattacaaagttattgaattagatcaaattccgaaaggttctgcaattcaaaatggattacaagaattaactggtcaacgtaccgttcctaatgttttcattaatgggaaacatattggcggtaattccgatattcaagctttacattcccaaggcaaattaaaaccactttttggatag

SEQ ID NO: 2640 - protein, 156 aa, Candida albicans SC5314
MDYFQTEKTTETRQQRQQKKRPVRNSIICTLSLSYQPNFVMSSLIGWLSSWFQNEPITPELKKEIESNINSHKVLVYSKSYCPYCTSTKTLLQSLNQDYKVIELDQIPKGSAIQNGLQELTGQRTVPNVFINGKHIGGNSDIQALHSQGKLKPLFG

SEQ ID NO: 2641 - DNA, 309 bp, Tribolium castaneum
  CDS (1)..(309)
atgtcttcggaaaagtctaaatcgaagttcgtgcagaatctgatcgcgagcgacaccgtggtcatattttcgaaaacctactgtccctactgccagctgacgaaggaaatcttcgacgacatggaccagaagttcaccgccatcgagctggacagcaggaaggactgcgaggaaattcaggaggtcctcgggcagatgacaggtgcccgcacagtcccgcgcgttttcgtcaacggatcgttcctcggaggagcttcggatataaagaagctttatgaaaatggacagctacagacttatcttgattaa

SEQ ID NO: 2642 - protein, 102 aa, Tribolium castaneum
MSSEKSKSKFVQNLIASDTVVIFSKTYCPYCQLTKEIFDDMDQKFTAIELDSRKDCEEIQEVLGQMTGARTVPRVFVNGSFLGGASDIKKLYENGQLQTYLD

SEQ ID NO: 2643 - DNA, 384 bp, Medicago truncatula
  CDS (1)..(384)
atgtaccaagcaattccatatagaacaagtgtatctacagtaacacgtaacctaccaatcaccacaggaatccttgaatccaacgtaacaacaatggtttcagaaaacgcagttattatcattggcacacgaggatgctgtctctgccatgttgtcaaaagattgttacaaggtctaggagtcaaccctcctgtctatgaggttgatcaagaccatgaaactgccgttgctgcccaactgtccaccaacaccgccgaaacagttcagtttccggcggtgttcgttggtggaaagttgcttggagggttggaaagagtcatggcaagtcatatctcaggagaattggttcctatattaaaagatgctggtgccttgtggctttga

SEQ ID NO: 2644 - protein, 127 aa, Medicago truncatula
MYQAIPYRTSVSTVTRNLPITTGILESNVTTMVSENAVIIIGTRGCCLCHVVKRLLQGLGVNPPVYEVDQDHETAVAAQLSTNTAETVQFPAVFVGGKLLGGLERVMASHISGELVPILKDAGALWL

SEQ ID NO: 2645 - DNA, 306 bp, Vitis vinifera
  CDS (1)..(306)
  misc_feature (225)..(225): r is g or a
  misc_feature (273)..(273): y is t or c
atggtttcagagaacgccgtcatagtgttcggaagacgtgggtgttgcatgacccatgtcgtgaagcgcctgcttctgggtctgggcgtcaacccggccgtctgcgaagtgaacgaagaggatgaaattggtgtcctagatgagctggggatggtcggcgccggcgagggaaagcagggcgcagtgcagtttccggcggtgttcatcggaggaaggttgtttggrgggttggatagagtcatggccgctcatattactggagaattggttccyatattgaaacaagctggggctttgtggctttga

SEQ ID NO: 2646 - protein, 101 aa, Vitis vinifera
MVSENAVIVFGRRGCCMTHVVKRLLLGLGVNPAVCEVNEEDEIGVLDELGMVGAGEGKQGAVQFPAVFIGGRLFGGLDRVMAAHITGELVPILKQAGALWL

SEQ ID NO: 2647 - DNA, 324 bp, Vitis vinifera
  CDS (1)..(324)
atggcggatccgctggagcgagtggcgaggctggcgtcggagaatgcggtggtgatcttcagcctcagctcctgctgcatgtgccatgccgtgaagaggctcttctgcggaatgggcgtgaacccgactgtgtacgagctggaccaggaccccagagggaaggagattgagcgggcgttgatgaggctgctggggaactctccggcggtgcctgtggtgttcatcggggggaagctcgtggggtcaatggacagtgtcatggcttcacatatcaatgggactctggtccctctcctcaaggaagccggagctctctggctctga

SEQ ID NO: 2648 - protein, 107 aa, Vitis vinifera
MADPLERVARLASENAVVIFSLSSCCMCHAVKRLFCGMGVNPTVYELDQDPRGKEIERALMRLLGNSPAVPVVFIGGKLVGSMDSVMASHINGTLVPLLKEAGALWL

SEQ ID NO: 2649 - DNA, 321 bp, Vitis vinifera
  CDS (1)..(321)
atggattcggtgatggcattggggactgcaaagccagtggtgatctttaccaagaactcattatgttgcatgagccacagcattaagacactcataagcagctatggggccagtcctacggtctatgagcttgatgaaatgccaaacggagagcaaatggaaaaggccctaccaatactagggtgtccgaatttaccagcggtattcataggtaaaaagctggtgggtggggctcgtgagataatgagcctgcaagtcaggggcgagctctctgatctgctcatagaggcaaaagctatatttttttggaacaaaaaatag

SEQ ID NO: 2650 - protein, 106 aa, Vitis vinifera
MDSVMALGTAKPVVIFTKNSLCCMSHSIKTLISSYGASPTVYELDEMPNGEQMEKALPILGCPNLPAVFIGKKLVGGAREIMSLQVRGELSDLLIEAKAIFFWNKK

SEQ ID NO: 2651 - DNA, 345 bp, Vitis vinifera
  CDS (1)..(345)
atggcgttgcaaaaggcccaggagatggtttcttcaaatcctgtcgtcgtcttcagcaagacgtattgtccgttctgcgtgagcgtgaagaagttgttatcggagctgggagctactttcaaggtcgtcgaattggatactgaaagtgatggagctgatcttcaatcagcacttgctgggtggaccggacagcgtactgtgccaaacgtgtttatcggtggaaagcacattggtggctgtgacaccgccacagccttgcacagtgatgggaaacttgttcctttgcttactgaagctggagctattacgtcctcctctaacgaagggagttctgttacctgttga

SEQ ID NO: 2652 - protein, 114 aa, Vitis vinifera
MALQKAQEMVSSNPVVVFSKTYCPFCVSVKKLLSELGATFKVVELDTESDGADLQSALAGWTGQRTVPNVFIGGKHIGGCDTATALHSDGKLVPLLTEAGAITSSSNEGSSVTC

SEQ ID NO: 2653 - DNA, 414 bp, Vitis vinifera
  CDS (1)..(414)
  misc_feature (18)..(18): y is t or c
  misc_feature (63)..(63): m is a or c
atgcaaggtgtgcggcgyttccggacgttaacggagggcggcgtccgcctggagctcactccmaccaccacctccccgctggccatcgacgtcactgaatcaaccgagatgaggatccagcgcctcatctccgagaacccagtcatcatcttcagccgtccctcctgctgcatgtgccacgtcatgaagcgcctgctctccaccatcggcgtgcaccccaccgtcatcgaattggacgacgaggagatcggagccctcgccgcccactccgccgactccacctccaccgcccccgtcgcccccgccgtcttcatcggcggcacacgtgtcggaggcctggagagcctcgtggccctccacctcagcggccacctcgtccctcgcctcgtcgaagttggtgctctctgggtatga

SEQ ID NO: 2654 - protein, 137 aa, Vitis vinifera
MQGVRRFRTLTEGGVRLELTPTTTSPLAIDVTESTEMRIQRLISENPVIIFSRPSCCMCHVMKRLLSTIGVHPTVIELDDEEIGALAAHSADSTSTAPVAPAVFIGGTRVGGLESLVALHLSGHLVPRLVEVGALWV

SEQ ID NO: 2655 - DNA, 315 bp, Fritillaria agrestis
  CDS (1)..(315)
atggctctcgcgaaggcaaaggatctcgtcgcctccaaccccgtcgtcgtcttcagcaagtcatactgtccctactgtatccgggttaaggagttgctggtgaagttgaaggcaacttacaaagtgattgaattggatctggaaagtgatggatcggcaatacaagctgcactagctgagtggaccggacaaaggacggtgccaaatgttttcatcggtgggaagcatatcggtggctgtgataagactatggagctgtacaactctggcaagctgcagccgttgttggtggaggctggggctcttgctgcttag

SEQ ID NO: 2656 - protein, 104 aa, Fritillaria agrestis
MALAKAKDLVASNPVVVFSKSYCPYCIRVKELLVKLKATYKVIELDLESDGSAIQAALAEWTGQRTVPNVFIGGKHIGGCDKTMELYNSGKLQPLLVEAGALAA

SEQ ID NO: 2657 - DNA, 402 bp, Thellungiella halophila
  CDS (1)..(402)
atgggtagccagcatcgtcgccgtcttgccatcgcggcggtgccggtactcctattactcgtggttgtcagcgagctgtcagattcagccggcgctgcgaattcggtatcggctttcgttcagaacgccatcttgtccaacaagattgtcatcttctccaagtcctactgcccgtattgcttgcgttcgaaacgtattttcagcgaacttaaggagcagccatttgttgtggagcttgatcagagagaggacggagatcaaatccagtacgagcttctggaattcgttggtcgccgaactgtcccgcaagtttttgtaaacggcaagcacattggtggatcagatgatcttggagctgctgtggagaatggtcagttgcaaaagcttcttgctgcaagttga

SEQ ID NO: 2658 - protein, 133 aa, Thellungiella halophila
MGSQHRRRLAIAAVPVLLLLVVVSELSDSAGAANSVSAFVQNAILSNKIVIFSKSYCPYCLRSKRIFSELKEQPFVVELDQREDGDQIQYELLEFVGRRTVPQVFVNGKHIGGSDDLGAAVENGQLQKLLAAS

SEQ ID NO: 2659 - DNA, 309 bp, Plantago major
  CDS (1)..(309)
atggagaaggtgttgcaaatggcatcagaaaacggaatcgtgatcttcagcaagagcacatgttgcttgagctatacagtccagatgctgttccaacagcttgggactcacccctgtatccatgacctggaccatgatccagaaggcaaggaagtcgagaaggctttgatgaggatgggatgcggtggtcctgttcctgcggttttcattgatggaaacctcgtgggatcgaccaatgaggtcatgtccctccatttgagtggtactctccttcctatgctcggagcacaccgtgctaagctgcattaa

SEQ ID NO: 2660 - protein, 102 aa, Plantago major
MEKVLQMASENGIVIFSKSTCCLSYTVQMLFQQLGTHPCIHDLDHDPEGKEVEKALMRMGCGGPVPAVFIDGNLVGSTNEVMSLHLSGTLLPMLGAHRAKLH

SEQ ID NO: 2661 - DNA, 312 bp, Musa acuminata
  CDS (1)..(312)
atggacagggtgatgaagttggcctcgcagaaggcagtggtaatcttcagcttgagctcatgctgcatgtgccacaccatcaagaggctcttctgcgagctgggagtcaatcctgctgtttatgagcttgacgaagaccccagagggagagagatggagaaggcactggtcaagctgctcggccgcaacccctcggtgccggtcgtgttcatcggaggaaagctcgttggatccaccgataggatcatggcccttcatcttggtggcaagctgactccattgcttcgggaggctggtgctctatggctttga

SEQ ID NO: 2662 - protein, 103 aa, Musa acuminata
MDRVMKLASQKAVVIFSLSSCCMCHTIKRLFCELGVNPAVYELDEDPRGREMEKALVKLLGRNPSVPVVFIGGKLVGSTDRIMALHLGGKLTPLLREAGALWL

SEQ ID NO: 2663 - DNA, 450 bp, Medicago truncatula
  CDS (1)..(450)
atgcaagacctacgtcgttactcaaacgacaccattcaactagacctagccaccaccacaacaaccaccaccaccaccatgtccatgagttccaactcctcctcttccttatccatagacgttgatgaatcagcagaaacacgcatccaccgtctcatatcagaacatccagttatcatcttcacacgttcctcttgctgcatgtgtcatgtcatgaagaagcttctctccaccataggtgttaatcccaccgtcatcgaattagacgacaacgagatcgcctctttgtcgtctgacgatgacgatgatcttgcttccgtcctccgtaaccgctctcctgctgtcttcattggtggtgcttgcgttggtggtcttgagagtcttgttgctcttcatgttggtggtcatcttgttcctaaactcgttcaagttggtgctctttatgtatga

SEQ ID NO: 2664 - protein, 149 aa, Medicago truncatula
MQDLRRYSNDTIQLDLATTTTTTTTTMSMSSNSSSSLSIDVDESAETRIHRLISEHPVIIFTRSSCCMCHVMKKLLSTIGVNPTVIELDDNEIASLSSDDDDDLASVLRNRSPAVFIGGACVGGLESLVALHVGGHLVPKLVQVGALYV

SEQ ID NO: 2665 - DNA, 357 bp, Medicago truncatula
  CDS (1)..(357)
atgtccaactccaactcaccctcttcatcttctctatccatggacatagacgaatccacagaaactcgaatcaaccgcctcatatcagaacaccctgtcatcatcttcacccgatcctcctcatgctgcatgtgccatgtcatgaggaatctcctcttcaccatcggcgttcatcccaccgttatccaattggatgacaacgagatccccgccgtccccaccacctccgatcactctctcactcccgctgctttcatcggcggtatctgcatcggtggcttggagtcccttgttgctcttcatgtcaccggtcacctcgttcccaagcttgttcaagttggtgctctttggaattga

SEQ ID NO: 2666 - protein, 118 aa, Medicago truncatula
MSNSNSPSSSSLSMDIDESTETRINRLISEHPVIIFTRSSSCCMCHVMRNLLFTIGVHPTVIQLDDNEIPAVPTTSDHSLTPAAFIGGICIGGLESLVALHVTGHLVPKLVQVGALWN

SEQ ID NO: 2667 - DNA, 384 bp, Medicago truncatula
  CDS (1)..(384)
atgggttctattcttggttctcagaagactcaagggaccaaagaagagatggaaacagcgttgaataaaactaaacagatcgctgcctcttcccccgtctttgtcttcagtaagacttattgtggttactgcaaaagggtcaaggatctactcaaacagctaggagcaacctacaaggtccttgaaatggatatagaaagtgatggagatgagattcatgcagcattaactgagtggacagggcaaaggacagtacctaatgtgtttattggaggcaagcacattggtggttgtgactctattttggagaaacaccgtgcaggtcaattgattcctcttctcactgatgctggagccatcgccaagaactctgctcagctctga

SEQ ID NO: 2668 - protein, 127 aa, Medicago truncatula
MGSILGSQKTQGTKEEMETALNKTKQIAASSPVFVFSKTYCGYCKRVKDLLKQLGATYKVLEMDIESDGDEIHAALTEWTGQRTVPNVFIGGKHIGGCDSILEKHRAGQLIPLLTDAGAIAKNSAQL

SEQ ID NO: 2669 - DNA, 366 bp, Medicago truncatula
  CDS (1)..(366)
atgggttctatgcagagttctcagaagagcaaagaagagatggaaactgccatgaataaagctaaggagattgccgcttcatcccccgtctttgtcttcagtaagacttattgtggttactgcaatcgggtcaaggatctactcaaacagctgggagcagcccacaaggtcattgaattggatacagaaagtgatgggggtgagattcaagcagcattagctgagtggacagggcaaaggacagtacctaacgtgtttattggaggcaagcacattggtggttgtgattctgttttggagaaacaccggacaggtcaattggttccccttctcaatgatgctggagccatcccgctcagcacttaa

SEQ ID NO: 2670 - protein, 121 aa, Medicago truncatula
MGSMQSSQKSKEEMETAMNKAKEIAASSPVFVFSKTYCGYCNRVKDLLKQLGAAHKVIELDTESDGGEIQAALAEWTGQRTVPNVFIGGKHIGGCDSVLEKHRTGQLVPLLNDAGAIPLST

SEQ ID NO: 2671 - DNA, 399 bp, Beta vulgaris
  CDS (1)..(399)
atggaggctgtgaaccgattagtggaagaaaaggcgttggttatctttactcggagttcttgctgtataagccactcagtaatgcaactcgtaagcagctatggagcgaatgcaacagtgtacgagctagatgagatgtcaaatggtcaagaagtagataaagcacttcaaggactagggcttaggccgagtattcctgctgttttcataggccaaaagttagttggtggtgctaaagagattattagcctgcaagtccaaggaaaacttatgccaatgctaaaggaggcagataagaagaaagatgctattagaagaaacaagcaggatggaaggatagatgaagctactagtaatgtaagcagtaatgcagtagtctacgcttttggtttgttgtaa

SEQ ID NO: 2672 - protein, 132 aa, Beta vulgaris
MEAVNRLVEEKALVIFTRSSCCISHSVMQLVSSYGANATVYELDEMSNGQEVDKALQGLGLRPSIPAVFIGQKLVGGAKEIISLQVQGKLMPMLKEADKKKDAIRRNKQDGRIDEATSNVSSNAVVYAFGLL

SEQ ID NO: 2673 - DNA, 321 bp, Beta vulgaris
  CDS (1)..(321)
atggacgttgtgaagggtttagtacaagaaaggccggtggtcatcttcagtaaggcaaactgtcctgtaagccactcgatgagacagctcattagtgggtttggcgctaatcctactgtatatgaactcgatcaaatgccaaatggacgggaaattgagagagttttacagatgatggggcgtaaacccactgtaccatctatgttcattggtggaaacttggtaggtggacctaatgacctgatcagccttcaggtgcaaggcaagcttgtacaaatgctgatggatgccggagctatttggatttggaagaggaactag

SEQ ID NO: 2674 - protein, 106 aa, Beta vulgaris
MDVVKGLVQERPVVIFSKANCPVSHSMRQLISGFGANPTVYELDQMPNGREIERVLQMMGRKPTVPSMFIGGNLVGGPNDLISLQVQGKLVQMLMDAGAIWIWKRN

SEQ ID NO: 2675 - DNA, 309 bp, Beta vulgaris
  CDS (1)..(309)
atggatgtcgtcaacagattagtggaagataaggcgttggtaatcttcacccggagtagttgctgcataagccactcggtattgcaactcataagcagttatggagccaatgcaacagtctatgagctagatgacatgttgaatggccaagaagtagataaaactcttcaaagactagggcttaggccgagtgttcctgctgtttttataggccaaaagctagttggtggtgctaaagagattattagcctacaggtccaaggaaaacttacgtcaatgctaaaggaggcaggagctatatgggtttag

SEQ ID NO: 2676 - protein, 102 aa, Beta vulgaris
MDVVNRLVEDKALVIFTRSSCCISHSVLQLISSYGANATVYELDDMLNGQEVDKTLQRLGLRPSVPAVFIGQKLVGGAKEIISLQVQGKLTSMLKEAGAIWV

SEQ ID NO: 2677 - DNA, 309 bp, Beta vulgaris
  CDS (1)..(309)
atggatactgtgaaccgattagtggaagagaaggcgttggtaatctttagtcgaagttcttgctgcataagccactcggtattgcaactcataagcagttatggagccaatgcaacagtatacgagctagatgacatgtctaatggccaagaagtagataaagctcttcaaaaactaggacttaggccgggtgttcctgctgtcttcataggccaaaagttagtcggtggcgctaaagagattattagcctacagatccaaggaaaacttatgccaatgctcaaggaagcaggagctatatgggtttag

SEQ ID NO: 2678 - protein, 102 aa, Beta vulgaris
MDTVNRLVEEKALVIFSRSSCCISHSVLQLISSYGANATVYELDDMSNGQEVDKALQKLGLRPGVPAVFIGQKLVGGAKEIISLQIQGKLMPMLKEAGAIWV

SEQ ID NO: 2679 - DNA, 309 bp, Beta vulgaris
  CDS (1)..(309)
atggacactgtgaacagattagtggaagagaaggcactagtaatcttcagccggagttcttgctgcattagccactcggtaatgcaactcataagcagttatggagccaatgcaacagtctacgagctagatgacatgtcgaatggtcaagaagtagataaagcccttcaaagacttgggcttaggccgagtgttccggctgtttttataggccaaaagttaattggtagtgctaaagagattattagcctacaggtccaaggaaaacttatgccaatgcttaaggaggcaggagctatatggctttag

SEQ ID NO: 2680 - protein, 102 aa, Beta vulgaris
MDTVNRLVEEKALVIFSRSSCCISHSVMQLISSYGANATVYELDDMSNGQEVDKALQRLGLRPSVPAVFIGQKLIGSAKEIISLQVQGKLMPMLKEAGAIWL

SEQ ID NO: 2681 - DNA, 492 bp, Aspergillus oryzae
  CDS (1)..(492)
atggcgccagcgatcccaagaaacggtgatgaagagacggaggagatatcgattgccgggcggacaaaaatgaccgtccctaaagaccgcaacaatccagaaaggcaagtgcagggatcgggtaccgatgagcgtgtggaagcgaagacagagctcaatagtatattaaaacgatcgccgattattatcttttccaagtcctattgcccccatagcgcccgggccaagtctatcctcttagacaaatactcaattgtcccagcaccttacgtggtagagcttgaccaacattcattgggccaaccgctgcaagctctcttggcagagaatactggccgccgcaccgtgcctaatattctagttagtggaagaagcattggtggtggggatgatgtggtcgctctcgatgagaaggacgagttggcgtcaacatttaagaagttgggaggacagtgggtccatgaggtcagtcgtaatgaggcaggacactaa

SEQ ID NO: 2682 - protein, 163 aa, Aspergillus oryzae
MAPAIPRNGDEETEEISIAGRTKMTVPKDRNNPERQVQGSGTDERVEAKTELNSILKRSPIIIFSKSYCPHSARAKSILLDKYSIVPAPYVVELDQHSLGQPLQALLAENTGRRTVPNILVSGRSIGGGDDVVALDEKDELASTFKKLGGQWVHEVSRNEAGH

SEQ ID NO: 2683 - DNA, 309 bp, Aspergillus oryzae
  CDS (1)..(309)
atgtctgccgctaagatcaaagcccagggcatcatcaacgccaacgccgtcgtcgttttctccaagtcctactgcccctactgcaaatctagcaagagcctccttagccagctggacgcaaagtacctcaccatcgagctcgatgaagagagcgatggcagcgccatccaggacgccctcgtggaaatcagcggccagcgcaccgtccccaacattttcatcaagcagaagcatatcggtggaaactcggatctgcaggctcgcaaaagcgagcttcctgccttgctgaaggacgctggtgctctttag

SEQ ID NO: 2684 - protein, 102 aa, Aspergillus oryzae
MSAAKIKAQGIINANAVVVFSKSYCPYCKSSKSLLSQLDAKYLTIELDEESDGSAIQDALVEISGQRTVPNIFIKQKHIGGNSDLQARKSELPALLKDAGAL

SEQ ID NO: 2685 - DNA, 381 bp, Populus tremula x Populus tremuloides
  CDS (1)..(381)
atgggttcgctgttaagttcttcaatcaagatgagcaagcaagaacttgatgcagcgctaaaaaaggctaaggaactcgcctcctctgctcctgtcgttgttttcagcaaaacctactgcggctattgcaatagggtgaagcagctgctgacacaggtaggagcatcttacaaggtcgttgagctggatgagctaagtgatggatctcaacttcaatcagcactagctcactggactgggcgagggacagtgcctaatgtgttcatcggagggaaacaaatcggtggttgcgacaccgttgtggagaagcaccaacgcaacgaactcttgcctcttctccaagatgctgctgccaccgctaaaacctctgcccagctttga

SEQ ID NO: 2686 - protein, 126 aa, Populus tremula x Populus tremuloides
MGSLLSSSIKMSKQELDAALKKAKELASSAPVVVFSKTYCGYCNRVKQLLTQVGASYKVVELDELSDGSQLQSALAHWTGRGTVPNVFIGGKQIGGCDTVVEKHQRNELLPLLQDAAATAKTSAQL

SEQ ID NO: 2687 - DNA, 318 bp, Plantago major
  CDS (1)..(318)
atggacaaggtgatgaaaatcaagtctgaaaatggagtggtgatcttcagcaagagcagttgctgcttgagctatgcggttcaaatgctgttccaggaactgagggcgaacgctttcatatacgaaattgaccacagcccagatgggaaggaagtggagaaggcgctgatgaggctaggtagtagtgggcccatcccggcggttttcattggcgggaagctggtgggatcaaccaatgaggtgatgtcactccatttgagtggctcactcatccccctgctcaagccaactcaggctaacttgtcttacaaatcttga

SEQ ID NO: 2688 - protein, 105 aa, Plantago major
MDKVMKIKSENGVVIFSKSSCCLSYAVQMLFQELRANAFIYEIDHSPDGKEVEKALMRLGSSGPIPAVFIGGKLVGSTNEVMSLHLSGSLIPLLKPTQANLSYKS

SEQ ID NO: 2689 - DNA, 342 bp, Triticum aestivum
  CDS (1)..(342)
atggcgctcgccaaggccaaggagatcgtcgcctccgcttccgtcgtcgtcttcagcaagtcttactgccctttctgtgttcaagtgaagaagttgctcacgcagcttggagcaagtttcaaggccgttgagatggacactgaaagcgatggaactgagattcagtcagctcttgctgaatggactgggcagaggactgttcccaatgtcttcatcaatggaaaacacatcggtggctgtgacgatactattgcactgaacaagggagggaagctggttgctctgctgacagaggctggagcgatctccggttcttcttcgaagaccaccgtcactgcttag

SEQ ID NO: 2690 - protein, 113 aa, Triticum aestivum
MALAKAKEIVASASVVVFSKSYCPFCVQVKKLLTQLGASFKAVEMDTESDGTEIQSALAEWTGQRTVPNVFINGKHIGGCDDTIALNKGGKLVALLTEAGAISGSSSKTTVTA

SEQ ID NO: 2691 - DNA, 420 bp, Populus tremula x Populus tremuloides
  CDS (1)..(420)
atggcgacgaggataagattgccatcaatcttggctacagcagtaacattaacagtacttgcggcatcactcacctgggctgctggcagccctgaagctacttttgtcaaaaagaccatctcttctcatcagatcgtcatcttctccaagtcttattgcccgtattgtaagaaggctaaaggtgttttcaaagaactgaaccagacaccacatgttgtcgagctcgatcaaagagaggatgggcacgacattcaggatgccatgagtgaaattgttgggaggcgcaccgtgcctcaggttttcatagacgggaagcacattggtggctcagatgacaccgtggaagcatacgaaagtggagaacttgctaagcttttaggagttgcttcagagcagaaagatgactttaaactagaatga

SEQ ID NO: 2692 - protein, 139 aa, Populus tremula x Populus tremuloides
MATRIRLPSILATAVTLTVLAASLTWAAGSPEATFVKKTISSHQIVIFSKSYCPYCKKAKGVFKELNQTPHVVELDQREDGHDIQDAMSEIVGRRTVPQVFIDGKHIGGSDDTVEAYESGELAKLLGVASEQKDDFKLE

SEQ ID NO: 2693 - DNA, 348 bp, Tilia platyphyllos
  CDS (1)..(348)
atggctttgccgaaggctaaggagatcgtttccgggaatccggtcgtcgttttcagcaagtcgtactgtccgttctgtgtgagcgtgaagcagttgcttgaacaaattggagcctctttcaaggccattgagcttgacaatgaaagtgatggaagtgaaattcaagcagctctggccgagtggactggtcagaggactgtgccaaatgttttcattggcgggaaacacattggtggctgtgactctacaacagctatgcacaagaatgggaagctgattcctctgctaaccgaagctggagctgttgctactgctactgctactgttactgctactgcttccgcttaa

SEQ ID NO: 2694 - protein, 115 aa, Tilia platyphyllos
MALPKAKEIVSGNPVVVFSKSYCPFCVSVKQLLEQIGASFKAIELDNESDGSEIQAALAEWTGQRTVPNVFIGGKHIGGCDSTTAMHKNGKLIPLLTEAGAVATATATVTATASA

SEQ ID NO: 2695 - DNA, 342 bp, Deschampsia antarctica
  CDS (1)..(342)
atggcgctcgccaaggccaaggaaatcgccgcctcttctcccgtcgtcgtcttcagcaagtcttactgcccttactgcacacgggtaaagcaattgttcacaaagctaggagcaagtttcaaggctattgagctagatgtggaaggtgatggagctgatatgcagtcagcccttgctcaatggactggacagaagaccgttccaaatgtcttcatcaatgggaaacacatcggtggttgtgatgatacccttgcactggagaagtcagggaagctggtgcctctgctgagggaggccggagcaatctctggttctgcttcgaaggaaaccatgactgcttag

SEQ ID NO: 2696 - protein, 113 aa, Deschampsia antarctica
MALAKAKEIAASSPVVVFSKSYCPYCTRVKQLFTKLGASFKAIELDVEGDGADMQSALAQWTGQKTVPNVFINGKHIGGCDDTLALEKSGKLVPLLREAGAISGSASKETMTA

SEQ ID NO: 2697 - DNA, 306 bp, Schizosaccharomyces pombe
  CDS (1)..(306)
atgtctagtgttgaatcatttgttgactctgccgttgctgacaacgatgttgttgtttttgccaagtcttactgcccttactgccatgctactgaaaaggtgatcgctgataagaaaattaaggctcaggtataccagattgaccttatgaacaacggtgatgagattcaatcttacttattgaagaagaccggtcaacgtaccgtacccaatatctttattcaccaaaagcatgttggtggtaactcggatttccaagcattattcaagaagggcgagctcgactctctttttaatactgcctaa

SEQ ID NO: 2698 - protein, 101 aa, Schizosaccharomyces pombe
MSSVESFVDSAVADNDVVVFAKSYCPYCHATEKVIADKKIKAQVYQIDLMNNGDEIQSYLLKKTGQRTVPNIFIHQKHVGGNSDFQALFKKGELDSLFNTA

SEQ ID NO: 2699 - DNA, 333 bp, Schizosaccharomyces pombe
  CDS (1)..(333)
atgacttctatagcaaaagcttttgttgaaaaggcgatctcaaacaatccggttactgtctttagtaaatcgttctgtcctttctgcaaagcagccaaaaatactcttacaaagtactctgctccgtataaggcttatgagttagataaaatagaaaatggatctgacatccaagcttatttacatgaaaagaccaaacagtctacagtacccagcatattctttcgcaaccaattcattggaggcaattccgatttgaacaaacttcgtagctcaggcactttgacgaagatgatagcagagcttaaggaaaacaaatcttcaattttatga

SEQ ID NO: 2700 - protein, 110 aa, Schizosaccharomyces pombe
MTSIAKAFVEKAISNNPVTVFSKSFCPFCKAAKNTLTKYSAPYKAYELDKIENGSDIQAYLHEKTKQSTVPSIFFRNQFIGGNSDLNKLRSSGTLTKMIAELKENKSSIL

SEQ ID NO: 2701 - DNA, 327 bp, Solanum lycopersicum
  CDS (1)..(327)
atgtcacttgccaaggctaaggaaattgtttctggaaatccagttgcggtcttcagcaagacgtattgtcccttctgtgttagcgtcaaggatttgttgtcgaagcttggtgctacttttaaggctgttgagttagattctgaaaaggatggaagtgagatccaggctgcactggctgagtggactggtcagcgaactgtgccaaacgtcttcataggccgaaagcacattggtggctgtgacgcgacaactgcgttgcacagggaagggaagcttcttcctctgctaaccgaggctggagcaattgctaaaacttctacagcttag

SEQ ID NO: 2702 - protein, 108 aa, Solanum lycopersicum
MSLAKAKEIVSGNPVAVFSKTYCPFCVSVKDLLSKLGATFKAVELDSEKDGSEIQAALAEWTGQRTVPNVFIGRKHIGGCDATTALHREGKLLPLLTEAGAIAKTSTA

SEQ ID NO: 2703 - DNA, 315 bp, Vernicia fordii
  CDS (1)..(315)
atggcgatgataaaggcccaggagcttgtttcttccaactccgtcgttgttttcagcaagacgttttgtccttattgcacgagcgtcaagcagctcttgaatcaattaggagcacaattcaaggtcatcgagttggattccgagagtgatggaagtgatttacaaaatgcattggctgagtggactggacaacgcactgtgcccaatgttttcatcggcggcaagcacattggtggctgtgataaaactacaggcatgcaccaggaagggaagttgattcctctgctcactgaagccggagctgtcaaggcttaa

SEQ ID NO: 2704 - protein, 104 aa, Vernicia fordii
MAMIKAQELVSSNSVVVFSKTFCPYCTSVKQLLNQLGAQFKVIELDSESDGSDLQNALAEWTGQRTVPNVFIGGKHIGGCDKTTGMHQEGKLIPLLTEAGAVKA

SEQ ID NO: 2705 - DNA, 447 bp, Arabidopsis thaliana
  CDS (1)..(447)
atgaagacgatgcgaggtttacgaaactgctcaaacgacgccgtaacgctagacctgacggttcatcctcctcctcctcctcctcttcctcctccagcaccatcaacagtctcctcctccaccgcctcgacgagcctgtcgttcgatgaagaggaaacatcagagtcaaagatcggacggctgatatcagagcatccagtcatcatattcactcgattttcctcatgttgcatgtgccacgtcatgaagaagcttctatcgaccgttggagttcacccaacagtgatcgagatcgacgacggagaaattgcttacctcgccgttgaagccgctccggtgcttttcatcggtggtacttgcgtcggtggcttcgagtcacttgtagcacttcacctaagtggtcagcttattcctagactcgtcgaggttggagccttatgggcataa

SEQ ID NO: 2706 - protein, 148 aa, Arabidopsis thaliana
MKTMRGLRNCSNDAVTLDLTVHPPPPPPLPPPAPSTVSSSTASTSLSFDEEETSESKIGRLISEHPVIIFTRFSSCCMCHVMKKLLSTVGVHPTVIEIDDGEIAYLAVEAAPVLFIGGTCVGGFESLVALHLSGQLIPRLVEVGALWA

SEQ ID NO: 2707 - DNA, 312 bp, Arabidopsis thaliana
  CDS (1)..(312)
atggagagaataagagatttgtcgtcgaagaaagcggcggtgatattcacaaagagctcatgttgtatgtgccatagcatcaagacgctattctacgaactaggcgctagtccggcgatccatgagctcgacaaagaccctgaaggccgtgaaatggaacgggccctacgtgccctcggctcatcgaacccggcggttccagctgttttcgttggaggaaggtacatcggatcagccaaagacatcatctcattccacgtggacgggtcactcaagcagatgcttaaagacgctaaggccatttggttatag

SEQ ID NO: 2708 - protein, 103 aa, Arabidopsis thaliana
MERIRDLSSKKAAVIFTKSSCCMCHSIKTLFYELGASPAIHELDKDPEGREMERALRALGSSNPAVPAVFVGGRYIGSAKDIISFHVDGSLKQMLKDAKAIWL

SEQ ID NO: 2709 - DNA, 312 bp, Arabidopsis thaliana
  CDS (1)..(312)
atggaacgagtaagagatttggcatcggagaaggcggctgtgatattcacgaagagctcgtgttgcatgtgtcatagcatcaagactctcttctacgaactcggggcgagtcctgccatccatgagcttgacaaggacccgcaaggccctgacatggaacgggccctcttccgggtattcgggtctaaccctgctgtccctgcggttttcgtaggaggaaggtacgtcggctcagctaaagacgtcatctccttccacgtggatggctccctcaagcagatgttaaaggcctctaacgccatatggttgtga

SEQ ID NO: 2710 - protein, 103 aa, Arabidopsis thaliana
MERVRDLASEKAAVIFTKSSCCMCHSIKTLFYELGASPAIHELDKDPQGPDMERALFRVFGSNPAVPAVFVGGRYVGSAKDVISFHVDGSLKQMLKASNAIWL

SEQ ID NO: 2711 - DNA, 309 bp, Arabidopsis thaliana
  CDS (1)..(309)
atggacaaagtgatgagaatgtcttcagagaaaggagtggtgatcttcacgaagagctcatgttgtctctgctacgccgttcaaatcctgttccgtgaccttagggttcaaccaaccatccacgagatcgacaacgacccggactgccgtgagatcgagaaggctcttctccggctcggctgttccacggcggttccagctgtctttgtcggaggcaagcttgttggctccaccaatgaagtcatgtcccttcaccttagtggctctcttgtcccattgatcaaaccctatcagtccatcctttactag

SEQ ID NO: 2712 - protein, 102 aa, Arabidopsis thaliana
MDKVMRMSSEKGVVIFTKSSCCLCYAVQILFRDLRVQPTIHEIDNDPDCREIEKALLRLGCSTAVPAVFVGGKLVGSTNEVMSLHLSGSLVPLIKPYQSILY

SEQ ID NO: 2713 - DNA, 309 bp, Arabidopsis thaliana
  CDS (1)..(309)
atggacaaggttatgagaatgtcatcggagaaaggagtcgtgatcttcaccaaaagttcatgttgtctctgctacgccgtgcaaatccttttccgtgatcttagggttcaaccaacaatccacgagatcgacaacgatcctgactgccgtgagatcgagaaggccttagttcgtcttggctgcgccaacgcggttcctgctgtctttgtaagtggcaagctcgtgggttcgaccaacgatgtcatgtcgcttcacctaagtggctccctcgttcccttgatcaagccgtatcagtcatttcataactag

SEQ ID NO: 2714 - protein, 102 aa, Arabidopsis thaliana
MDKVMRMSSEKGVVIFTKSSCCLCYAVQILFRDLRVQPTIHEIDNDPDCREIEKALVRLGCANAVPAVFVSGKLVGSTNDVMSLHLSGSLVPLIKPYQSFHN

SEQ ID NO: 2715 - DNA, 300 bp, Arabidopsis thaliana
  CDS (1)..(300)
atggacaaagttatgagaatgtcgtccgaaaaaggggtggttatatttaccaagagctcctgttgtttgtcctatgcggttcaagttctcttccaagatcttggtgttaaccctaagatccacgagattgataaggaccctgaatgccgagagatagagaaggctcttatgaggctagggtgttcaaagccggtcccagccgtcttcattggtggcaagctcgttggttcgaccaacgaagtaatgtccatgcacctaagcagctcgctcgttcccctagtgaagccatatttatgttaa

SEQ ID NO: 2716 - protein, 99 aa, Arabidopsis thaliana
MDKVMRMSSEKGVVIFTKSSCCLSYAVQVLFQDLGVNPKIHEIDKDPECREIEKALMRLGCSKPVPAVFIGGKLVGSTNEVMSMHLSSSLVPLVKPYLC

SEQ ID NO: 2717 - DNA, 540 bp, Arabidopsis thaliana
  CDS (1)..(540)
atggtagccgcaacagtaaacctcgcgaacatgacatggacgtcgttaaattcaaatccagcaatctctttctccatgttaagcggaatcagaaacttgggcatgttacctttcaggagatgtctaaagccgacagttatcggaatcgcgtcgtggccaccactccgttgttcttctgttaaggctatgtcttcatcatcgtcttcgtctggatcgacattggaggagactgttaaaacgactgtggcagagaaccctgtcgttgtttactccaaaacctggtgctcatactcgtctcaagtgaagtccttgttcaagagtcttcaagttgagccactggttgttgaattggatcaacttggttcagaagggtcgcagctgcagaatgtgttggagaaaattactggacaatacactgttcccaatgttttcatcggaggcaagcacattggtggctgctcagatacattgcagctgcacaataaaggagagctggaagcaattttagctgaagccaatggaaaaaacggtcagacctag

SEQ ID NO: 2718 - protein, 179 aa, Arabidopsis thaliana
MVAATVNLANMTWTSLNSNPAISFSMLSGIRNLGMLPFRRCLKPTVIGIASWPPLRCSSVKAMSSSSSSSGSTLEETVKTTVAENPVVVYSKTWCSYSSQVKSLFKSLQVEPLVVELDQLGSEGSQLQNVLEKITGQYTVPNVFIGGKHIGGCSDTLQLHNKGELEAILAEANGKNGQT

SEQ ID NO: 2719 - DNA, 453 bp, Arabidopsis thaliana
  CDS (1)..(453)
atgcaaaaagcaattcgaccatacgagtcaccgtggacgaagaccgtgccgggcaatagcattttccttttaaagaatgaagataaaccatcatcatcatcatcatcattatcatggttaacatcaggatcaccaaagccaacatctataagcaataagagatcaagcaacctagttgtgatggagaatgctgtggtggtgtttgcaaggagaggctgttgtttgggacacgtggcaaaacggctgctactgacacatggcgtgaatccagtggtggttgagattggtgaagaagacaacaacaactacgacaatatcgtaagtgataaagagaaattacctatgatgtacataggaggaaagttgtttggaggattggaaaatctgatggctgctcatattaatggtgatttagtgcctactcttagacaagctggggctttatggctttga

SEQ ID NO: 2720 - protein, 150 aa, Arabidopsis thaliana
MQKAIRPYESPWTKTVPGNSIFLLKNEDKPSSSSSSLSWLTSGSPKPTSISNKRSSNLVVMENAVVVFARRGCCLGHVAKRLLLTHGVNPVVVEIGEEDNNNYDNIVSDKEKLPMMYIGGKLFGGLENLMAAHINGDLVPTLRQAGALWL

SEQ ID NO: 2721 - DNA, 378 bp, Arabidopsis thaliana
  CDS (1)..(378)
atgggttcaatgttcagtggaaaccgaatgagcaaggaagagatggaggtggtggtgaacaaggctaaagagatcgtctctgcttatcccgttgttgtcttcagcaagacatactgtggttattgccagagggtgaagcagttactgacgcagctaggagcaacttttaaagtacttgagctcgatgaaatgagtgatggaggtgagatccaatcagctttatcagagtggactggacagaccacagttccaaacgtcttcatcaaaggaaaccacatcggtggatgcgatagagtgatggagaccaacaagcaaggcaagcttgtgcctctacttactgaagctggggctattgcagataactcttctcaactttga

SEQ ID NO: 2722 - protein, 125 aa, Arabidopsis thaliana
MGSMFSGNRMSKEEMEVVVNKAKEIVSAYPVVVFSKTYCGYCQRVKQLLTQLGATFKVLELDEMSDGGEIQSALSEWTGQTTVPNVFIKGNHIGGCDRVMETNKQGKLVPLLTEAGAIADNSSQL

SEQ ID NO: 2723 - DNA, 336 bp, Arabidopsis thaliana
  CDS (1)..(336)
atggcgatgcagaaagctaaggagatcgttaacagcgaatcagtcgttgttttcagcaagacttattgtccatattgcgtgagagtgaaggagcttttgcaacaattgggagctaagttcaaggccgttgagctcgacaccgaaagtgatggtagccaaattcaatcaggtctcgcagaatggacaggacaacgtaccgtgcctaatgtgtttataggaggaaatcacatcggtggctgtgatgcaacatcaaacttgcataaagatgggaagttggttccgctgttaactgaagctggagcgatcgcaggaaagactgcaacaacttctgcttaa

SEQ ID NO: 2724 - protein, 111 aa, Arabidopsis thaliana
MAMQKAKEIVNSESVVVFSKTYCPYCVRVKELLQQLGAKFKAVELDTESDGSQIQSGLAEWTGQRTVPNVFIGGNHIGGCDATSNLHKDGKLVPLLTEAGAIAGKTATTSA

SEQ ID NO: 2725 - DNA, 393 bp, Arabidopsis thaliana
  CDS (1)..(393)
atggttgaccagagtcctcgccgtgttgtcgtggcggcgctcctattgtttgtggttctgtgcgatctttcgaattctgcgggagctgcgaattctgtgtcagctttcgttcagaacgccatcttgtccaacaagattgtcatcttctccaaatcctactgcccgtattgtttgcggtcgaaacgtatattcagccaacttaaggaagagccatttgttgtggagcttgatcagagagaggacggagatcaaatccagtatgagcttttagaattcgttggtcgtcgtactgtcccgcaagtttttgttaacggcaagcatattggtggatcagatgatcttggagctgctttggagagtggtcagttgcaaaagcttcttgctgcaagttga

SEQ ID NO: 2726 - protein, 130 aa, Arabidopsis thaliana
MVDQSPRRVVVAALLLFVVLCDLSNSAGAANSVSAFVQNAILSNKIVIFSKSYCPYCLRSKRIFSQLKEEPFVVELDQREDGDQIQYELLEFVGRRTVPQVFVNGKHIGGSDDLGAALESGQLQKLLAAS

SEQ ID NO: 2727 - DNA, 408 bp, Arabidopsis thaliana
  CDS (1)..(408)
atgacaatgtttagatctatctccatggtaatgctgctcgtcgcactagttacattcatttctatggtttcttctgctgcttcgtccccagaagccgactttgttaagaagactatctcttcccataagatcgtcattttctccaaatcctactgcccctactgcaagaaagctaaatcagtgttcagagagctggatcaagttccttatgttgtcgagcttgatgaaagagaagatggttggagcatccagactgcacttggagagattgttggaaggcgaacagtaccgcaagtcttcattaacggaaaacatctcggaggatcagatgataccgtagatgcgtatgagagcggtgaactcgccaagcttcttggtgtttccgggaacaaagaagctgaactctag

SEQ ID NO: 2728 - protein, 135 aa, Arabidopsis thaliana
MTMFRSISMVMLLVALVTFISMVSSAASSPEADFVKKTISSHKIVIFSKSYCPYCKKAKSVFRELDQVPYVVELDEREDGWSIQTALGEIVGRRTVPQVFINGKHLGGSDDTVDAYESGELAKLLGVSGNKEAEL

SEQ ID NO: 2729 - DNA, 525 bp, Arabidopsis thaliana
  CDS (1)..(525)
atggcagtcacagcatttaacacattgaaacttgtatcgtcgtctctagatccgattccttcagtctcttgttcttcttattccttctctctgatatatgtcggatctccttacaagagatgtctaaagcagtcatgttctgttcgagctatgacttcttcttcttcggctgcatcgtcttcttcttcgtcctttggatcgagaatggaagagagtattaggaaaacagtgactgagaacactgtcgttatttactccaaaacttggtgctcatactgtactgaagtgaagacattgttcaagagacttggggttcagccactggttgttgaattggatcaacttggtccacaagggccacaactgcagaaggtactggaaagacttactgggcaacacactgttcctaatgttttcgtatgtggcaagcacattggtggctgcacagatacagtgaagcttaacaggaaaggagatctggaactgatgttagctgaagccaacggtaaaaacggtcagagttga

SEQ ID NO: 2730 - protein, 174 aa, Arabidopsis thaliana
MAVTAFNTLKLVSSSLDPIPSVSCSSYSFSLIYVGSPYKRCLKQSCSVRAMTSSSSAASSSSSSFGSRMEESIRKTVTENTVVIYSKTWCSYCTEVKTLFKRLGVQPLVVELDQLGPQGPQLQKVLERLTGQHTVPNVFVCGKHIGGCTDTVKLNRKGDLELMLAEANGKNGQS

SEQ ID NO: 2731 - DNA, 435 bp, Arabidopsis thaliana
  CDS (1)..(435)
atgatgcaagaattaggcttacaacgtttctcaaacgacgtcgttcgcttagacctcactcctccttctcaaacctcatctacttctctttccatcgacgaagaggaatcaacggaagccaagatccgacggctgatatcggagcatcctgtgatcatcttcagtagatcttcatgttgcatgtgccacgtcatgaagagactcttagcaacgatcggcgtaatccccaccgtcatcgagctcgatgatcacgaggtttcctctcttcccacggctctacaagatgaatattccggtggcgtctccgtcgttggtcctccgccggcggttttcattggccgtgagtgcgtcggaggtcttgagtcccttgtcgctcttcacttaagtggtcaacttgttcctaagcttgtccaagttggagctctttgggtatga

SEQ ID NO: 2732 - protein, 144 aa, Arabidopsis thaliana
MMQELGLQRFSNDVVRLDLTPPSQTSSTSLSIDEEESTEAKIRRLISEHPVIIFSRSSCCMCHVMKRLLATIGVIPTVIELDDHEVSSLPTALQDEYSGGVSVVGPPPAVFIGRECVGGLESLVALHLSGQLVPKLVQVGALWV

SEQ ID NO: 2733 - DNA, 411 bp, Arabidopsis thaliana
  CDS (1)..(411)
atgcaataccagacagaatcgtggggatcatacaagatgagcagcttaggattcggcggtttggggatggtggctgacactggtctgcttcgtatagagtccctggcttctgagagcgcggtggtgatcttcagcgtgagcacgtgctgcatgtgccacgccgtgaagggtctcttcagaggaatgggcgtcagccccgccgtccacgagctcgacctccacccctacggcggcgacatccagcgagccctcattcgtctcctcggctgctccggctcctcttctccagggtctctcccggtcgtcttcatcggcggtaaactggttggagctatggacagagtcatggcttctcacataaacggctctctcgttcctcttctcaaagacgccggcgctctctggctctga

SEQ ID NO: 2734 - protein, 136 aa, Arabidopsis thaliana
MQYQTESWGSYKMSSLGFGGLGMVADTGLLRIESLASESAVVIFSVSTCCMCHAVKGLFRGMGVSPAVHELDLHPYGGDIQRALIRLLGCSGSSSPGSLPVVFIGGKLVGAMDRVMASHINGSLVPLLKDAGALWL

SEQ ID NO: 2735 - DNA, 423 bp, Arabidopsis thaliana
  CDS (1)..(423)
atgcaatacaaaacagaaactcgagggtcgttgtcctacaacaacaacagtaaggtgatgaacaacatgaatgtgtttccgtcggagacactggcgaagatagagtcgatggcggcagagaatgcggtggttatattcagcgtgagcacttgctgcatgtgccatgccatcaagcgtctcttccgtggaatgggcgtcagccccgccgtccacgagctcgacctcctcccttacggagttgaaatccaccgagctctcctccgtctccttggctgttccagcggtggcgccacatctccgggggcacttccggtggtgttcatcggagggaagatggtaggagcaatggagagagtgatggcttcacatatcaatggctcactcgtccctcttctcaaagatgctggcgctctttggctctga

SEQ ID NO: 2736 - protein, 140 aa, Arabidopsis thaliana
MQYKTETRGSLSYNNNSKVMNNMNVFPSETLAKIESMAAENAVVIFSVSTCCMCHAIKRLFRGMGVSPAVHELDLLPYGVEIHRALLRLLGCSSGGATSPGALPVVFIGGKMVGAMERVMASHINGSLVPLLKDAGALWL

SEQ ID NO: 2737 - DNA, 414 bp, Arabidopsis thaliana
  CDS (1)..(414)
atgcaaggaacgatttcttgtgcaagaaattataacatgacgacaaccgtcggggaatctctgcggccgctatcgcttaaaacgcagggaaacggcgagagagttcggatggtggtggaggagaacgcggtgattgtgattggacggagaggatgttgcatgtgtcatgtggtgaggaggctgcttcttggacttggagtgaatccggcggtccttgagattgatgaggagagggaagatgaagttttgagtgagttggagaatattggagttcaaggcggcggaggtacggtgaagttaccggcggtttatgtaggagggaggttgtttggagggttagatagggttatggctactcatatctccggtgagttagttccaattcttaaggaagttggggctctgtggttgtga

SEQ ID NO: 2738 - protein, 137 aa, Arabidopsis thaliana
MQGTISCARNYNMTTTVGESLRPLSLKTQGNGERVRMVVEENAVIVIGRRGCCMCHVVRRLLLGLGVNPAVLEIDEEREDEVLSELENIGVQGGGGTVKLPAVYVGGRLFGGLDRVMATHISGELVPILKEVGALWL

SEQ ID NO: 2739 - DNA, 309 bp, Arabidopsis thaliana
  CDS (1)..(309)
atggatatgataacgaagatggtgatggagagaccggtggtgatttacagcaagagctcttgctgtatgtctcacacgatcaagactttgctctgcgatttcggagcaaatccagcggtttacgagctggatgagatatctagagggagggagatcgagcaggcgttgttgcggctcgggtgtagccccgcagttccgggcgttttcattggtggagagttggtcggtggagccaacgaggtcatgagtctacatcttaacggatccttgattcccatgcttaagcgggctggtgcattgtgggtttga

SEQ ID NO: 2740 - protein, 102 aa, Arabidopsis thaliana
MDMITKMVMERPVVIYSKSSCCMSHTIKTLLCDFGANPAVYELDEISRGREIEQALLRLGCSPAVPGVFIGGELVGGANEVMSLHLNGSLIPMLKRAGALWV

SEQ ID NO: 2741 - DNA, 309 bp, Arabidopsis thaliana
  CDS (1)..(309)
atggagaatctacaaaagatgatctccgagaagtcggtagtgatctttagcaagaactcttgctgcatgtctcacacaatcaagactctcttcttagaccttggcgtgaacccgacgatctatgaactcgatgagattagcagaggaaaggagatagagcatgcattggctcagctcgggtgcagcccgacagtgccagtggtgttcataggagggcagcttgttggtggagccaatcaagtcatgagtctccatctcaaccgctcccttgttccaatgcttaagcgcgctggagctttatggctttga

SEQ ID NO: 2742 - protein, 102 aa, Arabidopsis thaliana
MENLQKMISEKSVVIFSKNSCCMSHTIKTLFLDLGVNPTIYELDEISRGKEIEHALAQLGCSPTVPVVFIGGQLVGGANQVMSLHLNRSLVPMLKRAGALWL

SEQ ID NO: 2743 - DNA, 309 bp, Arabidopsis thaliana
  CDS (1)..(309)
atggataagctacagaagatgatctccgagaagtcggtagtgatctttagcaaaaactcatgttgcatgtctcacactatcaagactctcttcatagactttggcgtgaatccaacgatctatgagctagatgagatcaacagaggaaaggagatagagcaagcattggctcagcttggctgcagcccaaccgtgcctgtggtgtttattggagggcagcttgttggtggagccaatcaagtcatgagtctccatctcaatcgctctctggttcctatgctaaagagggttggagcactatggctttga

SEQ ID NO: 2744 - protein, 102 aa, Arabidopsis thaliana
MDKLQKMISEKSVVIFSKNSCCMSHTIKTLFIDFGVNPTIYELDEINRGKEIEQALAQLGCSPTVPVVFIGGQLVGGANQVMSLHLNRSLVPMLKRVGALWL

SEQ ID NO: 2745 - DNA, 309 bp, Arabidopsis thaliana
  CDS (1)..(309)
atggagaacctacagaagatgatctctgagaagtcggtagtaatttttagcaagaactcatgctgcatgtctcatacaattaagactctcttcttagactttggcgtgaacccgactatctatgagctcgacgagatcaacataggaagggagatagagcaagcattggctcagctcggatgcagcccgaccgttccggtggtgttcattggagggcagcttgttggtggagccaatcaagtcatgagtctccatctcaaccgctcccttgttcctatgcttaaacgtgctggagcattatggctttaa

SEQ ID NO: 2746 - protein, 102 aa, Arabidopsis thaliana
MENLQKMISEKSVVIFSKNSCCMSHTIKTLFLDFGVNPTIYELDEINIGREIEQALAQLGCSPTVPVVFIGGQLVGGANQVMSLHLNRSLVPMLKRAGALWL

SEQ ID NO: 2747 - DNA, 309 bp, Arabidopsis thaliana
  CDS (1)..(309)
atggagaagctacagaagatgacctcggagaagtcgttagtgatatttagcaaaaactcatgctgcatgtcgcacacaatcaagactctcttcttagaccttggcgtaaatccgacgatttatgagctagatgagatcaacagaggaaaagagatagagcaagcattggctcagcttggctgcagcccgaccgtgccagtggtgttcataggagggcagcttgtcggtggagccaatcaagtcatgagtctccatctcaaccgttctctcattccaatgcttaaacgcgttggggcgttatggctttga

SEQ ID NO: 2748 - protein, 102 aa, Arabidopsis thaliana
MEKLQKMTSEKSLVIFSKNSCCMSHTIKTLFLDLGVNPTIYELDEINRGKEIEQALAQLGCSPTVPVVFIGGQLVGGANQVMSLHLNRSLIPMLKRVGALWL

SEQ ID NO: 2749 - DNA, 309 bp, Arabidopsis thaliana
  CDS (1)..(309)
atggagaagatacaaaagatgatctccgagaagtcggtagtaatatttagcaataactcttgttgcatgtcacacacaatcaagactctcttcttagaccttggcgtgaacccgacaatctatgagctagacgagatcaacagaggaaaagagatagagtatgcattggctcagcttggctgcagcccgactgtgccagtggtgttcataggagggcagcttgttggtggagccaatcaagtcatgagtctccatctcaaccgttctctcattccaatgcttaaacgctttggggctttatggctttga

SEQ ID NO: 2750 - protein, 102 aa, Arabidopsis thaliana
MEKIQKMISEKSVVIFSNNSCCMSHTIKTLFLDLGVNPTIYELDEINRGKEIEYALAQLGCSPTVPVVFIGGQLVGGANQVMSLHLNRSLIPMLKRFGALWL

SEQ ID NO: 2751 - DNA, 309 bp, Arabidopsis thaliana
  CDS (1)..(309)
atggacaaagttgtgagaatgtcgtcagagaaaggagtggttattttcagcaagagctcgtgttgcatgtcctatgcggtccaagtacttttccaagaccttggggttcacccaacagtccatgagatcgataaagaccctgaatgtcgtgagatcgagaaagccctaatgaggttagggtgttccacgccggtcccagccatctttgtgggtgggaagctcattggttcgaccaatgaagtcatgtcgcttcacttaagcggctcgctggttccgctagttaagccgtttcaagccaatctatgttaa

SEQ ID NO: 2752 - protein, 102 aa, Arabidopsis thaliana
MDKVVRMSSEKGVVIFSKSSCCMSYAVQVLFQDLGVHPTVHEIDKDPECREIEKALMRLGCSTPVPAIFVGGKLIGSTNEVMSLHLSGSLVPLVKPFQANLC

SEQ ID NO: 2753 - DNA, 378 bp, Oryza sativa
  CDS (1)..(378)
atgcaggcggtggcggcggcggcggggatgatgcggcgggggagcctgacgatagacccggcgggggaggaggaggcgccggccgagagggtggggcggctggtgcgggagagccccgtggtggtgttcgcgcggcgggggtgctacatggcgcacgtcatgaggcgcctcctcgccgccgtcggcgcgcacgccaccgtcatcgagctggagggcggcgcggcggaggaggaggaggcggcgctgggcggcggcgccgcgctccccgcgctcttcgtcggcggcgaccccgtcggcggcctcgagggcctcatgggcctccacctcagcggccgcctcgtcccgcgcctcagagaggtcggcgccctctgcacctag

SEQ ID NO: 2754 - protein, 125 aa, Oryza sativa
MQAVAAAAGMMRRGSLTIDPAGEEEAPAERVGRLVRESPVVVFARRGCYMAHVMRRLLAAVGAHATVIELEGGAAEEEEAALGGGAALPALFVGGDPVGGLEGLMGLHLSGRLVPRLREVGALCT

SEQ ID NO: 2755 - DNA, 312 bp, Oryza sativa
  CDS (1)..(312)
atggacagggtgaacaggctggcggcgcagcgggcggtggtgatcttcagcatgagctcgtgctgcatgtgccacaccgtgacgcgcctcttctgcgagctcggggtgaacccgacggtggtggagctggacgaggacccgagggggaaggagatggagaaggcgctggcgaggctcctcggccgcagccccgccgtgccggcggtgttcatcggcgggaggctcgtcggctccaccgacaaggtcatgtcgctgcacctcagcggcaaccttgtcccgctgcttcgcaatgcgggtgccctctgggtgtag

SEQ ID NO: 2756 - protein, 103 aa, Oryza sativa
MDRVNRLAAQRAVVIFSMSSCCMCHTVTRLFCELGVNPTVVELDEDPRGKEMEKALARLLGRSPAVPAVFIGGRLVGSTDKVMSLHLSGNLVPLLRNAGALWV

SEQ ID NO: 2757 - DNA, 444 bp, Oryza sativa
  CDS (1)..(444)
atgtaccaggcgatcccgtacagcagcacccggccgtggctcaggccggagccggcggcgagcgtggtcgacgtcgtgaaggtggagacgacgacggccgtcgcgggtcggggcggtgaggcggaggtcgtgggggaggaggaggcggcggaggtgcggagggcggtggcggagagcccggtgctggtggtggggaggcgcgggtgctgcctcatccacgtggtgaagcggctgctgcaggggctcggggtcaacccggccgtgcacgaggtcgccggcgaggccgcgctcaagggggttgtgccggccggtggggaggccgcggcgctccccgccgtgttcgtcggggggaagctcctcggcgggctcgaccgcctcatggccgtccacatctccggcgagctcgtgcccatcctcaagaaggccggtgccctctggctttaa

SEQ ID NO: 2758 - protein, 147 aa, Oryza sativa
MYQAIPYSSTRPWLRPEPAASVVDVVKVETTTAVAGRGGEAEVVGEEEAAEVRRAVAESPVLVVGRRGCCLIHVVKRLLQGLGVNPAVHEVAGEAALKGVVPAGGEAAALPAVFVGGKLLGGLDRLMAVHISGELVPILKKAGALWL

SEQ ID NO: 2759 - DNA, 378 bp, Oryza sativa
  CDS (1)..(378)
atggcggagagggtggcgcggctgtcgtcgcagagggcggtggtgatcttcggggcgagcaactgcttcatgtgccacgtggtgaagacgctcttctcggagctcggggtgagctgggcggtgcacgaggtggacaaggaccccaacggcaaggacgtcgagagggcgctcgccggaatggtcggccggacgccgccggtgccggccgtcttcatcggcggcaagctcgtcgggcccaccgaccaggtcatgtcgctccacctcgccggcaagctcgtcccgctcctccgcgaagccggcgccctctggctcagagatacgaagtactcctatatactaccagctaatcaattaattaactatcgatcaattaattaa

SEQ ID NO: 2760 - protein, 125 aa, Oryza sativa
MAERVARLSSQRAVVIFGASNCFMCHVVKTLFSELGVSWAVHEVDKDPNGKDVERALAGMVGRTPPVPAVFIGGKLVGPTDQVMSLHLAGKLVPLLREAGALWLRDTKYSYILPANQLINYRSIN

SEQ ID NO: 2761 - DNA, 408 bp, Oryza sativa
  CDS (1)..(408)
atgcagtacggagcggcggccgagcaggcgtggtacatgccggcggcggcgccggcaccgatggtggagagcgcggtggcgcgggtggagcggctggcgtcggagagcgcggtggtggtgttcagcgtgagcagctgctgcatgtgccacgccgtgaagcgcctcttctgcggcatgggggtgcacccgacggtgcacgagctggacctcgacccgcgcggccgcgagctggagcgcgccctggcgcgcctcgtcgggtacggcggccccgccgccgcgtcgccgcccgtcgtccccgtcgtcttcatcggcggcaagctcgtcggcgccatggaccgcgtcatggccgcgcacatcaacggctccctcgtccccctcctcaaggaggccggcgcgctctggctctag

SEQ ID NO: 2762 - protein, 135 aa, Oryza sativa
MQYGAAAEQAWYMPAAAPAPMVESAVARVERLASESAVVVFSVSSCCMCHAVKRLFCGMGVHPTVHELDLDPRGRELERALARLVGYGGPAAASPPVVPVVFIGGKLVGAMDRVMAAHINGSLVPLLKEAGALWL

SEQ ID NO: 2763 - DNA, 402 bp, Oryza sativa
  CDS (1)..(402)
atggggatggcacagtcgtcttcgtcttcctcgcgcccctccgactccgagcagctagaggagcccagcaagccggtcatggcgctcgacaaggccaaggagatcgtcgcctcctcccccgtcgtcgtcttcagcaagacttattgccctttctgcgcccgagtgaagcgattgctggcagagctggcagcaagttacaaggctgttgaattggatgtggaaagtgatgggtctgagctgcagtcagctcttgccgattggactggacagagaactgttccttgtgtcttcattaaagggaaacatattggtggctgtgacgataccatggcgatgcacaaaggagggaacttggtccctctgctgacggaggcaggagcaatcgccactccttccctgtag

SEQ ID NO: 2764 - protein, 133 aa, Oryza sativa
MGMAQSSSSSSRPSDSEQLEEPSKPVMALDKAKEIVASSPVVVFSKTYCPFCARVKRLLAELAASYKAVELDVESDGSELQSALADWTGQRTVPCVFIKGKHIGGCDDTMAMHKGGNLVPLLTEAGAIATPSL

SEQ ID NO: 2765 - DNA, 408 bp, Oryza sativa
  CDS (1)..(408)
atgcagtacggcgcggcggcggcggagcaggcgtggtacatgccggcggcggcgatggtggtggcagcggcggcggagacggcggcggagcgggtggagaggctggcgtcggagagcgcggtggtggtgttcagcgtgagcagctgctgcatgtgccacgccgtgaagcgcctcttctgcggcatgggcgtgcacccggcggtgcacgagctggacctcgacccgcgcggccgcgacctggagcgcgccctggcgcgcctcgtcggcgccggcggcgccgccgctgccgccgtgcccgtcgtgttcatcggcggcaagctggtcggcgccatggaccgcgtcatggccgcgcacatcaacggctccctcgtgccgctgctcaaggaggccggcgcgctctggctttag

SEQ ID NO: 2766 - protein, 135 aa, Oryza sativa
MQYGAAAAEQAWYMPAAAMVVAAAAETAAERVERLASESAVVVFSVSSCCMCHAVKRLFCGMGVHPAVHELDLDPRGRDLERALARLVGAGGAAAAAVPVVFIGGKLVGAMDRVMAAHINGSLVPLLKEAGALWL

SEQ ID NO: 2767 - DNA, 384 bp, Oryza sativa
  CDS (1)..(384)
atgggaatcgcctcctcctcctcctcgaccccggaatccaggaagatggcgctcgccaaggccaaggagaccgtcgcctccgctcccgtcgtcgtctacagcaagtcttactgtcctttttgcgtccgtgtgaagaagttgttcgagcagcttggagcaactttcaaggccattgagttggatggggagagtgatggatctgagctgcagtcggcacttgctgaatggactggacaaaggactgttccaaatgtcttcatcaatgggaagcatattggtggctgtgatgatactttggcattgaacaatgaagggaagctggtgcctctgctgaccgaggctggagcaattgccagttctgcaaagacgacaatcaccgcatag

SEQ ID NO: 2768 - protein, 127 aa, Oryza sativa
MGIASSSSSTPESRKMALAKAKETVASAPVVVYSKSYCPFCVRVKKLFEQLGATFKAIELDGESDGSELQSALAEWTGQRTVPNVFINGKHIGGCDDTLALNNEGKLVPLLTEAGAIASSAKTTITA

SEQ ID NO: 2769 - DNA, 345 bp, Oryza sativa
  CDS (1)..(345)
atggacagggtgacaaggctggcgtcgcagaaggcggtggtggtgttcagcaagagctcgtgcggcatgtcccacgccgtgacgcgcctgctccgggagctcggcgtcgacgcccgcgtggtggagctcgacgaggagcccgccggcgccgacatggagaacgcgctcgccgggatgttgctcgccggcaccgccgccaacggcggtggccgcggccgcggcgtcgtggtgccgacagtgttcatcggcggcaggctcgtcggctccaccgaccgggtcatgtcgctccacgtcgccggcggccttgtcccgctcctccgcgacgccggcgcgctctgggtgtag

SEQ ID NO: 2770 - protein, 114 aa, Oryza sativa
MDRVTRLASQKAVVVFSKSSCGMSHAVTRLLRELGVDARVVELDEEPAGADMENALAGMLLAGTAANGGGRGRGVVVPTVFIGGRLVGSTDRVMSLHVAGGLVPLLRDAGALWV

SEQ ID NO: 2771 - DNA, 417 bp, Oryza sativa
  CDS (1)..(417)
atgcaaggaggaggcggcgtgagctgcgcggtggccggggacgcgccgtcgtcgacgagggggggaggcggcggagggatgctggggctgacgctgttcgacccgccgggaggggagcagccggcggagaggatcgggaggctggtgcgggagagccccgtggtgatcttcgcgaggagggggtgctgcatgtgccacgtcatgcgccgcctcctggccgccgtgggggcgcacgccaccgtcatcgagctcgacgaggccgccgaggaggccgcggcgtccgcggccgccgccgccgccgtcccggcgctcttcgtcggcggcgccccagtcggcggcctcgacggcctcatgggcctccacctcagcggccgcctcgtcccccgcctcagggaggtcggcgccctctgcggctag

SEQ ID NO: 2772 - protein, 138 aa, Oryza sativa
MQGGGGVSCAVAGDAPSSTRGGGGGGMLGLTLFDPPGGEQPAERIGRLVRESPVVIFARRGCCMCHVMRRLLAAVGAHATVIELDEAAEEAAASAAAAAAVPALFVGGAPVGGLDGLMGLHLSGRLVPRLREVGALCG

SEQ ID NO: 2773 - DNA, 399 bp, Oryza sativa
  CDS (1)..(399)
atgtaccaggcgatcccgtacaacgcgaaccgggcttggccggcggcgagccggccggcgacggcggcggcggcgccgccgccgccgccgccgcgtggcgaggaggaggaggtgaggagggcggtggcggagtgcccggtggtggtggtgggtcggagcgggtgctgcctgagccacgtcgtgaagcggctgctgcaggggctcggggtcaacccggcggtgcacgaggtcgccggcgaggccgagctcgccggggtggtcgccggcggcggcggcgtcgcgctgccggcggtgttcgtcggcgggaggctcctcggcgggctcgaccggctcatggccgtgcacatctccggcgagctcgtgcccattctgaaggaggccggtgcactctggctctga

SEQ ID NO: 2774 - protein, 132 aa, Oryza sativa
MYQAIPYNANRAWPAASRPATAAAAPPPPPPRGEEEEVRRAVAECPVVVVGRSGCCLSHVVKRLLQGLGVNPAVHEVAGEAELAGVVAGGGGVALPAVFVGGRLLGGLDRLMAVHISGELVPILKEAGALWL

SEQ ID NO: 2775 - DNA, 411 bp, Oryza sativa
  CDS (1)..(411)
atggcggcgctgctgggccggaggttcgggatggcggcggcggcgctcatcgccctcgcggcgctcggatccgccgcctcggggacggcgtccaagtcgtccttcgtgaaatccaccgtcaaagcccacgacgtcgtcatattctccaagtcatactgcccgtactgtagaagagccaaagctgtgttcaaggaacttgaactgaagaaggagccgtatgttgtggagcttgatcaacgagaggatggttgggagattcaggatgccttatctgacatggttggcaggcgaactgttcctcaagtttttgtccatgggaagcacctgggtggctctgatgatactgttgaagcatatgagagtggcaagctagccaaacttttgaacattgatgtcaaagaagatctttga

SEQ ID NO: 2776 - protein, 136 aa, Oryza sativa
MAALLGRRFGMAAAALIALAALGSAASGTASKSSFVKSTVKAHDVVIFSKSYCPYCRRAKAVFKELELKKEPYVVELDQREDGWEIQDALSDMVGRRTVPQVFVHGKHLGGSDDTVEAYESGKLAKLLNIDVKEDL

SEQ ID NO: 2777 - DNA, 579 bp, Oryza sativa
  CDS (1)..(579)
atgtcagagcgtgtgttcgccgagctcgcgaccatccactaccaaaaaagccttccatgtcgccactcctttgacccccctcgcaccacaccaattctccatctatatatcatccaccttcttcttcctcctctcattgccattgtgtgtttgtgttacattgcaatcgtgccatttgaagaagaggaggagaggatgaggatgcaggtggtggagacggcggcggtggaggaggaggaggcggcggcggcgatgatgtcggtgtacgagagggtggcgaggatggcgagcgggaacgcggtggtggtgttcagcgcgagcgggtgctgcatgtgccacgtcgtcaagcgcctcctcctcggcctcggcgtcggccccgccgtctacgagctcgaccagctcgccgccgccgccgacatccaggccgcgctgtcgcagctcctcccgccgggccagccgccggtgcccgtcgtgttcgtcggcggcaggctcctcggcggcgtcgagaaggtgatggcgtgccacatcaatggcaccctcgtccccctcctcaagcaggccggcgccctctggctctga

SEQ ID NO: 2778 - protein, 192 aa, Oryza sativa
MSERVFAELATIHYQKSLPCRHSFDPPRTTPILHLYIIHLLLPPLIAIVCLCYIAIVPFEEEEERMRMQVVETAAVEEEEAAAAMMSVYERVARMASGNAVVVFSASGCCMCHVVKRLLLGLGVGPAVYELDQLAAAADIQAALSQLLPPGQPPVPVVFVGGRLLGGVEKVMACHINGTLVPLLKQAGALWL

SEQ ID NO: 2779 - DNA, 495 bp, Oryza sativa
  CDS (1)..(495)
atgccgccgcggagcctcaccctctcccgccttcccgtggccgcccttggcctccccttctcttcttgctccccgcctcctcctcgccttcgcttccccttcgccgcacgccgcgccaggtccctcgccaccagggcctcctcctcctctccggattcctccttcggctcgcggatggaggactctgtcaagaggacgctcgccgacaaccccgtcgtcatctactccaagtcctggtgctcctactccatggaggtcaaggcgctcttcaagcggatcggcgtccagccgcacgtcatcgagctcgaccaactcggcgcacagggacctcagttgcaaaaggtgttagagcggctgactggacagtccactgttcctaatgttttcattggtggaaagcacattggtggctgtacagatactgtgaagcttcatcgcaaaggggagctagctaccatgctgtcagagctggatatcgacgtcaacaactcatga

SEQ ID NO: 2780 - protein, 164 aa, Oryza sativa
MPPRSLTLSRLPVAALGLPFSSCSPPPPRLRFPFAARRARSLATRASSSSPDSSFGSRMEDSVKRTLADNPVVIYSKSWCSYSMEVKALFKRIGVQPHVIELDQLGAQGPQLQKVLERLTGQSTVPNVFIGGKHIGGCTDTVKLHRKGELATMLSELDIDVNNS

SEQ ID NO: 2781 - DNA, 327 bp, Oryza sativa
  CDS (1)..(327)
atggagagggtggcgaagctggcgtcggagagggcggtggtggtgttcacggcgagcaactgcggcatgtgccacgccgtgacgagcctcctcgtcggcgagctgggcgtcaacgccgccgtgcacgagctcgacaaggacccccgcggcagggacatggagagggagctcgccaggaggctcaacggcggcggcggcggcggccgcgccctgccggcggtgttcgtcggaggcaacctcgtcggcggcgccaaccgggtcatgtcgctccacctcgccggcgagctcgtccccatgctcaagaacgccggcgcgctctggctctag

SEQ ID NO: 2782 - protein, 108 aa, Oryza sativa
MERVAKLASERAVVVFTASNCGMCHAVTSLLVGELGVNAAVHELDKDPRGRDMERELARRLNGGGGGGRALPAVFVGGNLVGGANRVMSLHLAGELVPMLKNAGALWL

SEQ ID NO: 2783 - DNA, 330 bp, Oryza sativa
  CDS (1)..(330)
atggcggagatggtggcgaggctggcgtcggagagggcggtggtggtgttcaccaagagcggctgctgcatgtgcaccgcggtgacgacgctgctcggcgagctcgccgtcagcgccgccgtgcacgagctcgacagggacccgctcgggaaggagatggagaaggagctcgccaggaggctctacggctccagcggccgcggcgggcccgccgtgccggcggtgttcatcggcgggagcctcgtcggcggcaccagcaaggtgatggccatgcacctcaagggcgagctcgtgcccttgctcaagagcgccggtgcactgtggctttga

SEQ ID NO: 2784 - protein, 109 aa, Oryza sativa
MAEMVARLASERAVVVFTKSGCCMCTAVTTLLGELAVSAAVHELDRDPLGKEMEKELARRLYGSSGRGGPAVPAVFIGGSLVGGTSKVMAMHLKGELVPLLKSAGALWL

SEQ ID NO: 2785 - DNA, 330 bp, Oryza sativa
  CDS (1)..(330)
atggcggagatggtggcgaggctggcgtcggagagggcggtggtggtgttcaccaagagcggctgctgcatgtgcaccgcggtgacgacgctgctcggcgagctcgccgtcagcgccgccgtgcacgagctcgacagggagccgctcgggaaggagatggagagggagctcgccaggaggctctacggctccggcggccgcggcgggcccgccgtgccggcggtgttcatcggcgggagcctcgtcggcggcaccagcaaggtgatgaccgtgcacctcaagggggagctcgtgccaatgctcaagagtgccggtgcactgtggctttga

SEQ ID NO: 2786 - protein, 109 aa, Oryza sativa
MAEMVARLASERAVVVFTKSGCCMCTAVTTLLGELAVSAAVHELDREPLGKEMERELARRLYGSGGRGGPAVPAVFIGGSLVGGTSKVMTVHLKGELVPMLKSAGALWL

SEQ ID NO: 2787 - DNA, 330 bp, Oryza sativa
  CDS (1)..(330)
atggcggagatggtggcgaggctggcgtcggagagggcggtggtggtgttcaccaagagcggctgctgcatgtgcaccgcggtgacgacgctgctcggcgagctcgccgtcagcgccgccgtgcacgagctcgacagggagccgctcgggaaggagatggagagggagctcgccaggaggctctacggctccggcggccgcggcgggcccgccgtgccggcggtgttcatcggcgggagcctcgtcggcagcaccagcaaggtgatggccatgcatctcaagggggagctcgtgccaatgctcaagaacgccggtgcactgtggctttaa

SEQ ID NO: 2788 - protein, 109 aa, Oryza sativa
MAEMVARLASERAVVVFTKSGCCMCTAVTTLLGELAVSAAVHELDREPLGKEMERELARRLYGSGGRGGPAVPAVFIGGSLVGSTSKVMAMHLKGELVPMLKNAGALWL

SEQ ID NO: 2789 - DNA, 312 bp, Oryza sativa
  CDS (1)..(312)
atggaccgtgtgatgaagctagcatccgagcgtgcggtggtgatcttcaccttgagctcatgctgcatgtgccacaccgtgacacgcctcttctgtgatctcggtgtcaacgcgctagtgcatgagctggaccaagaccctaggggcaaggagatggagagggcactcctcaagctgctcggaagggggccgcctgtgccggtggtgttcattggtgggaagctcgttgggggaaccaacaagatcatgtccctccaccttggaggtgagctgatccccatgctcaagaatgcgggagccctctggctgtag

SEQ ID NO: 2790 - protein, 103 aa, Oryza sativa
MDRVMKLASERAVVIFTLSSCCMCHTVTRLFCDLGVNALVHELDQDPRGKEMERALLKLLGRGPPVPVVFIGGKLVGGTNKIMSLHLGGELIPMLKNAGALWL

SEQ ID NO: 2791 - DNA, 315 bp, Oryza sativa
  CDS (1)..(315)
atggagagggtggcgaagctgtcgacggagaaggcggtggtgatcttcacggcgagcaactgcccgatgtgccacacggtggtgagcctcttctccgacctcggcgtcggcgccgccgtccacgagctcgaccgcgacccgctccacggccgggacatggagcgcgacctcgcccgccgcctcggccgctccccgcccgtccccgccgtcttcatcgccggcaagctcgtcggctccaccgaccgcgtcatgtcgctccacctcgccggcaagctcgtccccatgctcaaggccgccggcgccatttggctctag

SEQ ID NO: 2792 - protein, 104 aa, Oryza sativa
MERVAKLSTEKAVVIFTASNCPMCHTVVSLFSDLGVGAAVHELDRDPLHGRDMERDLARRLGRSPPVPAVFIAGKLVGSTDRVMSLHLAGKLVPMLKAAGAIWL

SEQ ID NO: 2793 - DNA, 309 bp, Brassica napus
  CDS (1)..(309)
atggagatgataactaagatggtgttggagagaccagtggtgatatacagcaaaagctcatgttgtatgtctcacacggtcaagactttgctctgcgattttggagcgaatccagcggtttacgagctagacgaggtgtctagaggaagggagattgagcaggcgctcttgaggctcgggtgtggcccagcggttccggctgtttttatcggaggagagttagtcggtggagccaacgaggtcatgagtctacaccttaacgggtccttaatccctatgcttaagcaagctggtgcattgtgggtttga

SEQ ID NO: 2794 - protein, 102 aa, Brassica napus
MEMITKMVLERPVVIYSKSSCCMSHTVKTLLCDFGANPAVYELDEVSRGREIEQALLRLGCGPAVPAVFIGGELVGGANEVMSLHLNGSLIPMLKQAGALWV

SEQ ID NO: 2795 - DNA, 309 bp, Brassica napus
  CDS (1)..(309)
atggagatggtcacgaggatggttttggagagacccgtggtgatatacagcaaaagcttatgttgtatgtcccacacagtcaagacattgctctgcgatttcggagcgaatccagccgtttacgagctagatgaggtatcaagagggagagagattgagcaggccttgttgcggcttggttgtagcccggcggttccagcggtttttatcggaggagagttagttggtggagccaacgaggtcatgagtcttcatcttaacggctcattgatccctatgcttaagcgggctggtgcattgtgggtttga

SEQ ID NO: 2796 - protein, 102 aa, Brassica napus
MEMVTRMVLERPVVIYSKSLCCMSHTVKTLLCDFGANPAVYELDEVSRGREIEQALLRLGCSPAVPAVFIGGELVGGANEVMSLHLNGSLIPMLKRAGALWV

SEQ ID NO: 2797 - DNA, 309 bp, Brassica napus
  CDS (1)..(309)
atggaaagcataagaagtttagttgcagacaaaccagtggtggttttcagcaaaagctcctgctgcatgagccactcgatccaaacactgatctcgggatttggtgcaaagatgacagtgtacgagctcgatcagctgtctaacgggaaggagatcgagaaggcgttggtacagatggggtgtaagccgagtgtaccagcggtgttcataggagaacagttaatcggcggggctaaccaggtgatgactctccaagtcaagaaccaactagccgcattgctaagaagagccggagccatatgggtttaa

SEQ ID NO: 2798 - protein, 102 aa, Brassica napus
MESIRSLVADKPVVVFSKSSCCMSHSIQTLISGFGAKMTVYELDQLSNGKEIEKALVQMGCKPSVPAVFIGEQLIGGANQVMTLQVKNQLAALLRRAGAIWV

SEQ ID NO: 2799 - DNA, 309 bp, Brassica napus
  CDS (1)..(309)
atggacaaggtgatgagaatgtcatcagagaaaggagttgtgatcttcaccaaaaactcgtgttgtctttgctacgccgtgcaggtccttttccgtgaccttagggttcagccaaaaatccacgagatcgacaatgatcctgactgccgcgagatcgagaaggccttagtccgtcttggctgcgccaacgcggttcctgctgtttttgttagtggtaagctggtgggttcgaccaacgatgttatgtcgcttcacctaagtggatctctcgttcccttgatcaagccatatcaggcgttccataactag

SEQ ID NO: 2800 - protein, 102 aa, Brassica napus
MDKVMRMSSEKGVVIFTKNSCCLCYAVQVLFRDLRVQPKIHEIDNDPDCREIEKALVRLGCANAVPAVFVSGKLVGSTNDVMSLHLSGSLVPLIKPYQAFHN

SEQ ID NO: 2801 - DNA, 309 bp, Brassica napus
  CDS (1)..(309)
atggataaagttgtgagaatgtcttcggataaaggagtggttatattcagcaagagctcgtgttgcatgtcctatgcggtccaggtcctcttccaagacctcggggttcacccgactgtccatgagatagacaaggaccctgattgtcgtgagatagagaaagccctaatgaggctcgggtgttccacaccggtcccagccatctttgtggatgggaagctcgttggttcgaccaatgaagtcatgtcgatgcaccttagcggctcgctggttccgctggttaagccatttcaagctaatctatgttaa

SEQ ID NO: 2802 - protein, 102 aa, Brassica napus
MDKVVRMSSDKGVVIFSKSSCCMSYAVQVLFQDLGVHPTVHEIDKDPDCREIEKALMRLGCSTPVPAIFVDGKLVGSTNEVMSMHLSGSLVPLVKPFQANLC

SEQ ID NO: 2803 - DNA, 318 bp, Brassica napus
  CDS (1)..(318)
atggacaaggtgatgagaatgtcgtcagagaaaggagtggtgatcttcacgaagagctcatgttgtctctgctacaccgttcagatcctgttccgtgaccttagggttcaaccaacgatccacgagatcgacaacgatccagactgccgcgaaatcgagaaggctctcctccgtattggctgttccacggcggtgccagctgtcttcgtaggtggcaagctcgttggttccaccaatgaagtcatgtcccttcaccttagtggttctctcgtccccttgatcaaaccctatcagtccctcctttaccaggccaattga

SEQ ID NO: 2804 - protein, 105 aa, Brassica napus
MDKVMRMSSEKGVVIFTKSSCCLCYTVQILFRDLRVQPTIHEIDNDPDCREIEKALLRIGCSTAVPAVFVGGKLVGSTNEVMSLHLSGSLVPLIKPYQSLLYQAN

SEQ ID NO: 2805 - DNA, 300 bp, Brassica napus
  CDS (1)..(300)
atggacaaggttctgagaatgtcatccgaaaaaggagtggttatattcagcaagagctcgtgttgcttgtcctacgcggttcaagtcctcttccaagatcttggggttagccctaagatccacgagatcgacaaggaccccgaatgccgagagatcgagaaggcactgatgaggctaggctgttcaaagccagttccagccgtcttcattggcggcaagctcgttggttccacaaacgaagtcatgtccatgcacctaagcagctccttggttcccttagtgaagccatatctatgttaa

SEQ ID NO: 2806 - protein, 99 aa, Brassica napus
MDKVLRMSSEKGVVIFSKSSCCLSYAVQVLFQDLGVSPKIHEIDKDPECREIEKALMRLGCSKPVPAVFIGGKLVGSTNEVMSMHLSSSLVPLVKPYLC

SEQ ID NO: 2807 - DNA, 309 bp, Brassica napus
  CDS (1)..(309)
atggaaaacattagaagtttagttgctgacaaaccagtggtgattttcaccaaaagcacttgctgcatgagccattcaattcaaacgctgatctcaggatttggggcaaagatgacagtgtacgagcttgaccagctgtcaaacggtcaggaaatggagaaagcattgaaacagatggggtgtaagccgagtgtaccagctgtgttcataggggaacagttaatcggtggggctaaccaggtaatgactctccaagtcaagaaccaactagccgcattgctaaaaagagctggagccatatgggtttaa

SEQ ID NO: 2808 - protein, 102 aa, Brassica napus
MENIRSLVADKPVVIFTKSTCCMSHSIQTLISGFGAKMTVYELDQLSNGQEMEKALKQMGCKPSVPAVFIGEQLIGGANQVMTLQVKNQLAALLKRAGAIWV

SEQ ID NO: 2809 - DNA, 519 bp, Brassica napus
  CDS (1)..(519)
atggcagtcacagctttcaaccctctgaaacttgcatcttcgcctcgagattcgtttccttcaatctcctcttcaacttcttattcggtgtctctgataagcttcggtatcagaaactccgtgggatctcctctcaagaaatgtctaaagcagacgtgttctgttcgagccatgtcttcttcgtcattcgaatcggggatggaggagagcgtgaagaaaacggtgaatgataacacagtcgttgtttactcgaaaacttggtgcccatactgttctgaagtgaagacattgttcaagagacttggtgttcagccactggtggttgagttggatgaacttggtccacaagggacacaactacagaaggtactggaaacacttactgggcaacgcactgttcctagtgtgttcgtcggaggcaagcacattggtggctgcacagatacagtaaacctgaacaggaaaggagaactggagctgatgttagctgaagccaacggtaaaaccgatcagacttga

SEQ ID NO: 2810 - protein, 172 aa, Brassica napus
MAVTAFNPLKLASSPRDSFPSISSSTSYSVSLISFGIRNSVGSPLKKCLKQTCSVRAMSSSSFESGMEESVKKTVNDNTVVVYSKTWCPYCSEVKTLFKRLGVQPLVVELDELGPQGTQLQKVLETLTGQRTVPSVFVGGKHIGGCTDTVNLNRKGELELMLAEANGKTDQT

SEQ ID NO: 2811 - DNA, 306 bp, Glycine max
  CDS (1)..(306)
atggacaaggtgatgaggttggcctctgaaaagggtgtggtgattttcacaaagagttcttgttgcctctgctatgcagttaacattctgtttcaagaacttggggtgaatcctgtggttcatgagattgatcatgaccctgaaggcagagaaatggagaaagctctattgaggctaggctgcactgctccagtcccagctgtgttcataggagggaagctaaggggatccaccaatgaaatcatgtccctccacctaagtggttcactcactcagatgctgaaaccttatcaggctttgtcttga

SEQ ID NO: 2812 - protein, 101 aa, Glycine max
MDKVMRLASEKGVVIFTKSSCCLCYAVNILFQELGVNPVVHEIDHDPEGREMEKALLRLGCTAPVPAVFIGGKLRGSTNEIMSLHLSGSLTQMLKPYQALS

SEQ ID NO: 2813 - DNA, 315 bp, Triticum aestivum
  CDS (1)..(315)
atggagagggtgacgaggctatcgacggagaaggcggtggtgatcttcacgccgagcaacgactgcccaatgagctacacagtgacgaccctcttctcgggcctcggcgtttgcgcggccgtgcacgagctggacaaggacccccggggccgtgacatggagcgcgacctcgcccgtcgtctgggccgcacgccggccgtcccggccgtcttcatcggcggcaagctcgtcggttccaccgacagggtcatgtcgctccacctcggtgggaagctggtgcccatgctcaaggccgccggggcgatctggctctga

SEQ ID NO: 2814 - protein, 104 aa, Triticum aestivum
MERVTRLSTEKAVVIFTPSNDCPMSYTVTTLFSGLGVCAAVHELDKDPRGRDMERDLARRLGRTPAVPAVFIGGKLVGSTDRVMSLHLGGKLVPMLKAAGAIWL

SEQ ID NO: 2815 - DNA, 306 bp, Glycine max
  CDS (1)..(306)
atggacaaggttacgaggttggcaacagaaaagggtgtggtggttttcaccaagagctcttgttgcctctgctatgcagtcaacattctgttccaagagcttggagtgatccctgtggttcatgaaattgacaaagaccctgagggcaaggaaatagagaaagctataacaaggttggggtgtcctacacctgttcctgcagtcttcatcggagggaagctggtggggtccaccaatgaagtcatgtccctccaccttagtggttcactcactcaactgctgaaaccatatcgagctttgtcttaa

SEQ ID NO: 2816 - protein, 101 aa, Glycine max
MDKVTRLATEKGVVVFTKSSCCLCYAVNILFQELGVIPVVHEIDKDPEGKEIEKAITRLGCPTPVPAVFIGGKLVGSTNEVMSLHLSGSLTQLLKPYRALS

SEQ ID NO: 2817 - DNA, 309 bp, Brassica napus
  CDS (1)..(309)
atggacaaagttgtgagaatgtcttcggagaaaggagtggttatattcagcaagagctcgtgttgcatgtcctatgcggtccaggtcctcttccaagacctcggggttcacccgaccgtccatgagatagacaaggaccctgattgtcgagagatagagaaagccctgatgaggctcgggttttccacaccggtcccagccatctttgtggatgggaagctcgttggttcgaccaatgaagtcatgtcgatgcaccttagcggctcgctggttccgctcgttaagccatttcaagccaatctatgttaa

SEQ ID NO: 2818 - protein, 102 aa, Brassica napus
MDKVVRMSSEKGVVIFSKSSCCMSYAVQVLFQDLGVHPTVHEIDKDPDCREIEKALMRLGFSTPVPAIFVDGKLVGSTNEVMSMHLSGSLVPLVKPFQANLC

SEQ ID NO: 2819 - DNA, 309 bp, Brassica napus
  CDS (1)..(309)
atggagatgataacgaagatggtgttggagagaccagtggtcatttacagcaaaagctcatgttgtatgtcccacacggtcaagactttgctctgcgacttcggtgcgaatccagcggttcacgagcttgatgaggtacctagaggcagggagattgagcaggcgttgttgcggcttgggtgtagcccggcggttccagccatttttattggaggagagttggttggtggagctaacgaggtcatgagtcttcaccttaacggctcattgatccctatgcttaagcaggctggcgcattgtgggtctga

SEQ ID NO: 2820 - protein, 102 aa, Brassica napus
MEMITKMVLERPVVIYSKSSCCMSHTVKTLLCDFGANPAVHELDEVPRGREIEQALLRLGCSPAVPAIFIGGELVGGANEVMSLHLNGSLIPMLKQAGALWV

SEQ ID NO: 2821 - DNA, 399 bp, Glycine max
  CDS (1)..(399)
atgcattaccaagcagcggcggcggcgtggtgggggagctacgtggcggcccctcggaacgcggcggcggcggtagtgggggacccgctggagcgcatagagaggctggcgtcggagagcgcggtggtgatattcagcgtgagcacgtgctgcatgtgccacgccatcaagaggctcttctgcggcatgggtgtgaacccaaccgtgcacgagctggacgaggatccaagaggcaaggacctcgaacgcgccctcatgcggctccttggaaccccctcggtggtccctgtcgtcttcatcggtggcaagcttgtcggaaccatggaccgggtcatggcatgccacatcaacggcacccttgttcctctcctcaaagaagccggtgctctctggctctga

SEQ ID NO: 2822 - protein, 132 aa, Glycine max
MHYQAAAAAWWGSYVAAPRNAAAAVVGDPLERIERLASESAVVIFSVSTCCMCHAIKRLFCGMGVNPTVHELDEDPRGKDLERALMRLLGTPSVVPVVFIGGKLVGTMDRVMACHINGTLVPLLKEAGALWL

SEQ ID NO: 2823 - DNA, 312 bp, Triticum aestivum
  CDS (1)..(312)
atggatcgcgtgatgaagctggcgtcggagagagcggtggtgatcttcaccctgagctcctgctgcatgtgccacaccgtggcgcggctcttctgcgacctaggtgtcaacgcactggtgcacgagctcgaccaagaccccaggggaaaggagatggagagagctctcctcaagatgctcgggaaaggcccgtctgttccggtggtgttcatcggcgggaagcttgtcggcgggacaaacagggtcatgtccatgcatctcagcggggagctggtcccagtgctgaggaatgcaggtgccctctggctatag

SEQ ID NO: 2824 - protein, 103 aa, Triticum aestivum
MDRVMKLASERAVVIFTLSSCCMCHTVARLFCDLGVNALVHELDQDPRGKEMERALLKMLGKGPSVPVVFIGGKLVGGTNRVMSMHLSGELVPVLRNAGALWL

SEQ ID NO: 2825 - DNA, 414 bp, Triticum aestivum
  CDS (1)..(414)
atgttgaggatgcagcagcaggtggagggcgtggtgggcggcggcatcgtggcggaggcggaggaggcggcggtgtacgagagggtggctcgcatggccagcggcaacgcggtggtcgtcttcagcgccagcggctgctgcatgtgccacgtcgtcaagcgcctcctgcttggcctgggagtcggccccaccgtgtacgagttggaccagatgggcggcgccgggcgggagatccaggcggccctggcgcagctgctgccccccggacccggcgccggccaccaccagcagccgccggtgcccgtggtgttcgttggcgggaggctcctgggcggcgtggagaaggtgatggcgtgccacatcaacggcacgctcgtcccgctcctcaaggacgccggcgcgctctggctctga

SEQ ID NO: 2826 - protein, 137 aa, Triticum aestivum
MLRMQQQVEGVVGGGIVAEAEEAAVYERVARMASGNAVVVFSASGCCMCHVVKRLLLGLGVGPTVYELDQMGGAGREIQAALAQLLPPGPGAGHHQQPPVPVVFVGGRLLGGVEKVMACHINGTLVPLLKDAGALWL

SEQ ID NO: 2827 - DNA, 414 bp, Zea mays
  CDS (1)..(414)
atgcagtacggcgcggcggcggcggagcaggcgtggtcgtacatgccggtggtggcaccgtcgtcggccgtggagacggcggcggagcgcgtggagcggctggcgtcggagagcgcggtggtggtgttcagcgtgagcacctgctgcatgtgccacgccgtgaagcgcctcttctgcggcatgggcgtgcacccgacggtgcacgagctggaccacgacccgcggggccgcgagctggagcgcgccctggcctgcctcctcggcgcctccggagcctcggcggcgggcgcgccggtcgtgcccgtcgtgttcatcggcggcaggctggtcggcgccatggaccgcgtcatggccgcgcacatcaacggcaccctcgtgccgctgctcaaggacgccggcgcgctctggctgtga

SEQ ID NO: 2828 - protein, 137 aa, Zea mays
MQYGAAAAEQAWSYMPVVAPSSAVETAAERVERLASESAVVVFSVSTCCMCHAVKRLFCGMGVHPTVHELDHDPRGRELERALACLLGASGASAAGAPVVPVVFIGGRLVGAMDRVMAAHINGTLVPLLKDAGALWL

SEQ ID NO: 2829 - DNA, 468 bp, Zea mays
  CDS (1)..(468)
atgtaccaggccatcccctacagcagcgcccgggcgtggctgatgccggcggcggcggctgaggcgggcgtcgccgctgtgaagccggagccggtggcgaccgtcgcggagcctgcggcggaggaggagcgcgcccggccggacgccgcggccggggacgacgacgacggcggcagggcggaggtggggagggccgtggcggagaggccggtgctggtggtggggcggcgcgggtgctgcctgagccacgtggtgaagcggctgctgcaggggctcggggtgaacccggccgtgcacgaggtcgcggacgagtcggcgctcgcggggctcgtcccggccggcgccggcgcgctgcccgcggtgttcgtcgggggcaggctcctgggcgggctcgaccggctcatggccgtccacatctccggcgagctcgtgcccatcctgaagaaggccggtgccctctggctctag

SEQ ID NO: 2830 - protein, 155 aa, Zea mays
MYQAIPYSSARAWLMPAAAAEAGVAAVKPEPVATVAEPAAEEERARPDAAAGDDDDGGRAEVGRAVAERPVLVVGRRGCCLSHVVKRLLQGLGVNPAVHEVADESALAGLVPAGAGALPAVFVGGRLLGGLDRLMAVHISGELVPILKKAGALWL

SEQ ID NO: 2831 - DNA, 504 bp, Zea mays
  CDS (1)..(504)
atgccgccgccgcagtcgggcatgaccctctgccgccttcccaaggccacccttggccttcccctttctctcccctctttgctatatcgtcccagcctgtccctcgccgcacgtcgcaccaaggccgtctccgccagggcctcctcctcctctccatcaccggactcttccttcggttcgcggatggaggattccgtcaagaagacggtggccgataaccccgttgtcatctactctaagtcatggtgctcatattccatggaggtgaagtcactcttcaagcggatcggtgtgcagccccacgtcatcgagctcgacaatctcggagctcaaggaccacaactacaaaaggtattagaaaggctgactggacagtctactgttcctaacgttttcatcggtggaaaacacgttggaggctgcacagataccgtgaagctgtatcgcaagggggagctagctagcatgctgtcggacctggatatcaacattgacaactcatga

SEQ ID NO: 2832 - protein, 167 aa, Zea mays
MPPPQSGMTLCRLPKATLGLPLSLPSLLYRPSLSLAARRTKAVSARASSSSPSPDSSFGSRMEDSVKKTVADNPVVIYSKSWCSYSMEVKSLFKRIGVQPHVIELDNLGAQGPQLQKVLERLTGQSTVPNVFIGGKHVGGCTDTVKLYRKGELASMLSDLDINIDNS

SEQ ID NO: 2833 - DNA, 312 bp, Hordeum vulgare
  CDS (1)..(312)
atggaccgtgtgatgaagatggcgccagagagaggggtggtgatcttcaccttgaactcatgctgcatgtgccacacagtaacccgcctcttcaccgacctcggtgtcaatgctctggttcatgagctagaccatgatcccaagggcaaggagatggagagggcgctcctaaagcttctcgggaaggggccacccgtcccggcagtgttcatcggtggaaagcttgtcggcggcaccaataagatcatgtctctgcaccttggtggtgagctggtccccatgatacggaatgcaggtgctctatggctgtag

SEQ ID NO: 2834 - protein, 103 aa, Hordeum vulgare
MDRVMKMAPERGVVIFTLNSCCMCHTVTRLFTDLGVNALVHELDHDPKGKEMERALLKLLGKGPPVPAVFIGGKLVGGTNKIMSLHLGGELVPMIRNAGALWL

SEQ ID NO: 2835 - DNA, 393 bp, Hordeum vulgare
  CDS (1)..(393)
atgggtaccgccttttcctcctcctcctcttccaccccagagtccagagctatggcgctcgccaaggccaaggagatcgtcgcctccgctcccgtcgtcgtcttcagcaagtcttactgccctttctgcgtacaagtgaagaaactgttcacgcagctaggagcgagtttcaaggccattgagttggacactgagagtgatggacctgagatgcagtcagctcttgcagaatggactgggcagaggactgtccccaatgtcttcatcaatggaaaacacatcggtggctgtgatgacactcttgcactgaacaagggagggaagctggttgctctgctgacggaggctggagcgatctccggttctacttcgaaggccaccaccactgcttag

SEQ ID NO: 2836 - protein, 130 aa, Hordeum vulgare
MGTAFSSSSSSTPESRAMALAKAKEIVASAPVVVFSKSYCPFCVQVKKLFTQLGASFKAIELDTESDGPEMQSALAEWTGQRTVPNVFINGKHIGGCDDTLALNKGGKLVALLTEAGAISGSTSKATTTA

SEQ ID NO: 2837 - DNA, 378 bp, Brassica napus
  CDS (1)..(378)
atgggttctatgttcagtggaaacagattgagcaaggaagagatggaggtggtgatgaacaaagccaaagagatcgtctccgagtacccggtcgttgtcttcagcaagacttactgtggttattgccagagggtgaaacagttgttgacacagctaggtgcaacttttaaagtacttgagctcgatgagatgagtgatggaggtgagatccaatcagctttatctgagtggactggacagagcactgttcctaatgttttcatcaaaggcaaacatatcggtggatgtgatagagtgatggagagtaacaagcaagggaagcttgtgcctctacttactgaagctggtgctatcgccaataactcttcccagctttga

SEQ ID NO: 2838 - protein, 125 aa, Brassica napus
MGSMFSGNRLSKEEMEVVMNKAKEIVSEYPVVVFSKTYCGYCQRVKQLLTQLGATFKVLELDEMSDGGEIQSALSEWTGQSTVPNVFIKGKHIGGCDRVMESNKQGKLVPLLTEAGAIANNSSQL

SEQ ID NO: 2839 - DNA, 522 bp, Brassica napus
  CDS (1)..(522)
atggccgcatcagccaatctcgggagcctgagatcgacgacgacgtcgctgttttcaaatcggccattctctttgtccatgttaagaagctccctcgtattaaggacatgccttattaagcccacacctctccggctcctcgtgtcgtggccaccgcaccacggctcttccgtcagggccatgtcatcatcgtcatcttccttggaggagacagttaaaacgactgtagcagaaaaccctgtggttgtctactccaaatcctggtgctcatactcgtcggaagtgaagtcgttgttcaatgggcttcaagttaagccactcgttgttgaactcgatcaacttggtgcagaggggtcgcagctgcagactgtcttggagaaactcactggacaattcactgttcctaatgttttcatcggaggcaagcacattggtggctgctcagatacgctgcagctgtacaataaaggacagctcgagccaatgttagctgaggccaatgccaaaaccggtcggacctag

SEQ ID NO: 2840 - protein, 173 aa, Brassica napus
MAASANLGSLRSTTTSLFSNRPFSLSMLRSSLVLRTCLIKPTPLRLLVSWPPHHGSSVRAMSSSSSSLEETVKTTVAENPVVVYSKSWCSYSSEVKSLFNGLQVKPLVVELDQLGAEGSQLQTVLEKLTGQFTVPNVFIGGKHIGGCSDTLQLYNKGQLEPMLAEANAKTGRT

SEQ ID NO: 2841 - DNA, 525 bp, Brassica napus
  CDS (1)..(525)
atggccgcatcagccaatctcgggagcctgagatcgacgacgacgtcgctgttttttacaaatcggccattctctttgtccatgttaagaagctctctcgtattaaggacatgtcttattaagcccacacctctccggctcgtcgtgtcgtggccaccgcaccacggctcttccgtgagggccatgtcatcatcgtcatcttccttggaggagacagttaaaacgactgtagcagaaaaccctgtggttgtctactccaaatcctggtgctcatactcgtcggaagtgaagtcgttattcaatgggcttcaagttaagccactcgttattgaactcgatgaacttggtgcagaggggtcgcagctgcagaatgtcttggagaaactcactggacaattcactgttcctaatgttttcatcggaggcaagcacattggtggctgctcagatacgttgcagctgtacaataaaggagagctcgagccaatgttagctgcggccaatgccaaaaccggtcagacctag

SEQ ID NO: 2842 - protein, 174 aa, Brassica napus
MAASANLGSLRSTTTSLFFTNRPFSLSMLRSSLVLRTCLIKPTPLRLVVSWPPHHGSSVRAMSSSSSSLEETVKTTVAENPVVVYSKSWCSYSSEVKSLFNGLQVKPLVIELDELGAEGSQLQNVLEKLTGQFTVPNVFIGGKHIGGCSDTLQLYNKGELEPMLAAANAKTGQT

SEQ ID NO: 2843 - DNA, 309 bp, Brassica napus
  CDS (1)..(309)
atggacaaggtgatgagaatgtcgtcagaaagaggagtggtgatcatcacgaagagctcatgttgtctctgctacaccgttcagatcctgttccgtgaccttagggttcaaccaacggtccacgaaattgacaacgacccccactgccgtgagatcgagaaggctctcctccggataggctgctccacggcggtaccagctgtcttcgtaggtggcaagctcgttggttccaccaatgaagtcatgtcccttcaccttagtggctctctcgcccccttgatcaaaccttatcagtctctcctttactag

SEQ ID NO: 2844 - protein, 102 aa, Brassica napus
MDKVMRMSSERGVVIITKSSCCLCYTVQILFRDLRVQPTVHEIDNDPHCREIEKALLRIGCSTAVPAVFVGGKLVGSTNEVMSLHLSGSLAPLIKPYQSLLY

SEQ ID NO: 2845 - DNA, 309 bp, Brassica napus
  CDS (1)..(309)
atggagatgataacgaagatggtgttggagagaccagtggtgatatacagcaaaagcttatgttgtatgtcccacacagtcaagacattgctctgcgatttcggagcgaatccagcggtttacgagctagatgaggtatctagaggaagggagattgagcaggcgttgttgcggcttgggtgtagcccggcggttccagccgtttttatcggaggagagttagttggtggagccaacgaggtcatgagtcttcaccttaacggatcattgatccctatgcttaagcaggctggcgcattgtgggtctga

SEQ ID NO: 2846 - protein, 102 aa, Brassica napus
MEMITKMVLERPVVIYSKSLCCMSHTVKTLLCDFGANPAVYELDEVSRGREIEQALLRLGCSPAVPAVFIGGELVGGANEVMSLHLNGSLIPMLKQAGALWV

SEQ ID NO: 2847 - DNA, 522 bp, Brassica napus
  CDS (1)..(522)
atggcagtcacagctttcaacccactgaagcttgcatcttcgcctcgagattcgtttccttcaatctcctcttcaacttcttattcggtgtctctgataagcttcgtccgtatcagaaactccgtgggatctcctctcaagaaatgtctaaagcagacgtgttctgttcgagccatgtcttcttcgtcattcgaatcggggatggaggagagcgtgaagaaaacggtgaatgataacacagtcgttgtttactcgaaaacttggtgcccatactgttctgaagtgaagacattgttcaagagacttggtgttcagccactggtggttgagttggatgaacttggtccacaagggacacaactacagaaggtactggaaacacttactgggcaacgcactgttcctagtgtgttcgtcggaggcaagcacattggtggctgcacagatacagtaaacctgaacaggaaaggagaacttgagctgatgttagctgaagccaacggtaaaaccgatcagacttga

SEQ ID NO: 2848 - protein, 173 aa, Brassica napus
MAVTAFNPLKLASSPRDSFPSISSSTSYSVSLISFVRIRNSVGSPLKKCLKQTCSVRAMSSSSFESGMEESVKKTVNDNTVVVYSKTWCPYCSEVKTLFKRLGVQPLVVELDELGPQGTQLQKVLETLTGQRTVPSVFVGGKHIGGCTDTVNLNRKGELELMLAEANGKTDQT

SEQ ID NO: 2849 - DNA, 435 bp, Brassica napus
  CDS (1)..(435)
atgatgcaagaattgggcttagaacgtttctccaacgatgtctttcccttagacctcactcctccttctcaaacctcatctacttctctttccatcgacgaagaggaatcttcggaggccaagatccggcggctgatatcggagcatccagtgatcatcttcagcagatcttcttgttgcatgtgccacgtcatgaaaagcctcctttcaacaatcggagtcgtccccaccgtcatcgagctagatgaccacgaggtttcctctctccccatggctcttgaagaagaatattccggcggccgctccgtcgttgttcctccgccggcggttttcattggccgtgagtatgtcggtggtcttgagtcccttgttgctcttcatctaagtagtcacttggtccctaagcttggccaagttggagctctttggttatga

SEQ ID NO: 2850 - protein, 144 aa, Brassica napus
MMQELGLERFSNDVFPLDLTPPSQTSSTSLSIDEEESSEAKIRRLISEHPVIIFSRSSCCMCHVMKSLLSTIGVVPTVIELDDHEVSSLPMALEEEYSGGRSVVVPPPAVFIGREYVGGLESLVALHLSSHLVPKLGQVGALWL

SEQ ID NO: 2851 - DNA, 435 bp, Brassica napus
  CDS (1)..(435)
atgatgcaagaattaggcttagaacgtttctccaacgacgtcgtttccttagacctcactcttccttctcaaacctcatccacctctctctccatcgacgaagaggaatcatctgaggccaagatccgacggctcataaccgagcatcccgtgatcatattcagcagatcttcttgttgcatgtgccacgtcatgaaaagactcttggcaacgatcggtgtcatccccaccgtcatcgagctcgatgatcacgaggtttcctctctccccttggctcttggagaagaatattccggcggtggctccggcgttgttcctcctccggcggttttcattggccgtgagtgtgtaggaggtctcgagtccctcgtcgcgctccatctaagtggtcaccttgtccctaagcttgtccaagttggagctctttgggtatga

SEQ ID NO: 2852 - protein, 144 aa, Brassica napus
MMQELGLERFSNDVVSLDLTLPSQTSSTSLSIDEEESSEAKIRRLITEHPVIIFSRSSCCMCHVMKRLLATIGVIPTVIELDDHEVSSLPLALGEEYSGGGSGVVPPPAVFIGRECVGGLESLVALHLSGHLVPKLVQVGALWV

SEQ ID NO: 2853 - DNA, 309 bp, Brassica napus
  CDS (1)..(309)
atggacaaggtgatgagaatgtcatcagagaaaggagttgtgatcttcaccaaaaactcatgttgtctttgctacgccgtgcagatccttttccgtgaccttagggttcaaccaacaatccacgagatcgacaatgatcctgactgccgcgagatcgagaaggccttagtccgtcttggctgcaccaacgcagttcctgctgtttttgtaagtggtaagctggtgggttcgaccaacgaagtcatgtcgcttcacctaagtggctctctcgttcccttgatcaagccgtatcaggcattccataactag

SEQ ID NO: 2854 - protein, 102 aa, Brassica napus
MDKVMRMSSEKGVVIFTKNSCCLCYAVQILFRDLRVQPTIHEIDNDPDCREIEKALVRLGCTNAVPAVFVSGKLVGSTNEVMSLHLSGSLVPLIKPYQAFHN

SEQ ID NO: 2855 - DNA, 300 bp, Brassica napus
  CDS (1)..(300)
atggacaaagttgtgagaatgtcttcggaaaaaggagtggttatattcagcaagagctcgtgttgcatgtcctatgcggtccaagtcctcttccaagacctcggggttcacccgaccgtccatgagatagacaaggaccctgaatgccgggagatggagaaggcactaatgaggctaggctgttcaaaaccggttccagccgtcttcatcggtggcaagctcgttggttccaccaacgaagtcatgtccatgcacctaagcagctccttggttcccttagtcaagccatatctatgttaa

SEQ ID NO: 2856 - protein, 99 aa, Brassica napus
MDKVVRMSSEKGVVIFSKSSCCMSYAVQVLFQDLGVHPTVHEIDKDPECREMEKALMRLGCSKPVPAVFIGGKLVGSTNEVMSMHLSSSLVPLVKPYLC

SEQ ID NO: 2857 - DNA, 363 bp, Brassica napus
  CDS (1)..(363)
atgggttctatgttcagtggaaatcgattgaacaaggaagagatggaggttgtcgtgaacaaagccaaagagatcgtctccgctcaccctgtcgttgtcttcagcaagacttactgtggttattgccagagggtgaaacagttgttgacacagctaggtgcaacttttaaagtacttgagctcgatgagatgagtgatggaggtgagatccaatcagctttatctgagtggactggacagagcactgttcctaatgttttcatcaaaggcaaacatatcggtggatgcgatagagtgatggagagtaacaagcaaggcaagcttgtgcctctacttactgaagctggtgctatctccaattaa

SEQ ID NO: 2858 - protein, 120 aa, Brassica napus
MGSMFSGNRLNKEEMEVVVNKAKEIVSAHPVVVFSKTYCGYCQRVKQLLTQLGATFKVLELDEMSDGGEIQSALSEWTGQSTVPNVFIKGKHIGGCDRVMESNKQGKLVPLLTEAGAISN

SEQ ID NO: 2859 - DNA, 336 bp, Brassica napus
  CDS (1)..(336)
atggcgatgcagaaggctaaagagatcgtttccggcaacgccgtcgttgttttcagcaagtcgttttgcccatactgtgtgagagtgaaggagcttttgcaacaattgggagctaaattcatcgccgttgagctcgacaaagagagtgatggtagccaagttcaatcagctctggcagaatggacaggacaacgcaccgttcccaatgtgttcataggtgaaaaacacatcggtggctgcgattctgtaacaaacctgcacagagacggcaagttggttcctatgttgactgaagctggagctattgctgcaacagctggaactacttctgcttaa

SEQ ID NO: 2860 - protein, 111 aa, Brassica napus
MAMQKAKEIVSGNAVVVFSKSFCPYCVRVKELLQQLGAKFIAVELDKESDGSQVQSALAEWTGQRTVPNVFIGEKHIGGCDSVTNLHRDGKLVPMLTEAGAIAATAGTTSA

SEQ ID NO: 2861 - DNA, 309 bp, Brassica napus
  CDS (1)..(309)
atggacaaggtgatgagaatgtcatcagagaaaggagttgcgatcttcaccagaaactcgtgttgtctttgctacgccgtgcaggtccttttccgtgaccttagggttcagccaaaaatccacgagatcgacaatgatcctgactgccgcgagatcgagaaggccttagtccgtcttggctgcgccaacgcggttcctgctgtttttgttagtggtaagctggtgggttcgaccaacgatgttatgtcgcttcacctaagtggatctctcgttcccttgatcaagccatatcaggcgttccataactag

SEQ ID NO: 2862 - protein, 102 aa, Brassica napus
MDKVMRMSSEKGVAIFTRNSCCLCYAVQVLFRDLRVQPKIHEIDNDPDCREIEKALVRLGCANAVPAVFVSGKLVGSTNDVMSLHLSGSLVPLIKPYQAFHN

SEQ ID NO: 2863 - DNA, 522 bp, Brassica napus
  CDS (1)..(522)
atggcagtcacagctttcaacccactgaagcttgcatcttcgcctcgagattcgtttccttcaatctcctcttcaacttcttattcggtgtctctgataagcttcggtttcagaaactccgtcggatctcctctcaagaaatgttctctaaagcagacgtgttctgttcgagccatgtcttcttcgtcattcgaatcggggatggaggagagcgtgaagaaaacggtggctgataacacagtcgttgtttactcgaaaacttggtgcccatactgttctgaagtgaagacattgttcaagagacttggtgttcagccactggtggttgagttggatgaacttggtccacaagggacacaactacagaaggtactggaaacacttactgggcaacgcactgttcctagtgtgttcgtcggaggcaagcacattggtggctgcacagatacagtaaacctgaacaggaaaggagaacttgagctgatgttagctgaagccaacggtaaaaccgatcagacttga

SEQ ID NO: 2864 - protein, 173 aa, Brassica napus
MAVTAFNPLKLASSPRDSFPSISSSTSYSVSLISFGFRNSVGSPLKKCSLKQTCSVRAMSSSSFESGMEESVKKTVADNTVVVYSKTWCPYCSEVKTLFKRLGVQPLVVELDELGPQGTQLQKVLETLTGQRTVPSVFVGGKHIGGCTDTVNLNRKGELELMLAEANGKTDQT

SEQ ID NO: 2865 - DNA, 309 bp, Brassica napus
  CDS (1)..(309)
atggacaaggtgatgagaatgtcgtcagagagaggagtggtgatcttcacgaagagctcatgttgtctctgctacaccgttcagatcctgttccgtgaccttagggttcaaccaacggtccacgaaattgacaacgaccccgactgccgtgagatcgagaaggctctcctccggataggctgctccacggcggtaccagctgtcttcgtaggtggcaagctcgttggttccaccaatgaagtcatgtcccttcaccttagtggctctctcgtccccttgatcaaaccttatcagtctctcctttactag

SEQ ID NO: 2866 - protein, 102 aa, Brassica napus
MDKVMRMSSERGVVIFTKSSCCLCYTVQILFRDLRVQPTVHEIDNDPDCREIEKALLRIGCSTAVPAVFVGGKLVGSTNEVMSLHLSGSLVPLIKPYQSLLY

SEQ ID NO: 2867 - DNA, 300 bp, Brassica napus
  CDS (1)..(300)
atggacaaggttctgagaatgtcatccgaaaaaggagtggttatattcagcaagagctcgtgttgtttgtcctacgcggttcaagtcctcttccaagatctcggggttagccctaagatccacgagatcgacaaggaccccgaatgccgggagatggagaaggcattgatgaggctaggctgttcaaagccggttccagccgtcttcatcggtggcaagctcgttggttccacaaacgaagtcatgtccatgcacctaagcagctccttggttcccttagtcaagccatatctatgttaa

SEQ ID NO: 2868 - protein, 99 aa, Brassica napus
MDKVLRMSSEKGVVIFSKSSCCLSYAVQVLFQDLGVSPKIHEIDKDPECREMEKALMRLGCSKPVPAVFIGGKLVGSTNEVMSMHLSSSLVPLVKPYLC

SEQ ID NO: 2869 - DNA, 309 bp, Brassica napus
  CDS (1)..(309)
atggaaaacattagaagtttagttgctgacaaaccagtggtgattttcaccaaaagcacttgctgcatgagccattcaattcaaacgctgatctcaggatttggggcaaagatgacagtgtacgagcttgaccagctgtcaaacggtcaggaaatggagaaagcattgaaacagatggggtgtaagccgagtgtaccagctgtgttcataggggaacagttaatcggtggggctaaccaggtaatgactctccaagtcaagaaccaactagccgcattgctaaaaagagctggagccatatggggttaa

SEQ ID NO: 2870 - protein, 102 aa, Brassica napus
MENIRSLVADKPVVIFTKSTCCMSHSIQTLISGFGAKMTVYELDQLSNGQEMEKALKQMGCKPSVPAVFIGEQLIGGANQVMTLQVKNQLAALLKRAGAIWG

SEQ ID NO: 2871 - DNA, 309 bp, Brassica napus
  CDS (1)..(309)
atggacaaggtgatgagaatgtcatcagagaaaggagttgtgatcttcaccaaagactcatgttgtctttgctacgccgtgcagatccttttccgtgaccttagggttcaaccaaccatccacgagatcgacaatgatcctgactgccgtgagatagagaaggccttagtccgtcttggctgcaccaacgctgttcctgctgtttttgtcagtggcaagctggtgggttcgaccaacgaagtcatgtcgcttcacctaagtggctcccttgttccattgatcaagccgtatcagtcatttcataactag

SEQ ID NO: 2872 - protein, 102 aa, Brassica napus
MDKVMRMSSEKGVVIFTKDSCCLCYAVQILFRDLRVQPTIHEIDNDPDCREIEKALVRLGCTNAVPAVFVSGKLVGSTNEVMSLHLSGSLVPLIKPYQSFHN

SEQ ID NO: 2873 - DNA, 309 bp, Brassica napus
  CDS (1)..(309)
atggagatgataacgaagatggtgttggagagaccagtggtcatttacagcaaaagcttatgttgtatgtcccacacggtcaagactttgctctgcgacttcggtgcgaatccagcggttcacgagcttgatgaggtacctagaggcagggagattgagcaggcgttgttgcggcttgggtgtagcccggcggttccagccatttttattggaggagagttggttggtggagctaacgaagtcatgagtcttcaccttaacggctcattgatccctatgcttaagcaggctggcgcattgtgggtctga

SEQ ID NO: 2874 - protein, 102 aa, Brassica napus
MEMITKMVLERPVVIYSKSLCCMSHTVKTLLCDFGANPAVHELDEVPRGREIEQALLRLGCSPAVPAIFIGGELVGGANEVMSLHLNGSLIPMLKQAGALWV

SEQ ID NO: 2875 - DNA, 312 bp, Brassica napus
  CDS (1)..(312)
atggagagaataagagatttgtcgtcgaagaaagcagcagtgatattcacaaagagctcatgttggatgtgccatagcatcaagacattattctacgaactaggggctagtcctgcgatccacgagctagataaggaccccgaaggccgtgaaatggagcgtgccctacgtgcgcttggctcatcaaacccggcggttccagctgtttttgtcggaggaaggtacatcggatcatccaaagacatcatctcgttccacgtggacgggtcgctcaaacagatgcttaaagacgctaaggccatatggctatag

SEQ ID NO: 2876 - protein, 103 aa, Brassica napus
MERIRDLSSKKAAVIFTKSSCWMCHSIKTLFYELGASPAIHELDKDPEGREMERALRALGSSNPAVPAVFVGGRYIGSSKDIISFHVDGSLKQMLKDAKAIWL

SEQ ID NO: 2877 - DNA, 426 bp, Brassica napus
  CDS (1)..(426)
atgatgcaagaattaagcttagaacgtttctccaacgacgtcgttcgcttagacctaactcctccttcccaagcctcacctatttctctctccatagacgaagaagaatcatcggagtctaagatccgacggctgatatcggagcatccagtgatcatcttcagcagatcttcttgttgcatgtcccacgtcatgaaaagactcctcactactatcggagtcgtccccaccgtcatcgagctcgatgatcacgaggtttcctctctccccatggctcttgaagaagaatttcccggcggcgttcttccgtctccggcggttttcattggccgtgagtgtgtcggtggtattgagtccctcgtcgcgctccatctaagtggtcaccttgtccctaagcttgtcgaagttggagctctttgggtatga

SEQ ID NO: 2878 - protein, 141 aa, Brassica napus
MMQELSLERFSNDVVRLDLTPPSQASPISLSIDEEESSESKIRRLISEHPVIIFSRSSCCMSHVMKRLLTTIGVVPTVIELDDHEVSSLPMALEEEFPGGVLPSPAVFIGRECVGGIESLVALHLSGHLVPKLVEVGALWV

SEQ ID NO: 2879 - DNA, 309 bp, Brassica napus
  CDS (1)..(309)
atggacaaggctatgagaatgtcatcagggaaaggagttgtgatcttcagcaaaaactcatgttgtctgtgctacgccgtgcagatactttttcgtgaccttagggttcaaccaacaatccacgagattgacaccgatcctgactgcctcgagatcgagaaggccttagtccgtcttggctgccccaacgcagttcctgctgtttttgtaagtggtaagctggtgggttctaccaatgaagtcatgtcgcttcacctaagtggctctctcattcccttgatcaagccgtatcagttatttcataactag

SEQ ID NO: 2880 - protein, 102 aa, Brassica napus
MDKAMRMSSGKGVVIFSKNSCCLCYAVQILFRDLRVQPTIHEIDTDPDCLEIEKALVRLGCPNAVPAVFVSGKLVGSTNEVMSLHLSGSLIPLIKPYQLFHN

SEQ ID NO: 2881 - DNA, 333 bp, Glycine max
  CDS (1)..(333)
atgaaaatggtgctcaacatggtttctgagaacgccgttatagtgattgcgagaagagggtgttgcatgagccacgtggtgaagcgtttgcttcttggtcttggtgttaaccctgcggtttatgaggtagaggagaaagatgaagagggtgttgccacgcaactggaagcaacaattcgtagtgatgatgggaacacacaacaggggaaggtgcagtttcctacggtttttatagggggtaagttgtttggaggattggataggatcatggctactcatatctctggggaattggttcctatcctcaaaaaagctggggctttatggctatga

SEQ ID NO: 2882 - protein, 110 aa, Glycine max
MKMVLNMVSENAVIVIARRGCCMSHVVKRLLLGLGVNPAVYEVEEKDEEGVATQLEATIRSDDGNTQQGKVQFPTVFIGGKLFGGLDRIMATHISGELVPILKKAGALWL

SEQ ID NO: 2883 - DNA, 324 bp, Glycine max
  CDS (1)..(324)
atggctctgcccaaagctaaggagatcgtgtcgtccaattccgtcgtcgttttcagcaaaacctattgccctttctgcgtcgatgtgaagaagctcttcggtgacctcggtgccaattacaaggccatcgaactcgacactgaatccgatggaaaagagctccaagcagcattagttgagtggacggaccagcgaaccgtgcctaatgtgtttattggtggaaaccacattggtggctgtgactcaacaactgccctgcacactcaggggaagctggttcctctgctgatatctgctggagctgttgccaaatcaactgcttaa

SEQ ID NO: 2884 - protein, 107 aa, Glycine max
MALPKAKEIVSSNSVVVFSKTYCPFCVDVKKLFGDLGANYKAIELDTESDGKELQAALVEWTDQRTVPNVFIGGNHIGGCDSTTALHTQGKLVPLLISAGAVAKSTA

SEQ ID NO: 2885 - DNA, 501 bp, Glycine max
  CDS (1)..(501)
atggcattggcattgggtaacgctattcctctctcaaacttgaaaccttgtccaaagttatcttgttgttgtatgaagaaactctttttcactcactcagtccccatttctcgcatcccaacaacgccaaagcgtactcccaccaccgtagttcgagccacttcctctttcgggtctcgcctcgaagacaccatcaagaagactgtagccgagaacccagtggtgctttattccaaaacatggtgctcctattcttctgaggtcaaaatcttgttcaaaaagctcggcgtcgacccattggtcttcgaattagacgaaatgggtcctcaaggcccacagttgcacaaggtattggaaaggatcacagggcaacacactgtgccaaatgtatttattggcggcaagcacattggcggctgtacagatacactgaagctgtatcggaaaggagaacttgaacctttgctatcaaaagctaatgctaaaaaaacagggagctaa

SEQ ID NO: 2886 - protein, 166 aa, Glycine max
MALALGNAIPLSNLKPCPKLSCCCMKKLFFTHSVPISRIPTTPKRTPTTVVRATSSFGSRLEDTIKKTVAENPVVLYSKTWCSYSSEVKILFKKLGVDPLVFELDEMGPQGPQLHKVLERITGQHTVPNVFIGGKHIGGCTDTLKLYRKGELEPLLSKANAKKTGS

SEQ ID NO: 2887 - DNA, 399 bp, Glycine max
  CDS (1)..(399)
atgcattaccaagcagcggcggcggcgtggtgggggagctacgtggcggcccctcggaacgcggcggcggtggtggtgggggacccactggagcggatagagaggctggcgtcggagagcgcggtggtgatattcagcgtgagcacgtgctgcatgtgccacgccatcaagaggctcttctgcggcatgggtgtgaacccaaccgtgcacgagctggacgaggatccaagaggcaaggacctcgaacgcgccctcatgcggctccttggaaccccctcggttgtccctgtcgtcttcatcggtggcaagcttgtcggaaccatggaccgggtcatggcatgccacatcaacggcacccttgttcctctcctcaaagaagccggtgctctctggctctga

SEQ ID NO: 2888 - protein, 132 aa, Glycine max
MHYQAAAAAWWGSYVAAPRNAAAVVVGDPLERIERLASESAVVIFSVSTCCMCHAIKRLFCGMGVNPTVHELDEDPRGKDLERALMRLLGTPSVVPVVFIGGKLVGTMDRVMACHINGTLVPLLKEAGALWL

SEQ ID NO: 2889 - DNA, 309 bp, Glycine max
  CDS (1)..(309)
atggagagggtgacaaagatggtatcagagaggccagtggtgatattcagcaagagctcgtgctgcatgagccacaccataaagaccctcttgtgtgactttggggtgaatccagcggttcatgagctggatgagatcccaagaggcagagacattgagcaagctctttcaaggcttggttgttctccatctgttcctgctgtcttcatttctggtgagcttgttggtggagccaatgaagtcatgagccttcaccttaatcgctccttaattccaatgcttaagaaagcaggagccctttgggtttaa

SEQ ID NO: 2890 - protein, 102 aa, Glycine max
MERVTKMVSERPVVIFSKSSCCMSHTIKTLLCDFGVNPAVHELDEIPRGRDIEQALSRLGCSPSVPAVFISGELVGGANEVMSLHLNRSLIPMLKKAGALWV

SEQ ID NO: 2891 - DNA, 525 bp, Glycine max
  CDS (1)..(525)
atgcatcaagcaattccctatagatcatggcgccatctccataaccccaccacccacttcaccccactcccattaattactcattcccacaacgatgatgataagaagaccaagaatattattgttaacaacaataatactattaatattcattcttcttcagttcttgtttcaccaaaagagaaggaggggatgaaaatggtgctcaacatggtttctgagaacgccgttatagtgattgcgagaagagggtgttgcatgagccacgtggtgaagcgtttgcttcttggtcttggtgttaaccctgcggtttatgaggtagaggagaaagatgaagagggtgttgccacgcaactggaagcaacaattcgtagtgatgatgggaacacacaacaggggaaggtgcagtttcctacggtttttatagggggtaagttgtttggaggattggataggatcatggctactcatatctctggggaattggttcctatcctcaaaaaagctggggctttatggctatga

SEQ ID NO: 2892 - protein, 174 aa, Glycine max
MHQAIPYRSWRHLHNPTTHFTPLPLITHSHNDDDKKTKNIIVNNNNTINIHSSSVLVSPKEKEGMKMVLNMVSENAVIVIARRGCCMSHVVKRLLLGLGVNPAVYEVEEKDEEGVATQLEATIRSDDGNTQQGKVQFPTVFIGGKLFGGLDRIMATHISGELVPILKKAGALWL

SEQ ID NO: 2893 - DNA, 483 bp, Glycine max
  CDS (1)..(483)
atgcatcaagcaattccctatagatcatggcgccctctccataaccccaccacccacttctccccattgccattaattgcacattcccacaacgatgatgataaaatgaggaacattgttaacaataataataataatattcattcttcagcagggagaatggtgctcaacatggtttctgagaacgcggttatagtgattgggagaagaggctgttgcatgagccatgtggtaaagcacttgcttcttggtcttggtgttaaccctgcggtttatgaggtggaggagaaagatgaagagggtgttgccaagcagttggaagaaacagttcgtagtgatgggaacacacaacaggggaaggtgcagtttcctgcggtttttataggggggaagttgtttggaggattggataggatcatggctactcatatctatggtgagttggttcctatcctcaaaaaagctggggctttatggctatga

SEQ ID NO: 2894 - protein, 160 aa, Glycine max
MHQAIPYRSWRPLHNPTTHFSPLPLIAHSHNDDDKMRNIVNNNNNNIHSSAGRMVLNMVSENAVIVIGRRGCCMSHVVKHLLLGLGVNPAVYEVEEKDEEGVAKQLEETVRSDGNTQQGKVQFPAVFIGGKLFGGLDRIMATHIYGELVPILKKAGALWL

SEQ ID NO: 2895 - DNA, 522 bp, Glycine max
  CDS (1)..(522)
atgcaacaagcaattccttataggtcatggcaacctctcatcacacccaccaacgccaacaccactcacttcacaattagcccacacacattagtaaccttttccacagtgtctacaacagaattatctctaaaagacgatattggttcggaaccgaataacaacatccataatagtgataatcctttctttgtttcctccaaaatggtgcccaacatggtcttagagagcgcgattatagtcttcgctaggcgtggttgttgcatgagccatgttgtgaagcgattgctgctgggtcttggggtgaaccctgcggtgcacgaggtggaggagagtgatgaagtgggtgttgttagagaattggaagcaattgtgggtgccaataatggagggaataagatgcaatttccagcagtttttattggtggcaaattgtttgggggattggataaggtaatggctactcatatttcaggggaattggttccaattctcaaagaagcaggagctctatggctttga

SEQ ID NO: 2896 - protein, 173 aa, Glycine max
MQQAIPYRSWQPLITPTNANTTHFTISPHTLVTFSTVSTTELSLKDDIGSEPNNNIHNSDNPFFVSSKMVPNMVLESAIIVFARRGCCMSHVVKRLLLGLGVNPAVHEVEESDEVGVVRELEAIVGANNGGNKMQFPAVFIGGKLFGGLDKVMATHISGELVPILKEAGALWL

SEQ ID NO: 2897 - DNA, 411 bp, Glycine max
  CDS (1)..(411)
atgcaaggcatagggatagggtgctgctcaaacgacgtcgtagggcagctggagctaagtcccactatgagcaactcctcttcctcgctatcgatggagctggacgagtcccccgagagccgaatccaacggctgatatcggagcaccccgtcatcatcttcacccgatcctcctgctgcatgtgccacgtcatgaagaagctcctcgccaccatcggcgtccaccccaccgtcatcgaattggacgaccacgagatcgcctccctccccctccccgacaccaccgcccccgccgccttcatcggcggcacctgcatcggcggcctcgaatccctcgtcgccctccacgtcagcggccacctcatccccaaactcgtccaagtcggcgctctctggaatttaggtgagtga

SEQ ID NO: 2898 - protein, 136 aa, Glycine max
MQGIGIGCCSNDVVGQLELSPTMSNSSSSLSMELDESPESRIQRLISEHPVIIFTRSSCCMCHVMKKLLATIGVHPTVIELDDHEIASLPLPDTTAPAAFIGGTCIGGLESLVALHVSGHLIPKLVQVGALWNLGE

SEQ ID NO: 2899 - DNA, 309 bp, Glycine max
  CDS (1)..(309)
atggatagagttaaggacttggcatcaaagaaggctgctgttatatttaccaagagttcatgttgcatgtgtcacagcataaagcaactgttctatgagcttggagcaagcccagcagtgcatgagctagacaaggatgcatatgggagggaaatggagtgggctttgaggagcatggggtgcaacccttcagtgccagcagtgttcattggtggaaaatttgtaggctcttcaaaggatgtcatatccctccatgttgatggctctctcaaacaaatgctcatggatgcaaaagccatatggttctag

SEQ ID NO: 2900 - protein, 102 aa, Glycine max
MDRVKDLASKKAAVIFTKSSCCMCHSIKQLFYELGASPAVHELDKDAYGREMEWALRSMGCNPSVPAVFIGGKFVGSSKDVISLHVDGSLKQMLMDAKAIWF

SEQ ID NO: 2901 - DNA, 423 bp, Glycine max
  CDS (1)..(423)
atgaacagtactgaggaggggatgcaaggcataggcataggcataggctgcttccaaaacgacgtcgtagggcagctggagctgagtcccactatgagcaactcctcctcctcgctatccatggagctggacgagtccccggagagcagaatccaacggttgatatcggagcacccggtcatcatcttcacccgatcctcctgctgcatgtgccacgtcatgaagaagctcctcgccaccatcggcgtccaccccaccgtcatcgaattggacgaccaggagatcgccgccctccccgacaccagcgccccctcggcctttataggcggcacctgcatcggcggcctcgaatccctggtcggcctccacgtcaccggccacctgatccccaaactggtccaagtcggcgctctctgggtatga

SEQ ID NO: 2902 - protein, 140 aa, Glycine max
MNSTEEGMQGIGIGIGCFQNDVVGQLELSPTMSNSSSSLSMELDESPESRIQRLISEHPVIIFTRSSCCMCHVMKKLLATIGVHPTVIELDDQEIAALPDTSAPSAFIGGTCIGGLESLVGLHVTGHLIPKLVQVGALWV

SEQ ID NO: 2903 - DNA, 306 bp, Glycine max
  CDS (1)..(306)
atggacaaggtgacgaggttggcttctgaaaagggtgtggtgattttcacaaagagctcttgttgcctctgctatgcagtcaacattctgtttcaagaacttggtgtgaatcctgtggttcatgagattgatcatgaccctgaaggcagagaaatggagaaagctctattgaggcaaggctgcactgctccagttccagctgtattcataggagggaagctaatgggatccaccaatgaaatcatgtccctccacctaagtggttcactcactcagatgctgaaaccttaccaggctttgtcttga

SEQ ID NO: 2904 - protein, 101 aa, Glycine max
MDKVTRLASEKGVVIFTKSSCCLCYAVNILFQELGVNPVVHEIDHDPEGREMEKALLRQGCTAPVPAVFIGGKLMGSTNEIMSLHLSGSLTQMLKPYQALS

SEQ ID NO: 2905 - DNA, 309 bp, Glycine max
  CDS (1)..(309)
atggatagggtgacacagatggcatcagagagaccagtggtgatattcagccggagttcatgctgcatgtgccacaccatcaaaaccctcttcagtgactttggagtgcatccaaatgttcatgaacttgatgagataccaagagggaaggacattgagcaagctctttcaaggctagggtgcagcccctctgtgcctgctgtgttcattggcggtgagcttgttggtggagccaatgaagtcatgagccttcaccttaaccgctccttgatccctatgcttaggagagcaggagctctttgggtttaa

SEQ ID NO: 2906 - protein, 102 aa, Glycine max
MDRVTQMASERPVVIFSRSSCCMCHTIKTLFSDFGVHPNVHELDEIPRGKDIEQALSRLGCSPSVPAVFIGGELVGGANEVMSLHLNRSLIPMLRRAGALWV

SEQ ID NO: 2907 - DNA, 318 bp, Glycine max
  CDS (1)..(318)
atggatgtggtaacatcattgactgctgataagccagtggtgatcttcagcaagagcacatgtttcatgagccacaccgtgaaggctctcatatgcagctttggtgccagcccttcggttattgagcttgacaaaatgcaaagtggtcaccaagtagagagagcacttattcaactaggttgcaaaccaagtgtgcctgcagtgttcataggacaacaattcataggtggtgctgatgaagtcatcaaactcaacgttcaaaacaagcttgcccaattgcttcttggtgctaaagctatatttatctggagtaggtag

SEQ ID NO: 2908 - protein, 105 aa, Glycine max
MDVVTSLTADKPVVIFSKSTCFMSHTVKALICSFGASPSVIELDKMQSGHQVERALIQLGCKPSVPAVFIGQQFIGGADEVIKLNVQNKLAQLLLGAKAIFIWSR

SEQ ID NO: 2909 - DNA, 402 bp, Glycine max
  CDS (1)..(402)
atgcaccaagccatttcccacagaagcttcatccccataggagcacgtggcatgccacacgcaggaggaatcaaagaatccaatggcacctatccatccaaagctgccacaatggtatcggagaacgcggtggtaatcattggaaaacggggatgctgcatgtgccacgtggtaaaaaggttgttacaaggtctgggagtgaaccctcccgtgtacgaggtggacgaggaccacgaagccgccgttgctctccacctgtccccgcagggcgccgaaacggtgcagtttccggcggtgttcctggccggcaagttgttcggagggttggaaagagttatggccactcatatctcaggtgaattggttcccatcttgaaggatgctggtgccttgtggctctga

SEQ ID NO: 2910 - protein, 133 aa, Glycine max
MHQAISHRSFIPIGARGMPHAGGIKESNGTYPSKAATMVSENAVVIIGKRGCCMCHVVKRLLQGLGVNPPVYEVDEDHEAAVALHLSPQGAETVQFPAVFLAGKLFGGLERVMATHISGELVPILKDAGALWL

SEQ ID NO: 2911 - DNA, 309 bp, Glycine max
  CDS (1)..(309)
atggagagggtgacaaagatggtatcagagaggccagtggtgatattcagcaagagctcgtgctgcatgagccacaccatcaagaccctcttgtgtgactttggggtgaatccagcggttcatgagctcgatgagatcccaagaggcagagacattgagcaagctctttccaggctaggttgttctccatctgttcctgctgtcttcatttctggtgagcttattggtggagccaatgaagtcatgagccttcaccttaatcgctccttaattccaatgcttaagaaagcaggagccctttgggtttaa

SEQ ID NO: 2912 - protein, 102 aa, Glycine max
MERVTKMVSERPVVIFSKSSCCMSHTIKTLLCDFGVNPAVHELDEIPRGRDIEQALSRLGCSPSVPAVFISGELIGGANEVMSLHLNRSLIPMLKKAGALWV

SEQ ID NO: 2913 - DNA, 402 bp, Glycine max
  CDS (1)..(402)
atgcaccaagccattccctaccgaacctccatcctgaccggaacatgtgacatggcacacgccggaggaatcaaagaattcaacctcgccaatccatccaacgttgccgcaatggtttcggagagcgcagtggtaatcattgggaaacgggggtgctgcatgtgccacgtggtcaaaaggttgttgcaaggtctgggagtgaaccctcccgtgtacgaggtcgacgaggaccacgaagccgccgttgctcgccacctgttcccgcagggcgccgaaacggtgcagtttccggcggtgttcctcgccggcaagttgttcggagggttggaaagagttatggcaactcatatctcaggtgagttgattcccatcttgaaggatgctggtgctttgtggctctga

SEQ ID NO: 2914 - protein, 133 aa, Glycine max
MHQAIPYRTSILTGTCDMAHAGGIKEFNLANPSNVAAMVSESAVVIIGKRGCCMCHVVKRLLQGLGVNPPVYEVDEDHEAAVARHLFPQGAETVQFPAVFLAGKLFGGLERVMATHISGELIPILKDAGALWL

SEQ ID NO: 2915 - DNA, 480 bp, Zea mays
  CDS (1)..(480)
atgtaccaggccatcccctacagcagcgcccgggcgtggctgatgccggcggcggcggctgaggcgggcgtcgccgctgtgaagccggagccggtggcgaccgtcgcggagcctgcggcggaggaggagcgcgcccggccggacgccgcggccggggacgacgacgacggcggcagggcggaggtggggagggccgtggcggagaggccggtgctggtggtggggcggcgcgggtgctgcctgagccacgtggtgaagcggctgctgcaggggctcggggtgaacccggccgtgcacgaggtcgcggacgagtcggcgctcgcggggctcgtcccggccggcgccggcgccgccgccggcgcgctgcccgcggtgttcgtcgggggcaggctcctgggcgggctcgaccggctcatggccgtccacatctccggcgagctcgtgcccatcctcaagaaggcgggtgccctctggctctag

SEQ ID NO: 2916 - protein, 159 aa, Zea mays
MYQAIPYSSARAWLMPAAAAEAGVAAVKPEPVATVAEPAAEEERARPDAAAGDDDDGGRAEVGRAVAERPVLVVGRRGCCLSHVVKRLLQGLGVNPAVHEVADESALAGLVPAGAGAAAGALPAVFVGGRLLGGLDRLMAVHISGELVPILKKAGALWL

SEQ ID NO: 2917 - DNA, 393 bp, Zea mays
  CDS (1)..(393)
atgcagtacgcggcggcggagcaggcgtggtacatgccggcgaccacgacgatgatggcggagagcgcggtggcgcgcgtggagcggctggcgtcggagagcgcggtggtggtgttcagcgtgagcagctgctgcatgtgccacgccgtgaagcggctcttctgcggcatgggcgtgcacccgacggtgcacgagctggacctggacccgcgcggacgagagctggagcacgccctcgcccgcctcatcggctacggccccgccggcgcgcccgtcgtccccgtcgtcttcatcggcgggaagctggtcggcgccatggaccgggtcatggccgcgcatatcaacggctccctcgtcccacttctcaaggaggccggcgcgctctggctctga

SEQ ID NO: 2918 - protein, 130 aa, Zea mays
MQYAAAEQAWYMPATTTMMAESAVARVERLASESAVVVFSVSSCCMCHAVKRLFCGMGVHPTVHELDLDPRGRELEHALARLIGYGPAGAPVVPVVFIGGKLVGAMDRVMAAHINGSLVPLLKEAGALWL

SEQ ID NO: 2919 - DNA, 345 bp, Zea mays
  CDS (1)..(345)
atggcaatggaccacgtggcgaggctggcgtcggagcgcgcggtggtggtgttcacggcgagcaactgcagcatgggcgacgtggtgacgtcgctgctgagcagcctgggcgtcaacgcggcggtgcacgacctggacagggacccccggggcatggagatggagcgggagctggccaggaggctcggcggcggcggcgggggcggcggcacgacgacgacccccaccgtgccggcggtgttcgtgggcggtgacctcgtcggcgggaccaacagggtcatggctctgcacctctccggcgagctcgtgcccatgctcaggaaagccggcgccctctggttgtag

SEQ ID NO: 2920 - protein, 114 aa, Zea mays
MAMDHVARLASERAVVVFTASNCSMGDVVTSLLSSLGVNAAVHDLDRDPRGMEMERELARRLGGGGGGGGTTTTPTVPAVFVGGDLVGGTNRVMALHLSGELVPMLRKAGALWL

SEQ ID NO: 2921 - DNA, 312 bp, Zea mays
  CDS (1)..(312)
atggagcatgtggcaaggctggcatcgcagcgtgcagtggtgatcttcagcacgagctcctgctgcatgtgtcacactgtgacgcagctgttccgcgagctaggggtgaacacgatggtggtggagttggacaaggacccgcgggggaacgagatggagaaagggctggccaggctactgggccgcagtgccggcgtaccagcagtgttcatcggcggcaggctcgtcggctccacggacaaggtcatgtcgctccatctcagcggcaacctcgtccctctgctgcgcaatgccggggcactctgggtctaa

SEQ ID NO: 2922 - protein, 103 aa, Zea mays
MEHVARLASQRAVVIFSTSSCCMCHTVTQLFRELGVNTMVVELDKDPRGNEMEKGLARLLGRSAGVPAVFIGGRLVGSTDKVMSLHLSGNLVPLLRNAGALWV

SEQ ID NO: 2923 - DNA, 342 bp, Zea mays
  CDS (1)..(342)
atggcgctcgccaaggccaaggagatcgttgcctccgctcccctcgtcgtcttcagcaaaacttcctgccctttctgcgtccgtgtgaagcagttgttcgagaagctcggagcaagctacaaggccattgagttggataaggaaagtgatggagctgagctccagaatgccctgaaggagtggactggacagaggactgtcccaaatgtcttcatcaatgggaagcatattggcggctgtgatgatactatggcactgaacaatgatgggaagctggtgcctctgctgactgaggctggagccatcgccggttctgcctcgaagacaaccatcactgcttga

SEQ ID NO: 2924 - protein, 113 aa, Zea mays
MALAKAKEIVASAPLVVFSKTSCPFCVRVKQLFEKLGASYKAIELDKESDGAELQNALKEWTGQRTVPNVFINGKHIGGCDDTMALNNDGKLVPLLTEAGAIAGSASKTTITA

SEQ ID NO: 2925 - DNA, 537 bp, Zea mays
  CDS (1)..(537)
atgccgccgccgccgccgccgccacagcagcagcagcagcagtccggcatgactctctgccgcctccccacggccactcttggccttcccctttctctcccctgtttgctacctcgttcccgcccccgcctgtgcttcgccgcacgtcatgccagggccgtcgccgccagggcttcctcatcctctccatcaccggactcttcattcggttcgcggatggaggagtccgtcaagaagacggtggccgacaaccccgttgtcatctactccaagtcatggtgctcatattgcatggaggtgaaggcgctcttcaagcggatcggtgtgcagccccatgttatcgagcttgaccatctcggtgctcaaggaccacaaatacagaaggtattagagaggctgactggacagtctactgttcctaatgttttcatcggtggaaagcatgttggtggctgtacagatactgtgaagctgtatcgcaagggggagctagctagcatgctgtccggcctggatatcaacattaacaactcatga

SEQ ID NO: 2926 - protein, 178 aa, Zea mays
MPPPPPPPQQQQQQSGMTLCRLPTATLGLPLSLPCLLPRSRPRLCFAARHARAVAARASSSSPSPDSSFGSRMEESVKKTVADNPVVIYSKSWCSYCMEVKALFKRIGVQPHVIELDHLGAQGPQIQKVLERLTGQSTVPNVFIGGKHVGGCTDTVKLYRKGELASMLSGLDININNS

SEQ ID NO: 2927 - DNA, 399 bp, Zea mays
  CDS (1)..(399)
atggctctcgagaaggccaaggagatcatcgcgtcctccccggtcgacctagctctccgaaaggccaaggagaccgtcgcctcccaccccgtcgtcgtcttcagcaaaacttactgtcctttctgcacccgagtgaaacaattgctagcaaagttgggggcaagttacaaggctattgagttggatgtggaaagtgatggcgctgagctgcagtcagctctcgctgaatggactggccagagaactgttcccaatgtcttcgtgaaaggggagcggattggtggctgtgacgcaaccatggcgatgcacgacggtgggaagctggtgcctctgctcaccgaggctggagcaattgtcactgccagggctactgcaactactaccactccgtctttgtag

SEQ ID NO: 2928 - protein, 132 aa, Zea mays
MALEKAKEIIASSPVDLALRKAKETVASHPVVVFSKTYCPFCTRVKQLLAKLGASYKAIELDVESDGAELQSALAEWTGQRTVPNVFVKGERIGGCDATMAMHDGGKLVPLLTEAGAIVTARATATTTTPSL

SEQ ID NO: 2929 - DNA, 315 bp, Zea mays
  CDS (1)..(315)
atggaccgtgtgatgcagctggtgtcggagcgtgcggtggttgtgttcacgctgagcagctgctgcatgtgccacacggtgacgcagctgatggcggacctgagcgtgaacgcgatggtgcacgagctggacagcgaccccaggggcaaggacatggagcgcgcgctgctcaagatgctgggagggagggcgcccgccgtccccgccgtcttcatcggcggcaagctcgtcggcggcaccaacaatgtcatgtcgctccacctcggcggagagctcgtgcccatgctcatgaacgctggcgccctctgggtctag

SEQ ID NO: 2930 - protein, 104 aa, Zea mays
MDRVMQLVSERAVVVFTLSSCCMCHTVTQLMADLSVNAMVHELDSDPRGKDMERALLKMLGGRAPAVPAVFIGGKLVGGTNNVMSLHLGGELVPMLMNAGALWV

SEQ ID NO: 2931 - DNA, 22 bp, Artificial sequence
  primer
atggaaagcgttagaagtttag

SEQ ID NO: 2932 - DNA, 20 bp, Artificial sequence
  primer
ttacacccatatggctccgg

SEQ ID NO: 2933 - protein, 101 aa, Artificial sequence
  consensus sequence
  Variant (2)..(3): Xaa in position 2 to 3 is any amino acid
  Variant (5)..(8): Xaa in position 5 to 8 is any amino acid
  Variant (9)..(9): Xaa in position 9 is any or no amino acid
  Variant (11)..(18): Xaa in position 11 to 18 is any amino acid
  Variant (20)..(30): Xaa in position 20 to 30 is any amino acid
  Variant (31)..(33): Xaa in position 31 to 33 is any or no amino acid
  Variant (35)..(35): Xaa in position 35 is any amino acid
  Variant (37)..(44): Xaa in position 37 to 44 is any amino acid
  Variant (45)..(48): Xaa in position 45 to 48 is any or no amino acid
  Variant (50)..(52): Xaa in position 50 to 52 is any amino acid
  Variant (53)..(69): Xaa in position 53 to 69 is any or no amino acid
  Variant (72)..(72): Xaa in position 72 is any amino acid
  Variant (75)..(76): Xaa in position 75 to 76 is any amino acid
  Variant (78)..(80): Xaa in position 78 to 80 is any amino acid
  Variant (81)..(82): Xaa in position 81 to 82 is any or no amino acid
  Variant (84)..(93): Xaa in position 84 to 93 is any amino acid
  Variant (94)..(94): Xaa in position 94 is any or no amino acid
  Variant (96)..(96): Xaa in position 96 is any amino acid
  Variant (98)..(100): Xaa in position 98 to 100 is any amino acid
VXXFXXXXXCXXXXXXXXLXXXXXXXXXXXXXXEXDXXXXXXXXXXXXLXXXXXXXXXXXXXXXXXXXXVPXVFXXGXXXXXGXXXXXXXXXXXGXLXXXL

SEQ ID NO: 2934 - protein, 30 aa, Artificial sequence
  protein pattern
  Variant (2)..(2): Xaa in position 2 is any amino acid
  Variant (5)..(5): Xaa in position 5 is any amino acid
  Variant (6)..(6): Xaa in position 6 is any or no amino acid
  Variant (8)..(10): Xaa in position 8 to 10 is any amino acid
  Variant (11)..(11): Xaa in position 11 is any or no amino acid
  Variant (13)..(13): Xaa in position 13 is Ala, Gly, Ser or Thr
  Variant (14)..(25): Xaa in position 14 to 25 is any amino acid
  Variant (27)..(29): Xaa in position 27 to 29 is any amino acid
  Variant (30)..(30): Xaa in position 30 is Ile, Leu or Val
PXVFXXGXXXXGXXXXXXXXXXXXXLXXXX

SEQ ID NO: 2935 - DNA, 312 bp, Arabidopsis thaliana; identical to SEQ ID NO: 2707
  CDS (1)..(312)

SEQ ID NO: 2936 - protein, 103 aa, Arabidopsis thaliana; identical to SEQ ID NO: 2708

SEQ ID NO: 2937 - DNA, 603 bp, Glycine max
  CDS (114)..(419)
taaattttctattccccaaatctcctccttagactgccaacccaatatagccattggatcgaattcagtctgaattcggtctaatggtttgggagttctaattaagtctaaggatggacaaggtgacgaggttggcttctgaaaagggtgtggtgattttcacaaagagctcttgttgcctctgctatgcagtcaacattctgtttcaagaacttggtgtgaatcctgtggttcatgagattgatcatgaccctgaaggcagagaaatggagaaagctctattgaggcaaggctgcactgctccagttccagctgtattcataggagggaagctaatgggatccaccaatgaaatcatgtccctccacctaagtggttcactcactcagatgctgaaaccttaccaggctttgtcttgaaaagaagcacaagaaacagttcctgacacctgctggaagaataagctggcttgaattagtagagtagtgaccatagtattgatattctagtgtttttatgtctgaaattgctcctagcatttaattagctataatgtaatcacataaatattcttaatgaaagtttgatttatatacttgtact

SEQ ID NO: 2938 - protein, 101 aa, Glycine max; identical to SEQ ID NO: 2904

SEQ ID NO: 2939 - DNA, 306 bp, Glycine max; identical to SEQ ID NO: 2811
  CDS (1)..(306)

SEQ ID NO: 2940 - protein, 101 aa, Glycine max; identical to SEQ ID NO: 2812

SEQ ID NO: 2941 - DNA, 511 bp, Glycine max; identical to SEQ ID NO: 2575
  CDS (108)..(416)

SEQ ID NO: 2942 - protein, 102 aa, Glycine max; identical to SEQ ID NO: 2576

SEQ ID NO: 2943 - DNA, 309 bp, Glycine max; identical to SEQ ID NO: 2577
  CDS (1)..(309)

SEQ ID NO: 2944 - protein, 102 aa, Glycine max; identical to SEQ ID NO: 2578

SEQ ID NO: 2945 - DNA, 309 bp, Glycine max
  CDS (1)..(309)
atggagagggtgacaaagatggtatcagagaggccagtggtgatattcagcaagagctcgtgctgcatgagccacaccataaagaccctcttgtgtgactttggggtgaatccagcggttcatgagctggatgagatcccaagaggcagagacattgagcaagctctttcaaggcttggttgttctccatctgttcctgctgtcttcatttctggtgagcttgttggtggagccaatgaagtcatgagccttcaccttaatcgctccttaattccaatgctgaagaaagcaggagccctttgggtttaa

SEQ ID NO: 2946 - protein, 102 aa, Glycine max; identical to SEQ ID NO: 2890

SEQ ID NO: 2947 - DNA, 309 bp, Glycine max; identical to SEQ ID NO: 2579
  CDS (1)..(309)

SEQ ID NO: 2948 - protein, 102 aa, Glycine max; identical to SEQ ID NO: 2580

SEQ ID NO: 2949 - DNA, 312 bp, Sorghum bicolor; identical to SEQ ID NO: 2581
  CDS (1)..(312)

SEQ ID NO: 2950 - protein, 103 aa, Sorghum bicolor; identical to SEQ ID NO: 2582

SEQ ID NO: 2951 - DNA, 315 bp, Zea mays; identical to SEQ ID NO: 2583
  CDS (1)..(315)

SEQ ID NO: 2952 - protein, 104 aa, Zea mays; identical to SEQ ID NO: 2584

SEQ ID NO: 2953 - DNA, 315 bp, Zea mays; identical to SEQ ID NO: 2587
  CDS (1)..(315)

SEQ ID NO: 2954 - protein, 104 aa, Zea mays; identical to SEQ ID NO: 2588

SEQ ID NO: 2955 - DNA, 255 bp, Xanthobacter autotrophicus Py2
  CDS (1)..(255): transl_table=11
atgaaacccatcgagatctataccaagagctggtgcccctattgccattccgccaaggaattgctgcgccgcaaaggcttgaccttcaccgagatcgacgtgaccaccgacaaggacggtcaggaagaaatgacgcgccgcgccggcgggcgcaccagcgtgcctcagatcttcattggcgagacccatgtgggcggctgcgacgacctctacgcccttgaggacgccggccgactggaccagctggccgcctga

SEQ ID NO: 2956 - protein, 84 aa, Xanthobacter autotrophicus Py2
MKPIEIYTKSWCPYCHSAKELLRRKGLTFTEIDVTTDKDGQEEMTRRAGGRTSVPQIFIGETHVGGCDDLYALEDAGRLDQLAA

SEQ ID NO: 2957 - DNA, 351 bp, Bombyx mori; identical to SEQ ID NO: 2591
  CDS (1)..(351)

SEQ ID NO: 2958 - protein, 116 aa, Bombyx mori; identical to SEQ ID NO: 2592

SEQ ID NO: 2959 - DNA, 405 bp, Oryza sativa (japonica cultivar-group); identical to SEQ ID NO: 2593
  CDS (1)..(405)

SEQ ID NO: 2960 - protein, 134 aa, Oryza sativa (japonica cultivar-group); identical to SEQ ID NO: 2594

SEQ ID NO: 2961 - DNA, 477 bp, Oryza sativa (japonica cultivar-group); identical to SEQ ID NO: 2595
  CDS (1)..(477)

SEQ ID NO: 2962 - protein, 158 aa, Oryza sativa (japonica cultivar-group); identical to SEQ ID NO: 2596

SEQ ID NO: 2963 - DNA, 309 bp, Arabidopsis thaliana; identical to SEQ ID NO: 2597
  CDS (1)..(309)

SEQ ID NO: 2964 - protein, 102 aa, Arabidopsis thaliana; identical to SEQ ID NO: 2598

SEQ ID NO: 2965 - DNA, 351 bp, Drosophila melanogaster; identical to SEQ ID NO: 2599
  CDS (1)..(351)

SEQ ID NO: 2966 - protein, 116 aa, Drosophila melanogaster; identical to SEQ ID NO: 2600

SEQ ID NO: 2967 - DNA, 345 bp, Drosophila melanogaster
  CDS (1)..(345)
atgggtgcagttggatccgctttgagatccccaatagtcgacatgtccaccaagcaggcgaaattcgttgaaaacaccattgccagcaacaaagtggtgatattcagcaagacctactgtccctactgcacgatggccaaagagcccttcaaaaagctcaatgtggacgccaccataatagaactcgatggaaatcccgatggcaacgaaattcaggcagttctgggcgagattaccggtgccagaacggttccccgcgtctttatcgatggcaaattcattggcggtggcactgacatcaaacgaatgttcgagacaggagctctgcaaaaatatttccaataa

SEQ ID NO: 2968 - protein, 114 aa, Drosophila melanogaster
MGAVGSALRSPIVDMSTKQAKFVENTIASNKVVIFSKTYCPYCTMAKEPFKKLNVDATIIELDGNPDGNEIQAVLGEITGARTVPRVFIDGKFIGGGTDIKRMFETGALQKYFQ

SEQ ID NO: 2969 - DNA, 297 bp, Apis mellifera; identical to SEQ ID NO: 2601
  CDS (1)..(297)

SEQ ID NO: 2970 - protein, 98 aa, Apis mellifera; identical to SEQ ID NO: 2602

SEQ ID NO: 2971 - DNA, 321 bp, Strongylocentrotus purpuratus; identical to SEQ ID NO: 2607
  CDS (1)..(321)

SEQ ID NO: 2972 - protein, 106 aa, Strongylocentrotus purpuratus; identical to SEQ ID NO: 2608

SEQ ID NO: 2973 - DNA, 297 bp, Nasonia vitripennis; identical to SEQ ID NO: 2609
  CDS (1)..(297)

SEQ ID NO: 2974 - protein, 98 aa, Nasonia vitripennis; identical to SEQ ID NO: 2610

SEQ ID NO: 2975 - DNA, 339 bp, Anopheles gambiae str. PEST; identical to SEQ ID NO: 2611
  CDS (1)..(339)

SEQ ID NO: 2976 - protein, 112 aa, Anopheles gambiae str. PEST; identical to SEQ ID NO: 2612

SEQ ID NO: 2977 - DNA, 309 bp, Magnaporthe grisea 70-15; identical to SEQ ID NO: 2613
  CDS (1)..(309)

SEQ ID NO: 2978 - protein, 102 aa, Magnaporthe grisea 70-15; identical to SEQ ID NO: 2614

SEQ ID NO: 2979 - DNA, 321 bp, Gibberella zeae PH-1; identical to SEQ ID NO: 2617
  CDS (1)..(321)

SEQ ID NO: 2980 - protein, 106 aa, Gibberella zeae PH-1; identical to SEQ ID NO: 2618

SEQ ID NO: 2981 - DNA, 636 bp, Kluyveromyces lactis NRRL Y-1140; identical to SEQ ID NO: 2619
  CDS (1)..(636)

SEQ ID NO: 2982 - protein, 211 aa, Kluyveromyces lactis NRRL Y-1140; identical to SEQ ID NO: 2620

SEQ ID NO: 2983 - DNA, 342 bp, Debaryomyces hansenii CBS767; identical to SEQ ID NO: 2621
  CDS (1)..(342)

SEQ ID NO: 2984 - protein, 113 aa, Debaryomyces hansenii CBS767; identical to SEQ ID NO: 2622

SEQ ID NO: 2985 - DNA, 336 bp, Debaryomyces hansenii CBS767
  CDS (1)..(336)
atgtctaaggaatatatcgaaagggcacaagagttggtcaataaccatccctatttaatgttatctaagtcatggtgtcctgattgtcattatacctacgaaatttggaaccaatacaatgttaaagaaaaaatttacatcatcgagttagataagtttgaagatcaaaacgaagcagaagaattagagaaagcttttacagaaatcgctggtagaaaatgggttccaacgatctttttccatggaaaaattctaggcactgaagaagatttgaaaaggtggacaaaggaaggtaaattgtccgagatctttaaagattctcatcttattaattaa

SEQ ID NO: 2986 - protein, 111 aa, Debaryomyces hansenii CBS767
MSKEYIERAQELVNNHPYLMLSKSWCPDCHYTYEIWNQYNVKEKIYIIELDKFEDQNEAEELEKAFTEIAGRKWVPTIFFHGKILGTEEDLKRWTKEGKLSEIFKDSHLIN

SEQ ID NO: 2987 - DNA, 315 bp, Debaryomyces hansenii CBS767; identical to SEQ ID NO: 2623
  CDS (1)..(315)

SEQ ID NO: 2988 - protein, 104 aa, Debaryomyces hansenii CBS767; identical to SEQ ID NO: 2624

SEQ ID NO: 2989 - DNA, 318 bp, Yarrowia lipolytica CLIB122; identical to SEQ ID NO: 2625
  CDS (1)..(318)

SEQ ID NO: 2990 - protein, 105 aa, Yarrowia lipolytica CLIB122; identical to SEQ ID NO: 2626

SEQ ID NO: 2991 - DNA, 309 bp, Aspergillus nidulans FGSC A4; identical to SEQ ID NO: 2629
  CDS (1)..(309)

SEQ ID NO: 2992 - protein, 102 aa, Aspergillus nidulans FGSC A4; identical to SEQ ID NO: 2630

SEQ ID NO: 2993 - DNA, 360 bp, Candida albicans SC5314; identical to SEQ ID NO: 2633
  CDS (1)..(360): transl_table=12

SEQ ID NO: 2994 - protein, 119 aa, Candida albicans SC5314; identical to SEQ ID NO: 2634

SEQ ID NO: 2995 - DNA, 309 bp, Ustilago maydis 521; identical to SEQ ID NO: 2635
  CDS (1)..(309)

SEQ ID NO: 2996 - protein, 102 aa, Ustilago maydis 521; identical to SEQ ID NO: 2636

SEQ ID NO: 2997 - DNA, 471 bp, Candida albicans SC5314; identical to SEQ ID NO: 2639
  CDS (1)..(471): transl_table=12

SEQ ID NO: 2998 - protein, 156 aa, Candida albicans SC5314; identical to SEQ ID NO: 2640

SEQ ID NO: 2999 - DNA, 309 bp, Tribolium castaneum; identical to SEQ ID NO: 2641
  CDS (1)..(309)

SEQ ID NO: 3000 - protein, 102 aa, Tribolium castaneum; identical to SEQ ID NO: 2642

SEQ ID NO: 3001 - DNA, 258 bp, Pseudoalteromonas tunicata D2
  CDS (1)..(258): transl_table=11
atggctgcaacagtcgttatttatactaaagattattgcccttactgcattcgtgcaaaagcacttttaagcagtaaaggtgttccatttaccgagtttgatattggcaagcagcctgaacttcgtgatgaaatggtagcaaaagcaaatggtggttatacggtgccacaaatttttattggtgatcaacatatcggtggttgtgatgatatgatggcgctagattcgcagggtaaacttgatactttgctcaaataa

SEQ ID NO: 3002 - protein, 85 aa, Pseudoalteromonas tunicata D2
MAATVVIYTKDYCPYCIRAKALLSSKGVPFTEFDIGKQPELRDEMVAKANGGYTVPQIFIGDQHIGGCDDMMALDSQGKLDTLLK

SEQ ID NO: 3003 - DNA, 384 bp, Medicago truncatula; identical to SEQ ID NO: 2643
  CDS (1)..(384)

SEQ ID NO: 3004 - protein, 127 aa, Medicago truncatula; identical to SEQ ID NO: 2644

SEQ ID NO: 3005 - DNA, 306 bp, Vitis vinifera; identical to SEQ ID NO: 2645
  CDS (1)..(306)
  misc_feature (225)..(225): r is g or a
  misc_feature (273)..(273): y is t or c

SEQ ID NO: 3006 - protein, 101 aa, Vitis vinifera; identical to SEQ ID NO: 2646

SEQ ID NO: 3007 - DNA, 324 bp, Vitis vinifera; identical to SEQ ID NO: 2647
  CDS (1)..(324)

SEQ ID NO: 3008 - protein, 107 aa, Vitis vinifera; identical to SEQ ID NO: 2648

SEQ ID NO: 3009 - DNA, 321 bp, Vitis vinifera; identical to SEQ ID NO: 2649
  CDS (1)..(321)

SEQ ID NO: 3010 - protein, 106 aa, Vitis vinifera; identical to SEQ ID NO: 2650

SEQ ID NO: 3011 - DNA, 345 bp, Vitis vinifera; identical to SEQ ID NO: 2651
  CDS (1)..(345)

SEQ ID NO: 3012 - protein, 114 aa, Vitis vinifera; identical to SEQ ID NO: 2652

SEQ ID NO: 3013 - DNA, 414 bp, Vitis vinifera; identical to SEQ ID NO: 2653
  CDS (1)..(414)
  misc_feature (18)..(18): y is t or c
  misc_feature (63)..(63): m is a or c

SEQ ID NO: 3014 - protein, 137 aa, Vitis vinifera; identical to SEQ ID NO: 2654

SEQ ID NO: 3015 - DNA, 315 bp, Fritillaria agrestis; identical to SEQ ID NO: 2655
  CDS (1)..(315)

SEQ ID NO: 3016 - protein, 104 aa, Fritillaria agrestis; identical to SEQ ID NO: 2656

SEQ ID NO: 3017 - DNA, 405 bp, Mesembryanthemum crystallinum
  CDS (1)..(405)
atgaagagaaatggcggaaattatgcgagtttgtgttatctaaggaatgtgatggcggtgataatggtgggaatgatttggatgaacgaagctatggccagcaattcagcttccgcatttgttaacaacgtcatctactccaaccgaattgcagttttctccaaatcctactgcccatattctgtgcgtgcgaagcgtgtatttagtgacctgcaggaacggccatttgttgttgagcttgatcttcgagatgatgggtctgaaattcaggatgttcttcttgaattggttggtcgacgcacagtcccacaagttttcgtgaatgggaaacatataggaggctctgatgatctccacagtgcagtcatgagcgggctgttgcagaagcatctctcaactagttga

SEQ ID NO: 3018 - protein, 134 aa, Mesembryanthemum crystallinum
MKRNGGNYASLCYLRNVMAVIMVGMIWMNEAMASNSASAFVNNVIYSNRIAVFSKSYCPYSVRAKRVFSDLQERPFVVELDLRDDGSEIQDVLLELVGRRTVPQVFVNGKHIGGSDDLHSAVMSGLLQKHLSTS

SEQ ID NO: 3019 - DNA, 402 bp, Thellungiella halophila; identical to SEQ ID NO: 2657
  CDS (1)..(402)

SEQ ID NO: 3020 - protein, 133 aa, Thellungiella halophila; identical to SEQ ID NO: 2658

SEQ ID NO: 3021 - DNA, 309 bp, Plantago major; identical to SEQ ID NO: 2659
  CDS (1)..(309)

SEQ ID NO: 3022 - protein, 102 aa, Plantago major; identical to SEQ ID NO: 2660

SEQ ID NO: 3023 - DNA, 312 bp, Musa acuminata
  CDS (1)..(312)
atggacaaggtgaagaagttggtgtcccaacgagcggtggtagtcttcagcatcagctcatgctgcatgtgccatactgtgaagagcctcctccatgacctcggtgtcaatgctgcagtacatgaacttgacgaggaaccaaggggaagagagatggagacggcgctagccgtgcttgtgaggcgtaatcctctggtgccgcttgtcttcatcggaggcaagctggttggatctactgataggatcatgtcactgcaccttggtggtgaattggtgccacttcttcacgaggcaggtgctctttgggtctga

SEQ ID NO: 3024 - protein, 103 aa, Musa acuminata
MDKVKKLVSQRAVVVFSISSCCMCHTVKSLLHDLGVNAAVHELDEEPRGREMETALAVLVRRNPLVPLVFIGGKLVGSTDRIMSLHLGGELVPLLHEAGALWV

SEQ ID NO: 3025 - DNA, 312 bp, Musa acuminata; identical to SEQ ID NO: 2661
  CDS (1)..(312)

SEQ ID NO: 3026 - protein, 103 aa, Musa acuminata; identical to SEQ ID NO: 2662

SEQ ID NO: 3027 - DNA, 450 bp, Medicago truncatula; identical to SEQ ID NO: 2663
  CDS (1)..(450)

SEQ ID NO: 3028 - protein, 149 aa, Medicago truncatula; identical to SEQ ID NO: 2664

SEQ ID NO: 3029 - DNA, 357 bp, Medicago truncatula; identical to SEQ ID NO: 2665
  CDS (1)..(357)

SEQ ID NO: 3030 - protein, 118 aa, Medicago truncatula; identical to SEQ ID NO: 2666

SEQ ID NO: 3031 - DNA, 384 bp, Medicago truncatula; identical to SEQ ID NO: 2667
  CDS (1)..(384)

SEQ ID NO: 3032 - protein, 127 aa, Medicago truncatula; identical to SEQ ID NO: 2668

SEQ ID NO: 3033 - DNA, 366 bp, Medicago truncatula; identical to SEQ ID NO: 2669
  CDS (1)..(366)

SEQ ID NO: 3034 - protein, 121 aa, Medicago truncatula; identical to SEQ ID NO: 2670

SEQ ID NO: 3035 - DNA, 399 bp, Beta vulgaris; identical to SEQ ID NO: 2671
  CDS (1)..(399)

SEQ ID NO: 3036 - protein, 132 aa, Beta vulgaris; identical to SEQ ID NO: 2672

SEQ ID NO: 3037 - DNA, 321 bp, Beta vulgaris; identical to SEQ ID NO: 2673
  CDS (1)..(321)

SEQ ID NO: 3038 - protein, 106 aa, Beta vulgaris; identical to SEQ ID NO: 2674

SEQ ID NO: 3039 - DNA, 309 bp, Beta vulgaris; identical to SEQ ID NO: 2675
  CDS (1)..(309)

SEQ ID NO: 3040 - protein, 102 aa, Beta vulgaris; identical to SEQ ID NO: 2676

SEQ ID NO: 3041 - DNA, 309 bp, Beta vulgaris; identical to SEQ ID NO: 2677
  CDS (1)..(309)

SEQ ID NO: 3042 - protein, 102 aa, Beta vulgaris; identical to SEQ ID NO: 2678

SEQ ID NO: 3043 - DNA, 309 bp, Beta vulgaris; identical to SEQ ID NO: 2679
  CDS (1)..(309)

SEQ ID NO: 3044 - protein, 102 aa, Beta vulgaris; identical to SEQ ID NO: 2680

SEQ ID NO: 3045 - DNA, 309 bp, Aspergillus oryzae; identical to SEQ ID NO: 2683
  CDS (1)..(309)

SEQ ID NO: 3046 - protein, 102 aa, Aspergillus oryzae; identical to SEQ ID NO: 2684

SEQ ID NO: 3047 - DNA, 381 bp, Populus tremula x Populus tremuloides; identical to SEQ ID NO: 2685
  CDS (1)..(381)

SEQ ID NO: 3048 - protein, 126 aa, Populus tremula x Populus tremuloides; identical to SEQ ID NO: 2686

SEQ ID NO: 3049 - DNA, 318 bp, Plantago major; identical to SEQ ID NO: 2687
  CDS (1)..(318)

SEQ ID NO: 3050 - protein, 105 aa, Plantago major; identical to SEQ ID NO: 2688

SEQ ID NO: 3051 - DNA, 342 bp, Triticum aestivum; identical to SEQ ID NO: 2689
  CDS (1)..(342)

SEQ ID NO: 3052 - protein, 113 aa, Triticum aestivum; identical to SEQ ID NO: 2690

SEQ ID NO: 3053 - DNA, 249 bp, Serratia marcescens
  CDS (1)..(249): transl_table=11
atggctaacattgatatctacaccaaagcgacctgtccgttctgccatcgcgccaaggcgctgttgaacagcaagggcgcggcgtttaacgagatcgccatcgacggcgataacgccaagcgcgaagtgatgatcgagcgcagcgggcgcaccaccgtgccgcagattttcatcgacggccggcatatcggcggctgtgatgatttatatgaactcgatgctcgcggcggcctggatccgctgctttaa

SEQ ID NO: 3054 - protein, 82 aa, Serratia marcescens
MANIDIYTKATCPFCHRAKALLNSKGAAFNEIAIDGDNAKREVMIERSGRTTVPQIFIDGRHIGGCDDLYELDARGGLDPLL

SEQ ID NO: 3055 - DNA, 420 bp, Populus tremula x Populus tremuloides; identical to SEQ ID NO: 2691
  CDS (1)..(420)

SEQ ID NO: 3056 - protein, 139 aa, Populus tremula x Populus tremuloides; identical to SEQ ID NO: 2692

SEQ ID NO: 3057 - DNA, 348 bp, Tilia platyphyllos; identical to SEQ ID NO: 2693
  CDS (1)..(348)

SEQ ID NO: 3058 - protein, 115 aa, Tilia platyphyllos; identical to SEQ ID NO: 2694

SEQ ID NO: 3059 - DNA, 342 bp, Deschampsia antarctica; identical to SEQ ID NO: 2695
  CDS (1)..(342)

SEQ ID NO: 3060 - protein, 113 aa, Deschampsia antarctica; identical to SEQ ID NO: 2696

SEQ ID NO: 3061 - DNA, 327 bp, Solanum lycopersicum; identical to SEQ ID NO: 2701
  CDS (1)..(327)

SEQ ID NO: 3062 - protein, 108 aa, Solanum lycopersicum; identical to SEQ ID NO: 2702

SEQ ID NO: 3063 - DNA, 315 bp, Vernicia fordii; identical to SEQ ID NO: 2703
  CDS (1)..(315)

SEQ ID NO: 3064 - protein, 104 aa, Vernicia fordii; identical to SEQ ID NO: 2704

SEQ ID NO: 3065 - DNA, 447 bp, Arabidopsis thaliana; identical to SEQ ID NO: 2705
  CDS (1)..(447)

SEQ ID NO: 3066 - protein, 148 aa, Arabidopsis thaliana; identical to SEQ ID NO: 2706

SEQ ID NO: 3067 - DNA, 312 bp, Arabidopsis thaliana; identical to SEQ ID NO: 2709
  CDS (1)..(312)

SEQ ID NO: 3068 - protein, 103 aa, Arabidopsis thaliana; identical to SEQ ID NO: 2710

SEQ ID NO: 3069 - DNA, 309 bp, Arabidopsis thaliana; identical to SEQ ID NO: 2711
  CDS (1)..(309)

SEQ ID NO: 3070 - protein, 102 aa, Arabidopsis thaliana; identical to SEQ ID NO: 2712

SEQ ID NO: 3071 - DNA, 309 bp, Arabidopsis thaliana; identical to SEQ ID NO: 2713
  CDS (1)..(309)

SEQ ID NO: 3072 - protein, 102 aa, Arabidopsis thaliana; identical to SEQ ID NO: 2714

SEQ ID NO: 3073 - DNA, 495 bp, Oryza sativa subsp; identical to SEQ ID NO: 2779
  CDS (1)..(495)

SEQ ID NO: 3074 - protein, 164 aa, Oryza sativa subsp; identical to SEQ ID NO: 2780

SEQ ID NO: 3075 - DNA, 300 bp, Arabidopsis thaliana; identical to SEQ ID NO: 2715
  CDS (1)..(300)

SEQ ID NO: 3076 - protein, 99 aa, Arabidopsis thaliana; identical to SEQ ID NO: 2716

SEQ ID NO: 3077 - DNA, 540 bp, Arabidopsis thaliana; identical to SEQ ID NO: 2717
  CDS (1)..(540)

SEQ ID NO: 3078 - protein, 179 aa, Arabidopsis thaliana; identical to SEQ ID NO: 2718

SEQ ID NO: 3079 - DNA, 378 bp, Arabidopsis thaliana; identical to SEQ ID NO: 2721
  CDS (1)..(378)

SEQ ID NO: 3080 - protein, 125 aa, Arabidopsis thaliana; identical to SEQ ID NO: 2722

SEQ ID NO: 3081 - DNA, 336 bp, Arabidopsis thaliana; identical to SEQ ID NO: 2723
  CDS (1)..(336)

SEQ ID NO: 3082 - protein, 111 aa, Arabidopsis thaliana; identical to SEQ ID NO: 2724

SEQ ID NO: 3083 - DNA, 378 bp, Oryza sativa subsp; identical to SEQ ID NO: 2759
  CDS (1)..(378)

SEQ ID NO: 3084 - protein, 125 aa, Oryza sativa subsp; identical to SEQ ID NO: 2760

SEQ ID NO: 3085 - DNA, 393 bp, Arabidopsis thaliana; identical to SEQ ID NO: 2725
  CDS (1)..(393)

SEQ ID NO: 3086 - protein, 130 aa, Arabidopsis thaliana; identical to SEQ ID NO: 2726

SEQ ID NO: 3087 - DNA, 408 bp, Arabidopsis thaliana; identical to SEQ ID NO: 2727
  CDS (1)..(408)

SEQ ID NO: 3088 - protein, 135 aa, Arabidopsis thaliana; identical to SEQ ID NO: 2728

SEQ ID NO: 3089 - DNA, 525 bp, Arabidopsis thaliana; identical to SEQ ID NO: 2729
  CDS (1)..(525)

SEQ ID NO: 3090 - protein, 174 aa, Arabidopsis thaliana; identical to SEQ ID NO: 2730

SEQ ID NO: 3091 - DNA, 435 bp, Arabidopsis thaliana; identical to SEQ ID NO: 2731
  CDS (1)..(435)

SEQ ID NO: 3092 - protein, 144 aa, Arabidopsis thaliana; identical to SEQ ID NO: 2732

SEQ ID NO: 3093 - DNA, 411 bp, Arabidopsis thaliana; identical to SEQ ID NO: 2733
  CDS (1)..(411)

SEQ ID NO: 3094 - protein, 136 aa, Arabidopsis thaliana; identical to SEQ ID NO: 2734

SEQ ID NO: 3095 - DNA, 423 bp, Arabidopsis thaliana; identical to SEQ ID NO: 2735
  CDS (1)..(423)

SEQ ID NO: 3096 - protein, 140 aa, Arabidopsis thaliana; identical to SEQ ID NO: 2736

SEQ ID NO: 3097 - DNA, 414 bp, Arabidopsis thaliana; identical to SEQ ID NO: 2737
  CDS (1)..(414)

SEQ ID NO: 3098 - protein, 137 aa, Arabidopsis thaliana; identical to SEQ ID NO: 2738

SEQ ID NO: 3099 - DNA, 309 bp, Arabidopsis thaliana; identical to SEQ ID NO: 2739
  CDS (1)..(309)

SEQ ID NO: 3100 - protein, 102 aa, Arabidopsis thaliana; identical to SEQ ID NO: 2740

SEQ ID NO: 3101 - DNA, 378 bp, Oryza sativa subsp; identical to SEQ ID NO: 2753
  CDS (1)..(378)

SEQ ID NO: 3102 - protein, 125 aa, Oryza sativa subsp; identical to SEQ ID NO: 2754

SEQ ID NO: 3103 - DNA, 309 bp, Arabidopsis thaliana; identical to SEQ ID NO: 2741
  CDS (1)..(309)

SEQ ID NO: 3104 - protein, 102 aa, Arabidopsis thaliana; identical to SEQ ID NO: 2742

SEQ ID NO: 3105 - DNA, 309 bp, Arabidopsis thaliana; identical to SEQ ID NO: 2743
  CDS (1)..(309)

SEQ ID NO: 3106 - protein, 102 aa, Arabidopsis thaliana; identical to SEQ ID NO: 2744

SEQ ID NO: 3107 - DNA, 309 bp, Arabidopsis thaliana; identical to SEQ ID NO: 2745
  CDS (1)..(309)

SEQ ID NO: 3108 - protein, 102 aa, Arabidopsis thaliana; identical to SEQ ID NO: 2746

SEQ ID NO: 3109 - DNA, 309 bp, Arabidopsis thaliana; identical to SEQ ID NO: 2573
  CDS (1)..(309)

SEQ ID NO: 3110 - protein, 102 aa, Arabidopsis thaliana; identical to SEQ ID NO: 2574

SEQ ID NO: 3111 - DNA, 396 bp, Oryza sativa subsp
  CDS (1)..(396)
atggctgcggcgagagcagcggtccccatcgccgtcttcctcctcctcgtcctcgccgaggccgaccccgcggcggcgacgcgctcgccttcggccttcgtgcagaacgccatctactccaatcgcatcaccatcttctctaaaacctactgcccgtactctatgcgtgctaagcgtatatttagagatctcaaggagaatccttatattgttgaactagatctcagagaggatggtagagaaattcaaagtgttcttctagacttagttggccgtcatactgtgccacaggtgttcgtgaatggccagcacgttggtggctcagatgatacagcaaatgctcattctaatggacagcttcagaaacttcttggaaatagccaatcacagcgatga

SEQ ID NO: 3112 - protein, 131 aa, Oryza sativa subsp
MAAARAAVPIAVFLLLVLAEADPAAATRSPSAFVQNAIYSNRITIFSKTYCPYSMRAKRIFRDLKENPYIVELDLREDGREIQSVLLDLVGRHTVPQVFVNGQHVGGSDDTANAHSNGQLQKLLGNSQSQR

SEQ ID NO: 3113 - DNA, 309 bp, Arabidopsis thaliana; identical to SEQ ID NO: 2747
  CDS (1)..(309)

SEQ ID NO: 3114 - protein, 102 aa, Arabidopsis thaliana; identical to SEQ ID NO: 2748

SEQ ID NO: 3115 - DNA, 309 bp, Arabidopsis thaliana; identical to SEQ ID NO: 2749
  CDS (1)..(309)

SEQ ID NO: 3116 - protein, 102 aa, Arabidopsis thaliana; identical to SEQ ID NO: 2750

SEQ ID NO: 3117 - DNA, 309 bp, Arabidopsis thaliana; identical to SEQ ID NO: 2751
  CDS (1)..(309)

SEQ ID NO: 3118 - protein, 102 aa, Arabidopsis thaliana; identical to SEQ ID NO: 2752

SEQ ID NO: 3119 - DNA, 411 bp, Oryza sativa
  CDS (1)..(411)
atgcaaggagcaaggtcggcggcggcgatggcggcggcggcggccgacgaggagagggaggtgcggagggcggtggaggagaagccggttgtggtggtggggcggcgcgggtgctgcatggcgcacgtcgcgcggcgcctgctgctggggcagggcgcgaacccggcggtgctcgaggtcggcgacgacgccgacccggcggcgctcgtcgacgccgcgctgcaggcccgccggcgcaaggacggcggcgacaaggctgcggcgggcgacggaggcggcggagcggcggtggcattcccggcggtgttcatcggcgggaggctggtgggcgggctcgatcggctcatggccatgcacatggccggcgagctcgtgccggtcttgaagcaggcaggagccctgtggctctga

SEQ ID NO: 3120 - protein, 136 aa, Oryza sativa
MQGARSAAAMAAAAADEEREVRRAVEEKPVVVVGRRGCCMAHVARRLLLGQGANPAVLEVGDDADPAALVDAALQARRRKDGGDKAAAGDGGGGAAVAFPAVFIGGRLVGGLDRLMAMHMAGELVPVLKQAGALWL

SEQ ID NO: 3121 - DNA, 312 bp, Oryza sativa; identical to SEQ ID NO: 2755
  CDS (1)..(312)

SEQ ID NO: 3122 - protein, 103 aa, Oryza sativa; identical to SEQ ID NO: 2756

SEQ ID NO: 3123 - DNA, 444 bp, Oryza sativa; identical to SEQ ID NO: 2757
  CDS (1)..(444)

SEQ ID NO: 3124 - protein, 147 aa, Oryza sativa; identical to SEQ ID NO: 2758

SEQ ID NO: 3125 - DNA, 408 bp, Oryza sativa; identical to SEQ ID NO: 2761
  CDS (1)..(408)

SEQ ID NO: 3126 - protein, 135 aa, Oryza sativa; identical to SEQ ID NO: 2762

SEQ ID NO: 3127 - DNA, 402 bp, Oryza sativa; identical to SEQ ID NO: 2763
  CDS (1)..(402)

SEQ ID NO: 3128 - protein, 133 aa, Oryza sativa; identical to SEQ ID NO: 2764

SEQ ID NO: 3129 - DNA, 408 bp, Oryza sativa; identical to SEQ ID NO: 2765
  CDS (1)..(408)

SEQ ID NO: 3130 - protein, 135 aa, Oryza sativa; identical to SEQ ID NO: 2766

SEQ ID NO: 3131 - DNA, 384 bp, Oryza sativa; identical to SEQ ID NO: 2767
  CDS (1)..(384)

SEQ ID NO: 3132 - protein, 127 aa, Oryza sativa; identical to SEQ ID NO: 2768

SEQ ID NO: 3133 - DNA, 345 bp, Oryza sativa; identical to SEQ ID NO: 2769
  CDS (1)..(345)

SEQ ID NO: 3134 - protein, 114 aa, Oryza sativa; identical to SEQ ID NO: 2770

SEQ ID NO: 3135 - DNA, 417 bp, Oryza sativa; identical to SEQ ID NO: 2771
  CDS (1)..(417)

SEQ ID NO: 3136 - protein, 138 aa, Oryza sativa; identical to SEQ ID NO: 2772

SEQ ID NO: 3137 - DNA, 399 bp, Oryza sativa; identical to SEQ ID NO: 2773
  CDS (1)..(399)

SEQ ID NO: 3138 - protein, 132 aa, Oryza sativa; identical to SEQ ID NO: 2774

SEQ ID NO: 3139 - DNA, 411 bp, Oryza sativa; identical to SEQ ID NO: 2775
  CDS (1)..(411)

SEQ ID NO: 3140 - protein, 136 aa, Oryza sativa; identical to SEQ ID NO: 2776

SEQ ID NO: 3141 - DNA, 579 bp, Oryza sativa; identical to SEQ ID NO: 2777
  CDS (1)..(579)

SEQ ID NO: 3142 - protein, 192 aa, Oryza sativa; identical to SEQ ID NO: 2778

SEQ ID NO: 3143 - DNA, 327 bp, Oryza sativa; identical to SEQ ID NO: 2781
  CDS (1)..(327)

SEQ ID NO: 3144 - protein, 108 aa, Oryza sativa; identical to SEQ ID NO: 2782

SEQ ID NO: 3145 - DNA, 330 bp, Oryza sativa; identical to SEQ ID NO: 2783
  CDS (1)..(330)

SEQ ID NO: 3146 - protein, 109 aa, Oryza sativa; identical to SEQ ID NO: 2784

SEQ ID NO: 3147 - DNA, 330 bp, Oryza sativa; identical to SEQ ID NO: 2785
  CDS (1)..(330)

SEQ ID NO: 3148 - protein, 109 aa, Oryza sativa; identical to SEQ ID NO: 2786

SEQ ID NO: 3149 - DNA, 330 bp, Oryza sativa; identical to SEQ ID NO: 2787
  CDS (1)..(330)

SEQ ID NO: 3150 - protein, 109 aa, Oryza sativa; identical to SEQ ID NO: 2788

SEQ ID NO: 3151 - DNA, 312 bp, Oryza sativa; identical to SEQ ID NO: 2789
  CDS (1)..(312)

SEQ ID NO: 3152 - protein, 103 aa, Oryza sativa; identical to SEQ ID NO: 2790

SEQ ID NO: 3153 - DNA, 315 bp, Oryza sativa; identical to SEQ ID NO: 2791
  CDS (1)..(315)

SEQ ID NO: 3154 - protein, 104 aa, Oryza sativa; identical to SEQ ID NO: 2792

SEQ ID NO: 3155 - DNA, 309 bp, Brassica napus; identical to SEQ ID NO: 2793
  CDS (1)..(309)

SEQ ID NO: 3156 - protein, 102 aa, Brassica napus; identical to SEQ ID NO: 2794

SEQ ID NO: 3157 - DNA, 537 bp, Brassica napus
  CDS (1)..(537)
atggcagtctcagcattcaaccctttaaaacttgcatcctcttcttctctagattcgattccttcaatctcttattctacttcttattcgttgtttctgataagcgtcggcatcagaaaatccgtcggatctcctttcaagagatgcctaaagcagtcttattcttcagttcgagccatgtcttcttcggctgcttcttcttctttcggatcgagaatggaggagagcgtgaggaaaacggttactgagaacattgtcgttgtttactccaaaacttggtgctcatactgtactgaagtgaagacattattcaagagacttggtgttcagccgctggtgattgaattggatgaacttggtccacaaggaccacaactgcagaaggtactggaaagactcacagggcaacacactgttcctaatgttttcgttggaggcaagcacattggtggctgcacagatacagtgaagctgaacaggaaaggagatcttgaactgatgttagctgaagccaacggcaacaccaatcaaacttaa

SEQ ID NO: 3158 - protein, 178 aa, Brassica napus
MAVSAFNPLKLASSSSLDSIPSISYSTSYSLFLISVGIRKSVGSPFKRCLKQSYSSVRAMSSSAASSSFGSRMEESVRKTVTENIVVVYSKTWCSYCTEVKTLFKRLGVQPLVIELDELGPQGPQLQKVLERLTGQHTVPNVFVGGKHIGGCTDTVKLNRKGDLELMLAEANGNTNQT

SEQ ID NO: 3159 - DNA, 309 bp, Brassica napus; identical to SEQ ID NO: 2795
  CDS (1)..(309)

SEQ ID NO: 3160 - protein, 102 aa, Brassica napus; identical to SEQ ID NO: 2796

SEQ ID NO: 3161 - DNA, 309 bp, Brassica napus; identical to SEQ ID NO: 2797
  CDS (1)..(309)

SEQ ID NO: 3162 - protein, 102 aa, Brassica napus; identical to SEQ ID NO: 2798

SEQ ID NO: 3163 - DNA, 309 bp, Brassica napus; identical to SEQ ID NO: 2799
  CDS (1)..(309)

SEQ ID NO: 3164 - protein, 102 aa, Brassica napus; identical to SEQ ID NO: 2800

SEQ ID NO: 3165 - DNA, 309 bp, Brassica napus; identical to SEQ ID NO: 2801
  CDS (1)..(309)

SEQ ID NO: 3166 - protein, 102 aa, Brassica napus; identical to SEQ ID NO: 2802

SEQ ID NO: 3167 - DNA, 318 bp, Brassica napus; identical to SEQ ID NO: 2803
  CDS (1)..(318)

SEQ ID NO: 3168 - protein, 105 aa, Brassica napus; identical to SEQ ID NO: 2804

SEQ ID NO: 3169 - DNA, 300 bp, Brassica napus; identical to SEQ ID NO: 2805
  CDS (1)..(300)

SEQ ID NO: 3170 - protein, 99 aa, Brassica napus; identical to SEQ ID NO: 2806

SEQ ID NO: 3171 - DNA, 309 bp, Brassica napus; identical to SEQ ID NO: 2807
  CDS (1)..(309)

SEQ ID NO: 3172 - protein, 102 aa, Brassica napus; identical to SEQ ID NO: 2808

SEQ ID NO: 3173 - DNA, 519 bp, Brassica napus; identical to SEQ ID NO: 2809
  CDS (1)..(519)

SEQ ID NO: 3174 - protein, 172 aa, Brassica napus; identical to SEQ ID NO: 2810

SEQ ID NO: 3175 - DNA, 315 bp, Triticum aestivum; identical to SEQ ID NO: 2813
  CDS (1)..(315)

SEQ ID NO: 3176 - protein, 104 aa, Triticum aestivum; identical to SEQ ID NO: 2814

SEQ ID NO: 3177 - DNA, 306 bp, Glycine max; identical to SEQ ID NO: 2815
  CDS (1)..(306)

SEQ ID NO: 3178 - protein, 101 aa, Glycine max; identical to SEQ ID NO: 2816

SEQ ID NO: 3179 - DNA, 309 bp, Brassica napus; identical to SEQ ID NO: 2817
  CDS (1)..(309)

SEQ ID NO: 3180 - protein, 102 aa, Brassica napus; identical to SEQ ID NO: 2818

SEQ ID NO: 3181 - DNA, 309 bp, Brassica napus; identical to SEQ ID NO: 2819
  CDS (1)..(309)

SEQ ID NO: 3182 - protein, 102 aa, Brassica napus; identical to SEQ ID NO: 2820

SEQ ID NO: 3183 - DNA, 399 bp, Glycine max; identical to SEQ ID NO: 2821
  CDS (1)..(399)

SEQ ID NO: 3184 - protein, 132 aa, Glycine max; identical to SEQ ID NO: 2822

SEQ ID NO: 3185 - DNA, 312 bp, Triticum aestivum; identical to SEQ ID NO: 2823
  CDS (1)..(312)

SEQ ID NO: 3186 - protein, 103 aa, Triticum aestivum; identical to SEQ ID NO: 2824

SEQ ID NO: 3187 - DNA, 414 bp, Triticum aestivum; identical to SEQ ID NO: 2825
  CDS (1)..(414)

SEQ ID NO: 3188 - protein, 137 aa, Triticum aestivum; identical to SEQ ID NO: 2826

SEQ ID NO: 3189 - DNA, 414 bp, Zea mays; identical to SEQ ID NO: 2827
  CDS (1)..(414)

SEQ ID NO: 3190 - protein, 137 aa, Zea mays; identical to SEQ ID NO: 2828

SEQ ID NO: 3191 - DNA, 468 bp, Zea mays; identical to SEQ ID NO: 2829
  CDS (1)..(468)

SEQ ID NO: 3192 - protein, 155 aa, Zea mays; identical to SEQ ID NO: 2830

SEQ ID NO: 3193 - DNA, 312 bp, Zea mays; identical to SEQ ID NO: 2585
  CDS (1)..(312)

SEQ ID NO: 3194 - protein, 103 aa, Zea mays; identical to SEQ ID NO: 2586

SEQ ID NO: 3195 - DNA, 312 bp, Hordeum vulgare; identical to SEQ ID NO: 2833
  CDS (1)..(312)

SEQ ID NO: 3196 - protein, 103 aa, Hordeum vulgare; identical to SEQ ID NO: 2834

SEQ ID NO: 3197 - DNA, 393 bp, Hordeum vulgare; identical to SEQ ID NO: 2835
  CDS (1)..(393)

SEQ ID NO: 3198 - protein, 130 aa, Hordeum vulgare; identical to SEQ ID NO: 2836

SEQ ID NO: 3199 - DNA, 309 bp, Brassica napus; identical to SEQ ID NO: 2843
  CDS (1)..(309)

SEQ ID NO: 3200 - protein, 102 aa, Brassica napus; identical to SEQ ID NO: 2844

SEQ ID NO: 3201 - DNA, 309 bp, Brassica napus; identical to SEQ ID NO: 2845
  CDS (1)..(309)

SEQ ID NO: 3202 - protein, 102 aa, Brassica napus; identical to SEQ ID NO: 2846

SEQ ID NO: 3203 - DNA, 522 bp, Brassica napus; identical to SEQ ID NO: 2847
  CDS (1)..(522)

SEQ ID NO: 3204 - protein, 173 aa, Brassica napus; identical to SEQ ID NO: 2848

SEQ ID NO: 3205 - DNA, 435 bp, Brassica napus; identical to SEQ ID NO: 2849
  CDS (1)..(435)

SEQ ID NO: 3206 - protein, 144 aa, Brassica napus; identical to SEQ ID NO: 2850

SEQ ID NO: 3207 - DNA, 435 bp, Brassica napus; identical to SEQ ID NO: 2851
  CDS (1)..(435)

SEQ ID NO: 3208 - protein, 144 aa, Brassica napus; identical to SEQ ID NO: 2852

SEQ ID NO: 3209 - DNA, 309 bp, Brassica napus; identical to SEQ ID NO: 2853
  CDS (1)..(309)

SEQ ID NO: 3210 - protein, 102 aa, Brassica napus; identical to SEQ ID NO: 2854

SEQ ID NO: 3211 - DNA, 300 bp, Brassica napus; identical to SEQ ID NO: 2855
  CDS (1)..(300)

SEQ ID NO: 3212 - protein, 99 aa, Brassica napus; identical to SEQ ID NO: 2856

SEQ ID NO: 3213 - DNA, 336 bp, Brassica napus; identical to SEQ ID NO: 2859
  CDS (1)..(336)

SEQ ID NO: 3214 - protein, 111 aa, Brassica napus; identical to SEQ ID NO: 2860

SEQ ID NO: 3215 - DNA, 309 bp, Brassica napus; identical to SEQ ID NO: 2861
  CDS (1)..(309)

SEQ ID NO: 3216 - protein, 102 aa, Brassica napus; identical to SEQ ID NO: 2862

SEQ ID NO: 3217 - DNA, 522 bp, Brassica napus; identical to SEQ ID NO: 2863
  CDS (1)..(522)

SEQ ID NO: 3218 - protein, 173 aa, Brassica napus; identical to SEQ ID NO: 2864

SEQ ID NO: 3219 - DNA, 309 bp, Brassica napus; identical to SEQ ID NO: 2865
  CDS (1)..(309)

SEQ ID NO: 3220 - protein, 102 aa, Brassica napus; identical to SEQ ID NO: 2866

SEQ ID NO: 3221 - DNA, 300 bp, Brassica napus; identical to SEQ ID NO: 2867
  CDS (1)..(300)

SEQ ID NO: 3222 - protein, 99 aa, Brassica napus; identical to SEQ ID NO: 2868

SEQ ID NO: 3223 - DNA, 309 bp, Brassica napus; identical to SEQ ID NO: 2869
  CDS (1)..(309)

SEQ ID NO: 3224 - protein, 102 aa, Brassica napus; identical to SEQ ID NO: 2870

SEQ ID NO: 3225 - DNA, 309 bp, Brassica napus; identical to SEQ ID NO: 2871
  CDS (1)..(309)

SEQ ID NO: 3226 - protein, 102 aa, Brassica napus; identical to SEQ ID NO: 2872

SEQ ID NO: 3227 - DNA, 309 bp, Brassica napus; identical to SEQ ID NO: 2873
  CDS (1)..(309)

SEQ ID NO: 3228 - protein, 102 aa, Brassica napus; identical to SEQ ID NO: 2874

SEQ ID NO: 3229 - DNA, 312 bp, Brassica napus; identical to SEQ ID NO: 2875
  CDS (1)..(312)

SEQ ID NO: 3230 - protein, 103 aa, Brassica napus; identical to SEQ ID NO: 2876

SEQ ID NO: 3231 - DNA, 426 bp, Brassica napus; identical to SEQ ID NO: 2877
  CDS (1)..(426)

SEQ ID NO: 3232 - protein, 141 aa, Brassica napus; identical to SEQ ID NO: 2878

SEQ ID NO: 3233 - DNA, 309 bp, Brassica napus; identical to SEQ ID NO: 2879
  CDS (1)..(309)

SEQ ID NO: 3234 - protein, 102 aa, Brassica napus; identical to SEQ ID NO: 2880

SEQ ID NO: 3235 - DNA, 333 bp, Glycine max; identical to SEQ ID NO: 2881
  CDS (1)..(333)

SEQ ID NO: 3236 - protein, 110 aa, Glycine max; identical to SEQ ID NO: 2882

SEQ ID NO: 3237 - DNA, 324 bp, Glycine max; identical to SEQ ID NO: 2883
  CDS (1)..(324)

SEQ ID NO: 3238 - protein, 107 aa, Glycine max; identical to SEQ ID NO: 2884

SEQ ID NO: 3239 - DNA, 399 bp, Glycine max; identical to SEQ ID NO: 2887
  CDS (1)..(399)

SEQ ID NO: 3240 - protein, 132 aa, Glycine max; identical to SEQ ID NO: 2888

SEQ ID NO: 3241 - DNA, 525 bp, Glycine max; identical to SEQ ID NO: 2891
  CDS (1)..(525)

SEQ ID NO: 3242 - protein, 174 aa, Glycine max; identical to SEQ ID NO: 2892

SEQ ID NO: 3243 - DNA, 483 bp, Glycine max; identical to SEQ ID NO: 2893
  CDS (1)..(483)

SEQ ID NO: 3244 - protein, 160 aa, Glycine max; identical to SEQ ID NO: 2894

SEQ ID NO: 3245 - DNA, 522 bp, Glycine max; identical to SEQ ID NO: 2895
  CDS (1)..(522)

SEQ ID NO: 3246 - protein, 173 aa, Glycine max; identical to SEQ ID NO: 2896

SEQ ID NO: 3247 - DNA, 411 bp, Glycine max; identical to SEQ ID NO: 2897
  CDS (1)..(411)

SEQ ID NO: 3248 - protein, 136 aa, Glycine max; identical to SEQ ID NO: 2898

SEQ ID NO: 3249 - DNA, 309 bp, Glycine max; identical to SEQ ID NO: 2899
  CDS (1)..(309)

SEQ ID NO: 3250 - protein, 102 aa, Glycine max; identical to SEQ ID NO: 2900

SEQ ID NO: 3251 - DNA, 423 bp, Glycine max; identical to SEQ ID NO: 2901
  CDS (1)..(423)

SEQ ID NO: 3252 - protein, 140 aa, Glycine max; identical to SEQ ID NO: 2902

SEQ ID NO: 3253 - DNA, 309 bp, Glycine max; identical to SEQ ID NO: 2905
  CDS (1)..(309)

SEQ ID NO: 3254 - protein, 102 aa, Glycine max; identical to SEQ ID NO: 2906

SEQ ID NO: 3255 - DNA, 318 bp, Glycine max; identical to SEQ ID NO: 2907
  CDS (1)..(318)

SEQ ID NO: 3256 - protein, 105 aa, Glycine max; identical to SEQ ID NO: 2908

SEQ ID NO: 3257 - DNA, 402 bp, Glycine max; identical to SEQ ID NO: 2909
  CDS (1)..(402)

SEQ ID NO: 3258 - protein, 133 aa, Glycine max; identical to SEQ ID NO: 2910

SEQ ID NO: 3259 - DNA, 309 bp, Glycine max; identical to SEQ ID NO: 2911
  CDS (1)..(309)

SEQ ID NO: 3260 - protein, 102 aa, Glycine max; identical to SEQ ID NO: 2912

SEQ ID NO: 3261 - DNA, 402 bp, Glycine max; identical to SEQ ID NO: 2913
  CDS (1)..(402)

SEQ ID NO: 3262 - protein, 133 aa, Glycine max; identical to SEQ ID NO: 2914

SEQ ID NO: 3263 - DNA, 480 bp, Zea mays; identical to SEQ ID NO: 2915
  CDS (1)..(480)

SEQ ID NO: 3264 - protein, 159 aa, Zea mays; identical to SEQ ID NO: 2916

SEQ ID NO: 3265 - DNA, 393 bp, Zea mays; identical to SEQ ID NO: 2917
  CDS (1)..(393)

SEQ ID NO: 3266 - protein, 130 aa, Zea mays; identical to SEQ ID NO: 2918

SEQ ID NO: 3267 - DNA, 345 bp, Zea mays; identical to SEQ ID NO: 2919
  CDS (1)..(345)

SEQ ID NO: 3268 - protein, 114 aa, Zea mays; identical to SEQ ID NO: 2920

SEQ ID NO: 3269 - DNA, 312 bp, Zea mays; identical to SEQ ID NO: 2921
  CDS (1)..(312)

SEQ ID NO: 3270 - protein, 103 aa, Zea mays; identical to SEQ ID NO: 2922

SEQ ID NO: 3271 - DNA, 342 bp, Zea mays; identical to SEQ ID NO: 2923
  CDS (1)..(342)

SEQ ID NO: 3272 - protein, 113 aa, Zea mays; identical to SEQ ID NO: 2924

SEQ ID NO: 3273 - DNA, 315 bp, Zea mays; identical to SEQ ID NO: 2929
  CDS (1)..(315)

SEQ ID NO: 3274 - protein, 104 aa, Zea mays; identical to SEQ ID NO: 2930

SEQ ID NO: 3275 - DNA, 21 bp, Artificial sequence
  primer
atggagagaataagagatttg

SEQ ID NO: 3276 - DNA, 20 bp, Artificial sequence
  primer
ctataaccaaatggccttag

SEQ ID NO: 3277 - protein, 105 aa, Artificial sequence
  consensus sequence
  Variant (2)..(8): Xaa in position 2 to 8 is any amino acid
  Variant (9)..(9): Xaa in position 9 is any or no amino acid
  Variant (11)..(18): Xaa in position 11 to 18 is any amino acid
  Variant (20)..(30): Xaa in position 20 to 30 is any amino acid
  Variant (31)..(33): Xaa in position 31 to 33 is any or no amino acid
  Variant (35)..(35): Xaa in position 35 is any amino acid
  Variant (37)..(43): Xaa in position 37 to 43 is any amino acid
  Variant (44)..(50): Xaa in position 44 to 50 is any or no amino acid
  Variant (52)..(54): Xaa in position 52 to 54 is any amino acid
  Variant (55)..(75): Xaa in position 55 to 75 is any or no amino acid
  Variant (78)..(78): Xaa in position 78 is any amino acid
  Variant (81)..(82): Xaa in position 81 to 82 is any amino acid
  Variant (84)..(86): Xaa in position 84 to 86 is any amino acid
  Variant (88)..(97): Xaa in position 88 to 97 is any amino acid
  Variant (98)..(98): Xaa in position 98 is any or no amino acid
  Variant (100)..(100): Xaa in position 100 is any amino acid
  Variant (102)..(104): Xaa in position 102 to 104 is any amino acid
VXXXXXXXXCXXXXXXXXLXXXXXXXXXXXXXXEXDXXXXXXXXXXXXXXLXXXXXXXXXXXXXXXXXXXXXXXXVPXVFXXGXXXGXXXXXXXXXXXGXLXXXL

SEQ ID NO: 3278 - protein, 29 aa, Artificial sequence
  protein pattern
  Variant (2)..(2): Xaa in position 2 is any amino acid
  Variant (3)..(3): Xaa in position 3 is Ala, Ile, Leu or Val
  Variant (4)..(4): Xaa in position 4 is Phe or Tyr
  Variant (5)..(5): Xaa in position 5 is Ile, Leu or Val
  Variant (6)..(9): Xaa in position 6 to 9 is any amino acid
  Variant (10)..(10): Xaa in position 10 is Phe, Ile, Leu, Met or Val
  Variant (12)..(12): Xaa in position 12 is Ala, Gly, Pro, Ser or Thr
  Variant (13)..(22): Xaa in position 13 to 22 is any amino acid
  Variant (24)..(24): Xaa in position 24 is any amino acid
  Variant (26)..(27): Xaa in position 26 to 27 is any amino acid
  Variant (28)..(28): Xaa in position 28 is any or no amino acid
PXXXXXXXXXGXXXXXXXXXXXGXLXXXL

SEQ ID NO: 3279 - DNA, 309 bp, Arabidopsis thaliana; identical to SEQ ID NO: 2747
  CDS (1)..(309)

SEQ ID NO: 3280 - protein, 102 aa, Arabidopsis thaliana; identical to SEQ ID NO: 2748

SEQ ID NO: 3281 - DNA, 441 bp, Aedes aegypti
  CDS (1)..(441)
atgagtctactggtgagaaaacttggatccagtgccttcggcagccgcaccagtttcttcctggcgcgaacgctttgcgccaacgccgtagatgccaaggagattgacaaacttgtacacaacaacaaggtcgtcgtgttcatgaagggaaacccggaacaaccgcggtgtggattcagcaatgccgtggtccagatcctgcggatgcatgccgtgaattacgacagccacgacgttctgcagagtgatgccttgcgacaggccatcaaagactattccaactggccaacgattccgcaggtttttatcaacggagaatttgtcggaggatgcgacatcatgctgcagatgcaccaaaacggagaactcatcgatgagctgaagaaggtcggcattacgagtgccttagtggatgcggccggagcagaagagaagaagtag

SEQ ID NO: 3282 - protein, 146 aa, Aedes aegypti
MSLLVRKLGSSAFGSRTSFFLARTLCANAVDAKEIDKLVHNNKVVVFMKGNPEQPRCGFSNAVVQILRMHAVNYDSHDVLQSDALRQAIKDYSNWPTIPQVFINGEFVGGCDIMLQMHQNGELIDELKKVGITSALVDAAGAEEKK

SEQ ID NO: 3283 - DNA, 339 bp, Aedes aegypti
  CDS (1)..(339)
atgggttctttcgtcagtagatctcctcctgccaatatgagtggacctgtagccgaattcgtgaagagcgccatcgccaaagacaaggtggtcattttttccaagacctattgtccgtactgcacaatggccaaagagcctttcaagaagctcaatcaaccagttgcctgctatgaactggatcaaaggaatgatggcgatgaaatccaggtggtactcggaaatttaacaggtgccagaacggtaccaagagtattcataaacgggaattttgtcggcgggggaaccgacattaaaaagatgtactccgatggacggttagaaaaactgttattatag

SEQ ID NO: 3284 - protein, 112 aa, Aedes aegypti
MGSFVSRSPPANMSGPVAEFVKSAIAKDKVVIFSKTYCPYCTMAKEPFKKLNQPVACYELDQRNDGDEIQVVLGNLTGARTVPRVFINGNFVGGGTDIKKMYSDGRLEKLLL

SEQ ID NO: 3285 - DNA, 303 bp, Aedes aegypti
  CDS (1)..(303)
atgagtggacctgtagccgaattcgtgaagagcgccatcgccaaagacaaggtggtcattttttccaagacctattgtccgtactgcacaatggccaaagagcctttcaagaagctcaatcaaccagttgcctgctatgaactggatcaaaggaatgatggcgatgaaatccaggtggtactcggaaatttaacaggtgccagaacggtaccaagagtattcataaacgggaattttgtcggcgggggaaccgacattaaaaagatgtactccgatggacggttagaaaaactgttattatag

SEQ ID NO: 3286 - protein, 100 aa, Aedes aegypti
MSGPVAEFVKSAIAKDKVVIFSKTYCPYCTMAKEPFKKLNQPVACYELDQRNDGDEIQVVLGNLTGARTVPRVFINGNFVGGGTDIKKMYSDGRLEKLLL

SEQ ID NO: 3287 - DNA, 351 bp, Bombyx mori; identical to SEQ ID NO: 2591
  CDS (1)..(351)

SEQ ID NO: 3288 - protein, 116 aa, Bombyx mori; identical to SEQ ID NO: 2592

SEQ ID NO: 3289 - DNA, 405 bp, Oryza sativa (japonica cultivar-group); identical to SEQ ID NO: 2593
  CDS (1)..(405)

SEQ ID NO: 3290 - protein, 134 aa, Oryza sativa (japonica cultivar-group); identical to SEQ ID NO: 2594

SEQ ID NO: 3291 - DNA, 477 bp, Oryza sativa (japonica cultivar-group); identical to SEQ ID NO: 2595
  CDS (1)..(477)

SEQ ID NO: 3292 - protein, 158 aa, Oryza sativa (japonica cultivar-group); identical to SEQ ID NO: 2596

SEQ ID NO: 3293 - DNA, 474 bp, Oryza sativa (japonica cultivar-group)
  CDS (1)..(474)
atggaccgtgtgatgaagctagcatccgagcgtgcggtggtgatcttcaccttgagctcatgctgcatgtgccacaccgtgacacgcctcttctgtgatctcggtgtcaacgcgctagtgcatgagctggaccaagaccctaggggcaaggagatggagagggcactcctcaagctgctcggaagggggccgcctgtgccggtggtgttcattggtgggaagctcgttgggggaaccaacaagatcatgtccctccaccttggagttacaaaggcattctataacatcgatctcttcacaactgaaggggatatatatatttgtttaattaaaagaaccctgttctttctaccaaagtcaagactcaagaggagccaaagcaaaaaagaagtactacaatatggagtgagcaaaagtaatatagtcaagaacaaagcaagaaagaaccactttaatatccacaaagtcttctaa

SEQ ID NO: 3294 - protein, 157 aa, Oryza sativa (japonica cultivar-group)
MDRVMKLASERAVVIFTLSSCCMCHTVTRLFCDLGVNALVHELDQDPRGKEMERALLKLLGRGPPVPVVFIGGKLVGGTNKIMSLHLGVTKAFYNIDLFTTEGDIYICLIKRTLFFLPKSRLKRSQSKKEVLQYGVSKSNIVKNKARKNHFNIHKVF

SEQ ID NO: 3295 - DNA, 309 bp, Arabidopsis thaliana; identical to SEQ ID NO: 2597
  CDS (1)..(309)

SEQ ID NO: 3296 - protein, 102 aa, Arabidopsis thaliana; identical to SEQ ID NO: 2598

SEQ ID NO: 3297 - DNA, 351 bp, Drosophila melanogaster; identical to SEQ ID NO: 2599
  CDS (1)..(351)

SEQ ID NO: 3298 - protein, 116 aa, Drosophila melanogaster; identical to SEQ ID NO: 2600

SEQ ID NO: 3299 - DNA, 345 bp, Drosophila melanogaster; identical to SEQ ID NO: 2967
  CDS (1)..(345)

SEQ ID NO: 3300 - protein, 114 aa, Drosophila melanogaster; identical to SEQ ID NO: 2968

SEQ ID NO: 3301 - DNA, 297 bp, Apis mellifera; identical to SEQ ID NO: 2601
  CDS (1)..(297)

SEQ ID NO: 3302 - protein, 98 aa, Apis mellifera; identical to SEQ ID NO: 2602

SEQ ID NO: 3303 - DNA, 312 bp, Strongylocentrotus purpuratus; identical to SEQ ID NO: 2603
  CDS (1)..(312)

SEQ ID NO: 3304 - protein, 103 aa, Strongylocentrotus purpuratus; identical to SEQ ID NO: 2604

SEQ ID NO: 3305 - DNA, 381 bp, Strongylocentrotus purpuratus; identical to SEQ ID NO: 2605
  CDS (1)..(381)

SEQ ID NO: 3306 - protein, 126 aa, Strongylocentrotus purpuratus; identical to SEQ ID NO: 2606

SEQ ID NO: 3307 - DNA, 321 bp, Strongylocentrotus purpuratus; identical to SEQ ID NO: 2607
  CDS (1)..(321)

SEQ ID NO: 3308 - protein, 106 aa, Strongylocentrotus purpuratus; identical to SEQ ID NO: 2608

SEQ ID NO: 3309 - DNA, 297 bp, Nasonia vitripennis; identical to SEQ ID NO: 2609
  CDS (1)..(297)

SEQ ID NO: 3310 - protein, 98 aa, Nasonia vitripennis; identical to SEQ ID NO: 2610

SEQ ID NO: 3311 - DNA, 429 bp, Nasonia vitripennis
  CDS (1)..(429)
atgctcacctcacgtgtcttcagggctgctcagctacttcgaggatttgcaacgaaaccggaggaaatcggacaactggtcaaaaaaaacaaggttgtggtgttcatgaaaggtgttccagaggagccgaggtgtggattcagtaatgccgttgtgcagatcatgagaatgcatggggttcagtacgatgcgcacgatgttctcaaggacgaaaacctcagacaaggaatcaaagatttctctaactggccaacgataccccaagtatttatcaatggagagtttgtcggaggctgtgacattgtcttgcaaatgcaccagaatggagagcttatcgaagagctgaaaaaggttggaatcaacagtgctcttctaaccaaagaacaggagaaagacagttcgaaatcagacaagggttcgaaggattaa

SEQ ID NO: 3312 - protein, 142 aa, Nasonia vitripennis
MLTSRVFRAAQLLRGFATKPEEIGQLVKKNKVVVFMKGVPEEPRCGFSNAVVQIMRMHGVQYDAHDVLKDENLRQGIKDFSNWPTIPQVFINGEFVGGCDIVLQMHQNGELIEELKKVGINSALLTKEQEKDSSKSDKGSKD

SEQ ID NO: 3313 - DNA, 339 bp, Anopheles gambiae str. PEST; identical to SEQ ID NO: 2611
  CDS (1)..(339)

SEQ ID NO: 3314 - protein, 112 aa, Anopheles gambiae str. PEST; identical to SEQ ID NO: 2612

SEQ ID NO: 3315 - DNA, 438 bp, Anopheles gambiae str. PEST
  CDS (1)..(438)
atgaacgtccttacgcgaaatttggcccaaactctgttcaaatacaatggggccgggttgatccaggcggccgcccgcagcttcagtgcgccggcactggatggcaaggagatcgagaagctggtgagcaacaataaggtggtcgttttcatgaaaggcaacccggacgcaccgcggtgcggcttcagcaatgcggtggtacagatactgcggatgcattcggtcaaatacgacagtcacgatgtgctgcagaatgaagccctccggcaaggcattaaggacttttcgaactggcccaccatcccgcaagtgttcatcaacggagagttcgttggcgggtgcgacatactgctgcagatgcaccaaaacggcgagctgatcgatgagctgaaaaaggccggcatcgagagcgcactggcgaaggagtccgagaagtga

SEQ ID NO: 3316 - protein, 145 aa, Anopheles gambiae str. PEST
MNVLTRNLAQTLFKYNGAGLIQAAARSFSAPALDGKEIEKLVSNNKVVVFMKGNPDAPRCGFSNAVVQILRMHSVKYDSHDVLQNEALRQGIKDFSNWPTIPQVFINGEFVGGCDILLQMHQNGELIDELKKAGIESALAKESEK

SEQ ID NO: 3317 - DNA, 309 bp, Magnaporthe grisea 70-15; identical to SEQ ID NO: 2613
  CDS (1)..(309)

SEQ ID NO: 3318 - protein, 102 aa, Magnaporthe grisea 70-15; identical to SEQ ID NO: 2614

SEQ ID NO: 3319 - DNA, 321 bp, Gibberella zeae PH-1; identical to SEQ ID NO: 2617
  CDS (1)..(321)

SEQ ID NO: 3320 - protein, 106 aa, Gibberella zeae PH-1; identical to SEQ ID NO: 2618

SEQ ID NO: 3321 - DNA, 324 bp, Kluyveromyces lactis NRRL Y-1140
  CDS (1)..(324)
atgccaagtgccgcaacaatcgctcgtgtccaaggtttaatcaactcatctaagatctttgtcgcttcaaagacatactgtccatactgccaagccactttgaaaactttgtttgaagaaaagaaggtggacaaaaagttggctactgttttgcaattgaaccaactagaagatggttccgatattcaggatgctttggcagaaattaccggccaaaagactgttccaaacatctttattaatggcaagcacatcggtggtaactctgatttgcaagagttgaacaactccggtgatttggataagttgttggcttccttataa

SEQ ID NO: 3322 - protein, 107 aa, Kluyveromyces lactis NRRL Y-1140
MPSAATIARVQGLINSSKIFVASKTYCPYCQATLKTLFEEKKVDKKLATVLQLNQLEDGSDIQDALAEITGQKTVPNIFINGKHIGGNSDLQELNNSGDLDKLLASL

SEQ ID NO: 3323 - DNA, 315 bp, Debaryomyces hansenii CBS767; identical to SEQ ID NO: 2623
  CDS (1)..(315)

SEQ ID NO: 3324 - protein, 104 aa, Debaryomyces hansenii CBS767; identical to SEQ ID NO: 2624

SEQ ID NO: 3325 - DNA, 318 bp, Yarrowia lipolytica CLIB122; identical to SEQ ID NO: 2625
  CDS (1)..(318)

SEQ ID NO: 3326 - protein, 105 aa, Yarrowia lipolytica CLIB122; identical to SEQ ID NO: 2626

SEQ ID NO: 3327 - DNA, 309 bp, Aspergillus nidulans FGSC A4; identical to SEQ ID NO: 2629
  CDS (1)..(309)

SEQ ID NO: 3328 - protein, 102 aa, Aspergillus nidulans FGSC A4; identical to SEQ ID NO: 2630

SEQ ID NO: 3329 - DNA, 360 bp, Candida albicans SC5314; identical to SEQ ID NO: 2633
  CDS (1)..(360): transl_table=12

SEQ ID NO: 3330 - protein, 119 aa, Candida albicans SC5314; identical to SEQ ID NO: 2634

SEQ ID NO: 3331 - DNA, 489 bp, Ustilago maydis 521
  CDS (1)..(489)
atgtcggcggttttcagacagagtcttgggttgcttcgatcagcgccagcacgtgggtcgttgctctgcaacccgacgcgtgcatgcttcactccaacctatacatccctcacacggcttctatccacggaggcgcgcgccaagatcgactcggcggtgaaatccaacccgctggtcatcttcatgaagggaacacccgacatgcccatgtgtggcttcagccgcgccgtcatccaagtgatgcaggttcaaggcgtaaaacccgagctgctcaaaactttcaactgtctcgaagaccaggaactgcgtgaaggcatcaaagagtactcggactggcccaccatcccacaagtttacgtcgatggcgaattcgtcggcggctgcgacatcgtgatcaacatgcaccagagcggagagttggaagatctcttagagaagaacggccttttactgcctctgaatgaggaggctgcaaaagcgcaggcttga

SEQ ID NO: 3332 - protein, 162 aa, Ustilago maydis 521
MSAVFRQSLGLLRSAPARGSLLCNPTRACFTPTYTSLTRLLSTEARAKIDSAVKSNPLVIFMKGTPDMPMCGFSRAVIQVMQVQGVKPELLKTFNCLEDQELREGIKEYSDWPTIPQVYVDGEFVGGCDIVINMHQSGELEDLLEKNGLLLPLNEEAAKAQA

SEQ ID NO: 3333 - DNA, 471 bp, Candida albicans SC5314; identical to SEQ ID NO: 2639
  CDS (1)..(471): transl_table=12

SEQ ID NO: 3334 - protein, 156 aa, Candida albicans SC5314; identical to SEQ ID NO: 2640

SEQ ID NO: 3335 - DNA, 309 bp, Tribolium castaneum; identical to SEQ ID NO: 2641
  CDS (1)..(309)

SEQ ID NO: 3336 - protein, 102 aa, Tribolium castaneum; identical to SEQ ID NO: 2642

SEQ ID NO: 3337 - DNA, 450 bp, Tribolium castaneum
  CDS (1)..(450)
atgggggctctcaacgcaacgatatttaagagtacgagtagaaacctgttacaaaatgcgaccactctcgctaggttttatagcacaaaaccggccgaagaaattaaaaaaatggtcaacaataacaaagttgtggtttttatgaagggggttcctgaacagccccggtgtggctttagcaatgcggttgtgcaaattttacgaatgcatggggtgcagtatgaagcccatgatgtcctgtctgatgagtcgctacggcagggtattaaggatttttcaaattggcccacaataccacaggtttttatcaacggcgaatttgtggggggctgtgatataatgctgcaaatgcaccagtcgggggatctgatcgaggagttggagaaggttggcatcaaaagtgcgcttttgttggcgaaggaaaaggaagatgcagaaaagaaatcttaa

SEQ ID NO: 3338 - protein, 149 aa, Tribolium castaneum
MGALNATIFKSTSRNLLQNATTLARFYSTKPAEEIKKMVNNNKVVVFMKGVPEQPRCGFSNAVVQILRMHGVQYEAHDVLSDESLRQGIKDFSNWPTIPQVFINGEFVGGCDIMLQMHQSGDLIEELEKVGIKSALLLAKEKEDAEKKS

SEQ ID NO: 3339 - DNA, 324 bp, Crocosphaera watsonii WH 8501
  CDS (1)..(324): transl_table=11
atgaccccagaactcaaagacagaatcgaccaacttgttaacaataacaaaatcctggtctttatgaagggtgctaagttaatgcctcaatgtggtttctctaataatgtagtacaagttcttaacagcctgggggtttcttatgaaaccgtggacgttttagcggatgaagagattcgtcaaggaattaaagagtattctagctggccaaccattccccaagtctatatcaacggagaatttattggcggtgcggatattgtctacgaaatgtaccaaaaaggtgaactacagcaaatgatagaagtggctttagcttcctaa

SEQ ID NO: 3340 - protein, 107 aa, Crocosphaera watsonii WH 8501
MTPELKDRIDQLVNNNKILVFMKGAKLMPQCGFSNNVVQVLNSLGVSYETVDVLADEEIRQGIKEYSSWPTIPQVYINGEFIGGADIVYEMYQKGELQQMIEVALAS

SEQ ID NO: 3341 - DNA, 384 bp, Medicago truncatula; identical to SEQ ID NO: 2643
  CDS (1)..(384)

SEQ ID NO: 3342 - protein, 127 aa, Medicago truncatula; identical to SEQ ID NO: 2644

SEQ ID NO: 3343 - DNA, 384 bp, Oryza sativa subsp
  CDS (1)..(384)
atggcggcggcggcggccgacgaggagagggaggtgcggagggcggtggaggagaagccggtggtggtggtggggcggcgcgggtgctgcatggcgcacgtcgcgcggcgcctgctgctggggcagggcgcgaacccggcggtgctcgaggtcggcgacgacgccgacccggcggcgctcgtcgacgccgcgctgcaggcccgccggcgcaaggacggcggcgacaaggctgcggcgggcgacggaggcggcggagcggcggtggcgttcccggcggtgttcatcggcgggaggctggtgggcgggctcgatcggctcatggccatgcacatggccggcgagctcgtgccggtcttgaagcaggcaggagccctgtggctctga

SEQ ID NO: 3344 - protein, 127 aa, Oryza sativa subsp
MAAAAADEEREVRRAVEEKPVVVVGRRGCCMAHVARRLLLGQGANPAVLEVGDDADPAALVDAALQARRRKDGGDKAAAGDGGGGAAVAFPAVFIGGRLVGGLDRLMAMHMAGELVPVLKQAGALWL

SEQ ID NO: 3345 - DNA, 315 bp, Oryza sativa subsp
  CDS (1)..(315)
atggcggagagggtggcgcggctgtcgtcgcagagggcggtggtgatcttcggggcgagcaactgcttcatgtgccacgtggtgaagacgctcttctcggagctcggggtgagctgggcggtgcacgaggtggacaaggaccccaacggcaaggacgtcgagagggcgctcgccggaatggtcggccggacgccgccggtgccggccgtcttcatcggcggcaagctcgtcgggcccaccgaccaggtcatgtcgctccacctcgccggcaagctcgtcccgctcctccgcgaagccggcgccctctggctctga

SEQ ID NO: 3346 - protein, 104 aa, Oryza sativa subsp
MAERVARLSSQRAVVIFGASNCFMCHVVKTLFSELGVSWAVHEVDKDPNGKDVERALAGMVGRTPPVPAVFIGGKLVGPTDQVMSLHLAGKLVPLLREAGALWL

SEQ ID NO: 3347 - DNA, 393 bp, Oryza sativa subsp
  CDS (1)..(393)
atgtaccaggcgatcccgtacaacgcgaaccgggcttggccggcggcgagccggccggcgacggcggcgccgccgccgccgccgccgcgtggagaggaggaggaggtgagaagggcggtggcggagtgcccggtggtggtggtgggtcggagcgggtgctgcctgagccacgtcgtgaagcggctgctgcaggggctcggggtcaacccggcggtgcacgaggtcgccggcgaggccgagctcgccggggtggtcgccggcggcggcggcgtcgcgctgccggcggtgttcgtcggcgggaggctcctcggcgggctcgaccggctcatggccgtgcacatctccggcgagctcgtgcccattctgaaggaggccggtgcactctggctctga

SEQ ID NO: 3348 - protein, 130 aa, Oryza sativa subsp
MYQAIPYNANRAWPAASRPATAAPPPPPPRGEEEEVRRAVAECPVVVVGRSGCCLSHVVKRLLQGLGVNPAVHEVAGEAELAGVVAGGGGVALPAVFVGGRLLGGLDRLMAVHISGELVPILKEAGALWL

SEQ ID NO: 3349 - DNA, 306 bp, Vitis vinifera; identical to SEQ ID NO: 2645
  CDS (1)..(306)
  misc_feature (225)..(225): r is g or a
  misc_feature (273)..(273): y is t or c

SEQ ID NO: 3350 - protein, 101 aa, Vitis vinifera; identical to SEQ ID NO: 2646

SEQ ID NO: 3351 - DNA, 324 bp, Vitis vinifera; identical to SEQ ID NO: 2647
  CDS (1)..(324)

SEQ ID NO: 3352 - protein, 107 aa, Vitis vinifera; identical to SEQ ID NO: 2648

SEQ ID NO: 3353 - DNA, 321 bp, Vitis vinifera; identical to SEQ ID NO: 2649
  CDS (1)..(321)

SEQ ID NO: 3354 - protein, 106 aa, Vitis vinifera; identical to SEQ ID NO: 2650

SEQ ID NO: 3355 - DNA, 345 bp, Vitis vinifera; identical to SEQ ID NO: 2651
  CDS (1)..(345)

SEQ ID NO: 3356 - protein, 114 aa, Vitis vinifera; identical to SEQ ID NO: 2652

SEQ ID NO: 3357 - DNA, 414 bp, Vitis vinifera; identical to SEQ ID NO: 2653
  CDS (1)..(414)
  misc_feature (18)..(18): y is t or c
  misc_feature (63)..(63): m is a or c

SEQ ID NO: 3358 - protein, 137 aa, Vitis vinifera; identical to SEQ ID NO: 2654

SEQ ID NO: 3359 - DNA, 342 bp, Pichia guilliermondii
  CDS (1)..(342)
atgttagggtacttgctttcctggttcaaaagtgaaccatcatctcctgaagtcatcagcaaggtccaaagtttgatcaatgcaaacaaaattgtggttttttcaaaatcttactgtccatattgctcacaaaccaagcaattgttgaaccaagttggagccagtgacgtgaacattattgagttgaacaatgtttctgatggagctgctatgcaaaatgcattgcaagagattaccggacaaagaactgtacccaacacttttataaaccaaaaacatattggaggaaacagtgaattgcagcagttgcaccgtgcaaacaaacttgtgccaatgttgtag

SEQ ID NO: 3360 - protein, 113 aa, Pichia guilliermondii
MLGYLLSWFKSEPSSPEVISKVQSLINANKIVVFSKSYCPYCSQTKQLLNQVGASDVNIIELNNVSDGAAMQNALQEITGQRTVPNTFINQKHIGGNSELQQLHRANKLVPML

SEQ ID NO: 3361 - DNA, 315 bp, Fritillaria agrestis; identical to SEQ ID NO: 2655
  CDS (1)..(315)

SEQ ID NO: 3362 - protein, 104 aa, Fritillaria agrestis; identical to SEQ ID NO: 2656

SEQ ID NO: 3363 - DNA, 405 bp, Mesembryanthemum crystallinum; identical to SEQ ID NO: 3017
  CDS (1)..(405)

SEQ ID NO: 3364 - protein, 134 aa, Mesembryanthemum crystallinum; identical to SEQ ID NO: 3018

SEQ ID NO: 3365 - DNA, 402 bp, Thellungiella halophila; identical to SEQ ID NO: 2657
  CDS (1)..(402)

SEQ ID NO: 3366 - protein, 133 aa, Thellungiella halophila; identical to SEQ ID NO: 2658

SEQ ID NO: 3367 - DNA, 309 bp, Plantago major; identical to SEQ ID NO: 2659
  CDS (1)..(309)

SEQ ID NO: 3368 - protein, 102 aa, Plantago major; identical to SEQ ID NO: 2660

SEQ ID NO: 3369 - DNA, 312 bp, Musa acuminata; identical to SEQ ID NO: 3023
  CDS (1)..(312)

SEQ ID NO: 3370 - protein, 103 aa, Musa acuminata; identical to SEQ ID NO: 3024

SEQ ID NO: 3371 - DNA, 312 bp, Unknown; identical to SEQ ID NO: 2661
  Unidentified
  CDS (1)..(312)

SEQ ID NO: 3372 - protein, 103 aa, Unknown; identical to SEQ ID NO: 2662
  Unidentified

SEQ ID NO: 3373 - DNA, 339 bp, Aedes aegypti
  CDS (1)..(339)
atgggttctttcgtcagtagatctcctcctgccaatatgagtggacctgtagccgaattcgtgaagagcgccatcgccaaagacaaggtggtcattttttccaagacctattgtccgtactgcacaatggccaaagagcctttcaagaagctcaatcaaccagttgcctgctatgaactggatcaaaggaatgatggcgatgaaatccaggtggtactcggaaatttaacaggtgccagaacggtaccaagagtattcataaacgggaattttgtcggcgggggaaccgacattaaaaagatgtactccgatggacggttagaaaaaatgttattatag

SEQ ID NO: 3374 - protein, 112 aa, Aedes aegypti
MGSFVSRSPPANMSGPVAEFVKSAIAKDKVVIFSKTYCPYCTMAKEPFKKLNQPVACYELDQRNDGDEIQVVLGNLTGARTVPRVFINGNFVGGGTDIKKMYSDGRLEKMLL

SEQ ID NO: 3375 - DNA, 450 bp, Medicago truncatula; identical to SEQ ID NO: 2663
  CDS (1)..(450)

SEQ ID NO: 3376 - protein, 149 aa, Medicago truncatula; identical to SEQ ID NO: 2664

SEQ ID NO: 3377 - DNA, 357 bp, Medicago truncatula; identical to SEQ ID NO: 2665
  CDS (1)..(357)

SEQ ID NO: 3378 - protein, 118 aa, Medicago truncatula; identical to SEQ ID NO: 2666

SEQ ID NO: 3379 - DNA, 384 bp, Medicago truncatula; identical to SEQ ID NO: 2667
  CDS (1)..(384)

SEQ ID NO: 3380 - protein, 127 aa, Medicago truncatula; identical to SEQ ID NO: 2668

SEQ ID NO: 3381 - DNA, 366 bp, Medicago truncatula; identical to SEQ ID NO: 2669
  CDS (1)..(366)

SEQ ID NO: 3382 - protein, 121 aa, Medicago truncatula; identical to SEQ ID NO: 2670

SEQ ID NO: 3383 - DNA, 399 bp, Beta vulgaris; identical to SEQ ID NO: 2671
  CDS (1)..(399)

SEQ ID NO: 3384 - protein, 132 aa, Beta vulgaris; identical to SEQ ID NO: 2672

SEQ ID NO: 3385 - DNA, 321 bp, Beta vulgaris; identical to SEQ ID NO: 2673
  CDS (1)..(321)

SEQ ID NO: 3386 - protein, 106 aa, Beta vulgaris; identical to SEQ ID NO: 2674

SEQ ID NO: 3387 - DNA, 309 bp, Beta vulgaris; identical to SEQ ID NO: 2675
  CDS (1)..(309)

SEQ ID NO: 3388 - protein, 102 aa, Beta vulgaris; identical to SEQ ID NO: 2676

SEQ ID NO: 3389 - DNA, 309 bp, Beta vulgaris; identical to SEQ ID NO: 2677
  CDS (1)..(309)

SEQ ID NO: 3390 - protein, 102 aa, Beta vulgaris; identical to SEQ ID NO: 2678

SEQ ID NO: 3391 - DNA, 309 bp, Beta vulgaris; identical to SEQ ID NO: 2679
  CDS (1)..(309)

SEQ ID NO: 3392 - protein, 102 aa, Beta vulgaris; identical to SEQ ID NO: 2680

SEQ ID NO: 3393 - DNA, 492 bp, Aspergillus oryzae; identical to SEQ ID NO: 2681
  CDS (1)..(492)

SEQ ID NO: 3394 - protein, 163 aa, Aspergillus oryzae; identical to SEQ ID NO: 2682

SEQ ID NO: 3395 - DNA, 309 bp, Aspergillus oryzae; identical to SEQ ID NO: 2683
  CDS (1)..(309)

SEQ ID NO: 3396 - protein, 102 aa, Aspergillus oryzae; identical to SEQ ID NO: 2684

SEQ ID NO: 3397 - DNA, 381 bp, Populus tremula x Populus tremuloides; identical to SEQ ID NO: 2685
  CDS (1)..(381)

SEQ ID NO: 3398 - protein, 126 aa, Populus tremula x Populus tremuloides; identical to SEQ ID NO: 2686

SEQ ID NO: 3399 - DNA, 318 bp, Plantago major; identical to SEQ ID NO: 2687
  CDS (1)..(318)

SEQ ID NO: 3400 - protein, 105 aa, Plantago major; identical to SEQ ID NO: 2688

SEQ ID NO: 3401 - DNA, 342 bp, Triticum aestivum; identical to SEQ ID NO: 2689
  CDS (1)..(342)

SEQ ID NO: 3402 - protein, 113 aa, Triticum aestivum; identical to SEQ ID NO: 2690

SEQ ID NO: 3403 - DNA, 420 bp, Populus tremula x Populus tremuloides; identical to SEQ ID NO: 2691
  CDS (1)..(420)

SEQ ID NO: 3404 - protein, 139 aa, Populus tremula x Populus tremuloides; identical to SEQ ID NO: 2692

SEQ ID NO: 3405 - DNA, 348 bp, Tilia platyphyllos; identical to SEQ ID NO: 2693
  CDS (1)..(348)

SEQ ID NO: 3406 - protein, 115 aa, Tilia platyphyllos; identical to SEQ ID NO: 2694

SEQ ID NO: 3407 - DNA, 342 bp, Deschampsia antarctica; identical to SEQ ID NO: 2695
  CDS (1)..(342)

SEQ ID NO: 3408 - protein, 113 aa, Deschampsia antarctica; identical to SEQ ID NO: 2696

SEQ ID NO: 3409 - DNA, 327 bp, Solanum lycopersicum; identical to SEQ ID NO: 2701
  CDS (1)..(327)

SEQ ID NO: 3410 - protein, 108 aa, Solanum lycopersicum; identical to SEQ ID NO: 2702

SEQ ID NO: 3411 - DNA, 315 bp, Vernicia fordii; identical to SEQ ID NO: 2703
  CDS (1)..(315)

SEQ ID NO: 3412 - protein, 104 aa, Vernicia fordii; identical to SEQ ID NO: 2704

SEQ ID NO: 3413 - DNA, 447 bp, Arabidopsis thaliana; identical to SEQ ID NO: 2705
  CDS (1)..(447)

SEQ ID NO: 3414 - protein, 148 aa, Arabidopsis thaliana; identical to SEQ ID NO: 2706

SEQ ID NO: 3415 - DNA, 312 bp, Arabidopsis thaliana; identical to SEQ ID NO: 2707
  CDS (1)..(312)

SEQ ID NO: 3416 - protein, 103 aa, Arabidopsis thaliana; identical to SEQ ID NO: 2708

SEQ ID NO: 3417 - DNA, 312 bp, Arabidopsis thaliana; identical to SEQ ID NO: 2709
  CDS (1)..(312)

SEQ ID NO: 3418 - protein, 103 aa, Arabidopsis thaliana; identical to SEQ ID NO: 2710

SEQ ID NO: 3419 - DNA, 309 bp, Arabidopsis thaliana; identical to SEQ ID NO: 2711
  CDS (1)..(309)

SEQ ID NO: 3420 - protein, 102 aa, Arabidopsis thaliana; identical to SEQ ID NO: 2712

SEQ ID NO: 3421 - DNA, 309 bp, Arabidopsis thaliana; identical to SEQ ID NO: 2713
  CDS (1)..(309)

SEQ ID NO: 3422 - protein, 102 aa, Arabidopsis thaliana; identical to SEQ ID NO: 2714

SEQ ID NO: 3423 - DNA, 300 bp, Arabidopsis thaliana; identical to SEQ ID NO: 2715
  CDS (1)..(300)

SEQ ID NO: 3424 - protein, 99 aa, Arabidopsis thaliana; identical to SEQ ID NO: 2716

SEQ ID NO: 3425 - DNA, 540 bp, Arabidopsis thaliana; identical to SEQ ID NO: 2717
  CDS (1)..(540)

SEQ ID NO: 3426 - protein, 179 aa, Arabidopsis thaliana; identical to SEQ ID NO: 2718

SEQ ID NO: 3427 - DNA, 453 bp, Arabidopsis thaliana; identical to SEQ ID NO: 2719
  CDS (1)..(453)

SEQ ID NO: 3428 - protein, 150 aa, Arabidopsis thaliana; identical to SEQ ID NO: 2720

SEQ ID NO: 3429 - DNA, 378 bp, Arabidopsis thaliana; identical to SEQ ID NO: 2721
  CDS (1)..(378)

SEQ ID NO: 3430 - protein, 125 aa, Arabidopsis thaliana; identical to SEQ ID NO: 2722

SEQ ID NO: 3431 - DNA, 336 bp, Arabidopsis thaliana; identical to SEQ ID NO: 2723
  CDS (1)..(336)

SEQ ID NO: 3432 - protein, 111 aa, Arabidopsis thaliana; identical to SEQ ID NO: 2724

SEQ ID NO: 3433 - DNA, 408 bp, Arabidopsis thaliana; identical to SEQ ID NO: 2727
  CDS (1)..(408)

SEQ ID NO: 3434 - protein, 135 aa, Arabidopsis thaliana; identical to SEQ ID NO: 2728

SEQ ID NO: 3435 - DNA, 525 bp, Arabidopsis thaliana; identical to SEQ ID NO: 2729
  CDS (1)..(525)

SEQ ID NO: 3436 - protein, 174 aa, Arabidopsis thaliana; identical to SEQ ID NO: 2730

SEQ ID NO: 3437 - DNA, 435 bp, Arabidopsis thaliana; identical to SEQ ID NO: 2731
  CDS (1)..(435)

SEQ ID NO: 3438 - protein, 144 aa, Arabidopsis thaliana; identical to SEQ ID NO: 2732

SEQ ID NO: 3439 - DNA, 411 bp, Arabidopsis thaliana; identical to SEQ ID NO: 2733
  CDS (1)..(411)

SEQ ID NO: 3440 - protein, 136 aa, Arabidopsis thaliana; identical to SEQ ID NO: 2734

SEQ ID NO: 3441 - DNA, 423 bp, Arabidopsis thaliana; identical to SEQ ID NO: 2735
  CDS (1)..(423)

SEQ ID NO: 3442 - protein, 140 aa, Arabidopsis thaliana; identical to SEQ ID NO: 2736

SEQ ID NO: 3443 - DNA, 414 bp, Arabidopsis thaliana; identical to SEQ ID NO: 2737
  CDS (1)..(414)

SEQ ID NO: 3444 - protein, 137 aa, Arabidopsis thaliana; identical to SEQ ID NO: 2738

SEQ ID NO: 3445 - DNA, 309 bp, Arabidopsis thaliana; identical to SEQ ID NO: 2739
  CDS (1)..(309)

SEQ ID NO: 3446 - protein, 102 aa, Arabidopsis thaliana; identical to SEQ ID NO: 2740

SEQ ID NO: 3447 - DNA, 309 bp, Arabidopsis thaliana; identical to SEQ ID NO: 2741
  CDS (1)..(309)

SEQ ID NO: 3448 - protein, 102 aa, Arabidopsis thaliana; identical to SEQ ID NO: 2742

SEQ ID NO: 3449 - DNA, 309 bp, Arabidopsis thaliana; identical to SEQ ID NO: 2743
  CDS (1)..(309)

SEQ ID NO: 3450 - protein, 102 aa, Arabidopsis thaliana; identical to SEQ ID NO: 2744

SEQ ID NO: 3451 - DNA, 309 bp, Arabidopsis thaliana; identical to SEQ ID NO: 2745
  CDS (1)..(309)

SEQ ID NO: 3452 - protein, 102 aa, Arabidopsis thaliana; identical to SEQ ID NO: 2746

SEQ ID NO: 3453 - DNA, 309 bp, Arabidopsis thaliana; identical to SEQ ID NO: 2573
  CDS (1)..(309)

SEQ ID NO: 3454 - protein, 102 aa, Arabidopsis thaliana; identical to SEQ ID NO: 2574

SEQ ID NO: 3455 - DNA, 309 bp, Arabidopsis thaliana; identical to SEQ ID NO: 2749
  CDS (1)..(309)

SEQ ID NO: 3456 - protein, 102 aa, Arabidopsis thaliana; identical to SEQ ID NO: 2750

SEQ ID NO: 3457 - DNA, 309 bp, Arabidopsis thaliana; identical to SEQ ID NO: 2751
  CDS (1)..(309)

SEQ ID NO: 3458 - protein, 102 aa, Arabidopsis thaliana; identical to SEQ ID NO: 2752

SEQ ID NO: 3459 - DNA, 378 bp, Oryza sativa; identical to SEQ ID NO: 2753
  CDS (1)..(378)

SEQ ID NO: 3460 - protein, 125 aa, Oryza sativa; identical to SEQ ID NO: 2754

SEQ ID NO: 3461 - DNA, 411 bp, Oryza sativa; identical to SEQ ID NO: 3119
  CDS (1)..(411)

SEQ ID NO: 3462 - protein, 136 aa, Oryza sativa; identical to SEQ ID NO: 3120

SEQ ID NO: 3463 - DNA, 312 bp, Oryza sativa; identical to SEQ ID NO: 2755
  CDS (1)..(312)

SEQ ID NO: 3464 - protein, 103 aa, Oryza sativa; identical to SEQ ID NO: 2756

SEQ ID NO: 3465 - DNA, 444 bp, Oryza sativa; identical to SEQ ID NO: 2757
  CDS (1)..(444)

SEQ ID NO: 3466 - protein, 147 aa, Oryza sativa; identical to SEQ ID NO: 2758

SEQ ID NO: 3467 - DNA, 378 bp, Oryza sativa; identical to SEQ ID NO: 2759
  CDS (1)..(378)

SEQ ID NO: 3468 - protein, 125 aa, Oryza sativa; identical to SEQ ID NO: 2760

SEQ ID NO: 3469 - DNA, 408 bp, Oryza sativa; identical to SEQ ID NO: 2761
  CDS (1)..(408)

SEQ ID NO: 3470 - protein, 135 aa, Oryza sativa; identical to SEQ ID NO: 2762

SEQ ID NO: 3471 - DNA, 402 bp, Oryza sativa; identical to SEQ ID NO: 2763
  CDS (1)..(402)

SEQ ID NO: 3472 - protein, 133 aa, Oryza sativa; identical to SEQ ID NO: 2764

SEQ ID NO: 3473 - DNA, 396 bp, Oryza sativa; identical to SEQ ID NO: 3111
  CDS (1)..(396)

SEQ ID NO: 3474 - protein, 131 aa, Oryza sativa; identical to SEQ ID NO: 3112

SEQ ID NO: 3475 - DNA, 408 bp, Oryza sativa; identical to SEQ ID NO: 2765
  CDS (1)..(408)

SEQ ID NO: 3476 - protein, 135 aa, Oryza sativa; identical to SEQ ID NO: 2766

SEQ ID NO: 3477 - DNA, 384 bp, Oryza sativa; identical to SEQ ID NO: 2767
  CDS (1)..(384)

SEQ ID NO: 3478 - protein, 127 aa, Oryza sativa; identical to SEQ ID NO: 2768

SEQ ID NO: 3479 - DNA, 345 bp, Oryza sativa; identical to SEQ ID NO: 2769
  CDS (1)..(345)

SEQ ID NO: 3480 - protein, 114 aa, Oryza sativa; identical to SEQ ID NO: 2770

SEQ ID NO: 3481 - DNA, 417 bp, Oryza sativa; identical to SEQ ID NO: 2771
  CDS (1)..(417)

SEQ ID NO: 3482 - protein, 138 aa, Oryza sativa; identical to SEQ ID NO: 2772

SEQ ID NO: 3483 - DNA, 399 bp, Oryza sativa; identical to SEQ ID NO: 2773
  CDS (1)..(399)

SEQ ID NO: 3484 - protein, 132 aa, Oryza sativa; identical to SEQ ID NO: 2774

SEQ ID NO: 3485 - DNA, 411 bp, Oryza sativa; identical to SEQ ID NO: 2775
  CDS (1)..(411)

SEQ ID NO: 3486 - protein, 136 aa, Oryza sativa; identical to SEQ ID NO: 2776

SEQ ID NO: 3487 - DNA, 579 bp, Oryza sativa; identical to SEQ ID NO: 2777
  CDS (1)..(579)

SEQ ID NO: 3488 - protein, 192 aa, Oryza sativa; identical to SEQ ID NO: 2778

SEQ ID NO: 3489 - DNA, 495 bp, Oryza sativa; identical to SEQ ID NO: 2779
  CDS (1)..(495)

SEQ ID NO: 3490 - protein, 164 aa, Oryza sativa; identical to SEQ ID NO: 2780

SEQ ID NO: 3491 - DNA, 327 bp, Oryza sativa; identical to SEQ ID NO: 2781
  CDS (1)..(327)

SEQ ID NO: 3492 - protein, 108 aa, Oryza sativa; identical to SEQ ID NO: 2782

SEQ ID NO: 3493 - DNA, 330 bp, Oryza sativa; identical to SEQ ID NO: 2783
  CDS (1)..(330)

SEQ ID NO: 3494 - protein, 109 aa, Oryza sativa; identical to SEQ ID NO: 2784

SEQ ID NO: 3495 - DNA, 330 bp, Oryza sativa; identical to SEQ ID NO: 2785
  CDS (1)..(330)

SEQ ID NO: 3496 - protein, 109 aa, Oryza sativa; identical to SEQ ID NO: 2786

SEQ ID NO: 3497 - DNA, 330 bp, Oryza sativa; identical to SEQ ID NO: 2787
  CDS (1)..(330)

SEQ ID NO: 3498 - protein, 109 aa, Oryza sativa; identical to SEQ ID NO: 2788

SEQ ID NO: 3499 - DNA, 312 bp, Oryza sativa; identical to SEQ ID NO: 2789
  CDS (1)..(312)

SEQ ID NO: 3500 - protein, 103 aa, Oryza sativa; identical to SEQ ID NO: 2790

SEQ ID NO: 3501 - DNA, 315 bp, Oryza sativa; identical to SEQ ID NO: 2791
  CDS (1)..(315)

SEQ ID NO: 3502 - protein, 104 aa, Oryza sativa; identical to SEQ ID NO: 2792

SEQ ID NO: 3503 - DNA, 309 bp, Brassica napus; identical to SEQ ID NO: 2793
  CDS (1)..(309)

SEQ ID NO: 3504 - protein, 102 aa, Brassica napus; identical to SEQ ID NO: 2794

SEQ ID NO: 3505 - DNA, 537 bp, Brassica napus; identical to SEQ ID NO: 3157
  CDS (1)..(537)

SEQ ID NO: 3506 - protein, 178 aa, Brassica napus; identical to SEQ ID NO: 3158

SEQ ID NO: 3507 - DNA, 309 bp, Brassica napus; identical to SEQ ID NO: 2795
  CDS (1)..(309)

SEQ ID NO: 3508 - protein, 102 aa, Brassica napus; identical to SEQ ID NO: 2796

SEQ ID NO: 3509 - DNA, 309 bp, Brassica napus; identical to SEQ ID NO: 2797
  CDS (1)..(309)

SEQ ID NO: 3510 - protein, 102 aa, Brassica napus; identical to SEQ ID NO: 2798

SEQ ID NO: 3511 - DNA, 309 bp, Brassica napus; identical to SEQ ID NO: 2799
  CDS (1)..(309)

SEQ ID NO: 3512 - protein, 102 aa, Brassica napus; identical to SEQ ID NO: 2800

SEQ ID NO: 3513 - DNA, 309 bp, Brassica napus; identical to SEQ ID NO: 2801
  CDS (1)..(309)

SEQ ID NO: 3514 - protein, 102 aa, Brassica napus; identical to SEQ ID NO: 2802

SEQ ID NO: 3515 - DNA, 318 bp, Brassica napus; identical to SEQ ID NO: 2803
  CDS (1)..(318)

SEQ ID NO: 3516 - protein, 105 aa, Brassica napus; identical to SEQ ID NO: 2804

SEQ ID NO: 3517 - DNA, 300 bp, Brassica napus; identical to SEQ ID NO: 2805
  CDS (1)..(300)

SEQ ID NO: 3518 - protein, 99 aa, Brassica napus; identical to SEQ ID NO: 2806

SEQ ID NO: 3519 - DNA, 309 bp, Brassica napus; identical to SEQ ID NO: 2807
  CDS (1)..(309)

SEQ ID NO: 3520 - protein, 102 aa, Brassica napus; identical to SEQ ID NO: 2808

SEQ ID NO: 3521 - DNA, 519 bp, Brassica napus; identical to SEQ ID NO: 2809
  CDS (1)..(519)

SEQ ID NO: 3522 - protein, 172 aa, Brassica napus; identical to SEQ ID NO: 2810

SEQ ID NO: 3523 - DNA, 306 bp, Glycine max; identical to SEQ ID NO: 2811
  CDS (1)..(306)

SEQ ID NO: 3524 - protein, 101 aa, Glycine max; identical to SEQ ID NO: 2812

SEQ ID NO: 3525 - DNA, 315 bp, Triticum aestivum; identical to SEQ ID NO: 2813
  CDS (1)..(315)

SEQ ID NO: 3526 - protein, 104 aa, Triticum aestivum; identical to SEQ ID NO: 2814

SEQ ID NO: 3527 - DNA, 306 bp, Glycine max; identical to SEQ ID NO: 2815
  CDS (1)..(306)

SEQ ID NO: 3528 - protein, 101 aa, Glycine max; identical to SEQ ID NO: 2816

SEQ ID NO: 3529 - DNA, 309 bp, Brassica napus; identical to SEQ ID NO: 2817
  CDS (1)..(309)

SEQ ID NO: 3530 - protein, 102 aa, Brassica napus; identical to SEQ ID NO: 2818

SEQ ID NO: 3531 - DNA, 309 bp, Brassica napus; identical to SEQ ID NO: 2819
  CDS (1)..(309)

SEQ ID NO: 3532 - protein, 102 aa, Brassica napus; identical to SEQ ID NO: 2820

SEQ ID NO: 3533 - DNA, 399 bp, Glycine max; identical to SEQ ID NO: 2821
  CDS (1)..(399)

SEQ ID NO: 3534 - protein, 132 aa, Glycine max; identical to SEQ ID NO: 2822

SEQ ID NO: 3535 - DNA, 312 bp, Triticum aestivum; identical to SEQ ID NO: 2823
  CDS (1)..(312)

SEQ ID NO: 3536 - protein, 103 aa, Triticum aestivum; identical to SEQ ID NO: 2824

SEQ ID NO: 3537 - DNA, 414 bp, Triticum aestivum; identical to SEQ ID NO: 2825
  CDS (1)..(414)

SEQ ID NO: 3538 - protein, 137 aa, Triticum aestivum; identical to SEQ ID NO: 2826

SEQ ID NO: 3539 - DNA, 414 bp, Zea mays; identical to SEQ ID NO: 2827
  CDS (1)..(414)

SEQ ID NO: 3540 - protein, 137 aa, Zea mays; identical to SEQ ID NO: 2828

SEQ ID NO: 3541 - DNA, 468 bp, Zea mays; identical to SEQ ID NO: 2829
  CDS (1)..(468)

SEQ ID NO: 3542 - protein, 155 aa, Zea mays; identical to SEQ ID NO: 2830

SEQ ID NO: 3543 - DNA, 312 bp, Zea mays; identical to SEQ ID NO: 2585
  CDS (1)..(312)

SEQ ID NO: 3544 - protein, 103 aa, Zea mays; identical to SEQ ID NO: 2586

SEQ ID NO: 3545 - DNA, 504 bp, Zea mays; identical to SEQ ID NO: 2831
  CDS (1)..(504)

SEQ ID NO: 3546 - protein, 167 aa, Zea mays; identical to SEQ ID NO: 2832

SEQ ID NO: 3547 - DNA, 312 bp, Hordeum vulgare; identical to SEQ ID NO: 2833
  CDS (1)..(312)

SEQ ID NO: 3548 - protein, 103 aa, Hordeum vulgare; identical to SEQ ID NO: 2834

SEQ ID NO: 3549 - DNA, 393 bp, Hordeum vulgare; identical to SEQ ID NO: 2835
  CDS (1)..(393)

SEQ ID NO: 3550 - protein, 130 aa, Hordeum vulgare; identical to SEQ ID NO: 2836

SEQ ID NO: 3551 - DNA, 378 bp, Brassica napus; identical to SEQ ID NO: 2837
  CDS (1)..(378)

SEQ ID NO: 3552 - protein, 125 aa, Brassica napus; identical to SEQ ID NO: 2838

SEQ ID NO: 3553 - DNA, 522 bp, Brassica napus; identical to SEQ ID NO: 2839
  CDS (1)..(522)

SEQ ID NO: 3554 - protein, 173 aa, Brassica napus; identical to SEQ ID NO: 2840

SEQ ID NO: 3555 - DNA, 525 bp, Brassica napus; identical to SEQ ID NO: 2841
  CDS (1)..(525)

SEQ ID NO: 3556 - protein, 174 aa, Brassica napus; identical to SEQ ID NO: 2842

SEQ ID NO: 3557 - DNA, 309 bp, Brassica napus; identical to SEQ ID NO: 2843
  CDS (1)..(309)

SEQ ID NO: 3558 - protein, 102 aa, Brassica napus; identical to SEQ ID NO: 2844

SEQ ID NO: 3559 - DNA, 309 bp, Brassica napus; identical to SEQ ID NO: 2845
  CDS (1)..(309)

SEQ ID NO: 3560 - protein, 102 aa, Brassica napus; identical to SEQ ID NO: 2846

SEQ ID NO: 3561 - DNA, 522 bp, Brassica napus; identical to SEQ ID NO: 2847
  CDS (1)..(522)

SEQ ID NO: 3562 - protein, 173 aa, Brassica napus; identical to SEQ ID NO: 2848

SEQ ID NO: 3563 - DNA, 435 bp, Brassica napus; identical to SEQ ID NO: 2849
  CDS (1)..(435)

SEQ ID NO: 3564 - protein, 144 aa, Brassica napus; identical to SEQ ID NO: 2850

SEQ ID NO: 3565 - DNA, 435 bp, Brassica napus; identical to SEQ ID NO: 2851
  CDS (1)..(435)

SEQ ID NO: 3566 - protein, 144 aa, Brassica napus; identical to SEQ ID NO: 2852

SEQ ID NO: 3567 - DNA, 309 bp, Brassica napus; identical to SEQ ID NO: 2853
  CDS (1)..(309)

SEQ ID NO: 3568 - protein, 102 aa, Brassica napus; identical to SEQ ID NO: 2854

SEQ ID NO: 3569 - DNA, 300 bp, Brassica napus; identical to SEQ ID NO: 2855
  CDS (1)..(300)

SEQ ID NO: 3570 - protein, 99 aa, Brassica napus; identical to SEQ ID NO: 2856

SEQ ID NO: 3571 - DNA, 363 bp, Brassica napus; identical to SEQ ID NO: 2857
  CDS (1)..(363)

SEQ ID NO: 3572 - protein, 120 aa, Brassica napus; identical to SEQ ID NO: 2858

SEQ ID NO: 3573 - DNA, 336 bp, Brassica napus; identical to SEQ ID NO: 2859
  CDS (1)..(336)

SEQ ID NO: 3574 - protein, 111 aa, Brassica napus; identical to SEQ ID NO: 2860

SEQ ID NO: 3575 - DNA, 309 bp, Brassica napus; identical to SEQ ID NO: 2861
  CDS (1)..(309)

SEQ ID NO: 3576 - protein, 102 aa, Brassica napus; identical to SEQ ID NO: 2862

SEQ ID NO: 3577 - DNA, 522 bp, Brassica napus; identical to SEQ ID NO: 2863
  CDS (1)..(522)

SEQ ID NO: 3578 - protein, 173 aa, Brassica napus; identical to SEQ ID NO: 2864

SEQ ID NO: 3579 - DNA, 309 bp, Brassica napus; identical to SEQ ID NO: 2865
  CDS (1)..(309)

SEQ ID NO: 3580 - protein, 102 aa, Brassica napus; identical to SEQ ID NO: 2866

SEQ ID NO: 3581 - DNA, 300 bp, Brassica napus; identical to SEQ ID NO: 2867
  CDS (1)..(300)

SEQ ID NO: 3582 - protein, 99 aa, Brassica napus; identical to SEQ ID NO: 2868

SEQ ID NO: 3583 - DNA, 309 bp, Brassica napus; identical to SEQ ID NO: 2869
  CDS (1)..(309)

SEQ ID NO: 3584 - protein, 102 aa, Brassica napus; identical to SEQ ID NO: 2870

SEQ ID NO: 3585 - DNA, 309 bp, Brassica napus; identical to SEQ ID NO: 2871
  CDS (1)..(309)

SEQ ID NO: 3586 - protein, 102 aa, Brassica napus; identical to SEQ ID NO: 2872

SEQ ID NO: 3587 - DNA, 309 bp, Brassica napus; identical to SEQ ID NO: 2873
  CDS (1)..(309)

SEQ ID NO: 3588 - protein, 102 aa, Brassica napus; identical to SEQ ID NO: 2874

SEQ ID NO: 3589 - DNA, 312 bp, Brassica napus; identical to SEQ ID NO: 2875
  CDS (1)..(312)

SEQ ID NO: 3590 - protein, 103 aa, Brassica napus; identical to SEQ ID NO: 2876

SEQ ID NO: 3591 - DNA, 426 bp, Brassica napus; identical to SEQ ID NO: 2877
  CDS (1)..(426)

SEQ ID NO: 3592 - protein, 141 aa, Brassica napus; identical to SEQ ID NO: 2878

SEQ ID NO: 3593 - DNA, 309 bp, Brassica napus; identical to SEQ ID NO: 2879
  CDS (1)..(309)

SEQ ID NO: 3594 - protein, 102 aa, Brassica napus; identical to SEQ ID NO: 2880

SEQ ID NO: 3595 - DNA, 333 bp, Glycine max; identical to SEQ ID NO: 2881
  CDS (1)..(333)

SEQ ID NO: 3596 - protein, 110 aa, Glycine max; identical to SEQ ID NO: 2882

SEQ ID NO: 3597 - DNA, 324 bp, Glycine max; identical to SEQ ID NO: 2883
  CDS (1)..(324)

SEQ ID NO: 3598 - protein, 107 aa, Glycine max; identical to SEQ ID NO: 2884

SEQ ID NO: 3599 - DNA, 501 bp, Glycine max; identical to SEQ ID NO: 2885
  CDS (1)..(501)

SEQ ID NO: 3600 - protein, 166 aa, Glycine max; identical to SEQ ID NO: 2886

SEQ ID NO: 3601 - DNA, 399 bp, Glycine max; identical to SEQ ID NO: 2887
  CDS (1)..(399)

SEQ ID NO: 3602 - protein, 132 aa, Glycine max; identical to SEQ ID NO: 2888

SEQ ID NO: 3603 - DNA, 309 bp, Glycine max; identical to SEQ ID NO: 2889
  CDS (1)..(309)

SEQ ID NO: 3604 - protein, 102 aa, Glycine max; identical to SEQ ID NO: 2890

SEQ ID NO: 3605 - DNA, 525 bp, Glycine max; identical to SEQ ID NO: 2891
  CDS (1)..(525)

SEQ ID NO: 3606 - protein, 174 aa, Glycine max; identical to SEQ ID NO: 2892

SEQ ID NO: 3607 - DNA, 483 bp, Glycine max; identical to SEQ ID NO: 2893
  CDS (1)..(483)

SEQ ID NO: 3608 - protein, 160 aa, Glycine max; identical to SEQ ID NO: 2894

SEQ ID NO: 3609 - DNA, 522 bp, Glycine max; identical to SEQ ID NO: 2895
  CDS (1)..(522)

SEQ ID NO: 3610 - protein, 173 aa, Glycine max; identical to SEQ ID NO: 2896

SEQ ID NO: 3611 - DNA, 411 bp, Glycine max; identical to SEQ ID NO: 2897
  CDS (1)..(411)

SEQ ID NO: 3612 - protein, 136 aa, Glycine max; identical to SEQ ID NO: 2898

SEQ ID NO: 3613 - DNA, 309 bp, Glycine max; identical to SEQ ID NO: 2899
  CDS (1)..(309)

SEQ ID NO: 3614 - protein, 102 aa, Glycine max; identical to SEQ ID NO: 2900

SEQ ID NO: 3615 - DNA, 423 bp, Glycine max; identical to SEQ ID NO: 2901
  CDS (1)..(423)

SEQ ID NO: 3616 - protein, 140 aa, Glycine max; identical to SEQ ID NO: 2902

SEQ ID NO: 3617 - DNA, 306 bp, Glycine max; identical to SEQ ID NO: 2903
  CDS (1)..(306)

SEQ ID NO: 3618 - protein, 101 aa, Glycine max; identical to SEQ ID NO: 2904

SEQ ID NO: 3619 - DNA, 309 bp, Glycine max; identical to SEQ ID NO: 2905
  CDS (1)..(309)

SEQ ID NO: 3620 - protein, 102 aa, Glycine max; identical to SEQ ID NO: 2906

SEQ ID NO: 3621 - DNA, 318 bp, Glycine max; identical to SEQ ID NO: 2907
  CDS (1)..(318)

SEQ ID NO: 3622 - protein, 105 aa, Glycine max; identical to SEQ ID NO: 2908

SEQ ID NO: 3623 - DNA, 402 bp, Glycine max; identical to SEQ ID NO: 2909
  CDS (1)..(402)

SEQ ID NO: 3624 - protein, 133 aa, Glycine max; identical to SEQ ID NO: 2910

SEQ ID NO: 3625 - DNA, 309 bp, Glycine max; identical to SEQ ID NO: 2911
  CDS (1)..(309)

SEQ ID NO: 3626 - protein, 102 aa, Glycine max; identical to SEQ ID NO: 2912

SEQ ID NO: 3627 - DNA, 402 bp, Glycine max; identical to SEQ ID NO: 2913
  CDS (1)..(402)

SEQ ID NO: 3628 - protein, 133 aa, Glycine max; identical to SEQ ID NO: 2914

SEQ ID NO: 3629 - DNA, 480 bp, Zea mays; identical to SEQ ID NO: 2915
  CDS (1)..(480)

SEQ ID NO: 3630 - protein, 159 aa, Zea mays; identical to SEQ ID NO: 2916

SEQ ID NO: 3631 - DNA, 393 bp, Zea mays; identical to SEQ ID NO: 2917
  CDS (1)..(393)

SEQ ID NO: 3632 - protein, 130 aa, Zea mays; identical to SEQ ID NO: 2918

SEQ ID NO: 3633 - DNA, 315 bp, Zea mays; identical to SEQ ID NO: 2583
  CDS (1)..(315)

SEQ ID NO: 3634 - protein, 104 aa, Zea mays; identical to SEQ ID NO: 2584

SEQ ID NO: 3635 - DNA, 345 bp, Zea mays; identical to SEQ ID NO: 2919
  CDS (1)..(345)

SEQ ID NO: 3636 - protein, 114 aa, Zea mays; identical to SEQ ID NO: 2920

SEQ ID NO: 3637 - DNA, 312 bp, Zea mays; identical to SEQ ID NO: 2921
  CDS (1)..(312)

SEQ ID NO: 3638 - protein, 103 aa, Zea mays; identical to SEQ ID NO: 2922

SEQ ID NO: 3639 - DNA, 342 bp, Zea mays; identical to SEQ ID NO: 2923
  CDS (1)..(342)

SEQ ID NO: 3640 - protein, 113 aa, Zea mays; identical to SEQ ID NO: 2924

SEQ ID NO: 3641 - DNA, 537 bp, Zea mays; identical to SEQ ID NO: 2925
  CDS (1)..(537)

SEQ ID NO: 3642 - protein, 178 aa, Zea mays; identical to SEQ ID NO: 2926

SEQ ID NO: 3643 - DNA, 399 bp, Zea mays; identical to SEQ ID NO: 2927
  CDS (1)..(399)

SEQ ID NO: 3644 - protein, 132 aa, Zea mays; identical to SEQ ID NO: 2928

SEQ ID NO: 3645 - DNA, 315 bp, Zea mays; identical to SEQ ID NO: 2587
  CDS (1)..(315)

SEQ ID NO: 3646 - protein, 104 aa, Zea mays; identical to SEQ ID NO: 2588

SEQ ID NO: 3647 - DNA, 315 bp, Zea mays; identical to SEQ ID NO: 2929
  CDS (1)..(315)

SEQ ID NO: 3648 - protein, 104 aa, Zea mays; identical to SEQ ID NO: 2930

SEQ ID NO: 3649 - DNA, 21 bp, Artificial sequence
  primer
atggagaagctacagaagatg

SEQ ID NO: 3650 - DNA, 21 bp, Artificial sequence
  primer
tcaaagccataacgccccaac

SEQ ID NO: 3651 - protein, 117 aa, Artificial sequence
  consensus sequence
  Variant (3)..(8): Xaa in position 3 to 8 is any amino acid
  Variant (9)..(13): Xaa in position 9 to 13 is any or no amino acid
  Variant (15)..(22): Xaa in position 15 to 22 is any amino acid
  Variant (23)..(27): Xaa in position 23 to 27 is any or no amino acid
  Variant (29)..(35): Xaa in position 29 to 35 is any amino acid
  Variant (36)..(43): Xaa in position 36 to 43 is any or no amino acid
  Variant (45)..(45): Xaa in position 45 is any amino acid
  Variant (47)..(54): Xaa in position 47 to 54 is any amino acid
  Variant (55)..(58): Xaa in position 55 to 58 is any or no amino acid
  Variant (60)..(62): Xaa in position 60 to 62 is any amino acid
  Variant (63)..(84): Xaa in position 63 to 84 is any or no amino acid
  Variant (86)..(86): Xaa in position 86 is any amino acid
  Variant (89)..(90): Xaa in position 89 to 90 is any amino acid
  Variant (92)..(94): Xaa in position 92 to 94 is any amino acid
  Variant (96)..(105): Xaa in position 96 to 105 is any amino acid
  Variant (106)..(106): Xaa in position 106 is any or no amino acid
  Variant (108)..(108): Xaa in position 108 is any amino acid
  Variant (109)..(112): Xaa in position 109 to 112 is any or no amino acid
  Variant (114)..(116): Xaa in position 114 to 116 is any amino acid
VVXXXXXXXXXXXCXXXXXXXXXXXXXLXXXXXXXXXXXXXXXEXDXXXXXXXXXXXXLXXXXXXXXXXXXXXXXXXXXXXXXXPXVFXXGXXXGXXXXXXXXXXXGXXXXXLXXXL

SEQ ID NO: 3652 - protein, 32 aa, Artificial sequence
  protein pattern
  Variant (2)..(2): Xaa in position 2 is any or no amino acid
  Variant (4)..(6): Xaa in position 4 to 6 is any or no amino acid
  Variant (8)..(8): Xaa in position 8 is Ile, Leu or Val
  Variant (9)..(9): Xaa in position 9 is any amino acid
  Variant (11)..(12): Xaa in position 11 to 12 is any amino acid
  Variant (13)..(13): Xaa in position 13 is Phe, Ile, Leu, Met or Val
  Variant (15)..(15): Xaa in position 15 is Ala, Gly, Pro, Ser or Thr
  Variant (16)..(27): Xaa in position 16 to 27 is any amino acid
  Variant (29)..(31): Xaa in position 29 to 31 is any amino acid
  Variant (32)..(32): Xaa in position 32 is Phe, Ile, Leu or Val
PXVXXXFXXGXXXGXXXXXXXXXXXXXLXXXX

SEQ ID NO: 3653 - protein, 12 aa, Artificial sequence
  protein pattern
  Variant (2)..(2): Xaa in position 2 is any amino acid
  Variant (3)..(3): Xaa in position 3 is Ile or Val
  Variant (5)..(5): Xaa in position 5 is Ile, Leu or Val
  Variant (6)..(6): Xaa in position 6 is any amino acid
  Variant (8)..(9): Xaa in position 8 to 9 is any amino acid
  Variant (10)..(10): Xaa in position 10 is Phe, Ile, Leu, Met or Val
  Variant (12)..(12): Xaa in position 12 is Ala, Gly, Pro, Ser or Thr
PXXFXXGXXXGX

SEQ ID NO: 3654 - DNA, 309 bp, Arabidopsis thaliana; identical to SEQ ID NO: 2741
  CDS (1)..(309)

SEQ ID NO: 3655 - protein, 102 aa, Arabidopsis thaliana; identical to SEQ ID NO: 2742

SEQ ID NO: 3656 - DNA, 309 bp, Glycine max
  CDS (1)..(309)
atggatagggtgacacagatggcatcagagaggccagtggtgatattcagcagaagttcatgctgcatgtgccacaccatcaaaaccctcttcagtgactttggagtgcatccaaatgttcatgaacttgatgagataccaagagggaaggacattgagcaagctctttcaaggctagggtgcagcccctctgtgcctgctgtgttcattggtggtgagcttgttggtggagccaatgaagtcatgagccttcaccttaaccgctccttgatccctatgcttaggagagcaggagctctttgggtttaa

SEQ ID NO: 3657 - protein, 102 aa, Glycine max; identical to SEQ ID NO: 2906

SEQ ID NO: 3658 - DNA, 603 bp, Glycine max; identical to SEQ ID NO: 2937
  CDS (114)..(419)

SEQ ID NO: 3659 - protein, 101 aa, Glycine max; identical to SEQ ID NO: 2904

SEQ ID NO: 3660 - DNA, 306 bp, Glycine max; identical to SEQ ID NO: 2811
  CDS (1)..(306)

SEQ ID NO: 3661 - protein, 101 aa, Glycine max; identical to SEQ ID NO: 2812

SEQ ID NO: 3662 - DNA, 511 bp, Glycine max; identical to SEQ ID NO: 2575
  CDS (108)..(416)

SEQ ID NO: 3663 - protein, 102 aa, Glycine max; identical to SEQ ID NO: 2576

SEQ ID NO: 3664 - DNA, 309 bp, Glycine max; identical to SEQ ID NO: 2577
  CDS (1)..(309)

SEQ ID NO: 3665 - protein, 102 aa, Glycine max; identical to SEQ ID NO: 2578

SEQ ID NO: 3666 - DNA, 312 bp, Sorghum bicolor; identical to SEQ ID NO: 2581
  CDS (1)..(312)

SEQ ID NO: 3667 - protein, 103 aa, Sorghum bicolor; identical to SEQ ID NO: 2582

SEQ ID NO: 3668 - DNA, 315 bp, Zea mays
  CDS (1)..(315)
atggaccgtgtgatgcagctggcgtcggagcgtgcggtggttgtgttcacgctgagcagctgctgcatgtgccacacggtgacgcagctgatggcggacctgagcgtgaacgcgctggtgcacgagctggacagcgaccccaggggcaaggacatggagcgcgcgctgctcaagatgctgggagggagggcgcccgctgtccccgccgtcttcatcggcggcaagctcgtcggcggcaccaacaatgtcatgtcgctccacctcggcggagagctcgtgcccatgctcatgaacgctggcgccctctgggtctag

SEQ ID NO: 3669 - protein, 104 aa, Zea mays
MDRVMQLASERAVVVFTLSSCCMCHTVTQLMADLSVNALVHELDSDPRGKDMERALLKMLGGRAPAVPAVFIGGKLVGGTNNVMSLHLGGELVPMLMNAGALWV

SEQ ID NO: 3670 - DNA, 315 bp, Zea mays; identical to SEQ ID NO: 2583
  CDS (1)..(315)

SEQ ID NO: 3671 - protein, 104 aa, Zea mays; identical to SEQ ID NO: 2584

SEQ ID NO: 3672 - DNA, 312 bp, Zea mays; identical to SEQ ID NO: 2585
  CDS (1)..(312)

SEQ ID NO: 3673 - protein, 103 aa, Zea mays; identical to SEQ ID NO: 2586

SEQ ID NO: 3674 - DNA, 315 bp, Zea mays; identical to SEQ ID NO: 2587
  CDS (1)..(315)

SEQ ID NO: 3675 - protein, 104 aa, Zea mays; identical to SEQ ID NO: 2588

SEQ ID NO: 3676 - DNA, 351 bp, Bombyx mori; identical to SEQ ID NO: 2591
  CDS (1)..(351)

SEQ ID NO: 3677 - protein, 116 aa, Bombyx mori; identical to SEQ ID NO: 2592

SEQ ID NO: 3678 - DNA, 405 bp, Oryza sativa (japonica cultivar-group); identical to SEQ ID NO: 2593
  CDS (1)..(405)

SEQ ID NO: 3679 - protein, 134 aa, Oryza sativa (japonica cultivar-group); identical to SEQ ID NO: 2594

SEQ ID NO: 3680 - DNA, 477 bp, Oryza sativa (japonica cultivar-group); identical to SEQ ID NO: 2595
  CDS (1)..(477)

SEQ ID NO: 3681 - protein, 158 aa, Oryza sativa (japonica cultivar-group); identical to SEQ ID NO: 2596

SEQ ID NO: 3682 - DNA, 309 bp, Arabidopsis thaliana; identical to SEQ ID NO: 2597
  CDS (1)..(309)

SEQ ID NO: 3683 - protein, 102 aa, Arabidopsis thaliana; identical to SEQ ID NO: 2598

SEQ ID NO: 3684 - DNA, 351 bp, Drosophila melanogaster; identical to SEQ ID NO: 2599
  CDS (1)..(351)

SEQ ID NO: 3685 - protein, 116 aa, Drosophila melanogaster; identical to SEQ ID NO: 2600

SEQ ID NO: 3686 - DNA, 345 bp, Drosophila melanogaster; identical to SEQ ID NO: 2967
  CDS (1)..(345)

SEQ ID NO: 3687 - protein, 114 aa, Drosophila melanogaster; identical to SEQ ID NO: 2968

SEQ ID NO: 3688 - DNA, 480 bp, Arabidopsis thaliana
  CDS (1)..(480)
atgcaaaaagcaattcgaccatacgagtcaccgtggacgaagaccgtgccgggcaatagcattttccttttaaagaatgaagataaaccatcatcatcatcatcatcattatcatggttaacatcaggatcaccaaagccaacatctataagcaataagagatcaagcaacctagttgtgatggagaatgctgtggtggtgtttgcaaggagaggctgttgtttgggacacgtggcaaaacggctgctactgacacatggcgtgaatccagtggtggttgagattggtgaagaagacaacaacaactacgacaatatcgtaagtgataaagagaaattacctatgatgtacataggaggaaagttgtttggaggattggaaaatctgatggctgctcatattaatggccactccatcaagattcgaaccgatacatggtcgtcgttctcagtcgccaccgtcgaccgaatccgctggtga

SEQ ID NO: 3689 - protein, 159 aa, Arabidopsis thaliana
MQKAIRPYESPWTKTVPGNSIFLLKNEDKPSSSSSSLSWLTSGSPKPTSISNKRSSNLVVMENAVVVFARRGCCLGHVAKRLLLTHGVNPVVVEIGEEDNNNYDNIVSDKEKLPMMYIGGKLFGGLENLMAAHINGHSIKIRTDTWSSFSVATVDRIRW

SEQ ID NO: 3690 - DNA, 297 bp, Apis mellifera; identical to SEQ ID NO: 2601
  CDS (1)..(297)

SEQ ID NO: 3691 - protein, 98 aa, Apis mellifera; identical to SEQ ID NO: 2602

SEQ ID NO: 3692 - DNA, 312 bp, Strongylocentrotus purpuratus; identical to SEQ ID NO: 2603
  CDS (1)..(312)

SEQ ID NO: 3693 - protein, 103 aa, Strongylocentrotus purpuratus; identical to SEQ ID NO: 2604

SEQ ID NO: 3694 - DNA, 381 bp, Strongylocentrotus purpuratus; identical to SEQ ID NO: 2605
  CDS (1)..(381)

SEQ ID NO: 3695 - protein, 126 aa, Strongylocentrotus purpuratus; identical to SEQ ID NO: 2606

SEQ ID NO: 3696 - DNA, 321 bp, Strongylocentrotus purpuratus; identical to SEQ ID NO: 2607
  CDS (1)..(321)

SEQ ID NO: 3697 - protein, 106 aa, Strongylocentrotus purpuratus; identical to SEQ ID NO: 2608

SEQ ID NO: 3698 - DNA, 297 bp, Nasonia vitripennis; identical to SEQ ID NO: 2609
  CDS (1)..(297)

SEQ ID NO: 3699 - protein, 98 aa, Nasonia vitripennis; identical to SEQ ID NO: 2610

SEQ ID NO: 3700 - DNA, 339 bp, Anopheles gambiae str. PEST; identical to SEQ ID NO: 2611
  CDS (1)..(339)

SEQ ID NO: 3701 - protein, 112 aa, Anopheles gambiae str. PEST; identical to SEQ ID NO: 2612

SEQ ID NO: 3702 - DNA, 309 bp, Magnaporthe grisea 70-15; identical to SEQ ID NO: 2613
  CDS (1)..(309)

SEQ ID NO: 3703 - protein, 102 aa, Magnaporthe grisea 70-15; identical to SEQ ID NO: 2614

SEQ ID NO: 3704 - DNA, 321 bp, Gibberella zeae PH-1; identical to SEQ ID NO: 2617
  CDS (1)..(321)

SEQ ID NO: 3705 - protein, 106 aa, Gibberella zeae PH-1; identical to SEQ ID NO: 2618

SEQ ID NO: 3706 - DNA, 324 bp, Kluyveromyces lactis NRRL Y-1140; identical to SEQ ID NO: 3321
  CDS (1)..(324)

SEQ ID NO: 3707 - protein, 107 aa, Kluyveromyces lactis NRRL Y-1140; identical to SEQ ID NO: 3322

SEQ ID NO: 3708 - DNA, 315 bp, Debaryomyces hansenii CBS767; identical to SEQ ID NO: 2623
  CDS (1)..(315)

SEQ ID NO: 3709 - protein, 104 aa, Debaryomyces hansenii CBS767; identical to SEQ ID NO: 2624

SEQ ID NO: 3710 - DNA, 318 bp, Yarrowia lipolytica CLIB122; identical to SEQ ID NO: 2625
  CDS (1)..(318)

SEQ ID NO: 3711 - protein, 105 aa, Yarrowia lipolytica CLIB122; identical to SEQ ID NO: 2626

SEQ ID NO: 3712 - DNA, 309 bp, Aspergillus nidulans FGSC A4; identical to SEQ ID NO: 2629
  CDS (1)..(309)

SEQ ID NO: 3713 - protein, 102 aa, Aspergillus nidulans FGSC A4; identical to SEQ ID NO: 2630

SEQ ID NO: 3714 - DNA, 360 bp, Candida albicans SC5314; identical to SEQ ID NO: 2633
  CDS (1)..(360): transl_table=12

SEQ ID NO: 3715 - protein, 119 aa, Candida albicans SC5314; identical to SEQ ID NO: 2634

SEQ ID NO: 3716 - DNA, 309 bp, Ustilago maydis 521; identical to SEQ ID NO: 2635
  CDS (1)..(309)

SEQ ID NO: 3717 - protein, 102 aa, Ustilago maydis 521; identical to SEQ ID NO: 2636

SEQ ID NO: 3718 - DNA, 441 bp, Cryptococcus neoformans var. neoformans B-3501A; identical to SEQ ID NO: 2637
  CDS (1)..(441)

SEQ ID NO: 3719 - protein, 146 aa, Cryptococcus neoformans var. neoformans B-3501A; identical to SEQ ID NO: 2638

SEQ ID NO: 3720 - DNA, 384 bp, Candida albicans SC5314
  CDS (1)..(384): transl_table=12
atgatagacaaaatgctgctgattcttgcctggggattcaatttgtggtatcaaccacctccacctactgcacaaactgagaaagaaatcgaacacactattaactctcacaagattgttatttattctaaaacttattgtccattttgtgaccaaaccaaacatctattaaatgaacaatatccacaagaatcgtacgaagtcataaacttgaatattctcgatgacggattgactattcagaatcaattgtatgctaatactggtcaatatatggtgcccataatcttcataaacggacaacacgttggaggaaattcagaagttcagcaattgcacaccaatgggaaattgcaagaattattgaatcctcagaaatattga

SEQ ID NO: 3721 - protein, 127 aa, Candida albicans SC5314
MIDKMSSILAWGFNLWYQPPPPTAQTEKEIEHTINSHKIVIYSKTYCPFCDQTKHLLNEQYPQESYEVINLNILDDGLTIQNQLYANTGQYMVPIIFINGQHVGGNSEVQQLHTNGKLQELLNPQKY

SEQ ID NO: 3722 - DNA, 471 bp, Candida albicans SC5314; identical to SEQ ID NO: 2639
  CDS (1)..(471): transl_table=12

SEQ ID NO: 3723 - protein, 156 aa, Candida albicans SC5314; identical to SEQ ID NO: 2640

SEQ ID NO: 3724 - DNA, 309 bp, Tribolium castaneum; identical to SEQ ID NO: 2641
  CDS (1)..(309)

SEQ ID NO: 3725 - protein, 102 aa, Tribolium castaneum; identical to SEQ ID NO: 2642

SEQ ID NO: 3726 - DNA, 330 bp, Azoarcus sp. EbN1
  CDS (1)..(330): transl_table=11
atggacacccaggaagtcatccgcgaacaggtcaccacgaaccccgtcgtcctgtacatgaagggcacgccccagttcccgcagtgcggcttctcatcgaccgccgtgcagatcctcaagaacagcggcgtgccgaagttcttctcggtgaacgttctcgagaacgacgaaatccgtaacggcatcaagcagttcgccaactggccgacgatcccgcagctgtacgtgaacggtgaattcgtcgggggctgcgacatcatgcgcgagatgtatgaaaacggcgagctgcaggaagttctgaagagcgccggagcaacgcagcaaggttga

SEQ ID NO: 3727 - protein, 109 aa, Azoarcus sp. EbN1
MDTQEVIREQVTTNPVVLYMKGTPQFPQCGFSSTAVQILKNSGVPKFFSVNVLENDEIRNGIKQFANWPTIPQLYVNGEFVGGCDIMREMYENGELQEVLKSAGATQQG

SEQ ID NO: 3728 - DNA, 384 bp, Medicago truncatula; identical to SEQ ID NO: 2643
  CDS (1)..(384)

SEQ ID NO: 3729 - protein, 127 aa, Medicago truncatula; identical to SEQ ID NO: 2644

SEQ ID NO: 3730 - DNA, 384 bp, Oryza sativa subsp; identical to SEQ ID NO: 3343
  CDS (1)..(384)

SEQ ID NO: 3731 - protein, 127 aa, Oryza sativa subsp; identical to SEQ ID NO: 3344

SEQ ID NO: 3732 - DNA, 315 bp, Oryza sativa subsp; identical to SEQ ID NO: 3345
  CDS (1)..(315)

SEQ ID NO: 3733 - protein, 104 aa, Oryza sativa subsp; identical to SEQ ID NO: 3346

SEQ ID NO: 3734 - DNA, 306 bp, Vitis vinifera; identical to SEQ ID NO: 2645
  CDS (1)..(306)
  misc_feature (225)..(225): r is g or a
  misc_feature (273)..(273): y is t or c

SEQ ID NO: 3735 - protein, 101 aa, Vitis vinifera; identical to SEQ ID NO: 2646

SEQ ID NO: 3736 - DNA, 324 bp, Vitis vinifera; identical to SEQ ID NO: 2647
  CDS (1)..(324)

SEQ ID NO: 3737 - protein, 107 aa, Vitis vinifera; identical to SEQ ID NO: 2648

SEQ ID NO: 3738 - DNA, 321 bp, Vitis vinifera; identical to SEQ ID NO: 2649
  CDS (1)..(321)

SEQ ID NO: 3739 - protein, 106 aa, Vitis vinifera; identical to SEQ ID NO: 2650

SEQ ID NO: 3740 - DNA, 345 bp, Vitis vinifera; identical to SEQ ID NO: 2651
  CDS (1)..(345)

SEQ ID NO: 3741 - protein, 114 aa, Vitis vinifera; identical to SEQ ID NO: 2652

SEQ ID NO: 3742 - DNA, 414 bp, Vitis vinifera; identical to SEQ ID NO: 2653
  CDS (1)..(414)
  misc_feature (18)..(18): y is t or c
  misc_feature (63)..(63): m is a or c

SEQ ID NO: 3743 - protein, 137 aa, Vitis vinifera; identical to SEQ ID NO: 2654

SEQ ID NO: 3744 - DNA, 342 bp, Pichia guilliermondii; identical to SEQ ID NO: 3359
  CDS (1)..(342)

SEQ ID NO: 3745 - protein, 113 aa, Pichia guilliermondii; identical to SEQ ID NO: 3360

SEQ ID NO: 3746 - DNA, 315 bp, Fritillaria agrestis; identical to SEQ ID NO: 2655
  CDS (1)..(315)

SEQ ID NO: 3747 - protein, 104 aa, Fritillaria agrestis; identical to SEQ ID NO: 2656

SEQ ID NO: 3748 - DNA, 405 bp, Mesembryanthemum crystallinum; identical to SEQ ID NO: 3017
  CDS (1)..(405)

SEQ ID NO: 3749 - protein, 134 aa, Mesembryanthemum crystallinum; identical to SEQ ID NO: 3018

SEQ ID NO: 3750 - DNA, 402 bp, Thellungiella halophila; identical to SEQ ID NO: 2657
  CDS (1)..(402)

SEQ ID NO: 3751 - protein, 133 aa, Thellungiella halophila; identical to SEQ ID NO: 2658

SEQ ID NO: 3752 - DNA, 309 bp, Plantago major; identical to SEQ ID NO: 2659
  CDS (1)..(309)

SEQ ID NO: 3753 - protein, 102 aa, Plantago major; identical to SEQ ID NO: 2660

SEQ ID NO: 3754 - DNA, 312 bp, Musa acuminata; identical to SEQ ID NO: 3023
  CDS (1)..(312)

SEQ ID NO: 3755 - protein, 103 aa, Musa acuminata; identical to SEQ ID NO: 3024

SEQ ID NO: 3756 - DNA, 312 bp, Musa acuminata; identical to SEQ ID NO: 2661
  CDS (1)..(312)

SEQ ID NO: 3757 - protein, 103 aa, Musa acuminata; identical to SEQ ID NO: 2662

SEQ ID NO: 3758 - DNA, 450 bp, Medicago truncatula; identical to SEQ ID NO: 2663
  CDS (1)..(450)

SEQ ID NO: 3759 - protein, 149 aa, Medicago truncatula; identical to SEQ ID NO: 2664

SEQ ID NO: 3760 - DNA, 357 bp, Medicago truncatula; identical to SEQ ID NO: 2665
  CDS (1)..(357)

SEQ ID NO: 3761 - protein, 118 aa, Medicago truncatula; identical to SEQ ID NO: 2666

SEQ ID NO: 3762 - DNA, 384 bp, Medicago truncatula; identical to SEQ ID NO: 2667
  CDS (1)..(384)

SEQ ID NO: 3763 - protein, 127 aa, Medicago truncatula; identical to SEQ ID NO: 2668

SEQ ID NO: 3764 - DNA, 366 bp, Medicago truncatula; identical to SEQ ID NO: 2669
  CDS (1)..(366)

SEQ ID NO: 3765 - protein, 121 aa, Medicago truncatula; identical to SEQ ID NO: 2670

SEQ ID NO: 3766 - DNA, 399 bp, Beta vulgaris; identical to SEQ ID NO: 2671
  CDS (1)..(399)

SEQ ID NO: 3767 - protein, 132 aa, Beta vulgaris; identical to SEQ ID NO: 2672

SEQ ID NO: 3768 - DNA, 321 bp, Beta vulgaris; identical to SEQ ID NO: 2673
  CDS (1)..(321)

SEQ ID NO: 3769 - protein, 106 aa, Beta vulgaris; identical to SEQ ID NO: 2674

SEQ ID NO: 3770 - DNA, 309 bp, Beta vulgaris; identical to SEQ ID NO: 2675
  CDS (1)..(309)

SEQ ID NO: 3771 - protein, 102 aa, Beta vulgaris; identical to SEQ ID NO: 2676

SEQ ID NO: 3772 - DNA, 309 bp, Beta vulgaris; identical to SEQ ID NO: 2677
  CDS (1)..(309)

SEQ ID NO: 3773 - protein, 102 aa, Beta vulgaris; identical to SEQ ID NO: 2678

SEQ ID NO: 3774 - DNA, 309 bp, Beta vulgaris; identical to SEQ ID NO: 2679
  CDS (1)..(309)

SEQ ID NO: 3775 - protein, 102 aa, Beta vulgaris; identical to SEQ ID NO: 2680

SEQ ID NO: 3776 - DNA, 492 bp, Aspergillus oryzae; identical to SEQ ID NO: 2681
  CDS (1)..(492)

SEQ ID NO: 3777 - protein, 163 aa, Aspergillus oryzae; identical to SEQ ID NO: 2682

SEQ ID NO: 3778 - DNA, 309 bp, Aspergillus oryzae; identical to SEQ ID NO: 2683
  CDS (1)..(309)

SEQ ID NO: 3779 - protein, 102 aa, Aspergillus oryzae; identical to SEQ ID NO: 2684

SEQ ID NO: 3780 - DNA, 381 bp, Populus tremula x Populus tremuloides; identical to SEQ ID NO: 2685
  CDS (1)..(381)

SEQ ID NO: 3781 - protein, 126 aa, Populus tremula x Populus tremuloides; identical to SEQ ID NO: 2686

SEQ ID NO: 3782 - DNA, 318 bp, Plantago major; identical to SEQ ID NO: 2687
  CDS (1)..(318)

SEQ ID NO: 3783 - protein, 105 aa, Plantago major; identical to SEQ ID NO: 2688

SEQ ID NO: 3784 - DNA, 342 bp, Triticum aestivum; identical to SEQ ID NO: 2689
  CDS (1)..(342)

SEQ ID NO: 3785 - protein, 113 aa, Triticum aestivum; identical to SEQ ID NO: 2690

SEQ ID NO: 3786 - DNA, 420 bp, Populus tremula x Populus tremuloides; identical to SEQ ID NO: 2691
  CDS (1)..(420)

SEQ ID NO: 3787 - protein, 139 aa, Populus tremula x Populus tremuloides; identical to SEQ ID NO: 2692

SEQ ID NO: 3788 - DNA, 348 bp, Tilia platyphyllos; identical to SEQ ID NO: 2693
  CDS (1)..(348)

SEQ ID NO: 3789 - protein, 115 aa, Tilia platyphyllos; identical to SEQ ID NO: 2694

SEQ ID NO: 3790 - DNA, 342 bp, Deschampsia antarctica; identical to SEQ ID NO: 2695
  CDS (1)..(342)

SEQ ID NO: 3791 - protein, 113 aa, Deschampsia antarctica; identical to SEQ ID NO: 2696

SEQ ID NO: 3792 - DNA, 333 bp, Saccharomyces cerevisiae
  CDS (1)..(333)
atggtatctcaagaaactatcaagcacgtcaaggaccttattgcagaaaacgagatcttcgtcgcatccaaaacgtactgtccatactgccatgcagccctaaacacgctttttgaaaagttaaaggttcccaggtccaaagttctggttttgcaattgaatgacatgaaggaaggcgcagacattcaggctgcgttatatgagattaatggccaaagaaccgtgccaaacatctatattaatggtaaacatattggaggcaacgacgacttgcaggaattgagggagactggtgaattggaggaattgttagaacctattcttgcaaattaa

SEQ ID NO: 3793 - protein, 110 aa, Saccharomyces cerevisiae
MVSQETIKHVKDLIAENEIFVASKTYCPYCHAALNTLFEKLKVPRSKVLVLQLNDMKEGADIQAALYEINGQRTVPNIYINGKHIGGNDDLQELRETGELEELLEPILAN

SEQ ID NO: 3794 - DNA, 333 bp, Schizosaccharomyces pombe; identical to SEQ ID NO: 2699
  CDS (1)..(333)

SEQ ID NO: 3795 - protein, 110 aa, Schizosaccharomyces pombe; identical to SEQ ID NO: 2700

SEQ ID NO: 3796 - DNA, 612 bp, Saccharomyces cerevisiae
  CDS (1)..(612)
atggctattgttataaacaaaagaaacgtgagagtcttggtaataactaatttactgctcattgttgtgttttttgtgttaaggaattcgaatgctagcgtcaacgaaagtattactactcaccatcctgattcattggtgacgtttgacaattcaggaaatgcacctggcactcaccaatctgtccatgatacagtaaatacacaagataaggaagccgaagaagttgataaaaatagtggggacgctgaatttgatgccgctgcagaatacaacaaaataatggaacagtcacccatgattgtatttagcaagactggctgcccatatagcaaaaaactgaaagctttgttgactaattcgtacacgttttctccatcttactacgttgtagaattggataggcacgaacacacaaaagaactacaagaccagattgaaaaagtcactggtaggagaacagtcccaaacgttatcatcggtggtacttccagaggtggttatactgagatagcagagttacataaaaatgatgaacttctagactctttcaaaaaatggagcgatggggcgtttactgtaaaagctaattcgcaatctgagagtgcctag

SEQ ID NO: 3797 - protein, 203 aa, Saccharomyces cerevisiae
MAIVINKRNVRVLVITNLLLIVVFFVLRNSNASVNESITTHHPDSLVTFDNSGNAPGTHQSVHDTVNTQDKEAEEVDKNSGDAEFDAAAEYNKIMEQSPMIVFSKTGCPYSKKLKALLTNSYTFSPSYYVVELDRHEHTKELQDQIEKVTGRRTVPNVIIGGTSRGGYTEIAELHKNDELLDSFKKWSDGAFTVKANSQSESA

SEQ ID NO: 3798 - DNA, 327 bp, Solanum lycopersicum; identical to SEQ ID NO: 2701
  CDS (1)..(327)

SEQ ID NO: 3799 - protein, 108 aa, Solanum lycopersicum; identical to SEQ ID NO: 2702

SEQ ID NO: 3800 - DNA, 315 bp, Vernicia fordii; identical to SEQ ID NO: 2703
  CDS (1)..(315)

SEQ ID NO: 3801 - protein, 104 aa, Vernicia fordii; identical to SEQ ID NO: 2704

SEQ ID NO: 3802 - DNA, 447 bp, Arabidopsis thaliana; identical to SEQ ID NO: 2705
  CDS (1)..(447)

SEQ ID NO: 3803 - protein, 148 aa, Arabidopsis thaliana; identical to SEQ ID NO: 2706

SEQ ID NO: 3804 - DNA, 312 bp, Arabidopsis thaliana; identical to SEQ ID NO: 2707
  CDS (1)..(312)

SEQ ID NO: 3805 - protein, 103 aa, Arabidopsis thaliana; identical to SEQ ID NO: 2708

SEQ ID NO: 3806 - DNA, 312 bp, Arabidopsis thaliana; identical to SEQ ID NO: 2709
  CDS (1)..(312)

SEQ ID NO: 3807 - protein, 103 aa, Arabidopsis thaliana; identical to SEQ ID NO: 2710

SEQ ID NO: 3808 - DNA, 309 bp, Arabidopsis thaliana; identical to SEQ ID NO: 2711
  CDS (1)..(309)

SEQ ID NO: 3809 - protein, 102 aa, Arabidopsis thaliana; identical to SEQ ID NO: 2712

SEQ ID NO: 3810 - DNA, 309 bp, Arabidopsis thaliana; identical to SEQ ID NO: 2713
  CDS (1)..(309)

SEQ ID NO: 3811 - protein, 102 aa, Arabidopsis thaliana; identical to SEQ ID NO: 2714

SEQ ID NO: 3812 - DNA, 300 bp, Arabidopsis thaliana; identical to SEQ ID NO: 2715
  CDS (1)..(300)

SEQ ID NO: 3813 - protein, 99 aa, Arabidopsis thaliana; identical to SEQ ID NO: 2716

SEQ ID NO: 3814 - DNA, 540 bp, Arabidopsis thaliana; identical to SEQ ID NO: 2717
  CDS (1)..(540)

SEQ ID NO: 3815 - protein, 179 aa, Arabidopsis thaliana; identical to SEQ ID NO: 2718

SEQ ID NO: 3816 - DNA, 453 bp, Arabidopsis thaliana; identical to SEQ ID NO: 2719
  CDS (1)..(453)

SEQ ID NO: 3817 - protein, 150 aa, Arabidopsis thaliana; identical to SEQ ID NO: 2720

SEQ ID NO: 3818 - DNA, 378 bp, Arabidopsis thaliana; identical to SEQ ID NO: 2721
  CDS (1)..(378)

SEQ ID NO: 3819 - protein, 125 aa, Arabidopsis thaliana; identical to SEQ ID NO: 2722

SEQ ID NO: 3820 - DNA, 336 bp, Arabidopsis thaliana; identical to SEQ ID NO: 2723
  CDS (1)..(336)

SEQ ID NO: 3821 - protein, 111 aa, Arabidopsis thaliana; identical to SEQ ID NO: 2724

SEQ ID NO: 3822 - DNA, 393 bp, Arabidopsis thaliana; identical to SEQ ID NO: 2725
  CDS (1)..(393)

SEQ ID NO: 3823 - protein, 130 aa, Arabidopsis thaliana; identical to SEQ ID NO: 2726

SEQ ID NO: 3824 - DNA, 408 bp, Arabidopsis thaliana; identical to SEQ ID NO: 2727
  CDS (1)..(408)

SEQ ID NO: 3825 - protein, 135 aa, Arabidopsis thaliana; identical to SEQ ID NO: 2728

SEQ ID NO: 3826 - DNA, 525 bp, Arabidopsis thaliana; identical to SEQ ID NO: 2729
  CDS (1)..(525)

SEQ ID NO: 3827 - protein, 174 aa, Arabidopsis thaliana; identical to SEQ ID NO: 2730

SEQ ID NO: 3828 - DNA, 435 bp, Arabidopsis thaliana; identical to SEQ ID NO: 2731
  CDS (1)..(435)

SEQ ID NO: 3829 - protein, 144 aa, Arabidopsis thaliana; identical to SEQ ID NO: 2732

SEQ ID NO: 3830 - DNA, 411 bp, Arabidopsis thaliana; identical to SEQ ID NO: 2733
  CDS (1)..(411)

SEQ ID NO: 3831 - protein, 136 aa, Arabidopsis thaliana; identical to SEQ ID NO: 2734

SEQ ID NO: 3832 - DNA, 423 bp, Arabidopsis thaliana; identical to SEQ ID NO: 2735
  CDS (1)..(423)

SEQ ID NO: 3833 - protein, 140 aa, Arabidopsis thaliana; identical to SEQ ID NO: 2736

SEQ ID NO: 3834 - DNA, 414 bp, Arabidopsis thaliana; identical to SEQ ID NO: 2737
  CDS (1)..(414)

SEQ ID NO: 3835 - protein, 137 aa, Arabidopsis thaliana; identical to SEQ ID NO: 2738

SEQ ID NO: 3836 - DNA, 309 bp, Arabidopsis thaliana; identical to SEQ ID NO: 2739
  CDS (1)..(309)

SEQ ID NO: 3837 - protein, 102 aa, Arabidopsis thaliana; identical to SEQ ID NO: 2740

SEQ ID NO: 3838 - DNA, 309 bp, Arabidopsis thaliana; identical to SEQ ID NO: 2743
  CDS (1)..(309)

SEQ ID NO: 3839 - protein, 102 aa, Arabidopsis thaliana; identical to SEQ ID NO: 2744

SEQ ID NO: 3840 - DNA, 309 bp, Arabidopsis thaliana; identical to SEQ ID NO: 2745
  CDS (1)..(309)

SEQ ID NO: 3841 - protein, 102 aa, Arabidopsis thaliana; identical to SEQ ID NO: 2746

SEQ ID NO: 3842 - DNA, 309 bp, Arabidopsis thaliana; identical to SEQ ID NO: 2573
  CDS (1)..(309)

SEQ ID NO: 3843 - protein, 102 aa, Arabidopsis thaliana; identical to SEQ ID NO: 2574

SEQ ID NO: 3844 - DNA, 309 bp, Arabidopsis thaliana; identical to SEQ ID NO: 2747
  CDS (1)..(309)

SEQ ID NO: 3845 - protein, 102 aa, Arabidopsis thaliana; identical to SEQ ID NO: 2748

SEQ ID NO: 3846 - DNA, 309 bp, Arabidopsis thaliana; identical to SEQ ID NO: 2749
  CDS (1)..(309)

SEQ ID NO: 3847 - protein, 102 aa, Arabidopsis thaliana; identical to SEQ ID NO: 2750

SEQ ID NO: 3848 - DNA, 309 bp, Arabidopsis thaliana; identical to SEQ ID NO: 2751
  CDS (1)..(309)

SEQ ID NO: 3849 - protein, 102 aa, Arabidopsis thaliana; identical to SEQ ID NO: 2752

SEQ ID NO: 3850 - DNA, 378 bp, Oryza sativa; identical to SEQ ID NO: 2753
  CDS (1)..(378)

SEQ ID NO: 3851 - protein, 125 aa, Oryza sativa; identical to SEQ ID NO: 2754

SEQ ID NO: 3852 - DNA, 411 bp, Oryza sativa; identical to SEQ ID NO: 3119
  CDS (1)..(411)

SEQ ID NO: 3853 - protein, 136 aa, Oryza sativa; identical to SEQ ID NO: 3120

SEQ ID NO: 3854 - DNA, 312 bp, Oryza sativa; identical to SEQ ID NO: 2755
  CDS (1)..(312)

SEQ ID NO: 3855 - protein, 103 aa, Oryza sativa; identical to SEQ ID NO: 2756

SEQ ID NO: 3856 - DNA, 444 bp, Oryza sativa; identical to SEQ ID NO: 2757
  CDS (1)..(444)

SEQ ID NO: 3857 - protein, 147 aa, Oryza sativa; identical to SEQ ID NO: 2758

SEQ ID NO: 3858 - DNA, 378 bp, Oryza sativa; identical to SEQ ID NO: 2759
  CDS (1)..(378)

SEQ ID NO: 3859 - protein, 125 aa, Oryza sativa; identical to SEQ ID NO: 2760

SEQ ID NO: 3860 - DNA, 408 bp, Oryza sativa; identical to SEQ ID NO: 2761
  CDS (1)..(408)

SEQ ID NO: 3861 - protein, 135 aa, Oryza sativa; identical to SEQ ID NO: 2762

SEQ ID NO: 3862 - DNA, 402 bp, Oryza sativa; identical to SEQ ID NO: 2763
  CDS (1)..(402)

SEQ ID NO: 3863 - protein, 133 aa, Oryza sativa; identical to SEQ ID NO: 2764

SEQ ID NO: 3864 - DNA, 396 bp, Oryza sativa; identical to SEQ ID NO: 3111
  CDS (1)..(396)

SEQ ID NO: 3865 - protein, 131 aa, Oryza sativa; identical to SEQ ID NO: 3112

SEQ ID NO: 3866 - DNA, 408 bp, Oryza sativa; identical to SEQ ID NO: 2765
  CDS (1)..(408)

SEQ ID NO: 3867 - protein, 135 aa, Oryza sativa; identical to SEQ ID NO: 2766

SEQ ID NO: 3868 - DNA, 384 bp, Oryza sativa; identical to SEQ ID NO: 2767
  CDS (1)..(384)

SEQ ID NO: 3869 - protein, 127 aa, Oryza sativa; identical to SEQ ID NO: 2768

SEQ ID NO: 3870 - DNA, 345 bp, Oryza sativa; identical to SEQ ID NO: 2769
  CDS (1)..(345)

SEQ ID NO: 3871 - protein, 114 aa, Oryza sativa; identical to SEQ ID NO: 2770

SEQ ID NO: 3872 - DNA, 417 bp, Oryza sativa; identical to SEQ ID NO: 2771
  CDS (1)..(417)

SEQ ID NO: 3873 - protein, 138 aa, Oryza sativa; identical to SEQ ID NO: 2772

SEQ ID NO: 3874 - DNA, 399 bp, Oryza sativa; identical to SEQ ID NO: 2773
  CDS (1)..(399)

SEQ ID NO: 3875 - protein, 132 aa, Oryza sativa; identical to SEQ ID NO: 2774

SEQ ID NO: 3876 - DNA, 411 bp, Oryza sativa; identical to SEQ ID NO: 2775
  CDS (1)..(411)

SEQ ID NO: 3877 - protein, 136 aa, Oryza sativa; identical to SEQ ID NO: 2776

SEQ ID NO: 3878 - DNA, 579 bp, Oryza sativa; identical to SEQ ID NO: 2777
  CDS (1)..(579)

SEQ ID NO: 3879 - protein, 192 aa, Oryza sativa; identical to SEQ ID NO: 2778

SEQ ID NO: 3880 - DNA, 495 bp, Oryza sativa; identical to SEQ ID NO: 2779
  CDS (1)..(495)

SEQ ID NO: 3881 - protein, 164 aa, Oryza sativa; identical to SEQ ID NO: 2780

SEQ ID NO: 3882 - DNA, 327 bp, Oryza sativa; identical to SEQ ID NO: 2781
  CDS (1)..(327)

SEQ ID NO: 3883 - protein, 108 aa, Oryza sativa; identical to SEQ ID NO: 2782

SEQ ID NO: 3884 - DNA, 330 bp, Oryza sativa; identical to SEQ ID NO: 2783
  CDS (1)..(330)

SEQ ID NO: 3885 - protein, 109 aa, Oryza sativa; identical to SEQ ID NO: 2784

SEQ ID NO: 3886 - DNA, 330 bp, Oryza sativa; identical to SEQ ID NO: 2785
  CDS (1)..(330)

SEQ ID NO: 3887 - protein, 109 aa, Oryza sativa; identical to SEQ ID NO: 2786

SEQ ID NO: 3888 - DNA, 330 bp, Oryza sativa; identical to SEQ ID NO: 2787
  CDS (1)..(330)

SEQ ID NO: 3889 - protein, 109 aa, Oryza sativa; identical to SEQ ID NO: 2788

SEQ ID NO: 3890 - DNA, 312 bp, Oryza sativa; identical to SEQ ID NO: 2789
  CDS (1)..(312)

SEQ ID NO: 3891 - protein, 103 aa, Oryza sativa; identical to SEQ ID NO: 2790

SEQ ID NO: 3892 - DNA, 315 bp, Oryza sativa; identical to SEQ ID NO: 2791
  CDS (1)..(315)

SEQ ID NO: 3893 - protein, 104 aa, Oryza sativa; identical to SEQ ID NO: 2792

SEQ ID NO: 3894 - DNA, 309 bp, Brassica napus; identical to SEQ ID NO: 2793
  CDS (1)..(309)

SEQ ID NO: 3895 - protein, 102 aa, Brassica napus; identical to SEQ ID NO: 2794

SEQ ID NO: 3896 - DNA, 537 bp, Brassica napus; identical to SEQ ID NO: 3157
  CDS (1)..(537)

SEQ ID NO: 3897 - protein, 178 aa, Brassica napus; identical to SEQ ID NO: 3158

SEQ ID NO: 3898 - DNA, 309 bp, Brassica napus; identical to SEQ ID NO: 2795
  CDS (1)..(309)

SEQ ID NO: 3899 - protein, 102 aa, Brassica napus; identical to SEQ ID NO: 2796

SEQ ID NO: 3900 - DNA, 309 bp, Brassica napus; identical to SEQ ID NO: 2797
  CDS (1)..(309)

SEQ ID NO: 3901 - protein, 102 aa, Brassica napus; identical to SEQ ID NO: 2798

SEQ ID NO: 3902 - DNA, 309 bp, Brassica napus; identical to SEQ ID NO: 2799
  CDS (1)..(309)

SEQ ID NO: 3903 - protein, 102 aa, Brassica napus; identical to SEQ ID NO: 2800

SEQ ID NO: 3904 - DNA, 309 bp, Brassica napus; identical to SEQ ID NO: 2801
  CDS (1)..(309)

SEQ ID NO: 3905 - protein, 102 aa, Brassica napus; identical to SEQ ID NO: 2802

SEQ ID NO: 3906 - DNA, 318 bp, Brassica napus; identical to SEQ ID NO: 2803
  CDS (1)..(318)

SEQ ID NO: 3907 - protein, 105 aa, Brassica napus; identical to SEQ ID NO: 2804

SEQ ID NO: 3908 - DNA, 300 bp, Brassica napus; identical to SEQ ID NO: 2805
  CDS (1)..(300)

SEQ ID NO: 3909 - protein, 99 aa, Brassica napus; identical to SEQ ID NO: 2806

SEQ ID NO: 3910 - DNA, 309 bp, Brassica napus; identical to SEQ ID NO: 2807
  CDS (1)..(309)

SEQ ID NO: 3911 - protein, 102 aa, Brassica napus; identical to SEQ ID NO: 2808

SEQ ID NO: 3912 - DNA, 519 bp, Brassica napus; identical to SEQ ID NO: 2809
  CDS (1)..(519)

SEQ ID NO: 3913 - protein, 172 aa, Brassica napus; identical to SEQ ID NO: 2810

SEQ ID NO: 3914 - DNA, 315 bp, Triticum aestivum; identical to SEQ ID NO: 2813
  CDS (1)..(315)

SEQ ID NO: 3915 - protein, 104 aa, Triticum aestivum; identical to SEQ ID NO: 2814

SEQ ID NO: 3916 - DNA, 306 bp, Glycine max; identical to SEQ ID NO: 2815
  CDS (1)..(306)

SEQ ID NO: 3917 - protein, 101 aa, Glycine max; identical to SEQ ID NO: 2816

SEQ ID NO: 3918 - DNA, 309 bp, Brassica napus; identical to SEQ ID NO: 2817
  CDS (1)..(309)

SEQ ID NO: 3919 - protein, 102 aa, Brassica napus; identical to SEQ ID NO: 2818

SEQ ID NO: 3920 - DNA, 309 bp, Brassica napus; identical to SEQ ID NO: 2819
  CDS (1)..(309)

SEQ ID NO: 3921 - protein, 102 aa, Brassica napus; identical to SEQ ID NO: 2820

SEQ ID NO: 3922 - DNA, 399 bp, Glycine max; identical to SEQ ID NO: 2821
  CDS (1)..(399)

SEQ ID NO: 3923 - protein, 132 aa, Glycine max; identical to SEQ ID NO: 2822

SEQ ID NO: 3924 - DNA, 312 bp, Triticum aestivum; identical to SEQ ID NO: 2823
  CDS (1)..(312)

SEQ ID NO: 3925 - protein, 103 aa, Triticum aestivum; identical to SEQ ID NO: 2824

SEQ ID NO: 3926 - DNA, 414 bp, Triticum aestivum; identical to SEQ ID NO: 2825
  CDS (1)..(414)

SEQ ID NO: 3927 - protein, 137 aa, Triticum aestivum; identical to SEQ ID NO: 2826

SEQ ID NO: 3928 - DNA, 414 bp, Zea mays; identical to SEQ ID NO: 2827
  CDS (1)..(414)

SEQ ID NO: 3929 - protein, 137 aa, Zea mays; identical to SEQ ID NO: 2828

SEQ ID NO: 3930 - DNA, 468 bp, Zea mays; identical to SEQ ID NO: 2829
  CDS (1)..(468)

SEQ ID NO: 3931 - protein, 155 aa, Zea mays; identical to SEQ ID NO: 2830

SEQ ID NO: 3932 - DNA, 504 bp, Zea mays; identical to SEQ ID NO: 2831
  CDS (1)..(504)

SEQ ID NO: 3933 - protein, 167 aa, Zea mays; identical to SEQ ID NO: 2832

SEQ ID NO: 3934 - DNA, 312 bp, Hordeum vulgare; identical to SEQ ID NO: 2833
  CDS (1)..(312)

SEQ ID NO: 3935 - protein, 103 aa, Hordeum vulgare; identical to SEQ ID NO: 2834

SEQ ID NO: 3936 - DNA, 393 bp, Hordeum vulgare; identical to SEQ ID NO: 2835
  CDS (1)..(393)

SEQ ID NO: 3937 - protein, 130 aa, Hordeum vulgare; identical to SEQ ID NO: 2836

SEQ ID NO: 3938 - DNA, 399 bp, Brassica napus
  CDS (1)..(399)
atgacgatgatcagatccatctcgatgctaacgttgctcgtcacactagctgcatccatttccatggcctcctccgcttcatccgcagactttgttaagaagactatctcttcccacaaaatcgtcatcttctccaaatcctactgcccgtattgcaggagagcgaagtctgtgttcagtgagctgaatcaagttcctcatgttgtcgagcttgacgaaagagaggatggggggagtatccagagtgcacttggagagattgttggaaggcgaacagtaccgcaggttttcattaacggaaagcacatcggaggttcagacgatacagtagacgcgcatgagagtggggaactggccaagcttcttggcgtttccgaaagtacaagagctgaactctag

SEQ ID NO: 3939 - protein, 132 aa, Brassica napus
MTMIRSISMLTLLVTLAASISMASSASSADFVKKTISSHKIVIFSKSYCPYCRRAKSVFSELNQVPHVVELDEREDGGSIQSALGEIVGRRTVPQVFINGKHIGGSDDTVDAHESGELAKLLGVSESTRAEL

SEQ ID NO: 3940 - DNA, 402 bp, Brassica napus
  CDS (1)..(402)
atgacaatgatgagatctttctcgatggcaatgttgctcgtcgcactagtttcatccatctctattgtttcttcggcttcttcatcccctgaagccgagtttgttaagaagaccatctcttcccacaagatcgttatcttctccaaatcctactgcccgtattgcaggagagccaaatctgtgttcagtgagctggatcaggttcctcatgttgtggagcttgatgaaagagaagatgggtggaacgttcagagtgcacttggagagattgttggaaggcgaacagtaccacaggttttcattaacggaaagcacattggaggatcagacgatactgtagaagcgcacgagagcggtgaactggccaagcttctcggtgtttccaccaaagctgaactctag

SEQ ID NO: 3941 - protein, 133 aa, Brassica napus
MTMMRSFSMAMLLVALVSSISIVSSASSSPEAEFVKKTISSHKIVIFSKSYCPYCRRAKSVFSELDQVPHVVELDEREDGWNVQSALGEIVGRRTVPQVFINGKHIGGSDDTVEAHESGELAKLLGVSTKAEL

SEQ ID NO: 3942 - DNA, 378 bp, Brassica napus; identical to SEQ ID NO: 2837
  CDS (1)..(378)

SEQ ID NO: 3943 - protein, 125 aa, Brassica napus; identical to SEQ ID NO: 2838

SEQ ID NO: 3944 - DNA, 522 bp, Brassica napus; identical to SEQ ID NO: 2839
  CDS (1)..(522)

SEQ ID NO: 3945 - protein, 173 aa, Brassica napus; identical to SEQ ID NO: 2840

SEQ ID NO: 3946 - DNA, 402 bp, Brassica napus
  CDS (1)..(402)
atgacaatgatgagatctttctcgatggcaatgttgctcgtcgcactagtttcatccatctctattgtttcttcggcttcttcatcccctgaagccgagtttgttaagaagaccatctcttcccacaagatcgttatcttctccaaatcctactgcccgtattgcaggagagccaaatctgtgttcagtgagctggatcaggttcctcatgttgtggagcttgatgaaagagaagatgggtggaacgttcagagtgcacttggagagattgttggaaggcgaacagtaccacaggttttcattaacggaaagcacattggaggatcagacgatactgtagaagcgcatgaaagcggtgaactggccaagcttctcggtctttccaccaaagctgaactctag

SEQ ID NO: 3947 - protein, 133 aa, Brassica napus
MTMMRSFSMAMLLVALVSSISIVSSASSSPEAEFVKKTISSHKIVIFSKSYCPYCRRAKSVFSELDQVPHVVELDEREDGWNVQSALGEIVGRRTVPQVFINGKHIGGSDDTVEAHESGELAKLLGLSTKAEL

SEQ ID NO: 3948 - DNA, 525 bp, Brassica napus; identical to SEQ ID NO: 2841
  CDS (1)..(525)

SEQ ID NO: 3949 - protein, 174 aa, Brassica napus; identical to SEQ ID NO: 2842

SEQ ID NO: 3950 - DNA, 399 bp, Brassica napus
  CDS (1)..(399)
atgacgatgatcagatccatctcgatgctaacgttgctcgtcacactagctgcatccatctccatggtctcctccgcttcatccgcagactttgttaagaagactatctcttcccacaagatcgtcatcttctccaaatcctactgcccgtattgtaggagagcgaagtctgtgttcagtgagctgaatcaggttcctcatgttgtcgagcttgacgaaagagaggatggggggagtatccagagtgcacttggagagattgttggaaggcgaacagtaccgcaggttttcattaacggaaagcacatcggaggttcagacgatacagtagacgcgcatgagagtggggaactggccaagcttcttggcgtttccgaaagtacaagagctgaactctag

SEQ ID NO: 3951 - protein, 132 aa, Brassica napus
MTMIRSISMLTLLVTLAASISMVSSASSADFVKKTISSHKIVIFSKSYCPYCRRAKSVFSELNQVPHVVELDEREDGGSIQSALGEIVGRRTVPQVFINGKHIGGSDDTVDAHESGELAKLLGVSESTRAEL

SEQ ID NO: 3952 - DNA, 309 bp, Brassica napus; identical to SEQ ID NO: 2843
  CDS (1)..(309)

SEQ ID NO: 3953 - protein, 102 aa, Brassica napus; identical to SEQ ID NO: 2844

SEQ ID NO: 3954 - DNA, 309 bp, Brassica napus; identical to SEQ ID NO: 2845
  CDS (1)..(309)

SEQ ID NO: 3955 - protein, 102 aa, Brassica napus; identical to SEQ ID NO: 2846

SEQ ID NO: 3956 - DNA, 522 bp, Brassica napus; identical to SEQ ID NO: 2847
  CDS (1)..(522)

SEQ ID NO: 3957 - protein, 173 aa, Brassica napus; identical to SEQ ID NO: 2848

SEQ ID NO: 3958 - DNA, 435 bp, Brassica napus; identical to SEQ ID NO: 2849
  CDS (1)..(435)

SEQ ID NO: 3959 - protein, 144 aa, Brassica napus; identical to SEQ ID NO: 2850

SEQ ID NO: 3960 - DNA, 435 bp, Brassica napus; identical to SEQ ID NO: 2851
  CDS (1)..(435)

SEQ ID NO: 3961 - protein, 144 aa, Brassica napus; identical to SEQ ID NO: 2852

SEQ ID NO: 3962 - DNA, 309 bp, Brassica napus; identical to SEQ ID NO: 2853
  CDS (1)..(309)

SEQ ID NO: 3963 - protein, 102 aa, Brassica napus; identical to SEQ ID NO: 2854

SEQ ID NO: 3964 - DNA, 300 bp, Brassica napus; identical to SEQ ID NO: 2855
  CDS (1)..(300)

SEQ ID NO: 3965 - protein, 99 aa, Brassica napus; identical to SEQ ID NO: 2856

SEQ ID NO: 3966 - DNA, 363 bp, Brassica napus; identical to SEQ ID NO: 2857
  CDS (1)..(363)

SEQ ID NO: 3967 - protein, 120 aa, Brassica napus; identical to SEQ ID NO: 2858

SEQ ID NO: 3968 - DNA, 336 bp, Brassica napus; identical to SEQ ID NO: 2859
  CDS (1)..(336)

SEQ ID NO: 3969 - protein, 111 aa, Brassica napus; identical to SEQ ID NO: 2860

SEQ ID NO: 3970 - DNA, 309 bp, Brassica napus; identical to SEQ ID NO: 2861
  CDS (1)..(309)

SEQ ID NO: 3971 - protein, 102 aa, Brassica napus; identical to SEQ ID NO: 2862

SEQ ID NO: 3972 - DNA, 522 bp, Brassica napus; identical to SEQ ID NO: 2863
  CDS (1)..(522)

SEQ ID NO: 3973 - protein, 173 aa, Brassica napus; identical to SEQ ID NO: 2864

SEQ ID NO: 3974 - DNA, 309 bp, Brassica napus; identical to SEQ ID NO: 2865
  CDS (1)..(309)

SEQ ID NO: 3975 - protein, 102 aa, Brassica napus; identical to SEQ ID NO: 2866

SEQ ID NO: 3976 - DNA, 300 bp, Brassica napus; identical to SEQ ID NO: 2867
  CDS (1)..(300)

SEQ ID NO: 3977 - protein, 99 aa, Brassica napus; identical to SEQ ID NO: 2868

SEQ ID NO: 3978 - DNA, 309 bp, Brassica napus; identical to SEQ ID NO: 2869
  CDS (1)..(309)

SEQ ID NO: 3979 - protein, 102 aa, Brassica napus; identical to SEQ ID NO: 2870

SEQ ID NO: 3980 - DNA, 309 bp, Brassica napus; identical to SEQ ID NO: 2871
  CDS (1)..(309)

SEQ ID NO: 3981 - protein, 102 aa, Brassica napus; identical to SEQ ID NO: 2872

SEQ ID NO: 3982 - DNA, 309 bp, Brassica napus; identical to SEQ ID NO: 2873
  CDS (1)..(309)

SEQ ID NO: 3983 - protein, 102 aa, Brassica napus; identical to SEQ ID NO: 2874

SEQ ID NO: 3984 - DNA, 312 bp, Brassica napus; identical to SEQ ID NO: 2875
  CDS (1)..(312)

SEQ ID NO: 3985 - protein, 103 aa, Brassica napus; identical to SEQ ID NO: 2876

SEQ ID NO: 3986 - DNA, 426 bp, Brassica napus; identical to SEQ ID NO: 2877
  CDS (1)..(426)

SEQ ID NO: 3987 - protein, 141 aa, Brassica napus; identical to SEQ ID NO: 2878

SEQ ID NO: 3988 - DNA, 309 bp, Brassica napus; identical to SEQ ID NO: 2879
  CDS (1)..(309)

SEQ ID NO: 3989 - protein, 102 aa, Brassica napus; identical to SEQ ID NO: 2880

SEQ ID NO: 3990 - DNA, 333 bp, Glycine max; identical to SEQ ID NO: 2881
  CDS (1)..(333)

SEQ ID NO: 3991 - protein, 110 aa, Glycine max; identical to SEQ ID NO: 2882

SEQ ID NO: 3992 - DNA, 324 bp, Glycine max; identical to SEQ ID NO: 2883
  CDS (1)..(324)

SEQ ID NO: 3993 - protein, 107 aa, Glycine max; identical to SEQ ID NO: 2884

SEQ ID NO: 3994 - DNA, 501 bp, Glycine max; identical to SEQ ID NO: 2885
  CDS (1)..(501)

SEQ ID NO: 3995 - protein, 166 aa, Glycine max; identical to SEQ ID NO: 2886

SEQ ID NO: 3996 - DNA, 399 bp, Glycine max; identical to SEQ ID NO: 2887
  CDS (1)..(399)

SEQ ID NO: 3997 - protein, 132 aa, Glycine max; identical to SEQ ID NO: 2888

SEQ ID NO: 3998 - DNA, 309 bp, Glycine max; identical to SEQ ID NO: 2889
  CDS (1)..(309)

SEQ ID NO: 3999 - protein, 102 aa, Glycine max; identical to SEQ ID NO: 2890

SEQ ID NO: 4000 - DNA, 525 bp, Glycine max; identical to SEQ ID NO: 2891
  CDS (1)..(525)

SEQ ID NO: 4001 - protein, 174 aa, Glycine max; identical to SEQ ID NO: 2892

SEQ ID NO: 4002 - DNA, 483 bp, Glycine max; identical to SEQ ID NO: 2893
  CDS (1)..(483)

SEQ ID NO: 4003 - protein, 160 aa, Glycine max; identical to SEQ ID NO: 2894

SEQ ID NO: 4004 - DNA, 522 bp, Glycine max; identical to SEQ ID NO: 2895
  CDS (1)..(522)

SEQ ID NO: 4005 - protein, 173 aa, Glycine max; identical to SEQ ID NO: 2896

SEQ ID NO: 4006 - DNA, 411 bp, Glycine max; identical to SEQ ID NO: 2897
  CDS (1)..(411)

SEQ ID NO: 4007 - protein, 136 aa, Glycine max; identical to SEQ ID NO: 2898

SEQ ID NO: 4008 - DNA, 309 bp, Glycine max; identical to SEQ ID NO: 2899
  CDS (1)..(309)

SEQ ID NO: 4009 - protein, 102 aa, Glycine max; identical to SEQ ID NO: 2900

SEQ ID NO: 4010 - DNA, 423 bp, Glycine max; identical to SEQ ID NO: 2901
  CDS (1)..(423)

SEQ ID NO: 4011 - protein, 140 aa, Glycine max; identical to SEQ ID NO: 2902

SEQ ID NO: 4012 - DNA, 318 bp, Glycine max; identical to SEQ ID NO: 2907
  CDS (1)..(318)

SEQ ID NO: 4013 - protein, 105 aa, Glycine max; identical to SEQ ID NO: 2908

SEQ ID NO: 4014 - DNA, 402 bp, Glycine max; identical to SEQ ID NO: 2909
  CDS (1)..(402)

SEQ ID NO: 4015 - protein, 133 aa, Glycine max; identical to SEQ ID NO: 2910

SEQ ID NO: 4016 - DNA, 309 bp, Glycine max; identical to SEQ ID NO: 2911
  CDS (1)..(309)

SEQ ID NO: 4017 - protein, 102 aa, Glycine max; identical to SEQ ID NO: 2912

SEQ ID NO: 4018 - DNA, 402 bp, Glycine max; identical to SEQ ID NO: 2913
  CDS (1)..(402)

SEQ ID NO: 4019 - protein, 133 aa, Glycine max; identical to SEQ ID NO: 2914

SEQ ID NO: 4020 - DNA, 480 bp, Zea mays; identical to SEQ ID NO: 2915
  CDS (1)..(480)

SEQ ID NO: 4021 - protein, 159 aa, Zea mays; identical to SEQ ID NO: 2916

SEQ ID NO: 4022 - DNA, 393 bp, Zea mays; identical to SEQ ID NO: 2917
  CDS (1)..(393)

SEQ ID NO: 4023 - protein, 130 aa, Zea mays; identical to SEQ ID NO: 2918

SEQ ID NO: 4024 - DNA, 345 bp, Zea mays; identical to SEQ ID NO: 2919
  CDS (1)..(345)

SEQ ID NO: 4025 - protein, 114 aa, Zea mays; identical to SEQ ID NO: 2920

SEQ ID NO: 4026 - DNA, 312 bp, Zea mays; identical to SEQ ID NO: 2921
  CDS (1)..(312)

SEQ ID NO: 4027 - protein, 103 aa, Zea mays; identical to SEQ ID NO: 2922

SEQ ID NO: 4028 - DNA, 342 bp, Zea mays; identical to SEQ ID NO: 2923
  CDS (1)..(342)

SEQ ID NO: 4029 - protein, 113 aa, Zea mays; identical to SEQ ID NO: 2924

SEQ ID NO: 4030 - DNA, 537 bp, Zea mays; identical to SEQ ID NO: 2925
  CDS (1)..(537)

SEQ ID NO: 4031 - protein, 178 aa, Zea mays; identical to SEQ ID NO: 2926

SEQ ID NO: 4032 - DNA, 399 bp, Zea mays; identical to SEQ ID NO: 2927
  CDS (1)..(399)

SEQ ID NO: 4033 - protein, 132 aa, Zea mays; identical to SEQ ID NO: 2928

SEQ ID NO: 4034 - DNA, 315 bp, Zea mays; identical to SEQ ID NO: 2929
  CDS (1)..(315)

SEQ ID NO: 4035 - protein, 104 aa, Zea mays; identical to SEQ ID NO: 2930

SEQ ID NO: 4036 - DNA, 21 bp, Artificial sequence
  primer
atggagaatctacaaaagatg

SEQ ID NO: 4037 - DNA, 20 bp, Artificial sequence
  primer
tcaaagccataaagctccag

SEQ ID NO: 4038 - protein, 108 aa, Artificial sequence
  consensus sequence
  Variant (3)..(8): Xaa in position 3 to 8 is any amino acid
  Variant (9)..(13): Xaa in position 9 to 13 is any or no amino acid
  Variant (15)..(33): Xaa in position 15 to 33 is any amino acid
  Variant (34)..(38): Xaa in position 34 to 38 is any or no amino acid
  Variant (40)..(40): Xaa in position 40 is any amino acid
  Variant (42)..(49): Xaa in position 42 to 49 is any amino acid
  Variant (50)..(53): Xaa in position 50 to 53 is any or no amino acid
  Variant (55)..(57): Xaa in position 55 to 57 is any amino acid
  Variant (58)..(78): Xaa in position 58 to 78 is any or no amino acid
  Variant (81)..(81): Xaa in position 81 is any amino acid
  Variant (84)..(85): Xaa in position 84 to 85 is any amino acid
  Variant (87)..(89): Xaa in position 87 to 89 is any amino acid
  Variant (91)..(100): Xaa in position 91 to 100 is any amino acid
  Variant (101)..(101): Xaa in position 101 is any or no amino acid
  Variant (103)..(103): Xaa in position 103 is any amino acid
  Variant (105)..(107): Xaa in position 105 to 107 is any amino acid
VVXXXXXXXXXXXCXXXXXXXXXXXXXXXXXXXXXXXXEXDXXXXXXXXXXXXLXXXXXXXXXXXXXXXXXXXXXXXXVPXVFXXGXXXGXXXXXXXXXXXGXLXXXL

SEQ ID NO: 4039 - protein, 29 aa, Artificial sequence
  protein pattern
  Variant (2)..(2): Xaa in position 2 is any amino acid
  Variant (3)..(3): Xaa in position 3 is Ala, Ile, Leu or Val
  Variant (4)..(4): Xaa in position 4 is Phe or Tyr
  Variant (5)..(5): Xaa in position 5 is Ile, Leu or Val
  Variant (6)..(6): Xaa in position 6 is any amino acid
  Variant (8)..(10): Xaa in position 8 to 10 is any amino acid
  Variant (12)..(12): Xaa in position 12 is Ala, Gly, Pro, Ser or Thr
  Variant (13)..(24): Xaa in position 13 to 24 is any amino acid
  Variant (26)..(27): Xaa in position 26 to 27 is any amino acid
  Variant (28)..(28): Xaa in position 28 is any or no amino acid
PXXXXXGXXXGXXXXXXXXXXXXXLXXXL

SEQ ID NO: 4040 - DNA, 864 bp, Arabidopsis thaliana
  CDS (1)..(864)
atggatcggcaaagttccgatgacatcatgaaatttctcgacggcatggctagctccgacgatgttctttttggcttcctcgacgaaggaaaccactcaccggaggattataacttcgccgccggcgacgaatccgaagttgacaacgataccaccgattgtaattcagaagagaacagaaaattttggcaagaacacgaacaacttctccaggcgacactgtataggacaagttcaattgagacaaagataagacaagcaactaaggaagcgttgaaagtagttagatcaaagggtttggtatgtgtctgccggagaccggttaccgacggttgtcgtagctgtttacgcggcgaagtatctagcctcctccgagaagctggctatgattgcgtcatttccaaatctaagtggagaagctctcatgagatccctgcaggtgagcatgaatacttggaggtcgtggacaaatcggtttcaaagaaaggcgagatccgggtggtgatcgaactatgttttagggcggagtttgagatggcgagaggcagtgaagagtacaagcgactcatcggaatgttaccggaagtgtatgtcgggaaaacggagaggctaaaatcattaataaagatattgtgcaccgcagcgaagaagtgtatgaaagacaagaagatgcacatgggtccttggagaaaacacaaatacatgcaggctaaatggtttggaacttgtgagagaaaatctgtgtcgccagtatccgaaactgaggagaatatgtttccggtggcaaagcagagggtttctatgttgaattatggtctttttggtgctggaataggccgtccgaccgttgtagcggttgtgtga

SEQ ID NO: 4041 - protein, 287 aa, Arabidopsis thaliana
MDRQSSDDIMKFLDGMASSDDVLFGFLDEGNHSPEDYNFAAGDESEVDNDTTDCNSEENRKFWQEHEQLLQATLYRTSSIETKIRQATKEALKVVRSKGLVCVCRRPVTDGCRSCLRGEVSSLLREAGYDCVISKSKWRSSHEIPAGEHEYLEVVDKSVSKKGEIRVVIELCFRAEFEMARGSEEYKRLIGMLPEVYVGKTERLKSLIKILCTAAKKCMKDKKMHMGPWRKHKYMQAKWFGTCERKSVSPVSETEENMFPVAKQRVSMLNYGLFGAGIGRPTVVAVV

SEQ ID NO: 4042 - DNA, 1299 bp, Glycine max
  CDS (97)..(1065)
gggcgtgcgtacggctgcgagaagacgacagaagggacaccaatttgttttaagtcaaaaaaacaaagaccaccttgttcggttgtttttgttgttatgggtgccacctctatggtccgaggaggagtcacgaggtttctaccccgaagggaatatttggggtgcgagaaattacaacttggagatgtggagtttgaatttctcgatgatggtgagatcatgtcgttggccaaaagtgaaggttctggcgatgagtttcatcaatccaatgaaatggaattggatgatgaagatgatggtgagagggttgatggtggcagcgttgaggagaatagaagcttttgggataatcaacaccagcttttgcagaccaacctatatagaacaacttcagttgagtcaaggataagaaatgtcaccaaagaagccgttcaggatatacaaaacgcggaaatagtgtgcagttgcagtagacagataatttccagatcctgtagaaactgtttcatgatacaagtctcaaggcgccttcagaagtctggttatgacagtgccatttgcaaaacaaaatggagcagctcaccaagtattccatcaggggagcatacttttctagatgttatagacagcagaagcaaaaagcaagaaattagggtgatcatagaactgaatttccgagcagagtttgagatggcaagggcaagtgaagagtacaacgggcttgttcggaagctccctgaggtgtatgtggggaaaatagagagattaagcaacatcatcaaggtgttgtgcatgggagcaaaaaggtgcatgaaggaaaacaaaatgcacatgggaccatggaggaagcacaagtacgtgcacgctaagtggctaggtccatgcaaaaggaacacctcaacaacttcactttcaaattcaatgatgggaaattccgaggtgatgatgccaaaaccaaagcctagggcatcactgctaacaatggatctgatgctagaaactaatactaagacagaaatgttgaagcttcccaatatgcattgttcagctgttgaagttttgtaattgtaattaagacagaaaagtagctaggtttcatttctctctctttaaataatttatttgtagcaataggttggtacttcaaagttgccctgaatttgaaagatccattaaacatgtacctatttttttttattattgatatgttgctttacatatagggtgactcaattgagggttaaaatcatatttattttgccattaatccaaaaaaaaaaaaaaaaaaaaaagggcgcc

SEQ ID NO: 4043 - protein, 322 aa, Glycine max
MGATSMVRGGVTRFLPRREYLGCEKLQLGDVEFEFLDDGEIMSLAKSEGSGDEFHQSNEMELDDEDDGERVDGGSVEENRSFWDNQHQLLQTNLYRTTSVESRIRNVTKEAVQDIQNAEIVCSCSRQIISRSCRNCFMIQVSRRLQKSGYDSAICKTKWSSSPSIPSGEHTFLDVIDSRSKKQEIRVIIELNFRAEFEMARASEEYNGLVRKLPEVYVGKIERLSNIIKVLCMGAKRCMKENKMHMGPWRKHKYVHAKWLGPCKRNTSTTSLSNSMMGNSEVMMPKPKPRASLLTMDLMLETNTKTEMLKLPNMHCSAVEVL

SEQ ID NO: 4044 - DNA, 1393 bp, Glycine max
  CDS (52)..(960)
caggggggaagtgggagtcagacagacaaacaaactactgctacgttaatcatgggtccaacctctatggccgccggaagagtcacgaggtttttggccaggcactaccctctcgagcaccaccgtgataacgccgatgttgagttcgactttcttgatgatattggagaagccttgttagctcaaagtgctagcagtgatgagtgcggtcaccccaatgaaatggaggaacagttcgaccaagacgaggatcacagagataccgtcgaggagaatagaaccttttgggacaaacaacaccagcttttgcaggccagtatatgcagaactagttcttcggagtcacggataaggcatgccaccaaagaagcgcttcaggaaattcaaagcgcggaaactgtgtgcggttgtggcagacaggtggctgtgatcacaacttgtcgaaactgtttgatgagagaagtttctaggcggcttcagaaagcaggttatgatagtgctatttgcaaaactaaatggagaagctcacccgatatcccatcaggggaacacaattttttggatgtgatagacagcacaaagaagggggaggtgagggtgattgtggagctgaatttcagaggagagtttgagatggcaaggggaagtgaagactacaaccgacttgttaggaggcttccagaggtgtttgtggggaaggtggagagactgagcaacctaataaagatattgtgtatgggagccaaaaggtgcatgaaggaaaagaaaatgcacatggggccatggaggaagcataggtacatgcaagctaagtggttaggtccatgtgaaaggaacacttccacaacctcactttcagtgaggtataattctgagaggatattgccaaggccaaaggcatccatgttgactgttgatctgctagagaagccttcccaatatgcattgcactgctgttgaggttgtgtaatataattttaagagagagaaccccctttttttgtttattttggtaattaattaattcccctccctaaaaaggtgaatattaaatgagtgattcgcaaattaatgtcctatacacatgtacgtaaaaacaaattatggaaatgaatgtgcagttcaaaactgccttttaaaatttcataaaaaaaaaaaaaaaaaaaaaaaaaaaaaaatttgtctttcatcaaatttgctaatcttttacatgcaaaatgccaaactatttgatgaaaacatagtgtatacaaactcaaaaagacctttttcaattggtgtatataaagaaatggtataaaatagagtatcataagggtgggaagtattgtatttagcaaaaatagattttgcttgtaaagagagaatttggattgttgagtttccccatcta

SEQ ID NO: 4045 - protein, 302 aa, Glycine max
MGPTSMAAGRVTRFLARHYPLEHHRDNADVEFDFLDDIGEALLAQSASSDECGHPNEMEEQFDQDEDHRDTVEENRTFWDKQHQLLQASICRTSSSESRIRHATKEALQEIQSAETVCGCGRQVAVITTCRNCLMREVSRRLQKAGYDSAICKTKWRSSPDIPSGEHNFLDVIDSTKKGEVRVIVELNFRGEFEMARGSEDYNRLVRRLPEVFVGKVERLSNLIKILCMGAKRCMKEKKMHMGPWRKHRYMQAKWLGPCERNTSTTSLSVRYNSERILPRPKASMLTVDLLEKPSQYALHCC

SEQ ID NO: 4046 - DNA, 927 bp, Oryza sativa (japonica cultivar-group)
  CDS (1)..(927)
atgggagcgacgcggccgtcgccgatggcgtacaagaaggcgacggcggtgctggacgaggcggccagggcacggctgcgtggcccgttcgccagcggtgccgcgtccctccggcgtgatcaagacgacgacgacgacgacctcctggtggatctggtgcacgagttctacgacgacggcgagcgcggcgcggacgccacggcgaggggcggcgtgtcgtcgtcgccggagccggagcctaccgagtggaaggacgcgctgcgcgaggcgctagcggacgcgacgtccgacgcggcggccgcccgcatccgcgccgaggccgagcgcgccgtccgggatgccgttcgcaacggcggcgacgtgatccggaagcgagtcgtcgagcggctccgcgcccgagggttcgacgccggcgtgtgcaggtcgtcgtgggaaagaaccggcagcgtgccggcgggcagccacgagtacgtggacgtgacggcggcggcgtcggcgacggggcgtcgcgctcgctacatcgtcgaggtcaacgtcgccggcgagttcgagatcgcgaggccgagcgccgagtaccaggacctcctcctctcgctcccgccggtgctcgtcgcgactcccgaggccttcaggggggtcgccgcggcaatgtgcgccgcggcggcggagtccatccgcggcgcgggcatgcacctgccgccgtggaggcgggcgcggtacgtgcaggccaagtggtccgcaccgtacgagcgagtggcggcggcggcaccgccggagggagctaggacggcgccgtccggcggccggaagcgttgcggaatggagattgggcgcagggagatggccatcggaaaggagagattgatacctatgcctaccggattgagatcaaatacagttggtactaaaaaggacttcacacaatga

SEQ ID NO: 4047 - protein, 308 aa, Oryza sativa (japonica cultivar-group)
MGATRPSPMAYKKATAVLDEAARARLRGPFASGAASLRRDQDDDDDDLLVDLVHEFYDDGERGADATARGGVSSSPEPEPTEWKDALREALADATSDAAAARIRAEAERAVRDAVRNGGDVIRKRVVERLRARGFDAGVCRSSWERTGSVPAGSHEYVDVTAAASATGRRARYIVEVNVAGEFEIARPSAEYQDLLLSLPPVLVATPEAFRGVAAAMCAAAAESIRGAGMHLPPWRRARYVQAKWSAPYERVAAAAPPEGARTAPSGGRKRCGMEIGRREMAIGKERLIPMPTGLRSNTVGTKKDFTQ

SEQ ID NO: 4048 - DNA, 885 bp, Arabidopsis thaliana
  CDS (1)..(885)
atggatcggcaaaattccgatgacatcatgagatttctcgatggaatggctagctccgacgacgttcttttcggttttcttgacgaaggaaaccagtcaccggaagatttctccgtaaacctcaacgccggcgaagatgacggtgacgaagacgacaataataacaattctgaagataacaaagctttttggcaggaacacgaacaacttcttcaggggacactgtataggacaagttccattgagacaaagattagacaagctacaaaagaagcgttgaaacaagttaaatctaagggtctttattgtgtttgccggcgaccagtggacggcggttgccggagttgcttacgtggcgaaatctctagacacctaagagatgtcgccggctacgattgcgtcatctctaaatctaaatggagaagttgtcaagacatccctgcaggggaacacgaatttatagagattgtggaccgatcgggttcaaagaaaagcgagatgcgagtggtgattgagttatcatttagggcagagtttgagattgcaaaaggcagtgaagagtacaaaagacttatcagtcgattgcctgaggtttacgtcgggaaaaccgagaggcttcgatctctgataaagatattgtgcatagcgggaaagaaatgcttgagagacaagaaaatgcatatggctccttggagaaaacacaagtacatgcaagccaagtggcttggcacatgtgatcgatctagctccttggaagcttcggtttccgaggccatggagccagaaaattgggtgccggtggcgaagcctagggtttctatgttgaactatgatggtctcttaggtggtttctctgccggtccggccactgtagcggtcgtgtga

SEQ ID NO: 4049 - protein, 294 aa, Arabidopsis thaliana
MDRQNSDDIMRFLDGMASSDDVLFGFLDEGNQSPEDFSVNLNAGEDDGDEDDNNNNSEDNKAFWQEHEQLLQGTLYRTSSIETKIRQATKEALKQVKSKGLYCVCRRPVDGGCRSCLRGEISRHLRDVAGYDCVISKSKWRSCQDIPAGEHEFIEIVDRSGSKKSEMRVVIELSFRAEFEIAKGSEEYKRLISRLPEVYVGKTERLRSLIKILCIAGKKCLRDKKMHMAPWRKHKYMQAKWLGTCDRSSSLEASVSEAMEPENWVPVAKPRVSMLNYDGLLGGFSAGPATVAVV

SEQ ID NO: 4050 - DNA, 933 bp, Arabidopsis thaliana
  CDS (1)..(933)
atgccattacatatgaaaatccaaccgatcgacgaatccgatgtatcggaagaggtaccttacccggagacgatgagacagatgccgaaatcgaggctgaagcgtctctttgagcgtcagttcactaataagaacgtttcggagaaatttaccggctcagatgttgaggcaccgctttcgagaggtaactctggagattttgagccgagctctgtttgtttggccaagatggttctaaattttatggaggacaacaacggcggcgagaaacagcggtgtggacgtagccgatgtaactgttttagcgggagtggtacagagagctctgatgatgaaactgaatgttcttctggtgaagcttgtgagatcctcaagagtttggttctctgtaagagcatccgtgtgaggaatttgctgactgatgtgaccaagattgcggaaacaagtaagaattgcaagcttaaagatggatcgtgcttgaaaagtgtggctaatgggttagtgagtttaggttatgatgcggctctatgcaaatctcgctgggagaaatctccttcttgtcctgctggggaatatgagtatgtggatgtgataatgaaaggtgaaagactgttaatcgacatagatttcaaatcgaagttcgagattgctcgtgcaacaaaaacgtataagtcgatgctacaaactctgccttacatatttgtggggaaagcggataggctgcagaagatcatcgttctaatatgtaaagcggcaaagcagagcttaaagaagaaaggacttcatgtaccgccatggaggagagctgagtatgtgaaatccaagtggctgtcttctcatgttcgtgtagaccaaaactcaaatggagaagtcaagcaggaatcagtagaggtgatcgctgagtcggtcagttccatagtcttcggtgtctga

SEQ ID NO: 4051 - protein, 310 aa, Arabidopsis thaliana
MPLHMKIQPIDESDVSEEVPYPETMRQMPKSRLKRLFERQFTNKNVSEKFTGSDVEAPLSRGNSGDFEPSSVCLAKMVLNFMEDNNGGEKQRCGRSRCNCFSGSGTESSDDETECSSGEACEILKSLVLCKSIRVRNLLTDVTKIAETSKNCKLKDGSCLKSVANGLVSLGYDAALCKSRWEKSPSCPAGEYEYVDVIMKGERLLIDIDFKSKFEIARATKTYKSMLQTLPYIFVGKADRLQKIIVLICKAAKQSLKKKGLHVPPWRRAEYVKSKWLSSHVRVDQNSNGEVKQESVEVIAESVSSIVFGV

SEQ ID NO: 4052 - DNA, 789 bp, Oryza sativa subsp
  CDS (1)..(789)
atgagcctgtcgaacctggtgctcggcttcttcgaggaggctgagagggagcagagatggccggagaacggcgacgacgacgacgagggctccagcggcagcggcgccgccgagagcaaggccttctggcagaaccagcactcccagctgcatgaggctttggccaagaccagccaggtagagagcaggatacgggaggacacggaggaggcaatcaggaagatgcgcgccgcgggcgccgtctgctcctgcgcgaggcgggcggcggccggggactgccggagctgcacgctccggcatgtcgacgagcggctgcgcgacaccgggtacaacagcgccatctgcaagtccaagtggacgcgctcgccggacatcccttcaggcgagcacagctacgtggacgtggtggtgcagacgaggagcggcaaggcggtgcgggtggtggtggagctgagcttccgcgccgagttcgaggtggcccgcgccagcgcggagtaccgcgcgctggtgaccgcgctgccggaggtgttcgtcggacgcgccgaccggctgcgcgccgtcgtcaaggccatgtgcgccgcggccaagcagtgcatgaaggagaacaacatgcacatgggcccctggaggaagcacaagtacatgcagtccaagtggctcggcacgccagagcgtgtcgcggccgcggcggcggcgccggtggcggtctggtcgccggagaagcagaccaagttcagggcgtccatgctcagctttgacttcgcccgggccgccgtggaggttgcgtga

SEQ ID NO: 4053 - protein, 262 aa, Oryza sativa subsp
MSLSNLVLGFFEEAEREQRWPENGDDDDEGSSGSGAAESKAFWQNQHSQLHEALAKTSQVESRIREDTEEAIRKMRAAGAVCSCARRAAAGDCRSCTLRHVDERLRDTGYNSAICKSKWTRSPDIPSGEHSYVDVVVQTRSGKAVRVVVELSFRAEFEVARASAEYRALVTALPEVFVGRADRLRAVVKAMCAAAKQCMKENNMHMGPWRKHKYMQSKWLGTPERVAAAAAAPVAVWSPEKQTKFRASMLSFDFARAAVEVA

SEQ ID NO: 4054 - DNA, 873 bp, Oryza sativa subsp
  CDS (1)..(873)
atggtgctcgggttctacgaggaggccgagctccagagctcgccgccgggagactgcgccgccgccgccggcgacgacgacgacggcagcgacgacgaggggtccggcggcgccgccaagtgcagggcgttctggaaggagcagcagtcgcaactctacgaagcgctggccaagatgagctcggcggagagcaggatccaagcggacgcggaggaggccatgaggcagatgcgcgcggcggcggcgggcgcctgctcctgcgcgagccgcggcgcggcggcggcggcggcggcggcaggcggcggaggctgccggagctgcacgctccggtttcttgccgagcggctgcgcgacgccgggtacaacagcgcgatctgcaggtccaaatggccgcgatcgccggaaattccttcaggggagcacagctacgtggacgtggtggcgccgaccaggagcggcaaggcggtgcgggtggtggtcgagcccagcttccgcggcgagttcgagatggcgcgcggcggcgcggggtacagggcgctggtggcgtcgctgccggaggcgttcgtcggccgcgccgatcggctgcgcggcgtggtgcgcgtcatgtgcgccgcggcgaagcagtgcgcgcgggagagcggcatgcacatggcgccctggaggaagcagcggtacatggaggccaagtggctcgccacgccggagcgggtcgcgccgcccggcaacgccggcggcgccggcgacgcggtggcggtcgggtcgccgtcgtcgccgctgtcgccggggatgacgaacaggcagatgcagcccaagttcagggcgtccatgctcacgctcgacttcggcggccggaccgccgtggaggtcgtgtga

SEQ ID NO: 4055 - protein, 290 aa, Oryza sativa subsp
MVLGFYEEAELQSSPPGDCAAAAGDDDDGSDDEGSGGAAKCRAFWKEQQSQLYEALAKMSSAESRIQADAEEAMRQMRAAAAGACSCASRGAAAAAAAAGGGGCRSCTLRFLAERLRDAGYNSAICRSKWPRSPEIPSGEHSYVDVVAPTRSGKAVRVVVEPSFRGEFEMARGGAGYRALVASLPEAFVGRADRLRGVVRVMCAAAKQCARESGMHMAPWRKQRYMEAKWLATPERVAPPGNAGGAGDAVAVGSPSSPLSPGMTNRQMQPKFRASMLTLDFGGRTAVEVV

SEQ ID NO: 4056 - DNA, 921 bp, Oryza sativa subsp
  CDS (1)..(921)
atggttgtggaggaggccgtcgtcgcggccggcaatgagatgagcctgtccaacatggtgctcgggttctacgaggaggccgagctccagagctcgccgccgggagactgcgccgccgccgccggtgacgacgacgacggcagcgacgacgaggggtccggcggcgccgccaagtgcagggcgttctggaaggagcagcagtcgcaactctacgaagcgctggccaagatgagctcggcggagagcaggatccaagcggacgcggaggaggccatgaggcagatgcgcgcggcggcggcgggcgcctgctcctgcgcgagccgcggcgcggcggcggcggcggcaggcagcggaggctgccggagctgcacgctccggtttctcgccgagcggctgcgcgacgccgggtacaacagcgcgatctgcaggtccaaatggccgcgatcgccggaaattccttcaggggagcacagctacgtggacgtggtggcgccgaccaggagcggcaaggcggtgcgggtggtggtcgagcccagcttccgcggcgagttcgagatggcgcgcggcggcgcggggtacagggcgctggtggcgtcgctgccggaggcgttcgtcggccgcgccgatcggctgcgcggcgtggtgcgcgtcatgtgcgccgcggcgaagcagtgcgcgcgggagagcggcatgcacatggcgccctggaggaagcagcggtacatggaggccaaatggctcgccaagccggaacgggtcgcgccgcccggaaaagccggcggagccggggaaccggtggcggtcgggttgccgttgttgccgctgttgccggggatgacgaacaggcagatgcagcccaagttcagggcgtccatgctcacgctcgacttcggcggccggaccgccgtggaggtcgtgtga

SEQ ID NO: 4057 - protein, 306 aa, Oryza sativa subsp
MVVEEAVVAAGNEMSLSNMVLGFYEEAELQSSPPGDCAAAAGDDDDGSDDEGSGGAAKCRAFWKEQQSQLYEALAKMSSAESRIQADAEEAMRQMRAAAAGACSCASRGAAAAAAGSGGCRSCTLRFLAERLRDAGYNSAICRSKWPRSPEIPSGEHSYVDVVAPTRSGKAVRVVVEPSFRGEFEMARGGAGYRALVASLPEAFVGRADRLRGVVRVMCAAAKQCARESGMHMAPWRKQRYMEAKWLAKPERVAPPGKAGGAGEPVAVGLPLLPLLPGMTNRQMQPKFRASMLTLDFGGRTAVEVV

SEQ ID NO: 4058 - DNA, 849 bp, Vitis vinifera
  CDS (1)..(849)
  misc_feature (77)..(77): r is g or a
  misc_feature (223)..(223): w is a or t
  misc_feature (736)..(736): r is g or a
atggcagtgttcgtgagatcgaagcgagtcactgacccgctcgatgatagagtgaaagcgcgaatcgtcggccgtgrctcagtccccgtcagcagcggcagtagcagcgacgccggggaagagtcgccgtgcctctccgatctcgtctacggcttccttgaggactgcgccgaagctcaaccgtccgagatggaattgggttccgagaacgacgatgacgacwcttcgccgttcgatcccacagaggtggttgcgtctctgctttatccgaaggccaatgtcgatcggtaccgtacattgcttttctcgcatgtctccaaggccgtgggttcgctctcgtgtccgagatcaaacaaggcggcgatccggcggaatgtcgccgcggtgctcagagatctcggccacaatgcggcggtgtgccgcaccaaatgggacggctcgggcgggctcaccgccgggaaccacgagtttatcgacgtcctcagatcggagaaacgctacatcgtggacctcgacttcgccggcgagttcgagatcgcaagaccgaccgatcagtacaagcgtctcatccaaacactgcctagggttttcatcggtaaaagcgaggacttaaagaagatcgtgaagctaacgtgcgacgcggctaagagatcgctgaagagcagagggcttcacctgccaccctggaggaagaatcgatacatgcagaacaagtggttcgggccttgccggcgtrccgccacaccaagcccgccactggcgccggcatcgacggagttcactgtgaaatgccggtcagtggggttcgacgccgtttcggacggccgtttctttgtgcgtacaagatga

SEQ ID NO: 4059 - protein, 282 aa, Vitis vinifera
  misc_feature (26)..(26): The Xaa at location 26 stands for Asp, or Gly.
  misc_feature (75)..(75): The Xaa at location 75 stands for Ser, or Thr.
  misc_feature (246)..(246): The Xaa at location 246 stands for Ala, or Thr.
MAVFVRSKRVTDPLDDRVKARIVGRXSVPVSSGSSSDAGEESPCLSDLVYGFLEDCAEAQPSEMELGSENDDDDXSPFDPTEVVASLLYPKANVDRYRTLLFSHVSKAVGSLSCPRSNKAAIRRNVAAVLRDLGHNAAVCRTKWDGSGGLTAGNHEFIDVLRSEKRYIVDLDFAGEFEIARPTDQYKRLIQTLPRVFIGKSEDLKKIVKLTCDAAKRSLKSRGLHLPPWRKNRYMQNKWFGPCRRXATPSPPLAPASTEFTVKCRSVGFDAVSDGRFFVRTR

SEQ ID NO: 4060 - DNA, 912 bp, Vitis vinifera
  CDS (1)..(912)
  misc_feature (171)..(171): y is t or c
  misc_feature (549)..(549): y is t or c
  misc_feature (630)..(630): r is g or a
  misc_feature (634)..(634): r is g or a
atgcccggagtagcggctagacttccggtgactccctggagttccgacgacactctcaaattctccggtgactcggagagtttaggtgatatggttttcgggtttttaggggaagactcgtcagggagttcgtgtaactccggcggcggttgggttcatggtgaagattgyggcgacggtgccgatggggaagaggggtttgacaatgttgaggggagtaaggcgttttgggaggaacaagaccaacttgttcaggcaattttgtgtaggacgagttctattgagtcgaaaattaggcaggtgacgaaagaggcccttagggaattaaaattgaaagaaacatactgtgtatgccggcgacgggttgccggagtatgccaaaattgtgcggaaaaggaagtttggggtcagctccaaaccgccggttacaatagtgccatctgcaagtccaagtggaagtcctctccggatattccatcaggcaaacactcgtatatggaggtggtggacaggtcaagtgccaagaaaggagaggtgagagtggtgatygagttgaattttcgggcggagttcgagatggcgagggctagcgccgaatataacctgttagtcagccggttgccggaggtrttcrtcggaaaatctgagaggctaaaggccttgatcaagatactatgccatgcagccaagaaatgcatgaaggagaagaaaatgcacatgggtccatggagaaagcacaaatacatgcaagctaagtggtttggcacgtgcgagaggacagcgccggcacccatgtcgcctgttgattttcccggccgtctacccaggcagagggtctccatgcttaccttcgacctgctggagaatttgccggcggccggtttaaattttaaggcggtggaagttgtgtga

SEQ ID NO: 4061 - protein, 303 aa, Vitis vinifera
  misc_feature (212)..(212): The Xaa at location 212 stands for Ile, or Val.
MPGVAARLPVTPWSSDDTLKFSGDSESLGDMVFGFLGEDSSGSSCNSGGGWVHGEDCGDGADGEEGFDNVEGSKAFWEEQDQLVQAILCRTSSIESKIRQVTKEALRELKLKETYCVCRRRVAGVCQNCAEKEVWGQLQTAGYNSAICKSKWKSSPDIPSGKHSYMEVVDRSSAKKGEVRVVIELNFRAEFEMARASAEYNLLVSRLPEVFXGKSERLKALIKILCHAAKKCMKEKKMHMGPWRKHKYMQAKWFGTCERTAPAPMSPVDFPGRLPRQRVSMLTFDLLENLPAAGLNFKAVEVV

SEQ ID NO: 4062 - DNA, 807 bp, Vitis vinifera
  CDS (1)..(807)
atggggcatcttattgaagagaaggctcttggagatgatcatcaacgcggggacagcctcgaagagaaaatctcattgttttttgatgaagaagacgaagaactggatcgaaattctgaaggtgattgggctgatgatgaagctgccaacaatgaattgcatgaccccattgagagaaaagagttctgggattcacaagaggctttgcttctggaaataatggaaagatgtaattcaatgggtgcaaagttgagggaagagatagggagagtggtggagagggcaagagaaacactagtgtgcagctgctccaagtcaaattcagatgggtgtgccctttgtttgaggaggagagtggtggatttgctttgcctcaagggtttctctgcctctctccgtacttccaagtggaggcacactcacaagttccccggaggatcacatgaatatatagaggtaatggcaagcacccctgggaggaagaagcaaatcccattccttatagagctcgaattccgaactgaattcgagatggccaaagcctgcgatgagtaccgcagactcatcgcccaactccccaaatcctacatcggaaaatccgactacctcaacgccatcctgcgtgtggtatgcgatgccgccaagaggtccatgaaggagcagaagatccacatggggccatggcggaagcgcagcttcatgcagatgaaatggtccggttacaacgacagaaaacagccctccaaggatcaaccctggaacaagttttcgctgtccggcatcactgctgctgtggtggttaaatga

SEQ ID NO: 4063 - protein, 268 aa, Vitis vinifera
MGHLIEEKALGDDHQRGDSLEEKISLFFDEEDEELDRNSEGDWADDEAANNELHDPIERKEFWDSQEALLLEIMERCNSMGAKLREEIGRVVERARETLVCSCSKSNSDGCALCLRRRVVDLLCLKGFSASLRTSKWRHTHKFPGGSHEYIEVMASTPGRKKQIPFLIELEFRTEFEMAKACDEYRRLIAQLPKSYIGKSDYLNAILRVVCDAAKRSMKEQKIHMGPWRKRSFMQMKWSGYNDRKQPSKDQPWNKFSLSGITAAVVVK

SEQ ID NO: 4064 - DNA, 963 bp, Medicago truncatula
  CDS (1)..(963)
atgagattcatgagtatttgctcttgggttgcaaaaactactaggtttttatggattcatcctctgaatagtctcgagtctgaagaacaatcttcaaacacgagtgttggtgatgttcagtttgaattttttgatgttggtgaagtgatcaagtcaggtcaaaatgctagcgatcttaaacagtgtcattcacttgaaatggatttggatgatgatgaagagaatgatcgaagtagtatcactaagaagaatcaaatcttttgggaaagccaacacctggatttgcagaccaatatagataacacaagttctttggagactaagataaggagtgccaccaaagaagctattgaagaaatagaaagctgtggaacagtgtgtggctgcaccagaaagaagattgctatcacctcttgccgagactgcttaatgagggaagtttttacgaggcttcacaaaactggtttcaatattgctatttgtaaaacaaaatggagaacttcatcagatattccatcaggggaacacacatttttggatgtgatagacaacacaaatccagaaaaaggggaggtgagagtgatgattgagatgaacttccaagctgagtttgagatggcaaaaggaagtgatgaatacaacaacttggttaagaaggtacctgaagtgtttgttggagaagtagggagaatgagcaagttaatcaaaatcttatgcatggcagccaaaaaatgcatgaaggataaaaagttgcatatggggccatggaggaggcataagtacatggaagctaaatggttaggtccatgtgaaaggtacccttcaacaaagtctccactttctattggatcattttctgagaggatcataacaaagcaaaaatcaaaggtatctatgttgactattgaattatttgataagcttccaacattgcattgcccagctgttgatgaggttgtgtga

SEQ ID NO: 4065 - protein, 320 aa, Medicago truncatula
MRFMSICSWVAKTTRFLWIHPLNSLESEEQSSNTSVGDVQFEFFDVGEVIKSGQNASDLKQCHSLEMDLDDDEENDRSSITKKNQIFWESQHLDLQTNIDNTSSLETKIRSATKEAIEEIESCGTVCGCTRKKIAITSCRDCLMREVFTRLHKTGFNIAICKTKWRTSSDIPSGEHTFLDVIDNTNPEKGEVRVMIEMNFQAEFEMAKGSDEYNNLVKKVPEVFVGEVGRMSKLIKILCMAAKKCMKDKKLHMGPWRRHKYMEAKWLGPCERYPSTKSPLSIGSFSERIITKQKSKVSMLTIELFDKLPTLHCPAVDEVV

SEQ ID NO: 4066 - DNA, 789 bp, Oryza sativa subsp
  CDS (1)..(789)
atgagcctgtcgaacctggtgctcggcttcttcgaggaggctgagagggagcagagatggccggagaacggcgacgacgacgacgagggctccagcggcagcggcgccgccgagagcaaggccttctggcagaaccagcactcccagctgcatgaggctttggccaagaccagccaggtagagagcaggatacgggaggacacggaggaggcaatcaggaagatgcgcgccgcgggcgccgtctgctcctgcgcgaggcgggcggcggccggggactgccggagctgcacgctccggcatgtcgacgagcggctgcgcgacgccgggtacaacagcgccatctgcaagtccaagtggacgcgctcgccggacatcccttcaggcgagcacagctacgtggacgtggtggtgcagacgaggagcggcaaggcggtgcgggtggtggtggagctgaacttccgcgccgagttcgaggtggcccgcgccagcgcggagtaccgcgcgctggtgaccgcgctgccggaggtgttcgtcggacgcgccgaccggctgcgcgccgtcgtcaaggccatgtgcgccgcggccaagcagtgcatgaaggagaacaacatgcacatgggcccctggaggaagcacaagtacatgcagtccaagtggctcggcacgccagagcgtgtcgcggccgcggcggcggcgccggtggcggtctggtcgccggagaagcagaccaagttcagggcgtccatgctcagctttgacttcgcccgggccgccgtggaggttgcgtga

SEQ ID NO: 4067 - protein, 262 aa, Oryza sativa subsp
MSLSNLVLGFFEEAEREQRWPENGDDDDEGSSGSGAAESKAFWQNQHSQLHEALAKTSQVESRIREDTEEAIRKMRAAGAVCSCARRAAAGDCRSCTLRHVDERLRDAGYNSAICKSKWTRSPDIPSGEHSYVDVVVQTRSGKAVRVVVELNFRAEFEVARASAEYRALVTALPEVFVGRADRLRAVVKAMCAAAKQCMKENNMHMGPWRKHKYMQSKWLGTPERVAAAAAAPVAVWSPEKQTKFRASMLSFDFARAAVEVA

SEQ ID NO: 4068 - DNA, 885 bp, Arabidopsis thaliana
  CDS (1)..(885)
atggatcggcaaaattccgatgacatcatgagatttctcgatggaatggctagctccgacgacgttcttttcggttttcttgacgaaggaaaccagtcaccggaagatttctccgtaaacctcaacgccggcgaagatgacggtgacgaagacgacaataataacaattctgaagataacaaagctttttggcaggaacacgaacaacttcttcaggggacactgtataggacaagttccattgagacaaagattagacaagctacaaaagaagcgttgaaacaagttaaatctaagggtctttattgtgtttgccggcgaccagtggacggcggttgccggagttgcttacgtggcgaaatctctagacacctaagagatgtcgccggctacgattgcgtcatctctaaatctaaatggagaagttgtcaagacatccctgcagaggaaaacgaatttatagagattgtggaccgatcgggttcaaagaaaagcgagatgcgagtggtgattgagttatcatttagggcagagtttgagattgcaaaaggcagtgaagagtacaaaagacttatcagtcgattgcctgaggtttacgtcgggaaaaccgagaggcttcgatctctgataaagatattgtgcatagcgggaaagaaatgcttgagagacaagaaaatgcatatggctccttggagaaaacacaagtacatgcaagccaagtggcttggcacatgtgatcgatctagctccttggaagcttcggtttccgaggccatggagccagaaaattgggtgccggtggcgaagcctagggtttctatgttgaactatgatggtctcttaggtggtttctctgccggtccggccactgtagcggtcgtgtga

SEQ ID NO: 4069 - protein, 294 aa, Arabidopsis thaliana
MDRQNSDDIMRFLDGMASSDDVLFGFLDEGNQSPEDFSVNLNAGEDDGDEDDNNNNSEDNKAFWQEHEQLLQGTLYRTSSIETKIRQATKEALKQVKSKGLYCVCRRPVDGGCRSCLRGEISRHLRDVAGYDCVISKSKWRSCQDIPAEENEFIEIVDRSGSKKSEMRVVIELSFRAEFEIAKGSEEYKRLISRLPEVYVGKTERLRSLIKILCIAGKKCLRDKKMHMAPWRKHKYMQAKWLGTCDRSSSLEASVSEAMEPENWVPVAKPRVSMLNYDGLLGGFSAGPATVAVV

SEQ ID NO: 4070 - DNA, 810 bp, Oryza sativa
  CDS (1)..(810)
atggttatggaggacggcgagatgagcctgtcgaacctggtgctcggcttcttcgaggaggctgagagggagcagagatggccggagaacggcgacgacgacgacgagggctccagcggcagcggcgccgccgagagcaaggccttctggcagaaccagcactcccagctgcatgaggctttggccaagaccagccaggtagagagcaggatacgggaggacacggaggaggcaatcaggaagatgcgcgccgcgggcgccgtctgctcctgcgcgaggcgggcggcggccggggactgccggagctgcacgctccggcatgtcgacgagcggctgcgcgacgccgggtacaacagcgccatctgcaagtccaagtggacgcgctcgccggacatcccttcaggcgagcacagctacgtggacgtggtggtgcagacgaggagcggcaaggcggtgcgggtggtggtggagctgaacttccgcgccgagttcgaggtggcccgcgccagcgcggagtaccgcgcgctggtgaccgcgctgccggaggtgttcgtcggacgcgccgaccggctgcgcgccgtcgtcaaggccatgtgcgccgcggccaagcagtgcatgaaggagaacaacatgcacatgggcccctggaggaagcacaagtacatgcagtccaagtggctcggcacgccagagcgtgtcgcggccgcggcggcggcgccggtggcggtctggtcgccggagaagcagaccaagttcagggcgtccatgctcagctttgacttcgcccgggccgccgtggaggttgcgtga

SEQ ID NO: 4071 - protein, 269 aa, Oryza sativa
MVMEDGEMSLSNLVLGFFEEAEREQRWPENGDDDDEGSSGSGAAESKAFWQNQHSQLHEALAKTSQVESRIREDTEEAIRKMRAAGAVCSCARRAAAGDCRSCTLRHVDERLRDAGYNSAICKSKWTRSPDIPSGEHSYVDVVVQTRSGKAVRVVVELNFRAEFEVARASAEYRALVTALPEVFVGRADRLRAVVKAMCAAAKQCMKENNMHMGPWRKHKYMQSKWLGTPERVAAAAAAPVAVWSPEKQTKFRASMLSFDFARAAVEVA

SEQ ID NO: 4072 - DNA, 864 bp, Oryza sativa
  CDS (1)..(864)
atggcgtacaagaaggcgacggcggtgctggacgaggcggccagggcacggctgcgtggcccgttcgccagcggtgccgcgtccctccggcgtgatcaagacgacgacgacgacgacctcctggtggatctggtgcacgagttctacgacgacggcgagcgcggcgcggacgccacggcgaggggcggcgtgtcgtcgtcgccggagccggagcctaccgagtggaaggacgcgctgcgcgaggcgctagcggacgcgacgtccgacgcggcggccgcccgcatccgcgccgaggccgagcgcgccgtccgggatgccgttcgcaacggcggcgacgtgatccggaagcgagtcgtcgagcggctccgcgcccgagggttcgacgccggcgtgtgcaggtcgtcgtgggaaagaaccggcagcgtgccggcgggcagccacgagtacgtggacgtgacggcggcggcgtcggcgacggggcgtcgcgctcgctacatcgtcgaggtcaacgtcgccggcgagttcgagatcgcgaggccgagcgccgagtaccaggacctcctcctctcgctcccgccggtgctcgtcgcgactcccgaggccttcaggggggtcgccgcggcaatgtgcgccgcggcggcggagtccatccgcggcgcgggcatgcacctgccgccgtggaggcgggcgcggtacgtgcaggccaagtggtccgcaccgtacgagcgagtggcggcggcggcaccgccggagggagctaggacggcgccgtccggcggccggaagcgttgcggaatggagattgggcgcagggagatggccatcggaaaggagagattggtaccatttttcagagggttatga

SEQ ID NO: 4073 - protein, 287 aa, Oryza sativa
MAYKKATAVLDEAARARLRGPFASGAASLRRDQDDDDDDLLVDLVHEFYDDGERGADATARGGVSSSPEPEPTEWKDALREALADATSDAAAARIRAEAERAVRDAVRNGGDVIRKRVVERLRARGFDAGVCRSSWERTGSVPAGSHEYVDVTAAASATGRRARYIVEVNVAGEFEIARPSAEYQDLLLSLPPVLVATPEAFRGVAAAMCAAAAESIRGAGMHLPPWRRARYVQAKWSAPYERVAAAAPPEGARTAPSGGRKRCGMEIGRREMAIGKERLVPFFRGL

SEQ ID NO: 4074 - DNA, 921 bp, Oryza sativa
  CDS (1)..(921)
atggttgtggaggaggccgtcgtcgcggccggcaatgagatgagcctgtccaacatggtgctcgggttctacgaggaggccgagctccagagctcgccgccgggagactgcgccgccgccgccggtgacgacgacgacggcagcgacgacgaggggtccggcggcgccgccaagtgcagggcgttctggaaggagcagcagtcgcaactctacgaagcgctggccaagatgagctcggcggagagcaggatccaagcggacgcggaggaggccatgaggcagatgcgcgcggcggcggcgggcgcctgctcctgcgcgagccgcggcgcggcggcggcggcggcaggcagcggaggctgccggagctgcacgctccggtttctcgccgagcggctgcgcgacgccgggtacaacagcgcgatctgcaggtccaaatggccgcgatcgccggaaattccttcaggggagcacagctacgtggacgtggtggcgccgaccaggagcggcaaggcggtgcgggtggtggtcgagcccagcttccgcggcgagttcgagatggcgcgcggcggcgcggggtacagggcgctggtggcgtcgctgccggaggcgttcgtcggccgcgccgatcggctgcgcggcgtggtgcgcgtcatgtgcgccgcggcgaagcagtgcgcgcgggagagcggcatgcacatggcgccctggaggaagcagcggtacatggaggccaagtggctcgccacgccggagcgggtcgcgccgcccggcaacgccggcggcgccggcgacgcggtggcggtcgggtcgccgtcgtcgccgctgtcgccggggatgacgaacaggcagatgcagcccaagttcagggcgtccatgctcacgctcgacttcggcggccggaccgccgtggaggtcgtgtga

SEQ ID NO: 4075 - protein, 306 aa, Oryza sativa
MVVEEAVVAAGNEMSLSNMVLGFYEEAELQSSPPGDCAAAAGDDDDGSDDEGSGGAAKCRAFWKEQQSQLYEALAKMSSAESRIQADAEEAMRQMRAAAAGACSCASRGAAAAAAGSGGCRSCTLRFLAERLRDAGYNSAICRSKWPRSPEIPSGEHSYVDVVAPTRSGKAVRVVVEPSFRGEFEMARGGAGYRALVASLPEAFVGRADRLRGVVRVMCAAAKQCARESGMHMAPWRKQRYMEAKWLATPERVAPPGNAGGAGDAVAVGSPSSPLSPGMTNRQMQPKFRASMLTLDFGGRTAVEVV

SEQ ID NO: 4076 - DNA, 900 bp, Brassica napus
  CDS (1)..(900)
atggatcgtcaagattccgatgacataatgaagtttctagacggcatggctagctccgacgatgttttatttggtttcctcgacggaggaaaccattcaccggaggtttaccctgacaccggtagcttcgccgcaggtgaagattcctatgcagaaaacgatgcagccggttgcaattccgatgagaacaaaaccttttggcttgaacaagaacaacttctccaggcgacactgtataggacaagttcaattgagacaaagattcgacaagcagcgaaacaagcgttgaaagaagtgagatcagaaggcacgcaatgtgtctgccggagacccgtggccggcggttgccgtagctgtttacgcggcgaagtggctcgccgtctccgagaggccggctatgattgcgtcagctgtaaatccaaatggagaagcaatcatgaaatccctgcaggtgagcatgaatatttggaaattgtggaccaatcgggatcgaagaaagtcgagatccgtgtggtgatcgagctatctttcagggctgagtttgagatggcgaggggtagtgaggagtacaagcgactcgttggaatattacctgaagtgtacgtggggaaaacagagaggctaagaacactaataaaaatattgtgcatggctgcgaaaaagtgcatgaaagacaagaaaatgcacatgggtccttggagaaaacacaagtatatgcaagccaaatggctcggtacctgcgagagaaaatctatgaggctggttgctgagactaagacggagactgaggaggaggatatgattgccaaagctaaacagagagtttctatgctgaattatggtatttttgaaaacgtatccgccggaatgggccgtccggccgccgtagcggtcgtatga

SEQ ID NO: 4077 - protein, 299 aa, Brassica napus
MDRQDSDDIMKFLDGMASSDDVLFGFLDGGNHSPEVYPDTGSFAAGEDSYAENDAAGCNSDENKTFWLEQEQLLQATLYRTSSIETKIRQAAKQALKEVRSEGTQCVCRRPVAGGCRSCLRGEVARRLREAGYDCVSCKSKWRSNHEIPAGEHEYLEIVDQSGSKKVEIRVVIELSFRAEFEMARGSEEYKRLVGILPEVYVGKTERLRTLIKILCMAAKKCMKDKKMHMGPWRKHKYMQAKWLGTCERKSMRLVAETKTETEEEDMIAKAKQRVSMLNYGIFENVSAGMGRPAAVAVV

SEQ ID NO: 4078 - DNA, 894 bp, Brassica napus
  CDS (1)..(894)
atggatcgtcaaaattctgatgacatcgtgagatttctcgatggaatggctagctccgacgacgttctattcggtttcctcgacgaaggaaaccagtcaccggaagacttcccggactccggtaacctcaacggtggtggagatatagacgatgttgacgacaatagcaattgcgatgctgaagaaaacaaagctttctggcaggaacaagaaaaacttcttcaggggacactgtataggacaagttcaattgagacaaagattagacaagcgacaaaggaagcactgaaagaagttaaatcaaagggtctttattgtttctgccgacgacccgttgctggcggttgccggagctgcttacgtggtgaaatctctagacaccttcgagatgtggccggctacgactgcgtcatctccaaatccaagtggagaagctctcaagacatccctgcaggggaacacgaatacatagagatcttggacagatctgattcgaagaaaggcgagatgcgagtggtgattgagttatcattcagggcagagttcgagattgcaaaaggcggtgaagagtacaaaaggcttatcagccgattgccggaggtttacgtcggaaaaaccgagaggctcagatccctgatcaagatattgtgcatcgccgggaagaaatgcttgagagacaagaaaatgcatatgggaccctggagaaaacataagtacatgcaagccaagtggcttggcacgtgcgatagatcgagctccttggaagcggccgtggtctccgagacgactgaaccggagaattgggtgccgctggtgaagcctagggtttccatgctgaactacgatggtctgactaccgggatgggccgttctgccgctgtaacagtcgtgtga

SEQ ID NO: 4079 - protein, 297 aa, Brassica napus
MDRQNSDDIVRFLDGMASSDDVLFGFLDEGNQSPEDFPDSGNLNGGGDIDDVDDNSNCDAEENKAFWQEQEKLLQGTLYRTSSIETKIRQATKEALKEVKSKGLYCFCRRPVAGGCRSCLRGEISRHLRDVAGYDCVISKSKWRSSQDIPAGEHEYIEILDRSDSKKGEMRVVIELSFRAEFEIAKGGEEYKRLISRLPEVYVGKTERLRSLIKILCIAGKKCLRDKKMHMGPWRKHKYMQAKWLGTCDRSSSLEAAVVSETTEPENWVPLVKPRVSMLNYDGLTTGMGRSAAVTVV

SEQ ID NO: 4080 - DNA, 990 bp, Glycine max
  CDS (1)..(990)
atgggtgctacctctatggtccgaggaggagtcacgaggtttctaccccgaagggaatcattggggtgcgagaaactacaacttggagttggagatgtggagtttgaatttctcgatgatggtgagatgatgatgtcgttggtcaaaagtgatgaaagttctggcgatgagtttcgtcaatccaatgaaatggaattggatgatgatgatgatggtgagagggttgatggtggcagcgttgaggagaatagaagcttttgggataatcaacaccagcttttgcagaactacctatatagatcaacttctattgagtcaaggataaggaatgccaccaaagaagccgttcaggaaatacaaaacgcagaaatagtgtgcagttgcagtagacagataatttccagatcctgtagaaactgcttcattatagaagtctcaagacgccttcagaattctggttataacagtgccatttgcaaaacaaaatggagaagctcaccaagtaatattccatcaggagagcatactttcctagatgtaatagacagcacaagcaaaaagcaagaagttagggtgatcatagaactgaattttcgagcagagtttgagatggcaagggcaagtgaagagtacaacgggctagtgagcaagctccctgaggtgtacgtggggaaaatagagagattaagcaacatcatcaaggtgttgtgtatgggagcaaaaaagtgcatgaaggaaaacaaaatgcacatgggaccatggaggaagcacaagtacatgcaagctaagtggctaggttcatgcaaaaggaacacctcaacaactacttcatcacttaattcaatgatggggtattccgaggtggtgatgccaaaaccaaagcctagagcatcactgctaacagtggatctgatgctagaaaataataattttaagacagaaatgttgaagcttcccaatatgcattgtacagctgttgaagttttgtga

SEQ ID NO: 4081 - protein, 329 aa, Glycine max
MGATSMVRGGVTRFLPRRESLGCEKLQLGVGDVEFEFLDDGEMMMSLVKSDESSGDEFRQSNEMELDDDDDGERVDGGSVEENRSFWDNQHQLLQNYLYRSTSIESRIRNATKEAVQEIQNAEIVCSCSRQIISRSCRNCFIIEVSRRLQNSGYNSAICKTKWRSSPSNIPSGEHTFLDVIDSTSKKQEVRVIIELNFRAEFEMARASEEYNGLVSKLPEVYVGKIERLSNIIKVLCMGAKKCMKENKMHMGPWRKHKYMQAKWLGSCKRNTSTTTSSLNSMMGYSEVVMPKPKPRASLLTVDLMLENNNFKTEMLKLPNMHCTAVEVL

SEQ ID NO: 4082 - DNA, 894 bp, Brassica napus
  CDS (1)..(894)
atggatcgtcaaaattctgatgacatcgtgagatttctcgatggaatggctagctccgacgacgttctattcggtttcctcgacgaaggaaaccagtcaccggaagacttcccggactccggtaacctcaacggtggtggagatatagacgatgttgacgacaatagcaattgcgatgctgaagaaaacaaagctttctggcaggaacaagaaaaacttcttcaggggacactgtataggacaagttcaattgagacaaagattagacaagcgacaaaggaagcactgaaagaagttaaatcaaagggtctttattgtttctgccgacgacccgttgctggcggttgccccacctgcttacgtggtgaaatctctagacaccttcgagatgtggccggctacgactgcgtcatctccaaatccaagtggagaagctctcaagacatccctgcaggggaacacgaatacatagagatcttggacagatctgattcgaagaaaggcgagatgcgagtggtgattgagttatcattcagggcagagttcgagattgcaaaaggcggtgaagagtacaaaaggcttatcagccgattgccggaggtttacgtcggaaaaaccgagaggctcagatccctgatcaagatattgtgcatcgccgggaagaaatgcttgagagacaagaaaatgcatatgggaccctggagaaaacataagtacatgcaagccaagtggcttggcacgtgcgatagatcgagctccttggaagcggccgtggtctccgagacgactgaaccggagaattgggtgccgctggtgaagcctagggtttccatgctgaactacgatggtctgactaccgggatgggccgttctgccgctgtaacagtcgtgtga

SEQ ID NO: 4083 - protein, 297 aa, Brassica napus
MDRQNSDDIVRFLDGMASSDDVLFGFLDEGNQSPEDFPDSGNLNGGGDIDDVDDNSNCDAEENKAFWQEQEKLLQGTLYRTSSIETKIRQATKEALKEVKSKGLYCFCRRPVAGGCPTCLRGEISRHLRDVAGYDCVISKSKWRSSQDIPAGEHEYIEILDRSDSKKGEMRVVIELSFRAEFEIAKGGEEYKRLISRLPEVYVGKTERLRSLIKILCIAGKKCLRDKKMHMGPWRKHKYMQAKWLGTCDRSSSLEAAVVSETTEPENWVPLVKPRVSMLNYDGLTTGMGRSAAVTVV

SEQ ID NO: 4084 - DNA, 903 bp, Brassica napus
  CDS (1)..(903)
atgggtttctccagagcaaaacgtgtcaccgatccactagccgacgaggccagggctcgtctcgttgggtgcagcttcagcagcggcagcgaacacaccggcgacggtatcgacgactacgacgatgattccccttgtctttccgatctagtccaagggttcttggaagacgaagctaaccagaacgttaacgaggagccacgctggtgcgacagcgactcggaatcagactcagactctgactcggagcgagtcgacctccctgactttgcggaagatattgcgaaaattctgaggaacactctcagggaagacaactacggacgaatggtgctgtttcatgtcgcgagagctatggaaatgctgccgtctctaggatctgatcaagaacagcgtgccgtttcgcgacgtaagctcatgtcccttcttagagggttcggacacaatgcggcgatctgcaaaacgaaatggaaatcctccggcggcctcaccgccggaaaccacgagtttatcgacgtcgtttacacacccgccgccgccacctcgcctcagaccgtacgttacatcgtcgatttggacttcgcgtcgcggtttcagatcgccagaccgacggcacagtactcgcgtgtgcttcagtcgcttccggcggtttttgtcgggagaggggatgatctgaagcggatcttacgtctcgtgtgcgacgcggcgaggttgtcgcttaggagccgtggcctcacgcttccaccgtggagaaagaaccgttatttgcagacgcggtggcttggttcttacaaacgcaccgtgaacttaacgccatcatctcccgccgttaacaccgtcatgtgtcgtgccgtcggtttcgataacgccgtcggtgaccgtctatttgtgcagactcgataa

SEQ ID NO: 4085 - protein, 300 aa, Brassica napus
MGFSRAKRVTDPLADEARARLVGCSFSSGSEHTGDGIDDYDDDSPCLSDLVQGFLEDEANQNVNEEPRWCDSDSESDSDSDSERVDLPDFAEDIAKILRNTLREDNYGRMVLFHVARAMEMLPSLGSDQEQRAVSRRKLMSLLRGFGHNAAICKTKWKSSGGLTAGNHEFIDVVYTPAAATSPQTVRYIVDLDFASRFQIARPTAQYSRVLQSLPAVFVGRGDDLKRILRLVCDAARLSLRSRGLTLPPWRKNRYLQTRWLGSYKRTVNLTPSSPAVNTVMCRAVGFDNAVGDRLFVQTR

SEQ ID NO: 4086 - DNA, 900 bp, Brassica napus
  CDS (1)..(900)
atggatcgtcaagattccgatgacataatgaagtttctagacggcatggctagctccgacgatgttttatttggtttcctcgacggaggaaaccattcaccggaggtttaccctgacaccggtagcttcgccgcaggtgaagattcctatgcagaaaacgatgcagccggttgcaattccgatgagaacaaaaccttttggcttgaacaagaacaacttctccaggcgacactgtataggacaagttcaattgagacaaagattcgacaagcagcgaaacaagcgttgaaagaagtgagatcagaaggcacgcaatgtgtctgccggagacccgtggccggcggttgccgtagctgtttacgcggcgaagtggctcgccgtctccgagaggccggctatgattgcgtcagctgtaaatccaaatggagaagcaatcatgaaatccctgcaggtgagcatgaatatttggaaattgtggaccaatcgggatcgaagaaagtcgagatccgtgtggtgatcgagctatctttcagggctgagtttgagatggcgaggggtagtgaggagtacaagcgactcgctggaatattacctgaagtgtacgtggggaaaacagagaggctaagaacactaataaaaatattgtgcatggctgcgaaaaagtgcatgaaagacaagaaaatgcacatgggtccttggagaaaacacaagtatatgcaagccaaatggctcggtacctgcgagagaaaatctatgaggctggttgctgagactaagacggagactgaggaggaggatatgattgccaaagctaaacagagagtttctatgctgaattatggtatttttgaaaacgtatccgccggaatgggccgtccggccgccgtagcggtcgtatga

SEQ ID NO: 4087 - protein, 299 aa, Brassica napus
MDRQDSDDIMKFLDGMASSDDVLFGFLDGGNHSPEVYPDTGSFAAGEDSYAENDAAGCNSDENKTFWLEQEQLLQATLYRTSSIETKIRQAAKQALKEVRSEGTQCVCRRPVAGGCRSCLRGEVARRLREAGYDCVSCKSKWRSNHEIPAGEHEYLEIVDQSGSKKVEIRVVIELSFRAEFEMARGSEEYKRLAGILPEVYVGKTERLRTLIKILCMAAKKCMKDKKMHMGPWRKHKYMQAKWLGTCERKSMRLVAETKTETEEEDMIAKAKQRVSMLNYGIFENVSAGMGRPAAVAVV

SEQ ID NO: 4088 - DNA, 903 bp, Brassica napus
  CDS (1)..(903)
atgggtttctccagagcaaaacgtgtcaccgatccactagccgacgaggtcagggctcgtctcgttgggtgcagcttcagcagcggcagcgaacacaccggcgacggtatcgacgactacgacgatgattccccttgtctttccgatctagtccaagggttcttggaagacgaagctaaccagaacgttaacgaggagccacgctggtgcgacagcgactcggaatcagactcagactctgactcggagcgagtcgagctccctgactttgcggaagatattgcgaagattctgaggaacactctcggggaagacaactacggacgaatggtgctgtttcatgtcgcgagagctatggaaatgctgccgtctctgggatctgatcaagaacagcgtgccgtttcgcgacgtaagctcatgtcccttctcagagggttcggacacaatgcggcgatctgcaaaacgaaatggaaatcctccggcggcctcaccgccggcaaccacgagtttatcgacgtcgtttacacacccgccgccgccgcctcgcctcagaccgtacgttacatcgtcgatttggacttcgcgtcgcggtttcagatcgccagaccgacggcacagtactcgcgtgtgcttcagtcgcttccggcggtttttgtcgggagaggggatgatctgaagcggatcttacgtctcgtgtgcgacgcggcgaggttgtcgcttaggagccgtggcctcacgcttccaccgtggagaaagaaccgttatttgcagacgcggtggcttggttcttacaaacgcaccgtgaacttaacgccatcatctcccgccgttaacaccgtcatgtgtcgtgccgtcggtttcgataacgccgtcggtgaccgtctatttgtgcagactcgataa

SEQ ID NO: 4089 - protein, 300 aa, Brassica napus
MGFSRAKRVTDPLADEVRARLVGCSFSSGSEHTGDGIDDYDDDSPCLSDLVQGFLEDEANQNVNEEPRWCDSDSESDSDSDSERVELPDFAEDIAKILRNTLGEDNYGRMVLFHVARAMEMLPSLGSDQEQRAVSRRKLMSLLRGFGHNAAICKTKWKSSGGLTAGNHEFIDVVYTPAAAASPQTVRYIVDLDFASRFQIARPTAQYSRVLQSLPAVFVGRGDDLKRILRLVCDAARLSLRSRGLTLPPWRKNRYLQTRWLGSYKRTVNLTPSSPAVNTVMCRAVGFDNAVGDRLFVQTR

SEQ ID NO: 4090 - DNA, 981 bp, Glycine max
  CDS (1)..(981)
atgggtgctacctctatggtccgaggaggagtcacgaggtttctaccccgaagggaatcattggggtgcgagaaactacaacttggagttggagatgtggagtttgaatttctcgatgatggtgagatgatgatgtcgttggtcaaaagtgatgaaagttctggcgatgagtttcgtcaatccaatgaaatggaattggatgatgatgatgatggtgagagggttgatggtggcagcgttgaggagaatagaagcttttgggataatcaacaccagcttttgcagaactacctatatagaacaacttcagttgagtcaaggataagaaatgtcaccaaagaagccgttcaggatatacaaaacgcggaaatagtgtgcagttgcagtagacagataatttccagatcctgtagaaactgtttcatgatacaagtctcaaggcgccttcagaagtctggttatgacagtgccatttgcaaaacaaaatggagcagctcaccaagtattccatcaggggagcatacttttctagatgttatagacagcagaagcaaaaagcaagaaattagggtgatcatagaactgaatttccgagcagagtttgagatggcaagggcaagtgaagagtacaacgggcttgttcggaagctccctgaggtgtatgtggggaaaatagagagattaagcaacatcatcaaggtgttgtgcatgggagcaaaaaggtgcatgaaggaaaacaaaatgcacatgggaccatggaggaagcacaagtacgtgcacgctaagtggctaggtccatgcaaaaggaacacctcaacaacttcactttcaaattcaatgatgggaaattccgaggtgatgatgccaaaaccaaagcctagggcatcactgctaacagtggatctgatgctagaaacgaattctaagacagaaatgttgaagcttcccaatatgcattgttcagctgttgcagttttgtaa

SEQ ID NO: 4091 - protein, 326 aa, Glycine max
MGATSMVRGGVTRFLPRRESLGCEKLQLGVGDVEFEFLDDGEMMMSLVKSDESSGDEFRQSNEMELDDDDDGERVDGGSVEENRSFWDNQHQLLQNYLYRTTSVESRIRNVTKEAVQDIQNAEIVCSCSRQIISRSCRNCFMIQVSRRLQKSGYDSAICKTKWSSSPSIPSGEHTFLDVIDSRSKKQEIRVIIELNFRAEFEMARASEEYNGLVRKLPEVYVGKIERLSNIIKVLCMGAKRCMKENKMHMGPWRKHKYVHAKWLGPCKRNTSTTSLSNSMMGNSEVMMPKPKPRASLLTVDLMLETNSKTEMLKLPNMHCSAVAVL

SEQ ID NO: 4092 - DNA, 900 bp, Glycine max
  CDS (1)..(900)
atggtggttttagcgagaaagaaacgagtcactgatccgttcgacgacgaagccaaagcacgtctcgtcggcggcggcgaccaccggcaattgagctacgtcagcagcgggagcgaacattccggcaacggcgacggacactcgccgtgtctctccgagctcgtgcatgatttcctcgaggacaatggcgactcggagaacaacaactcagcggggaacgagttcgactcggagcgagtcgactccgtcacagactgcattgactcagtggaggagcttctcatgttaaacgcatccaacgtttcagactcttataagagcttgcttctcgagcatgcttcggaggcatcagagaagttcgagtttttgaaagaaggaaacgtttcgtcgcatcgccgaaacgcgatgtcgtttctgcgcgagaaggggcacaatgcggcgatttgcaaaacgcggtgggactcttccggtggagtaactgcaggtaactatgaattcatcgacgtggtgcaatctgggccggctacgtggcacaaaaggtacttcgtggaccttgatttcgtggcccagttcgagatcgcacggcccacaagcgagtacttagagtttcttaattatgtgccgcgaatattcgttgggacggaggaggagctaaaacgcaccgtgcgggtgttgtgcggagttgcgaggcgttgttttgggaagagagggttaagtctgcctccatggaggaagaaccggtacatgcagaacaagtggttcggtccgtatcggagaaccgcgaacccggttcacggaaacccggttccaacggtcgtgtctgcgttgagtggggccaaatgtaggttcgtggggttcgacgacgcgtttcggaggccagacatggcggtgtggttgtaa

SEQ ID NO: 4093 - protein, 299 aa, Glycine max
MVVLARKKRVTDPFDDEAKARLVGGGDHRQLSYVSSGSEHSGNGDGHSPCLSELVHDFLEDNGDSENNNSAGNEFDSERVDSVTDCIDSVEELLMLNASNVSDSYKSLLLEHASEASEKFEFLKEGNVSSHRRNAMSFLREKGHNAAICKTRWDSSGGVTAGNYEFIDVVQSGPATWHKRYFVDLDFVAQFEIARPTSEYLEFLNYVPRIFVGTEEELKRTVRVLCGVARRCFGKRGLSLPPWRKNRYMQNKWFGPYRRTANPVHGNPVPTVVSALSGAKCRFVGFDDAFRRPDMAVWL

SEQ ID NO: 4094 - DNA, 861 bp, Glycine max
  CDS (1)..(861)
atgggtgctacctctatggtccgaggaggagtcacgaggtttctaccccgaagggaatcattggggtgcgagaaactacaacttggagttggagatgtggagtttgaatttctcgatgatggtgagatgatgatgtcgttggtcaaaagtgatgaaagttctggcgatgagtttcgtcaatccaatgaaatggaattggatgatgatgatgatggtgagagggttgatggtggcagcgttgaggagaatagaagcttttgggataatcaacaccagcttttgcagacctacctatatagaacaacttcagttgagtcaaggataagaaatgtcaccaaagaagccgttcaggatatacaaaacgcggaaatagtgtgcagttgcagtagacagataatttccagatcctgtagaaactgtttcatgatacaagtctcaaggcgccttcagaagtctggttatgacagtgccatttgcaaaacaaaatggagcagctcaccaagtattccatcaggggagcatacttttctagatgttatagacagcagaagcaaaaagcaagaaattagggtgatcatagaactgaatttccgagcagagtttgagatggcaagggcaagtgaagagtacaacgggcttgttcggaagctccctgaggtgtatgtggggaaaatagagagattaagcaacatcatcaaggtgttgtgcatgggagcaaaaaggtgcatgaaggaaaacaaaatgcacatgggaccatggaggaagcacaagtacgtgcacgctaagtggctaggtccatgcaaaaggaacacctcaacaacttcactttcaaattcaatgatgggaaaattcgaggtatga

SEQ ID NO: 4095 - protein, 286 aa, Glycine max
MGATSMVRGGVTRFLPRRESLGCEKLQLGVGDVEFEFLDDGEMMMSLVKSDESSGDEFRQSNEMELDDDDDGERVDGGSVEENRSFWDNQHQLLQTYLYRTTSVESRIRNVTKEAVQDIQNAEIVCSCSRQIISRSCRNCFMIQVSRRLQKSGYDSAICKTKWSSSPSIPSGEHTFLDVIDSRSKKQEIRVIIELNFRAEFEMARASEEYNGLVRKLPEVYVGKIERLSNIIKVLCMGAKRCMKENKMHMGPWRKHKYVHAKWLGPCKRNTSTTSLSNSMMGKFEV

SEQ ID NO: 4096 - DNA, 22 bp, Artificial sequence
  primer
atggatcggcaaagttccgatg

SEQ ID NO: 4097 - DNA, 20 bp, Artificial sequence
  primer
tcacacaaccgctacaacgg

SEQ ID NO: 4098 - protein, 126 aa, Artificial sequence
  consensus sequence
  Variant (2)..(3): Xaa in position 2 to 3 is any amino acid
  Variant (4)..(5): Xaa in position 4 to 5 is any or no amino acid
  Variant (7)..(14): Xaa in position 7 to 14 is any amino acid
  Variant (17)..(22): Xaa in position 17 to 22 is any amino acid
  Variant (23)..(23): Xaa in position 23 is any or no amino acid
  Variant (25)..(25): Xaa in position 25 is any amino acid
  Variant (27)..(27): Xaa in position 27 is any amino acid
  Variant (29)..(38): Xaa in position 29 to 38 is any amino acid
  Variant (39)..(46): Xaa in position 39 to 46 is any or no amino acid
  Variant (48)..(50): Xaa in position 48 to 50 is any amino acid
  Variant (52)..(53): Xaa in position 52 to 53 is any amino acid
  Variant (55)..(56): Xaa in position 55 to 56 is any amino acid
  Variant (60)..(60): Xaa in position 60 is any amino acid
  Variant (62)..(66): Xaa in position 62 to 66 is any amino acid
  Variant (68)..(69): Xaa in position 68 to 69 is any amino acid
  Variant (71)..(73): Xaa in position 71 to 73 is any amino acid
  Variant (76)..(78): Xaa in position 76 to 78 is any amino acid
  Variant (81)..(84): Xaa in position 81 to 84 is any amino acid
  Variant (86)..(92): Xaa in position 86 to 92 is any amino acid
  Variant (94)..(95): Xaa in position 94 to 95 is any amino acid
  Variant (98)..(105): Xaa in position 98 to 105 is any amino acid
  Variant (107)..(108): Xaa in position 107 to 108 is any amino acid
  Variant (113)..(114): Xaa in position 113 to 114 is any amino acid
  Variant (116)..(118): Xaa in position 116 to 118 is any amino acid
  Variant (121)..(125): Xaa in position 121 to 125 is any amino acid
LXXXXGXXXXXXXXKWXXXXXXXPXGXHXXXXXXXXXXXXXXXXXXRXXXEXXFXXEFEXAXXXXXYXXLXXXLPXXXVGXXXXLXXXXXXXCXXAKXXXXXXXXHXXPWRKXXYXXXKWXXXXXR

SEQ ID NO: 4099 - protein, 55 aa, Artificial sequence
  protein pattern
  Variant (3)..(3): Xaa in position 3 is any amino acid
  Variant (4)..(5): Xaa in position 4 to 5 is any or no amino acid
  Variant (7)..(8): Xaa in position 7 to 8 is any or no amino acid
  Variant (10)..(10): Xaa in position 10 is Lys or Arg
  Variant (11)..(11): Xaa in position 11 is any amino acid
  Variant (12)..(12): Xaa in position 12 is Asp or Glu
  Variant (13)..(13): Xaa in position 13 is Asp or Arg
  Variant (15)..(16): Xaa in position 15 to 16 is any amino acid
  Variant (17)..(18): Xaa in position 17 to 18 is Ile, Leu or Val
  Variant (19)..(19): Xaa in position 19 is any amino acid
  Variant (20)..(20): Xaa in position 20 is Ala, Ile, Leu or Val
  Variant (21)..(21): Xaa in position 21 is any amino acid
  Variant (23)..(23): Xaa in position 23 is any amino acid
  Variant (24)..(25): Xaa in position 24 to 25 is Ala or Gly
  Variant (26)..(26): Xaa in position 26 is Lys or Arg
  Variant (27)..(27): Xaa in position 27 is any amino acid
  Variant (28)..(28): Xaa in position 28 is Cys or Ser
  Variant (29)..(29): Xaa in position 29 is any amino acid
  Variant (30)..(30): Xaa in position 30 is Lys or Arg
  Variant (31)..(33): Xaa in position 31 to 33 is any amino acid
  Variant (34)..(34): Xaa in position 34 is Leu or Met
  Variant (35)..(35): Xaa in position 35 is any amino acid
  Variant (36)..(36): Xaa in position 36 is Leu, Met or Val
  Variant (37)..(37): Xaa in position 37 is Ala, Gly or Pro
  Variant (41)..(41): Xaa in position 41 is Lys or Arg
  Variant (42)..(42): Xaa in position 42 is any amino acid
  Variant (43)..(43): Xaa in position 43 is Glu, Lys or Arg
  Variant (45)..(45): Xaa in position 45 is Leu, Met or Val
  Variant (46)..(46): Xaa in position 46 is any amino acid
  Variant (47)..(47): Xaa in position 47 is Ala, Asn, Ser or Thr
  Variant (48)..(48): Xaa in position 48 is Lys or Arg
  Variant (50)..(50): Xaa in position 50 is Phe or Leu
  Variant (51)..(51): Xaa in position 51 is Ala, Gly or Ser
  Variant (52)..(54): Xaa in position 52 to 54 is any amino acid
LPXXXVXXGXXXXLXXXXXXXCXXXXXXXXXXXXXXXPWRXXXYXXXXWXXXXXR

SEQ ID NO: 4100 - protein, 14 aa, Artificial sequence
  protein pattern
  Variant (2)..(2): Xaa in position 2 is Phe, His or Tyr
  Variant (3)..(3): Xaa in position 3 is Asp or Asn
  Variant (4)..(4): Xaa in position 4 is any amino acid
  Variant (5)..(5): Xaa in position 5 is Ala or Val
  Variant (6)..(6): Xaa in position 6 is any amino acid
  Variant (7)..(7): Xaa in position 7 is Cys or Ser
  Variant (8)..(8): Xaa in position 8 is Lys or Arg
  Variant (9)..(9): Xaa in position 9 is Ser or Thr
  Variant (12)..(12): Xaa in position 12 is any amino acid
  Variant (13)..(13): Xaa in position 13 is any or no amino acid
GXXXXXXXXKWXXS

SEQ ID NO: 4101 - protein, 20 aa, Artificial sequence
  protein pattern
  Variant (2)..(2): Xaa in position 2 is any amino acid
  Variant (3)..(3): Xaa in position 3 is Ile, Met or Val
  Variant (4)..(4): Xaa in position 4 is Ile or Val
  Variant (5)..(5): Xaa in position 5 is Asp or Glu
  Variant (6)..(6): Xaa in position 6 is any amino acid
  Variant (7)..(7): Xaa in position 7 is Cys, Asp, Asn or Ser
  Variant (8)..(8): Xaa in position 8 is Phe or Val
  Variant (9)..(9): Xaa in position 9 is any amino acid
  Variant (10)..(10): Xaa in position 10 is Ala or Gly
  Variant (14)..(14): Xaa in position 14 is Ile, Met or Val
  Variant (16)..(16): Xaa in position 16 is Lys or Arg
  Variant (17)..(17): Xaa in position 17 is Ala, Gly or Pro
  Variant (18)..(18): Xaa in position 18 is Gly, Ser or Thr
  Variant (19)..(19): Xaa in position 19 is Ala, Asp or Glu
  Variant (20)..(20): Xaa in position 20 is Asp, Glu, Gly or Gln
RXXXXXXXXXEFEXAXXXXX

SEQ ID NO: 4102 - DNA, 435 bp, Arabidopsis thaliana; identical to SEQ ID NO: 2731
  CDS (1)..(435)

SEQ ID NO: 4103 - protein, 144 aa, Arabidopsis thaliana; identical to SEQ ID NO: 2732

SEQ ID NO: 4104 - DNA, 444 bp, Glycine max
  CDS (1)..(444)
atgaacagtactgaggaggggatgcaaggcataggcataggcataggctgcttccaaaacgacgtcgtagggcagctggagctgagtcccactatgagcaactcctcctcctcgctatccatggagctggacgagtccccggagagcagaatccaacggttgatatcggagcacccggtcatcatcttcacccgatcctcctgctgcatgtgccacgtcatgaagaagctcctcgccaccatcggcgtccaccccaccgtcatcgaattggacgaccaggagatcgccgccctccccgacaccagcgccccctcggcctttataggcggcacctgcatcggcggcctcgaatccctggtcggcctgcacgtcaccggccacctgatccccaaactggtccaagtcggcgctctctggcccctatggcagaatttgggtgagtga

SEQ ID NO: 4105 - protein, 147 aa, Glycine max
MNSTEEGMQGIGIGIGCFQNDVVGQLELSPTMSNSSSSLSMELDESPESRIQRLISEHPVIIFTRSSCCMCHVMKKLLATIGVHPTVIELDDQEIAALPDTSAPSAFIGGTCIGGLESLVGLHVTGHLIPKLVQVGALWPLWQNLGE

SEQ ID NO: 4106 - DNA, 639 bp, Zea mays subsp. mays
  CDS (41)..(466)
agattagtgctctctgagttttttctctctctagttgcctatgatgcaagaattaagcttagaatgtttctccaacgaagtcgttcgcttagacctaactcctccttcccaaacctcacctacttctctctccatagacgaagaagaatcatcggaggctaagattcgacggctgatatcggagcatccagtgatcatcttcagcagatcttcttgttgcatgtcccacgtcatgaaaagactcctcactactatcggagtcgtccccaccgtcatcgagctcgatgatcacgaggtttcctctctccccatggctcttgaagaagaattttccggcggcgttcttccgtctccggcggttttcattggccgtgagtgtgtcggtggtattgagtccctcgtcgcgctccatctaagtggtcaccttgtccctaagcttgtccaagttggagctctttgggtatgattgtaatctacttcttgtttcttttttgtgtcaacgtttacttcttgcttttcaatagtatttgacagtatcaaaaggagaattttagggtttcttttttctgattatcctccgatgatcaaagttatatacccatgttgaaaatgaattatgaataataattaaagatgtgc

SEQ ID NO: 4107 - protein, 141 aa, Zea mays subsp. mays
MMQELSLECFSNEVVRLDLTPPSQTSPTSLSIDEEESSEAKIRRLISEHPVIIFSRSSCCMSHVMKRLLTTIGVVPTVIELDDHEVSSLPMALEEEFSGGVLPSPAVFIGRECVGGIESLVALHLSGHLVPKLVQVGALWV

SEQ ID NO: 4108 - DNA, 639 bp, Zea mays subsp. mays; identical to SEQ ID NO: 4106
  CDS (44)..(466)

SEQ ID NO: 4109 - protein, 140 aa, Zea mays subsp. mays
MQELSLECFSNEVVRLDLTPPSQTSPTSLSIDEEESSEAKIRRLISEHPVIIFSRSSCCMSHVMKRLLTTIGVVPTVIELDDHEVSSLPMALEEEFSGGVLPSPAVFIGRECVGGIESLVALHLSGHLVPKLVQVGALWV

SEQ ID NO: 4110 - DNA, 627 bp, Glycine max
  CDS (53)..(496)
attttcattctcactacactacttgtcctttttttcctcactcaattcaacgatgcaaggcctgcgccgctgctcaaacgacgtcgtccagctagacctctccaccccaacaacaaccaccaccaccaccaccaccaccacaaacaacacaaactcttcttctttctcctcttcttgttctctctccatcgacgtggacgaatcaacggaagcccgcatccagcgcctgatctccgagcaccccgtcataatcttcacgcgctcctcctgctgcatgtgccacgtcatgaagaagctcctcgccaccatcggcgtcaaccccaccgtcatcgaattggacgaccacgagatcgctgccctccccctccccgaccaccgcacccccgccgtcttcatcggaggctcctccgtcggcggcctcgagtccctcgtcgccctccacgtctccggccacctcgtccccaaactcgtccaagtcggcgccctctgggtatgattatcataacaacaacatcatcatcaccatcatcataataatcttaataacaataattagttaattaccagttaccaccaccccaatcaagtcaaatacctcccacatatattatattattatttacttcc

SEQ ID NO: 4111 - protein, 147 aa, Glycine max
MQGLRRCSNDVVQLDLSTPTTTTTTTTTTTNNTNSSSFSSSCSLSIDVDESTEARIQRLISEHPVIIFTRSSCCMCHVMKKLLATIGVNPTVIELDDHEIAALPLPDHRTPAVFIGGSSVGGLESLVALHVSGHLVPKLVQVGALWV

SEQ ID NO: 4112 - DNA, 405 bp, Oryza sativa (japonica cultivar-group); identical to SEQ ID NO: 2593
  CDS (1)..(405)

SEQ ID NO: 4113 - protein, 134 aa, Oryza sativa (japonica cultivar-group); identical to SEQ ID NO: 2594

SEQ ID NO: 4114 - DNA, 477 bp, Oryza sativa (japonica cultivar-group); identical to SEQ ID NO: 2595
  CDS (1)..(477)

SEQ ID NO: 4115 - protein, 158 aa, Oryza sativa (japonica cultivar-group); identical to SEQ ID NO: 2596

SEQ ID NO: 4116 - DNA, 309 bp, Arabidopsis thaliana; identical to SEQ ID NO: 2597
  CDS (1)..(309)

SEQ ID NO: 4117 - protein, 102 aa, Arabidopsis thaliana; identical to SEQ ID NO: 2598

SEQ ID NO: 4118 - DNA, 480 bp, Arabidopsis thaliana; identical to SEQ ID NO: 3688
  CDS (1)..(480)

SEQ ID NO: 4119 - protein, 159 aa, Arabidopsis thaliana; identical to SEQ ID NO: 3689

SEQ ID NO: 4120 - DNA, 666 bp, Debaryomyces hansenii CBS767
  CDS (1)..(666)
atgataagtaataagaagattagattagttgccatttccgcacttctgatattattcataatattattctttagaactagttccgaatctgaaatacgtcccgaaacattaaataatgattctaaagcacagacattattaactgccaataatttgatcgattcaaagaatgacgacaaggttgatgcggctatcaataatgagatatcaaaacttaacaatgatgaatcagaacaggatacttcatcagaaaaagcacaggaggatcaatccgagaagacagaagaaggtttcgacgcagcaaaggcattattagaaattcgagccatgtcacctatggtcatattctcgaagacatactgtccatattccaagagacttaagcaattgctacgtgataattatcaaataaccccggaacctacaatcatggagctcgataaacatggatacggtcagaacttacaggagtacttagaagagaccacgggacgtggtaccgtacctaacgttttagtcggaacttcgctcgaaagcagaggagggtttgacgatatcaagaagttgcatgacgagggcaaattgctaaccttactagtcgaatggggttcaacggattccaaaaagctcgacgttaagaagattgaagcaccatctaatagttag

SEQ ID NO: 4121 - protein, 221 aa, Debaryomyces hansenii CBS767
MISNKKIRLVAISALLILFIILFFRTSSESEIRPETLNNDSKAQTLLTANNLIDSKNDDKVDAAINNEISKLNNDESEQDTSSEKAQEDQSEKTEEGFDAAKALLEIRAMSPMVIFSKTYCPYSKRLKQLLRDNYQITPEPTIMELDKHGYGQNLQEYLEETTGRGTVPNVLVGTSLESRGGFDDIKKLHDEGKLLTLLVEWGSTDSKKLDVKKIEAPSNS

SEQ ID NO: 4122 - DNA, 441 bp, Cryptococcus neoformans var. neoformans B-3501A; identical to SEQ ID NO: 2637
  CDS (1)..(441)

SEQ ID NO: 4123 - protein, 146 aa, Cryptococcus neoformans var. neoformans B-3501A; identical to SEQ ID NO: 2638

SEQ ID NO: 4124 - DNA, 384 bp, Medicago truncatula; identical to SEQ ID NO: 2643
  CDS (1)..(384)

SEQ ID NO: 4125 - protein, 127 aa, Medicago truncatula; identical to SEQ ID NO: 2644

SEQ ID NO: 4126 - DNA, 384 bp, Oryza sativa subsp; identical to SEQ ID NO: 3343
  CDS (1)..(384)

SEQ ID NO: 4127 - protein, 127 aa, Oryza sativa subsp; identical to SEQ ID NO: 3344

SEQ ID NO: 4128 - DNA, 315 bp, Oryza sativa subsp; identical to SEQ ID NO: 3345
  CDS (1)..(315)

SEQ ID NO: 4129 - protein, 104 aa, Oryza sativa subsp; identical to SEQ ID NO: 3346

SEQ ID NO: 4130 - DNA, 393 bp, Oryza sativa subsp; identical to SEQ ID NO: 3347
  CDS (1)..(393)

SEQ ID NO: 4131 - protein, 130 aa, Oryza sativa subsp; identical to SEQ ID NO: 3348

SEQ ID NO: 4132 - DNA, 579 bp, Oryza sativa subsp
  CDS (1)..(579)
atgtcagagcgtgtgttcgccgagctcgcgaccatccactgccaaaaaagccttccatgtcgccactcctttgacccccctcgcaccacaccaattctccatctatatatcatccaccttcttcttcctcctctcattgccattgtgtgtttgtgttacattgcaatcgtgccatttgaagaagaggaggagaggatgaggatgcaggtggtggaggcggcggcggtggaggaggcggcggcggcggcggcgatgatgtcggtgtacgagagggtggcgaggatggcgagcgggaacgcggtggtggtgttcagcgcgagcgggtgctgcatgtgccacgtcgtcaagcgcctcctcctcggcctcggcgtcggccccgccgtctacgagctcgaccagctcgccgccgccgccgacatccaggccgcgctgtcgcagctcctcccgccgggccagccgccggtgcccgtcgtgttcgtcggcggcaggctcctcggcggcgtcgagaaggtgatggcgtgccacatcaatggcaccctcgtccccctcctcaagcaggccggcgccctctggctctga

SEQ ID NO: 4133 - protein, 192 aa, Oryza sativa subsp
MSERVFAELATIHCQKSLPCRHSFDPPRTTPILHLYIIHLLLPPLIAIVCLCYIAIVPFEEEEERMRMQVVEAAAVEEAAAAAAMMSVYERVARMASGNAVVVFSASGCCMCHVVKRLLLGLGVGPAVYELDQLAAAADIQAALSQLLPPGQPPVPVVFVGGRLLGGVEKVMACHINGTLVPLLKQAGALWL

SEQ ID NO: 4134 - DNA, 495 bp, Oryza sativa subsp
  CDS (1)..(495)
atgccgccgcggagcctcaccctctcccgccttcccgtggccgcccttggcctccccttctcttcttgctccccgcctcctcctcgccttcgcttccccatcgccgcacgccgcgccaggtccctcgccaccagggcctcctcctcctctccggattcctccttcggctcgcggatggaggactctgtcaagaggacgctcgccgacaaccccgtcgtcatctactccaagtcctggtgctcctactccatggaagtcaaggcgctcttcaagcggatcggcgtccagccgcacgtcatcgagctcgaccaactcggcgcacagggacctcagttgcaaaaggtgttagagcggctgactggacagtccactgttcctaatgttttcattggtggaaagcacattggtggctgtacagatactgtgaagcttcatcgcaaaggggagctagctaccatgctgtcagagctggatatcgacgtcaacaactcatga

SEQ ID NO: 4135 - protein, 164 aa, Oryza sativa subsp
MPPRSLTLSRLPVAALGLPFSSCSPPPPRLRFPIAARRARSLATRASSSSPDSSFGSRMEDSVKRTLADNPVVIYSKSWCSYSMEVKALFKRIGVQPHVIELDQLGAQGPQLQKVLERLTGQSTVPNVFIGGKHIGGCTDTVKLHRKGELATMLSELDIDVNNS

SEQ ID NO: 4136 - DNA, 327 bp, Oryza sativa subsp
  CDS (1)..(327)
atggagagggtggcgaagctggcgtcggagagggcggtggtggtgttcacggcgagcaactgcggcatgtgccacgccgtgacgagcctcctcgtcggcgagctgggcgtcaacgccgccgtgcacgagctcgacaaggacccccgcggcagggacatggagagggagctcgccaggaggctcaacggcggcggcggcggcggccgcgccgtgccggcggtgttcgtcggaggcaacctcgtcggcggcgccaaccgggtcatgtcgctccacctcgccggcgagctcgtccccatgctcaagaacgccggcgcgctctggctctag

SEQ ID NO: 4137 - protein, 108 aa, Oryza sativa subsp
MERVAKLASERAVVVFTASNCGMCHAVTSLLVGELGVNAAVHELDKDPRGRDMERELARRLNGGGGGGRAVPAVFVGGNLVGGANRVMSLHLAGELVPMLKNAGALWL

SEQ ID NO: 4138 - DNA, 330 bp, Oryza sativa subsp
  CDS (1)..(330)
atggcggagagggtggcgaggctggcgtcggagagggcggtggtggtgttcaccaagagcggctgctgcatgagcaccgcggtgacgacgctgctcggcgagctcgccgtcagcgccgccgtgcacgagctcgacagggagccgctcgggaaggagatggagaaggagctcgccaggaggctctacggctccggcggacgcggcgggcccgccgtgccggcggtgttcatcggcgggagcctcgtcggcggcaccagcaaggtgatggccatgcacctcaagggcgagctcgtgcccttgctcaagagcgccggtgcactgtggctttga

SEQ ID NO: 4139 - protein, 109 aa, Oryza sativa subsp
MAERVARLASERAVVVFTKSGCCMSTAVTTLLGELAVSAAVHELDREPLGKEMEKELARRLYGSGGRGGPAVPAVFIGGSLVGGTSKVMAMHLKGELVPLLKSAGALWL

SEQ ID NO: 4140 - DNA, 330 bp, Oryza sativa subsp
  CDS (1)..(330)
atggcggagagggtggcgatgctggcgtcggagagggcggtggtggtgttcaccaagagcggctgctgcatgtgcaccgcggtgacgacgctgctcggcgagctcgccgtcagcgccgccgtgcacgagctcgacagggacccgctcgggaaggagatggagagggagctcgccaggaggctctacggctccggcggccgcggagggcccgccgtgccggcggtgttcatcggcgggagcctcgtcggcggcaccagcaaggtgatggccatgcatctcaagggggagctcgtgcccatgctcaagagtgccggtgcactgtggctttga

SEQ ID NO: 4141 - protein, 109 aa, Oryza sativa subsp
MAERVAMLASERAVVVFTKSGCCMCTAVTTLLGELAVSAAVHELDRDPLGKEMERELARRLYGSGGRGGPAVPAVFIGGSLVGGTSKVMAMHLKGELVPMLKSAGALWL

SEQ ID NO: 4142 - DNA, 306 bp, Vitis vinifera; identical to SEQ ID NO: 2645
  CDS (1)..(306)
  misc_feature (225)..(225): r is g or a
  misc_feature (273)..(273): y is t or c

SEQ ID NO: 4143 - protein, 101 aa, Vitis vinifera; identical to SEQ ID NO: 2646

SEQ ID NO: 4144 - DNA, 324 bp, Vitis vinifera; identical to SEQ ID NO: 2647
  CDS (1)..(324)

SEQ ID NO: 4145 - protein, 107 aa, Vitis vinifera; identical to SEQ ID NO: 2648

SEQ ID NO: 4146 - DNA, 321 bp, Vitis vinifera; identical to SEQ ID NO: 2649
  CDS (1)..(321)

SEQ ID NO: 4147 - protein, 106 aa, Vitis vinifera; identical to SEQ ID NO: 2650

SEQ ID NO: 4148 - DNA, 345 bp, Vitis vinifera; identical to SEQ ID NO: 2651
  CDS (1)..(345)

SEQ ID NO: 4149 - protein, 114 aa, Vitis vinifera; identical to SEQ ID NO: 2652

SEQ ID NO: 4150 - DNA, 414 bp, Vitis vinifera; identical to SEQ ID NO: 2653
  CDS (1)..(414)
  misc_feature (18)..(18): y is t or c
  misc_feature (63)..(63): m is a or c

SEQ ID NO: 4151 - protein, 137 aa, Vitis vinifera; identical to SEQ ID NO: 2654

SEQ ID NO: 4152 - DNA, 312 bp, Musa acuminata; identical to SEQ ID NO: 3023
  CDS (1)..(312)

SEQ ID NO: 4153 - protein, 103 aa, Musa acuminata; identical to SEQ ID NO: 3024

SEQ ID NO: 4154 - DNA, 312 bp, Musa acuminata; identical to SEQ ID NO: 2661
  CDS (1)..(312)

SEQ ID NO: 4155 - protein, 103 aa, Musa acuminata; identical to SEQ ID NO: 2662

SEQ ID NO: 4156 - DNA, 450 bp, Medicago truncatula; identical to SEQ ID NO: 2663
  CDS (1)..(450)

SEQ ID NO: 4157 - protein, 149 aa, Medicago truncatula; identical to SEQ ID NO: 2664

SEQ ID NO: 4158 - DNA, 357 bp, Medicago truncatula; identical to SEQ ID NO: 2665
  CDS (1)..(357)

SEQ ID NO: 4159 - protein, 118 aa, Medicago truncatula; identical to SEQ ID NO: 2666

SEQ ID NO: 4160 - DNA, 321 bp, Beta vulgaris; identical to SEQ ID NO: 2673
  CDS (1)..(321)

SEQ ID NO: 4161 - protein, 106 aa, Beta vulgaris; identical to SEQ ID NO: 2674

SEQ ID NO: 4162 - DNA, 309 bp, Beta vulgaris; identical to SEQ ID NO: 2675
  CDS (1)..(309)

SEQ ID NO: 4163 - protein, 102 aa, Beta vulgaris; identical to SEQ ID NO: 2676

SEQ ID NO: 4164 - DNA, 309 bp, Beta vulgaris; identical to SEQ ID NO: 2677
  CDS (1)..(309)

SEQ ID NO: 4165 - protein, 102 aa, Beta vulgaris; identical to SEQ ID NO: 2678

SEQ ID NO: 4166 - DNA, 309 bp, Beta vulgaris; identical to SEQ ID NO: 2679
  CDS (1)..(309)

SEQ ID NO: 4167 - protein, 102 aa, Beta vulgaris; identical to SEQ ID NO: 2680

SEQ ID NO: 4168 - DNA, 381 bp, Populus tremula x Populus tremuloides; identical to SEQ ID NO: 2685
  CDS (1)..(381)

SEQ ID NO: 4169 - protein, 126 aa, Populus tremula x Populus tremuloides; identical to SEQ ID NO: 2686

SEQ ID NO: 4170 - DNA, 348 bp, Tilia platyphyllos; identical to SEQ ID NO: 2693
  CDS (1)..(348)

SEQ ID NO: 4171 - protein, 115 aa, Tilia platyphyllos; identical to SEQ ID NO: 2694

SEQ ID NO: 4172 - DNA, 327 bp, Solanum lycopersicum; identical to SEQ ID NO: 2701
  CDS (1)..(327)

SEQ ID NO: 4173 - protein, 108 aa, Solanum lycopersicum; identical to SEQ ID NO: 2702

SEQ ID NO: 4174 - DNA, 447 bp, Arabidopsis thaliana; identical to SEQ ID NO: 2705
  CDS (1)..(447)

SEQ ID NO: 4175 - protein, 148 aa, Arabidopsis thaliana; identical to SEQ ID NO: 2706

SEQ ID NO: 4176 - DNA, 312 bp, Arabidopsis thaliana; identical to SEQ ID NO: 2707
  CDS (1)..(312)

SEQ ID NO: 4177 - protein, 103 aa, Arabidopsis thaliana; identical to SEQ ID NO: 2708

SEQ ID NO: 4178 - DNA, 312 bp, Arabidopsis thaliana; identical to SEQ ID NO: 2709
  CDS (1)..(312)

SEQ ID NO: 4179 - protein, 103 aa, Arabidopsis thaliana; identical to SEQ ID NO: 2710

SEQ ID NO: 4180 - DNA, 309 bp, Arabidopsis thaliana; identical to SEQ ID NO: 2711
  CDS (1)..(309)

SEQ ID NO: 4181 - protein, 102 aa, Arabidopsis thaliana; identical to SEQ ID NO: 2712

SEQ ID NO: 4182 - DNA, 540 bp, Arabidopsis thaliana; identical to SEQ ID NO: 2717
  CDS (1)..(540)

SEQ ID NO: 4183 - protein, 179 aa, Arabidopsis thaliana; identical to SEQ ID NO: 2718

SEQ ID NO: 4184 - DNA, 453 bp, Arabidopsis thaliana; identical to SEQ ID NO: 2719
  CDS (1)..(453)

SEQ ID NO: 4185 - protein, 150 aa, Arabidopsis thaliana; identical to SEQ ID NO: 2720

SEQ ID NO: 4186 - DNA, 378 bp, Arabidopsis thaliana; identical to SEQ ID NO: 2721
  CDS (1)..(378)

SEQ ID NO: 4187 - protein, 125 aa, Arabidopsis thaliana; identical to SEQ ID NO: 2722

SEQ ID NO: 4188 - DNA, 525 bp, Arabidopsis thaliana; identical to SEQ ID NO: 2729
  CDS (1)..(525)

SEQ ID NO: 4189 - protein, 174 aa, Arabidopsis thaliana; identical to SEQ ID NO: 2730

SEQ ID NO: 4190 - DNA, 411 bp, Arabidopsis thaliana; identical to SEQ ID NO: 2733
  CDS (1)..(411)

SEQ ID NO: 4191 - protein, 136 aa, Arabidopsis thaliana; identical to SEQ ID NO: 2734

SEQ ID NO: 4192 - DNA, 423 bp, Arabidopsis thaliana; identical to SEQ ID NO: 2735
  CDS (1)..(423)

SEQ ID NO: 4193 - protein, 140 aa, Arabidopsis thaliana; identical to SEQ ID NO: 2736

SEQ ID NO: 4194 - DNA, 414 bp, Arabidopsis thaliana; identical to SEQ ID NO: 2737
  CDS (1)..(414)

SEQ ID NO: 4195 - protein, 137 aa, Arabidopsis thaliana; identical to SEQ ID NO: 2738

SEQ ID NO: 4196 - DNA, 309 bp, Arabidopsis thaliana; identical to SEQ ID NO: 2739
  CDS (1)..(309)

SEQ ID NO: 4197 - protein, 102 aa, Arabidopsis thaliana; identical to SEQ ID NO: 2740

SEQ ID NO: 4198 - DNA, 309 bp, Arabidopsis thaliana; identical to SEQ ID NO: 2741
  CDS (1)..(309)

SEQ ID NO: 4199 - protein, 102 aa, Arabidopsis thaliana; identical to SEQ ID NO: 2742

SEQ ID NO: 4200 - DNA, 309 bp, Arabidopsis thaliana; identical to SEQ ID NO: 2743
  CDS (1)..(309)

SEQ ID NO: 4201 - protein, 102 aa, Arabidopsis thaliana; identical to SEQ ID NO: 2744

SEQ ID NO: 4202 - DNA, 309 bp, Arabidopsis thaliana; identical to SEQ ID NO: 2745
  CDS (1)..(309)

SEQ ID NO: 4203 - protein, 102 aa, Arabidopsis thaliana; identical to SEQ ID NO: 2746

SEQ ID NO: 4204 - DNA, 309 bp, Arabidopsis thaliana; identical to SEQ ID NO: 2573
  CDS (1)..(309)

SEQ ID NO: 4205 - protein, 102 aa, Arabidopsis thaliana; identical to SEQ ID NO: 2574

SEQ ID NO: 4206 - DNA, 309 bp, Arabidopsis thaliana; identical to SEQ ID NO: 2747
  CDS (1)..(309)

SEQ ID NO: 4207 - protein, 102 aa, Arabidopsis thaliana; identical to SEQ ID NO: 2748

SEQ ID NO: 4208 - DNA, 309 bp, Arabidopsis thaliana; identical to SEQ ID NO: 2749
  CDS (1)..(309)

SEQ ID NO: 4209 - protein, 102 aa, Arabidopsis thaliana; identical to SEQ ID NO: 2750

SEQ ID NO: 4210 - DNA, 309 bp, Arabidopsis thaliana; identical to SEQ ID NO: 2751
  CDS (1)..(309)

SEQ ID NO: 4211 - protein, 102 aa, Arabidopsis thaliana; identical to SEQ ID NO: 2752

SEQ ID NO: 4212 - DNA, 378 bp, Oryza sativa; identical to SEQ ID NO: 2753
  CDS (1)..(378)

SEQ ID NO: 4213 - protein, 125 aa, Oryza sativa; identical to SEQ ID NO: 2754

SEQ ID NO: 4214 - DNA, 411 bp, Oryza sativa; identical to SEQ ID NO: 3119
  CDS (1)..(411)

SEQ ID NO: 4215 - protein, 136 aa, Oryza sativa; identical to SEQ ID NO: 3120

SEQ ID NO: 4216 - DNA, 312 bp, Oryza sativa; identical to SEQ ID NO: 2755
  CDS (1)..(312)

SEQ ID NO: 4217 - protein, 103 aa, Oryza sativa; identical to SEQ ID NO: 2756

SEQ ID NO: 4218 - DNA, 444 bp, Oryza sativa; identical to SEQ ID NO: 2757
  CDS (1)..(444)

SEQ ID NO: 4219 - protein, 147 aa, Oryza sativa; identical to SEQ ID NO: 2758

SEQ ID NO: 4220 - DNA, 378 bp, Oryza sativa; identical to SEQ ID NO: 2759
  CDS (1)..(378)

SEQ ID NO: 4221 - protein, 125 aa, Oryza sativa; identical to SEQ ID NO: 2760

SEQ ID NO: 4222 - DNA, 408 bp, Oryza sativa; identical to SEQ ID NO: 2761
  CDS (1)..(408)

SEQ ID NO: 4223 - protein, 135 aa, Oryza sativa; identical to SEQ ID NO: 2762

SEQ ID NO: 4224 - DNA, 402 bp, Oryza sativa; identical to SEQ ID NO: 2763
  CDS (1)..(402)

SEQ ID NO: 4225 - protein, 133 aa, Oryza sativa; identical to SEQ ID NO: 2764

SEQ ID NO: 4226 - DNA, 408 bp, Oryza sativa; identical to SEQ ID NO: 2765
  CDS (1)..(408)

SEQ ID NO: 4227 - protein, 135 aa, Oryza sativa; identical to SEQ ID NO: 2766

SEQ ID NO: 4228 - DNA, 384 bp, Oryza sativa; identical to SEQ ID NO: 2767
  CDS (1)..(384)

SEQ ID NO: 4229 - protein, 127 aa, Oryza sativa; identical to SEQ ID NO: 2768

SEQ ID NO: 4230 - DNA, 345 bp, Oryza sativa; identical to SEQ ID NO: 2769
  CDS (1)..(345)

SEQ ID NO: 4231 - protein, 114 aa, Oryza sativa; identical to SEQ ID NO: 2770

SEQ ID NO: 4232 - DNA, 417 bp, Oryza sativa; identical to SEQ ID NO: 2771
  CDS (1)..(417)

SEQ ID NO: 4233 - protein, 138 aa, Oryza sativa; identical to SEQ ID NO: 2772

SEQ ID NO: 4234 - DNA, 399 bp, Oryza sativa; identical to SEQ ID NO: 2773
  CDS (1)..(399)

SEQ ID NO: 4235 - protein, 132 aa, Oryza sativa; identical to SEQ ID NO: 2774

SEQ ID NO: 4236 - DNA, 579 bp, Oryza sativa; identical to SEQ ID NO: 2777
  CDS (1)..(579)

SEQ ID NO: 4237 - protein, 192 aa, Oryza sativa; identical to SEQ ID NO: 2778

SEQ ID NO: 4238 - DNA, 495 bp, Oryza sativa; identical to SEQ ID NO: 2779
  CDS (1)..(495)

SEQ ID NO: 4239 - protein, 164 aa, Oryza sativa; identical to SEQ ID NO: 2780

SEQ ID NO: 4240 - DNA, 327 bp, Oryza sativa; identical to SEQ ID NO: 2781
  CDS (1)..(327)

SEQ ID NO: 4241 - protein, 108 aa, Oryza sativa; identical to SEQ ID NO: 2782

SEQ ID NO: 4242 - DNA, 330 bp, Oryza sativa; identical to SEQ ID NO: 2783
  CDS (1)..(330)

SEQ ID NO: 4243 - protein, 109 aa, Oryza sativa; identical to SEQ ID NO: 2784

SEQ ID NO: 4244 - DNA, 330 bp, Oryza sativa; identical to SEQ ID NO: 2785
  CDS (1)..(330)

SEQ ID NO: 4245 - protein, 109 aa, Oryza sativa; identical to SEQ ID NO: 2786

SEQ ID NO: 4246 - DNA, 312 bp, Oryza sativa; identical to SEQ ID NO: 2789
  CDS (1)..(312)

SEQ ID NO: 4247 - protein, 103 aa, Oryza sativa; identical to SEQ ID NO: 2790

SEQ ID NO: 4248 - DNA, 309 bp, Brassica napus; identical to SEQ ID NO: 2793
  CDS (1)..(309)

SEQ ID NO: 4249 - protein, 102 aa, Brassica napus; identical to SEQ ID NO: 2794

SEQ ID NO: 4250 - DNA, 309 bp, Brassica napus; identical to SEQ ID NO: 2795
  CDS (1)..(309)

SEQ ID NO: 4251 - protein, 102 aa, Brassica napus; identical to SEQ ID NO: 2796

SEQ ID NO: 4252 - DNA, 309 bp, Brassica napus; identical to SEQ ID NO: 2797
  CDS (1)..(309)

SEQ ID NO: 4253 - protein, 102 aa, Brassica napus; identical to SEQ ID NO: 2798

SEQ ID NO: 4254 - DNA, 309 bp, Brassica napus; identical to SEQ ID NO: 2807
  CDS (1)..(309)

SEQ ID NO: 4255 - protein, 102 aa, Brassica napus; identical to SEQ ID NO: 2808

SEQ ID NO: 4256 - DNA, 306 bp, Glycine max; identical to SEQ ID NO: 2811
  CDS (1)..(306)

SEQ ID NO: 4257 - protein, 101 aa, Glycine max; identical to SEQ ID NO: 2812

SEQ ID NO: 4258 - DNA, 306 bp, Glycine max; identical to SEQ ID NO: 2815
  CDS (1)..(306)

SEQ ID NO: 4259 - protein, 101 aa, Glycine max; identical to SEQ ID NO: 2816

SEQ ID NO: 4260 - DNA, 309 bp, Brassica napus; identical to SEQ ID NO: 2819
  CDS (1)..(309)

SEQ ID NO: 4261 - protein, 102 aa, Brassica napus; identical to SEQ ID NO: 2820

SEQ ID NO: 4262 - DNA, 399 bp, Glycine max; identical to SEQ ID NO: 2821
  CDS (1)..(399)

SEQ ID NO: 4263 - protein, 132 aa, Glycine max; identical to SEQ ID NO: 2822

SEQ ID NO: 4264 - DNA, 312 bp, Triticum aestivum; identical to SEQ ID NO: 2823
  CDS (1)..(312)

SEQ ID NO: 4265 - protein, 103 aa, Triticum aestivum; identical to SEQ ID NO: 2824

SEQ ID NO: 4266 - DNA, 414 bp, Triticum aestivum; identical to SEQ ID NO: 2825
  CDS (1)..(414)

SEQ ID NO: 4267 - protein, 137 aa, Triticum aestivum; identical to SEQ ID NO: 2826

SEQ ID NO: 4268 - DNA, 414 bp, Zea mays; identical to SEQ ID NO: 2827
  CDS (1)..(414)

SEQ ID NO: 4269 - protein, 137 aa, Zea mays; identical to SEQ ID NO: 2828

SEQ ID NO: 4270 - DNA, 468 bp, Zea mays; identical to SEQ ID NO: 2829
  CDS (1)..(468)

SEQ ID NO: 4271 - protein, 155 aa, Zea mays; identical to SEQ ID NO: 2830

SEQ ID NO: 4272 - DNA, 312 bp, Zea mays; identical to SEQ ID NO: 2585
  CDS (1)..(312)

SEQ ID NO: 4273 - protein, 103 aa, Zea mays; identical to SEQ ID NO: 2586

SEQ ID NO: 4274 - DNA, 312 bp, Hordeum vulgare; identical to SEQ ID NO: 2833
  CDS (1)..(312)

SEQ ID NO: 4275 - protein, 103 aa, Hordeum vulgare; identical to SEQ ID NO: 2834

SEQ ID NO: 4276 - DNA, 378 bp, Brassica napus; identical to SEQ ID NO: 2837
  CDS (1)..(378)

SEQ ID NO: 4277 - protein, 125 aa, Brassica napus; identical to SEQ ID NO: 2838

SEQ ID NO: 4278 - DNA, 522 bp, Brassica napus; identical to SEQ ID NO: 2839
  CDS (1)..(522)

SEQ ID NO: 4279 - protein, 173 aa, Brassica napus; identical to SEQ ID NO: 2840

SEQ ID NO: 4280 - DNA, 309 bp, Brassica napus; identical to SEQ ID NO: 2845
  CDS (1)..(309)

SEQ ID NO: 4281 - protein, 102 aa, Brassica napus; identical to SEQ ID NO: 2846

SEQ ID NO: 4282 - DNA, 435 bp, Brassica napus; identical to SEQ ID NO: 2849
  CDS (1)..(435)

SEQ ID NO: 4283 - protein, 144 aa, Brassica napus; identical to SEQ ID NO: 2850

SEQ ID NO: 4284 - DNA, 435 bp, Brassica napus; identical to SEQ ID NO: 2851
  CDS (1)..(435)

SEQ ID NO: 4285 - protein, 144 aa, Brassica napus; identical to SEQ ID NO: 2852

SEQ ID NO: 4286 - DNA, 363 bp, Brassica napus; identical to SEQ ID NO: 2857
  CDS (1)..(363)

SEQ ID NO: 4287 - protein, 120 aa, Brassica napus; identical to SEQ ID NO: 2858

SEQ ID NO: 4288 - DNA, 336 bp, Brassica napus; identical to SEQ ID NO: 2859
  CDS (1)..(336)

SEQ ID NO: 4289 - protein, 111 aa, Brassica napus; identical to SEQ ID NO: 2860

SEQ ID NO: 4290 - DNA, 309 bp, Brassica napus; identical to SEQ ID NO: 2869
  CDS (1)..(309)

SEQ ID NO: 4291 - protein, 102 aa, Brassica napus; identical to SEQ ID NO: 2870

SEQ ID NO: 4292 - DNA, 309 bp, Brassica napus; identical to SEQ ID NO: 2873
  CDS (1)..(309)

SEQ ID NO: 4293 - protein, 102 aa, Brassica napus; identical to SEQ ID NO: 2874

SEQ ID NO: 4294 - DNA, 312 bp, Brassica napus; identical to SEQ ID NO: 2875
  CDS (1)..(312)

SEQ ID NO: 4295 - protein, 103 aa, Brassica napus; identical to SEQ ID NO: 2876

SEQ ID NO: 4296 - DNA, 426 bp, Brassica napus; identical to SEQ ID NO: 2877
  CDS (1)..(426)

SEQ ID NO: 4297 - protein, 141 aa, Brassica napus; identical to SEQ ID NO: 2878

SEQ ID NO: 4298 - DNA, 333 bp, Glycine max; identical to SEQ ID NO: 2881
  CDS (1)..(333)

SEQ ID NO: 4299 - protein, 110 aa, Glycine max; identical to SEQ ID NO: 2882

SEQ ID NO: 4300 - DNA, 399 bp, Glycine max; identical to SEQ ID NO: 2887
  CDS (1)..(399)

SEQ ID NO: 4301 - protein, 132 aa, Glycine max; identical to SEQ ID NO: 2888

SEQ ID NO: 4302 - DNA, 309 bp, Glycine max; identical to SEQ ID NO: 2889
  CDS (1)..(309)

SEQ ID NO: 4303 - protein, 102 aa, Glycine max; identical to SEQ ID NO: 2890

SEQ ID NO: 4304 - DNA, 525 bp, Glycine max; identical to SEQ ID NO: 2891
  CDS (1)..(525)

SEQ ID NO: 4305 - protein, 174 aa, Glycine max; identical to SEQ ID NO: 2892

SEQ ID NO: 4306 - DNA, 483 bp, Glycine max; identical to SEQ ID NO: 2893
  CDS (1)..(483)

SEQ ID NO: 4307 - protein, 160 aa, Glycine max; identical to SEQ ID NO: 2894

SEQ ID NO: 4308 - DNA, 522 bp, Glycine max; identical to SEQ ID NO: 2895
  CDS (1)..(522)

SEQ ID NO: 4309 - protein, 173 aa, Glycine max; identical to SEQ ID NO: 2896

SEQ ID NO: 4310 - DNA, 411 bp, Glycine max; identical to SEQ ID NO: 2897
  CDS (1)..(411)

SEQ ID NO: 4311 - protein, 136 aa, Glycine max; identical to SEQ ID NO: 2898

SEQ ID NO: 4312 - DNA, 309 bp, Glycine max; identical to SEQ ID NO: 2899
  CDS (1)..(309)

SEQ ID NO: 4313 - protein, 102 aa, Glycine max; identical to SEQ ID NO: 2900

SEQ ID NO: 4314 - DNA, 423 bp, Glycine max; identical to SEQ ID NO: 2901
  CDS (1)..(423)

SEQ ID NO: 4315 - protein, 140 aa, Glycine max; identical to SEQ ID NO: 2902

SEQ ID NO: 4316 - DNA, 306 bp, Glycine max; identical to SEQ ID NO: 2903
  CDS (1)..(306)

SEQ ID NO: 4317 - protein, 101 aa, Glycine max; identical to SEQ ID NO: 2904

SEQ ID NO: 4318 - DNA, 309 bp, Glycine max; identical to SEQ ID NO: 2905
  CDS (1)..(309)

SEQ ID NO: 4319 - protein, 102 aa, Glycine max; identical to SEQ ID NO: 2906

SEQ ID NO: 4320 - DNA, 318 bp, Glycine max; identical to SEQ ID NO: 2907
  CDS (1)..(318)

SEQ ID NO: 4321 - protein, 105 aa, Glycine max; identical to SEQ ID NO: 2908

SEQ ID NO: 4322 - DNA, 402 bp, Glycine max; identical to SEQ ID NO: 2909
  CDS (1)..(402)

SEQ ID NO: 4323 - protein, 133 aa, Glycine max; identical to SEQ ID NO: 2910

SEQ ID NO: 4324 - DNA, 309 bp, Glycine max; identical to SEQ ID NO: 2911
  CDS (1)..(309)

SEQ ID NO: 4325 - protein, 102 aa, Glycine max; identical to SEQ ID NO: 2912

SEQ ID NO: 4326 - DNA, 402 bp, Glycine max; identical to SEQ ID NO: 2913
  CDS (1)..(402)

SEQ ID NO: 4327 - protein, 133 aa, Glycine max; identical to SEQ ID NO: 2914

SEQ ID NO: 4328 - DNA, 480 bp, Zea mays; identical to SEQ ID NO: 2915
  CDS (1)..(480)

SEQ ID NO: 4329 - protein, 159 aa, Zea mays; identical to SEQ ID NO: 2916

SEQ ID NO: 4330 - DNA, 393 bp, Zea mays; identical to SEQ ID NO: 2917
  CDS (1)..(393)

SEQ ID NO: 4331 - protein, 130 aa, Zea mays; identical to SEQ ID NO: 2918

SEQ ID NO: 4332 - DNA, 315 bp, Zea mays; identical to SEQ ID NO: 2583
  CDS (1)..(315)

SEQ ID NO: 4333 - protein, 104 aa, Zea mays; identical to SEQ ID NO: 2584

SEQ ID NO: 4334 - DNA, 345 bp, Zea mays; identical to SEQ ID NO: 2919
  CDS (1)..(345)

SEQ ID NO: 4335 - protein, 114 aa, Zea mays; identical to SEQ ID NO: 2920

SEQ ID NO: 4336 - DNA, 312 bp, Zea mays; identical to SEQ ID NO: 2921
  CDS (1)..(312)

SEQ ID NO: 4337 - protein, 103 aa, Zea mays; identical to SEQ ID NO: 2922

SEQ ID NO: 4338 - DNA, 399 bp, Zea mays; identical to SEQ ID NO: 2927
  CDS (1)..(399)

SEQ ID NO: 4339 - protein, 132 aa, Zea mays; identical to SEQ ID NO: 2928

SEQ ID NO: 4340 - DNA, 315 bp, Zea mays; identical to SEQ ID NO: 2587
  CDS (1)..(315)

SEQ ID NO: 4341 - protein, 104 aa, Zea mays; identical to SEQ ID NO: 2588

SEQ ID NO: 4342 - DNA, 315 bp, Zea mays; identical to SEQ ID NO: 2929
  CDS (1)..(315)

SEQ ID NO: 4343 - protein, 104 aa, Zea mays; identical to SEQ ID NO: 2930

SEQ ID NO: 4344 - DNA, 22 bp, Artificial sequence
  primer
atgatgcaagaattaggcttac

SEQ ID NO: 4345 - DNA, 21 bp, Artificial sequence
  primer
tcatacccaaagagctccaac

SEQ ID NO: 4346 - protein, 110 aa, Artificial sequence
  consensus sequence
  Variant (2)..(8): Xaa in position 2 to 8 is any amino acid
  Variant (9)..(9): Xaa in position 9 is any or no amino acid
  Variant (11)..(18): Xaa in position 11 to 18 is any amino acid
  Variant (20)..(23): Xaa in position 20 to 23 is any amino acid
  Variant (24)..(24): Xaa in position 24 is any or no amino acid
  Variant (26)..(29): Xaa in position 26 to 29 is any amino acid
  Variant (30)..(31): Xaa in position 30 to 31 is any or no amino acid
  Variant (33)..(33): Xaa in position 33 is any amino acid
  Variant (35)..(35): Xaa in position 35 is any amino acid
  Variant (37)..(48): Xaa in position 37 to 48 is any amino acid
  Variant (49)..(74): Xaa in position 49 to 74 is any or no amino acid
  Variant (76)..(76): Xaa in position 76 is any amino acid
  Variant (79)..(79): Xaa in position 79 is any amino acid
  Variant (81)..(82): Xaa in position 81 to 82 is any amino acid
  Variant (84)..(86): Xaa in position 84 to 86 is any amino acid
  Variant (88)..(95): Xaa in position 88 to 95 is any amino acid
  Variant (97)..(98): Xaa in position 97 to 98 is any amino acid
  Variant (100)..(100): Xaa in position 100 is any amino acid
  Variant (102)..(102): Xaa in position 102 is any amino acid
  Variant (104)..(104): Xaa in position 104 is any amino acid
  Variant (106)..(108): Xaa in position 106 to 108 is any amino acid
VXXXXXXXXCXXXXXXXXLXXXXXGXXXXXXVXEXDXXXXXXXXXXXXXXXXXXXXXXXXXXXXXXXXXXXXXXPXVFXGXXGXXXGXXXXXXXXHXXGXLXPXLXXXGA

SEQ ID NO: 4347 - protein, 25 aa, Artificial sequence
  protein pattern
  Variant (2)..(2): Xaa in position 2 is Ala, Gly, Ser or Thr
  Variant (3)..(7): Xaa in position 3 to 7 is any amino acid
  Variant (8)..(8): Xaa in position 8 is Ala, Glu, Gly, Asn, Ser or Thr
  Variant (9)..(14): Xaa in position 9 to 14 is any amino acid
  Variant (16)..(18): Xaa in position 16 to 18 is any amino acid
  Variant (20)..(22): Xaa in position 20 to 22 is any amino acid
  Variant (25)..(25): Xaa in position 25 is Ile, Leu or Val
GXXXXXXXXXXXXXLXXXLXXXGAX

SEQ ID NO: 4348 - DNA, 1671 bp, Arabidopsis thaliana
  CDS (1)..(1671)
atgggcaattcttgccgtggatctttcaaggacaaactcgacgaaggcgataacaataagcctgaagattactctaaaacctctaccaccaacttgtcttctaattccgaccattcaccgaacgctgcagacatcattgctcaagaattctccaaagacaacaacagcaacaacaacagcaaagatccagctcttgttattcctttaagagaaccaatcatgaggcgtaacccagacaatcaagcttactatgttcttggtcataagacaccaaacattcgtgatatctatacccttagccgcaagctaggtcaaggtcaatttggaacgacttatctatgtacagagattgcctcaggcgttgactacgcttgtaagtcaatatccaagaggaagttgatctctaaagaagatgttgaggatgttagaagggagattcagataatgcatcatttagctggtcacggtagtatcgtgacgattaaaggagcttatgaggactctttgtatgttcacattgttatggagctttgtgctggaggtgaattgtttgataggattattcagagaggacattatagtgagaggaaagctgctgagctgactaagatcattgtcggtgttgttgaagcgtgtcattcgcttggtgtgatgcatagagacttgaagcctgagaatttcttattggttaataaggatgatgatttctctctcaaggctattgattttgggctatctgtctttttcaaaccaggtcaaatattcactgatgttgttggaagtccatattatgttgctcctgaggttttgctcaaacgttatgggcctgaagctgatgtgtggactgctggtgttatattgtatatattgctaagcggagtcccacctttctgggcagaaacacagcaagggatatttgatgctgtgttgaaaggatatatcgactttgagtcagacccgtggcctgtgatatccgacagtgctaaagacttgatccgcagaatgttatcctccaagcctgcagaacgtttgaccgctcatgaagtcttgcgtcatccatggatctgtgagaatggtgttgcaccagatagagcactagatccagctgttctttctcgtctcaagcaattctctgcaatgaataaactaaagaagatggctttgaaggttatagctgagagtctctcggaagaagagatagctggtttaagagaaatgtttcaagcaatggatactgataacagcggggcaatcacatttgatgaactcaaagctgggctgagaaaatatggatctaccttgaaagacacagagatccatgatcttatggatgcggctgatgtagacaacagtgggacaatagattacagtgagttcattgcagcgacgatccatctcaacaaactagagcgggaagagcatcttgttgcagcgtttcaatattttgacaaagatggaagcggtttcataacaattgatgagctacaacaagcgtgtgttgaacatggcatggctgatgttttccttgaagacatcatcaaagaagttgatcaaaacaatgatggaaagattgattatggtgagtttgtggagatgatgcaaaagggaaatgctggtgttggaagaaggacgatgagaaatagtctaaacattagcatgagagacgcgtag

SEQ ID NO: 4349 - protein, 556 aa, Arabidopsis thaliana
MGNSCRGSFKDKLDEGDNNKPEDYSKTSTTNLSSNSDHSPNAADIIAQEFSKDNNSNNNSKDPALVIPLREPIMRRNPDNQAYYVLGHKTPNIRDIYTLSRKLGQGQFGTTYLCTEIASGVDYACKSISKRKLISKEDVEDVRREIQIMHHLAGHGSIVTIKGAYEDSLYVHIVMELCAGGELFDRIIQRGHYSERKAAELTKIIVGVVEACHSLGVMHRDLKPENFLLVNKDDDFSLKAIDFGLSVFFKPGQIFTDVVGSPYYVAPEVLLKRYGPEADVWTAGVILYILLSGVPPFWAETQQGIFDAVLKGYIDFESDPWPVISDSAKDLIRRMLSSKPAERLTAHEVLRHPWICENGVAPDRALDPAVLSRLKQFSAMNKLKKMALKVIAESLSEEEIAGLREMFQAMDTDNSGAITFDELKAGLRKYGSTLKDTEIHDLMDAADVDNSGTIDYSEFIAATIHLNKLEREEHLVAAFQYFDKDGSGFITIDELQQACVEHGMADVFLEDIIKEVDQNNDGKIDYGEFVEMMQKGNAGVGRRTMRNSLNISMRDA

SEQ ID NO: 4350 - DNA, 2392 bp, Oryza sativa
  CDS (191)..(1897)
gttgtcagtgggacgtggcccagctcacctcgtccccctccggccatctcccctctcctccaccaaaatcctcctccgatccaaatccaccaaccctcgccgccgccgccaccgccgcctatgccgccgccgccgtcgccggctgcctagggttacggcggccgcagctcccccccacttcgccggcgcgatggggaacacctgcgtcggccccagctccgcggcggaccgccacggcttcttccactccgtctccctcgccgtgctctggcgccccggtggccgcgccgagccgtcgcagccgccgggttacccgcctcgggagtcgagccactcctccgtcacctcgtccacggcgcccgagcgcgtcaccatcgccgactccgacctctcctcctccacccccaacaagggcgggaataagcccaaggtgaggcgcgtccagagcgcggggctcctcgccgactccgtcctcaagcgcgactccgagcggctcaaggacctctacaccctggggaagaagctcgggcaggggcagttcgggaccacgtaccagtgcgtggagaaggccacggggaaggtgctcgcctgcaagtccatcgccaagcggaagctggtcagcgaggaggacgtggaggacgtgcgccgggagatccagatcatgcaccacctcgccggccacccgagcgtggtctccatcgtcggcgcgtacgaggacgccgtcgccgtgcacctcgtcatggagctctgcgctggcggggagctgtttgataggatcgtgcagcgcgggcactactccgagaaggcggccgcgcagctggcgcgggtgatcatcggtgtcgtcgaggcgtgccattcgctcggggtgatgcacagagacctcaagccggagaacttcttgtttgtcaaccataaggaggactcgccactcaagacgatcgattttgggctttccattttcttcaagccaggcgaaaattattcggatgttgttggaagtccttactatgttgcacctgaggttctgatgaagcattatggccgcgaggtggatgtatggagtgctggtgtaatcatttatatcttgcttagtggagttcctccattttgggatgaatctgaacaagggatatttgaaaaagttttgaaaggagatcttgatttttcatctgatccctggcctgctatctcagacagtgcaaaggatttggtgaggaaaatgttaaaccgtgatcccagaaagagattgactgcacatgaagctctatgtcatccttgggtttgtgttgatggagttgctcctgataaacctcttgattctgctgtcttaactagattgaagcaattttcagcaatgaacaagctaaagaagatggcccttagggtcattgctgaaaatttatcggaagatgaaattgcgagattgagagaaatgttcaaaatgttggacactgataatagtggtcagatcacattggaggaactaaaaactggcttgcggagagttggtgctaatttgaaggattcggaaattacaaccctaatggaagcggctgatattgataatagtggttcaatagattatggggagttcattgctgcaactatgcatctgaacaaagttgagagagaagataatctttttgcagcgttttcatactttgataaagacagcagtggttacattactcaagatgagctacaaaaagcctgtgaggaatttggcataggagatgcacatctggaggatatcatcaaagatattgatcaggacaatgatggccggatcgactacaatgaatttgtaacaatgatgcggaaagggaataatccactagggaaaaaggggcaaggccagctaagttttggtctaagggaagcattgaagcttggttaatggaataactacccctgaatgtagaatggagtgctatttagtaaaggacgaagactgaattcaagaaagcagaagatcaaagacaaacgttggtgttactcctttatcaacactctgtgaagatacaaactaactttttgggttccatcagccggacacacaagaaagccacgtacttgggtttcttcaaagagttcaacatccgtggaccctccaaccgtatagggtgtttttttttccttttttaaataggcacaactcacaagaatagcgtgtgtgttgtttcatactttcatgtcctccttttccgttctggaaacccttgtaggatgctctgctgagacggtgaagctttgacacgcttggaacttcggattggagagttggacgagattcctttgcattggagagttgtatagttgctagtattgaaatgttgtaagaattcgtaggttgtaacataaacagtaaaatgaatgaaatggttgttttagt

SEQ ID NO: 4351 - protein, 568 aa, Oryza sativa
MGNTCVGPSSAADRHGFFHSVSLAVLWRPGGRAEPSQPPGYPPRESSHSSVTSSTAPERVTIADSDLSSSTPNKGGNKPKVRRVQSAGLLADSVLKRDSERLKDLYTLGKKLGQGQFGTTYQCVEKATGKVLACKSIAKRKLVSEEDVEDVRREIQIMHHLAGHPSVVSIVGAYEDAVAVHLVMELCAGGELFDRIVQRGHYSEKAAAQLARVIIGVVEACHSLGVMHRDLKPENFLFVNHKEDSPLKTIDFGLSIFFKPGENYSDVVGSPYYVAPEVLMKHYGREVDVWSAGVIIYILLSGVPPFWDESEQGIFEKVLKGDLDFSSDPWPAISDSAKDLVRKMLNRDPRKRLTAHEALCHPWVCVDGVAPDKPLDSAVLTRLKQFSAMNKLKKMALRVIAENLSEDEIARLREMFKMLDTDNSGQITLEELKTGLRRVGANLKDSEITTLMEAADIDNSGSIDYGEFIAATMHLNKVEREDNLFAAFSYFDKDSSGYITQDELQKACEEFGIGDAHLEDIIKDIDQDNDGRIDYNEFVTMMRKGNNPLGKKGQGQLSFGLREALKLG

SEQ ID NO: 4352 - DNA, 2044 bp, Oryza sativa
  CDS (192)..(1793)
gacccttgtgcccttatctcctatggttgcttccactgtcaccaaagggggactcgccatctaccttgttcctcagttcatgcgaatttcatgcggtcctgggctgtgactgggagtagattgagggttgatctcgtttgcggagtaacaaatttgcaagcctacaactgctagggagaatttgactaaaaatggggtcgtgttgcagcagagctacgtctccagattctggtcgaggaggagcaaacggttatggctattctcaccagacaaaacctgctcagacaactcctagctataaccatcctcagccgccgccgccagctgaggtgaggtacacaccatcagcaatgaaccctccggtagtcccacctgtggttgccccaccgaagcccaccccagacacaattcttggaaagccgtatgacgatgtgcgctcggtttactcccttggaaaggaactcggaaggggacagtttggggtgacatacctgtgcacggagatcgctagtggtaagcagtatgcttgcaaatccatctctaagcgcaagcttgtgagcaaggccgacaaggaggacattcgccgggagattcagatcatgcagcacctatatggacaacaaaacattgtcgagttccggggagcatatgaggacaagagcaatgtccatgttgtcatggagctctgcgctggtggggagctgtttgatcggatcattgccaaggggcactactcagagcgtgcggctgctaccatctgcagggcagtggtgaatgttgtcaacatttgccattttatgggagtgatgcatcgtgatttaaaaccggagaacttcttacttgcaaccaaagaagagaatgcaatgctcaaagccactgattttggtctctcagttttcattgaagaaggaaaaatgtatagagacattgttggaagtgcttattatgttgctcctgaagtccttcggcggaattatggtaaagagattgatgtatggagtgcaggcgttattttgtacattcttctcagtggtgttcctccattttgggctgaaactgaaaagggaatatttgatgctattcttcaaggggagattgactttgagagtcaaccatggccatcaatatccgagagtgctaaagaccttgttagaaagatgttgacacaagatccaaagaaaagaattacttcggcccaagttctccaacatccctggctcagagatggagaagcatctgacaaacctattgacagcgctgttctttctaggatgaagcaattcagagcaatgaacaagctgaaaaagatggctctgaaggttattgcttcaaaccttaatgaggaggagatcaagggcctgaagcaaatgttcacaaacatggacacagacaacagcgggaccatcacatatgatgaactcaaagcaggattagccaaacttggatcaaagctttcagaagctgaagtaaagcagttgatggaagctgctgatgtagacggcaatggatccatcgactatgttgaatttatcactgccacaatgcatagacacaagctcgaaagagatgagcatttgtttaaggcattccagtattttgacaaagacaacagtggcttcatcacaagagatgaactggaatccgctttaatcgagcatgaaatgggcgatacaagtaccataaaggatattatatcagaagtcgacacgaataatgatgggaggattaactacgaggaattttgcgctatgatgagaggaggggggatgcagcagcctatgaggctcaaatagtctgtttccttgtagaaaatgatgtacaattacattagtaaactgttttcgccttcttttttttgttccatggatggtagtcgacggataaaaggtttaccctggacgcagcttttgcattgttgagatgattgtgtatattttcttgccttgcccgtgtatggtgtagtgatttgaatgtcctcccttttgtaagttgtttctgcaagtacacacaataaaagagcatttttgcacctcaattcttctgc

SEQ ID NO: 4353 - protein, 533 aa, Oryza sativa
MGSCCSRATSPDSGRGGANGYGYSHQTKPAQTTPSYNHPQPPPPAEVRYTPSAMNPPVVPPVVAPPKPTPDTILGKPYDDVRSVYSLGKELGRGQFGVTYLCTEIASGKQYACKSISKRKLVSKADKEDIRREIQIMQHLYGQQNIVEFRGAYEDKSNVHVVMELCAGGELFDRIIAKGHYSERAAATICRAVVNVVNICHFMGVMHRDLKPENFLLATKEENAMLKATDFGLSVFIEEGKMYRDIVGSAYYVAPEVLRRNYGKEIDVWSAGVILYILLSGVPPFWAETEKGIFDAILQGEIDFESQPWPSISESAKDLVRKMLTQDPKKRITSAQVLQHPWLRDGEASDKPIDSAVLSRMKQFRAMNKLKKMALKVIASNLNEEEIKGLKQMFTNMDTDNSGTITYDELKAGLAKLGSKLSEAEVKQLMEAADVDGNGSIDYVEFITATMHRHKLERDEHLFKAFQYFDKDNSGFITRDELESALIEHEMGDTSTIKDIISEVDTNNDGRINYEEFCAMMRGGGMQQPMRLK

SEQ ID NO: 4354 - DNA, 2235 bp, Sorghum bicolor
  CDS (216)..(1883)
gcacgaggcctagtggtcgtccccgttaaatccctgctcgcccagtcacgagcacccgccccgccacgctcctcccgcccgcccccgacccaacccagatcagagattccgtttgcggcgttggcgtttgcgctggcgtttccgagccgcggccgtgaccgaccgtccggagctagcttcatgcgccagggccggcggcttcaccccgtcgtttgatgggcaacgcatgcggcggctcccttagatccaagtacctgcacagcttcaagcacgccgcgtcgcagcgccacgactccgagtacagcgccaccagcaccgtcgacgactcgcccaggaagcagcccaccacgccgcccgccaccacggacgcccacgcgcagccgccgccggcgtccgccgccgccgcagccatgaggcgcggcggggcgggcgcgacgcccgacctcgggtccgtgctcggccaccccacccccaacctccgcgacctctacgcgctcggcaggaagctcgggcaggggcagttcggcaccacctacctctgcaccgagctcgccacgggggtcgactacgcctgcaagtccatctccaagcgcaagctcatcaccaaggaggacatcgacgacgtgcgccgagagatccagatcatgcaccacctctcgggccacaagaacgtcgtcgctatcaagggcgcgtacgaggaccaggtctacgtccacatcgtcatggagctctgcgccggaggcgagctcttcgaccggatgcacgagggcgggcactacagcgagcgcaaggccgccgagctcaccaggatcatcgtcggggtcgtcgaggcctgccactcgctcggggtcatgcaccgggaccccaagcccgagaacttcctgctcgccaacaaggacgacgacctctcgctcaaggccatcgatttcggactctctgtcttcttcaagcctggtcaagttttcaccgatgttgttggtagcccatattatgtggctccagaagttttgttgaaaagttatggaccagcagctgatgtatggacagccggtgtcattctttacattctactaagtggtgtgcctccattttgggcagaaacacaacaaggaatatttgatgctgtattgaaaggtgtcattgattttgattctgatccgtggcctgtcatatctgatagtgcaaaagatcttataagacgaatgctgaatcctcgtgctgccgagcgcttaacagcacacgaagttctatgccatccatggattcgtgatcatggagtagctcctgaccgtccactggatccagctgtcttatctcgcattaagcaattctctgcaatgaataagttgaagaaaatggctttacgagtaatagctgagagcctatcagaagaggaaattgcggggttgaaggaaatgttccagaccatggacactgataacagtggcgcaattacttatgatgagctaaaagaaggattgagaaaatatggctccacactgaaggacactgagattcgtgatcttatggacgcagctgatattgacaacagtggaacaattgactacatagaattcattgctgcaactttgcatctcaataagctggaacgtgaggaacatctcgtagcagccttttcatatttcgacaaagatggtagtggctatatcacagtggatgaactacaggaagcttgcaaagagcataacatgccagatgcttttcttgatgatgtcatcaacgaagcagaccaggacaatgatggccgcattgactatggagagtttgttgccatgatgaccaagggcaacatgggagtgggtcgaagaacaatgagaaacagcctgaatatcagcatgagggacgcacctggtgctttctgagacttaacacgatgtacagcttgtggcttagctacttcctctgtcttgctgccctacgaaaccgtctgcgatttttcaagatgttgtcaagtgtctgtgtggatgtgtttttctggggattctgattgaactcttgtgattgattccatgaaatgcataacaagatgtccatgtcacgcatgaagccgtaaaatgatgctgctgccccttgactctcagaaacacttatgttcagtgaactagcttgccatgtgtgtctccggatgacatccattcttggatgcacgctgtatctcaatgcaacgcgttgctccgtttgtatgaacctgtacttaatgcacgtgttttcccg

SEQ ID NO: 4355 - protein, 555 aa, Sorghum bicolor
MGNACGGSLRSKYLHSFKHAASQRHDSEYSATSTVDDSPRKQPTTPPATTDAHAQPPPASAAAAAMRRGGAGATPDLGSVLGHPTPNLRDLYALGRKLGQGQFGTTYLCTELATGVDYACKSISKRKLITKEDIDDVRREIQIMHHLSGHKNVVAIKGAYEDQVYVHIVMELCAGGELFDRMHEGGHYSERKAAELTRIIVGVVEACHSLGVMHRDPKPENFLLANKDDDLSLKAIDFGLSVFFKPGQVFTDVVGSPYYVAPEVLLKSYGPAADVWTAGVILYILLSGVPPFWAETQQGIFDAVLKGVIDFDSDPWPVISDSAKDLIRRMLNPRAAERLTAHEVLCHPWIRDHGVAPDRPLDPAVLSRIKQFSAMNKLKKMALRVIAESLSEEEIAGLKEMFQTMDTDNSGAITYDELKEGLRKYGSTLKDTEIRDLMDAADIDNSGTIDYIEFIAATLHLNKLEREEHLVAAFSYFDKDGSGYITVDELQEACKEHNMPDAFLDDVINEADQDNDGRIDYGEFVAMMTKGNMGVGRRTMRNSLNISMRDAPGAF

SEQ ID NO: 4356 - DNA, 2230 bp, Physcomitrella patens
  CDS (327)..(1976)
atcccgggcgaactgcgatctgagattccaacttggaagggcctcgcgtaagaccggatctcgtttcttacgcttttgcgcctcgcgatatttgtacattgtttcctctggttttattcgattccgcctctgaaaatgtgaacgggctgcaagcttggttttggagcaacgttggagcattgaagggttgcgctcgtccctgcccattcctcgcttctgctctggcctatgtcatgacgacgtgaaggagaggatttgagggttttgtaagtgatataatcctccccgaggagatttctgtgagttgattaacttggatcagcgacatggggaacactagttcgaggggatcgaggaagtccactcggcaggtgaatcagggagtcgggtctcaagacacccgagagaagaatgatagcgtcaatccaaagacgagacagggtggtagcgttggcgcaaacaactatggcggaaagccaagcagtggtgctcaggccggagaacgatccacctctgcgcccgctgctctgccgaggccgaagccagcatcgaggtcagtatccggtgttttgggtaagccgctgtcagatattcgtcaatcttacatcctgggacgggagcttggccgagggcagttcggagtgacttacttgtgtactgacaagatgacgaatgaggcgtacgcgtgcaagagcatcgccaaacggaaactgaccagtaaggaggatatcgaggatgttaagcgggaggttcagattatgcatcacctgtcggggacacccaatatcgtggtgttaaaggatgtgttcgaggacaagcattccgtgcatcttgtgatggagctctgtgcaggtggcgagctcttcgatcgcatcattgccaaggggcattacagtgagcgcgccgctgccgatatgtgcagagtcatcgtcaatgtggtgcacagatgccactcattaggggtcttccatcgggatctcaagccagagaattttctgttggccagcaaggctgaggatgcgcctctgaaggccacagacttcggtctgtcaactttctttaagccaggagatgtgttccaggatattgttggaagtgcgtattacgtggcccctgaagttttgaagagaagttatggtcctgaagctgatgtttggagtgcaggcgtgattgtgtacattctgctgtgtggtgtaccccccttctgggctgaaactgagcagggtatctttgacgctgtgctcaaagggcacatagacttcgagaacgatccatggccgaaaatctccaacggggctaaggatttggtgaggaaaatgctaaaccctaacgtgaagatacgtctgacggcacagcaggtgttgaaccatccatggatgaaggaagatggtgatgctccagacgtgccactcgacaatgcggtgttgaccagactgaaaaatttctcagccgccaacaagatgaaaaagctggcgctgaaggtgattgcagagagtctgtcggaggaagagatcgtggggttgagggagatgttcaaatccatagatacagacaacagcggcacggtgacgttcgaggagcttaaggaagggttgctgaagcagggctcaaaacttaatgaatcggacatcaggaaactaatggaagctgcagatgtcgatggaaacggcaagatcgacttcaacgagttcatatcggcaacaatgcacatgaacaagacggagaaagaggatcacctttgggcagcattcatgcatttcgacacggacaatagcgggtatatcaccatcgacgagcttcaggaagcaatggagaagaatggaatgggagatcctgagaccatccaagagatcatcagcgaggtggacacagacaacgacggaagaatagactacgacgagttcgtagccatgatgcgcaagggcaatcctggcgctgaaaacggaggaacggtgaacaagcccagacacaggtagtagctcctggttgccaatttgacgacgggtttggcaaggcaacagtagttgttgttagctttcagattcaggttcggtattgttcatgccctcctttgtctcgaacaatggactctaggcctttccaatggaaaagctattccaacagggtttgcataacgtgtagtagaatgaaagcattgcctggggggtgtacagtgcctgtgatcttgtggagttctcgtaggatggcttcggttggatctcgttaacgc

SEQ ID NO: 4357 - protein, 549 aa, Physcomitrella patens
MGNTSSRGSRKSTRQVNQGVGSQDTREKNDSVNPKTRQGGSVGANNYGGKPSSGAQAGERSTSAPAALPRPKPASRSVSGVLGKPLSDIRQSYILGRELGRGQFGVTYLCTDKMTNEAYACKSIAKRKLTSKEDIEDVKREVQIMHHLSGTPNIVVLKDVFEDKHSVHLVMELCAGGELFDRIIAKGHYSERAAADMCRVIVNVVHRCHSLGVFHRDLKPENFLLASKAEDAPLKATDFGLSTFFKPGDVFQDIVGSAYYVAPEVLKRSYGPEADVWSAGVIVYILLCGVPPFWAETEQGIFDAVLKGHIDFENDPWPKISNGAKDLVRKMLNPNVKIRLTAQQVLNHPWMKEDGDAPDVPLDNAVLTRLKNFSAANKMKKLALKVIAESLSEEEIVGLREMFKSIDTDNSGTVTFEELKEGLLKQGSKLNESDIRKLMEAADVDGNGKIDFNEFISATMHMNKTEKEDHLWAAFMHFDTDNSGYITIDELQEAMEKNGMGDPETIQEIISEVDTDNDGRIDYDEFVAMMRKGNPGAENGGTVNKPRHR

SEQ ID NO: 4358 - DNA, 2466 bp, Oryza sativa
  CDS (560)..(2269)
tttttcctcaaatcagaatcttatatacttttgtggaaaaaactgtcctttacaactgataatgcaagcatgaattagttaacctgccatgcttcacaatttgatgcatgcatgcctgcaatgtttatcatcaagaccctagcatctgaaatgtcagttgaacaacctggagataatgtcatctgctagctcaatctgcagcattgcagtgtcctcacaaagagatcctaggtttcaacctaattcgagtctctgtcatctgtttgcgtggtagtaagcatttagcctccaaggaagatccagaccaagaaattcatgtttcagagcattaatccttactccctagtaatccatctgtgccctcggatttcatacccacctaatccttgatcactgctctctcctccactctctgcgctcccgtacccagatttcctgcgatgcttccgtgatttcttctgaccactattatcacttaagctcccattcaggagaggatcgtcaataccgctgattaccctgctcaaggattgttgtcaggatatacatttttgtgggaatggggaattcttgccaaaatggaacctatgggaacaattaccagaacagcaaccggtttcagaatgaccgttttgcttctcggtacgttgatgggaatgatactgaggattgctactcgggctcgtcaagggccagcttagcgggtgctctgcggcaagggctgaacctaaagtcccctgtccttggatacaagactccaaatgtaagggagctctatactcttggccgggagcttggacagggacagttcgggaaaacatacctctgcactgagattagcacagggtgtcaatatgcatgcaagactatcttaaagagtaatctccgatgtgtgtcagatatcgaggacgtgcgccgtgaaatccagataatgcaccatctttcgggccagaagaatatagtgacaatcaaggacacatatgaggatgagcaggccgtgcacatcgtcatggagctctgcgcaggtggtgagctcttcagcaagattcagaagcgaggtcattacagtgaacggaaggctgcagagcttataaaaattatagttggcatcatagaaacatgccattcacatggagtgttgcaccgggatctcaagccagaaaatttcctcttactggacgcagacgatgaattctcggttaaagcaattgactttggtctatctgtgttcttcagaccaggtcaggttttcagagaggtagtgggaagtccatattatattgctccagaggtattggagaagcgttatggaccagaggctgatatatggactgctggagtgattctctatgtattgctgactggtgttcctccattttgggcagatacacaaagcgggatatatgaaaaagtactggatggacgtattgattttaaatcaaaccggtggcccaggatatctgacagtgcaaaggatcttataaaaaagatgctctgcccttatccattagagcgtttgaaagcccatgaagtgctaaagcatccatggatatgtgataatggagtggctactaatcgagctctggatccaagtgtacttcctcgtctcaagcaattttctgcaatgaataggttaaagaaattgtctctccagattattgctgagcgtctttcagaagaggagattgttgggttaagagaaatgttcaaggctatggacaccaaaaacagaagtgtggttacatttggtgagcttaagggactgaaaagatacagctcagtgttcaaggatactgaaattaacgacttaatggaagcagctgatgacaccacctccaccatcaactgggaagagtttattgctgcagcagtgtctcttaataaaatagaacgtgagaaacacttgatggcagcctttacatactttgacaaagatggaagtggttttatcacagttgacaagcttcaaaaggcttgcatggaacgtaacatggaagatactttccttgaagagatgattctggaggttgatcaaaacaatgatggtcaaatcgattatgctgaatttgtcacaatgatgcaaagcaacaactttggacttgggtggcaaacggtggaaagcagcctgaatgtagccctgagggaggcaccccaagtatctgaactcctgtcgcctggcacccccaagaattcagtttgttctcctgagcctttcatctgtttatcacaacacatagttgtggatttgagagaagagagccaagactagatggtttatcagtaatcaccctatagcagtggtggaagaagactctcttagtacctaatagcatataaatgtgtggtctaaagacatcgtatatgtatgaacctcataagttcgttcgttcgttcgtttggttggttggtttgctaccctgctatctaataataatatcaataatacccgaagaacccctcttggtt

SEQ ID NO: 4359 - protein, 569 aa, Oryza sativa
MGNSCQNGTYGNNYQNSNRFQNDRFASRYVDGNDTEDCYSGSSRASLAGALRQGLNLKSPVLGYKTPNVRELYTLGRELGQGQFGKTYLCTEISTGCQYACKTILKSNLRCVSDIEDVRREIQIMHHLSGQKNIVTIKDTYEDEQAVHIVMELCAGGELFSKIQKRGHYSERKAAELIKIIVGIIETCHSHGVLHRDLKPENFLLLDADDEFSVKAIDFGLSVFFRPGQVFREVVGSPYYIAPEVLEKRYGPEADIWTAGVILYVLLTGVPPFWADTQSGIYEKVLDGRIDFKSNRWPRISDSAKDLIKKMLCPYPLERLKAHEVLKHPWICDNGVATNRALDPSVLPRLKQFSAMNRLKKLSLQIIAERLSEEEIVGLREMFKAMDTKNRSVVTFGELKGLKRYSSVFKDTEINDLMEAADDTTSTINWEEFIAAAVSLNKIEREKHLMAAFTYFDKDGSGFITVDKLQKACMERNMEDTFLEEMILEVDQNNDGQIDYAEFVTMMQSNNFGLGWQTVESSLNVALREAPQVSELLSPGTPKNSVCSPEPFICLSQHIVVDLREESQD

SEQ ID NO: 4360 - DNA, 2142 bp, Oryza sativa (japonica cultivar-group)
  CDS (1)..(2142)
atgtctagttttgtaaatggtaagggagattttacccttagccgtcgctggcggcagcgtccaaccggaccacaccacaatacacttgtccgtggcacacggattcgctgtccaagaaaatatccacgccgagtcgctagtcgtcaccacccgccgcggcccgcgagcagaggaacagcgaatctccatcgacaaccgcgaccgcacccacccaccaactccccactgactccgcaaccccaccaccaactccccactgactccacgaccccaccataccctggaggccgggaccacccacgcgtttccaccccacccccacccccaagccagatccgaacgccacacgcgatcccccgccggcgtcgccgtcgcactccgtccgcacccgatccccactgtcacaactcgcaagtcgcaacgcgcgcctcgtcacgcgataaccgcagcggcgggtcgcggtcgcccctcggtcgtctccgcggagcgcgtctactactcgtgcgcttctgcttcctgttcaaacccaacgctccaccacatcgcctgcgttccccaccccgactgacccagcctccagtagccatgggcaaccgcacgtcgcgccaccaccgcgccgctcccgagcagccgccgccccagcccaagccgaagcctcagccgcagcagcagcagcagcagtggccgaggccgcagcagccgaccccgccgccggcggcggcgccggacgcggcgatggggagggtgctggggcggccgatggaggacgtccgcgcgacctacaccttcgggcgcgagctcgggcggggccagttcggggtcacctacctcgtcacccacaaggccacggggaagcgcttcgcctgcaagtccatcgccacgcggaagctcgcccaccgcgacgacatcgaggacgtgcgccgggaggtgcagatcatgcaccacctcacgggccaccgcaacatcgtcgagctccggggcgcctacgaggaccgccactcggtcaacctcatcatggagctctgcgagggcggggagctcttcgaccgcatcatcgccagggggcactactccgagcgcgccgccgccgcgctctgccgcgagatcgtcgccgtcgtgcacagctgccactccatgggggtcttccaccgggatctcaagccggagaactttttgttcctcagtaaaagcgaggactcgccgctcaaggccactgacttcggtctttccgttttcttcaagcctggggagcattttaaggaccttgttggaagtgcgtattatgttgcacctgaggtgctgaaacgaaactatggagcagaggctgacatatggagtgctggcgttattctttacatccttctttctggtgttccacctttttgggcagagagtgaagatggtatatttgatgccgtattacgtggtcacattgatttctcgtctgaaccttggccttcgatatccaatggtgcaaaagatttggttaagaagatgttgcggcaagacccaaaagagcgccttacttctgctgaaattttgaaccacccatggattagagaggatggagaagccccagacaagccacttgacattacagttatcagcaggatgaagcagttcagggcaatgaacaagcttaagaaagttgcattgaaggttgttgcagagaacttgtcagatgaagagattacaggcttaaaagaaatgttcagatccttggatactgataacagtgggacaataactcttgaggagctaagatctggtttaccaaaacttggcaccaaaatttctgaatcagaaattagacagctgatggaggcggctgatgttgatggaaatggaaccattgactatgctgagttcatatcagcgacaatgcacatgaacagattggagaaggaagaccacatacttaaagcatttgagtattttgataaggaccacagcggatacataacagtagatgagttggaagaagctctgaagaagtatgatatgggggacgataaaacgattaaggaaatcatcgctgaagtagatactgatcatgatggaagaattaactaccaggagtttgtcgccatgatgaggaacaacaaccctgagattgctcccaaccggcggcgcatgttctaa

SEQ ID NO: 4361 - protein, 713 aa, Oryza sativa (japonica cultivar-group)
MSSFVNGKGDFTLSRRWRQRPTGPHHNTLVRGTRIRCPRKYPRRVASRHHPPRPASRGTANLHRQPRPHPPTNSPLTPQPHHQLPTDSTTPPYPGGRDHPRVSTPPPPPSQIRTPHAIPRRRRRRTPSAPDPHCHNSQVATRASSRDNRSGGSRSPLGRLRGARLLLVRFCFLFKPNAPPHRLRSPPRLTQPPVAMGNRTSRHHRAAPEQPPPQPKPKPQPQQQQQQWPRPQQPTPPPAAAPDAAMGRVLGRPMEDVRATYTFGRELGRGQFGVTYLVTHKATGKRFACKSIATRKLAHRDDIEDVRREVQIMHHLTGHRNIVELRGAYEDRHSVNLIMELCEGGELFDRIIARGHYSERAAAALCREIVAVVHSCHSMGVFHRDLKPENFLFLSKSEDSPLKATDFGLSVFFKPGEHFKDLVGSAYYVAPEVLKRNYGAEADIWSAGVILYILLSGVPPFWAESEDGIFDAVLRGHIDFSSEPWPSISNGAKDLVKKMLRQDPKERLTSAEILNHPWIREDGEAPDKPLDITVISRMKQFRAMNKLKKVALKVVAENLSDEEITGLKEMFRSLDTDNSGTITLEELRSGLPKLGTKISESEIRQLMEAADVDGNGTIDYAEFISATMHMNRLEKEDHILKAFEYFDKDHSGYITVDELEEALKKYDMGDDKTIKEIIAEVDTDHDGRINYQEFVAMMRNNNPEIAPNRRRMF

SEQ ID NO: 4362 - DNA, 1794 bp, Oryza sativa (japonica cultivar-group)
  CDS (1)..(1794)
atgggtctctgccatggcaagtcggcggcggtgctggagccaacggtggaggaggaggaggagggggcgacgcgcgtagccgaggccgcggcggcgccggcgaagccagcgtcgcctgcgccttcggcggcggcggcggcggcgaagcccgggacgccgaagcagcacaagttcccgttctacctgccgagcccgctcccggcgtcgagctacaagggctcgccggcgaactcgagcgtggcgtcgacgcccgcgcgcggcgggttcaagcggccgttcccgccgccgtcgccggcgaagcacatccgcgcgctcctggcgcggcgccacggctcggtgaagccgaacgaggcgtccatcccggagtccggcgagcccggcgtggcgctggacaagggcttcggcttctccaggcacttcgccgccaagtacgagctcggccgcgaggttggccgcggccacttcggctacacctgcgccgccacctgcaagaagggcgagctcaagggcgacgacgtcgccgtcaaggtcatccccaaggccaagatgactactgctattgccattgaagatgtcaggagagaagtcagaatattgagttctttggcagggcacagcaacttagtgcagttttatgatgcttatgaggatgaagaaaatgtatatatagttatggagttatgcaaaggaggtgaactgctggacaggattttggctagaggtggaaaatattctgaggaagatgcaaaggttgttatgcgccaaatcctaagtgttgcttcattttgtcatcttcagggtgttgttcatcgggatctgaaaccagagaatttccttttctcgtcaaaggatgagaactctgccatgaaggtcatagacttcggtttgtctgactttgtaaagccagatgagaggcttaatgacattgtcggaagtgcatattatgttgctcctgaagtgctccatcgatcttatggcactgaggcagatatgtggagcattggagtaatagtgtatattttgctttgtggcagccgtcctttctgggcacgtactgagtcaggaatattccgagctgtgctgaaagcagaccctagttttgaggaagccccatggccaaccctctctgctgaagcaaaagactttgtaaggaggctgctcaataaagattaccgcaagaggatgactgctgcacaagccctctgtcatccatggattcgtggtactgaagaagtgaagcttcctttggacatgataatttataggcttatgagggcttacataagttcatcttctttacggagagctgcattgagggcccttgccaagacattgacaacagatcaaatctattacctaagagaacagtttgaattgataggcccaaacaagagcgatcttattactttgcaaaatttgaagacggccttgatgaagaactccacaaatgcaatgaaggattctagggtggttgactttgttaacacaatatccaatattcagtacagaaagttggattttgaggagttttctgctgctgccatcagtgtttaccagatggaaggtttggaaacctgggaacaacatgcccggcaagcgtacgagttctttgataaggagggtaaccgaccaattgtgatcgacgagctcgcatcggaacttggattgggtccttcggttcccctacatgttgttctccaagattggatcagacatcctgatggaaaactcagcttccttgggttcatgaaactattgcatggagtttcttcgcgtaccatcccaaaaacctga

SEQ ID NO: 4363 - protein, 597 aa, Oryza sativa (japonica cultivar-group)
MGLCHGKSAAVLEPTVEEEEEGATRVAEAAAAPAKPASPAPSAAAAAAKPGTPKQHKFPFYLPSPLPASSYKGSPANSSVASTPARGGFKRPFPPPSPAKHIRALLARRHGSVKPNEASIPESGEPGVALDKGFGFSRHFAAKYELGREVGRGHFGYTCAATCKKGELKGDDVAVKVIPKAKMTTAIAIEDVRREVRILSSLAGHSNLVQFYDAYEDEENVYIVMELCKGGELLDRILARGGKYSEEDAKVVMRQILSVASFCHLQGVVHRDLKPENFLFSSKDENSAMKVIDFGLSDFVKPDERLNDIVGSAYYVAPEVLHRSYGTEADMWSIGVIVYILLCGSRPFWARTESGIFRAVLKADPSFEEAPWPTLSAEAKDFVRRLLNKDYRKRMTAAQALCHPWIRGTEEVKLPLDMIIYRLMRAYISSSSLRRAALRALAKTLTTDQIYYLREQFELIGPNKSDLITLQNLKTALMKNSTNAMKDSRVVDFVNTISNIQYRKLDFEEFSAAAISVYQMEGLETWEQHARQAYEFFDKEGNRPIVIDELASELGLGPSVPLHVVLQDWIRHPDGKLSFLGFMKLLHGVSSRTIPKT

SEQ ID NO: 4364 - DNA, 1551 bp, Oryza sativa (japonica cultivar-group)
  CDS (1)..(1551)
atgggcaacgcatgcggcggttcccttagatccaagtacctgagcttcaagcagaccgcgtcgcagcgccacgacaccgacgacaacaacaacgccgccgcggccgactcgccgaagaagccctcccgccctccagcagccgccaagacggacctctacgccatgggcaggaagctcgggcaggggcagttcggcaccacctacctctgcaccgagctgtccactggggtggactacgcctgcaagtccatttccaagcgcaagctcatcaccaaggaggacatcgaagacgttcgccgcgagatccagatcatgcaccatctctcgggccacaagaacgtcgtcgccatcaagggcgcctacgaggaccagctatacgtgcacatcgtcatggagctctgcgccggcggcgagctcttcgatcgcatcatacagcgcggccactacagcgagcggaaggccgccgagctcacgcggatcatcgttggggtcgtcgaggcctgccactcgctcggggtcatgcaccgggacctcaagccagaaaacttcctgcttgccaacaaggacgatgacctctcgctcaaggccatagattttggtctctcagtcttcttcaagcccggtcaaacttttaccgatgttgtcggaagcccatattacgtagctccagaagtgttgttgaaacactatggaccagaagctgatgtatggactgcaggtgtcattctctacattttactaagtggtgtacccccattctgggcagagacacaacaaggaatatttgatgctgtactaaaaggtttcattgattttgattctgatccttggcctgtgatctctgagagcgcaaaggatcttataacaaaaatgctcaatcctcgcccaaaggaacgcttaacagcacatgaagttctatgccatccatggattcgtgatcacggagttgctccagatcggcctcttgatccagctgtcctatctcgcatcaagcagttctctgcaatgaataagttgaagaagatggctttgcgggtaatagctgagagtctctcagaggaggaaatcgctgggttgaaggaaatgtttcagactatggatgctgataacagtggtgcgatcacatatgatgagcttaaagaaggcttgagaaaatatggctcaacacttaaggacaccgagattcgtgatcttatggatgcagcagatatagacaacagcggaacaattgattatatcgaattcattgctgcaacattgcatctcaataaactggagcgagaggaacatcttgtggcagctttttcatattttgacaaagatggaagtggttacatcacagtggatgaactgcagcaagcttgcaaagagcataacatgcccgatgcttttcttgatgatgtcatcaatgaagctgatcaggacaatgatgggcgcattgactatggagaatttgttgccatgatgaccaagggcaatatgggagtcggacgaagaacaatgagaaacagcttgaatatcagcatgagggacgcacctggtgcactctag

SEQ ID NO: 4365 - protein, 516 aa, Oryza sativa (japonica cultivar-group)
MGNACGGSLRSKYLSFKQTASQRHDTDDNNNAAAADSPKKPSRPPAAAKTDLYAMGRKLGQGQFGTTYLCTELSTGVDYACKSISKRKLITKEDIEDVRREIQIMHHLSGHKNVVAIKGAYEDQLYVHIVMELCAGGELFDRIIQRGHYSERKAAELTRIIVGVVEACHSLGVMHRDLKPENFLLANKDDDLSLKAIDFGLSVFFKPGQTFTDVVGSPYYVAPEVLLKHYGPEADVWTAGVILYILLSGVPPFWAETQQGIFDAVLKGFIDFDSDPWPVISESAKDLITKMLNPRPKERLTAHEVLCHPWIRDHGVAPDRPLDPAVLSRIKQFSAMNKLKKMALRVIAESLSEEEIAGLKEMFQTMDADNSGAITYDELKEGLRKYGSTLKDTEIRDLMDAADIDNSGTIDYIEFIAATLHLNKLEREEHLVAAFSYFDKDGSGYITVDELQQACKEHNMPDAFLDDVINEADQDNDGRIDYGEFVAMMTKGNMGVGRRTMRNSLNISMRDAPGAL

SEQ ID NO: 4366 - DNA, 1539 bp, Oryza sativa (japonica cultivar-group)
  CDS (1)..(1539)
atgggactctgctcctcctccagcgcccgccgggacgccggcacacccggcggcggtaacggcgcggggaacaaggataacgcggggaggaaggggatcgtggcgtgcgggaagcggacggacttcgggtacgacaaggacttcgaggcgcggtacgcgctcgggaagctgctgggccacggccagttcggctacaccttcgccgccgtcgaccgccgctccagcgagcgcgtcgccgtcaagcgcatcgacaagaacaagatggttcttcctgttgccgttgaagacgtaaagcgagaagttaaaatactgaaggccttacaaggccatgaaaatgttgtacatttttacaatgcatttgaagatgataattatgtgtatattgttatggaattatgtgaaggcggggagttacttgaccggatactagccaagaaagatagccgttatagcgagaaagatgctgcagtagttgtgcggcaaatgctcaaggttgctgctgagtgccatttgcatggtttggttcatcgggacatgaagcctgagaacttcctcttcaaatcaaccaaagaggactcatccctcaaggctacagattttggtctttcagattttataagaccagggaaacactttcgtgacattgttggaagtgcctactatgtagcaccagaagtgcttaagcgtaagtcaggcccagaatctgacgtttggagtattggcgtaataacctatattctactgtgtggaagacgacctttctgggacaaaactgaagatggaatatttaaagaggtgttgaaaaacaagccagattttcgtcgcaagccctggccaaatatcactccttgtgctaaagactttgtacaaaagttgcttgttaaggatccccgtgcaagattaactgctgctcaggcattatcacatgaatgggtgagagaaggaggacaggcatctgatatacctctagatatatctgtattacataatatgcgtcagtttgtaaaatacagtcggtttaagcaatttgctttacgggcgttagcttctacactaaatgcagaagagttgtctgatcttcgtgaccagttcaatgccattgatgttgacaagaatggaacaattagtctggaagaactgaagcaggctcttgcaaaggatgttccatggagattaaagggtccacgtgttttagagattgttgaggcaattgacagtaacacagatggattagttgatttcgaagagtttgttgctgcaacattacatgtgcatcagctagtggaacatgatactgagaagtggaaatcattgtctcaagctgcatttgataaatttgatgttgacggagatggctatatcacatctgatgaactgagaatgcaaacaggactgaaaggttctattgatcccctcctggaggaggctgacattgacagagatggaaaaataagcctagatgaatttcgcaggctcctgaaaactgcaagcatgagttcacgcaatgtacaaactccgaggagtgttcacagatcgtag

SEQ ID NO: 4367 - protein, 512 aa, Oryza sativa (japonica cultivar-group)
MGLCSSSSARRDAGTPGGGNGAGNKDNAGRKGIVACGKRTDFGYDKDFEARYALGKLLGHGQFGYTFAAVDRRSSERVAVKRIDKNKMVLPVAVEDVKREVKILKALQGHENVVHFYNAFEDDNYVYIVMELCEGGELLDRILAKKDSRYSEKDAAVVVRQMLKVAAECHLHGLVHRDMKPENFLFKSTKEDSSLKATDFGLSDFIRPGKHFRDIVGSAYYVAPEVLKRKSGPESDVWSIGVITYILLCGRRPFWDKTEDGIFKEVLKNKPDFRRKPWPNITPCAKDFVQKLLVKDPRARLTAAQALSHEWVREGGQASDIPLDISVLHNMRQFVKYSRFKQFALRALASTLNAEELSDLRDQFNAIDVDKNGTISLEELKQALAKDVPWRLKGPRVLEIVEAIDSNTDGLVDFEEFVAATLHVHQLVEHDTEKWKSLSQAAFDKFDVDGDGYITSDELRMQTGLKGSIDPLLEEADIDRDGKISLDEFRRLLKTASMSSRNVQTPRSVHRS

SEQ ID NO: 4368 - DNA, 1653 bp, Oryza sativa (japonica cultivar-group)
  CDS (1)..(1653)
atgggcaactgctgcgtgacgccggagggcagcggccgcgggaggaagaaacagcagcaggagcagaagcagaagcagaaggagccgaagcagcagcagcagcagcagaagaaggggaagaagccgaacccgttctcgatcgagtacaaccggtcgtcggcgccgtcggggcacaggctggtggtgctgcgcgagccgacggggcgggacatcgccgcgcggtacgagctgggcggggagctcgggcgcggcgagttcggggtcacctacctctgcacggagcgggagacgggggacgcctacgcgtgcaagtccatctccaagaagaagctccgcaccgccgtggacatcgaggacgtgcgccgggaggtggacatcatgcgccacctccccaagcaccccaacatcgtcacgctccgggacacctacgaggacgacaatgccgtccacctcgtcatggagctctgcgagggcggggagctcttcgaccggatcgtcgcccggggccactacaccgagcgcgccgccgcgctggtcacccgcaccatcgtcgaggtcgtgcagatgtgccataagcatggagtgatgcaccgggacctcaaaccagagaatttcttgtttgcaaacaagaaggaaactgcagctctgaaggcaattgattttggcctgtctgtttttttcaccccaggtgaacggttcactgagattgtcggaagcccttattacatggctcctgaggtgctaaagagaaattatggccctgaggttgatgtttggagtgcaggagtgatcctttacattcttctttgtggagtccctccattttgggcagaaactgaacagggtgttgctcaggcaattatccgttctgtcattgacttcaagagagacccatggccaagggtctcagataatgcaaaggatcttgtcaagggaatgctcaatccagaccctaggcggcggctaaatgctcaacaagtgcttgatcatccttggttacagaacattaagaaggctccaaatgtaaatttaggcgaaactgttaaggccagacttcaacaattctctgtgatgaacaagttcaagaagcatgcacttagggtcatagctgagcatctttcagtagaagaggttgctggtataaaggacatgtttgagaagatggatctcaacaaagataatatgattaattttgatgagctgaagcttggcctgcataaacttgggcaccaaatggctgatgcagatgtccaaatactaatggatgctgcggatgtcgatggaaatggatctttagactacggggagtttgttgctctatctgttcacctgagaaagattggcaacgatgagcatctgcacaaggcatttgcatactttgatcggaaccagagtggatatattgaaatcgatgagctccgtgaatcattggctgatgacctgggagcaaatcatgaagaggttatcaatgccatcatccgtgatgtagacactgataaggatggcaagataagctatgatgagtttgcggcaatgatgaaggccggaacagattggaggaaagcctcaagacaatattcaagagaacggttcactagcctcagcctaaaacttcagaaagatggatcattgcagttaacaactacccaatag

SEQ ID NO: 4369 - protein, 550 aa, Oryza sativa (japonica cultivar-group)
MGNCCVTPEGSGRGRKKQQQEQKQKQKEPKQQQQQQKKGKKPNPFSIEYNRSSAPSGHRLVVLREPTGRDIAARYELGGELGRGEFGVTYLCTERETGDAYACKSISKKKLRTAVDIEDVRREVDIMRHLPKHPNIVTLRDTYEDDNAVHLVMELCEGGELFDRIVARGHYTERAAALVTRTIVEVVQMCHKHGVMHRDLKPENFLFANKKETAALKAIDFGLSVFFTPGERFTEIVGSPYYMAPEVLKRNYGPEVDVWSAGVILYILLCGVPPFWAETEQGVAQAIIRSVIDFKRDPWPRVSDNAKDLVKGMLNPDPRRRLNAQQVLDHPWLQNIKKAPNVNLGETVKARLQQFSVMNKFKKHALRVIAEHLSVEEVAGIKDMFEKMDLNKDNMINFDELKLGLHKLGHQMADADVQILMDAADVDGNGSLDYGEFVALSVHLRKIGNDEHLHKAFAYFDRNQSGYIEIDELRESLADDLGANHEEVINAIIRDVDTDKDGKISYDEFAAMMKAGTDWRKASRQYSRERFTSLSLKLQKDGSLQLTTTQ

SEQ ID NO: 4370 - DNA, 1998 bp, Oryza sativa (japonica cultivar-group)
  CDS (1)..(1998)
atggggcagtgttacgcgaggaacgtgccggtggatggggaggggggaggaggggtggtgacgacgacgacgacgacgaccatctcggtgagcgcgtcggcggcgggggaggaggtggaggtggggagagggggaggagggggaggagggaggaggagcgggaggccgtcgccggcggggacgccgaggaggaggggggcgacgccggcgaggtcgtcggtggcggggagcccgtgggcggggagcccgctccccgagggcatcgcaccgtcgcctgcgccgtcggcgaccacgccgaggcggttcttcaggcggccgttcccgccgccgtcgccggcgaagcacatcaaggcgtccctcgcgcgccgcctcgggcagcggtcgccggccacggcccaggcgcagcaggccgcgaagccgcccgccgaggtcccgatcccggagcacgggggcgggggcggcgccgccgccggggaggtggagcgggagctcgacaagagcttcggctatgaccgccacttcgccgccaagtacgagctggggaaggaggtgggtcgcggccacttcggccacacctgcctcgcgcgtgcccgcaagggcgacatgagaggccaactcctcgctgtcaaggtcatctccaaagccaagatgacaacagcaatatcaattgaggatgtgcgtagagaggtgaaaattctgaaggctttatctgggcattcgaatcttgtcaaattttatgatgcatgtgaggatgcccttaatgtctacataatcatggagttatgtgaaggtggggagttattggacagaattttgtccagaggtgggagatacactgaggaagatgctaaagttatcgttgaacaaatattaaatgttgtttctttctgccatcttcaaggcgttgttcaccgtgatttgaagccagagaatttcctattcagcactagagatgaccattcacctatgaagatcatcgactttggactttctgattttatacggccagatgaaagattaaatgatattgttggtagtgcatactatgttgctccagaagtcctacataggtcatatagcacggaagcagacatgtggagtattggtgttatcacttatatcttgctgtgcggtagcagaccattctgggcacgaactgaatcaggcattttccgctcagtgctgagagctgatcctaattttgatgatgcaccgtggtcttcaatatctcctgaagccaaagattttgtcaaaagacttcttaacaaggattacagaaaaagaatgactgctgcccaggcactctctcacccctggttgcgagatgagtgccgaccgatccctttggatatgctagtttttaagttgattaaggcatatcttcgctctacacctttcaagcgagcggcattgaaggctctgtccagagcaataacagaagatgagcttatctacatcagagcacagtacaacttgctagaaccaagtagtacagatggtcgactatgcattgaaaacttcaggatggctcttttacaaaactctacagatgctatgaaggaatccagagcccttgatatcttgaatgcgttggagccacttgcctacagaagaatggactttgaggagttccgggcggcgacaatcagtccttaccaacttgaggctttatcacggtgggaagaaatagctggcactgcgtttgagtactttgagcaggaaggcaaccgtcccatcacaattgaggagctggcacaggtgcctactgtttctccaaagaagcagccgcagatgggggcagaaggccgcaaatgtcgtagtgtgttttacttttgccggacaatggtacggcgccactttattgttctcaggacaattaacaaatgctttcagtatccgaggctttccctcattcccggtaaccttgagatgcttaacacaactgggctcgcggcagatcacaagaaaaataaggagcccatgctgactatctggtaa

SEQ ID NO: 4371 - protein, 665 aa, Oryza sativa (japonica cultivar-group)
MGQCYARNVPVDGEGGGGVVTTTTTTTISVSASAAGEEVEVGRGGGGGGGRRSGRPSPAGTPRRRGATPARSSVAGSPWAGSPLPEGIAPSPAPSATTPRRFFRRPFPPPSPAKHIKASLARRLGQRSPATAQAQQAAKPPAEVPIPEHGGGGGAAAGEVERELDKSFGYDRHFAAKYELGKEVGRGHFGHTCLARARKGDMRGQLLAVKVISKAKMTTAISIEDVRREVKILKALSGHSNLVKFYDACEDALNVYIIMELCEGGELLDRILSRGGRYTEEDAKVIVEQILNVVSFCHLQGVVHRDLKPENFLFSTRDDHSPMKIIDFGLSDFIRPDERLNDIVGSAYYVAPEVLHRSYSTEADMWSIGVITYILLCGSRPFWARTESGIFRSVLRADPNFDDAPWSSISPEAKDFVKRLLNKDYRKRMTAAQALSHPWLRDECRPIPLDMLVFKLIKAYLRSTPFKRAALKALSRAITEDELIYIRAQYNLLEPSSTDGRLCIENFRMALLQNSTDAMKESRALDILNALEPLAYRRMDFEEFRAATISPYQLEALSRWEEIAGTAFEYFEQEGNRPITIEELAQVPTVSPKKQPQMGAEGRKCRSVFYFCRTMVRRHFIVLRTINKCFQYPRLSLIPGNLEMLNTTGLAADHKKNKEPMLTIW

SEQ ID NO: 4372 - DNA, 1467 bp, Arabidopsis thaliana
  CDS (1)..(1467)
atgggtgtctgtttctccgccattagagtcactggtgctagcagcagtagacgaagcagtcagaccaaatccaaggctgctcctactcccatcgataccaaggcctctaccaaacgccgaaccggctccatcccctgcggcaagcgtaccgattttggctactccaaagacttccacgatcactacaccatcggcaagttgctcggccatggtcaattcggctacacctacgtcgccatccacagacccaatggagatcgcgtcgccgtcaaaagactcgataagtctaagatggttcttcctattgctgttgaggatgtcaagcgtgaggttcagattcttattgctctctctggccacgagaatgttgttcagtttcacaatgcctttgaggatgacgattacgtctatattgttatggagttgtgcgaaggaggcgaattgctggataggatattatccaagaaaggtaatcggtactccgagaaagatgcagccgttgtcgttaggcagatgctcaaagttgcaggagaatgtcatctacacggtcttgtacatagagatatgaaaccagagaactttttgttcaaatcagctcaactagattcgcctctaaaggctacggattttggtttatcggattttatcaaaccagggaaaaggttccatgacattgttggtagcgcctattatgtggctcctgaggtattaaagcgcagatcagggcctgaatcagatgtatggagcattggtgtgattacgtatatattactttgtgggaggcggcctttttgggatagaactgaagatggtatatttaaagaggttttaagaaataaacctgacttcagccgtaaaccttgggcaactataagtgacagcgccaaagattttgtgaaaaagttacttgtaaaagacccacgagcacggctaactgctgcacaagcactatcacatgcgtgggttagagaaggcgggaatgctactgatatccctgtcgacatttcagttctgaacaacttaagacaatttgtgagatacagccgtctaaagcaatttgctttaagggcgcttgctagcacacttgacgaggcagagatctctgacctcagagatcaatttgatgcgattgatgtggataaaaatggcgtcattagtcttgaagagatgagacaggcacttgccaaagatcttccttggaaactgaaagactcacgagttgctgagatccttgaagcgattgatagcaacactgatgggttagtggacttcacagagtttgtagcagcagctctacatgttcatcaactagaagaacatgattcagagaaatggcagctaaggtcaagagcagcttttgagaaattcgacctagacaaagacgggtacataacgcctgaggaacttcgaatggcgcagcaaaacaaagagagaaagtggagtgagaatcccattgatgaaatatga

SEQ ID NO: 4373 - protein, 488 aa, Arabidopsis thaliana
MGVCFSAIRVTGASSSRRSSQTKSKAAPTPIDTKASTKRRTGSIPCGKRTDFGYSKDFHDHYTIGKLLGHGQFGYTYVAIHRPNGDRVAVKRLDKSKMVLPIAVEDVKREVQILIALSGHENVVQFHNAFEDDDYVYIVMELCEGGELLDRILSKKGNRYSEKDAAVVVRQMLKVAGECHLHGLVHRDMKPENFLFKSAQLDSPLKATDFGLSDFIKPGKRFHDIVGSAYYVAPEVLKRRSGPESDVWSIGVITYILLCGRRPFWDRTEDGIFKEVLRNKPDFSRKPWATISDSAKDFVKKLLVKDPRARLTAAQALSHAWVREGGNATDIPVDISVLNNLRQFVRYSRLKQFALRALASTLDEAEISDLRDQFDAIDVDKNGVISLEEMRQALAKDLPWKLKDSRVAEILEAIDSNTDGLVDFTEFVAAALHVHQLEEHDSEKWQLRSRAAFEKFDLDKDGYITPEELRMAQQNKERKWSENPIDEI

SEQ ID NO: 4374 - DNA, 1488 bp, Arabidopsis thaliana
  CDS (1)..(1488)
atggagacgaagccaaaccctagacgtccttcaaacacagttctaccatatcaaacaccacgattaagagatcattaccttctgggaaaaaagctaggccaaggccaatttggaacaacctatctctgcacagagaaatcaacctccgctaattacgcctgcaaatcgatcccgaagcgaaagctcgtgtgtcgcgaggattacgaagatgtatggcgtgagattcagatcatgcatcatctctctgagcatccaaatgttgttaggatcaaagggacttatgaagattcggtgtttgttcatattgttatggaggtttgtgaaggtggtgagctttttgatcggattgtttctaaaggtcattttagtgagcgtgaagctgtcaagcttattaagacgattcttggtgttgttgaggcttgtcattctcttggtgttatgcatagagatctcaaacctgagaatttcttgtttgatagtcctaaagatgatgctaagcttaaggctaccgattttggtttgtctgtcttctataagccaggacaatatttatatgacgtagttggaagtccgtactatgttgcaccagaggtgctaaagaaatgttatggacctgaaatagatgtgtggagtgctggtgttatcctctacattttactcagcggtgttcctcccttctgggcagagactgagtctggaatctttagacagatattgcaagggaagttagatttcaaatctgacccgtggcctactatctcagaagctgctaaagatttgatctataaaatgctcgaaaggagccccaagaaacgcatttctgctcatgaagccttgtgtcacccatggattgtcgatgaacaagcagcaccagacaagcctcttgatccagcagtcttatctcgtctaaagcagttttctcaaatgaataagattaagaaaatggcattacgggtaattgctgagagactttcagaggaagaaattggaggtctgaaggaattgttcaagatgatagacacagacaacagcggaacgattacttttgaagagctcaaagcgggtttgaagagagtcggatctgaactgatggaatcagaaatcaagtctctcatggatgcggctgatatcgacaacagtggtacaatagactacggagaattcctagcagcaaccttacacatgaacaagatggagagagaggagaatctggtggctgcattttcgtactttgacaaagacggaagcggttatatcaccatcgatgagcttcagtcagcttgcacagagtttggtctatgtgatacacctctggacgacatgatcaaggagattgatcttgacaatgacgggaagatcgatttctcggagtttacagcaatgatgaggaaaggagatggagttgggagaagcagaaccatgatgaagaacttgaacttcaacattgctgatgcttttggagttgatggtgaaaaatctgatgactga

SEQ ID NO: 4375 - protein, 495 aa, Arabidopsis thaliana
METKPNPRRPSNTVLPYQTPRLRDHYLLGKKLGQGQFGTTYLCTEKSTSANYACKSIPKRKLVCREDYEDVWREIQIMHHLSEHPNVVRIKGTYEDSVFVHIVMEVCEGGELFDRIVSKGHFSEREAVKLIKTILGVVEACHSLGVMHRDLKPENFLFDSPKDDAKLKATDFGLSVFYKPGQYLYDVVGSPYYVAPEVLKKCYGPEIDVWSAGVILYILLSGVPPFWAETESGIFRQILQGKLDFKSDPWPTISEAAKDLIYKMLERSPKKRISAHEALCHPWIVDEQAAPDKPLDPAVLSRLKQFSQMNKIKKMALRVIAERLSEEEIGGLKELFKMIDTDNSGTITFEELKAGLKRVGSELMESEIKSLMDAADIDNSGTIDYGEFLAATLHMNKMEREENLVAAFSYFDKDGSGYITIDELQSACTEFGLCDTPLDDMIKEIDLDNDGKIDFSEFTAMMRKGDGVGRSRTMMKNLNFNIADAFGVDGEKSDD

SEQ ID NO: 4376 - DNA, 1821 bp, Arabidopsis thaliana
  CDS (1)..(1821)
atgggaggctgtacttccaaaccctccacttcctccggcagacctaaccctttcgctcccggtaatgactatcctcaaattgacgattttgcccctgaccatcccggtaaatcaccaattcctactccttccgccgcaaaggcctctcctttcttccccttttacacgccgagccctgctcgccaccgccgcaataagagccgcgacgtcggcggaggaggagagagcaagagtttgactagcacgcctctccgtcaattacgccgtgcgtttcaccctccgtctccggcgaaacacatacgggcggcgctacggcggaggaaagggaaaaaggaagctgctttatctggggtgacgcagctaacgacggaggtaccgcagcgtgaggaggaagaggaagtagggcttgacaaaagatttggtttttctaaagagtttcacagtagagtagagttaggggaagaaattggacgaggacattttgggtacacttgctctgctaagttcaagaaaggagagctcaaaggtcaagtggttgctgtcaaaatcatcccaaaatcgaagatgacaactgcaattgctatagaagatgtgagaagggaagtgaaaattctacaggctttatctggacataagaatctggtacaattctatgatgcatttgaggacaatgcaaacgtctacattgcaatggagctatgtgaaggtggtgagcttcttgacagaatactagcaaggggagggaaatactcagagaatgacgcaaaaccagtgattatacaaattctgaatgtggtagctttctgtcatttccaaggagttgttcatcgagaccttaaaccagagaacttcttgtacacttccaaggaggagaattctcagcttaaagcgatagactttggcttatcagactttgtcagaccagatgagagactaaacgatatagtgggaagtgcatactatgtagctcccgaagttctacacagatcatatacaacagaagcggatgtgtggagcatcggagtcatagcatacattctactatgtggtagccgtccgttttgggcaagaactgaatccggaatttttagagctgttcttaaagctgacccgagtttcgatgaacctccttggcccttcttgtcttctgacgctaaagactttgttaagcggttattgtttaaggatccccggcgaagaatgtcagcctcccaagccttgatgcatccttggatccgagcttataatacggacatgaatatccctttcgatatcttgatctttaggcagatgaaggcgtacttgcgatcttcttcattacgcaaagctgctttgagggcgctatcgaagacgttaatcaaggatgaaattctttacctgaaaactcaattttctcttctcgcaccaaacaaagatggcctaatcacaatggataccattagaatggcacttgcaagcaatgcaacagaagcaatgaaagaatctcggatcccagagtttcttgctttgctaaatggacttcaatacagaggaatggattttgaagagttttgtgcagctgctataaacgttcatcagcacgagtcgcttgattgttgggaacagagcattcgacatgcttatgagcttttcgacaagaatggaaaccgagctattgtcatcgaagaacttgcctctgaacttggtgttggaccatctataccggtacattcagttctacatgattggatcagacacactgatggaaagcttagcttcttcgggtttgttaaactgttacatggagtctctgttcgagcctcggggaaaactacccggtga

SEQ ID NO: 4377 - protein, 606 aa, Arabidopsis thaliana
MGGCTSKPSTSSGRPNPFAPGNDYPQIDDFAPDHPGKSPIPTPSAAKASPFFPFYTPSPARHRRNKSRDVGGGGESKSLTSTPLRQLRRAFHPPSPAKHIRAALRRRKGKKEAALSGVTQLTTEVPQREEEEEVGLDKRFGFSKEFHSRVELGEEIGRGHFGYTCSAKFKKGELKGQVVAVKIIPKSKMTTAIAIEDVRREVKILQALSGHKNLVQFYDAFEDNANVYIAMELCEGGELLDRILARGGKYSENDAKPVIIQILNVVAFCHFQGVVHRDLKPENFLYTSKEENSQLKAIDFGLSDFVRPDERLNDIVGSAYYVAPEVLHRSYTTEADVWSIGVIAYILLCGSRPFWARTESGIFRAVLKADPSFDEPPWPFLSSDAKDFVKRLLFKDPRRRMSASQALMHPWIRAYNTDMNIPFDILIFRQMKAYLRSSSLRKAALRALSKTLIKDEILYLKTQFSLLAPNKDGLITMDTIRMALASNATEAMKESRIPEFLALLNGLQYRGMDFEEFCAAAINVHQHESLDCWEQSIRHAYELFDKNGNRAIVIEELASELGVGPSIPVHSVLHDWIRHTDGKLSFFGFVKLLHGVSVRASGKTTR

SEQ ID NO: 4378 - DNA, 1566 bp, Arabidopsis thaliana; identical to SEQ ID NO: 1837
  CDS (1)..(1566)

SEQ ID NO: 4379 - protein, 521 aa, Arabidopsis thaliana; identical to SEQ ID NO: 1838

SEQ ID NO: 4380 - DNA, 1656 bp, Arabidopsis thaliana
  CDS (1)..(1656)
atgggatgtctctgcatcaatctgaagaagaaggtcaagaaaccaacaccagacatcagtggagaacaaaacacagaggtaaagagcagagaaataacaccaaaagaacaacctcgtcaaagacaaccagctccaagagccaagttccagattgtggtgcaacctcataaactcccacttccacttcctcagcctcaagaaaaacaaaagctgatcaatcatcaaaaacagagcaccctgcaacaaccagaaccgatcttagggagaccatttgaagatattaaggagaagtatagtcttggtcgcgaattaggtcgtggccaattcggtataacgtatatatgtacagagatttcatcaggcaagaactttgcttgtaaatccatcttgaagagaaagctcatcagaactaaggacagagaggatgtaagaagggagatacagataatgcactacttatcaggacaaccaaacattgtggaaatcaaaggagcttatgaagacagacaaagtgttcatcttgtaatggagctttgcgaaggcggtgagctttttgataagatcactaaacgaggacattactcagagaaagcagccgcggagatcattagaagtgtggttaaagttgtacagatttgtcatttcatgggtgtgattcatcgcgaccttaaacccgaaaacttcttgttgtccagtaaagatgaagcttcctcaatgctcaaggctactgattttggtgtttcagttttcatcgaagaagggaaagtgtatgaagacattgttggaagtgcatattacgttgcaccggaggttctgaagagaaactacggcaaagcaatcgatatttggagcgccggagttattctctacatccttctctgcggaaatcctccattttgggcagagactgataagggaatatttgaggagattttgagaggagagattgattttgagtcggaaccatggccgtcgatttcggagagtgctaaggatttggtgagaaacatgttaaagtatgatcccaagaaacggtttactgcggctcaagtcctagaacatccttggatacgagaaggtggagaagcttctgataaaccaatcgatagtgctgttttgtcgcggatgaagcaactccgagctatgaataagcttaagaagcttgcatttaaatttatcgcgcaaaatctcaaagaagaggaactaaagggtctcaagacaatgttcgcaaacatggataccgataagagcggtacaatcacttacgacgaattgaaatccggactggaaaaactcggttcgaggttaaccgaaaccgaagttaagcagctcttggaagatgctgatgtcgatgggaacggtactattgattacattgagttcatttcagctactatgaaccggttcagagtagaaagagaggataatttgttcaaagcttttcaacatttcgataaagataacagcgggtttatttcgagacaagaattagaaacagctatgaaagagtataatatgggagatgatattatgatcaaagagattatctcagaagttgatgctgataatgatggaagtataaattatcaagagttttgcaatatgatgaagagctgctcacaatcacaccaatcaaaattggttcaaccgaattaa

SEQ ID NO: 4381 - protein, 551 aa, Arabidopsis thaliana
MGCLCINLKKKVKKPTPDISGEQNTEVKSREITPKEQPRQRQPAPRAKFQIVVQPHKLPLPLPQPQEKQKLINHQKQSTLQQPEPILGRPFEDIKEKYSLGRELGRGQFGITYICTEISSGKNFACKSILKRKLIRTKDREDVRREIQIMHYLSGQPNIVEIKGAYEDRQSVHLVMELCEGGELFDKITKRGHYSEKAAAEIIRSVVKVVQICHFMGVIHRDLKPENFLLSSKDEASSMLKATDFGVSVFIEEGKVYEDIVGSAYYVAPEVLKRNYGKAIDIWSAGVILYILLCGNPPFWAETDKGIFEEILRGEIDFESEPWPSISESAKDLVRNMLKYDPKKRFTAAQVLEHPWIREGGEASDKPIDSAVLSRMKQLRAMNKLKKLAFKFIAQNLKEEELKGLKTMFANMDTDKSGTITYDELKSGLEKLGSRLTETEVKQLLEDADVDGNGTIDYIEFISATMNRFRVEREDNLFKAFQHFDKDNSGFISRQELETAMKEYNMGDDIMIKEIISEVDADNDGSINYQEFCNMMKSCSQSHQSKLVQPN

SEQ ID NO: 4382 - DNA, 1626 bp, Arabidopsis thaliana
  CDS (1)..(1626)
atgggtaattgtatcgcctgcgtcaagtttgacccagacaactcaaaaccaaaccagaagaagaaacctccacggggacggcaacgaaacccatacgacgatcccgatggtttaagaactcacgcaccgttacgtgtgattcctatgagccatcaatctcagatcagcgacaagtacatcttaggacgagaactcggtcgcggcgaattcggaatcacgtatctttgtacagatagagagactcgtgaagctttagcttgcaaatcaatctccaagagaaagctccgaaccgccgtcgatgtggaagacgtccgtcgtgaagtcacgatcatgtcaactttaccggaacacccaaacgttgtgaaacttaaagcgacttatgaggataacgagaacgtgcatcttgtgatggagctttgtgaaggaggtgagctttttgatcggattgttgccagaggacattatacagagcgtgcggcggctaccgtcgcgagaacgatcgcggaggttgtgaggatgtgtcatgtcaatggtgttatgcatagagatttgaagcctgagaatttcttgtttgctaacaagaaggagaattctgcacttaaggctattgattttggtttatctgttctctttaaacctggagagaggtttacagagattgttggaagtccttattatatggctccagaagtgttgaagagaaattatggaccagaggttgatgtgtggagtgctggagttatcctctacatcttgctttgtggtgttcctccgttttgggcagagactgaacaaggtgtggctcttgccatcttgaggggagttcttgattttaagagagatccttggtcgcagatatcagagagcgcaaagagccttgtgaagcagatgttggaacctgattcaactaagcgtttgactgctcagcaagttcttgatcacccttggatacagaatgcaaagaaagctccaaatgttcctttaggggatattgttaggtcaaggttgaagcaattctccatgatgaatagattgaaaaagaaagctctgcgtgttatcgccgaacacttgtctattcaagaagttgaagtgatcagaaacatgtttacgctgatggatgatgacaacgacggtaaaatatcatatctagaactcagagctggactccggaaagtcggttcacaactgggtgaaccagagatcaaattgttaatggaagtggcggatgttaatggaaatggatgcttggactatggagagtttgtagcagtgataattcacttgcagaagatggagaatgatgagcatttcagacaagcttttatgttctttgacaaagatggaagtggatacatcgaatcagaagaactacgtgaagctttaaccgacgagttaggtgaaccagacaacagtgttataatcgatataatgcgtgaagtcgacactgacaaggacggaaaaataaactatgatgagtttgtggtgatgatgaaagctggaactgattggagaaaggcatcaagacaatactcaagagagaggtttaaaagcttaagcttaaacttgatgaaagacgggtcaatgcatctacacgacgcactcactggacaatctattgcagtttga

SEQ ID NO: 4383 - protein, 541 aa, Arabidopsis thaliana
MGNCIACVKFDPDNSKPNQKKKPPRGRQRNPYDDPDGLRTHAPLRVIPMSHQSQISDKYILGRELGRGEFGITYLCTDRETREALACKSISKRKLRTAVDVEDVRREVTIMSTLPEHPNVVKLKATYEDNENVHLVMELCEGGELFDRIVARGHYTERAAATVARTIAEVVRMCHVNGVMHRDLKPENFLFANKKENSALKAIDFGLSVLFKPGERFTEIVGSPYYMAPEVLKRNYGPEVDVWSAGVILYILLCGVPPFWAETEQGVALAILRGVLDFKRDPWSQISESAKSLVKQMLEPDSTKRLTAQQVLDHPWIQNAKKAPNVPLGDIVRSRLKQFSMMNRLKKKALRVIAEHLSIQEVEVIRNMFTLMDDDNDGKISYLELRAGLRKVGSQLGEPEIKLLMEVADVNGNGCLDYGEFVAVIIHLQKMENDEHFRQAFMFFDKDGSGYIESEELREALTDELGEPDNSVIIDIMREVDTDKDGKINYDEFVVMMKAGTDWRKASRQYSRERFKSLSLNLMKDGSMHLHDALTGQSIAV

SEQ ID NO: 4384 - DNA, 1716 bp, Arabidopsis thaliana
  CDS (1)..(1716)
atgggtctctgtttctcctccgccgccaaatcctccggccacaaccgcagtagccggaatccccacccacatcctcctctcacggttgttaaatccagaccaccgcgatctccatgttccttcatggccgttacgatccaaaaggatcatagaacgcaaccgcgacgcaatgcaacggctaagaaaacgccgacgcggcatacgccaccgcacgggaaagtgagagagaaagttataagcaataacggtaggagacatggagaaacgatcccctacggtaagcgtgtagattttgggtacgctaaagattttgatcaccgttacaccattggaaaattgcttggacatggtcaatttggttatacatatgtcgctaccgataaaaaaaccggtgatcgtgtcgccgtcaagaagatcgataaggccaagatgacaattccgatagctgtggaagatgtaaagagagaggtgaagatattacaagctttaactggtcatgaaaatgtggttcggttttataatgccttcgaggacaagaactctgtttatatagttatggagttatgcgagggtggtgaattacttgatcgtattttagccaggaaggatagccgttatagcgagagagacgcggccgtggtggtgagacaaatgctgaaagttgcggctgagtgtcatttacgcggtttggttcaccgagatatgaaaccagagaattttctgttcaaatcaaccgaagaagattcgcctctaaaagctactgatttcggtttatctgacttcataaagccaggcaaaaagtttcatgatattgttgggagtgcatactatgtagcacctgaagtgttaaaacgtaggtcgggacctgaatcagatgtgtggagtattggtgtaatcagttacattcttctctgcgggagacgaccattctgggataagactgaagacggtatcttcaaggaggttttgaagaacaaacctgatttcagaagaaaaccgtggccaaccattagcaacagcgccaaagattttgtcaagaagttgttagtaaaagacccgagagcgcgattaacagctgcacaagcactatcacatccatgggttagagaaggaggagatgcatctgagattcccatagacatatctgttctgaacaacatgcgtcagtttgtgaaatttagccgccttaagcaattcgctttaagggctcttgcaacgacacttgatgaggaagagttggctgatcttcgagaccagtttgatgcgattgatgttgacaagaatggtgtcattagccttgaagagatgaggcaggctctagcgaaagatcatccttggaagcttaaggatgcaagagttgccgagattcttcaagcgattgatagcaacacagatggattcgtggactttggcgagtttgtcgccgctgcgctacacgtaaaccaattagaggaacacgattccgagaagtggcaacagagatcaagagcagcatttgaaaaattcgacatagatggagatggatttataacagcagaggaacttcgaatgcatactggcttgaaagggtccattgagccacttcttgaagaagcagacattgacaatgatggtaaaatcagtctccaagagtttcgtagacttttgagaactgcaagtatcaaatcaagaaatgttagaagccctcctggttatcttatttctcgcaaggtctaa

SEQ ID NO: 4385 - protein, 571 aa, Arabidopsis thaliana
MGLCFSSAAKSSGHNRSSRNPHPHPPLTVVKSRPPRSPCSFMAVTIQKDHRTQPRRNATAKKTPTRHTPPHGKVREKVISNNGRRHGETIPYGKRVDFGYAKDFDHRYTIGKLLGHGQFGYTYVATDKKTGDRVAVKKIDKAKMTIPIAVEDVKREVKILQALTGHENVVRFYNAFEDKNSVYIVMELCEGGELLDRILARKDSRYSERDAAVVVRQMLKVAAECHLRGLVHRDMKPENFLFKSTEEDSPLKATDFGLSDFIKPGKKFHDIVGSAYYVAPEVLKRRSGPESDVWSIGVISYILLCGRRPFWDKTEDGIFKEVLKNKPDFRRKPWPTISNSAKDFVKKLLVKDPRARLTAAQALSHPWVREGGDASEIPIDISVLNNMRQFVKFSRLKQFALRALATTLDEEELADLRDQFDAIDVDKNGVISLEEMRQALAKDHPWKLKDARVAEILQAIDSNTDGFVDFGEFVAAALHVNQLEEHDSEKWQQRSRAAFEKFDIDGDGFITAEELRMHTGLKGSIEPLLEEADIDNDGKISLQEFRRLLRTASIKSRNVRSPPGYLISRKV

SEQ ID NO: 4386 - DNA, 1749 bp, Arabidopsis thaliana
  CDS (1)..(1749)
atgggaagttgtgtttcgtcgccattgaaaggctctccttttggaaagagaccggtaagaaggcgacacagtagtaatagcagaacatcctctgttcctcgtttcgattcttcaactaatctttcccggagattgattttccagccaccaagccgcgttctccccgagcctatcggtgatggaattcacctcaagtatgatttgggaaaagaactaggccgtggtgaatttggtgtcactcatgaatgtatcgagatcagtacccgagaaagatttgcgtgtaagaggatatcgaaggagaagctaaggacggagatagatgtggaggatgtgagaagagaggttgagatcatgagatgtttaccaaaacatcctaatattgttagctttaaggaagcttttgaggacaaagacgctgtctatcttgtcatggagatttgtgaaggaggtgaactttttgaccgcattgtctctagagggcattacactgaacgcgccgctgcatctgttgctaaaaccattcttgaagttgtcaaggtgtgtcatgaacatggagtgattcatcgtgatcttaaaccagagaacttcctcttttcgaatggaactgagactgcacaactcaaagccattgattttggtctctccattttcttcaaaccggcccagcggttcaatgagattgtgggaagtccttactacatggctccagaggttttgagacgaaattacggtcctgagatcgatgtttggagtgctggtgttatactctatatcttgctttgtggtgttcctcccttttgggcagaaaccgaggaaggaatcgcgcacgctattgtgagagggaacatcgatttcgagagagatccatggccaaaagtctcacatgaagccaaggaactcgttaagaacatgcttgatgcaaatccttatagcagactcacagtccaagaagtgcttgaacatccatggatccggaacgcagagagagcaccaaatgtgaatcttggagataacgtcaggaccaagattcaacaattcttgttgatgaacaggttcaagaagaaagtcctcaggattgtagcggacaatctaccaaacgaggagatagcagcgatagtacagatgtttcaaacaatggacactgataagaatggtcacttgacttttgaggagctaagagatggactgaagaagattggacaagttgttcccgatggcgatgtgaagatgctaatggatgcagcggatacagatggaaatgggatgttgagctgtgatgagtttgtgacactctcaatacatttgaagagaatgggatgtgatgagcatttgcaggaagcattcaagtattttgacaagaacgggaacggatttatcgagctagatgagctcaaggtagctctttgcgatgataagctaggccacgctaacggtaacgaccagtggatcaaagatatcttctttgacgtcgacctcaacaaggatggacggataagctttgatgagtttaaggcaatgatgaaatcagggacggattggaaaatggcgtcgaggcagtactcgagggcgttgttgaatgctctaagcatcaagatgttcaaagaagattttggggacaatggtcctaagtcacattccatggagttccctatagcaaggaagagggctaagctgcttgatgctcccaagaacaaatcaatggagcttcagatctccaaaacctataaaccctcaggtctaagaaactaa

SEQ ID NO: 4387 - protein, 582 aa, Arabidopsis thaliana
MGSCVSSPLKGSPFGKRPVRRRHSSNSRTSSVPRFDSSTNLSRRLIFQPPSRVLPEPIGDGIHLKYDLGKELGRGEFGVTHECIEISTRERFACKRISKEKLRTEIDVEDVRREVEIMRCLPKHPNIVSFKEAFEDKDAVYLVMEICEGGELFDRIVSRGHYTERAAASVAKTILEVVKVCHEHGVIHRDLKPENFLFSNGTETAQLKAIDFGLSIFFKPAQRFNEIVGSPYYMAPEVLRRNYGPEIDVWSAGVILYILLCGVPPFWAETEEGIAHAIVRGNIDFERDPWPKVSHEAKELVKNMLDANPYSRLTVQEVLEHPWIRNAERAPNVNLGDNVRTKIQQFLLMNRFKKKVLRIVADNLPNEEIAAIVQMFQTMDTDKNGHLTFEELRDGLKKIGQVVPDGDVKMLMDAADTDGNGMLSCDEFVTLSIHLKRMGCDEHLQEAFKYFDKNGNGFIELDELKVALCDDKLGHANGNDQWIKDIFFDVDLNKDGRISFDEFKAMMKSGTDWKMASRQYSRALLNALSIKMFKEDFGDNGPKSHSMEFPIARKRAKLLDAPKNKSMELQISKTYKPSGLRN

SEQ ID NO: 4388 - DNA, 1752 bp, Arabidopsis thaliana
  CDS (1)..(1752)
atgggaaacacatgcgtgggtccgaatctgaaccctaatggattccttcaatccgttagtgctgccgtgtggcggaatcagaaaccagacgatagcattaagagcagcaaggacgagagcagtcgaaaaaagaacgataaaagcgttaatggcgacgacagtaacggtcacgtttcctccaccgtggatccagcaccatccacgttgccaacaccgagcacaccaccacctccggtgaaaatggccaacgaagaaccaccaccaaaacctatcacagagaacaaagaagatccgaattcgaaaccgcagaagaaagaagcgcacatgaaacgtatggcaagcgcaggtctacaaatagactcagttcttgggagaaaaacagagaatctcaaagatatatacagtgttgggagaaaattaggtcaaggacaatttggaacaacgtttctttgcgtggataagaagacaggtaaagagttcgcttgtaaaacgatagctaagaggaaattaacaacacctgaggatgttgaagatgtgagaagagagattcagataatgcatcatttgtctggtcatccaaacgtgattcagatcgttggtgcgtatgaagatgcagtagctgttcatgttgtgatggagatttgtgcaggtggagagttatttgataggattatacagagagggcattatactgagaaaaaagctgctgagcttgctaggatcattgttggtgttatagaagcttgtcattctttaggtgtaatgcaccgtgatcttaagcctgagaattttttatttgttagtggagatgaagaagctgctctcaagactattgattttggcctctctgttttctttaaaccaggagaaacattcactgatgtcgttggtagtccttattatgtggcaccagaagttttaaggaaacattatagtcatgaatgtgatgtttggagtgccggagttattatttacattttactaagtggcgtccctccgttttgggatgaaacggaacaggggatctttgagcaggttttgaaaggtgaccttgattttatatcagaaccatggcctagtgtatcagaaagtgccaaggatttggtccgtcggatgctaatcagagaccctaagaagcgaatgactactcatgaagttctctgtcatccatgggccagagtagatggtgttgctcttgataaacctcttgattctgctgtcctaagtcgtttgcaacaattttcagccatgaacaagctcaagaaaatagctatcaaggtaatagcagaaagcttgtcagaggaagaaatagcaggattgaaggaaatgttcaagatgatagatacagataatagtggacacatcactctcgaagaactcaagaaaggtttggacagagttggtgctgaccttaaagattcagaaatactaggattaatgcaagcagcggatatagataacagtgggacaatagactatggagagtttatagcagcaatggtgcatttgaacaaaatagagaaagaagaccatttgttcacagcattctcttactttgaccaagatggaagtggttatataaccagagacgagctccaacaagcttgcaagcaatttggcttagcggatgttcatttagacgacattttacgcgaagtcgataaagacaacgatggaagaatagactacagcgagtttgtggatatgatgcaagacactggttttggcaaaatgggtttaaaggtgagttga

SEQ ID NO: 4389 - protein, 583 aa, Arabidopsis thaliana
MGNTCVGPNLNPNGFLQSVSAAVWRNQKPDDSIKSSKDESSRKKNDKSVNGDDSNGHVSSTVDPAPSTLPTPSTPPPPVKMANEEPPPKPITENKEDPNSKPQKKEAHMKRMASAGLQIDSVLGRKTENLKDIYSVGRKLGQGQFGTTFLCVDKKTGKEFACKTIAKRKLTTPEDVEDVRREIQIMHHLSGHPNVIQIVGAYEDAVAVHVVMEICAGGELFDRIIQRGHYTEKKAAELARIIVGVIEACHSLGVMHRDLKPENFLFVSGDEEAALKTIDFGLSVFFKPGETFTDVVGSPYYVAPEVLRKHYSHECDVWSAGVIIYILLSGVPPFWDETEQGIFEQVLKGDLDFISEPWPSVSESAKDLVRRMLIRDPKKRMTTHEVLCHPWARVDGVALDKPLDSAVLSRLQQFSAMNKLKKIAIKVIAESLSEEEIAGLKEMFKMIDTDNSGHITLEELKKGLDRVGADLKDSEILGLMQAADIDNSGTIDYGEFIAAMVHLNKIEKEDHLFTAFSYFDQDGSGYITRDELQQACKQFGLADVHLDDILREVDKDNDGRIDYSEFVDMMQDTGFGKMGLKVS

SEQ ID NO: 4390 - DNA, 1731 bp, Arabidopsis thaliana
  CDS (1)..(1731)
atggggatctgtcatggaaaacccgtcgagcaacaatcaaaaagcctcccagtttccggcgaaactaatgaagctccgacgaattcacagccaccggcgaaatcctctggctttccgttttatagcccgagtcctgtacctagcttattcaaatcctcaccatctgtatcttctagcgtgagctcaacgcctcttcgtatcttcaagagacctttccctcctccttctcctgctaagcacatacgagctttcctcgcgcgtcgctatggctctgtcaagcctaatgaggtttcgattcccgaaggtaaagaatgtgagatcggtctcgataagagttttggcttttcaaaacagtttgcttcacactatgagattgatggtgaggtgggtcgtggacattttggatatacttgctctgctaagggtaaaaaaggtagcttgaaaggtcaagaagttgctgttaaagttattcctaaatcaaagatgacaactgcaattgcgattgaggatgttagtagagaagtgaagatgttgcgggctttgactggtcataagaacctagtccagttctatgacgcgtttgaagatgatgaaaatgtttatattgtcatggaattatgcaaaggtggtgaactcttggacaaaatacttcaaaggggtggaaaatactccgaagatgatgctaaaaaagttatggttcagattctcagtgttgtggcttactgtcatctacaaggtgtggttcaccgtgaccttaaacccgagaactttcttttctctaccaaggatgagacttctcctctgaaagcaattgattttggtctttctgactatgtcaagccagacgagaggttgaatgatattgtagggagtgcttactatgtggccccggaagttttacaccgtacatatggaacagaagctgacatgtggagtataggagtgattgcttatattcttctctgtggcagtcgacccttttgggcccgtactgaatccggaatctttcgagctgtactaaaggcagaaccgaattttgaagaagctccttggccttctctatcacccgaagctgtagattttgtgaagagattgctaaacaaagattaccgtaaaagactaactgcggcccaggctttgtgtcatccctggctggttggctcgcatgaactaaagattccatctgatatgatcatatacaagcttgtaaaagtgtacataatgtcaacttcattgagaaaatcggctttagcggctcttgccaaaacattaactgtaccgcagttagcgtatcttcgggagcaattcacattgttggggccaagcaaaaatggatatatctcgatgcagaattacaaaacagcaatcctaaagagttcaacagatgctatgaaggattctcgagtgtttgattttgttcacatgataagttgtcttcaatacaagaaactagactttgaagagttttgtgcttcagcattaagcgtttatcagctcgaagcaatggagacatgggagcaacatgcacggcgtgcttacgagttgtttgagaaagacgggaataggcccatcatgattgaagaacttgcatcggaactcggactagggccatcagtgccggtgcacgttgttcttcaggattggataagacattctgatggcaaacttagtttcttagggtttgtcagattgctacatggcgtgtcttctcggaccttacaaaaagcttag

SEQ ID NO: 4391 - protein, 576 aa, Arabidopsis thaliana
MGICHGKPVEQQSKSLPVSGETNEAPTNSQPPAKSSGFPFYSPSPVPSLFKSSPSVSSSVSSTPLRIFKRPFPPPSPAKHIRAFLARRYGSVKPNEVSIPEGKECEIGLDKSFGFSKQFASHYEIDGEVGRGHFGYTCSAKGKKGSLKGQEVAVKVIPKSKMTTAIAIEDVSREVKMLRALTGHKNLVQFYDAFEDDENVYIVMELCKGGELLDKILQRGGKYSEDDAKKVMVQILSVVAYCHLQGVVHRDLKPENFLFSTKDETSPLKAIDFGLSDYVKPDERLNDIVGSAYYVAPEVLHRTYGTEADMWSIGVIAYILLCGSRPFWARTESGIFRAVLKAEPNFEEAPWPSLSPEAVDFVKRLLNKDYRKRLTAAQALCHPWLVGSHELKIPSDMIIYKLVKVYIMSTSLRKSALAALAKTLTVPQLAYLREQFTLLGPSKNGYISMQNYKTAILKSSTDAMKDSRVFDFVHMISCLQYKKLDFEEFCASALSVYQLEAMETWEQHARRAYELFEKDGNRPIMIEELASELGLGPSVPVHVVLQDWIRHSDGKLSFLGFVRLLHGVSSRTLQKA

SEQ ID NO: 4392 - DNA, 1593 bp, Arabidopsis thaliana
  CDS (1)..(1593)
atgggaaattgttgtggaacggctggatcgttgattcaagataagcagaagaaaggttttaaattgccaaatcctttctcaaacgagtacggcaaccaccacgatggccttaagcttatcgtgttgaaggaaccaacgggtcatgagatcaagcagaaatataaattaggtcgtgagttaggtcgaggagagttcggtgtgacgtatctgtgcaccgagatcgagaccggagagattttcgcatgcaaatcaatcttaaagaagaagctgaaaacgtcgattgatatagaggacgttaagagagaagttgagatcatgaggcaaatgcctgaacatcctaatattgttactttgaaagagacttatgaggatgataaagctgtgcatttggttatggagctttgtgaaggcggtgagcttttcgataggattgttgctagagggcattatacggagagagctgctgcttcggttattaaaacgatcatcgaggttgttcagatgtgtcataagcatggagtaatgcacagagatttaaaacctgagaacttcttgtttgcaaacaagaaggaaactgcatctttgaaggctattgattttggtctctctgttttctttaaaccaggcgagagatttaacgaaattgttgggagtccttactacatggctcctgaggtattaaggaggagttatggacaagaaattgacatttggagcgcaggagtgattctttacatattgctctgtggtgttccacctttttgggcagaaaccgaacatggagtcgcaaaagcaattcttaaatctgtaattgactttaaaagagacccctggcctaaagtttctgataatgcaaaagatctgatcaaaaagatgcttcatcctgatccaaggcgtcgtctaactgctcaacaagtgcttgatcatccgtggatacagaatggtaagaatgcttccaatgtatcattgggtgaaaccgtaagagcaaggcttaagcaattctctgttatgaacaagctcaagaaaagggcactcagggttatcgctgagcatctatcggttgaagaaacatcttgcataaaagaaagattccaagtaatggatacaagcaatagaggaaagattactatcaccgagctaggaatcggattgcagaaactcgggattgttgttcctcaagatgacattcaaatattgatggacgcgggagatgttgataaagatggatatttagacgtcaatgaatttgtagccatatcggtacacatcaggaagttaggcaacgacgagcacttaaagaaagcttttacgttctttgacaaaaacaagagtggttatatcgaaatagaggagttaagagatgctttggcagatgatgttgacactactagtgaagaagttgttgaagccattattcttgatgtcgataccaataaggatgggaaaataagttacgacgaatttgcaacgatgatgaaaacgggaacggattggagaaaagcttcgaggcagtactcgagggacctgtttaagtgtcttagtcttaagctcatgcaagatgggtccttgcagtctaatggagatacaaagtag

SEQ ID NO: 4393 - protein, 530 aa, Arabidopsis thaliana
MGNCCGTAGSLIQDKQKKGFKLPNPFSNEYGNHHDGLKLIVLKEPTGHEIKQKYKLGRELGRGEFGVTYLCTEIETGEIFACKSILKKKLKTSIDIEDVKREVEIMRQMPEHPNIVTLKETYEDDKAVHLVMELCEGGELFDRIVARGHYTERAAASVIKTIIEVVQMCHKHGVMHRDLKPENFLFANKKETASLKAIDFGLSVFFKPGERFNEIVGSPYYMAPEVLRRSYGQEIDIWSAGVILYILLCGVPPFWAETEHGVAKAILKSVIDFKRDPWPKVSDNAKDLIKKMLHPDPRRRLTAQQVLDHPWIQNGKNASNVSLGETVRARLKQFSVMNKLKKRALRVIAEHLSVEETSCIKERFQVMDTSNRGKITITELGIGLQKLGIVVPQDDIQILMDAGDVDKDGYLDVNEFVAISVHIRKLGNDEHLKKAFTFFDKNKSGYIEIEELRDALADDVDTTSEEVVEAIILDVDTNKDGKISYDEFATMMKTGTDWRKASRQYSRDLFKCLSLKLMQDGSLQSNGDTK

SEQ ID NO: 4394 - DNA, 1788 bp, Arabidopsis thaliana
  CDS (1)..(1788)
atggggcaatgttacgggaaggttaatcagagtaagcaaaatggtgaagaagaagctaacacgactacttatgttgtttccggcgacgggaatcagattcagcctctaactccggttaattacggtcgagctaagaacactccagctaggtcatcgaatccgagtccttggcctagtcctttccctcacggatcagcgagccctcttccttctggtgtttctccttctccggccagaacttccactccgaggaggtttttccgacggcctttcccgccgccttctccagccaaacacattaaggcttctttgatcaaacgtcttggagtgaagcctaaggaaggtccgatccctgaggagagaggaactgagccggagcagtcgcttgataagagctttggttatggcaagaattttggtgctaagtacgaattggggaaagaagtgggtcgagggcattttggtcatacttgttctggccgtggtaagaagggagatattaaggatcatcctattgctgtcaagatcatctccaaggctaagatgacaacagcaattgcaattgaagatgttcgcagggaggtgaagttactgaaatcattatctggacacaaatatttaatcaaatattatgatgcatgtgaggacgccaataacgtatacatagtcatggagttgtgtgatggtggagaacttttggacagaattttagcaaggggtggtaaatacccggaggatgatgcaaaggcgattgtcgtacaaattctaactgttgtttcattttgtcatctccaaggagttgtgcaccgtgacttaaagccagagaattttctatttacatcaagccgcgaagactcagacttgaaacttattgattttggtctctcagactttattagacctgatgaaagactgaatgatatagttggaagtgcctactatgtcgcgcctgaagttttacacaggtcatatagccttgaggctgatatatggagtattggagttattacatatatactcttatgtggaagccgacctttttgggcacggacagaatctggaatctttcgcactgtactaagaactgaaccaaactatgatgacgtaccttggccttcttgttcatcagaaggtaaagattttgtgaaacgacttctcaacaaagactataggaagcgaatgtctgcagttcaagctttgactcatccgtggttacgggatgatagtcgtgtgattcctttagacattttgatctataagttggtcaaagcctacttgcacgcgacacctcttagacgagctgctttaaaggcgctagcaaaagcattgaccgagaacgagctagtctatcttagagcacagttcatgctgttgggaccaaacaaagatggtagcgtctctctcgaaaacttcaagacggcgcttatgcaaaacgcaacagacgcaatgagagaatcaagagttcctgaaatacttcacactatggaatctctagcgtataggaagatgtatttcgaagagttctgtgcagcagcaattagcatccatcaactagaagctgttgacgcgtgggaagagatagcaacggcaggtttccagcattttgaaaccgagggaaaccgagtgatcacaatcgaagaactagcaagggaactgaatgtgggtgcgtctgcgtatggacacttgagagattgggtaagaagcagtgacgggaagctgagttacttagggttcactaagttcttgcacggagttactcttcgtgctgctcacgcaagacctcgctag

SEQ ID NO: 4395 - protein, 595 aa, Arabidopsis thaliana
MGQCYGKVNQSKQNGEEEANTTTYVVSGDGNQIQPLTPVNYGRAKNTPARSSNPSPWPSPFPHGSASPLPSGVSPSPARTSTPRRFFRRPFPPPSPAKHIKASLIKRLGVKPKEGPIPEERGTEPEQSLDKSFGYGKNFGAKYELGKEVGRGHFGHTCSGRGKKGDIKDHPIAVKIISKAKMTTAIAIEDVRREVKLLKSLSGHKYLIKYYDACEDANNVYIVMELCDGGELLDRILARGGKYPEDDAKAIVVQILTVVSFCHLQGVVHRDLKPENFLFTSSREDSDLKLIDFGLSDFIRPDERLNDIVGSAYYVAPEVLHRSYSLEADIWSIGVITYILLCGSRPFWARTESGIFRTVLRTEPNYDDVPWPSCSSEGKDFVKRLLNKDYRKRMSAVQALTHPWLRDDSRVIPLDILIYKLVKAYLHATPLRRAALKALAKALTENELVYLRAQFMLLGPNKDGSVSLENFKTALMQNATDAMRESRVPEILHTMESLAYRKMYFEEFCAAAISIHQLEAVDAWEEIATAGFQHFETEGNRVITIEELARELNVGASAYGHLRDWVRSSDGKLSYLGFTKFLHGVTLRAAHARPR

SEQ ID NO: 4396 - DNA, 1941 bp, Arabidopsis thaliana
  CDS (1)..(1941)
atgggtaatgcttgcgttggaccaaacatttctggaaatggtttcttgcaaactgttacggctgcaatgtggaggccacggatcggagctgagcaagcttcttcttcttcccatggtaatggacaagtttctaaagaagcagcttcagaaccagctactgatcaagtccagaataaaccccctgagcctatcacaatgccaagctcaaagaccaatcccgaaactaaactgaaacccgatctagagatccaacctgaagaaaagaaggagaaagttcttgcagaagaaaccaagcagaaagttgttcctgaagaaagtaagcaggaagttcctcctgaagaaagtaagcgggaagttgttgtgcagccggagtcagcaaaaccagaaacaaagtctgaatccaagccagagacaacaaaaccagaaacaacgtctgaaaccaagccagagacgaaagctgaacctcagaagcctaaacatatgaggagagtgtccagtgcagggcttagaactgagtcagtgttgcagaggaaaactgaaaactttaaggagttctattcattagggaggaaacttggacaagggcaatttgggacgacgtttttatgccttgagaaaggtactgggaacgaatatgcgtgcaagtcgatttccaagaggaagcttttgactgatgaggatgttgaagatgtgagaagagagattcagataatgcatcacttggctggtcatccgaatgttatatctattaaaggtgcttatgaggatgttgttgcggtacatcttgtgatggagttgtgttcgggtggcgagctttttgatagaattattcaacgtggacattacactgagaggaaagctgctgagcttgcgagaaccattgttggggttttagaggcttgtcactctcttggtgttatgcatcgggacctcaagccagagaattttctatttgttagtagagaggaagattccctgttgaaaacgatcgactttggactctcaatgttctttaagccagatgaggtttttacagatgttgttggtagtccgtattatgtagctccagaagttcttagaaagcgttatggtcctgaatcagatgtgtggagtgctggtgtgattgtttacattttgttaagcggagttcctcctttctgggccgaaaccgaacaaggtattttcgagcaggtccttcatggagatcttgacttttcatctgatccatggccaagcatctctgaaagcgcgaaagacttggtaaggaaaatgcttgttcgagaccccaagcgaagactaaccgcacatcaagtattatgtcatccatgggtacagattgacggtgtggctccagataaacctctggactctgctgttctgagccgtatgaagcaattttctgcaatgaacaagttcaagaaaatggctcttagagtcatagctgagagcttatctgaagaagaaatagccggtttaaaacaaatgttcaagatgatagacgcagacaatagtggtcagatcacttttgaagaactgaaagcaggactaaaacgagttggtgccaatctcaaagagtcagagattcttgatctaatgcaagctgctgatgtggacaatagcggaacgatagactacaaagagttcatagccgccacattgcatctaaacaaaatagagagagaggaccatttgttcgccgccttctcttactttgacaaggacgagagtggctttatcaccccggacgagcttcaacaagcttgcgaagagtttggtgttgaagatgcccgcatagaagaaatgatgcgcgatgttgatcaagacaaggatggacgaatagactacaacgagtttgtggcaatgatgcagaaagggagcataatgggaggacctgtgaagatgggtttagagaacagcattagcatttctctgaaacattag

SEQ ID NO: 4397 - protein, 646 aa, Arabidopsis thaliana
MGNACVGPNISGNGFLQTVTAAMWRPRIGAEQASSSSHGNGQVSKEAASEPATDQVQNKPPEPITMPSSKTNPETKLKPDLEIQPEEKKEKVLAEETKQKVVPEESKQEVPPEESKREVVVQPESAKPETKSESKPETTKPETTSETKPETKAEPQKPKHMRRVSSAGLRTESVLQRKTENFKEFYSLGRKLGQGQFGTTFLCLEKGTGNEYACKSISKRKLLTDEDVEDVRREIQIMHHLAGHPNVISIKGAYEDVVAVHLVMELCSGGELFDRIIQRGHYTERKAAELARTIVGVLEACHSLGVMHRDLKPENFLFVSREEDSLLKTIDFGLSMFFKPDEVFTDVVGSPYYVAPEVLRKRYGPESDVWSAGVIVYILLSGVPPFWAETEQGIFEQVLHGDLDFSSDPWPSISESAKDLVRKMLVRDPKRRLTAHQVLCHPWVQIDGVAPDKPLDSAVLSRMKQFSAMNKFKKMALRVIAESLSEEEIAGLKQMFKMIDADNSGQITFEELKAGLKRVGANLKESEILDLMQAADVDNSGTIDYKEFIAATLHLNKIEREDHLFAAFSYFDKDESGFITPDELQQACEEFGVEDARIEEMMRDVDQDKDGRIDYNEFVAMMQKGSIMGGPVKMGLENSISISLKH

SEQ ID NO: 4398 - DNA, 1800 bp, Arabidopsis thaliana
  CDS (1)..(1800)
atgggaggctgtacttccaaaccttcctcctccgtcaaacctaatccttacgcacccaaagacgcggttctccaaaatgacgattctacccctgctcatcccgggaaatcaccggttcgttcatctcccgccgtaaaggcctctccttttttccctttttacacgcctagtcccgcccggcaccgccgtaacaagagccgcgacggcggaggaggagagagtaagagcgttaccagcactcctctccgtcagctcgcgcgtgctttccaccctccgtcaccggcgagacatatacgggatgttctgcggcggaggaaggagaagaaggaggctgctctgccggcggcgaggcagcagaaggaggaggaggagagggaagaggtagggctggataaaagatttgggttttccaaggagttacagagtaggattgagctaggggaagagattgggagagggcattttgggtatacttgctctgctaagttcaagaaaggagagctcaaagatcaggaggttgctgttaaagtcatcccaaaatctaagatgacatctgcaatatctatagaggatgtgagaagagaagtgaaaatactgcgggcgttatctggacatcaaaatttggtacaattctatgatgcgttcgaggacaatgccaacgtttacatcgttatggagttatgtggaggtggtgaacttcttgacaggatactagcaaggggaggaaaatactctgaagatgatgcaaaagcagtgcttatacagatccttaacgtcgtagctttctgtcatctccaaggagttgttcatcgagatctaaaaccagagaacttcttgtacacttccaaggaggagaattctatgttgaaagtcatagattttggcttatcggactttgtcagaccagacgaaagactaaatgatatagtgggaagtgcatattacgtagcccctgaagttctacacagatcttataccacagaagcggatgtatggagcataggagtcatagcatacattctcctatgtggaagccgtcctttttgggcaagaactgaatcaggaattttcagagcagttctaaaagctgatcccagttttgatgaacctccttggccttcgttatcctttgaggcaaaagattttgttaagagattattgtacaaggaccctcggaaaagaatgactgcatctcaagctttgatgcatccttggatcgcgggttataagaaaatagatatcccatttgatattctgatcttcaagcagatcaaagcatacttgagatcttcgtctttgcgcaaagctgctttgatggctctgtccaagacattaactaccgatgaacttctttatctgaaagcgcagtttgcacacttagcacccaacaaaaatggcctcatcactttagatagcatcagactggcacttgcgacaaatgcaacagaagcaatgaaggaatcacggatcccggactttcttgcattgttaaatggacttcaatacaaagggatggattttgaagagttttgtgcagcttccattagcgttcatcagcatgagtctcttgattgttgggagcagagcattcgtcatgcttatgagctatttgaaatgaatggaaaccgagttatcgtcatcgaagaactcgcttctgaacttggtgttggatcatccatcccggttcataccattctaaatgactggataagacatactgacgggaagctgagtttcttgggttttgtcaaactgctgcacggtgtctcgactcgacaatctttagcgaaaacgcgatga

SEQ ID NO: 4399 - protein, 599 aa, Arabidopsis thaliana
MGGCTSKPSSSVKPNPYAPKDAVLQNDDSTPAHPGKSPVRSSPAVKASPFFPFYTPSPARHRRNKSRDGGGGESKSVTSTPLRQLARAFHPPSPARHIRDVLRRRKEKKEAALPAARQQKEEEEREEVGLDKRFGFSKELQSRIELGEEIGRGHFGYTCSAKFKKGELKDQEVAVKVIPKSKMTSAISIEDVRREVKILRALSGHQNLVQFYDAFEDNANVYIVMELCGGGELLDRILARGGKYSEDDAKAVLIQILNVVAFCHLQGVVHRDLKPENFLYTSKEENSMLKVIDFGLSDFVRPDERLNDIVGSAYYVAPEVLHRSYTTEADVWSIGVIAYILLCGSRPFWARTESGIFRAVLKADPSFDEPPWPSLSFEAKDFVKRLLYKDPRKRMTASQALMHPWIAGYKKIDIPFDILIFKQIKAYLRSSSLRKAALMALSKTLTTDELLYLKAQFAHLAPNKNGLITLDSIRLALATNATEAMKESRIPDFLALLNGLQYKGMDFEEFCAASISVHQHESLDCWEQSIRHAYELFEMNGNRVIVIEELASELGVGSSIPVHTILNDWIRHTDGKLSFLGFVKLLHGVSTRQSLAKTR

SEQ ID NO: 4400 - DNA, 1626 bp, Arabidopsis thaliana
  CDS (1)..(1626)
atgggaaattgttttgccaagaaccatggattgatgaagccacagcaaaatggtaataccactagatcagttgaagtaggagtaaccaaccaagatccaccgtcgtatactccacaagcgagaaccactcagcagccggagaaaccaggttccgtgaatagtcaaccaccaccgtggagggcggcggctgcagcaccaggactaagtcccaagaccaccactaagagcaattcaatactagagaacgctttcgaagacgtgaagctcttttacacattgggtaaagagctaggtcgtggtcaatttggggtaacgtatctgtgcacagagaattccacggggaagaagtacgcttgcaaatcgatctcgaagaagaagctggtgactaaagctgataaggatgatatgaggagagagattcagataatgcagcatttgagtgggcagcctaatattgtggagtttaaaggagcttatgaggatgagaaagctgtgaatttggtgatggagctttgtgctggtggtgaattgtttgatagaatcattgctaagggacattacactgagagagctgctgcttctgtttgtagacagattgtgaatgttgtcaagatttgtcatttcatgggtgtgttgcatagagacttgaagcctgagaatttcttgctctctagcaaagatgagaaggctttgatcaaggctactgatttcggattgtctgtctttattgaagagggaaaagtatatagagatattgttgggagtgcatactatgttgctccagaagtcttacgtcgcagatatgggaaagaagttgatatctggagtgctggaatcatcttatacattctactcagcggtgtgcccccgttttgggctgagactgagaaaggaatatttgatgctatattggaaggccatatcgactttgagagccaaccatggccgtcaatctccagcagtgccaaagatttggtacgtagaatgttgactgcggatccaaaaaggcggatttctgctgctgatgttcttcagcatccatggcttagagaaggtggagaagcatcagacaagccaattgacagtgctgttctctcaaggatgaaacaatttagagcaatgaataagctaaagaaacttgctttaaaggtcatagcggagaatattgacacggaagaaatccaaggattgaaggcaatgtttgctaacatagacactgacaacagtggcacaatcacttatgaagaactgaaagaaggattagccaaattgggatctaaactcacagaggcagaagtgaaacagctcatggatgctgctgatgttgatgggaacgggtccatcgactacatagagtttattacagcaacaatgcataggcacaggcttgaaagtaatgagaatctttacaaagctttccagcattttgacaaagacagcagcggatacattacaatagacgaactggaatctgcattgaaggaatatggaatgggagatgatgcaacaatcaaagaggttttgtcagatgtcgactccgataacgatggtagaatcaactatgaagagttctgcgcaatgatgagaagtggaaatccacaacaacaacaacctcggctgttctag

SEQ ID NO: 4401 - protein, 541 aa, Arabidopsis thaliana
MGNCFAKNHGLMKPQQNGNTTRSVEVGVTNQDPPSYTPQARTTQQPEKPGSVNSQPPPWRAAAAAPGLSPKTTTKSNSILENAFEDVKLFYTLGKELGRGQFGVTYLCTENSTGKKYACKSISKKKLVTKADKDDMRREIQIMQHLSGQPNIVEFKGAYEDEKAVNLVMELCAGGELFDRIIAKGHYTERAAASVCRQIVNVVKICHFMGVLHRDLKPENFLLSSKDEKALIKATDFGLSVFIEEGKVYRDIVGSAYYVAPEVLRRRYGKEVDIWSAGIILYILLSGVPPFWAETEKGIFDAILEGHIDFESQPWPSISSSAKDLVRRMLTADPKRRISAADVLQHPWLREGGEASDKPIDSAVLSRMKQFRAMNKLKKLALKVIAENIDTEEIQGLKAMFANIDTDNSGTITYEELKEGLAKLGSKLTEAEVKQLMDAADVDGNGSIDYIEFITATMHRHRLESNENLYKAFQHFDKDSSGYITIDELESALKEYGMGDDATIKEVLSDVDSDNDGRINYEEFCAMMRSGNPQQQQPRLF

SEQ ID NO: 4402 - DNA, 1785 bp, Arabidopsis thaliana
  CDS (1)..(1785)
atgggccactgttacagccggaacatttccaccgtcgacgacgacgacgaaatcccctccgcaaccgctcagttaccacatcggtcacaccaaaaccaccaccagacttcatcatcatcatcaattccccagtctccggctacttcagaagtcaacccttacaacatcagcccatttcaaagcccgttaccggcgggagtagctccatctccggcgagaactccgggaagaaaattcaaatggccattcccgcctccttcacctgcgaaaccgattatggcggctttaagacggcgacgaggtacagcaccacatcctcgggatggtccgatccctgaggatagtgaagccggcggaagcggcggcggaatcggagaaaggttagataaaaatttcggatttgcgaagaattttgaaggtaagtatgagcttgggagagaagtaggtcgagggcattttggtcatacttgttgggctaaagctaagaaagggaagatcaaaggtcaaacagttgcagtcaaaatcatctctaaatctaagatgacatcagctttgtcgattgaagatgttcgtcgagaggtgaagttgttgaaagctttgtctgggcatagtcacatggttaagttctatgatgtgtttgaggattcggataatgtctttgttgttatggagttatgtgaaggtggagagctattggacagtattttggcgagaggtggtcgatatccggaagcagaagctaagcgtattcttgtacagattttatctgcaactgcttttttccatcttcaaggtgttgtgcaccgtgatctgaaaccggagaattttctctttacaagcaaaaatgaggatgcagtactcaaggttatagattttggcttgtctgattacgctagatttgatcagcgtctcaacgatgtggtaggaagtgcatactatgttgcacctgaagtacttcacagatcctatagcaccgaagcagatatatggagcattggtgtcatatcttacatattactctgtggaagtagacctttttacggaagaaccgagtctgcaatttttcgttgtgtgcttagagcgaacccgaatttcgacgatttgccgtggccttcaatatctcctattgccaaagactttgtgaaaaggcttttgaataaagaccataggaaaagaatgacagctgctcaagctttagctcatccatggcttcgagatgaaaatcctggtttacttctggatttctctatctacaaattggtgaagtcttatattcgtgcatcgcctttccgaagagcagcacttaagtctctatccaaagctatacccgaagaggaactcgtgttccttaaagcacagtttatgctcttggagccagaagatggaggcttgcatcttcacaatttcaccacggctctgacaagatatgctacggatgctatgatcgaatctagacttcctgacatattaaacatgatgcaaccattggcacataagaaacttgattttgaagagttttgtgcggcttcagtcagcgtttatcaacttgaggctcttgaagaatgggaacagatcgcaacggtagcctttgaacactttgaaagtgaaggaagccgagccatttcggtccaagaactcgccgaggagatgagtttgggaccaaatgcgtatcctctgctcaaggattggatccgtagtttagatgggaagctgaatttcttaggttacgccaagttcttgcacggtgtgactgttcgaagctcgagctcgagaccaatgagatga

SEQ ID NO: 4403 - protein, 594 aa, Arabidopsis thaliana
MGHCYSRNISTVDDDDEIPSATAQLPHRSHQNHHQTSSSSSIPQSPATSEVNPYNISPFQSPLPAGVAPSPARTPGRKFKWPFPPPSPAKPIMAALRRRRGTAPHPRDGPIPEDSEAGGSGGGIGERLDKNFGFAKNFEGKYELGREVGRGHFGHTCWAKAKKGKIKGQTVAVKIISKSKMTSALSIEDVRREVKLLKALSGHSHMVKFYDVFEDSDNVFVVMELCEGGELLDSILARGGRYPEAEAKRILVQILSATAFFHLQGVVHRDLKPENFLFTSKNEDAVLKVIDFGLSDYARFDQRLNDVVGSAYYVAPEVLHRSYSTEADIWSIGVISYILLCGSRPFYGRTESAIFRCVLRANPNFDDLPWPSISPIAKDFVKRLLNKDHRKRMTAAQALAHPWLRDENPGLLLDFSIYKLVKSYIRASPFRRAALKSLSKAIPEEELVFLKAQFMLLEPEDGGLHLHNFTTALTRYATDAMIESRLPDILNMMQPLAHKKLDFEEFCAASVSVYQLEALEEWEQIATVAFEHFESEGSRAISVQELAEEMSLGPNAYPLLKDWIRSLDGKLNFLGYAKFLHGVTVRSSSSRPMR

SEQ ID NO: 4404 - DNA, 1806 bp, Arabidopsis thaliana
  CDS (1)..(1806)
atgggtctatgtacttcgaaaccgaattcatctaattccgatcaaactccggcgaggaatagtccacttccggcgtctgaatccgtcaagccttcgagctcttccgttaatggtgaagatcagtgtgtaacaacaacgaacaatgaaggcaaaaagtctccgtttttccctttttatagtccaagtccagctcactatttcttctccaagaagactccggcgagatctccggcgactaattcgactaattcgactccgaagcgattctttaaacggccgtttcctcctccgtctccggctaaacatatcagagctgttttagcgagaaggcatggttctgtgaagcctaattcgtcggcgatccctgaaggtagtgaagctgaaggaggtggtgttggattggataaaagctttggtttttccaagagttttgcgagtaagtatgagcttggtgatgaagttggtcgtggtcattttggttatacttgtgctgctaagtttaagaagggtgataataaaggtcaacaagtcgcggttaaagtcattcccaaagcaaagatgacgacggctattgcaattgaagatgtgagaagggaagtgaagatattgagggctttgtctggtcataacaatcttcctcatttctatgatgcttatgaggatcatgataatgtctatatagtgatggaactatgtgaaggaggagagcttttggatagaatactttcaagaggtgggaagtacacagaggaggatgcaaagaccgttatgatacaaatattgaatgtggttgctttttgtcatctgcaaggcgttgtacacagagatcttaaaccagagaattttctttttacctcaaaagaagacacctctcaattgaaggcaatagatttcggtttgtcagattacgtgagaccagatgagaggctcaatgacattgttggtagtgcatactatgtagcacctgaagttctgcatagatcttacagtacagaagctgatatttggagtgttggtgtgattgtatatattctattgtgtggaagccgaccgttttgggctaggacagaatcaggaatctttcgtgctgttctaaaagctgatccaagttttgatgaccctccttggcctttgttatcttcagaggcaagagattttgtaaagcggttgctaaacaaagatccgcgtaaaagattaacagctgctcaagccttaagtcatccatggataaaggactcaaacgacgcaaaggttccaatggatattctggttttcaaacttatgagagcttatttacgatcatcatctctccgtaaagctgcattaagagctttatcgaaaacacttacggttgatgaactgttttatctgagagagcagtttgctttgttagaacctagtaagaacggaaccataagtctagaaaacatcaaatcagctctgatgaaaatggcaacagatgcgatgaaggactcacgtattccagagttcttaggacaactgagtgctcttcaatatagaagaatggactttgaggaattctgtgcagcggcattgagtgttcaccagctagaagctcttgatcgatgggaacaacacgctcgttgtgcttatgagcttttcgaaaaggaagggaaccgaccaatcatgatcgatgaactcgcttcggaacttggtcttggcccttctgtaccggttcacgcagtgcttcacgattggcttagacataccgatgggaagcttagctttctcggatttgtgaaattgctacatggtgtgtctagccgcacgatcaaagctcattag

SEQ ID NO: 4405 - protein, 601 aa, Arabidopsis thaliana
MGLCTSKPNSSNSDQTPARNSPLPASESVKPSSSSVNGEDQCVTTTNNEGKKSPFFPFYSPSPAHYFFSKKTPARSPATNSTNSTPKRFFKRPFPPPSPAKHIRAVLARRHGSVKPNSSAIPEGSEAEGGGVGLDKSFGFSKSFASKYELGDEVGRGHFGYTCAAKFKKGDNKGQQVAVKVIPKAKMTTAIAIEDVRREVKILRALSGHNNLPHFYDAYEDHDNVYIVMELCEGGELLDRILSRGGKYTEEDAKTVMIQILNVVAFCHLQGVVHRDLKPENFLFTSKEDTSQLKAIDFGLSDYVRPDERLNDIVGSAYYVAPEVLHRSYSTEADIWSVGVIVYILLCGSRPFWARTESGIFRAVLKADPSFDDPPWPLLSSEARDFVKRLLNKDPRKRLTAAQALSHPWIKDSNDAKVPMDILVFKLMRAYLRSSSLRKAALRALSKTLTVDELFYLREQFALLEPSKNGTISLENIKSALMKMATDAMKDSRIPEFLGQLSALQYRRMDFEEFCAAALSVHQLEALDRWEQHARCAYELFEKEGNRPIMIDELASELGLGPSVPVHAVLHDWLRHTDGKLSFLGFVKLLHGVSSRTIKAH

SEQ ID NO: 4406 - DNA, 1587 bp, Arabidopsis thaliana
  CDS (1)..(1587)
atgggaaactgttgcagatctcccgcagcagttgctagagaagacgtgaaatccaactattccggccacgatcacgcccgcaaagacgccgccggcggtaaaaaatcggcgccgattcgagttctaagcgatgttcccaaggaaaacatcgaggaccgttacttactcgacagagaactcggccgcggcgagtttggtgtcacttacctctgtatcgagaggtcctcgcgtgacctactcgcttgcaaatcgatctccaagaggaagcttagaactgctgtggatattgaagatgttaaaagagaagtagcgattatgaagcatttgcctaagagttcgagtattgttactttgaaagaagcttgtgaggatgataatgctgtgcatttggttatggagctttgtgaaggtggcgagcttttcgatcggattgttgcgagaggtcattatacggagcgtgctgctgctggtgttactaagactattgttgaggttgtgcagctttgtcataagcatggtgtgattcatagagatttgaagcccgagaactttttgtttgctaataagaaggagaactcgcctttgaaagctattgattttggattgtcgattttcttcaagccaggtgagaaattctctgagattgttgggagtccatattacatggcacctgaggtgcttaagcggaattatggacccgaaatagatatttggagtgctggagtgattctttatattctcttgtgtggagttcctccgttctgggcagagtcagaacagggagttgctcaggctattctgcgtggagtaattgattttaagagggaaccgtggccaaacatttctgagaccgctaagaatctagtcagacaaatgttagagcctgatccaaagcgtcggctgactgcaaagcaagtgcttgagcacccatggattcagaacgcaaagaaagctcccaatgttcctcttggagatgttgtgaagtcgaggttgaagcaattttcagtgatgaaccgattcaagagaaaagctttaagggttattgccgaatttttatctacggaagaagtagaagacatcaaagtaatgttcaacaagatggatactgataatgatggtatagtttccattgaggagttgaaagccggacttcgtgattttagtacacagctagcggaatcagaagttcagatgcttattgaagcggtggatactaaaggaaaaggaactctagactatggagaatttgtagcagtgtctctccacctgcaaaaggtagcaaacgatgagcatctccgcaaagccttctcttactttgacaaggatggaaatgggtacattttgccccaggagctttgtgacgccttaaaggaagatggaggagatgactgtgtggatgtcgccaatgatatattccaagaagttgacacagacaaggatgggagaataagctacgaagagtttgcggcaatgatgaaaacaggaacggattggagaaaggcgtctcgtcattactcaagagggagattcaatagcctaagcatcaagctaatgaaggacgggtctttgaacctaggcaacgaatag

SEQ ID NO: 4407 - protein, 528 aa, Arabidopsis thaliana
MGNCCRSPAAVAREDVKSNYSGHDHARKDAAGGKKSAPIRVLSDVPKENIEDRYLLDRELGRGEFGVTYLCIERSSRDLLACKSISKRKLRTAVDIEDVKREVAIMKHLPKSSSIVTLKEACEDDNAVHLVMELCEGGELFDRIVARGHYTERAAAGVTKTIVEVVQLCHKHGVIHRDLKPENFLFANKKENSPLKAIDFGLSIFFKPGEKFSEIVGSPYYMAPEVLKRNYGPEIDIWSAGVILYILLCGVPPFWAESEQGVAQAILRGVIDFKREPWPNISETAKNLVRQMLEPDPKRRLTAKQVLEHPWIQNAKKAPNVPLGDVVKSRLKQFSVMNRFKRKALRVIAEFLSTEEVEDIKVMFNKMDTDNDGIVSIEELKAGLRDFSTQLAESEVQMLIEAVDTKGKGTLDYGEFVAVSLHLQKVANDEHLRKAFSYFDKDGNGYILPQELCDALKEDGGDDCVDVANDIFQEVDTDKDGRISYEEFAAMMKTGTDWRKASRHYSRGRFNSLSIKLMKDGSLNLGNE

SEQ ID NO: 4408 - DNA, 1734 bp, Arabidopsis thaliana
  CDS (1)..(1734)
atggggctgtgtcatgggaaacctatcgaacaacaatcgaagaatctcccaatctccaatgaaatcgaagagacacctaagaattcatctcagaaggcgaaatcttcaggctttccgttttatagtccaagccctttacctagtctcttcaaaacctcacctgctgtgtcatcctccagcgtgagctccacgccacttcgtatctttaagcgacctttcccacctccatcaccagctaagcatatacgagctctcctcgcgcgtcgtcacggttctgttaagcccaatgaagcttcgatccctgaaggtagtgaatgtgaggttggcttggacaagaaatttggtttctctaagcagtttgcttcacactacgagattgacggtgaggtgggtcgagggcattttggttatacttgctctgctaaggggaaaaaaggtagcttgaaaggtcaagatgtggctgtcaaagttattcccaaatccaagatgactacggcaattgcaattgaggatgttagaagagaagtgaagatattgcgggctttaactggtcacaagaacctagtccagttctatgacgccttcgaagatgatgaaaatgtttacattgtcatggagttatgccaaggcggtgaactcttggacaaaatacttcaaaggggaggcaaatactcagaagtagatgctaaaaaagtaatgattcagattcttagtgtagtagcctactgtcatcttcaaggcgtggttcaccgtgacctcaaacctgagaattttctcttcaccacaaaggatgagtcttcccctttgaaagccattgattttggtctctccgactatgtcaggccagatgagaggttgaatgacattgtaggaagtgcttattacgtggcccctgaagttttacaccgtacatatggaactgaggcagatatgtggagtattggagtgattgcttatatactactctgtggtagccggcccttttgggcccgttctgaatctggaatctttagagctgttcttaaagcagaacccaatttcgaagaagctccttggccatctctttcacctgacgctgtagattttgtgaaacgtttgttaaataaagattaccgtaagagactaactgctgcacaggctttatgccatccgtggctggttggctcacatgaattaaagataccatctgatatgatcatttacaagctcgtaaaagtatacataatgtcgtcttctttgagaaaatcggctttagcggctcttgccaaaactttaacagtaccgcagctgacttatttgcaagagcagtttaatctgttaggaccaagcaaaaacggatatatctcgatgcagaattataaaacagcaatcttgaagagctccacagaagctacaaaggattcacgagtcttggattttgtacacatgattagttgtcttcagtataagaaactagactttgaagagttttgcgcttcagctttaagtgtatatcagctagaagcaatggagacttgggagcaacatgcacgccgtgcatatgagttgtatgagaaggatgggaacagagtcatcatgatcgaagaacttgccacggaactcggactaggtccatcggtgcctgttcatgttgttcttcaagattggataagacattctgatgggaagctaagtttcttgggttttgtcagactcttacacggcgtctcctctcgtacattgcagaaagcgtag

SEQ ID NO: 4409 - protein, 577 aa, Arabidopsis thaliana
MGLCHGKPIEQQSKNLPISNEIEETPKNSSQKAKSSGFPFYSPSPLPSLFKTSPAVSSSSVSSTPLRIFKRPFPPPSPAKHIRALLARRHGSVKPNEASIPEGSECEVGLDKKFGFSKQFASHYEIDGEVGRGHFGYTCSAKGKKGSLKGQDVAVKVIPKSKMTTAIAIEDVRREVKILRALTGHKNLVQFYDAFEDDENVYIVMELCQGGELLDKILQRGGKYSEVDAKKVMIQILSVVAYCHLQGVVHRDLKPENFLFTTKDESSPLKAIDFGLSDYVRPDERLNDIVGSAYYVAPEVLHRTYGTEADMWSIGVIAYILLCGSRPFWARSESGIFRAVLKAEPNFEEAPWPSLSPDAVDFVKRLLNKDYRKRLTAAQALCHPWLVGSHELKIPSDMIIYKLVKVYIMSSSLRKSALAALAKTLTVPQLTYLQEQFNLLGPSKNGYISMQNYKTAILKSSTEATKDSRVLDFVHMISCLQYKKLDFEEFCASALSVYQLEAMETWEQHARRAYELYEKDGNRVIMIEELATELGLGPSVPVHVVLQDWIRHSDGKLSFLGFVRLLHGVSSRTLQKA

SEQ ID NO: 4410 - DNA, 1617 bp, Arabidopsis thaliana
  CDS (1)..(1617)
atgggtaattgttgcggaacagcaggatcattggctcaaaacgataacaaacccaaaaaaggaaggaagaagcaaaaccctttctcgattgattacggtcttcaccacggtggtggagatggaggtggaagacctcttaagcttatcgttttgaatgatccaacaggtcgtgagatcgagtctaaatacacgttggggagagagctaggtcgtggagaattcggtgttacgtatctatgtactgataaggagacagacgacgtttttgcttgtaaatcgattttgaagaagaagctgaggacagctgttgatattgaagatgttaggagagaggttgagattatgaggcatatgcctgagcatcctaatgttgttactttgaaggagacttatgaggatgagcatgctgttcatttggttatggagctttgtgaaggtggtgaattgtttgataggattgttgctagagggcattatactgagagagctgctgctgctgtcactaagaccatcatggaagttgttcaggtgtgtcataagcatggggtaatgcacagggacctgaaacctgagaacttcttgtttggaaacaagaaggagactgcacctcttaaggcgattgattttggtctctctgttttctttaaaccaggcgagaggtttaacgaaatcgttggtagtccgtactacatggctcccgaggtgctaaaacggaattatggtccagaagttgatatttggagtgcaggtgtaattctttacatactgctatgtggtgtcccgcctttctgggcagaaactgaacaaggagttgcacaagcaattattcgatctgtactagacttcagaagggacccatggcccaaggtttctgaaaacgcaaaagaccttatcaggaaaatgcttgatcctgaccaaaagcgtcgtcttacagctcaacaagtcctagatcacccgtggttacagaatgcaaagacagcccccaatgtatcattgggtgaaacagtgagggcaaggttgaagcagttcaccgtcatgaacaagctcaagaaacgagcactcagggttattgctgagcatttatcagatgaagaagcttcaggtataagagaagggttccaaataatggacacaagccaaagagggaagattaacatcgacgagcttaaaatcgggttgcagaaacttggtcatgccattccgcaagatgatttacaaattttgatggatgctggagacatcgatagagatggatatttggactgtgacgagtttattgccatatcggtacacctaaggaaaatgggcaatgacgagcatctcaagaaagcgtttgcgttctttgatcaaaacaataacggatatatcgaaatagaggagttaagggaagccttgtctgacgaacttggtacaagtgaagaagttgttgatgccattatccgtgatgttgacaccgacaaggatggaagaataagttacgaagagtttgtaacgatgatgaaaacaggaacagattggagaaaagcttcgagacagtactcgagagaacggtttaacagtatcagtctcaaactgatgcaagatgcgtcgttgcaggtcaatggtgatacaagatga

SEQ ID NO: 4411 - protein, 538 aa, Arabidopsis thaliana
MGNCCGTAGSLAQNDNKPKKGRKKQNPFSIDYGLHHGGGDGGGRPLKLIVLNDPTGREIESKYTLGRELGRGEFGVTYLCTDKETDDVFACKSILKKKLRTAVDIEDVRREVEIMRHMPEHPNVVTLKETYEDEHAVHLVMELCEGGELFDRIVARGHYTERAAAAVTKTIMEVVQVCHKHGVMHRDLKPENFLFGNKKETAPLKAIDFGLSVFFKPGERFNEIVGSPYYMAPEVLKRNYGPEVDIWSAGVILYILLCGVPPFWAETEQGVAQAIIRSVLDFRRDPWPKVSENAKDLIRKMLDPDQKRRLTAQQVLDHPWLQNAKTAPNVSLGETVRARLKQFTVMNKLKKRALRVIAEHLSDEEASGIREGFQIMDTSQRGKINIDELKIGLQKLGHAIPQDDLQILMDAGDIDRDGYLDCDEFIAISVHLRKMGNDEHLKKAFAFFDQNNNGYIEIEELREALSDELGTSEEVVDAIIRDVDTDKDGRISYEEFVTMMKTGTDWRKASRQYSRERFNSISLKLMQDASLQVNGDTR

SEQ ID NO: 4412 - DNA, 1458 bp, Arabidopsis thaliana
  CDS (1)..(1458)
atgggttgcttcagcagtaaggagctacaacaatcgaaaagaaccattcttgagaaacctttagttgacatcacaaagatttatatcctcggggaggaattgggtagaggtaatttcggtctaacccgaaagtgcgttgagaaatctacaggtaagacattcgcctgcaaaaccattctcaagacaaagctaaaggacgaagaatgtgaagaagacgtgaagagagagattcggattatgaagcaattgtctggagaaccaaacattgtcgagttcaagaatgcttacgaggacaaagattctgtacatattgttatggaatattgtggtggtggagagttatacgacaagatcctagctttgtacgatgttgggaagtcttactcggagaaagaagctgctggaatcattaggtcgattgtgaatgttgtgaagaattgccattacatgggtgtgatgcatcgtgatctaaagcctgagaatttcttgcttacgagtaacgatgacaatgctacggtcaaagttattgactttgggtgttctgtgttcattgaagaaggaaaagtataccaggatttagctgggagtgattactacattgctcctgaagtgttacagggaaattacggtaaagaagcggacatttggagtgcagggattatattatacatcctactctgtggcaaatctccctttgtgaaagaacctgagggacagatgttcaatgagattaagagtttggaaatcgactacagcgaggaaccatggcctcttagagattcaagggcaatacatcttgtcaagaggatgcttgatagaaaccccaaggaacgaatctctgctgcagaggttcttggacatccttggatgaaagaaggagaagcttcggataagcctattgatggcgttgttttatcccgtttgaagagatttcgagatgcgaacaagtttaagaaggtagttctaaagtttattgcagcaaatctatcagaagaggaaatcaaaggtcttaagacactgttcaccaacatagatactgacaaaagtggaaatattactcttgaagaactcaaaacaggtcttactagacttggatctaacctctctaaaaccgaagtggagcaactcatggaagctgctgatatggatggtaatggaacaatcgacatagacgagtttatttctgcaacgatgcatagatacaaattggatagagatgaacatgtgtacaaagcattccaacactttgacaaagacaacgacgggcacataacgaaggaagagttggagatggcgatgaaggaggatggtgcgggagatgaaggtagcatcaaacaaatcatagccgatgctgataccgataatgatggaaaaataaactttgaggaattccgcacaatgatgagaactgagagcagcttgcagccagaaggggaacttcttccgatcatcaattga

SEQ ID NO: 4413 - protein, 485 aa, Arabidopsis thaliana
MGCFSSKELQQSKRTILEKPLVDITKIYILGEELGRGNFGLTRKCVEKSTGKTFACKTILKTKLKDEECEEDVKREIRIMKQLSGEPNIVEFKNAYEDKDSVHIVMEYCGGGELYDKILALYDVGKSYSEKEAAGIIRSIVNVVKNCHYMGVMHRDLKPENFLLTSNDDNATVKVIDFGCSVFIEEGKVYQDLAGSDYYIAPEVLQGNYGKEADIWSAGIILYILLCGKSPFVKEPEGQMFNEIKSLEIDYSEEPWPLRDSRAIHLVKRMLDRNPKERISAAEVLGHPWMKEGEASDKPIDGVVLSRLKRFRDANKFKKVVLKFIAANLSEEEIKGLKTLFTNIDTDKSGNITLEELKTGLTRLGSNLSKTEVEQLMEAADMDGNGTIDIDEFISATMHRYKLDRDEHVYKAFQHFDKDNDGHITKEELEMAMKEDGAGDEGSIKQIIADADTDNDGKINFEEFRTMMRTESSLQPEGELLPIIN

SEQ ID NO: 4414 - DNA, 1596 bp, Arabidopsis thaliana
  CDS (1)..(1596)
atgggttgcttcagcagtaaacaccggaaaactcaaaacgacggcggagaaaaatcaatcccgatcaatccagttcaaacccatgtagtccccgagcatcgtaaacctcaaaccccaacaccaaaacccatgactcaaccaatccatcagcagatttcaacaccgtcttcaaatccagtctcagttcgagatccagatacgattttaggtaaaccattcgaagacatcaggaaattttacagcttggggaaagaattaggtcgaggtcaatttgggattacgtatatgtgtaaagagattggtactggtaacacttatgcttgcaaatcgattcttaagaggaagctaattagtaagcaagataaagaagatgtgaagagagagattcagataatgcagtatttgtctggacaacctaacattgttgagatcaaaggtgcttatgaagatagacaatctatacatttggttatggagttgtgtgctggtggtgagttgtttgataggattatagctcaaggtcattactctgagagagctgctgctggtatcattaggtctattgtcaatgttgttcagatttgtcattttatgggtgtggttcatcgagatctcaagcctgagaatttcttgctttcgagtaaagaggagaatgctatgcttaaagctactgatttcggtttgtccgtcttcatcgaagaaggaaaagtttaccgggatatagttgggagtgcttactacgttgctccagaagtattaaggcgaagttacggaaaagaaatcgacatttggagtgcaggtgtcattttatacatcctactcagcggtgtacctcctttttgggccgaaaatgagaaaggaatattcgatgaggtcataaaaggcgaaattgattttgtaagtgagccatggccttctatatctgaaagcgcgaaagatcttgttaggaagatgctaaccaaagacccgaagagacgaatcacggctgcacaggttcttgaacatccttggatcaaagggggagaagcaccagacaagcctattgatagcgctgtgttatcccgcatgaagcaattccgagcaatgaacaagcttaagaagctagctctaaaggttatcgcggagagtctatcagaagaggagattaaaggtcttaaaaccatgtttgcgaatatagataccgacaaaagcgggacaatcacttatgaagaactcaaaactgggctaactagacttgggtctagactctcggaaactgaagttaagcaactcatggaagccgctgacgtcgatggtaatggaacaatcgactactacgagtttatctctgcgacaatgcatagatacaaattagatcgagatgagcatgtatacaaagcattccaacactttgataaagacaacagcgggcacataactagagatgagttggaaagtgccatgaaggaatatggaatgggagatgaagctagcatcaaagaagttatatccgaagttgataccgacaatgatggaagaataaactttgaagaattttgcgcgatgatgagaagtggcagcacgcagccacaggggaaactgcttccattccattga

SEQ ID NO: 4415 - protein, 531 aa, Arabidopsis thaliana
MGCFSSKHRKTQNDGGEKSIPINPVQTHVVPEHRKPQTPTPKPMTQPIHQQISTPSSNPVSVRDPDTILGKPFEDIRKFYSLGKELGRGQFGITYMCKEIGTGNTYACKSILKRKLISKQDKEDVKREIQIMQYLSGQPNIVEIKGAYEDRQSIHLVMELCAGGELFDRIIAQGHYSERAAAGIIRSIVNVVQICHFMGVVHRDLKPENFLLSSKEENAMLKATDFGLSVFIEEGKVYRDIVGSAYYVAPEVLRRSYGKEIDIWSAGVILYILLSGVPPFWAENEKGIFDEVIKGEIDFVSEPWPSISESAKDLVRKMLTKDPKRRITAAQVLEHPWIKGGEAPDKPIDSAVLSRMKQFRAMNKLKKLALKVIAESLSEEEIKGLKTMFANIDTDKSGTITYEELKTGLTRLGSRLSETEVKQLMEAADVDGNGTIDYYEFISATMHRYKLDRDEHVYKAFQHFDKDNSGHITRDELESAMKEYGMGDEASIKEVISEVDTDNDGRINFEEFCAMMRSGSTQPQGKLLPFH

SEQ ID NO: 4416 - DNA, 1563 bp, Arabidopsis thaliana
  CDS (1)..(1563)
atgggttgtttcagcagtaaacaccggaaaactcaaaacgacggcggcggagaaagatcaattccgataattccagttcaaacccatatcgttgatcaagtccccgatcatcgtaaacctcaaatcccatcaccatcgatacccatctcagttcgagatccagagacgattttaggtaaaccattcgaagacatcaggaaattttacagcttggggagagaattaggtcgaggtggtttagggattacgtatatgtgcaaagagattgggactgggaacatttatgcttgcaaatcgattctcaagaggaagctaattagtgagctgggtagagaagatgtgaagacagagattcagatcatgcagcatttgtctggacaaccaaacgttgttgagatcaaaggttcttatgaagacagacattctgtacatttggtaatggaattatgtgccggtggagagttgtttgataggattatagctcaaggtcattactctgagagagctgctgctggtaccattaagtcaattgtggatgttgttcagatttgtcatttgaatggtgtgattcatcgagatctcaagcctgagaatttcttgttctcgagtaaggaggagaatgcaatgcttaaagtaaccgatttcgggttgtccgcgttcatcgaagaaggaaaaatttacaaggatgtggttgggagtccttactacgttgctcctgaagtattaaggcagagttacggaaaagaaatcgacatttggagtgcaggtgttattttatacatcctactctgcggtgtacctcctttttgggccgacaatgaagaaggagtattcgttgaaattctaaaatgcaaaattgattttgtacgtgagccatggccttctatatctgacagcgcgaaagatcttgttgagaagatgctaaccgaagaccctaagagacgaatcactgctgcacaagttcttgaacatccttggatcaaagggggagaagcaccggaaaagcctattgatagcactgtgttatcacgtatgaagcaattccgagcaatgaacaagcttaagaagctagccctaaaggttagcgcggtgagtctatccgaagaagagatcaaaggtcttaaaaccttgtttgcgaatatggataccaatagaagcgggacaatcacttatgaacaactccaaactgggctaagtagacttagatctagactctctgaaactgaagttcagcaactcgttgaagcgtctgatgtggatggtaatggaacaattgactactatgagtttatctctgcgacaatgcatagatacaaattacatcacgatgagcacgtacacaaagcattccaacacttagataaagacaaaaatgggcacataactagggatgagttggaaagtgccatgaaggaatatggaatgggagatgaagctagcatcaaagaagttatatccgaagttgacaccgacaatgatggaaaaataaactttgaggaatttcgtgcgatgatgagatgtggcaccacacaaccaaaagggaaacagtatccattccactga

SEQ ID NO: 4417 - protein, 520 aa, Arabidopsis thaliana
MGCFSSKHRKTQNDGGGERSIPIIPVQTHIVDQVPDHRKPQIPSPSIPISVRDPETILGKPFEDIRKFYSLGRELGRGGLGITYMCKEIGTGNIYACKSILKRKLISELGREDVKTEIQIMQHLSGQPNVVEIKGSYEDRHSVHLVMELCAGGELFDRIIAQGHYSERAAAGTIKSIVDVVQICHLNGVIHRDLKPENFLFSSKEENAMLKVTDFGLSAFIEEGKIYKDVVGSPYYVAPEVLRQSYGKEIDIWSAGVILYILLCGVPPFWADNEEGVFVEILKCKIDFVREPWPSISDSAKDLVEKMLTEDPKRRITAAQVLEHPWIKGGEAPEKPIDSTVLSRMKQFRAMNKLKKLALKVSAVSLSEEEIKGLKTLFANMDTNRSGTITYEQLQTGLSRLRSRLSETEVQQLVEASDVDGNGTIDYYEFISATMHRYKLHHDEHVHKAFQHLDKDKNGHITRDELESAMKEYGMGDEASIKEVISEVDTDNDGKINFEEFRAMMRCGTTQPKGKQYPFH

SEQ ID NO: 4418 - DNA, 1506 bp, Arabidopsis thaliana
  CDS (1)..(1506)
atggagaaaccaaaccctagaagaccctcaaacagtgttcttccatacgaaacaccaagattaagagatcactatctcctcggcaaaaagctaggccaaggccaatttggaacaacctatctctgtacagagaaatcatcatcagctaattacgcttgcaaatcaatcccaaaacgtaagcttgtatgtcgtgaagactacgaagatgtatggcgtgagattcagatcatgcatcatctctctgagcatcctaatgttgttagaatcaagggtacttatgaagactctgtttttgttcacattgttatggaagtttgtgaaggtggtgagctttttgatcggattgtttctaaagggtgttttagtgaacgtgaagctgctaagttgattaagactattcttggtgttgttgaggcttgtcattctcttggtgttatgcatagagatcttaagcctgagaatttcttgtttgatagtcccagtgatgatgctaagcttaaagctacagactttggtttgtctgtcttctacaagccagggcagtatctgtatgatgtagttggaagtccgtattatgttgcacctgaggttctgaagaaatgttatggaccagagatagacgtgtggagcgccggtgttatcttgtacatcttactaagtggggttcctcctttttgggcagaaaccgagtcaggaatctttaggcagatattgcaagggaagatagattttaaatctgatccgtggcctactatctcagaaggtgctaaagatttgatttacaaaatgctcgataggagccccaagaaacgtatttctgcacatgaagcattgtgtcacccttggattgttgatgaacatgctgcaccagacaagcctctcgacccagcagtcttgtcgcgacttaagcagttctcgcaaatgaataaaatcaagaaaatggccttacgagtaatcgcggagagactctcggaggaagagattggtggtctgaaggaattgttcaaaatgatagatacagacaacagtggaacaatcacctttgaagagcttaaagcaggtctaaagagagttggatctgaattgatggaatcagaaatcaagtctcttatggatgcggcggatatagacaacagtgggacaatagactacggtgaattcctagcagcgacattacatataaacaagatggagagagaagagaacttggtggttgcgttttcatactttgataaagatggtagcggttatatcaccattgacgagcttcaacaagcctgcacagagtttggtctctgtgacactcctcttgatgacatgatcaaagagattgatcttgataatgacgggaagattgatttctcagagtttactgctatgatgaagaaaggagatggtgttgggaggagcagaactatgaggaacaacttgaacttcaatatagctgaagcttttggagttgaggacacaagcagcactgctaaatctgatgattcaccaaagtaa

SEQ ID NO: 4419 - protein, 501 aa, Arabidopsis thaliana
MEKPNPRRPSNSVLPYETPRLRDHYLLGKKLGQGQFGTTYLCTEKSSSANYACKSIPKRKLVCREDYEDVWREIQIMHHLSEHPNVVRIKGTYEDSVFVHIVMEVCEGGELFDRIVSKGCFSEREAAKLIKTILGVVEACHSLGVMHRDLKPENFLFDSPSDDAKLKATDFGLSVFYKPGQYLYDVVGSPYYVAPEVLKKCYGPEIDVWSAGVILYILLSGVPPFWAETESGIFRQILQGKIDFKSDPWPTISEGAKDLIYKMLDRSPKKRISAHEALCHPWIVDEHAAPDKPLDPAVLSRLKQFSQMNKIKKMALRVIAERLSEEEIGGLKELFKMIDTDNSGTITFEELKAGLKRVGSELMESEIKSLMDAADIDNSGTIDYGEFLAATLHINKMEREENLVVAFSYFDKDGSGYITIDELQQACTEFGLCDTPLDDMIKEIDLDNDGKIDFSEFTAMMKKGDGVGRSRTMRNNLNFNIAEAFGVEDTSSTAKSDDSPK

SEQ ID NO: 4420 - DNA, 1665 bp, Arabidopsis thaliana
  CDS (1)..(1665)
atgggttgctttagcagcaaacaccgaaacacagagagtgatatcatcaatggcagcgtacagagctcaattccgacaaatcaacctgaaaaccatgtctctcgtgatgttctcaagcctcagaaacctccttctcctcaaattccgacaacaacccaatcaaatcatcatcaccaacaagaatccaaacccgttaatcagcaaatcgaaaagaagcacgttctaacacaaccattgaaaccaatcgtttttagagaaacagagacaattctaggcaaaccctttgaagaaataaggaaactttacacgttaggtaaagaattaggtcgaggccaatttggtataacctacacttgcaaagagaattcaacaggcaacacatacgcttgcaaatcaatactcaagaggaaactaacgagaaagcaagacatagatgatgtgaagagagagattcagataatgcagtatttgtctggacaagagaacattgttgagatcaaaggtgcttatgaagatagacaatcgatacatttggtgatggagttgtgtggtggtagtgaattgttcgataggattatagctcaaggacattactctgagaaagcagctgctggtgttattagatcggttttgaatgttgttcagatttgtcatttcatgggagtgattcatcgtgatctcaagcctgagaattttctgctcgctagtactgatgagaatgctatgcttaaagctactgattttggattgtctgtgttcattgaagaagggaaagtttatagggatatagtaggaagtgcttactatgttgctcctgaagtattaagaagaagttatggaaaagaaatcgatatttggagtgcagggattattctatacatcttgctttgtggtgtgcctcctttttggtctgaaactgagaaggggatatttaatgagattataaagggagaaattgattttgatagccaaccatggccttctatatctgagagtgctaaagatcttgtgaggaagttgcttactaaggaccctaagcaacgaatctcagcggcacaagctcttgaacatccttggatcagaggaggagaagcaccggacaagcctattgatagtgctgttttatctcggatgaagcaattccgagcaatgaataagcttaaaaagctagctctaaaggttattgcagagagtctctcggaagaggaaattaaaggtcttaaaaccatgtttgcgaatatggatactgacaaaagcggcacaatcacttatgaagaactgaaaaacgggctagctaaacttggctctaaactcactgaagctgaagtgaagcaactcatggaagccgctgatgtagatggtaatggaacaattgactacatcgaatttatctcagcaacgatgcatagatacagatttgatcgagatgaacacgtattcaaagccttccaatacttcgacaaagacaacagcgggtttatcacaatggatgagttggagtcagccatgaaagagtatggtatgggagatgaagctagcatcaaagaagtcatagcggaagtcgatacagataacgatggaagaataaactatgaagaattttgtgcgatgatgagaagtggtatcacactgccacaacaagggaaaattcttccagtccaatga

SEQ ID NO: 4421 - protein, 554 aa, Arabidopsis thaliana
MGCFSSKHRNTESDIINGSVQSSIPTNQPENHVSRDVLKPQKPPSPQIPTTTQSNHHHQQESKPVNQQIEKKHVLTQPLKPIVFRETETILGKPFEEIRKLYTLGKELGRGQFGITYTCKENSTGNTYACKSILKRKLTRKQDIDDVKREIQIMQYLSGQENIVEIKGAYEDRQSIHLVMELCGGSELFDRIIAQGHYSEKAAAGVIRSVLNVVQICHFMGVIHRDLKPENFLLASTDENAMLKATDFGLSVFIEEGKVYRDIVGSAYYVAPEVLRRSYGKEIDIWSAGIILYILLCGVPPFWSETEKGIFNEIIKGEIDFDSQPWPSISESAKDLVRKLLTKDPKQRISAAQALEHPWIRGGEAPDKPIDSAVLSRMKQFRAMNKLKKLALKVIAESLSEEEIKGLKTMFANMDTDKSGTITYEELKNGLAKLGSKLTEAEVKQLMEAADVDGNGTIDYIEFISATMHRYRFDRDEHVFKAFQYFDKDNSGFITMDELESAMKEYGMGDEASIKEVIAEVDTDNDGRINYEEFCAMMRSGITLPQQGKILPVQ

SEQ ID NO: 4422 - DNA, 1590 bp, Arabidopsis thaliana
  CDS (1)..(1590)
atgggccacagacacagcaagtccaaatcctccgatccgccaccgtcctcctcctcctcttcctccggcaacgtagtccaccatgttaaacctgccggagaacgccgcggatcatccggttccggaaccgtcggatcgtcaggctccggaacaggcggatctcgttccaccacatctactcagcagaatggtcggatcttaggtcggccgatggaggaagtacggagaacctatgagtttggtcgtgagcttggtcgtggccagtttggtgtcacgtacctcgtaactcacaaagagacgaaacaacaggtcgcttgcaagtcaatccctacgcgccgccttgttcacaaagacgacattgaagatgttcgccgtgaagtccagattatgcaccatctcagcggtcaccggaacatagtggacttgaagggagcctacgaggacagacactctgtgaatctgataatggagttgtgtgaaggaggggaattgttcgataggatcatttctaaaggtctttactcagagagagctgctgcggatttgtgtaggcagatggtgatggttgtgcatagttgtcattctatgggtgtaatgcaccgagacttgaagcccgaaaactttctctttcttagtaaagatgagaactcaccattgaaagctacagactttggtctctctgtcttcttcaagccaggtgataagtttaaggatcttgttggaagtgcatactatgttgccccagaagttctaaaacggaactatggaccagaggctgatatctggagtgctggtgtgattctatacatccttctcagtggtgttccgcctttctggggagaaaatgaaacggggatctttgatgccattcttcaagggcaacttgatttttcagctgatccatggccagcactatcagatggtgccaaagatcttgtgaggaaaatgttaaaatatgaccctaaagatcggcttacagctgcggaagtgctaaatcatccgtggattagagaagatggggaggcatcagacaaaccgcttgacaatgcggtgttatccaggatgaaacaattccgggcgatgaacaaactaaaaaaaatggccctgaaggttatcgctgagaacctttctgaagaagaaatcattggtcttaaagagatgttcaaatctctagacactgataacaatggaatagtcaccttggaggaattgagaaccggtctcccaaaacttggttcaaagatctctgaagctgaaataaggcagttaatggaagcagctgatatggatggagatggatcaattgattacttggagtttatatcagccacaatgcatatgaacagaatcgaacgtgaggatcacttgtacaccgcattccagttctttgacaatgacaacagcggctacataacaatggaagagctagagctagccatgaagaaatacaacatgggtgatgataaatccatcaaagagatcattgctgaagtagacaccgatcgtgacggaaaaatcaactacgaagaatttgtagcgatgatgaagaagggaaatccagaattggtgccaaaccgacgcagaatgtga

SEQ ID NO: 4423 - protein, 529 aa, Arabidopsis thaliana
MGHRHSKSKSSDPPPSSSSSSSGNVVHHVKPAGERRGSSGSGTVGSSGSGTGGSRSTTSTQQNGRILGRPMEEVRRTYEFGRELGRGQFGVTYLVTHKETKQQVACKSIPTRRLVHKDDIEDVRREVQIMHHLSGHRNIVDLKGAYEDRHSVNLIMELCEGGELFDRIISKGLYSERAAADLCRQMVMVVHSCHSMGVMHRDLKPENFLFLSKDENSPLKATDFGLSVFFKPGDKFKDLVGSAYYVAPEVLKRNYGPEADIWSAGVILYILLSGVPPFWGENETGIFDAILQGQLDFSADPWPALSDGAKDLVRKMLKYDPKDRLTAAEVLNHPWIREDGEASDKPLDNAVLSRMKQFRAMNKLKKMALKVIAENLSEEEIIGLKEMFKSLDTDNNGIVTLEELRTGLPKLGSKISEAEIRQLMEAADMDGDGSIDYLEFISATMHMNRIEREDHLYTAFQFFDNDNSGYITMEELELAMKKYNMGDDKSIKEIIAEVDTDRDGKINYEEFVAMMKKGNPELVPNRRRM

SEQ ID NO: 4424 - DNA, 1605 bp, Arabidopsis thaliana
  CDS (1)..(1605)
atgggtctctgtttctcgtctcctaaagccaccagacgtggcaccggtagtcggaaccctaatcctgattctccgacgcaggggaaggcgagtgagaaggttagtaataaaaacaagaagaatacgaagaagatccaattgaggcaccaaggagggatcccgtacggtaaacgcatcgattttgggtacgctaaggatttcgataaccgatacaccattgggaaattgctcggacatggccagtttggctttacctacgtcgccaccgataacaacaatggcaatcgcgttgcagtcaagagaatcgacaaggccaagatgactcaaccgattgaagtggaagatgtgaagcgagaggttaagatactacaagctttaggtgggcatgagaatgtggtaggctttcacaatgcatttgaggacaagacctatatttacattgtcatggagttatgtgacggtggtgaattgctagatcgaatactagctaagaaagatagccgttacaccgagaaagatgcagcggttgtggtgagacaaatgctgaaagttgcagctgaatgtcatttacgaggtctagttcaccgcgacatgaagccagagaattttctgttcaaatcaaccgaagaaggttcatctctaaaggctacagattttggtctgtcggacttcataaagccaggagtgaaatttcaggatatagtaggaagcgcatactacgttgcacctgaagtgttgaaacgtaggtcaggacctgaatcagacgtttggagtattggtgtcatcacttacattctgctctgcgggagaagacccttctgggataagactcaagacggaatattcaatgaggtcatgaggaaaaaacctgatttcagagaagtcccatggccaaccattagcaacggtgccaaagatttcgtgaagaagttgttagttaaggagcctcgggcacggttaacagcagctcaagcgctatcacattcatgggtgaaagaaggaggtgaggcctcagaggttccaatagacatatctgttcttaacaatatgcgtcagtttgtgaaattcagccgtctgaagcagattgcacttagggctctggcgaaaacaattaatgaggatgagctggatgatctcagagaccagtttgatgcgattgacattgacaagaacggttctataagccttgaggaaatgaggcaggctcttgcgaaagatgttccttggaaactcaaagatgcaagagttgcagagattctccaagcgaatgatagcaacactgatggtttggtggatttcactgagtttgtggtggctgctttgcacgtgaaccaattggaggagcatgactctgagaagtggcaacagaggtcaagagcagcatttgacaagtttgacatagacggagatgggtttataactcccgaagaacttagattgcaaacgggtttaaaaggctccatcgaaccacttcttgaagaggccgacgtagatgaagatgggagaatcagcatcaatgagtttcgcagacttttgagaagtgcaagcctcaagtcaaaaaatgttaaaagccctcctggttaccagctttcacaaaagatgtaa

SEQ ID NO: 4425 - protein, 534 aa, Arabidopsis thaliana
MGLCFSSPKATRRGTGSRNPNPDSPTQGKASEKVSNKNKKNTKKIQLRHQGGIPYGKRIDFGYAKDFDNRYTIGKLLGHGQFGFTYVATDNNNGNRVAVKRIDKAKMTQPIEVEDVKREVKILQALGGHENVVGFHNAFEDKTYIYIVMELCDGGELLDRILAKKDSRYTEKDAAVVVRQMLKVAAECHLRGLVHRDMKPENFLFKSTEEGSSLKATDFGLSDFIKPGVKFQDIVGSAYYVAPEVLKRRSGPESDVWSIGVITYILLCGRRPFWDKTQDGIFNEVMRKKPDFREVPWPTISNGAKDFVKKLLVKEPRARLTAAQALSHSWVKEGGEASEVPIDISVLNNMRQFVKFSRLKQIALRALAKTINEDELDDLRDQFDAIDIDKNGSISLEEMRQALAKDVPWKLKDARVAEILQANDSNTDGLVDFTEFVVAALHVNQLEEHDSEKWQQRSRAAFDKFDIDGDGFITPEELRLQTGLKGSIEPLLEEADVDEDGRISINEFRRLLRSASLKSKNVKSPPGYQLSQKM

SEQ ID NO: 4426 - DNA, 1587 bp, Arabidopsis thaliana
  CDS (1)..(1587)
atgggaaattgttgctctcacggacgggactcagccgataacggagacgcattggaaaacggagcttccgcttcaaatgctgccaattcgactggtccaaccgcggaagcttctgtaccacaatcaaaacatgcacctccttctcctcctcctgcaaccaaacaaggccctataggccctgtcttaggtcgacccatggaagatgtaaaagcttcatattctttagggaaagagctcgggcgaggccaatttggtgtcacacacctctgcacacagaaggcaacaggtcatcaatttgcttgcaagacgattgcaaaaagaaagcttgtaaacaaggaagacattgaggatgtaagaagagaagtgcagataatgcatcacttgactggtcaaccaaacattgtggagcttaaaggggcttatgaggataagcattccgtgcatttggttatggagctttgcgcaggtggagagttgttcgataggattattgctaaaggacattactcggagagagcagctgcttcgttgctaagaacgattgttcagattgtgcatacttgccattccatgggggtgattcacagggatttgaagccagagaactttctcttgctcaacaaagatgagaattctcctctcaaagctactgactttgggttgtcggttttctacaagccaggagaggtattcaaggatattgtggggagtgcttattacatcgcacctgaggttttgaaaagaaagtatggaccagaggcagatatttggagtattggtgtcatgttgtatatcctcttatgtggtgtcccgccattctgggctgagtcggagaacgggatattcaacgcaatccttaggggacatgttgatttctcaagtgatccatggccatccatctcgcctcaggcaaaggatcttgttaagaagatgctcaactctgatccaaagcaaagactaactgctgctcaagttctcaaccatccatggatcaaggaggatggagaggcaccagatgttcctcttgataatgcggtgatgtccaggctcaaacaattcaaagcaatgaacaatttcaagaaagttgcattacgggtgatagcaggctgcttatcagaggaagagatcatggggttgaaggagatgtttaaaggtatggatactgatagtagtggaacaattacactcgaggagttaagacaaggacttgctaagcaaggtacaaggttgtcagaatatgaagttcagcagttaatggaagctgctgatgctgatggtaatggaacaatagactatggcgagtttatcgcagccacaatgcatatcaacagacttgacagagaagaacatctttactcagccttccaacactttgacaaagacaacagtggatatatcacaatggaagagctagagcaagccctacgggagtttggcatgaatgatggcagagacattaaggagatcatttccgaggttgatggagacaatgatggtcggataaactatgatgaatttgtggcaatgatgagaaaaggaaacccggatccaatcccaaagaagcggcgtgaactttcattcaaatga

SEQ ID NO: 4427 - protein, 528 aa, Arabidopsis thaliana
MGNCCSHGRDSADNGDALENGASASNAANSTGPTAEASVPQSKHAPPSPPPATKQGPIGPVLGRPMEDVKASYSLGKELGRGQFGVTHLCTQKATGHQFACKTIAKRKLVNKEDIEDVRREVQIMHHLTGQPNIVELKGAYEDKHSVHLVMELCAGGELFDRIIAKGHYSERAAASLLRTIVQIVHTCHSMGVIHRDLKPENFLLLNKDENSPLKATDFGLSVFYKPGEVFKDIVGSAYYIAPEVLKRKYGPEADIWSIGVMLYILLCGVPPFWAESENGIFNAILRGHVDFSSDPWPSISPQAKDLVKKMLNSDPKQRLTAAQVLNHPWIKEDGEAPDVPLDNAVMSRLKQFKAMNNFKKVALRVIAGCLSEEEIMGLKEMFKGMDTDSSGTITLEELRQGLAKQGTRLSEYEVQQLMEAADADGNGTIDYGEFIAATMHINRLDREEHLYSAFQHFDKDNSGYITMEELEQALREFGMNDGRDIKEIISEVDGDNDGRINYDEFVAMMRKGNPDPIPKKRRELSFK

SEQ ID NO: 4428 - DNA, 1572 bp, Arabidopsis thaliana
  CDS (1)..(1572)
atgggaaattgttgctctcatggaagagattcagatgataacaaagaagaaccgaggccggaaaatggaggcggcggtgttggtgccgctgaagcctctgttagagcttctaaacacccgccagcatctcctcctcctgcaaccaaacaaggaccaataggacctgtcttagggcgaccaatggaagatgtaaagagctcatatacattgggtaaggagctaggtcgtggacagtttggggtgactcatctctgcacgcaaaaggccacggggctgcaattcgcttgcaagaccattgctaaaaggaagctcgtgaacaaagaagacattgaggatgtgagaagggaggtgcagattatgcatcacttgaccggtcagccaaacattgtggagcttaaaggagcgtatgaggataagcattctgtgcatttggttatggagctttgcgcgggaggtgagttgttcgacaggattatcgcaaagggacattattcggagagagctgcagcctcgttactacggacgattgtgcagattatccatacttgccattccatgggggttatccacagggacttgaagcctgagaactttttgttgcttagcaaggatgagaattctcctctgaaagccaccgacttcgggttatccgtgttctacaaaccaggagaggtgttcaaagacattgtgggaagtgcttattacattgcaccagaggtgttgaggaggaagtatggaccagaggctgatatttggagcattggtgtcatgttgtatatcctcctgtgtggtgttccacctttttgggctgagtcagagaatgggattttcaatgccatcctaagtggacaggttgatttttcaagcgatccatggccagtcatctcaccacaggcaaaagacctcgttaggaagatgctcaactctgatccaaaacaaagattaaccgctgctcaagttctcaatcatccatggatcaaggaggatggagaagcaccggatgttcctcttgacaatgcagtgatgtctaggctcaagcagttcaaagcaatgaacaactttaagaaagttgctttacgggtgatagccgggtgcttatcagaggaagaaatcatggggttaaaagagatgttcaaaggaatggacactgacaacagtggaaccataactcttgaggaactaagacagggacttgctaagcaaggtacaaggttatccgaatacgaagtccagcaactaatggaagctgctgatgcggacggtaatggaacaatagactatggggagttcattgcagctacaatgcacatcaacaggctcgacagagaagagcatctctactcagccttccaacactttgacaaagacaacagtggatatatcacaacggaagagctagagcaagcccttcgggagtttggcatgaacgatggcagagacattaaggaaatcatttctgaggttgatggagacaatgatgggcggataaactacgaggaatttgtggcgatgatgagaaaaggaaacccagatcctaatcctaagaagcggcgtgaactatcattcaaatga

SEQ ID NO: 4429 - protein, 523 aa, Arabidopsis thaliana
MGNCCSHGRDSDDNKEEPRPENGGGGVGAAEASVRASKHPPASPPPATKQGPIGPVLGRPMEDVKSSYTLGKELGRGQFGVTHLCTQKATGLQFACKTIAKRKLVNKEDIEDVRREVQIMHHLTGQPNIVELKGAYEDKHSVHLVMELCAGGELFDRIIAKGHYSERAAASLLRTIVQIIHTCHSMGVIHRDLKPENFLLLSKDENSPLKATDFGLSVFYKPGEVFKDIVGSAYYIAPEVLRRKYGPEADIWSIGVMLYILLCGVPPFWAESENGIFNAILSGQVDFSSDPWPVISPQAKDLVRKMLNSDPKQRLTAAQVLNHPWIKEDGEAPDVPLDNAVMSRLKQFKAMNNFKKVALRVIAGCLSEEEIMGLKEMFKGMDTDNSGTITLEELRQGLAKQGTRLSEYEVQQLMEAADADGNGTIDYGEFIAATMHINRLDREEHLYSAFQHFDKDNSGYITTEELEQALREFGMNDGRDIKEIISEVDGDNDGRINYEEFVAMMRKGNPDPNPKKRRELSFK

SEQ ID NO: 4430 - DNA, 1473 bp, Arabidopsis thaliana
  CDS (1)..(1473)
atggcgaacaaaccaagaaccagatgggttcttccttacaagaccaaaaacgttgaagacaattactttcttggtcaagtccttggacaaggccaattcggaaccactttcctctgtacccataaacagacaggtcaaaagcttgcctgcaaatccatacccaaaaggaagctcctttgtcaagaagattacgacgacgttctgagagagatccagataatgcatcacttgtctgaataccccaacgttgtccgtatagagagtgcgtacgaggacaccaaaaacgtgcatcttgtgatggagctttgtgaaggaggtgagttgtttgatagaattgtgaagagaggtcattacagtgaaagagaagctgctaagcttatcaagaccattgttggggttgttgaggcgtgtcactctcttggtgttgttcatagagatcttaagcctgagaatttcttgttttcttcttctgatgaagatgcttctcttaaatctactgactttggcctctctgttttctgcacaccaggagaagcattttcggaactcgttggtagtgcttactatgtggcacctgaggttttacataagcattatggtcctgaatgtgacgtatggagtgctggagttatcctctacattctcttatgtggttttcctcctttttgggctgagagtgaaataggcatcttcaggaagattttacagggaaagttggagtttgagatcaatccttggcctagcatttcagagagtgccaaagatcttataaagaaaatgcttgaaagcaatcctaaaaagaggctaactgctcatcaagtgttgtgtcatccgtggattgtggatgataaggttgctccagataaacctttggactgcgcggtagtgtcccgcctgaagaagttctctgcaatgaacaaacttaagaagatggctttacgagttattgcagagagactatctgaggaagaaatcggtggtctcaaagaactgttcaaaatgatagacacagataaaagtgggactatcacgtttgaagagttaaaagatagtatgagacgtgttgggtcagagcttatggaatcagagatccaagaactcttgcgtgcggctgatgttgatgagagtggaacaattgactatggagagttcttagctgcaacaatccacttgaacaagctggagagagaggagaatctagtagctgcattctctttctttgataaggatgcaagtggttacatcactatcgaagagcttcaacaggcatggaaggagtttggtataaacgattctaatcttgatgaaatgatcaaagacattgatcaagataatgatggacaaatagactatggagaatttgtggcaatgatgaggaaaggaaatggcactggaggagggattggtcggagaactatgaggaactctctcaactttggaactactcttcctgatgagtctatgaatgtctga

SEQ ID NO: 4431 - protein, 490 aa, Arabidopsis thaliana
MANKPRTRWVLPYKTKNVEDNYFLGQVLGQGQFGTTFLCTHKQTGQKLACKSIPKRKLLCQEDYDDVLREIQIMHHLSEYPNVVRIESAYEDTKNVHLVMELCEGGELFDRIVKRGHYSEREAAKLIKTIVGVVEACHSLGVVHRDLKPENFLFSSSDEDASLKSTDFGLSVFCTPGEAFSELVGSAYYVAPEVLHKHYGPECDVWSAGVILYILLCGFPPFWAESEIGIFRKILQGKLEFEINPWPSISESAKDLIKKMLESNPKKRLTAHQVLCHPWIVDDKVAPDKPLDCAVVSRLKKFSAMNKLKKMALRVIAERLSEEEIGGLKELFKMIDTDKSGTITFEELKDSMRRVGSELMESEIQELLRAADVDESGTIDYGEFLAATIHLNKLEREENLVAAFSFFDKDASGYITIEELQQAWKEFGINDSNLDEMIKDIDQDNDGQIDYGEFVAMMRKGNGTGGGIGRRTMRNSLNFGTTLPDESMNV

SEQ ID NO: 4432 - DNA, 1785 bp, Arabidopsis thaliana
  CDS (1)..(1785)
atgggtcattgttacagccggaacatctccgccgtcgaggacgacgagatccccaccggtaacggcgaggtttcgaatcaaccatctcaaaatcaccggcatgcttcgattcctcagtctccggttgcttctggtactcctgaagtcaactcatataacattagccctttccaaagcccgttaccggcgggagtagctccatcaccggcgagaactccgggacggaagttcaaatggccgtttcctccaccgtcacctgcgaaaccgattatggcggctttgagacgacgacgtggcgctccgcctcagcctcgagatgagccgatcccggaggatagtgaagatgtagtagatcacggtggtgacagtggcggcggagagaggttagataagaatttcgggtttgggaagaacttcgaagggaagtatgagttagggaaagaagtagggcgagggcattttggtcatacttgttgggcaaaagcgaagaaaggcaagatgaagaaccaaaccgtggctgtcaaaatcatctctaaagctaagatgacgtcgacgttatctattgaagatgttcgtagagaagtgaaattgctgaaagctttatcagggcataggcatatggttaagttctatgatgtatatgaggatgctgataatgtctttgttgttatggagttatgcgaaggtggagagctattggatagaattttggcgagaggtggacgataccctgaagtcgatgccaaacgtattcttgtgcagattttgtctgcaacagcattttttcaccttcaaggtgtcgtgcaccgtgatctgaagccggagaattttctctttaccagcagaaatgaggatgcgatactcaaggtcatagattttggcttgtctgatttcattagatacgatcagcgtctcaatgatgttgtaggaagtgcatactatgttgcacctgaagtactccataggtcttacagcactgaagcagatatgtggagcatcggtgtcataagttacatacttctctgtggaagcagacctttctatggaagaactgagtctgcaatattccgttgtgtgcttagagcaaaccctaattttgaggatatgccttggccttctatatctcctactgccaaagacttcgtgaaaaggcttttgaacaaggaccataggaaacgaatgacagctgctcaagctctagctcatccgtggttacgtgacgaaaaccccggtttgcttcttgatttctcggtctacaagttggtcaagtcctatatccgtgcctcacctttccgacgatcagcacttaaggctctctcgaaagctatacctgatgaagaacttgtgttccttaaggcacagttcatgctcctggatcctaaagacggaggcctatcccttaactgtttcacaatggctttaacaagatatgctactgatgctatgatggaatcaaggcttcctgacattttaaatacgatgcaacctctggcgcaaaagaagcttgactttgaagagttctgtgcggctgcggtcagtgtttaccaactggaggctcttgaagaatgggaacagattgcaacttcagcatttgagcactttgaacatgaaggaaaccgaatcatatctgtccaagaactcgccggggagatgagcgtgggaccgagtgcatatcctctgctcaaggattggatccgaagttcggatggaaagctgagtttcttggggtacgctaagttcttgcatggtgtgaccgtacgaagctcaagctcgagacctaggtga

SEQ ID NO: 4433 - protein, 594 aa, Arabidopsis thaliana
MGHCYSRNISAVEDDEIPTGNGEVSNQPSQNHRHASIPQSPVASGTPEVNSYNISPFQSPLPAGVAPSPARTPGRKFKWPFPPPSPAKPIMAALRRRRGAPPQPRDEPIPEDSEDVVDHGGDSGGGERLDKNFGFGKNFEGKYELGKEVGRGHFGHTCWAKAKKGKMKNQTVAVKIISKAKMTSTLSIEDVRREVKLLKALSGHRHMVKFYDVYEDADNVFVVMELCEGGELLDRILARGGRYPEVDAKRILVQILSATAFFHLQGVVHRDLKPENFLFTSRNEDAILKVIDFGLSDFIRYDQRLNDVVGSAYYVAPEVLHRSYSTEADMWSIGVISYILLCGSRPFYGRTESAIFRCVLRANPNFEDMPWPSISPTAKDFVKRLLNKDHRKRMTAAQALAHPWLRDENPGLLLDFSVYKLVKSYIRASPFRRSALKALSKAIPDEELVFLKAQFMLLDPKDGGLSLNCFTMALTRYATDAMMESRLPDILNTMQPLAQKKLDFEEFCAAAVSVYQLEALEEWEQIATSAFEHFEHEGNRIISVQELAGEMSVGPSAYPLLKDWIRSSDGKLSFLGYAKFLHGVTVRSSSSRPR

SEQ ID NO: 4434 - DNA, 1572 bp, Arabidopsis thaliana
  CDS (1)..(1572)
atgggtgtctgtttctccgccattagagtcactggtgctagcagcagtagacgaagcagtcagaccaaatccaaggctgctcctactcccatcgataccaaggcctctaccaaacgccgaaccggctccatcccctgcggcaagcgtaccgattttggctactccaaagacttccacgatcactacaccatcggcaagttgctcggccatggtcaattcggctacacctacgtcgccatccacagacccaatggagatcgcgtcgccgtcaaaagactcgataagtctaagatggttcttcctattgctgttgaggatgtcaagcgtgaggttcagattcttattgctctctctggccacgagaatgttgttcagtttcacaatgcctttgaggatgacgattacgtctatattgttatggagttgtgcgaaggaggcgaattgctggataggatattatccaagaaaggtaatcggtactccgagaaagatgcagccgttgtcgttaggcagatgctcaaagttgcaggagaatgtcatctacacggtcttgtacatagagatatgaaaccagagaactttttgttcaaatcagctcaactagattcgcctctaaaggctacggattttggtttatcggattttatcaaaccagggaaaaggttccatgacattgttggtagcgcctattatgtggctcctgaggtattaaagcgcagatcagggcctgaatcagatgtatggagcattggtgtgattacgtatatattactttgtgggaggcggcctttttgggatagaactgaagatggtatatttaaagaggttttaagaaataaacctgacttcagccgtaaaccttgggcaactataagtgacagcgccaaagattttgtgaaaaagttacttgtaaaagacccacgagcacggctaactgctgcacaagcactatcacatgcgtgggttagagaaggcgggaatgctactgatatccctgtcgacatttcagttctgaacaacttaagacaatttgtgagatacagccgtctaaagcaatttgctttaagggcgcttgctagcacacttgacgaggcagagatctctgacctcagagatcaatttgatgcgattgatgtggataaaaatggcgtcattagtcttgaagagatgagacaggcacttgccaaagatcttccttggaaactgaaagactcacgagttgctgagatccttgaagcgattgatagcaacactgatgggttagtggacttcacagagtttgtagcagcagctctacatgttcatcaactagaagaacatgattcagagaaatggcagctaaggtcaagagcagcttttgagaaattcgacctagacaaagacgggtacataacgcctgaggaacttcgaatgcacacggggttaagaggatcaatagatccactgctggatgaagcagacatagacagagatgggaaaataagcctgcatgagttcaggagacttctaagaacagcgagcataagttcacagagagcaccaagccctgcaggtcacaggaatcttcgatag

SEQ ID NO: 4435 - protein, 523 aa, Arabidopsis thaliana
MGVCFSAIRVTGASSSRRSSQTKSKAAPTPIDTKASTKRRTGSIPCGKRTDFGYSKDFHDHYTIGKLLGHGQFGYTYVAIHRPNGDRVAVKRLDKSKMVLPIAVEDVKREVQILIALSGHENVVQFHNAFEDDDYVYIVMELCEGGELLDRILSKKGNRYSEKDAAVVVRQMLKVAGECHLHGLVHRDMKPENFLFKSAQLDSPLKATDFGLSDFIKPGKRFHDIVGSAYYVAPEVLKRRSGPESDVWSIGVITYILLCGRRPFWDRTEDGIFKEVLRNKPDFSRKPWATISDSAKDFVKKLLVKDPRARLTAAQALSHAWVREGGNATDIPVDISVLNNLRQFVRYSRLKQFALRALASTLDEAEISDLRDQFDAIDVDKNGVISLEEMRQALAKDLPWKLKDSRVAEILEAIDSNTDGLVDFTEFVAAALHVHQLEEHDSEKWQLRSRAAFEKFDLDKDGYITPEELRMHTGLRGSIDPLLDEADIDRDGKISLHEFRRLLRTASISSQRAPSPAGHRNLR

SEQ ID NO: 4436 - DNA, 1638 bp, Arabidopsis thaliana
  CDS (1)..(1638)
atgggtaactgtaacgcctgtgtaaggccagactcaaaagaatcaaaaccatcttcaaagccgaaaaaacccaatcgagatcggaaattaaacccattcgccggagatttcaccagatccccagctccaatacgtgttctcaaagatgtaatccctatgagcaatcaaactcagatcagcgacaaatacatcttaggtcgtgaattaggtcgaggcgaattcggaatcacttacctctgtactgatcgtgaaacccacgaagctttagcttgcaaatcgatttcaaagcgaaagcttcgaacagctgtcgatatcgaagacgttcgtcgtgaggtagcgattatgtctactttacctgagcatccaaacgtagttaagcttaaggctagttatgaggataacgagaacgtgcatctggttatggagctttgtgaaggaggtgagctttttgatcggattgttgctagaggacattacacggagcgtgctgctgcagctgttgcgagaacgattgctgaggttgtgatgatgtgtcactctaatggagttatgcatcgagatttgaaacctgagaatttcttgtttgctaataaaaaggagaattctccactaaaggctattgattttggcttgtctgtgttcttcaaacctggagataagtttacagagattgtaggaagtccgtattatatggctccagaagtgttgaagagagattatggaccaggggttgatgtgtggagtgccggagttattatctatatcttgctctgtggtgttcctccgttttgggctgagactgaacaaggtgttgctcttgcgatcttgcggggagttcttgattttaagagagacccttggcctcagatatcagagagtgccaagagccttgtgaagcagatgttggatcctgatccgactaagcggttaactgctcagcaagtgttagctcacccatggatacagaatgcaaagaaagctcccaatgttcctttaggagatatagtcagatctaggttgaagcagttctctatgatgaacagattcaaaaagaaagttcttcgtgtaattgcggagcacttgtctattcaagaggttgaagtgataaagaacatgttctcactgatggatgatgacaaggatggtaaaataacttacccggaactcaaagctgggcttcagaaggtcggttcacaacttggtgaaccagagatcaaaatgttgatggaagtggcggatgtcgatggaaatgggtttctggattatggagagtttgtagctgtgataattcacttgcagaagatagagaatgatgaacttttcaaactagcttttatgtttttcgacaaagatggaagtacatacattgaacttgatgagctacgggaagctttagcggatgagttaggcgagccagacgccagtgttctaagcgacatcatgcgtgaagttgacactgacaaggacggacgtataaactatgatgagtttgtgacgatgatgaaagctggaactgactggagaaaggcatcgagacaatattcaagagagaggttcaaaagcttaagcattaacttgatgaaagatgggtcattgcatctccatgacgctctcactggacaaactgttcctgtttaa

SEQ ID NO: 4437 - protein, 545 aa, Arabidopsis thaliana
MGNCNACVRPDSKESKPSSKPKKPNRDRKLNPFAGDFTRSPAPIRVLKDVIPMSNQTQISDKYILGRELGRGEFGITYLCTDRETHEALACKSISKRKLRTAVDIEDVRREVAIMSTLPEHPNVVKLKASYEDNENVHLVMELCEGGELFDRIVARGHYTERAAAAVARTIAEVVMMCHSNGVMHRDLKPENFLFANKKENSPLKAIDFGLSVFFKPGDKFTEIVGSPYYMAPEVLKRDYGPGVDVWSAGVIIYILLCGVPPFWAETEQGVALAILRGVLDFKRDPWPQISESAKSLVKQMLDPDPTKRLTAQQVLAHPWIQNAKKAPNVPLGDIVRSRLKQFSMMNRFKKKVLRVIAEHLSIQEVEVIKNMFSLMDDDKDGKITYPELKAGLQKVGSQLGEPEIKMLMEVADVDGNGFLDYGEFVAVIIHLQKIENDELFKLAFMFFDKDGSTYIELDELREALADELGEPDASVLSDIMREVDTDKDGRINYDEFVTMMKAGTDWRKASRQYSRERFKSLSINLMKDGSLHLHDALTGQTVPV

SEQ ID NO: 4438 - DNA, 1635 bp, Arabidopsis thaliana
  CDS (1)..(1635)
atgggcaattcatgtcgtggttcttttaaggacaaaatctacgagggcaatcatagtaggcccgaggagaattccaaatccaccaccactactgtttcctctgttcattctcctactacagaccaagatttctccaaacagaacaccaatccagctcttgtgattcctgttaaagaacccattatgcggcgtaacgttgacaatcaatcttactatgttcttggtcacaagactcctaacattcgtgatctttacacgttgagtcgtaagttaggacaaggacaattcgggacaacgtatttgtgtactgatattgccacaggtgttgactatgcttgtaagtctatatccaagaggaaattgatatctaaagaagatgttgaggatgttaggagggagattcagattatgcatcatttagctggtcacaagaatattgttactattaaaggagcttatgaggatcctttgtatgttcacattgtgatggagctttgtgctggtggtgagttgtttgataggattattcatagaggtcattacagcgagaggaaagctgctgagttgaccaagatcattgtcggtgttgttgaggcgtgtcattctcttggtgttatgcatagagatttaaagcctgagaatttcttgttggttaataaggatgatgatttctctcttaaggccattgattttggtctctctgttttcttcaaaccaggccaaatattcaaggatgttgttggaagtccatactatgttgctcctgaggttcttctaaaacattatggtccagaagctgatgtgtggactgctggtgttatactctatatcttactaagtggtgtcccgcctttctgggcagaaacacagcaaggaatatttgatgctgtgttgaagggatatattgactttgatacagacccgtggcctgtcatatccgacagtgctaaagatctgatccggaagatgttatgctctagtccttctgaacgtttgactgctcatgaagtcttgcgtcatccatggatctgtgagaatggagttgcaccggatagagcacttgacccggctgttttgtctcgtctaaaacagttttctgcaatgaataaattaaagaagatggctttaaaggtgatagctgagagcctctcagaagaagagattgcgggtttaagagcaatgtttgaggcaatggatactgataacagcggtgcaatcacttttgatgaactcaaagctggcttgagaagatatggatcaaccttgaaagacaccgagatccgagatcttatggaagcggctgatgtggacaacagcggtacaatagattacagcgagtttattgcagcgacgatccatctgaataaactagagagagaagagcatcttgtctctgcatttcagtactttgacaaagatggaagtggttacatcaccattgatgagctgcaacaatcttgcattgaacatgggatgaccgatgtttttcttgaagacataatcaaagaagtagatcaagacaacgatggacggattgattacgaagaatttgttgcgatgatgcaaaagggaaatgctggtgtagggagaagaacaatgaaaaatagtctaaacatcagcatgagagatgtgtag

SEQ ID NO: 4439 - protein, 544 aa, Arabidopsis thaliana
MGNSCRGSFKDKIYEGNHSRPEENSKSTTTTVSSVHSPTTDQDFSKQNTNPALVIPVKEPIMRRNVDNQSYYVLGHKTPNIRDLYTLSRKLGQGQFGTTYLCTDIATGVDYACKSISKRKLISKEDVEDVRREIQIMHHLAGHKNIVTIKGAYEDPLYVHIVMELCAGGELFDRIIHRGHYSERKAAELTKIIVGVVEACHSLGVMHRDLKPENFLLVNKDDDFSLKAIDFGLSVFFKPGQIFKDVVGSPYYVAPEVLLKHYGPEADVWTAGVILYILLSGVPPFWAETQQGIFDAVLKGYIDFDTDPWPVISDSAKDLIRKMLCSSPSERLTAHEVLRHPWICENGVAPDRALDPAVLSRLKQFSAMNKLKKMALKVIAESLSEEEIAGLRAMFEAMDTDNSGAITFDELKAGLRRYGSTLKDTEIRDLMEAADVDNSGTIDYSEFIAATIHLNKLEREEHLVSAFQYFDKDGSGYITIDELQQSCIEHGMTDVFLEDIIKEVDQDNDGRIDYEEFVAMMQKGNAGVGRRTMKNSLNISMRDV

SEQ ID NO: 4440 - DNA, 1608 bp, Arabidopsis thaliana
  CDS (1)..(1608)
atggggaattgttgtggcaatccgagttcggctacgaaccagagtaaacaagggaaacccaagaacaaaaacaatcctttttacagcaatgaatacgctacaacagatagatctggagctggttttaagctctctgtgctgaaagatcctacaggacatgatatatccttgcagtatgatcttggacgtgaggttggtcgaggcgagtttggtataacttacttgtgtactgataaggaaactggtgagaagtatgcctgcaagtccatatctaagaagaagctgagaacagcagttgatatagaggatgttaggagggaggttgagattatgaagcatatgcctaaacacccaaatgtcgtctctttgaaggattcctttgaggatgatgatgcggtgcatatagttatggagttgtgtgaaggaggggaactgtttgatcggattgttgcaagaggtcattacactgagcgggctgctgctgcggttatgaagactattgttgaagttgttcagatatgccataagcaaggagtgatgcatcgggatctcaaaccagagaactttctttttgcaaataagaaagagacatcagcccttaaggccattgattttggattatctgtattcttcaaacctggtgagcagtttaatgagattgttggaagtccttattacatggcacccgaggtgctgcggcgaaactatggtcctgagatcgatgtgtggagcgctggagttatcctctatatcctactttgtggtgttccgccattttgggcagagactgagcaaggggtggctcaagcgatcattagatcagttattgactttaagagagatccatggccaagagtttctgacagcgccaaagaccttgtgagaaagatgcttgaacctgatcccaaaaaacggcttactgctgcacaagttctcgaacatacttggatactgaatgcaaagaaggctccaaatgtctctcttggggagactgtgaaagcaagactaaagcagttttctgttatgaacaagctcaagaaacgagctctacgagtgatagctgaacatttgtcagtggaggaagcagcagggataaaggaagcatttgaaatgatggacgtaaacaagagaggcaagataaatctcgaggagcttaaatatggacttcaaaaagctggacaacagatagctgatactgatcttcaaattcttatggaagctactgatgttgatggggatgggacactgaactatagcgagtttgttgctgtttcagtccaccttaagaagatggcgaatgatgaacacttgcataaagcttttaacttctttgatcagaaccagagtggttacatagagattgacgaacttcgtgaagccttgaatgatgaattggataatactagcagtgaggaagtaatcgcagccatcatgcaagatgttgataccgacaaggatggacgaataagctatgaagagtttgttgcgatgatgaaagctgggacagattggagaaaagcgtcaagacagtattctcgggaaagattcaacagtttaagcctcaagttaatgagagatggttcattgcaattagaaggcgagacctaa

SEQ ID NO: 4441 - protein, 535 aa, Arabidopsis thaliana
MGNCCGNPSSATNQSKQGKPKNKNNPFYSNEYATTDRSGAGFKLSVLKDPTGHDISLQYDLGREVGRGEFGITYLCTDKETGEKYACKSISKKKLRTAVDIEDVRREVEIMKHMPKHPNVVSLKDSFEDDDAVHIVMELCEGGELFDRIVARGHYTERAAAAVMKTIVEVVQICHKQGVMHRDLKPENFLFANKKETSALKAIDFGLSVFFKPGEQFNEIVGSPYYMAPEVLRRNYGPEIDVWSAGVILYILLCGVPPFWAETEQGVAQAIIRSVIDFKRDPWPRVSDSAKDLVRKMLEPDPKKRLTAAQVLEHTWILNAKKAPNVSLGETVKARLKQFSVMNKLKKRALRVIAEHLSVEEAAGIKEAFEMMDVNKRGKINLEELKYGLQKAGQQIADTDLQILMEATDVDGDGTLNYSEFVAVSVHLKKMANDEHLHKAFNFFDQNQSGYIEIDELREALNDELDNTSSEEVIAAIMQDVDTDKDGRISYEEFVAMMKAGTDWRKASRQYSRERFNSLSLKLMRDGSLQLEGET

SEQ ID NO: 4442 - DNA, 1455 bp, Arabidopsis thaliana
  CDS (1)..(1455)
atgggttgctacagcagtaagaacctaaaacaatcaaaaagaaccattcttgagaaaccattcgttgacatcggaaaggtttacatcctcggggatgaattgggtcaaggccaattcggtataactcgaaaatgcgttgagaagacttcaggtaagacttacgcctgcaagaccattctcaagacgaatctaaagagtagagaagatgaagaagccgtgaagagagagattcgtatcatgaagcatttgtctggagaaccgaacattgttgagttcaagaaagcttacgaggacagagattctgtacatattgttatggaatattgtggtggtggagagttattcaaaaagatcgaagctttgtccaaagatggaaagtcttactccgagaaagaagctgttgaaatcattaggccgattgtgaatgttgtcaagaattgtcattacatgggtgtgatgcttcgtgatctaaagcctgagaatttcttgctctccagtaccgataagaatgctacggtcaaagctatcgacttcgggtgttctgttttcattgaagaaggagaagtacaccggaaattcgctgggagtgcttactacattgctcctgaagtgttacagggaaaatacggtaaagaagcggacatttggagtgcagggattatattgtacatcctactctgcggcaaacctccctttgtgacagaacctgaggcacagatgttctctgagataaagagtgccaaaatcgacgttgacagcgaatcatggaagtttatagatgtgaaggcaaaacatcttgtcaataggatgcttaacagaaaccccaaggaacgaatctctgctgcagaggttcttggacatccttggatgaaagacggagaagcttcagataagcctattgatggcgttgttttatctcgattgaagcaatttcgagatatgaacaagctaaagaaagtagctctaaaggttattgcagcaaatctatcggaagaggaaatcaaaggtcttaaaacactgttcaccaacattgataccgacaaaagtggcacaatcactcttgaagaactcaaaacaggtcttactagacttggatctaacctctctaaaaccgaagtggagcaactcatggaagctgctgatgtggatggtaatggaacaatcgacatagacgagtttatctctgccacgatgcatagatatagattggatagagatgatcatgtgtaccaagcattccaacactttgacaaagacaatgacgggcacataaccaaggaagagttggagatggcaatgaaagagcatggtgtgggagatgaagttagcatcaaacaaatcataaccgaagttgataccgataatgatgggaaaataaactttgaggaattccgcacaatgatgagaagtggcagcagcttgcagccacaaagggagcttcttccgatcaagtga

SEQ ID NO: 4443 - protein, 484 aa, Arabidopsis thaliana
MGCYSSKNLKQSKRTILEKPFVDIGKVYILGDELGQGQFGITRKCVEKTSGKTYACKTILKTNLKSREDEEAVKREIRIMKHLSGEPNIVEFKKAYEDRDSVHIVMEYCGGGELFKKIEALSKDGKSYSEKEAVEIIRPIVNVVKNCHYMGVMLRDLKPENFLLSSTDKNATVKAIDFGCSVFIEEGEVHRKFAGSAYYIAPEVLQGKYGKEADIWSAGIILYILLCGKPPFVTEPEAQMFSEIKSAKIDVDSESWKFIDVKAKHLVNRMLNRNPKERISAAEVLGHPWMKDGEASDKPIDGVVLSRLKQFRDMNKLKKVALKVIAANLSEEEIKGLKTLFTNIDTDKSGTITLEELKTGLTRLGSNLSKTEVEQLMEAADVDGNGTIDIDEFISATMHRYRLDRDDHVYQAFQHFDKDNDGHITKEELEMAMKEHGVGDEVSIKQIITEVDTDNDGKINFEEFRTMMRSGSSLQPQRELLPIK

SEQ ID NO: 4444 - DNA, 1602 bp, Arabidopsis thaliana
  CDS (1)..(1602)
atgggaaattgttgtgcgagcccgggttcggagactgggagtaagaaggggaaaccaaagatcaaaagtaacccgttttatagtgaagcatacactacgaatggatctggaactgggttcaagctctctgttttgaaagatccaacaggacatgatatatctcttatgtatgatctggggcgtgaggttggtcgcggagagtttggtattacttacttgtgcactgatatcaaaacgggcgagaagtatgcgtgcaagtctatatcaaagaagaagcttagaacagctgtggatatagaggatgttaggagggaagttgagataatgaaacatatgcctagacacccaaatatcgtgtcgctgaaggatgcctttgaggatgatgatgcagtgcatatagttatggagttgtgtgaaggaggtgagctgtttgatcggattgttgctagaggtcattatactgagcgagctgctgctgcagtgatgaagactattcttgaagttgttcagatatgccataagcatggagtgatgcatcgggatctaaagcctgagaactttctctttgcaaataaaaaagagacatcagcccttaaagccatagattttggattatcagtcttcttcaagcctggtgagggattcaacgagattgttggaagtccttattacatggcaccagaggtacttaggcgaaattacggacctgaggttgatatctggagtgctggagttatcctttatatcctgctctgtggtgtcccaccattttgggccgagactgagcaaggggtggctcaggcgatcattaggtcagttatcgactttaagagggatccatggccgagagtttctgagactgccaaagaccttgtgaggaagatgctcgaacctgaccccaaaaaacggctttctgctgcacaagtactcgaacattcttggatacaaaatgcgaagaaggctccaaatgtttcactcggcgagacggtgaaagcaagactcaaacagttttctgttatgaacaagctcaagaaaagagcgctacgggtgatagccgaacacttatcagtggaggaagtagctggcatcaaggaagcatttgagatgatggacagtaaaaagacgggaaagataaacctcgaggagcttaaatttggacttcataaactcggacagcagcagatacctgatactgatctacagattctgatggaagctgctgatgttgatggggatgggactttaaattatggggagtttgtggctgtctctgtgcatcttaagaaaatggcgaacgacgaacacttgcataaggcttttagcttttttgaccagaatcagagcgattacatagagattgaggagctgcgtgaggctttaaatgatgaggtggatactaacagtgaagaagttgttgcagctattatgcaagatgttgacacagacaaggacggacgaataagctatgaagagtttgcggcgatgatgaaagctggaacagattggaggaaagcgtcgaggcagtattcccgggaaagattcaacagtttgagcctcaagttaatgagagaaggttcattgcaattagaaggcgaaaattaa

SEQ ID NO: 4445 - protein, 533 aa, Arabidopsis thaliana
MGNCCASPGSETGSKKGKPKIKSNPFYSEAYTTNGSGTGFKLSVLKDPTGHDISLMYDLGREVGRGEFGITYLCTDIKTGEKYACKSISKKKLRTAVDIEDVRREVEIMKHMPRHPNIVSLKDAFEDDDAVHIVMELCEGGELFDRIVARGHYTERAAAAVMKTILEVVQICHKHGVMHRDLKPENFLFANKKETSALKAIDFGLSVFFKPGEGFNEIVGSPYYMAPEVLRRNYGPEVDIWSAGVILYILLCGVPPFWAETEQGVAQAIIRSVIDFKRDPWPRVSETAKDLVRKMLEPDPKKRLSAAQVLEHSWIQNAKKAPNVSLGETVKARLKQFSVMNKLKKRALRVIAEHLSVEEVAGIKEAFEMMDSKKTGKINLEELKFGLHKLGQQQIPDTDLQILMEAADVDGDGTLNYGEFVAVSVHLKKMANDEHLHKAFSFFDQNQSDYIEIEELREALNDEVDTNSEEVVAAIMQDVDTDKDGRISYEEFAAMMKAGTDWRKASRQYSRERFNSLSLKLMREGSLQLEGEN

SEQ ID NO: 4446 - DNA, 1593 bp, Arabidopsis thaliana
  CDS (1)..(1593)
atgggaaattgttgtggaacggctggatcgttgattcaagataagcagaagaaaggttttaaattgccaaatcctttctcaaacgagtacggcaaccaccacgatggccttaagcttatcgtgttgaaggaaccaacgggtcatgagatcaagcagaaatataaattaggtcgtgagttaggtcgaggagagttcggtgtgacgtatctgtgcaccgagatcgagaccggagagattttcgcatgcaaatcaatcttaaagaagaagctgaaaacgtcgattgatatagaggacgttaagagagaagttgagatcatgaggcaaatgcctgaacatcctaatattgttactttgaaagagacttatgaggatgataaagctgtgcatttggttatggagctttgtgaaggcggtgagcttttcgataggattgttgctagagggcattatacggagagagctgctgcttcggttattaaaacgatcatcgaggttgttcagatgtgtcataagcatggagtaatgcacagagatttaaaacctgagaacttcttgtttgcaaacaagaaggaaactgcatctttgaaggctattgattttggtctctctgttttctttaaaccaggtgatagatttaacgaaattgttgggagtccttactacatggctcctgaggtattaaggaggagttatggacaagaaattgacatttggagcgcaggagtgattctttacatattgctctgtggtgttccacctttttgggcagaaaccgaacatggagtcgcaaaagcaattcttaaatctgtaattgactttaaaagagacccctggcctaaagtttctgataatgcaaaagatctgatcaaaaagatgcttcatcctgatccaaggcgtcgtctaactgctcaacaagtgcttgatcatccgtggatacagaatggtaagaatgcttccaatgtatcattgggtgaaaccgtaagagcaaggcttaagcaattctctgttatgaacaagctcaagaaaagggcactcagggttatcgctgagcatctatcggttgaagaaacatcttgcataaaagaaagattccaagtaatggatacaagcaatagaggaaagattactatcaccgagctaggaatcggattgcagaaactcgggattgttgttcctcaagatgacattcaaatattgatggacgcgggagatgttgataaagatggatatttagacgtcaatgaatttgtagccatatcggtacacatcaggaagttaggcaacgacgagcacttaaagaaagcttttacgttctttgacaaaaacaagagtggttatatcgaaatagaggagttaagagatgctttggcagatgatgttgacactactagtgaagaagttgttgaagccattattcttgatgtcgataccaataaggatgggaaaataagttacgacgaatttgcaacgatgatgaaaacgggaacggattggagaaaagcttcgaggcagtactcgagggacctgtttaagtgtcttagtcttaagctcatgcaagatgggtccttgcagtctaatggagatacaaagtag

SEQ ID NO: 4447 - protein, 530 aa, Arabidopsis thaliana
MGNCCGTAGSLIQDKQKKGFKLPNPFSNEYGNHHDGLKLIVLKEPTGHEIKQKYKLGRELGRGEFGVTYLCTEIETGEIFACKSILKKKLKTSIDIEDVKREVEIMRQMPEHPNIVTLKETYEDDKAVHLVMELCEGGELFDRIVARGHYTERAAASVIKTIIEVVQMCHKHGVMHRDLKPENFLFANKKETASLKAIDFGLSVFFKPGDRFNEIVGSPYYMAPEVLRRSYGQEIDIWSAGVILYILLCGVPPFWAETEHGVAKAILKSVIDFKRDPWPKVSDNAKDLIKKMLHPDPRRRLTAQQVLDHPWIQNGKNASNVSLGETVRARLKQFSVMNKLKKRALRVIAEHLSVEETSCIKERFQVMDTSNRGKITITELGIGLQKLGIVVPQDDIQILMDAGDVDKDGYLDVNEFVAISVHIRKLGNDEHLKKAFTFFDKNKSGYIEIEELRDALADDVDTTSEEVVEAIILDVDTNKDGKISYDEFATMMKTGTDWRKASRQYSRDLFKCLSLKLMQDGSLQSNGDTK

SEQ ID NO: 4448 - DNA, 1686 bp, Arabidopsis thaliana
  CDS (1)..(1686)
atgcttcaaaaccaacataaaacgaccaaaaaccagagaaacaaaaacattggaacaaaatattttcttagaaaaaaaattatgggattttgcttctccaaatttggcaaatcacaaacacatgagatcccaatctcttcctcttccgattcaagccctcctcatcactaccaacctctccctaaaccaactgtttctcaaggtcaaaccagtaatcccacctccaatcctcagcccaaacccaaacccgctcctcctcctcctccgtcaacatcctccggttcacaaatcggtccaatcctaaaccgaccaatgatcgatctctcagctctctacgacctccacaaagaactcggccgtggccaattcggaatcacttacaaatgcacggacaaatccaacggtcgagaatacgcctgcaaatccatctcaaaacgtaaactcatacgtcgcaaagacatcgaagacgtgagacgtgaggtcatgatcttgcaacaccttactggtcaaccaaacatagtcgagtttcgaggcgcgtatgaagacaaagacaatcttcatttggttatggagctctgttctggaggagagctttttgatcgtattatcaagaaaggaagttactctgagaaagaagctgctaatatcttcagacagatcgttaatgttgttcatgtttgtcacttcatgggcgttgttcatagagacttaaagcctgagaatttcttgcttgttagtaacgaagaagattctccaatcaaagcaacagattttggactctctgttttcatcgaagaaggtaaagtgtatagagatatagttgggagcgcatactacgttgcacctgaagttctacatcgaaactacgggaaagaaatcgatgtatggagcgcgggtgttatgctttacattcttctcagtggtgttcctccattttggggagagaccgagaagactatatttgaggcgatcttagaaggaaagctggatcttgaaacttctccttggcctactatatcggaaagcgcaaaagatttgataagaaagatgttgataagagatcctaaaaaaaggataaccgcagctgaagcacttgagcatccatggatgacagacaccaaaatttctgataaaccaatcaatagtgctgttcttgttaggatgaagcaattccgcgcgatgaacaagctcaagaaacttgccttgaaggtgatagcggaaaacttatcggaagaagagataaaaggattaaagcaaacgtttaagaacatggatacagatgaaagtggcaccatcacttttgatgaactaagaaacgggttacatcgtcttggatctaagcttacggagtctgaaatcaaacaactcatggaagctgctgatgtggacaaaagtgggacgattgattacattgagtttgtaactgcaacaatgcatcgtcatagattggagaaagaagagaatttgatagaagcatttaaatacttcgacaaagacagaagcggttttatcacaagggacgagcttaaacactccatgactgagtatggcatgggtgatgatgcgaccatagatgaagttatcaatgatgttgataccgacaatgatgggaggataaactacgaggaatttgtggcgatgatgaggaaaggaactacagattcagatccaaagctgatcagatga

SEQ ID NO: 4449 - protein, 561 aa, Arabidopsis thaliana
MLQNQHKTTKNQRNKNIGTKYFLRKKIMGFCFSKFGKSQTHEIPISSSSDSSPPHHYQPLPKPTVSQGQTSNPTSNPQPKPKPAPPPPPSTSSGSQIGPILNRPMIDLSALYDLHKELGRGQFGITYKCTDKSNGREYACKSISKRKLIRRKDIEDVRREVMILQHLTGQPNIVEFRGAYEDKDNLHLVMELCSGGELFDRIIKKGSYSEKEAANIFRQIVNVVHVCHFMGVVHRDLKPENFLLVSNEEDSPIKATDFGLSVFIEEGKVYRDIVGSAYYVAPEVLHRNYGKEIDVWSAGVMLYILLSGVPPFWGETEKTIFEAILEGKLDLETSPWPTISESAKDLIRKMLIRDPKKRITAAEALEHPWMTDTKISDKPINSAVLVRMKQFRAMNKLKKLALKVIAENLSEEEIKGLKQTFKNMDTDESGTITFDELRNGLHRLGSKLTESEIKQLMEAADVDKSGTIDYIEFVTATMHRHRLEKEENLIEAFKYFDKDRSGFITRDELKHSMTEYGMGDDATIDEVINDVDTDNDGRINYEEFVAMMRKGTTDSDPKLIR

SEQ ID NO: 4450 - DNA, 1647 bp, Triticum aestivum
  CDS (1)..(1647)
atgggcaatcagaatgggacccccgggaacgattactacaaccggttcccgagggagcatccggcttccaggtatgccgatgggattgaagatgatagctactcagacttgaagaaatctgacaagccctggcccgatgctgactcgtttaggcccaccgccgctggtattctgaggcaagggttggatccgacatccatctctgtcctcgggcgccagacggcggacctaagggagcactatatccttggccggaagcttgggcagggccagtttgggactacgtacctctgcaccgagataagtacagggtgcgactttgcgtgcaagaccatcctcaagcgcaagctcatcaccaaggtggatgtcgaggatgtgcgccgtgagattcagacaatgcaccatctgtcgggacacaagaacgttgtctcgatcaaggatgtctatgaggacgtgcaggcggtccacattgtgatggagctcttgcctggcggggagctatttgaccgaattcaggggaacgggcgttacagtgagatgaaggctgcagagattacaagaattgttgtcagcattgtggctatgtgccattcacttggtgtgatgcaccgcgatctcaagccggaaaatttcctcctccttgacaaagatgatgacctgtccataaaagcaattgattttggcctatccatctacttcaagccaggccaggttttcagtgagctagttggcagcccgttctatgttgctcctgaggtgttgcacaaacgctatgggccagaatcggatgtgtggtcagctggagtgatactctatgtattgctaagtggggttccaccattttgggcagatacacagaaaggcatatttgatgcagttctgaaggggcaccttgatttggaatcagacccctggcctaagatatctgacagtgtaaaggatcttataagaaagatgctttgcaattgcccttcagagcgtttgaaagcccatgtagtgctacggcatccctggatctgccaaaatgggatggccactgatggagttttggatcctagtgttatctctcggctcaagcggttctctgcaatgaacaatctacagaaattggctctgagagtgatagctgagcgtctttcagaagaggagattgctggattaagagaattattcaagacagtggacataaaaaatagaggcgtaatcacttttggcgagcttaggaaaggtctgacaagatatggcaacgaattggtggataccgagatttgtgatataatggaagcggctgatacagacactgatgtaaccataaactatgaagaatttattgctgcaaccatgcctctaaacaagatagagcgggaagaacacttgaaggcagcttttacatattttgacaaagatggcagtggctatatcacagtcgacaagcttcaacgagcctgtgcagaatataacatggaaggcactctccttgaagagattattttagaggccgatcggaacaatgacggtcaaattgattatgccgaatttgtagccatgatgctaggcaacgctaatggtggcaatattggacttggacgtccaacaatggaaaccagtctgaatgtgaccttgagagatgcacctcaagtacattaa

SEQ ID NO: 4451 - protein, 548 aa, Triticum aestivum
MGNQNGTPGNDYYNRFPREHPASRYADGIEDDSYSDLKKSDKPWPDADSFRPTAAGILRQGLDPTSISVLGRQTADLREHYILGRKLGQGQFGTTYLCTEISTGCDFACKTILKRKLITKVDVEDVRREIQTMHHLSGHKNVVSIKDVYEDVQAVHIVMELLPGGELFDRIQGNGRYSEMKAAEITRIVVSIVAMCHSLGVMHRDLKPENFLLLDKDDDLSIKAIDFGLSIYFKPGQVFSELVGSPFYVAPEVLHKRYGPESDVWSAGVILYVLLSGVPPFWADTQKGIFDAVLKGHLDLESDPWPKISDSVKDLIRKMLCNCPSERLKAHVVLRHPWICQNGMATDGVLDPSVISRLKRFSAMNNLQKLALRVIAERLSEEEIAGLRELFKTVDIKNRGVITFGELRKGLTRYGNELVDTEICDIMEAADTDTDVTINYEEFIAATMPLNKIEREEHLKAAFTYFDKDGSGYITVDKLQRACAEYNMEGTLLEEIILEADRNNDGQIDYAEFVAMMLGNANGGNIGLGRPTMETSLNVTLRDAPQVH

SEQ ID NO: 4452 - DNA, 1617 bp, Medicago truncatula
  CDS (1)..(1617)
atggggtgtttgttaagtaaagacaaagattcagaaccagaacacaacaatggtggttatagatatggtgaacacaatcatagaaacaatcatgaacaagtcaacacatcaagaacagcaccaacaagttcttatcaacctcaaataccaaccaagccttcatcaatttctgctccaagtccaaaacctcttatcaagcaagacagtaacacaatcctaggaaaaggtttggaagatgtgaaacaattctacacactaggtaaagaattaggtagaggccaattcggagtaacgtttctatgcaccgagaattcaactggattgctttatgcttgcaagtcaatttccaagaggaaacttgtgagtaaatctgatagggaagatataaagagagagattcagatcatgcaacatttgagtggtcaaccaaatattgttgaatttaaaggagcttatgaggataggaattcagttcatgttgttatggaactttgtgctggtggtgaactttttgataggatcattgctaaaggacattatagtgaaaaagctgctgcttctatttgtagacagattgttaatgttgttaatatttgtcattttatgggagttatgcatagggatctgaaaccagagaatttcttgttggctagtaaagatgaaaatgcacttcttaaggctactgattttgggttggctgttttcattgaagaaggaaaggtgtatcgcgatatagtcggaagtgcttattatgttgctccagaagttcttcgtcgtagatgcgggaaagaaatagatatatggagtgcaggagttatactatatatcttacttagtggtgtccctccattttgggctgagactgaaaagggaatatttgatgcaatattggaaggtcatattgattttgaaagtgaaccgtggcctaaaatttcagacagcgccaaggatcttgttcgtaaaatgcttatacaggaaccgaagaaacgcattaccgctgcacaggttctagagcatccttggattaaagatggtaatgcttctgataagccaatagacagtgcagttctttcaagaatgaagcaattcagagctatgaataaactaaagaaacttgcattgaaggtcattgctgagaatatgtctgaagaagaaatccgaggtttgaaggcgatgtttacaaatatggacacagacaatagtggtacaatcacctatgaagaactaaaagcaggattacaaagacttggctcaaagctttcagaagctgaagttaagcaactcatggaagctgctgatgtagatggaaatggcacaattgattgcattgaattcatcactgctacaatgcatagacacaagttagaaagagatgaccatctttacaaggcattccaatattttgacaaagacagcagtgggtttattacaagagatgaactggaaacagccatgaaagaatatggtatgggagatgatgccacaatcaaggaaattatatctgaagttgatacaattatatctgaagtggacacagatcatgatggtagaatcaactatgaagaattctgtgcaatgatgagaagtggaaaccaacagcaagttaagctattctaa

SEQ ID NO: 4453 - protein, 538 aa, Medicago truncatula
MGCLLSKDKDSEPEHNNGGYRYGEHNHRNNHEQVNTSRTAPTSSYQPQIPTKPSSISAPSPKPLIKQDSNTILGKGLEDVKQFYTLGKELGRGQFGVTFLCTENSTGLLYACKSISKRKLVSKSDREDIKREIQIMQHLSGQPNIVEFKGAYEDRNSVHVVMELCAGGELFDRIIAKGHYSEKAAASICRQIVNVVNICHFMGVMHRDLKPENFLLASKDENALLKATDFGLAVFIEEGKVYRDIVGSAYYVAPEVLRRRCGKEIDIWSAGVILYILLSGVPPFWAETEKGIFDAILEGHIDFESEPWPKISDSAKDLVRKMLIQEPKKRITAAQVLEHPWIKDGNASDKPIDSAVLSRMKQFRAMNKLKKLALKVIAENMSEEEIRGLKAMFTNMDTDNSGTITYEELKAGLQRLGSKLSEAEVKQLMEAADVDGNGTIDCIEFITATMHRHKLERDDHLYKAFQYFDKDSSGFITRDELETAMKEYGMGDDATIKEIISEVDTIISEVDTDHDGRINYEEFCAMMRSGNQQQVKLF

SEQ ID NO: 4454 - DNA, 1605 bp, Oryza sativa subsp
  CDS (1)..(1605)
atggggaattcttgccaaaatggaacctatgggaacaattaccagaacagcaaccggtttcagaatgaccgttttgcttctcggtacgttgatgggaatgatactgaggattgctactcgggctcgtcaagggccagcttagcgggtgctctgcggcaagggctgaacctaaagtcccctgtccttggatacaagactccaaatgtaagggagctctatactcttggccgggagcttggacagggacagttcgggaaaacatacctctgcactgagattagcacagggtgtcaatatgcatgcaagactatcttaaagagtaatctccgatgtgtgtcagatatcgaggacgtgcgccgtgaaatccagataatgcaccatctttcgggccagaagaatatagtgacaatcaaggacacatatgaggatgagcaggccgtgcacatcgtcatggagctctgtgcaggtggtgagctcttcagcaagattcagaagcgaggtcattacagtgaacggaaggctgcagagcttataaaaattatagttggcatcatagaaacatgccattcacatggagtgatgcaccgggatctcaagccagaaaatttcctcttactggacgcagacgatgaattctcggttaaagcaattgactttggtctatctgtgttcttcagaccaggtcaggttttcagagaggtagtgggaagtccatattatattgctccagaggtattggagaagcgttatggaccagaggctgatatatggactgctggagtgattctctatgtattgctgactggtgttcctccattttgggcagatacacaaagcgggatatatgaaaaagtactggatggacgtattgattttaaatcaaaccggtggcccaggatatctgacagtgcaaaggatcttataaaaaagatgctctgcccttatccattagagcgtttgaaagcccatgaagtgctaaagcatccatggatatgtgataatggagtggctactaatcgagctctggatccaagtgtacttcctcgtctcaagcaattttctgcaatgaataggttaaagaaattgtctctccagattattgctgagcgtctttcagaagaggagattgttgggttaagagaaatgttcaaggctatggacaccaaaaacagaagtgtggttacatttggtgagcttaagggactgaaaagatacagctcagtgttcaaggatactgaaattaacgacttaatggaagcagctgatgacaccacctccaccatcaactgggaagagtttattgctgcagcagtgtctcttaataaaatagaacgtgagaaacacttgatggcagcctttacatactttgacaaagatggaagtggttttatcacagttgacaagcttcaaaaggcttgcatggaacgtaacatggaagatactttccttgaagagatgattctggaggttgatcaaaacaatgatggtcaaatcgattatgctgaatttgtcacaatgatgcaaagcaacaactttggacttgggtggcaaacggtggaaagcagcctgaatgtagccctgagggaggcaccccaagtatactga

SEQ ID NO: 4455 - protein, 534 aa, Oryza sativa subsp
MGNSCQNGTYGNNYQNSNRFQNDRFASRYVDGNDTEDCYSGSSRASLAGALRQGLNLKSPVLGYKTPNVRELYTLGRELGQGQFGKTYLCTEISTGCQYACKTILKSNLRCVSDIEDVRREIQIMHHLSGQKNIVTIKDTYEDEQAVHIVMELCAGGELFSKIQKRGHYSERKAAELIKIIVGIIETCHSHGVMHRDLKPENFLLLDADDEFSVKAIDFGLSVFFRPGQVFREVVGSPYYIAPEVLEKRYGPEADIWTAGVILYVLLTGVPPFWADTQSGIYEKVLDGRIDFKSNRWPRISDSAKDLIKKMLCPYPLERLKAHEVLKHPWICDNGVATNRALDPSVLPRLKQFSAMNRLKKLSLQIIAERLSEEEIVGLREMFKAMDTKNRSVVTFGELKGLKRYSSVFKDTEINDLMEAADDTTSTINWEEFIAAAVSLNKIEREKHLMAAFTYFDKDGSGFITVDKLQKACMERNMEDTFLEEMILEVDQNNDGQIDYAEFVTMMQSNNFGLGWQTVESSLNVALREAPQVY

SEQ ID NO: 4456 - DNA, 1653 bp, Oryza sativa subsp
  CDS (1)..(1653)
atgggcgcccgcgcctctcgccaccgccaatcccccgaccaatcccaatcccaatccccatccccacaccacaagcaccaccaccaccaccaaaccacccgggcccccaagcccaagcccaagccccagccaccgccgccgcagcagccgcgatctcagcctccgccgccgccgcggcaccagccccagcaggcgccccagcaggcggcggcggaggatggggtggggcgggtgctggggcggcccatggaggacgtccgtgcgacctacaccttcgggcgggagctggggcgggggcagttcggggtgacctacctcgccacccacaagcccaccggccgacgctacgccctgcaagtccatcgccgcccgcaagctcgcccggccccgacgacctcgacgacgtccgccgcgaggtccacatcatgcaccacctcaccggccaccgcaacatcgtcgagctgcgcgggcgcctacgaggaccgccactccgtcaacctcgtcatggagctctgcgagggcggcgagctcttcgaccgcatcatcgccaggggccactactccgagcgcgccgccgccgccctctgcagggagatcgtctccgtcgtccacagctgccactccatgggggtcatgcacagggacctcaagcccgagaacttcctcttcctcaacaagcgcgaggactccccgctcaaagccaccgattttggcctctccgtcttcttcaagcccggtgagcagttcagagatcttgttggaagtgcatattatgtggctcctgaggtcctaaaacgactatatggagctgaggcagacatatggagtgctggagttatcctttacatccttctatcaggggttcctccattctgggcagaaaacgaggacggtatatttgatgctgttctgcaaggtcatatcgacttctcatctgaaccatggccttctatatctagtggtgcaaaagacttggtcaagcggatgcttcggcaggacccaaaggagcggttaactgctgctgaaattttgaaccacccatggattagagaggatggagaggccccagataaaccacttgatattacagtgatcagtagaatgaagcagttcagagcaatgaacaaacttaagaaggttgccttgaaggtcgttgcagagaacttgtcagaggaagagattgtgggtttaaaggaaatgttcaaatctttagatactgataacagtgggacgataactcttgaagaactaagagctggtctaccaaagcttggcactaaaatttcggaatcagaattaaggcagttgatggaagcggctgatgttgatggaaatgggtccattgattatgttgaatttatatcagcaacgatgcacatgaatagattagagaaggaagatcacatatataaagcatttgaatattttgacaaggaccacagcgggttcataacagtcgatgaattggaagaagctctgacaaagtacgacatgggtgatgaagcgacaattaaagaaataattgctgaagtggatacagaccatgataatcgaattgattacattgaatatcttgaaaacattggaggagatttggttttcaagtatgctgaatgttgctcagccatctctaagatcatggatgctggctaa

SEQ ID NO: 4457 - protein, 550 aa, Oryza sativa subsp
MGARASRHRQSPDQSQSQSPSPHHKHHHHHQTTRAPKPKPKPQPPPPQQPRSQPPPPPRHQPQQAPQQAAAEDGVGRVLGRPMEDVRATYTFGRELGRGQFGVTYLATHKPTGRRYALQVHRRPQARPAPTTSTTSAARSTSCTTSPATATSSSCAGAYEDRHSVNLVMELCEGGELFDRIIARGHYSERAAAALCREIVSVVHSCHSMGVMHRDLKPENFLFLNKREDSPLKATDFGLSVFFKPGEQFRDLVGSAYYVAPEVLKRLYGAEADIWSAGVILYILLSGVPPFWAENEDGIFDAVLQGHIDFSSEPWPSISSGAKDLVKRMLRQDPKERLTAAEILNHPWIREDGEAPDKPLDITVISRMKQFRAMNKLKKVALKVVAENLSEEEIVGLKEMFKSLDTDNSGTITLEELRAGLPKLGTKISESELRQLMEAADVDGNGSIDYVEFISATMHMNRLEKEDHIYKAFEYFDKDHSGFITVDELEEALTKYDMGDEATIKEIIAEVDTDHDNRIDYIEYLENIGGDLVFKYAECCSAISKIMDAG

SEQ ID NO: 4458 - DNA, 1674 bp, Solanum tuberosum
  CDS (1)..(1674)
atgggcaacacatgccgtggatctattggaggcaaaacttttcagggttacactcagcctgaagatagttcctgctccaccaatcataacccttcttccggcaattcttattcttcttctgacaatttttctcccaccagtaacgctcaacagaatagcaatcacaagaaggagcattctttgtctcttgttagtcccagaaaagctagcatgaatcgttccgggagtaatcaggcttattatgtaatgggtcatatgaccccgaatattcgcgatctttatactttgggaaggaaattaggacaagggcagtttgggactacttatttatgcacagagaattctaccggtgctgagtatgcctgtaaatcaatctcgaagaggaagttgatttcgaaggaggatgtggaagatgttagaagggaaattcagataatgcatcatttgtctggtcataggaatattgttactattaaaggggcttatgaggatcctttatatgttcatattgtcatggagatatgtagtggcggtgagttgtttgatcggatcatacaacgaggacattacagtgagagaaaggcagctgaattgactaaaattattgttggggttgtggaggcgtgtcattctcttggtgttatgcatagagatctcaaacctgagaatttcttgttggttaataaggataatgatttctctctcaaggccattgattttggactctctgttttcttcaagccaggacaaatattcacagatgttgttggtagtccatattatgtggctcctgaggtgcttttgaagcattatggtcctgaagctgatgtgtggacagcaggagtcatactctacatactgctaagtggtgtgccaccattttgggctgaaacacagcagggaatatttgacgcagttctgaaagggcacattgattttgactcagatccttggccattgatatctgagagtgcaaaagatcttatccggaagatgttgtgcatgcagccctcggagcggttaactgctcatgaagtattgtgtcatccttggatttgcgaaaatggtgtcgctcctgatagagcactggatcctgcagtactttctcgcctaaaacagttctctgctatgaacaagttaaaaaagatggctttgcgggtgattgctgaaagcttgtctgaagaagagattgctggtctgagagagatgtttaaggccatggatactgacagtagtggtgcaattacatttgatgaactaaaagcagggttgagaaaatatggctctacgttaaaggatacggagatacgggaacttatggatgcggctgatgtggacaatagtggaactattgactatggagaattcattgcggcaactgttcatcttaataaattggagcgcgaggaacatctcatggccgcatttcaatattttgacaaggatggaagtggttacataacggttgatgaggtccaacaagcttgtatagagcataacatgacagatgtttactttgaggatattataagagaagtcgatcaggataatgatggacgaattgattatggagaatttgttgctatgatgcaaaaaggaaatccatgtatagggagacgaacaatgcgaaatagtctgaatttgagcatgagagatgcaccgggagctcagtag

SEQ ID NO: 4459 - protein, 557 aa, Solanum tuberosum
MGNTCRGSIGGKTFQGYTQPEDSSCSTNHNPSSGNSYSSSDNFSPTSNAQQNSNHKKEHSLSLVSPRKASMNRSGSNQAYYVMGHMTPNIRDLYTLGRKLGQGQFGTTYLCTENSTGAEYACKSISKRKLISKEDVEDVRREIQIMHHLSGHRNIVTIKGAYEDPLYVHIVMEICSGGELFDRIIQRGHYSERKAAELTKIIVGVVEACHSLGVMHRDLKPENFLLVNKDNDFSLKAIDFGLSVFFKPGQIFTDVVGSPYYVAPEVLLKHYGPEADVWTAGVILYILLSGVPPFWAETQQGIFDAVLKGHIDFDSDPWPLISESAKDLIRKMLCMQPSERLTAHEVLCHPWICENGVAPDRALDPAVLSRLKQFSAMNKLKKMALRVIAESLSEEEIAGLREMFKAMDTDSSGAITFDELKAGLRKYGSTLKDTEIRELMDAADVDNSGTIDYGEFIAATVHLNKLEREEHLMAAFQYFDKDGSGYITVDEVQQACIEHNMTDVYFEDIIREVDQDNDGRIDYGEFVAMMQKGNPCIGRRTMRNSLNLSMRDAPGAQ

SEQ ID NO: 4460 - DNA, 1608 bp, Solanum tuberosum
  CDS (1)..(1608)
atgggcaacgcatgccgtggatctttcggaggcaaaacttttcagggctaccctcagcctcaagatcattcagaatccaattccaatcccaaacataattccgattcccccaaaccaaaaaaggaacaacaacccctcgtcaccatgaatcgtacaagcactaaccagtcctattacgtcctcggtcataagacccctaacattcgcgatctatacaccctcggccgcaaactaggacaaggtcagtttggcaccacttatttatgcaccgaattgtcttccggtatcgactacgcctgtaaatctattgccaagagaaaactcatctctaaggaggatgtagaagatgtcaggagggaaattcagataatgcaccatttggctggtcacaaaaacatcgtttccatcaagggtgcttatgaggatcctttgtatgttcatattgtcatggaactttgtggtggcggtgaattgtttgaccgcatcattcaaagaggacactacactgagagaaaggctgccgatttgactaaaattattgtgggtgttgttgaggcatgccattcacttggagttatgcatagagatctcaaacctgagaatttcttgttggttaacaaggatgatgatttctctctcaaggccattgactttggactctcagtattctttaagccaggccaaattttcacagatgttgttgggagtccatactacgttgctcctgaggtgcttttgaagcattatggtccagaagcagatgtttggacagcaggggtcatactctatatcctgctaagtggagttccaccattctgggctgaaacacagcaggggatatttgatgcagttctgaaagggcacattgattttgactcagatccttggcctttattatcggagagtgcaaaagatctcatccggaagatgttatgcatgcgaccctcagagcggttaactgctcatgaagtattatgtcatccttggatttgtgaaaatggtgttgctcctgatagagctcttgatcctgcagtactttctcgcctcaaacacttttctgcaatgaacaaattaaaaaagatggctctgcgggtgattgctgaaagcttgtcagaggaggagattgccggtcttaaggagatgtttaaggccatggatactgataacagtggtgcaattacattcgatgaactaaaagctggtttgagaaaatatggctctactctgaaggatatagagatacgggaacttatggatgcggctgatgtggacaatagtggaactattgactatggagaattcatagcagcaactattcaccttaacaaattggaccgcgaggaacatctcatggcagcatttcagtattttgacaaggatggaagtggttatattactgtagatgagctccagcaggcgtgtgcagatcataacattacagatgtattctttgaggatattatcagagaagttgatcaggataatgatggacgcattgactatggagaatttgttgctatgatgcaaaaaggaaatccatgcataggaagacgaacgatgcgaaatagtctgaatttcagcatgagagatgcgcccggagctcattag

SEQ ID NO: 4461 - protein, 535 aa, Solanum tuberosum
MGNACRGSFGGKTFQGYPQPQDHSESNSNPKHNSDSPKPKKEQQPLVTMNRTSTNQSYYVLGHKTPNIRDLYTLGRKLGQGQFGTTYLCTELSSGIDYACKSIAKRKLISKEDVEDVRREIQIMHHLAGHKNIVSIKGAYEDPLYVHIVMELCGGGELFDRIIQRGHYTERKAADLTKIIVGVVEACHSLGVMHRDLKPENFLLVNKDDDFSLKAIDFGLSVFFKPGQIFTDVVGSPYYVAPEVLLKHYGPEADVWTAGVILYILLSGVPPFWAETQQGIFDAVLKGHIDFDSDPWPLLSESAKDLIRKMLCMRPSERLTAHEVLCHPWICENGVAPDRALDPAVLSRLKHFSAMNKLKKMALRVIAESLSEEEIAGLKEMFKAMDTDNSGAITFDELKAGLRKYGSTLKDIEIRELMDAADVDNSGTIDYGEFIAATIHLNKLDREEHLMAAFQYFDKDGSGYITVDELQQACADHNITDVFFEDIIREVDQDNDGRIDYGEFVAMMQKGNPCIGRRTMRNSLNFSMRDAPGAH

SEQ ID NO: 4462 - DNA, 1404 bp, Vitis vinifera
  CDS (1)..(1404)
  misc_feature (12)..(12): w is a or t
  misc_feature (92)..(92): r is g or a
atgggttgtttwagcagtaaggagaggccgccactcaagccttcacatcccaataccagagctattcagaagccagataccatattgggtargccatttgatgatattaagcattactatactcttggtaaggaactgggtagggggcagtttggaagaaagcttgtgactaaaaatgataaggaggatataaagagagagattcagatcatgcagcatctgactgggcagccaaacattgtggaattcaagggtgcttatgaggataggcactcagtgcaccttgtgatggagctctgtgctggtggggagctctttgatagaatcatttctcaggggcattactctgagagagctgctgcagcaatttgtagggctattgtgaatgttgtccacatctgccatttcatgggtgtgatgcatcgcgatctcaagcctgagaatttcttgttgtccagcaaggatgaagcagcaatgctgaaggcaactgattttgggttgtctgtcttcattgaggaaggaaaggtgtatcgtgatatagtaggtagtgcctactatgttgctccagaagtattacggcgtaattatgggaaggaaatagatatttggagtgcaggagttattttgtatattctactcagtggtgtacctccattttgggctgaaactgaaaagggaatatttgatgccatattgcaaggagaaattgacttcgaaagtcaaccatggccagctatatcaaatggtgccaaagatctagtcaggaagatgctgacacaggaccggaacaagcgtattacttctgcacaagttcttgagcatccatggataagagaagatggagaagcatcagacaagccaatagacagtgctgtactctctagaatgaagcaatttagggcaatgaacaagctcaagaagctcgcattgaaggttattgcagaaaatctatctgaagaagaaatcaaaggtcttaaagcaatgttcaccaacatggacactgacaagagtggtaccatcacttatgaagaactgaagagcggattggctcgacttggttcaaggctctcagagactgaagtccaacaactcatggaagctgctgatgtggatggcaatggaacaattgactacattgaatttatcactgctacaatgcacagacacagactagaaagagatgagcatctctataaagcttttaactattttgataaggataacagtggctttataacaagagatgaattggaaaatgccatgaaggagtatgggatgggtgatgaagacagcatcaaggaaataattaatgaggttgatacagataaggatgggaggatcaactataaggagttttgcacaatgatgagaagtggaacacaaccgccagtcaagctattttag

SEQ ID NO: 4463 - protein, 467 aa, Vitis vinifera
  misc_feature (4)..(4): The Xaa at location 4 stands for Leu, or Phe.
  misc_feature (31)..(31): The Xaa at location 31 stands for Arg, or Lys.
MGCXSSKERPPLKPSHPNTRAIQKPDTILGXPFDDIKHYYTLGKELGRGQFGRKLVTKNDKEDIKREIQIMQHLTGQPNIVEFKGAYEDRHSVHLVMELCAGGELFDRIISQGHYSERAAAAICRAIVNVVHICHFMGVMHRDLKPENFLLSSKDEAAMLKATDFGLSVFIEEGKVYRDIVGSAYYVAPEVLRRNYGKEIDIWSAGVILYILLSGVPPFWAETEKGIFDAILQGEIDFESQPWPAISNGAKDLVRKMLTQDRNKRITSAQVLEHPWIREDGEASDKPIDSAVLSRMKQFRAMNKLKKLALKVIAENLSEEEIKGLKAMFTNMDTDKSGTITYEELKSGLARLGSRLSETEVQQLMEAADVDGNGTIDYIEFITATMHRHRLERDEHLYKAFNYFDKDNSGFITRDELENAMKEYGMGDEDSIKEIINEVDTDKDGRINYKEFCTMMRSGTQPPVKLF

SEQ ID NO: 4464 - DNA, 1755 bp, Vitis vinifera
  CDS (1)..(1755)
  misc_feature (585)..(585): r is g or a
  misc_feature (705)..(705): r is g or a
atgggaatctgcgcctcaaagcctccgaagcagaatccgtacgccccggagtctttggaaccttctgcaacccctggagcagtcagcaaggatgaggcggaggggccggggaagcgctcgccgttcttccccttctacagtcccagtccggcgcactacctcttctccaagaagtctccggcggtgcggagcgccagctccacgccacggcggttcttcaagaggccgtttccgccgccgtctccggcgaagcatataaaggcggtgctggcccgaaggcagggaaagaaggcggccgcgataccggagggggagggggaggaggaagaagctgcggcgggaggtttggataagagtttcgggttctcgaagcagttcaccagtaagtatgaggttggcgaagaagtggggaggggacattttgggtatacttgttctgctaggttcaagaaaggtgagcgcaagggtcagcaagttgctgtcaaagtcatccctaaagccaagatgacaacagccattgcaatcgaggatgtgagaagggaggtgaaaatattgcgagccttgacaggacataagaatctagtrcaattctatgatgcatttgaagaccatgataacgtctatatagtaatggagttatgcgaaggaggcgagctcctggatagaatactttcaaggggtgggaaatactcagaagatgatgcragggctgtcatggtgcagatattgaatgttgtttcatttttccatctccagggtgtggtacacagagatcttaaaccagagaattttttgtttacttctaaggatgagaactctgagttgaaagctattgactttggcttatcagattttgtcaaaccagatgaaaggcttaatgacatagtgggaagtgcatactacgtgtcccctgaagttttgcatagatcttacagtacagaggctgatgtatggagtataggcgtgatagcatatattcttttgtgtggtagtcgtccattttgggcccgaactgagtcgggaatctttagggcagtgttaaaagctgatccaagttttgatgaagtaccatggccttccttatcttcagaggcaaaggactttgtcaagtgcctactaaataaagaccctcggaaacgaatcactgctgctcaggctctaagtcatccttggattcgaggttacaatggtgtgaaagtccctcttgatattctaatattcaaactcatgaaagcctatatgcggtcatcatctttgcgtaaggctgctttaagggcattgtcgaagacgctgactatggatgaactcttttatttgaaagaacagtttgcacacttggagccaaacaaaaatgggaccattaccttagagaatattaggacggccctgatgaaaaatgcaacagatgcaatgaaggagtctcgcatccctgattttcttgcgtcgctaaatgcacttcaatatagaaggatggatttcgaagaattctgtgcagctgcattaagtgtccatcagctggaggcactcgatcgttgggaacaacatgcacgttgtgcatatgaactctttgacaaggatggaaatagggctattatgattgaggaacttgcttcggaacttggccttggcccttctgttccagttcatgctgttctacatgactggataaggcacacagatgggaaactaagcttccttggatttgtcaaattgttgcatggtgtctccagcagagctcttgcaaaggcacagtaa

SEQ ID NO: 4465 - protein, 584 aa, Vitis vinifera
MGICASKPPKQNPYAPESLEPSATPGAVSKDEAEGPGKRSPFFPFYSPSPAHYLFSKKSPAVRSASSTPRRFFKRPFPPPSPAKHIKAVLARRQGKKAAAIPEGEGEEEEAAAGGLDKSFGFSKQFTSKYEVGEEVGRGHFGYTCSARFKKGERKGQQVAVKVIPKAKMTTAIAIEDVRREVKILRALTGHKNLVQFYDAFEDHDNVYIVMELCEGGELLDRILSRGGKYSEDDARAVMVQILNVVSFFHLQGVVHRDLKPENFLFTSKDENSELKAIDFGLSDFVKPDERLNDIVGSAYYVSPEVLHRSYSTEADVWSIGVIAYILLCGSRPFWARTESGIFRAVLKADPSFDEVPWPSLSSEAKDFVKCLLNKDPRKRITAAQALSHPWIRGYNGVKVPLDILIFKLMKAYMRSSSLRKAALRALSKTLTMDELFYLKEQFAHLEPNKNGTITLENIRTALMKNATDAMKESRIPDFLASLNALQYRRMDFEEFCAAALSVHQLEALDRWEQHARCAYELFDKDGNRAIMIEELASELGLGPSVPVHAVLHDWIRHTDGKLSFLGFVKLLHGVSSRALAKAQ

SEQ ID NO: 4466 - DNA, 1743 bp, Vitis vinifera
  CDS (1)..(1743)
  misc_feature (822)..(822): m is a or c
  misc_feature (1476)..(1476): w is a or t
  misc_feature (1660)..(1660): m is a or c
atggggaataactgtgtgggatccatggttcccgagcatggattgtttgaatcaatttctaattcaatttggtggacgagagcctcggagtgtatgacttctcattctaccggagaaggtgtcagcgaaacgcaaagtaaagagcagaaatctcctcctcctgttcaaaacaagcctccagaagaggtggagctaataaatccgccagaggtaatgaagataacaaaggaagagacgaaaccaacacccacaccgaagaggccactccttatgaagaggttaccaagtgctggacttgaggtggacttggttttgaaagacaaaactgatcatttgaaggaacactataatttggggcggaagcttgggcacggccagtttgggacaacttttctatgtgtagagaaagaaacaggcaaagagtacgcttgcaaatccattgcaaaaaggaaactgctgacaagagatgacattgaagacgtgaggagggaaatccagataatgcatcacttggcgggccactccaatatcatctccatcaagggagcttatgaggatgcggtggcagttcatcttgtcatggaattgtgtacggggggtgagctttttgataggattgccaagcgaggccattatacagaaagaaaggcagctcagcttgcaaggactataattggtgttgtagaagcctgccactctttaggggtcatgcaccgggaccttaagcctgagaattttctttttgtcaatgagcaagaggaatcacttcttaagacaatagactttgggttgtccgtattcttcaagccaggggagattttmactgatgtggttggaagcccatattatgtggcacctgaagttctgagaaagtgttatggtccagaagcagatgtttggagtgttggggtgatcatttatattctcttaagtggggtgcctccattttgggcagaaagtgagcaagagatatttcaagaagtactgcatggtgatcttaacttctcatcagatccatggcctcatatctctgaaagtgctaaggacttaattaggagaatacttgtcagagatcccaagaaacgcctaactgcccatgaagtcctgtgtcacccttggattcaggttgatggagtagctcctgacaaaacccttgattctgcagtcataagtcgcttgaagcagttttcagccatgaacaagcttaagaaaatggctcttagagtgattgctgagaatctctctgaagaagaaattgctggattgaaagaaatgttcaagattattgatacagacaatagtggtcagattacttttgaagaactcaaggctggactaaaaagatttggcgctaatcttaaggaagctgaaatttatgatctaatgcaggctgcagatgttgataatagtggaacaatcgattatggggagttcatagctgcaacattccatctaaacaaaattgagagagaagawcacctatttgctgctttttcctactttgacaaagatggaagtggctatatcactccagatgagctccaaaaagcctgtgaggagtttgggatggaggatgtccatttggaagaaatgatccaagaagttgaccaggacaatgacggccgcatagattataatgagtttgtggcaatgatgcagmaaggaaacaataatgattttggtaagaagggtctgcagaatggtattagctttgggtttaggcagccgctaccagtctattga

SEQ ID NO: 4467 - protein, 580 aa, Vitis vinifera
  misc_feature (274)..(274): The Xaa at location 274 stands for Leu, or Phe.
  misc_feature (492)..(492): The Xaa at location 492 stands for Asp, or Glu.
  misc_feature (554)..(554): The Xaa at location 554 stands for Gln, or Lys.
MGNNCVGSMVPEHGLFESISNSIWWTRASECMTSHSTGEGVSETQSKEQKSPPPVQNKPPEEVELINPPEVMKITKEETKPTPTPKRPLLMKRLPSAGLEVDLVLKDKTDHLKEHYNLGRKLGHGQFGTTFLCVEKETGKEYACKSIAKRKLLTRDDIEDVRREIQIMHHLAGHSNIISIKGAYEDAVAVHLVMELCTGGELFDRIAKRGHYTERKAAQLARTIIGVVEACHSLGVMHRDLKPENFLFVNEQEESLLKTIDFGLSVFFKPGEIXTDVVGSPYYVAPEVLRKCYGPEADVWSVGVIIYILLSGVPPFWAESEQEIFQEVLHGDLNFSSDPWPHISESAKDLIRRILVRDPKKRLTAHEVLCHPWIQVDGVAPDKTLDSAVISRLKQFSAMNKLKKMALRVIAENLSEEEIAGLKEMFKIIDTDNSGQITFEELKAGLKRFGANLKEAEIYDLMQAADVDNSGTIDYGEFIAATFHLNKIEREXHLFAAFSYFDKDGSGYITPDELQKACEEFGMEDVHLEEMIQEVDQDNDGRIDYNEFVAMMQXGNNNDFGKKGLQNGISFGFRQPLPVY

SEQ ID NO: 4468 - DNA, 1623 bp, Vitis vinifera
  CDS (1)..(1623)
atgggcaactgttgctcccaaggcaacaccaacgatggcccagctaatgacaagggagaaaccatccctgagcctacgaccaacccggaaactgctgcgcctgagagttcagccgcgcagaataagcctgcagccagttccactcctgctgcttcatccggagcgtctaccaagcctagcaagccaacccctataggacctgtgttgggcaggcctatggaagatgttcgtaccctttacactataggaaaggagctcggtcgcgggcagtttggtgttacccatttgtgtaccagcaaggcaaccggcgagcagtttgcttgtaagacaatagccaagcggaaacttgtaaacaaggaggatattgaggatgtcaggagggaagttcagatcatgcaccatttgacgggtcagcctaatatagtcgagcttaagggtgcctatgaggacaagcaatcggttcatctggtgatggagttgtgtgcaggaggagagctctttgatcgtattatctcaaaggggcattacaccgagcgtggtgcagcatctttgctgaggactattgttcagattgtccacacctgccattccatgggagttgtccatagggatctcaagcctgaaaatttccttctgctgaacaaggatgagaatgcacctctcaaggctacagatttcggtttatccgtgttcttcaaacaaggagaagtatttagagatattgttggtagtgcatattacattgcacctgaagtattgaagagaagatatggaccagaggtcgatatatggagtgttggggttatgttgtatatccttctatgtggagttcctcccttctggggcagagaaattggattaacagaatcggagcatgggatattcaatgcaatcttacgcggccacattgattttacaagcgacccatggcccactatttcatctggtgccaaggatcttgtcagaaagatgttaacttcagacccaaagcagaggataacagcattccaagttctgaatcatccatggattaaggaggatggagaagcacctgatactcctcttgacaatgcagtttttgaaaggttcaaacagtttagagcaatgaacaagttcaagaaagttgctcttcgggtcattgctggctgtctatcagaggaagaaatcatgggattgaagcaaatgtttaagggcatggacactgataatagtggaaccataacacttgaagagctgaagcaaggtctgtccaagcaagggactaagctgtctgaatatgaagttaaacagttgatggaagctgctgatgcagatggcaatggaaccattgactatgatgagtttatcacggcaacaatgcacctgaacagaatggacaaagaagaccatctttacacagccttccaatacttcgacaaagataacagcgggtatattacaaccgaagagttggagcaagctctccatgaatttggcatgcacgatggaagggacataaaagaaatccttaatgaagttgacggtgataatgatggccggatcaactacgatgagttcgtgacaatgatgagaaaagggaacccagaaccgaacccaaagaagagacgggatgtatttgtttga

SEQ ID NO: 4469 - protein, 540 aa, Vitis vinifera
MGNCCSQGNTNDGPANDKGETIPEPTTNPETAAPESSAAQNKPAASSTPAASSGASTKPSKPTPIGPVLGRPMEDVRTLYTIGKELGRGQFGVTHLCTSKATGEQFACKTIAKRKLVNKEDIEDVRREVQIMHHLTGQPNIVELKGAYEDKQSVHLVMELCAGGELFDRIISKGHYTERGAASLLRTIVQIVHTCHSMGVVHRDLKPENFLLLNKDENAPLKATDFGLSVFFKQGEVFRDIVGSAYYIAPEVLKRRYGPEVDIWSVGVMLYILLCGVPPFWGREIGLTESEHGIFNAILRGHIDFTSDPWPTISSGAKDLVRKMLTSDPKQRITAFQVLNHPWIKEDGEAPDTPLDNAVFERFKQFRAMNKFKKVALRVIAGCLSEEEIMGLKQMFKGMDTDNSGTITLEELKQGLSKQGTKLSEYEVKQLMEAADADGNGTIDYDEFITATMHLNRMDKEDHLYTAFQYFDKDNSGYITTEELEQALHEFGMHDGRDIKEILNEVDGDNDGRINYDEFVTMMRKGNPEPNPKKRRDVFV

SEQ ID NO: 4470 - DNA, 1647 bp, Vitis vinifera
  CDS (1)..(1647)
  misc_feature (356)..(356): y is t or c
atgggtttctgcttctccagacctcgtgatatcccaatctcttcttcttcctcctctgatggtgattttactaatcatcactaccaacccatacccatttcttcctccaaagagtcattggacatcccacctcctctttcaatgtctgtgcctaaaccacccacatcttcacaaattggaaccgttctaggcagaccattatgtgaaataacctcgatttatgatattggtaaagaactggggaggggtcagtttgggatcacctatctctgtactgagaagtccactggtttgaagtacgcttgtaagtcaatatccaagcggaagcttaagagtgggaaggatattgaggatgytaagagggagattttgattctagagcacctcactggacaacccaatatagtagagttcaagggtgcttatgaggacaagcagaatctgcatttagtgatggagttgtgttctgggggtgagctttttgatcggattacagcgaaaggtagttattccgagcgagaagcggcagatatctgtagacagattgtgaccgtggttcatgtttgtcattttatgggagtgatgcatagggacttgaagcctgagaatttcttgatggtgagccgggaggagaattccccgttgaaagccacagattttgggctctctgtcttcatagaggacaatgaagtgtacacggatgttgttggaagtgcatactatgtggctccagaggtgctgcgacggagctatgggaaagaaattgatgtctggagtgctggagtcattttatatattcttctaagtggggtgcctccattttggggtgagaatgaaaaaagtatatttgatgcagtattacaaggctacgttgattttgacagtgcaccatggccttctatatctagttctgcaaaggatctaataaaaaaaatgttaatgaaggaccctaaaagacggatcactgcttctgatgccctcaatcatccatggctcagagaagatggtgaggcgtcagacaaacctattgatagtgctgttctagtcaggatgaagcaattcagagcaatgaacaagttgaagaaacttgcattaaaggtaattgcagaaaacctatcagaagaagacatcaaagggttgaaacaaatgtttaacaacatggacactgatagaagtggcacaatcacattcgaagaactcaaaactggattgtctaggctggggtccaagctttctgagttagaaataaagcagctgatggatgctgttgatgttgatcagaatgggactcttgattatactgaattcattactgccactatgcagcggcaccgactagagaaagaagagaacttgttcaaagctttccagttttttgacaaggatagtagtgggtttataacaagagaggagctgaagcaagccatgacccagtatggaatgggggatgaagcgactatagatgaagtcatcgatgatgtggatactgataaagatgggagaattaattatgaggagtttgtggccatgatgaaaaagggaccacaagataccgaatcggcttcaggttggtggaatcgtttcgatttatttggttcctatgagagatcgagaaggtcgccgaatgtaggtagcaatgatgattga

SEQ ID NO: 4471 - protein, 548 aa, Vitis vinifera
  misc_feature (119)..(119): The Xaa at location 119 stands for Ala, or Val.
MGFCFSRPRDIPISSSSSSDGDFTNHHYQPIPISSSKESLDIPPPLSMSVPKPPTSSQIGTVLGRPLCEITSIYDIGKELGRGQFGITYLCTEKSTGLKYACKSISKRKLKSGKDIEDXKREILILEHLTGQPNIVEFKGAYEDKQNLHLVMELCSGGELFDRITAKGSYSEREAADICRQIVTVVHVCHFMGVMHRDLKPENFLMVSREENSPLKATDFGLSVFIEDNEVYTDVVGSAYYVAPEVLRRSYGKEIDVWSAGVILYILLSGVPPFWGENEKSIFDAVLQGYVDFDSAPWPSISSSAKDLIKKMLMKDPKRRITASDALNHPWLREDGEASDKPIDSAVLVRMKQFRAMNKLKKLALKVIAENLSEEDIKGLKQMFNNMDTDRSGTITFEELKTGLSRLGSKLSELEIKQLMDAVDVDQNGTLDYTEFITATMQRHRLEKEENLFKAFQFFDKDSSGFITREELKQAMTQYGMGDEATIDEVIDDVDTDKDGRINYEEFVAMMKKGPQDTESASGWWNRFDLFGSYERSRRSPNVGSNDD

SEQ ID NO: 4472 - DNA, 1686 bp, Vitis vinifera
  CDS (1)..(1686)
  misc_feature (132)..(132): w is a or t
  misc_feature (337)..(337): w is a or t
  misc_feature (340)..(340): y is t or c
  misc_feature (1542)..(1542): y is t or c
atgggcaacacatgccggggatctttcagagggaaatattttcagggctacggccagcccgaagaacaatcgacctccaagcgcaactctgaccgctcaaattccgattattcccccagcagcttgaactcwcagcagctcgtttctcaggaattcgccaaggaaaaccctaagaaagaaacccgtgtatccatccttagtccaaccaataaagacggcaccatgaggcgcggtgttgataaccaatcttattatgtgttgggtcataagactgctaatattcgcgacctttactcattggggcgtaaattgggacaaggacaatttggtacgactwatytatgtactgatatggccacaggcattgagtatgcctgcaaatcgatttcaaagagaaagttgatttctagggaagatgtagaggatgtgagaagggaaattcagataatgcatcatttggcaggtcacaagaatattgtgacgatcaagggtgcttatgaggatccattgtatgttcatatcgtgatggagctttgtgctgggggtgagttgtttgaccggatcattcagagggggcattacagtgagagaagggcagctgaattgacaaagattattgtaggggttgtcgaggcttgtcattcacttggggttatgcatagagatttaaagcctgagaatttcctattggttaacaaggatgatgatttctctctcaaagccattgattttggactctctgttttctttaaaccaggtcaagttttcactgatgtggttggaagtccatattatgttgctcctgaggtactttgcaagcattacgggccagaagcagatgtgtggacggcaggggtcatactgtatatattactaagtggtgtaccgccattttgggcagaaactcaacagggaatatttgatgcggtgctgaagggattcattgatttcgaatcagaaccatggccactaatatctgacagtgcaaaggatctgattcgcaaaatgctgtgttctcggcctgcagatcgcttgactgctcatgaagtattatgtcatccttggatatgcgagaatggagttgctccagacaggtcattagatccagctgtactttctcgtctcaaacagttctcggcaatgaataagttgaagaaaatggctttacgggtaatagctgaaagcctatcagaggaggagattgctggtttgagagagatgtttaaagcaatggatactgatagcagtggtgcaatcacatttgatgagctaaaagctggtttaagaagatatggttctaccttgaaagagtcagagatacgagatcttatggatgcagctgatgtggacaacagtgggaccattgattatggagaatttattgctgccacagttcatcttaataaactagaacgcgaggagcaccttgttgcagcatttcagtactttgacaaagatggaagtggctatataacagttgatgaactccagcaagcttgtgcagaacataatatgaccgatgttttccttgaagacattatyaaggaagttgatcaggataatgatggaaggatcgactacagtgaatttgttgctatgatgcaaaagggcaatgcagggattggaagaagaaccatgcgaaacagtctgaatatgagcatgagagatgcaccaggagctttttag

SEQ ID NO: 4473 - protein, 561 aa, Vitis vinifera
  misc_feature (113)..(113): The Xaa at location 113 stands for Asn, or Tyr.
MGNTCRGSFRGKYFQGYGQPEEQSTSKRNSDRSNSDYSPSSLNSQQLVSQEFAKENPKKETRVSILSPTNKDGTMRRGVDNQSYYVLGHKTANIRDLYSLGRKLGQGQFGTTXLCTDMATGIEYACKSISKRKLISREDVEDVRREIQIMHHLAGHKNIVTIKGAYEDPLYVHIVMELCAGGELFDRIIQRGHYSERRAAELTKIIVGVVEACHSLGVMHRDLKPENFLLVNKDDDFSLKAIDFGLSVFFKPGQVFTDVVGSPYYVAPEVLCKHYGPEADVWTAGVILYILLSGVPPFWAETQQGIFDAVLKGFIDFESEPWPLISDSAKDLIRKMLCSRPADRLTAHEVLCHPWICENGVAPDRSLDPAVLSRLKQFSAMNKLKKMALRVIAESLSEEEIAGLREMFKAMDTDSSGAITFDELKAGLRRYGSTLKESEIRDLMDAADVDNSGTIDYGEFIAATVHLNKLEREEHLVAAFQYFDKDGSGYITVDELQQACAEHNMTDVFLEDIIKEVDQDNDGRIDYSEFVAMMQKGNAGIGRRTMRNSLNMSMRDAPGAF

SEQ ID NO: 4474 - DNA, 1605 bp, Vitis vinifera
  CDS (1)..(1605)
atgggggcgtgcctctccgccaccaaagtcagaagctccaacagcaacaccaccgcaaacgccgcagccaccaagaatacccgccctagagggagctccaagactagcaataagaatcagcagaagaagccgcaggagggagacaggaatcggtcaaatcaacaacacaggaatcctcagccgcagaaggcgaaggattttgatgctcgctacaccatcggcaagttgttgggccacggccaatttgggtatacgtatgtcgccaccgataaggctaatggggatcgagttgcggttaagagaattgagaagaataagatgattcttcctattgctgttgaagacgttaagcgagaggtcaaaatattagaagcgcttaccggccatgagaatgtggttcagttccataatgcatttgaggatgattcttatgtctatatagttatggagttatgtgagggtggtgaattgttggatcggatattggccaagaaggatagccgttatagtgagaaagatgcagcaaaagttgtaaggcagatgctcaaagttgcagctgagtgtcatttacatggtctggtacaccgtgacatgaaaccagagaattttcttttcaagtcaaccaaagaggactcgcctttgaaggccacggattttggtctatcagacttcataaagcctgggaagaagtttcaagatattgttggtagtgcctactatgttgctcctgaagtattgagacggaaatcgggacctgaatcagatgtctggagtattggtgtcattacctacattttgctctgtgggaagcgccccttctgggataagactgaggatggaattttcaaggaggtccttaagaacaagcctgattttcgccgcaaaccatggccaaccataagcaatggtgctaaagattttgtaaagaagttactagtgaaagaccctcgggcaagacttactgctgctcaggccctatcacatccatgggttagagaaggaggagatgcctctgagattccgatcgatatttctgttctgtccaacatgcgtgaatttgtcaagtacagtcacttgaaacagtttgctttaagggcattggcgagcacgcttgatgatgaggaactggctgatcttagggatcaatttgatgctatcgatgtggataaaaatggctctattagccttgaagaaatgagacaggcccttgctaaagatcttccttggaagatgaaggaatcacgagttttagagattcttcaagcaattgacagcaatacagatgggcttgtggattttaccgagtttgttgcagccactctacacgtgcatcaattggaggaacatgactctgataagtggcgacagcggtcacaggctgcttttgacaaatttgatgtggatagggatgggttcataaccccagaggaacttaaactgcacacgggcttaagaggctcaattgacccactgctagaggaagctgatattgacaaagatgggaggataagcttggcagaattccgaaggcttctaagaacagcaagtattagttcgcgacaagtacctagctcatctggttttcggaatcctcggaaaatttag

SEQ ID NO: 4475 - protein, 534 aa, Vitis vinifera
MGACLSATKVRSSNSNTTANAAATKNTRPRGSSKTSNKNQQKKPQEGDRNRSNQQHRNPQPQKAKDFDARYTIGKLLGHGQFGYTYVATDKANGDRVAVKRIEKNKMILPIAVEDVKREVKILEALTGHENVVQFHNAFEDDSYVYIVMELCEGGELLDRILAKKDSRYSEKDAAKVVRQMLKVAAECHLHGLVHRDMKPENFLFKSTKEDSPLKATDFGLSDFIKPGKKFQDIVGSAYYVAPEVLRRKSGPESDVWSIGVITYILLCGKRPFWDKTEDGIFKEVLKNKPDFRRKPWPTISNGAKDFVKKLLVKDPRARLTAAQALSHPWVREGGDASEIPIDISVLSNMREFVKYSHLKQFALRALASTLDDEELADLRDQFDAIDVDKNGSISLEEMRQALAKDLPWKMKESRVLEILQAIDSNTDGLVDFTEFVAATLHVHQLEEHDSDKWRQRSQAAFDKFDVDRDGFITPEELKLHTGLRGSIDPLLEEADIDKDGRISLAEFRRLLRTASISSRQVPSSSGFRNPRKI

SEQ ID NO: 4476 - DNA, 1677 bp, Vitis vinifera
  CDS (1)..(1677)
  misc_feature (1197)..(1197): w is a or t
  misc_feature (1494)..(1494): y is t or c
atgggtaatacttgtgttggtccaagcatctccaagaatggtttcttccaatctgtgtcggctgcaatgtggcggagccgtgcaccggaaggctcggcttcttacacgaatggagaaactatggatgagccacaggctacaactaaagaacccggatcaccattgccagtccaaaacaaacccccagagcaaatgacaatccccaaggaggagcagcctacaaaacccaagaagccccatcaaattaagagggtgtcgagtgcagggcttaggatagaatctgtgttgcaaacaaaaaccggaaactttaagcaattttttattctggggaggaagcttggacaagggcaatttgggactacatttctttgtgtgcagaaagctaccaggaaagagtatgcgtgtaaatcaattgcgaaaaggaaattgttaacagatgaggacgtggaggatgtcagaagggaaattcagataatgcaccacctggcagggcatccaaatgtcatatctatcgagggagcttatgaggatgctgtggcagttcatgttgtcatggaactatgcaaaggtggggagctatttgataggattattcagcacggccattacactgaaagaaaggcagctgagcttactaggactatagttggggttgtggaggcttgtcattctcttggggtcatgcatcgagaccttaagcctgagaactttcttttagtcaatgaggaggaggattcacttctcaaaacaattgactttggattatcagttttcttcaagccaggggaaaaatttactgatgtggttggcagcccatactatgtcgcaccagaagttctgagaaagcgttatggtccagaagcagatgtttggagtgctggggtgatcctatacattttattgagtggagtgcctcccttttgggccgaaaccgagcaaggtatatttgaacaggtcttgcatggtgatcttgacttttcatcagacccttggccgagtatctcagaaagtgccaaagatttagtaaggagaatgcttgttcgagaccctagacggcggttgactgcacatgaagttttgtgtcacccttgggttcaggttgatggtgtagctcctgacaagcctcttgattcggcagttttaagtcgcttgaaacaattttcagcaatgaacaagctcaagaagatggctcttatwgtcattgcagagaacctatcagaagaagaaatagctggcttaaaagaaatgttcaagatgatagatacagacaacagtggccaaatcacttttgaagaactcaaggctggattaaaaagagttggtgctaatcttaaagagtctgaaatttatgatttaatgcatgcagctgatgttgataacaatggaaccattgattatggggagttcatagctgccacactacatctaaacaaagttgagagagaagatcatttatttgcagctttttcctactttgataaggatggaacctgygaagagtttggcttagaggatgtccgcctggaagaaatgatccgagaagttgatcaggacaatgatggacgcatagattacaatgagtttgtggccatgatgcaaaagggaaatccaggcattgggaagaagggcctgcaaaccagtttcagtatggggtttagagaggcgttaaaacattag

SEQ ID NO: 4477 - protein, 558 aa, Vitis vinifera
MGNTCVGPSISKNGFFQSVSAAMWRSRAPEGSASYTNGETMDEPQATTKEPGSPLPVQNKPPEQMTIPKEEQPTKPKKPHQIKRVSSAGLRIESVLQTKTGNFKQFFILGRKLGQGQFGTTFLCVQKATRKEYACKSIAKRKLLTDEDVEDVRREIQIMHHLAGHPNVISIEGAYEDAVAVHVVMELCKGGELFDRIIQHGHYTERKAAELTRTIVGVVEACHSLGVMHRDLKPENFLLVNEEEDSLLKTIDFGLSVFFKPGEKFTDVVGSPYYVAPEVLRKRYGPEADVWSAGVILYILLSGVPPFWAETEQGIFEQVLHGDLDFSSDPWPSISESAKDLVRRMLVRDPRRRLTAHEVLCHPWVQVDGVAPDKPLDSAVLSRLKQFSAMNKLKKMALIVIAENLSEEEIAGLKEMFKMIDTDNSGQITFEELKAGLKRVGANLKESEIYDLMHAADVDNNGTIDYGEFIAATLHLNKVEREDHLFAAFSYFDKDGTCEEFGLEDVRLEEMIREVDQDNDGRIDYNEFVAMMQKGNPGIGKKGLQTSFSMGFREALKH

SEQ ID NO: 4478 - DNA, 1449 bp, Vitis vinifera
  CDS (1)..(1449)
atggcctcaacgacggccgcccctgtcgtccatcgccctcttgcaggcaacggtcgagtactcggccggccgatggaggatgttcgacaaacctacatttttgggcgcgagctgggccgggggcagtttggtgtgacctacctggtgacgcataaggaaacgaaggagcaattcgcctgcaaatcgatcgcgacgaggaagctggtgaaccgcgatgacatcgaggatgtgcggagggaggtgcagatcatgcaccacctgaccgggcaccgcaatatcgtggagctcaagggcgcctacgaggatcgacactctgtgaatctggtgatggagctctgcgccggcggcgagctatttgatcggatcatcgctaaaggtcattactcggagcgggccgcggcggcgttgtgtcggcagatcgtgacggtggttcacaactgccataccatgggagtgatgcatagggatttgaagcctgaaaactttttgttcctgagtactgcggaggattcgccgttgaaggccacggattttggactttcggtcttctttaaaccaggagatgtatttaaagacctagttgggagtgcatattacgtagctcccgaagtgttgcgccgaagttatggagctgaggctgatatttggagtgcaggggtgatactgttcattctacttagtggggtcccaccattctggggagagaatgagcagagtatctttgacactattctacgaggacatattgatttctcgtcagatccttggccttccatatcaaatagtgctaaagatcttgtgaagaagatgctacgtgctgatcctaaagaaagacttactgcaattgatgtcctgaatcatccatggatgaaagaagatggggcatctgataagcccattgatattgctgtcttaactagagtgaagcagttcagggccatgaacaaactcaagaaagtggctctaaaggtaattgcagaaaatctttctgaagaagaaatcataggcttgaaggagatgttcaaatccatggacactgataacagtggaacaattacttatgaggagttgaaaaatggtcttccaaaattgggtaccaagctttctgaatctgaagtgaggcagttgatggaagcggctgatgtggatggaaatggaacaattgattacatcgagtttatatcagccacaatgcatatgaatagaatggaaagagaggaccacttatatagggcttttgaatattttgacaaggacaaaagcgggtatattacaatggaagaattggagcatgccctaaagaggtataatatgggtgatgaaaaaacaataaaggagatcattgcagaagttgacacagatcacgatggaagaatcaactatgaagagtttgcagctatgatgaggaaaggaaacccggatttgatcacaaacagacgtcggaaatga

SEQ ID NO: 4479 - protein, 482 aa, Vitis vinifera
MASTTAAPVVHRPLAGNGRVLGRPMEDVRQTYIFGRELGRGQFGVTYLVTHKETKEQFACKSIATRKLVNRDDIEDVRREVQIMHHLTGHRNIVELKGAYEDRHSVNLVMELCAGGELFDRIIAKGHYSERAAAALCRQIVTVVHNCHTMGVMHRDLKPENFLFLSTAEDSPLKATDFGLSVFFKPGDVFKDLVGSAYYVAPEVLRRSYGAEADIWSAGVILFILLSGVPPFWGENEQSIFDTILRGHIDFSSDPWPSISNSAKDLVKKMLRADPKERLTAIDVLNHPWMKEDGASDKPIDIAVLTRVKQFRAMNKLKKVALKVIAENLSEEEIIGLKEMFKSMDTDNSGTITYEELKNGLPKLGTKLSESEVRQLMEAADVDGNGTIDYIEFISATMHMNRMEREDHLYRAFEYFDKDKSGYITMEELEHALKRYNMGDEKTIKEIIAEVDTDHDGRINYEEFAAMMRKGNPDLITNRRRK

SEQ ID NO: 4480 - DNA, 1494 bp, Vitis vinifera
  CDS (1)..(1494)
atgaagaaatcgtccgcaggagcaccatcaaaacccacaaaaccggcatgggtcctcccctacaagacccaagacttgagaaccctgtacaccataggtcagaagctgggtcaagggcagtttgggacaacatttctgtgcacagacaaggccacgggccacaactatgcctgcaaatccatcccaaagaggaagctcttctgcaaggaggactatgatgatgtgtggagggagattcagataatgcaccacttgtctgagcacccaaatgtggtgaggatcaggggaacctatgaggaccccgtgtttgtgcatttggtcatggagttgtgtgagggaggtgagctttttgataggattgtgcagagggggcattacagtgagagagaggctgcaaagctgatcaagaccattgttggggtggttgaggggtgtcattcacttggggttatgcatagggatctcaagcccgagaacttcttgtttgataccactgctgaggatgctgctctcaaggccactgattttgggttgtctgttttctataagccaggtgaaaccttttctgatgtagttgggagtccctactatgttgcaccagaggtgttgtgcaagcattatggacctgaagcagatgtttggagtgcgggagttattttgtatatcttactaagtggggttccacctttttgggcagagactgaaacaggaatcttccgtcagatactacaaggaaagttagattttgaatctgaaccgtggccttgcatctcagaaactgccaaggaactattgcggaaaatgcttgataggaatccaaagaaaaggctaactgctcatgaagtcctttcccacccatgggtcgtagatgatagaatggccccagataaacctcttgattctgcagtgttatcacgtctgaagcagttctctgcaatgaacaaacttaaaaagatggctttgcgtgtcatagcagaggggctttctgaagaggagattggtggtttgcgggagttgttcaaaatgatagacacggacaatagtggaacaataacgtttgatgaattgaaagatggcttaaaaagagtgggctctgaactaatggagtctgaaatcagggatctcatgaatgcagctgacattgacaacagtggaacaatagattatggggaattccttgctgctactgtgcacttgaataagttggagagggaggaaaatttggtgtcagcattctccttttttgacaaagataaaagtggttacattaccattgatgagcttcaacaagcttgtaaagagtttggcttaagtgaggcccatcttgatgacatgatcaaagaaattgaccaagataatgatggacagatagattacggggaatttgctgcaatgatgaggaagggcaatggaggaatcgggcggagaaccatgagaaacaacttaaacttgggagatgttctagggataccagacatgcgcttgacaaactga

SEQ ID NO: 4481 - protein, 497 aa, Vitis vinifera
MKKSSAGAPSKPTKPAWVLPYKTQDLRTLYTIGQKLGQGQFGTTFLCTDKATGHNYACKSIPKRKLFCKEDYDDVWREIQIMHHLSEHPNVVRIRGTYEDPVFVHLVMELCEGGELFDRIVQRGHYSEREAAKLIKTIVGVVEGCHSLGVMHRDLKPENFLFDTTAEDAALKATDFGLSVFYKPGETFSDVVGSPYYVAPEVLCKHYGPEADVWSAGVILYILLSGVPPFWAETETGIFRQILQGKLDFESEPWPCISETAKELLRKMLDRNPKKRLTAHEVLSHPWVVDDRMAPDKPLDSAVLSRLKQFSAMNKLKKMALRVIAEGLSEEEIGGLRELFKMIDTDNSGTITFDELKDGLKRVGSELMESEIRDLMNAADIDNSGTIDYGEFLAATVHLNKLEREENLVSAFSFFDKDKSGYITIDELQQACKEFGLSEAHLDDMIKEIDQDNDGQIDYGEFAAMMRKGNGGIGRRTMRNNLNLGDVLGIPDMRLTN

SEQ ID NO: 4482 - DNA, 1665 bp, Zea mays
  CDS (1)..(1665)
atgggcaacgcatgcggcggcgcccttagatccaagcaccagcacagcttcaagcacgccgcgtcgtcgcagcgccaccacgcctcctccgagtacagcgccagcgccgcggccgacgactcgcccaggaagccgccaccgccgcccgccaccacggacgcccacgcgccgccgccgccgcccgccaccgccatgaggcgcggcggggccggcgcgccgccggacctggggtccgtgctcggccaccccacccccaacctccgcgacctctacgcgctcggcaggaagctcgggcaggggcagttcggcaccaccttcctctgcaccgagctcgccacgggggtcgactacgcctgcaagtccatctccaagcgcaagctcatcaccagggaggacgtcgacgacgtgcgccgcgagatccagatcatgcaccacctctccggccacaccaacgtcgtcgccatcaagggcgcctacgaggaccagctctacgtccacatcgtcatggagctctgcgccgggggcgagctcttcgaccggatcatacagcgcggccactacagcgagcgcaaggccgccgagctcaccaggatcatcgtcggcgtcgtcgaggcctgccactccctcggtgtcatgcaccgggacctcaagcccgagaacttcctgctcgtcaacaaggacgacgacctctcgctcaaggccatcgatttcggactctctgtcttcttcaagcctggtcaagttttcaccgatgttgttggtagcccatattatgtagctccagaagttttgttgaaaaattatggaccagcagctgatgtatggacagctggtgtcattctttacattctactaagtggcgtgcctccgttttgggcagaaacacaacaaggaatatttgatgctgtattgaaaggtgtcattgattttgattctgatccgtggcctgtcatatctgatagtgcaaaagatcttataagacggatgctgaatcctcgctctgccgagcgcttaacagcacatgaagttctatgccatccatggattcgtgaccatggagtagctcctgaccgtccactggatccagctgtcttatctcgcattaagcaattctctgcaatgaataagttgaagaaaatggctttgcgagtaatagctgagagcctatcagaagaggaaattgcggggttgaaggaaatgttccagaccatggacactgacaacagtggcgcaattacctacgatgaactaaaagaaggattgagaaaatatggttccacactgaaggacactgagattcgtgatcttatggatgcagctgatatcgacaacaatggaacaattgactacattgaattcattgctgcaactttgcatctcaataagctggagcgcgaagaacatctcgtggcagccttttcatatttcgacaaagatggtagtggctatatcacagtggacgaactacagcaagcttgcaaagagcataacatgccggatgcttttcttgatgatgtcatcaacgaagctgatcaggataacgatggccgcattgactatggagagtttgttgccatgatgaccaagggcaatatgggagttggtcgacggacaatgagaaacagcttgaatatcagcatgagggacgcacctggtgcattctga

SEQ ID NO: 4483 - protein, 554 aa, Zea mays
MGNACGGALRSKHQHSFKHAASSQRHHASSEYSASAAADDSPRKPPPPPATTDAHAPPPPPATAMRRGGAGAPPDLGSVLGHPTPNLRDLYALGRKLGQGQFGTTFLCTELATGVDYACKSISKRKLITREDVDDVRREIQIMHHLSGHTNVVAIKGAYEDQLYVHIVMELCAGGELFDRIIQRGHYSERKAAELTRIIVGVVEACHSLGVMHRDLKPENFLLVNKDDDLSLKAIDFGLSVFFKPGQVFTDVVGSPYYVAPEVLLKNYGPAADVWTAGVILYILLSGVPPFWAETQQGIFDAVLKGVIDFDSDPWPVISDSAKDLIRRMLNPRSAERLTAHEVLCHPWIRDHGVAPDRPLDPAVLSRIKQFSAMNKLKKMALRVIAESLSEEEIAGLKEMFQTMDTDNSGAITYDELKEGLRKYGSTLKDTEIRDLMDAADIDNNGTIDYIEFIAATLHLNKLEREEHLVAAFSYFDKDGSGYITVDELQQACKEHNMPDAFLDDVINEADQDNDGRIDYGEFVAMMTKGNMGVGRRTMRNSLNISMRDAPGAF

SEQ ID NO: 4484 - DNA, 1806 bp, Arabidopsis thaliana
  CDS (1)..(1806)
atgggtctatgtacttcgaaaccgaattcatctaattccgatcaaactccggcgaggaatagtccacttccggcgtctgaatccgtcaagccttcgagctcttccgttaatggtgaagatcagtgtgtaacaacaacgaacaatgaaggcaaaaagtctccgtttttccctttttatagtccaagtccagctcactatttcttctccaagaagactccggcgagatctccggcgactaattcgactaattcgactccgaagcgattctttaaacggccgtttcctcctccgtctccggctaaacatatcagagctgttttagcgagaaggcatggttctgtgaagcctaattcgtcggcgatccctgaaggtagtgaagctgaaggaggtggtgttggattggataaaagctttggtttttccaagagttttgcgagtaagtatgagcttggtgatgaagttggtcgtggtcattttggttatacttgtgctgctaagtttaagaagggtgataataaaggtcaacaagtcgcggttaaagtcattcccaaagcaaagatgacgacggctattgcaattgaagatgtgagaagggaagtgaagatattgagggctttgtctggtcataacaatcttcctcatttctatgatgcttatgaggatcatgataatgtctatatagtgatggaactatgtgaaggaggagagcttttggatagaatactttcaagaggtgggaagtacacagaggaggatgcaaagaccgttatgatacaaatattgaatgtggttgctttttgtcatctgcaaggcgttgtacacagagatcttaaaccagagaattttctttttacctcaaaagaagacacctctcaattgaaggcaatagatttcggtttgtcagattacgtgagaccagatgagaggctcaatgacattgttggtagtgcatactatgtagcacctgaagttctgcatagatcttacagtacagaagctgatatttggagtgttggtgtgattgtatatattctattgtgtggaagccgaccgttttgggctaggacagaatcaggaatctttcgtgctgttctaaaagctgatccaagttttgatgaccctccttggcctttgttatcttcagaggcaagagattttgtaaagcggttgctaaacaaagatccgcgtaaaagattaacagctgctcaagccttaagtcatccatggataaaggactcaaacgacgcaaaggttccaatggatattctggttttcaaacttatgagagcttatttacgatcatcatctctccgtaaagctgcattaagagctttatcgaaaacacttacggttgatgaactgttttatctgagagagcagtttgctttgttagaacctagtaagaacggaaccataagtctagaaaacatcaaatcagctctgatgaaaatggcaacagatgcgatgaaggactcacgtattccagagttcttaggacaactgagtgctcttcaatatagaagaatggactttgaggaattctgtgcagcggcattgagtgttcaccagctagaagctcttgatcgatgggaacaacacgctcgttgtgcttatgagcttttcgaaaaggaagggaaccgaccaatcatgatcgatgaactcgcttcggaacttggtcttggcccttctgtaccggttcacgcagtgcttcacgattggcttagacataccgatgggaagcttagctttctcggatttgtgaaattgcaacatggtgtgtctagccgcacgatcaaagctcattag

SEQ ID NO: 4485 - protein, 601 aa, Arabidopsis thaliana
MGLCTSKPNSSNSDQTPARNSPLPASESVKPSSSSVNGEDQCVTTTNNEGKKSPFFPFYSPSPAHYFFSKKTPARSPATNSTNSTPKRFFKRPFPPPSPAKHIRAVLARRHGSVKPNSSAIPEGSEAEGGGVGLDKSFGFSKSFASKYELGDEVGRGHFGYTCAAKFKKGDNKGQQVAVKVIPKAKMTTAIAIEDVRREVKILRALSGHNNLPHFYDAYEDHDNVYIVMELCEGGELLDRILSRGGKYTEEDAKTVMIQILNVVAFCHLQGVVHRDLKPENFLFTSKEDTSQLKAIDFGLSDYVRPDERLNDIVGSAYYVAPEVLHRSYSTEADIWSVGVIVYILLCGSRPFWARTESGIFRAVLKADPSFDDPPWPLLSSEARDFVKRLLNKDPRKRLTAAQALSHPWIKDSNDAKVPMDILVFKLMRAYLRSSSLRKAALRALSKTLTVDELFYLREQFALLEPSKNGTISLENIKSALMKMATDAMKDSRIPEFLGQLSALQYRRMDFEEFCAAALSVHQLEALDRWEQHARCAYELFEKEGNRPIMIDELASELGLGPSVPVHAVLHDWLRHTDGKLSFLGFVKLQHGVSSRTIKAH

SEQ ID NO: 4486 - DNA, 1479 bp, Zea mays
  CDS (1)..(1479)
atgaggcgcggcggggccggcgcgccgccggacctggggtccgtgctcggccacacaacccccaacctccgcgacctctacgcgctcggcaggaagctcgggcaggggcagttcggcaccacctacctctgcaccgagctcgccacggggatcgactacgcctgcaagtccatctccaagcgcaagctcatcaccaaggaggacgtcgacgacgtgcgccgcgagatccagatcatgcaccacctctccggccacaagaacgtcgtcgctatcaagggcgcgtacgaggaccaggtctacgtccacatcgtcatggagctctgtgccgggggcgagctcttcgaccggatcatacagcgcggacactacagcgagcgcaaggccgccgcgctcacaaggatcatcgtcggggtcgtcgaggcctgccactcgctcggggtcatgcaccgggacctcaagcccgagaacttcctgctcgccaacagggacgatgacctctcgctcaaggccatcgatttcggactctctgtctttttcaagcctggtcaagttttcaccgatgtagttggtagcccatattatgtagctccagaagttctgttgaaaagttatggaccagcagctgatgtatggacagccggtgtcattctttacattctactgagtggtgtgcctccattttgggcagaaacacaacaaggaatatttgatgctgtattgaagggtgccattgattttgattctgatccgtggcctgtcatatctgatagtgcaaaagatcttatcagacgaatgctgaatcctcgccctgccgagcgcttaacagcacatgaagttctatgccatccatggattcgtgatcatggagtagctcctgaccgtccactggatccagctgtcttatctcgcattaagcaattctctgcaatgaataagttgaagaaaatggctttacgagtaatagctgagagcctatcagaagaggaaattgcggggttgaaggaaatgttccagaccatggacactgacaacagtggcgcaattacttatgatgagctaaaagaaggattgagaaaatatggctccacactaaaggacactgagattcgtgatcttatggatgcagctgatattgacaacagtggaacaattgactacatagaattcattgctgcaactttgcatctcaataagctggagcgtgaggaacatctcgtggcagccttttcatatttcgacaaagatggtagtggctatatcacagtggacgaactacagctagcttgcaaagagcataacatgccggatgcttttcttgatgatgtcatcaacgaagctgatcaggacaatgatggccgcattgactatggagaatttgttgccatgatgaccaagggcaatatgggagtcggtcgaagaacaatgagaaacagcttgaatatcagcatgagggacgacctggtgtgttctgagacttaa

SEQ ID NO: 4487 - protein, 492 aa, Zea mays
MRRGGAGAPPDLGSVLGHTTPNLRDLYALGRKLGQGQFGTTYLCTELATGIDYACKSISKRKLITKEDVDDVRREIQIMHHLSGHKNVVAIKGAYEDQVYVHIVMELCAGGELFDRIIQRGHYSERKAAALTRIIVGVVEACHSLGVMHRDLKPENFLLANRDDDLSLKAIDFGLSVFFKPGQVFTDVVGSPYYVAPEVLLKSYGPAADVWTAGVILYILLSGVPPFWAETQQGIFDAVLKGAIDFDSDPWPVISDSAKDLIRRMLNPRPAERLTAHEVLCHPWIRDHGVAPDRPLDPAVLSRIKQFSAMNKLKKMALRVIAESLSEEEIAGLKEMFQTMDTDNSGAITYDELKEGLRKYGSTLKDTEIRDLMDAADIDNSGTIDYIEFIAATLHLNKLEREEHLVAAFSYFDKDGSGYITVDELQLACKEHNMPDAFLDDVINEADQDNDGRIDYGEFVAMMTKGNMGVGRRTMRNSLNISMRDDLVCSET

SEQ ID NO: 4488 - DNA, 1473 bp, Glycine max
  CDS (1)..(1473)
atgcagaagcatggttttgcatcaaagcgcaacgtgttgccgtatcaaacggcgaggctaagggaccactacgttctggggaagaagctggggcaagggcaattcgggacgacgtacctgtgcacccacaaggtgacggggaagctctacgcgtgcaaatcgatcccgaagaggaagcttatgtgccaggaggattacgatgatgtgtggagggagattcagatcatgcaccatttgtcggagcatccaaacgttgtccagatacaaggcacgtacgaggattccgtgttcgtgcaccttgtcatggaactatgtgccggcggggagcttttcgacaggatcattcagaaggggcattacagcgagagagaggctgccaagttgataaagaccattgttggggtggtggaggcgtgccactctcttggggtcatgcatagggatctcaagcctgagaatttcttgtttgatacccctggcgaagatgcccagatgaaggccaccgattttggcctctctgtcattctacaagccagacaagcctttcatgatgtagtaggaagtccctactatgttgccccagaggtgttgtgcaagcaatatggacctgaagtggacgtatggagtgctggtgttatcctatacatcttactgagtggggtgccacctttctgggctgaaaccgaagcaggaattttcagacagattttaaatggagatcttgattttgtttctgaaccgtggccaagtatctcagaaaatgctaaagaattggtaaaacagatgttggatagggaccctaagaaaagaatttctgctcatgaagttttatgtaacccttgggttgttgatgacattgcacctgacaaacctctggactctgctgttttgacacgcctaaagcatttctcagcaatgaataaacttaagaagatggcattacgggtcatagcagagaggctttcagaggaagaaataggtggattgaaagagttgtttaaaatgattgacacagacaatagtgggacaataacttttgaggaactgaaggaggggttgaaaagtgtgggctctaatctcatggaatctgaaattaaatcacttatggaagcggctgatatagacaacaatggatcaatagactatggtgaatttcttgctgctacactgcacttgaataagatggaaagagaggagaatttggttgctgctttcgcctattttgataaagatggtagtggttacatcaccattgacgagcttcaacaggcttgtaaggacttcagcctaggtgatgtgcatctggatgagatgatcaaagagattgatcaagataatgatgggaggattgattatgcggagtttgcagcaatgatgaaaaagggtgatccaaatatgggtagaagcagaaccatgaaaggcaatttgaacttcaatattgcagatgcatttggaatgaaagactcttcttga

SEQ ID NO: 4489 - protein, 490 aa, Glycine max
MQKHGFASKRNVLPYQTARLRDHYVLGKKLGQGQFGTTYLCTHKVTGKLYACKSIPKRKLMCQEDYDDVWREIQIMHHLSEHPNVVQIQGTYEDSVFVHLVMELCAGGELFDRIIQKGHYSEREAAKLIKTIVGVVEACHSLGVMHRDLKPENFLFDTPGEDAQMKATDFGLSVILQARQAFHDVVGSPYYVAPEVLCKQYGPEVDVWSAGVILYILLSGVPPFWAETEAGIFRQILNGDLDFVSEPWPSISENAKELVKQMLDRDPKKRISAHEVLCNPWVVDDIAPDKPLDSAVLTRLKHFSAMNKLKKMALRVIAERLSEEEIGGLKELFKMIDTDNSGTITFEELKEGLKSVGSNLMESEIKSLMEAADIDNNGSIDYGEFLAATLHLNKMEREENLVAAFAYFDKDGSGYITIDELQQACKDFSLGDVHLDEMIKEIDQDNDGRIDYAEFAAMMKKGDPNMGRSRTMKGNLNFNIADAFGMKDSS

SEQ ID NO: 4490 - DNA, 1617 bp, Glycine max
  CDS (1)..(1617)
atggttacagacatgctgggactggtggtgtgcacaaccaagaagactcatgaacctttggtcaaccaatcaagagcacctgcaaatcaaccttatcatttacatgaaaagcatgctgcatccactgctcagacagtgcctcaaaatatgccatggaagcctcctggtccagcccttagtcctaaacctgttgttggtgttaggcaagacacaattcttgggaagcagtttgaggatgtgaagcagttccacacacttgggaaggagttgggtagagggcaatttggtgtgacatatctttgcactgagaattcgaccggattgcagtatgcctgcaagtccatttccaagaggaaacttgcgagcaaatctgataaggaggacataaagagggagattcagattatgcagcatttgagtggtcaacccaacattgttgagttcaaaggggcttatgaggataggagctcagttcatgttgtgatggagctgtgtgcaggtggggaactttttgataggattattgccaaggggcattacagtgagaaggctgctgcttcaatttgcagacaaattgtaaatgttgttcatatctgtcatttcatgggtgtgatgcatagggatctgaaaccagagaattttttgctatctagtagggacgaaaatgcacttctcaaggcaaccgattttggcttgtcagttttcattgaagaaggaaaggtatatcgggatatagttggtagtgcttactatgttgctcctgaagttctgcggcgcagatgtgggaaggaaatagatatatggagtgcaggagtcatattgtatatcttacttagtggagtccctccattttgggctgagactgagaagggaatatttgatgccatattggaaggtcacattgattttgaaagtcaaccatggcctaacatctcagacagtgccaaggatcttgttcgtaagatgcttatacaggatccaaagaaacgcattacctctgctcaagttcttgagcacccatggattaaagatggaaatgcttcagacaagccgatagacagtgcagtcctttccagaatgaagcaatttagagcaatgaataagctaaagaaacttgccttgaaggtcattgctgagaatatgtctgcagaagagatccaaggtttgaaggcaatgtttacaaatatggacactgacaagagtggtacaatcacctatgaagaacttaagtcaggattgcatagacttggctcaaagcttacagaggctgaagtgaagcaacttatggaagctgctgatgtagatggaaatggctcaattgactacatagaattcatcactgctacaatgcatagacacaaattagaaagagatgaccaacttttcaaggccttccaatattttgataaagacaacagtgggtttattacaagagatgaattggaatcagccatgaaagaatatggtatgggtgatgatgcaacaatcaaggaaatcatatctgaagttgatacaattatatctgaagtggatacagatcatgatggtagaatcaactatgaagaattctctgcgatgatgaagagtgggaaccaacaacaaggcaagctattctaa

SEQ ID NO: 4491 - protein, 538 aa, Glycine max
MVTDMLGLVVCTTKKTHEPLVNQSRAPANQPYHLHEKHAASTAQTVPQNMPWKPPGPALSPKPVVGVRQDTILGKQFEDVKQFHTLGKELGRGQFGVTYLCTENSTGLQYACKSISKRKLASKSDKEDIKREIQIMQHLSGQPNIVEFKGAYEDRSSVHVVMELCAGGELFDRIIAKGHYSEKAAASICRQIVNVVHICHFMGVMHRDLKPENFLLSSRDENALLKATDFGLSVFIEEGKVYRDIVGSAYYVAPEVLRRRCGKEIDIWSAGVILYILLSGVPPFWAETEKGIFDAILEGHIDFESQPWPNISDSAKDLVRKMLIQDPKKRITSAQVLEHPWIKDGNASDKPIDSAVLSRMKQFRAMNKLKKLALKVIAENMSAEEIQGLKAMFTNMDTDKSGTITYEELKSGLHRLGSKLTEAEVKQLMEAADVDGNGSIDYIEFITATMHRHKLERDDQLFKAFQYFDKDNSGFITRDELESAMKEYGMGDDATIKEIISEVDTIISEVDTDHDGRINYEEFSAMMKSGNQQQGKLF

SEQ ID NO: 4492 - DNA, 1737 bp, Tortula ruralis
  CDS (1)..(1737)
atgggcaacagttgtgtaggagcggctgggtactttcagggcttcaccagtgtgatcgcactgggagggcgtagctccagatcccctagtgaggtatcacccactccatccaaggcagagtccagaggggggagcagggcagaggcggagtccccggagactcaacggaaaccgccacgcccagctcacattcctgctgtggaaccggccgaaactcagcaattcaaagaagtgatcgaagccatgaagaaagggagagagatgaagcccgtccctggccagagtctgactcactctgtgctgcagcggaagacagagaacctcagagacctgtatgttctgggaaagaagctggggcaaggtcaattcggcaccacctacctgtgcattgagaaggccaccaacagggagtacgcatgcaagtctattgccaagcggaagcttatctccaaggaagacgtggatgacgttcgccgtgaactgcagatcatgcatcacctttcaggacatccgaacattgtcatgatcaagggggcgtatgaggatcctgcttcagtgcatctggtgatggagctttgtgcaggcggtgagctgtttgaccgcatcattcaacgaggacagtactcggaagccaaagcggcagtgctcactcgtactatcgtgggcgtggttgagacctgccattctcttggcgtgatgcacagagatttgaagccggagaacttcctgttttcgagtacgaaggaggatgcggctctgaaaacgactgattttgggctatcagtgttctttaaacctggagaagttttcagagatgtggttggaagcccttactatgtggcacctgaagtgttgaggaagaactatggcccggaagcggatgtgtggagtgcgggtgtgatactttacatccttctcagcggagtccctccattctgggcagagacggagcagggcatctttgagcaggttttgaaatcagagcttgattttgcatcagatccatggcctaagatttctgatagcgccaaggatttgatccgcaaaatgctcacgccccaggcttcgaagaggttgaaagcccatcaagtgttggcacatccttggatctgcgaggacggagtagcgcccgacagacccatcgattccgcagtgcaatcccggctcaagcacttctccgcaatgaacaagctgaagaagatcgccatccgggtgatcgcggagtccttgtcggaggaggagatcgcaggtctgaaggagatgttcaagatgatggacacggacaactcagggtccatcagctacgaggagctgaaggcgggtctgaagaaagtgggttccaatctcaaagaggaagacgttcggcagctcatggacgccgctgacgtcgacggcagtggggcaatcgattatggtgagtttctggccgccactctccacctgaacaaggtcgaacgcgatgagaacatgttcgccgccttctcgtacctggacaaggacaacagcggctatctgacggtcgatgagctgcaacatgcgttggccgaattcaacatgggagacgtatccgtggaggagctgctcagggaggtcgaccagaacaacgatggtcagattgattacaccgagttcgtcaccatgatgcgcaagggcaatatgggcggcggtgctggtcgctcatcgctacgcaacagccagcagttgagtctgaccgacgtgttggggatcggaggatag

SEQ ID NO: 4493 - protein, 578 aa, Tortula ruralis
MGNSCVGAAGYFQGFTSVIALGGRSSRSPSEVSPTPSKAESRGGSRAEAESPETQRKPPRPAHIPAVEPAETQQFKEVIEAMKKGREMKPVPGQSLTHSVLQRKTENLRDLYVLGKKLGQGQFGTTYLCIEKATNREYACKSIAKRKLISKEDVDDVRRELQIMHHLSGHPNIVMIKGAYEDPASVHLVMELCAGGELFDRIIQRGQYSEAKAAVLTRTIVGVVETCHSLGVMHRDLKPENFLFSSTKEDAALKTTDFGLSVFFKPGEVFRDVVGSPYYVAPEVLRKNYGPEADVWSAGVILYILLSGVPPFWAETEQGIFEQVLKSELDFASDPWPKISDSAKDLIRKMLTPQASKRLKAHQVLAHPWICEDGVAPDRPIDSAVQSRLKHFSAMNKLKKIAIRVIAESLSEEEIAGLKEMFKMMDTDNSGSISYEELKAGLKKVGSNLKEEDVRQLMDAADVDGSGAIDYGEFLAATLHLNKVERDENMFAAFSYLDKDNSGYLTVDELQHALAEFNMGDVSVEELLREVDQNNDGQIDYTEFVTMMRKGNMGGGAGRSSLRNSQQLSLTDVLGIGG

SEQ ID NO: 4494 - DNA, 1590 bp, Fragaria ananassa
  CDS (1)..(1590)
atgggtaattgctgtgtcacccctccccagacgggttcgccgttaaagaacaagaagaataagccaaacccgtttgcgatagactacgttgtcgccaatggcggcaagctctccgttttgaagaacccaaccggcactgaaatcgagcagacttacgagctgggccgcgagctcggccgcggagagttcgggattacgtatctgtgtactgacaaggccaccaacgagaactacgcttgcaaatcgatatcgaagcagaaactgaggacggctgtggatattgaagatgtgaggagggaagttgagatcatgaagcacttgcctaagcatcccaatattgtgagcttgaaagatacttacgaggatgataatgctgtccatcttgttatggagctctgtgagggcggtgagctttttgatcggatcgtgtctaggggacattacactgagcgtgctgctgctgctgtcactaagactattgtggaagttgttcagatgtgccacaagcatggtgtgatgcaccgggatcttaaacctgagaactttttgtttgcaaacaagaaagaaacagcgcccttgaaggcaattgattttgggttgtcagtgttctttaagcctggtgaaagattcagtgaaattgttggaagtccatactacatggctcctgaggtgctaagacgcaattatggtcctgaagttgatgtgtggagtgctggagttatactttacatcttactttgtggtgttccgcctttctgggcagaaactgaacagggagttgcacaagcaattatacggtctgttgtagattttaagagggacccctggcctaaggtttctgataatgcaaaagaccttgtgaaaaagatgcttgatcctgacccgaagcggaggcttacagctcagcaagttctagatcatacttggttgcaaaatgcaaagagagctccaaatgtttctttaggtgaaacagtgagagcaaggctcaagcagttctctgtaatgaacaagcttaagaaaagtgcactgaaggtcatagctgagcatttgtcacaggaggaagttgctggcatacaagagggatttaagatcatggatactagcaataagggcaagattaacattgatgagctaagagttgggttacataaactaggccatcagattcctgatgctgatgttcatatcctaatggaagctggtgatgtagataatgatgggtatctggactatggggagtttgttgccatttctgttcacctaagaaggatgggcaatgatgatgagcaccttcgcaaagcttttgacttctttgatcaaaacaaaagtgggttcattgaagtcgaggagttgcgaactgccttggctactgaagttgatgaccacgttgaagatgttattagtgccattatcagtgacgtggatacagacaaggatggaaaaataagttacgaggagtttgccaccatgatgaaggccggcacagattggagaaaggcctcaaggcagtattcacgagagcggttcaatagtctcagtttgaaattgatgagggatggatcattggaaggtaaaaccgagagcaaatga

SEQ ID NO: 4495 - protein, 529 aa, Fragaria ananassa
MGNCCVTPPQTGSPLKNKKNKPNPFAIDYVVANGGKLSVLKNPTGTEIEQTYELGRELGRGEFGITYLCTDKATNENYACKSISKQKLRTAVDIEDVRREVEIMKHLPKHPNIVSLKDTYEDDNAVHLVMELCEGGELFDRIVSRGHYTERAAAAVTKTIVEVVQMCHKHGVMHRDLKPENFLFANKKETAPLKAIDFGLSVFFKPGERFSEIVGSPYYMAPEVLRRNYGPEVDVWSAGVILYILLCGVPPFWAETEQGVAQAIIRSVVDFKRDPWPKVSDNAKDLVKKMLDPDPKRRLTAQQVLDHTWLQNAKRAPNVSLGETVRARLKQFSVMNKLKKSALKVIAEHLSQEEVAGIQEGFKIMDTSNKGKINIDELRVGLHKLGHQIPDADVHILMEAGDVDNDGYLDYGEFVAISVHLRRMGNDDEHLRKAFDFFDQNKSGFIEVEELRTALATEVDDHVEDVISAIISDVDTDKDGKISYEEFATMMKAGTDWRKASRQYSRERFNSLSLKLMRDGSLEGKTESK

SEQ ID NO: 4496 - DNA, 1629 bp, Oryza sativa
  CDS (1)..(1629)
atggggaatcagtgccagaacgggactcttgggagtgattaccacaatcggttcccaagggagcatgccgttgggtacgttcagggggatagctacttggacttgaagaagttcgatgatacttggcctgaggtgaacaacttcaagcctactgctgctagtattctcaggcgggggttggatcctacatctatcaatgtccttgggcggaagacagcggacctaagggagcattatatcattggtcggaagcttggtcagggccagtttggcacaacttacctctgtaccgagatcaatacagggtgtgagtatgcttgcaagaccatcccaaagcgcaagctcatcaccaaggaggatgtagaagatgtgcgccgtgagattcagataatgcaccatttgtcgggccacaagaatgttgttgcaatcaaggatgtctatgaggatgggcaagcggtgcacattgtgatggagctctgcgctggtggggagctctttgacaggattcaggagaaggggcattacagcgagcggaaggctgcagagcttataagaataattgtcagcattgtggctatgtgccattcgctcggggtgatgcaccgtgatcttaagccagaaaatttcctccttttggataaagatgatgatctgtcaataaaggcaatagattttggtctatccgtgttcttcaaaccaggtcaggttttcactgagctggttgggagtccatattatgttgctcctgaggtattgcacaaacgttatggaccagaatctgatgtgtggtcagctggagtgatactttacgttttgctgagtggagtgccaccattttgggcagagacacaacaaggaatatttgatgcagttctgaagggtcacattgattttcaatctgatccatggccaaagatatctgacagtgcaaaggatcttataagaaaaatgctctctcattgcccttcggagcgtttgaaggcccatgaagtgctaaggcatccttggatctgtgaaaatggagttgccactgatcaagctctggatcccagtgttatctctcggctcgaacaattctctgcaatgaacaagttaaagaagttggctctgagagtgatagctgagcgtctttcagaggaggagattgctgggttaagagaaatgttcaaggcagtggacacaaaaaatagaggtgttatcactttcggtgagcttagagaaggtttaagaagatttggcgctgaatttaaggatacagagattggtgatataatggaagcggcacacaacgacaataatgttacaatccattatgaagaatttattgctgcaactctacctcttaacaagatggaacgtgaggagcacctgctggcagctttcacatattttgacaaagatgggagtggttatatcacagttgacaagcttcgacgagcttgtggagaacataacatggaggattcactccttgaagagattatttcacaggttgatcaaaacaatgacggccaaattgactacgccgaatttgttgccatgatgccaggcagcaacgttggactacggtggcaaacaatggaaagcagtttgaatgtagcattaagagacgcacctcaagtacattga

SEQ ID NO: 4497 - protein, 542 aa, Oryza sativa
MGNQCQNGTLGSDYHNRFPREHAVGYVQGDSYLDLKKFDDTWPEVNNFKPTAASILRRGLDPTSINVLGRKTADLREHYIIGRKLGQGQFGTTYLCTEINTGCEYACKTIPKRKLITKEDVEDVRREIQIMHHLSGHKNVVAIKDVYEDGQAVHIVMELCAGGELFDRIQEKGHYSERKAAELIRIIVSIVAMCHSLGVMHRDLKPENFLLLDKDDDLSIKAIDFGLSVFFKPGQVFTELVGSPYYVAPEVLHKRYGPESDVWSAGVILYVLLSGVPPFWAETQQGIFDAVLKGHIDFQSDPWPKISDSAKDLIRKMLSHCPSERLKAHEVLRHPWICENGVATDQALDPSVISRLEQFSAMNKLKKLALRVIAERLSEEEIAGLREMFKAVDTKNRGVITFGELREGLRRFGAEFKDTEIGDIMEAAHNDNNVTIHYEEFIAATLPLNKMEREEHLLAAFTYFDKDGSGYITVDKLRRACGEHNMEDSLLEEIISQVDQNNDGQIDYAEFVAMMPGSNVGLRWQTMESSLNVALRDAPQVH

SEQ ID NO: 4498 - DNA, 1611 bp, Arabidopsis thaliana
  CDS (1)..(1611)
atgggtctctgtttctcgtctcctaaagccaccagacgtggcaccggtagtcggaaccctaatcctgattctccgacgcaggggaaggcgagtgagaaggttagtaataaaaacaagaagaatacgaagaagatccaattgaggcaccaaggagggatcccgtacggtaaacgcatcgattttgggtacgctaaggatttcgataaccgatacaccattgggaaattgctcggacatggccagtttggctttacctacgtcgccaccgataacaacaatggcaatcgcgttgcagtcaagagaatcgacaaggccaagatgactcaaccgattgaagtggaagatgtgaagcgagaggttaagatactacaagctttaggtgggcatgagaatgtggtaggctttcacaatgcatttgaggacaagacctatatttacattgtcatggagttatgtgacggtggtgaattgctagatcgaatactagctaaccgttacaccgagaaagatgcagcggttgtggtgagacaaatgctgaaagttgcagctgaatgtcatttacgaggtctagttcaccgcgacatgaagccagagaattttctgttcaaatcaaccgaagaaggttcatctctaaaggctacagattttggtctgtcggacttcataaagccaggagtgaaatttcaggatatagtaggaagcgcatactacgttgcacctgaagtgttgaaacgtaggtcaggacctgaatcagacgtttggagtattggtgtcatcacttacattctgctctgcgggagaagacccttctgggataagactcaagacggaatattcaatgaggtcatgaggaaaaaacctgatttcagagaagtcccatggccaaccattagcaacggtgccaaagatttcgtgaagaagttgttagttaaggagcctcgggcacggttaacagcagctcaagcgctatcacattcatgggtgaaagaaggaggtgaggcctcagaggttccaatagacatatctgttcttaacaatatgcgtcagtttgtgaaattcagccgtctgaagcagattgcacttagggctctggcgaaaacaattaatgaggatgagctggatgatctcagagaccagtttgatgcgattgacattgacaagaacggttctataagccttgaggaaatgaggcaggctcttgcgaaagatgttccttggaaactcaaagatgcaagagttgcagagattctccaagcgaatgatagcaacactgatggtttggtggatttcactgagtttgtggtggctgctttgcacgtgaaccaattggaggagcatgactctgagaagtggcaacagaggtcaagagcagcatttgacaagtttgacatagacggagatgggtttataactcccgaagaacttagattgaatcaatgtttgcagcaaacgggtttaaaaggctccatcgaaccacttcttgaagaggccgacgtagatgaagatgggagaatcagcatcaatgagtttcgcagacttttgagaagtgcaagcctcaagtcaaaaaatgttaaaagccctcctggttaccagctttcacaaaagatgtaa

SEQ ID NO: 4499 - protein, 536 aa, Arabidopsis thaliana
MGLCFSSPKATRRGTGSRNPNPDSPTQGKASEKVSNKNKKNTKKIQLRHQGGIPYGKRIDFGYAKDFDNRYTIGKLLGHGQFGFTYVATDNNNGNRVAVKRIDKAKMTQPIEVEDVKREVKILQALGGHENVVGFHNAFEDKTYIYIVMELCDGGELLDRILANRYTEKDAAVVVRQMLKVAAECHLRGLVHRDMKPENFLFKSTEEGSSLKATDFGLSDFIKPGVKFQDIVGSAYYVAPEVLKRRSGPESDVWSIGVITYILLCGRRPFWDKTQDGIFNEVMRKKPDFREVPWPTISNGAKDFVKKLLVKEPRARLTAAQALSHSWVKEGGEASEVPIDISVLNNMRQFVKFSRLKQIALRALAKTINEDELDDLRDQFDAIDIDKNGSISLEEMRQALAKDVPWKLKDARVAEILQANDSNTDGLVDFTEFVVAALHVNQLEEHDSEKWQQRSRAAFDKFDIDGDGFITPEELRLNQCLQQTGLKGSIEPLLEEADVDEDGRISINEFRRLLRSASLKSKNVKSPPGYQLSQKM

SEQ ID NO: 4500 - DNA, 1662 bp, Arabidopsis thaliana
  CDS (1)..(1662)
atgggatgtctctgcatcaatctgaagaagaaggtcaagaaaccaacaccagacatcagtggagaacaaaacacagaggtaaagagcagagaaataacaccaaaagaacaacctcgtcaaagacaaccagctccaagagccaagttccagattgtggtgcaacctcataaactcccacttccacttcctcagcctcaagaaaaacaaaagctgatcaatcatcaaaaacagagcaccctgcaacaaccagaaccgatcttagggagaccatttgaagatattaaggagaagtatagtcttggtcgcgaattaggtcgtggccaattcggtataacgtatatatgtacagagatttcatcaggcaagaactttgcttgtaaatccatcttgaagagaaagctcatcagaactaaggcaagagacagagaggatgtaagaagggagatacagataatgcactacttatcaggacaaccaaacattgtggaaatcaaaggagcttatgaagacagacaaagtgttcatcttgtaatggagctttgcgaaggcggtgagctttttgataagatcactaaacgaggacattactcagagaaagcagccgcggagatcattagaagtgtggttaaagttgtacagatttgtcatttcatgggtgtgattcatcgcgaccttaaacccgaaaacttcttgttgtccagtaaagatgaagcttcctcaatgctcaaggctactgattttggtgtttcagttttcatcgaagaagggaaagtgtatgaagacattgttggaagtgcatattacgttgcaccggaggttctgaagagaaactacggcaaagcaatcgatatttggagcgccggagttattctctacatccttctctgcggaaatcctccattttgggcagagactgataagggaatatttgaggagattttgagaggagagattgattttgagtcggaaccatggccgtcgatttcggagagtgctaaggatttggtgagaaacatgttaaagtatgatcccaagaaacggtttactgcggctcaagtcctagaacatccttggatacgagaaggtggagaagcttctgataaaccaatcgatagtgctgttttgtcgcggatgaagcaactccgagctatgaataagcttaagaagcttgcatttaaatttatcgcgcaaaatctcaaagaagaggaactaaagggtctcaagacaatgttcgcaaacatggataccgataagagcggtacaatcacttacgacgaattgaaatccggactggaaaaactcggttcgaggttaaccgaaaccgaagttaagcagctcttggaagatgctgatgtcgatgggaacggtactattgattacattgagttcatttcagctactatgaaccggttcagagtagaaagagaggataatttgttcaaagcttttcaacatttcgataaagataacagcgggtttatttcgagacaagaattagaaacagctatgaaagagtataatatgggagatgatattatgatcaaagagattatctcagaagttgatgctgataatgatggaagtataaattatcaagagttttgcaatatgatgaagagctgctcacaatcacaccaatcaaaattggttcaaccgaattaa

SEQ ID NO: 4501 - protein, 553 aa, Arabidopsis thaliana
MGCLCINLKKKVKKPTPDISGEQNTEVKSREITPKEQPRQRQPAPRAKFQIVVQPHKLPLPLPQPQEKQKLINHQKQSTLQQPEPILGRPFEDIKEKYSLGRELGRGQFGITYICTEISSGKNFACKSILKRKLIRTKARDREDVRREIQIMHYLSGQPNIVEIKGAYEDRQSVHLVMELCEGGELFDKITKRGHYSEKAAAEIIRSVVKVVQICHFMGVIHRDLKPENFLLSSKDEASSMLKATDFGVSVFIEEGKVYEDIVGSAYYVAPEVLKRNYGKAIDIWSAGVILYILLCGNPPFWAETDKGIFEEILRGEIDFESEPWPSISESAKDLVRNMLKYDPKKRFTAAQVLEHPWIREGGEASDKPIDSAVLSRMKQLRAMNKLKKLAFKFIAQNLKEEELKGLKTMFANMDTDKSGTITYDELKSGLEKLGSRLTETEVKQLLEDADVDGNGTIDYIEFISATMNRFRVEREDNLFKAFQHFDKDNSGFISRQELETAMKEYNMGDDIMIKEIISEVDADNDGSINYQEFCNMMKSCSQSHQSKLVQPN

SEQ ID NO: 4502 - DNA, 1623 bp, Nicotiana tabacum
  CDS (1)..(1623)
  misc_feature (191)..(191): n is a, g, c or t
  misc_feature (200)..(200): n is a, g, c or t
atgggtggttgttttagcaagaagtatagacaagaaggtgctaatggggggtatagggcaacaagaagaaatgctaatcaagaatatcagaagccaccacaacatcaaccagaaaggccatatcagccacagcctcaacctcagcctcagcctcagccacgcccacagccacaagcacatactgttaccgngcagccggnacaaacccaagatcaaatgcaaggaccccatttgaataacatattaggaaagccttttgaagatattaggaagcaatatacacttgggaaagaattaggtaggggtcagtttggagtgacatatcattgtactgagaattccacggggaacccttatgcttgtaagtctatattgaaaaggaagcttgtgcgtaagaatgatagggaggatatgaagagggaaattcaaattatgcagcatttaagtggccagccaaatatcgtggaatttaaaggcgcgtatgaggataggcattcagtgcacctcgtgatggaactttgtgctggaggagagttgtttgataggattattgctcggggatattattcggagaaggatgctgctgagattattagacagattgcaaatgttgttaacatttgccatttcatgggtgttatgcatagggatcttaagccagagaatttcttactgactagtaaggatgaaaatgcaaagctcaaggcaaccgattttggactttctgtcttcattgaagaagggaaggtgtaccgggatatagttggtagtgcatattatgttgcccctgaagtattgcggcgtagttatgggaaggaagcagatgtatggagtgcaggtgttattttgtatattctactcagcggcgtgcctccattttgggctgaaactgaaaagggaatatttaatgccatactaaaaggagaaattgactttcaaagtgatccatggccatccatatcaaatagtgccaaggaccttataagaaaaatgctcacgcaggagccaaggaagagaatgacttcagcacaagttcttgaacatccatggcttcgaatgggagaagcatcagacaagccaatagacagtgcagtgctgtccagaatgaaacagttcagagcaatgaacaagctcaagaaacttgcattgaaggtcattgcggaaaatttatctgaagaagaaattaagggtctaaaagctatgtttgcgaacattgatacagacaatagtggcacaatcacttatgaagaattgaagtcgggattggctcggcttggatcaaagctaacagagaccgaagtcaagcaactcatggaagctgctgatgtggatggaaatggaacaatcgactacatcgagtttattactgcaacaatgcatagacatcggcttgaaagggatgagcatctctttaaagcatttcagtatttcgacaaggaccacagtggctttatcacgagagatgaactggaaagcgccatgaaggagtacggtatgggcgatgaggcgaccataaaggaaataattgcagaggtggacactgataatgatggtaggatcaattatgaggagttctgtgctatgatgagaagtggaacacaaccacagccgaagcttttctag

SEQ ID NO: 4503 - protein, 540 aa, Nicotiana tabacum
  misc_feature (64)..(64): The Xaa at location 64 stands for Ala, Glu, Gly, or Val.
  misc_feature (67)..(67): The Xaa at location 67 stands for Ala, Glu, Gly, or Val.
MGGCFSKKYRQEGANGGYRATRRNANQEYQKPPQHQPERPYQPQPQPQPQPQPRPQPQAHTVTXQPXQTQDQMQGPHLNNILGKPFEDIRKQYTLGKELGRGQFGVTYHCTENSTGNPYACKSILKRKLVRKNDREDMKREIQIMQHLSGQPNIVEFKGAYEDRHSVHLVMELCAGGELFDRIIARGYYSEKDAAEIIRQIANVVNICHFMGVMHRDLKPENFLLTSKDENAKLKATDFGLSVFIEEGKVYRDIVGSAYYVAPEVLRRSYGKEADVWSAGVILYILLSGVPPFWAETEKGIFNAILKGEIDFQSDPWPSISNSAKDLIRKMLTQEPRKRMTSAQVLEHPWLRMGEASDKPIDSAVLSRMKQFRAMNKLKKLALKVIAENLSEEEIKGLKAMFANIDTDNSGTITYEELKSGLARLGSKLTETEVKQLMEAADVDGNGTIDYIEFITATMHRHRLERDEHLFKAFQYFDKDHSGFITRDELESAMKEYGMGDEATIKEIIAEVDTDNDGRINYEEFCAMMRSGTQPQPKLF

SEQ ID NO: 4504 - DNA, 1920 bp, Zea mays
  CDS (1)..(1920)
atggggaacacgtgcgtcggccccagcatcaccatgaacggcttcttccagtccgtgtccacggcgctgtggaagacgccgcaggaaggcgacgcgctgcccgccgccgccaatggccccggcgggccagccggggccggttcgcagtcggcgctgccgaagccggcgtccgacgtgcaccacgtcgccgtgcagagcgaggcccctgagcccgtcaagatcgccgcctaccactcggagccggcgcccgccgtgcggagcgaggcccctgagcccgtcaagatcgccgcctctcactcggagccggcgcccatggccgccaagcctggtggcgccgccgccaacgccagccccagccccagccccaggccgcgtccgcaggtgaagcgcgtgtcgagcgccgggctgctgctggggtcggtgctgaggcgcaagacggagaacctcaaggacaagtacagcctggggcggcggctcgggcaggggcagttcggcacgacgcacctgtgcgtggagcgcgccacggggaaggagctcgcgtgcaagtcgatcctgaagcgcaagctgggcagcgacgacgacgtggaggacgtgcggcgggagatccagataatgcaccacctggcgggccaccccagcgtggtcggcatccgcggcgcgtacgaggacgccgtggccgtgcacctcgtcatggagctctgcggcggcggcgagctgttcgaccggatcgtgcggaggggccactacaccgagaggaaggccgccgagctcgcccgcgtcatcgtcggcgtcgtggaggcgtgccactccatgggcgtcatgcaccgggacctcaagcccgagaacttcctcttcgctgaccactcggaggaggccgctctcaagaccattgacttcggtctctccatcttctttcgccctggccaaattttcaccgacgtcgtgggcagcccttactacgtggcgccggaggtactgaagaagagatacgggccagaggcggacgtctggagcgctggcgtaatcatctacatcctgctgtgcggagtgccgccattctgggcagagaacgagcagggcatattcgaggaggttctgcacgggaggctggacttcgagtcggagccgtggcccagcatctccgacggcgccaaggatctcgtgaggaggatgcttgtcagggacccgaggaagagactgaccgctcacgaagttctacggcatccgtgggttcaggtcggtggagtggctcctgacaggccgctggactcggccgttctgtctcgcatgaagcagttctcggctatgaataagctgaagaagatggctcttagggtgatcgccgagaacctgtcggaggacgagatcgccgggctgagggagatgttcaagatgatcgacgcggacaacagcgggcagatcacgttcgaggagctcaaggttggcctggagaaggtgggcgccaacctgcaggagtcggagatctacgcgctcatgcaagccgcggacgtggacaacaacggcacgatcgactacggcgagttcatcgcggccacgctgcacctgaacaaggtggagcgggaggaccacctgttcgcggcgttccagtacttcgacaaggacggcagcggctacatcaccgccgacgagctgcaggtggcgtgcgaggagttcggcctgggcgacgtccagctggaggacttgatcggggaagtcgaccaggacaacgacgggcgcatagactacaacgagttcgtggcgatgatgcagaagccgacggtggggggatcccgaagaaggccgatctgcagaacagcttcagcatcgggttcagcatcgggttcagggaggcgctcaggatggcctagacctctgtgtctctggcttccctgctgcctgcgtgtaggtgtagatgattga

SEQ ID NO: 4505 - protein, 639 aa, Zea mays
MGNTCVGPSITMNGFFQSVSTALWKTPQEGDALPAAANGPGGPAGAGSQSALPKPASDVHHVAVQSEAPEPVKIAAYHSEPAPAVRSEAPEPVKIAASHSEPAPMAAKPGGAAANASPSPSPRPRPQVKRVSSAGLLLGSVLRRKTENLKDKYSLGRRLGQGQFGTTHLCVERATGKELACKSILKRKLGSDDDVEDVRREIQIMHHLAGHPSVVGIRGAYEDAVAVHLVMELCGGGELFDRIVRRGHYTERKAAELARVIVGVVEACHSMGVMHRDLKPENFLFADHSEEAALKTIDFGLSIFFRPGQIFTDVVGSPYYVAPEVLKKRYGPEADVWSAGVIIYILLCGVPPFWAENEQGIFEEVLHGRLDFESEPWPSISDGAKDLVRRMLVRDPRKRLTAHEVLRHPWVQVGGVAPDRPLDSAVLSRMKQFSAMNKLKKMALRVIAENLSEDEIAGLREMFKMIDADNSGQITFEELKVGLEKVGANLQESEIYALMQAADVDNNGTIDYGEFIAATLHLNKVEREDHLFAAFQYFDKDGSGYITADELQVACEEFGLGDVQLEDLIGEVDQDNDGRIDYNEFVAMMQKPTVGGSRRRPICRTASASGSASGSGRRSGWPRPLCLWLPCCLRVGVDD

SEQ ID NO: 4506 - DNA, 1878 bp, Zea mays
  CDS (1)..(1878)
atggggcagtgctacgggaaggcgcgcggcgcgtcctcgcgggcggaccacgacgccgacccctcgggggcggggtcggtcgcgccgccatccccgctgccggccaacggcgcgccgctgcccgccacgcccaggcgccacaagtccggatccaccacgccggtgcaccaccaccaggcggcgacgcccggcgccgccgcctggcctagtccgtacccggccggcggcgccagcccgctccccgcgggcgtgtcgccgtcgccggcccggtccacgccccggaggttcttcaagcggcccttcccgccgccctcgcccgccaagcacatcaaggccacgctcgccaagcgcctcggcgggggcaagcccaaggagggcaccataccggaggagggcggcgcgggggccggggccggggccggcgccggcgccggcgcggccgttggtgccgccgattccgccgaggccgaccgcccgttggacaaaacgttcggcttcgccaagaactttggggccaagtacgatctcgggaaggaggtcgggaggggccactttggccacacctgctccgccgtcgtcaagaagggcgagcacaagggccataccgtcgccgtcaagatcatctccaaagctaagatgacaacggccatttccattgaagatgttcgtagggaggtcaagattttgaaagccctatcagggcacgataatctcgtcagattctatgatgcatgtgaggacgccctcaatgtctacattgtcatggaattatgtgaaggtggagagttgctagacagaattttagcaagaggtgggagatatacagaagaagatgccaaagcgatcattgtacagattttgagcgtagtggccttctgtcatcttcagggagtagtgcatcgtgatttgaagccagagaattttctcttcacaacaagagatgaaagcgctcctatgaagttgattgactttggtctgtcagattttattagaccagatgaaaggctcaatgatattgttggaagtgcttattatgttgctccagaggttctacacagatcatacagtatggaagcagacatttggagtataggtgttataacatacattctgctctgtggcagtcggccattctgggcaaggacagaatctgggatcttccggtccgtattgagggctgatcccaattttgacgattcaccatggccttcagtatcggctgaggctaaggattttgtgaagagatttctgaacaaagattaccgcaaaagaatgactgctgtccaagcactgactcacccttggttacgagatgaacaaaggcaaattccattggacatactcattttcagattagttaagcagtatctccgtgctactcctcttaaacgtttggcattaaaggcactatctaaggctttaagcgaggatgaacttttgtatcttaggttgcagtttaagctgcttgaacccagagatgggttcgtgtcactcgacaactttcggacggctctgacaagatactcaactgacgccatgagagaatcaagggttcttgagtttcagcatgcgttggaaccacttgcgtacagaaagatggactttgaagaattctgtgctgcagcaatcagcccgtaccagctggaagctttggaaaggtgggaagaaattgctggaacagcttttcagcactttgaacaagagggcaaccgagttatatcagttgaggagttagcacaggaactaaatctcgcgccgacacattactccattgtgcaagactggatcagaaaatcggacggcaagcttaactttcttgggttcaccaaatttttgcacggtgtcacgatacggggttcaaatacaagacgacactaa

SEQ ID NO: 4507 - protein, 625 aa, Zea mays
MGQCYGKARGASSRADHDADPSGAGSVAPPSPLPANGAPLPATPRRHKSGSTTPVHHHQAATPGAAAWPSPYPAGGASPLPAGVSPSPARSTPRRFFKRPFPPPSPAKHIKATLAKRLGGGKPKEGTIPEEGGAGAGAGAGAGAGAAVGAADSAEADRPLDKTFGFAKNFGAKYDLGKEVGRGHFGHTCSAVVKKGEHKGHTVAVKIISKAKMTTAISIEDVRREVKILKALSGHDNLVRFYDACEDALNVYIVMELCEGGELLDRILARGGRYTEEDAKAIIVQILSVVAFCHLQGVVHRDLKPENFLFTTRDESAPMKLIDFGLSDFIRPDERLNDIVGSAYYVAPEVLHRSYSMEADIWSIGVITYILLCGSRPFWARTESGIFRSVLRADPNFDDSPWPSVSAEAKDFVKRFLNKDYRKRMTAVQALTHPWLRDEQRQIPLDILIFRLVKQYLRATPLKRLALKALSKALSEDELLYLRLQFKLLEPRDGFVSLDNFRTALTRYSTDAMRESRVLEFQHALEPLAYRKMDFEEFCAAAISPYQLEALERWEEIAGTAFQHFEQEGNRVISVEELAQELNLAPTHYSIVQDWIRKSDGKLNFLGFTKFLHGVTIRGSNTRRH

SEQ ID NO: 4508 - DNA, 1722 bp, Cucurbita pepo
  CDS (1)..(1722)
atggggaatacttgtgtaggaccaagtatttcaaagaatggattctttgaatctgtttctgctgctatgtggcgatctaaaacgccggagaactcggtttctaatcatactaatggagaaaatgttcgagaggtagtagctagcgaacccgaatcgcctttgcctgttcaaaaccaacctcctgaaaaagtgacaatgccagaatcagtagctaaaccagaaccgcctatggaaccgaaggtgcgccctgttatgaagagggtgggtagtgctgggcttcgaggtggttcggttctacagacgaaaacgggaaactttaaggagtattatagcttgggtaaaaaattaggccaaggacaatttgggacaacatatatgtgtgtggagaaggcaactgggaaagagtatgcttgtaagtctattgcaaagaggaagttggttaatgaggatgatgttgaagatgtgagaagggaaattcagataatgcaccatttgtctggacacccgaatgttatatcgatcaagggggcgtacgaggatgccgttgcagttcaggtagtcatggagttgtgtgctggaggtgagctatttgataggatcattcaacgtggacattataccgaaagaaaggctgctgagcttactaggaccatagtcggggttttggaggcatgtcacgctcttggagttatgcaccgtgaccttaagcccgagaattttctctttgttagcaaggaagaggaatcacttctcaagacaattgattttggactatcaatgttcttcaaaccaggcgaaaagtttaatgatgtggtcgggagtccgtactatgttgcacctgaagttttgcggaagcgatatggtccagaagcagatgtttggagtgctggagtaattgtatacattctgttaagtggagtgcctcccttttgggctgagtctgaggaagggatatttgaagaggtcctgcacggcgatcttgacttctcctccgacccttggcccagcatctccgacagtgcgaaagatttggttagaagaatgcttgttcgagacccgagaaagagactgacagcatatgaagttttgtgccacccttgggttcaagttgatggtgtcgctcctgacaagccgcttgactcggcagtcttgactcgcttgaagcagttttcagccatgaacaagctcaagaaaatggctatcaaggtcattgcagagagcttatctgaagaagaaattgctggactcaaggaaatgttcaagatgatagatactgacaacagcggccaaatcacatttgaagaactcaaagctggattgaaaaagtttggagctaatcttaaggagtccgaaatttacgacctaatgcaagcagcggatatagacaacaacggaaccatcgactacggggagttcgtagctgccacattgcatctaaacaaaatcgagaaggaagatcatcttctagcagcgttttcatatttcgacaaagatggaagcgggttcattacccacgacgagcttcaacaagcatgtaaagagttcgggatagaggatcttcaaatggaagaaatgatgcgcgaggtcgatcaaaacaatgacggaagcatcgactataacgagttcgtggcgatgatgcaaaaaggaaatgtagtgaatactggcaagaaagggctacaaagtagcttcagcattggctttagggaggctctaaaactctag

SEQ ID NO: 4509 - protein, 573 aa, Cucurbita pepo
MGNTCVGPSISKNGFFESVSAAMWRSKTPENSVSNHTNGENVREVVASEPESPLPVQNQPPEKVTMPESVAKPEPPMEPKVRPVMKRVGSAGLRGGSVLQTKTGNFKEYYSLGKKLGQGQFGTTYMCVEKATGKEYACKSIAKRKLVNEDDVEDVRREIQIMHHLSGHPNVISIKGAYEDAVAVQVVMELCAGGELFDRIIQRGHYTERKAAELTRTIVGVLEACHALGVMHRDLKPENFLFVSKEEESLLKTIDFGLSMFFKPGEKFNDVVGSPYYVAPEVLRKRYGPEADVWSAGVIVYILLSGVPPFWAESEEGIFEEVLHGDLDFSSDPWPSISDSAKDLVRRMLVRDPRKRLTAYEVLCHPWVQVDGVAPDKPLDSAVLTRLKQFSAMNKLKKMAIKVIAESLSEEEIAGLKEMFKMIDTDNSGQITFEELKAGLKKFGANLKESEIYDLMQAADIDNNGTIDYGEFVAATLHLNKIEKEDHLLAAFSYFDKDGSGFITHDELQQACKEFGIEDLQMEEMMREVDQNNDGSIDYNEFVAMMQKGNVVNTGKKGLQSSFSIGFREALKL

SEQ ID NO: 4510 - DNA, 1878 bp, Isatis tinctoria
  CDS (1)..(1878)
atgggtaatacttgtgttggaccaagcagaaatgggttcttgcaatccgtttcggctgcaatgtggcggcctcgggatgcagatgattcggtttctcagagcaatggagatactgcaagtgaagctgtttcaggagagcttcgatctccatcatctgatcaggtccagaataaacctcctgagcagctcacaatgccaaagccagggactaacatcgagataaaggcgaaatccgatgtagagattcagcctgaaatcaagctggaaacgcaagaggtgacaaaaccggagtccaagccggagaccaagtcagagactaagcctgagaccaagtcggagactaagccggagaccaagtcagagactaagccggagacaaaagctgatactccggctaagcctaagaaacctaaacacatgaagagagtgtccagtgcaggtcttaggactgagtcggtgttgcagaggaaaactgaaaactttaaggaattctattccttgggaaggaaacttggacaagggcaatttgggacgacttttctatgcgtggagaagacttcagggaaggagtttgcctgcaagtctattgctaagaggaagctgttgaccgatgaggacgtggaagatgtgagaagggaaattcagattatgcatcacttggctggtcacccgaatgtcatatccattaaaggagcttatgaggatgttctggcggtgcaccttgttatggagtgttgtgcaggtggcgagctttttgacagaataattcaacgcggtcactacacagagaggaaagctgctgagctcactagaaccatagtcggggtggtagaggcttgtcattctcttggtgttatgcatcgagacctcaagcccgagaattttctgtttgtcagtaaacacgaagattcactcttgaagacgattgattttggactctctatgttctttaagccagatgatgtttttacagatgttgttggtagcccgtattatgtagctccggaagttcttcgaaagcattatggtcctgaagctgatgtctggagtgctggagtgattgtatacattttgttaagtggagttcctccattctgggctgaatccgaacaaggtattttcgaacaggtcctccatggtgatcttgacttttcatccgatccctggccgagcatatctgaaagtgcaaaagacttagtgaggaaaatgcttgttcgggatcccaagagaagactaactgcacaccaagtattatgtcatccatgggtacaaatcgacggcgtggctccagacaaacctctagattctgctgttctgagccgtatgaagcaattttctgcaatgaacaagttcaagaaaatggctcttagagtcattgctgagagcttatctgaagaggaaatagccggcttgaaagaaatgtttaatatgatagatgccgacaaaagcggtcagataactttcgaagaactgaaagcaggactaaaacgagtaggggcgaatctcaaagagtcagagattctcgacttgatgcaagctgctgatgtggacaacagtggaacaatagactacaaagagttcatagcagcaacattgcatttaaacaagatagagagagaagaccatttgtttgcagcctttacatactttgacaaagatgggagcggttatatcaccccggacgagcttcaacaagcttgtgaggagtttggagttgaggatgtccgcatagaagaaatgatgcgtgatgttgatcaagacaatgacgggcgaatagattataacgagtttgtggcgatgatgcagaaagggagcatcacaggagttccagtgaagatgggactagagaaaagctttagcattgctcttaaactctag

SEQ ID NO: 4511 - protein, 625 aa, Isatis tinctoria
MGNTCVGPSRNGFLQSVSAAMWRPRDADDSVSQSNGDTASEAVSGELRSPSSDQVQNKPPEQLTMPKPGTNIEIKAKSDVEIQPEIKLETQEVTKPESKPETKSETKPETKSETKPETKSETKPETKADTPAKPKKPKHMKRVSSAGLRTESVLQRKTENFKEFYSLGRKLGQGQFGTTFLCVEKTSGKEFACKSIAKRKLLTDEDVEDVRREIQIMHHLAGHPNVISIKGAYEDVLAVHLVMECCAGGELFDRIIQRGHYTERKAAELTRTIVGVVEACHSLGVMHRDLKPENFLFVSKHEDSLLKTIDFGLSMFFKPDDVFTDVVGSPYYVAPEVLRKHYGPEADVWSAGVIVYILLSGVPPFWAESEQGIFEQVLHGDLDFSSDPWPSISESAKDLVRKMLVRDPKRRLTAHQVLCHPWVQIDGVAPDKPLDSAVLSRMKQFSAMNKFKKMALRVIAESLSEEEIAGLKEMFNMIDADKSGQITFEELKAGLKRVGANLKESEILDLMQAADVDNSGTIDYKEFIAATLHLNKIEREDHLFAAFTYFDKDGSGYITPDELQQACEEFGVEDVRIEEMMRDVDQDNDGRIDYNEFVAMMQKGSITGVPVKMGLEKSFSIALKL

SEQ ID NO: 4512 - DNA, 1584 bp, Oryza sativa subsp
  CDS (1)..(1584)
atggggtcgtgttgcagcagagctacgtctccagattctggtcgaggaggagcaaacggttatggctattctcaccagacaaaacctgctcagacaactcctagctataaccatcctcagccgccgccgccagctgaggtgaggtacacaccatcagcaatgaaccctccggtagtcccacctgtggttgccccaccgaagcccaccccagacacaattcttggaaagctgtatgacgatgtgcgctcggtttactcccttggaaaggaactcggaaggggacagtttggggtgacatacctgtgcacggagatcgctagtggtaagcagtatgcttgcaaatccatctctaagcgcaagcttgtgagcaaggccgacaaggaggacattcgccgggagattcagatcatgcagcacctatctggacaacaaaacattgtcgagttccggggagcatatgaggacaagagcaatgtccatgttgtcatggagctctgcgctggtggggagctgtttgatcggatcattgccaaggggcactactcagagcgtgcggctgctaccatctgcagggcagtggtgaatgttgtcaacatttgccattttatgggagtgatgcatcgtgatttgaaaccggagaacttcttacttgcaaccaaagaagagaatgcaatgctcaaagccactgattttggtctctcagttttcattgaagaaggaaaaatgtatagagacattgttggaagtgcttattatgttgctcctgaagtccttcggcggaattatggtaaagagattgatgtatggagtgcaggcgttattttgtacattcttctcagtggtgttcctccattttgggctgaaactgaaaagggtatatttgatgctattcttcaaggggagattgactttgagagtcaaccatggccatcaatatccgagagtgctaaagaccttgttagaaagatgttgacacaagatccaaagaaaagaattacttcggcccaagttctccaacatccctggctcagagatggagaagcatctgacaaacctattgacagcgctgttctttctaggatgaagcaattcagagcaatgaacaagctgaaaaagatggctctgaaggttattgcttcaaaccttaatgaggaggagatcaagggcctgaagcaaatgttcacaaacatggacacagacaacagcgggaccatcacatatgaagaactcaaagcaggattagccaaacttggatcaaagctttcagaagctgaagtaaagcagttgatggaagctgctgatgtagacggcaatggatccatcgactatgttgaatttatcactgccacaatgcatagacacaagctcgaaagagatgagcatttgtttaaggcattccagtattttgacaaagacaacagtggctttatcacaagagatgaactggaatccgctttaatcgagcatgaaatgggcgatacgagtaccataaaggatattatatcagaagtcgacacggataatgatgggaggattaactacgaggaattttgcgctatgatgatagccgagatgatggattga

SEQ ID NO: 4513 - protein, 527 aa, Oryza sativa subsp
MGSCCSRATSPDSGRGGANGYGYSHQTKPAQTTPSYNHPQPPPPAEVRYTPSAMNPPVVPPVVAPPKPTPDTILGKLYDDVRSVYSLGKELGRGQFGVTYLCTEIASGKQYACKSISKRKLVSKADKEDIRREIQIMQHLSGQQNIVEFRGAYEDKSNVHVVMELCAGGELFDRIIAKGHYSERAAATICRAVVNVVNICHFMGVMHRDLKPENFLLATKEENAMLKATDFGLSVFIEEGKMYRDIVGSAYYVAPEVLRRNYGKEIDVWSAGVILYILLSGVPPFWAETEKGIFDAILQGEIDFESQPWPSISESAKDLVRKMLTQDPKKRITSAQVLQHPWLRDGEASDKPIDSAVLSRMKQFRAMNKLKKMALKVIASNLNEEEIKGLKQMFTNMDTDNSGTITYEELKAGLAKLGSKLSEAEVKQLMEAADVDGNGSIDYVEFITATMHRHKLERDEHLFKAFQYFDKDNSGFITRDELESALIEHEMGDTSTIKDIISEVDTDNDGRINYEEFCAMMIAEMMD

SEQ ID NO: 4514 - DNA, 1614 bp, Isatis tinctoria
  CDS (1)..(1614)
atgggcaattgctgcgggacggcggggtcgttggctcagaacgataacaataagccgaagaaaggaaggaagaagcaaaaccctttctcgatcgattacggtctccaccacggcggtggcggcggaggagctctcaagctcatcgtgctgagcgatccaacaggtcgggagatcgagcagaaatacaagctcgggagagagctgggccgtggagagttcggcgtcacgtatctgtgtaccgacaaggagaccgacgaggtgttggcgtgtaagtcgatcttgaagaagaagctgaggacggctgtggatatagaggacgttaggagagaggttgagatcatgaggcatatgcctgtgcatcccaatgtcgtcactttgaaagagacttatgaggatgagcatgctgtgcatctcgttatggagctttgcgaaggaggcgaattgtttgataggattgtcgccagagggcattacaccgagagagctgctgctgctgttactaagaccatcatggaggttgttcaggtgtgtcataacaatggggtgatgcacagggacctgaaacctgagaacttcttgtttgcgaacaagaaggagactgcacctcttaaggcgattgatttcggactctctgttttcttcaaaccaggcgagaggttcaacgaaatcgttggcagtccgtactacatggctcctgaggtgctaaaacgaaactatgggccagaagttgacatttggagtgcaggtgtaattctttacatactgctctgtggtgtcccgcctttctgggcagaaactgaacaaggagttgcacaagcaattattcgatctcaactggacttcagaagggacccatggcccaaggtttctgagaacgcaaaagaccttatcaggaaaatgcttgatcctgaccagaagcgtcgtctcacagctcagcaagtgcttgatcatccgtggttacagaatgcaaagactgctcccaatgtatcattaggtgaaacagtaagggcaagactgaagcagttcaccgtcatgaacaagctcaagaaacgagcactcagggttattgctgagcatttatcagatgaagaagcttctggtataagagaagggttccaaatcatggacacaagccaaagagggaagattaacatagacgagctaaaaatcgggttgcagaaacttggtcatgctattccccaagatgatttacaaattttgatggacgctggagatatcgataaagatggatatttggactgcgatgagttcattgccatatcggtgcatctcaggaagatgggcaacgacgagcatctcaagaaagcgtttgcgttctttgatcaaaatgataacggatatatcgaaatagaggagttgagggaagctttgtctgatgaagttggtacaagcgaagaggttgttgatgccattattcgcgatgttgataccgataaggatggaagaataagttacgaagagtttgcgacgatgatgaaaacgggaacagattggagaaaagcttcgaggcagtactcgagggaacggtttaacagtatcagtctcaaactgatgcaagatgcatcgttgcaagtcaatggcgatgcgagatga

SEQ ID NO: 4515 - protein, 537 aa, Isatis tinctoria
MGNCCGTAGSLAQNDNNKPKKGRKKQNPFSIDYGLHHGGGGGGALKLIVLSDPTGREIEQKYKLGRELGRGEFGVTYLCTDKETDEVLACKSILKKKLRTAVDIEDVRREVEIMRHMPVHPNVVTLKETYEDEHAVHLVMELCEGGELFDRIVARGHYTERAAAAVTKTIMEVVQVCHNNGVMHRDLKPENFLFANKKETAPLKAIDFGLSVFFKPGERFNEIVGSPYYMAPEVLKRNYGPEVDIWSAGVILYILLCGVPPFWAETEQGVAQAIIRSQLDFRRDPWPKVSENAKDLIRKMLDPDQKRRLTAQQVLDHPWLQNAKTAPNVSLGETVRARLKQFTVMNKLKKRALRVIAEHLSDEEASGIREGFQIMDTSQRGKINIDELKIGLQKLGHAIPQDDLQILMDAGDIDKDGYLDCDEFIAISVHLRKMGNDEHLKKAFAFFDQNDNGYIEIEELREALSDEVGTSEEVVDAIIRDVDTDKDGRISYEEFATMMKTGTDWRKASRQYSRERFNSISLKLMQDASLQVNGDAR

SEQ ID NO: 4516 - DNA, 1572 bp, Medicago truncatula
  CDS (1)..(1572)
atgggcaattgttgctctggtggtactgaagaccctgaagataagggagaaaacaatcaacaaaacaacgatgcaaatggagattcttcagctacaacgccgccaccatggtcaaaaccttcgcctcaaccttctaaaccatcaaaaccttccgcgatcggtcctgttcttggcaggccaatggaagatgttaaggctacttatagcatggggaaggaactagggagaggacaatttggtgtaacacatttgtgcacacacaaaaccactggaaaacaatatgcatgcaaaacaatagccaagagaaagcttgcgaataaggaagatattgaggatgttaggagggaggttcaaatcatgcatcaccttacaggacagcctaatattgtggaacttattggtgcttttgaagataaacaatctgttcatttggttatggagttgtgtgctggtggtgaacttttcgatcgaatcattgctaagggtcattacaccgaacgtgctgcagcttccttgttgagaaccattgttcaaattgttcatacttgtcattccatgggtgttattcatagagatcttaagcctgagaattttcttttgttgagcaaggatgagaattctcctctcaaagccactgatttcggtttatctgtcttttacaaacaaggtgaccagtttaaagatattgttggtagtgcatattacattgcacctgatgtgttgaagaggaaatatggaccagaagtagacatttggagtgttggtgtcatgttatatattcttctatgtggtgttccaccattttgggcagaatctgaaaatggtatattcaatgccatcctaagaggacatgttgacttttctagtgatccatggccctccatttcaccttcagcaaaggatcttgtaaggaaaatgttgaattcagatcccaagcaaaggattacagcatatgaagttctgaatcatccatggatcaaggaagacggagaagcaccagatacacctcttgacaatgcagtgctcaataggctcaaacagtttagagcaatgaaccaattcaagaaagttgctctaaaggttattgctagctgcttatcagaggaagaaatcatgggattgaagcagatgtttaagggtatggacactgacaatagtggaaccattacaattgaagagctcaagcaagggcttgcaaaacaaggaactagactgagtgaaacagaagttaagcaattaatggaagctgcagatgctgatggtaatggaatcattgactacgacgagttcatcacagcaactatgcacatgaaccgattgaacagagaagaacatgtttatactgccttccaattcttcgataaagataacagcgggtacatcaccattgaagaactagagcaagctctccatgagtataacatgcatgacggcagggacataaaagaaatcatttcagaagttgatgcagataacgatggtcggattaactacgatgaatttgttgcaatgatgggcaaaggaaacccagaagcaaataccaagaagaggcgtgattcgaccttgtattag

SEQ ID NO: 4517 - protein, 523 aa, Medicago truncatula
MGNCCSGGTEDPEDKGENNQQNNDANGDSSATTPPPWSKPSPQPSKPSKPSAIGPVLGRPMEDVKATYSMGKELGRGQFGVTHLCTHKTTGKQYACKTIAKRKLANKEDIEDVRREVQIMHHLTGQPNIVELIGAFEDKQSVHLVMELCAGGELFDRIIAKGHYTERAAASLLRTIVQIVHTCHSMGVIHRDLKPENFLLLSKDENSPLKATDFGLSVFYKQGDQFKDIVGSAYYIAPDVLKRKYGPEVDIWSVGVMLYILLCGVPPFWAESENGIFNAILRGHVDFSSDPWPSISPSAKDLVRKMLNSDPKQRITAYEVLNHPWIKEDGEAPDTPLDNAVLNRLKQFRAMNQFKKVALKVIASCLSEEEIMGLKQMFKGMDTDNSGTITIEELKQGLAKQGTRLSETEVKQLMEAADADGNGIIDYDEFITATMHMNRLNREEHVYTAFQFFDKDNSGYITIEELEQALHEYNMHDGRDIKEIISEVDADNDGRINYDEFVAMMGKGNPEANTKKRRDSTLY

SEQ ID NO: 4518 - DNA, 1554 bp, Medicago truncatula
  CDS (1)..(1554)
atgggcaaccgcatcagctccaaacacaaaccctcttccgattcccaaacccgttccaaatcagaaccctcacattccactcccacttccttccatcctcctaatcgaacccccaaacaatccactcacacccccaccccttcctcctcccccctcggccgcgtcttaggcaaacccatggaagacgtccgatcaacctacaccttcggccgtgaactcggtcgcggccaattcggtgtaacctacttagttacacacaaactcaccaaagaacaattcgcctgcaaatctatagccactcggaaactaatccgccgcgatgatcttgacgatattcgccgtgaagttcagatcatgcatcatctcaccggtcaccggaacattgttgagcttaaaggtgcttatgaggatcgtcattcggttaatcttatcatggagctttgtgctggtggtgagctttttgataggattatatccaaaggtcattactctgaacgtgctgcggctgagctgtgtcgccagattgtcactgttgttcataattgtcatactatgggtgttatgcatagggatttgaagcctgagaatttcttgtttcttagtaagcatgagaattcgccgcttaaagctacagattttggtctctccgtgtttttcaagcccgaagatgtattcaaagatcttgttgggagtgcatattatgttgctcctgaggtgttgcgtagaagctatggacctgaagctgatatttggagtgctgggattattttgtacattctcctctctggtgttcctcccttctgggcagaaaatgaacaaggtatcttcgatgctattcttcgtggacatcttgatttcgcatctgatccttggcctaaaatatcgagtattgctaaagatctgatcaaaaagatgttgcgagctgaccctaaagaacgaatttcagctgttgaagtccttgaccattcttggatgaaagaagatggagcatccgataagcctcttgatattgctgtcttaaccagaatgaaacaattcagggcaatgaacaagctaaagaaagtagctctaaaggttattgctgaaaatctttctgaagaagaaattataggcttgaaggaaatgtttaaatccatggatacagataacagtggaacaatcacttttgaagagttgaaagctggtctccccaaactaggtactaagatttcggaatctgaagtaaggcagttgatggaagcggctgatgttgacggaaatggaaccattgattatattgaatttataacagctaccatgcacttgaatagaatggaaagagaggaccacctatacaaagcttttgaatattttgacaacgacaaaagcgggtatattacaaaagaagagttggaatctgcccttacaaagtacaacatgggtgatgagaaaacaataaaggagataattgacgaagttgattcagacaatgatggaagaattaactatgaggagtttgtagccatgatgaggaaaggcaatccagacttgataaccaacaaacgtcgcaaataa

SEQ ID NO: 4519 - protein, 517 aa, Medicago truncatula
MGNRISSKHKPSSDSQTRSKSEPSHSTPTSFHPPNRTPKQSTHTPTPSSSPLGRVLGKPMEDVRSTYTFGRELGRGQFGVTYLVTHKLTKEQFACKSIATRKLIRRDDLDDIRREVQIMHHLTGHRNIVELKGAYEDRHSVNLIMELCAGGELFDRIISKGHYSERAAAELCRQIVTVVHNCHTMGVMHRDLKPENFLFLSKHENSPLKATDFGLSVFFKPEDVFKDLVGSAYYVAPEVLRRSYGPEADIWSAGIILYILLSGVPPFWAENEQGIFDAILRGHLDFASDPWPKISSIAKDLIKKMLRADPKERISAVEVLDHSWMKEDGASDKPLDIAVLTRMKQFRAMNKLKKVALKVIAENLSEEEIIGLKEMFKSMDTDNSGTITFEELKAGLPKLGTKISESEVRQLMEAADVDGNGTIDYIEFITATMHLNRMEREDHLYKAFEYFDNDKSGYITKEELESALTKYNMGDEKTIKEIIDEVDSDNDGRINYEEFVAMMRKGNPDLITNKRRK

SEQ ID NO: 4520 - DNA, 1599 bp, Triticum aestivum
  CDS (1)..(1599)
atgggccagtgttgcagcagagctacgtccccggattctgtccaaggaggagccaatggctatggctattctcaccagcccaaacaagcacaaacacctcctagttacaacaatgctcagccaccaccacaagctgaggtgaggtacacaccgccagcgatgaaccctcctgtagtcccacctgtggttgccccctcaaagcccatgccggacacgattctcggcaagcagtacgacgatgtgcgctctgtctacccgcttggcaaggaacttggtagggggcagttcggggtgacgtacctttgcactgagattagcactggcaggcagtatgcttgcaagtccatatccaagcgcaagctcgtgagtaaggccgataaggaggatatccgcagggagatccagatcatgcagcacctatctgggcagccaaacatagtggagttctgtggagcatatgaggacaagggcagcgtgcatgtcgtgatggagctctgtgcaggcggggagctgtttgatcggattattgccaaggggcactactcagagcgtgcagctgctacaatctgcagaggagttgtgaatgttgtcaatgtctgccatttcatgggagtgatgcaccgcgatctgaagccggagaacttcttgcttgcgaccaagaatgagaatgcagtgctcaaggccactgatttcgggctttcggtcttcattgaagaaggaaaaatgtatagggacatcgttggaagtgcttattatgttgctcctgaagtccttaggagaaactatggtaaagagatagatgtttggagtgcaggtgttattctgtacattcttctcagcggtgttcctccattctgggctgaaactgagaagggaatatttgatgctattcttcaaggggagattgactttgaaagtcagccatggccttcaatttctgagagcgctaaagaccttgtgaggaagatgttggcacaggatccaaagaaaagaattagtttagcccaagttcttcaacatccatggctcagggaaggagaagcatcagataaacctattgacagtgctgttctttctaggatgaagcaattcagagcaatgaataaactgaaaaagatggctctaaaggttatagcttcaaatcttaacgaggaagagatcaagggcctgaagcaaatgtttatgaacatggacacagacaacagtgggacaatcacatatgaggaactcaaagcaggactagccaaacttggaccgaagctctcagaagctgaagtaaagcagttgatggatgcggctgatgtggatggcaatggatcaattgactacgttgagttcataacagcaaccatgcatagacacaagctcgaaagagacgagcatttgttcaaggcgttccagtactttgacaaagacaacagtggcttcatcacaagagatgaactggagactgctttgattgagcatgaaatgggcgatgcggataccataaaggacatcatatcagaagtcgacacagataatgatgggaggattaactacgaggaattctgcgctatgatgagaggagggatgcagcagccaataaggctcaagtag

SEQ ID NO: 4521 - protein, 532 aa, Triticum aestivum
MGQCCSRATSPDSVQGGANGYGYSHQPKQAQTPPSYNNAQPPPQAEVRYTPPAMNPPVVPPVVAPSKPMPDTILGKQYDDVRSVYPLGKELGRGQFGVTYLCTEISTGRQYACKSISKRKLVSKADKEDIRREIQIMQHLSGQPNIVEFCGAYEDKGSVHVVMELCAGGELFDRIIAKGHYSERAAATICRGVVNVVNVCHFMGVMHRDLKPENFLLATKNENAVLKATDFGLSVFIEEGKMYRDIVGSAYYVAPEVLRRNYGKEIDVWSAGVILYILLSGVPPFWAETEKGIFDAILQGEIDFESQPWPSISESAKDLVRKMLAQDPKKRISLAQVLQHPWLREGEASDKPIDSAVLSRMKQFRAMNKLKKMALKVIASNLNEEEIKGLKQMFMNMDTDNSGTITYEELKAGLAKLGPKLSEAEVKQLMDAADVDGNGSIDYVEFITATMHRHKLERDEHLFKAFQYFDKDNSGFITRDELETALIEHEMGDADTIKDIISEVDTDNDGRINYEEFCAMMRGGMQQPIRLK

SEQ ID NO: 4522 - DNA, 1599 bp, Triticum aestivum
  CDS (1)..(1599)
atgggccagtgttgcagcagagctacgtccccggattctgtccaaggaggagccaatggctatggctattctcaccagccaaaacaagcacaaacacctcctagttacaacaatgctcagccaccaccacaagctgaggtgaggtacacaccgccagcgatgaaccctcctgtcgtcccacctgtggttgccccctcaaagcccatgccggacacgattctcggcaagcagtacgaggatgtgcgctctgtctactcccttggcaaggaacttggtagggggcagttcggggtgacgtacctttgcactgagattagcactggcaggcagtatgcttgcaagtccatatccaagcgcaagctcgtgagtaaggccgacaaggaggatatccgcagggagatccagatcatgcagcacctatctgggcagccgaacatagtggagttctgtggagcatatgaggacaagggcagcgtgcatgttgtgatggagctctgtgcaggcggggagctgtttgatcggattattgccaaggggcactactcagagcgtgcagctgctacaatctgcagaggagttgtgaatgttgtcaatgtttgccatttcatgggagtgatgcaccgcgatctgaagccagagaacttcttgctcgcgaccaaggatgagaatgctgtgctcaaggccactgatttcgggctttcggtcttcattgaagaaggaaaaatgtatagggacatcgttggaagtgcttattatgttgctcctgaagtccttaggagaaactatggtaaagagatagatgtttggagtgcaggtgttattctgtacattcttctcagcggtgttcctccattctgggctgaaactgagaagggaatatttgatgctattcttcaaggggagattgactttgaaagtcagccatggccatcaatttctgagagcgctaaagaccttgtgaggaagatgttggcacaggatccaaagaaaagaattagttcagcccaagttcttcaacatccatggctcagggaaggagaagcatcagataaacctattgacagtgctgttctttctaggatgaagcaattcagagcaatgaataaactgaaaaagatggctctaaaggttatagcttcaaatcttaatgaggaagagatcaagggcctgaagcaaatgtttatgaacatggacacagacaacagtgggacaatcacatatgaggaactcaaagcaggactagccaaacttggatcgaagctctcagaagctgaagtaaagcagttgatggatgcggctgatgtggatggcaatggatcaattgactacgttgagttcataacagcaaccatgcatagacacaagctcgaaagagacgagcatttgttcaaggcgttccagtactttgacaaagacaacagtggcttcatcacaagagatgaactggagactgctttgattgagcatgaaatgggcgatgcggataccataaaggacatcatatcagaagtcgacacagataatgatgggaggattaactacgaggaattctgcgctatgatgagaggagggatgcagcagccaataaggctcaagtag

SEQ ID NO: 4523 - protein, 532 aa, Triticum aestivum
MGQCCSRATSPDSVQGGANGYGYSHQPKQAQTPPSYNNAQPPPQAEVRYTPPAMNPPVVPPVVAPSKPMPDTILGKQYEDVRSVYSLGKELGRGQFGVTYLCTEISTGRQYACKSISKRKLVSKADKEDIRREIQIMQHLSGQPNIVEFCGAYEDKGSVHVVMELCAGGELFDRIIAKGHYSERAAATICRGVVNVVNVCHFMGVMHRDLKPENFLLATKDENAVLKATDFGLSVFIEEGKMYRDIVGSAYYVAPEVLRRNYGKEIDVWSAGVILYILLSGVPPFWAETEKGIFDAILQGEIDFESQPWPSISESAKDLVRKMLAQDPKKRISSAQVLQHPWLREGEASDKPIDSAVLSRMKQFRAMNKLKKMALKVIASNLNEEEIKGLKQMFMNMDTDNSGTITYEELKAGLAKLGSKLSEAEVKQLMDAADVDGNGSIDYVEFITATMHRHKLERDEHLFKAFQYFDKDNSGFITRDELETALIEHEMGDADTIKDIISEVDTDNDGRINYEEFCAMMRGGMQQPIRLK

SEQ ID NO: 4524 - DNA, 1788 bp, Medicago truncatula
  CDS (1)..(1788)
atgggactctgtcatggaaaacccattgaaacgtcacgtagagaaagagaaagagaaagagaaaattcaacaaatgaagaaattcttcaacttccaccaccaccatcaagctctcatcatcatcatgcaccaactaaatcatcatcaaagtttccattttttagtccaagtccattaccaagtttcttcaaaaattcacctgcaaattcaactgtgagttcaaattcaacccctctgcgaacccctcttcggatcttcaagcgaccctttcctccgccttcaccggcaaagcacattcgagcactgctagctagaagacacggctctgtgaagcctaatgaagctactatacctgaagggagtgagtgtgaagttgggttggataagagttttggattttctaagcattttgtgacgaattttgagcttggacaagaagtgggtcgtggccattttggttatacttgctctgctaagggtaaaaaaggaagctttaagggtcttgatgttgctgttaaagtcattcctaaatctaagatgacaacagcaattgctatagaggatgtaagaagagaagtgaagatattgcgagctctaactgggcataagaatttggtacaattctacgaagcttacgaagacgaagaaaatgtttatgtagttatggaattatgcaaaggaggcgaattgttagataagattctttccaggggtggaaagtacccggaagaggatgccagagttgttttgattcagatattaagtgtggtagcttactgtcatctacagggtgttgtacaccgcgatctcaagccagagaattttctttttagttctgaggatgaaaattctacattgaaggccattgactttggactctctgattatgtaaagccagatgagagattgaatgatattgttggaagtgcttattacgttgcacctgaagttttgcatagatcttatgggactgaagcagatatgtggagcatcggtgtaattgcttatattctgttatgtggaagccgtcctttttgggccaggactgaatctggcatatttcgggctgtccttaaggcagatccaagtttcgatgaagctccctggccttctttatcggctgatgcaaaagattttgtaaaaaggctgttgaataaagattaccgtaaaagactaaccgctgctcaggctctcagtcatccgtggctggtgaatcacttagaggacataaagataccatttgacatgataatccacaagctcatcaaaacttacatatgctcgtcttctttacgcaaatcagcattaggggctcttgcaaagacattgacattagtgcagctagcatatctcagagaacaatttactctattagggccaaacaaaagtgggctaatctctatgcagaacttcaagacggctgttttaagaagcgccactgatgcctcgaaggattcacgggtcttagattatgcgaacatggttagctcaatccagtatcgaaaattagattttgaggaattttgcgctgctgctataagtgtccatcaactggagggaatggacacttgggagcaacatgcaaggcgtgcctacgagctgtttgaaaaggatggaaataggccaattatgatcgaagagcttgcctcggaacttggacttagcccctcagtacctattcacgtggtactccaagattggataagacactcagatggaaagctaagtttcttagggtttgtcagactcctgcatggagtttcttctcgcacatttcacaaggcttga

SEQ ID NO: 4525 - protein, 595 aa, Medicago truncatula
MGLCHGKPIETSRRERERERENSTNEEILQLPPPPSSSHHHHAPTKSSSKFPFFSPSPLPSFFKNSPANSTVSSNSTPLRTPLRIFKRPFPPPSPAKHIRALLARRHGSVKPNEATIPEGSECEVGLDKSFGFSKHFVTNFELGQEVGRGHFGYTCSAKGKKGSFKGLDVAVKVIPKSKMTTAIAIEDVRREVKILRALTGHKNLVQFYEAYEDEENVYVVMELCKGGELLDKILSRGGKYPEEDARVVLIQILSVVAYCHLQGVVHRDLKPENFLFSSEDENSTLKAIDFGLSDYVKPDERLNDIVGSAYYVAPEVLHRSYGTEADMWSIGVIAYILLCGSRPFWARTESGIFRAVLKADPSFDEAPWPSLSADAKDFVKRLLNKDYRKRLTAAQALSHPWLVNHLEDIKIPFDMIIHKLIKTYICSSSLRKSALGALAKTLTLVQLAYLREQFTLLGPNKSGLISMQNFKTAVLRSATDASKDSRVLDYANMVSSIQYRKLDFEEFCAAAISVHQLEGMDTWEQHARRAYELFEKDGNRPIMIEELASELGLSPSVPIHVVLQDWIRHSDGKLSFLGFVRLLHGVSSRTFHKA

SEQ ID NO: 4526 - DNA, 1545 bp, Triticum aestivum
  CDS (1)..(1545)
atgcagccggacgcgagcggcaacgctggcggcggcggcgcgaatccgaggccgaagctgccgccggtggccgtcgcgccggcgccgtccgggcggccggcgtccgtgctgccgcacaagacggccaacgtgcgggaccactaccgcatcggcaagaagctggggcaggggcagttcggcaccacctacctgtgcgtggccaaggaggacggcggcgagttcgcgtgcaagtccatccccaagcgcaagctgctgtgccgcgaggactacgaggacgtctggcgcgagatccagatcatgcaccacctctcggagcaccccaacgtcgtccgcatccgtggcgcctacgaggacgcgctcttcgtgcacattgtcatggagctctgcgccggcggggagctcttcgaccgcatcgtggccaaggggcactacaccgagcgtgccgcagcgcagctcatcaggacgatcgttggggtcgtagaggcatgccactcgctcggcgtcatgcaccgggacctcaagccggagaacttcctgtttgccagcactgccgaggacgccccgctcaagactaccgatttcgggttatccatgttctacaagcccggtgacaaattctctgatgttgttgggagcccctactatgttgcacctgaggtgcttcagaaatgctatggtccagaagctgatgtctggagtgctggggtgattctgtacattttgctatgtggcgtcccccctttctgggcagaaactgaagcaggaatcttcagacagatccttcgaggcaaacttgattttgagtctgagccctggcctagtatctctgacagcgctaaagatctagtccgtactatgctttgcagggatcctacaaagcgactctctgctcatgaggttctctgtcacccatggattgttgatgatgctgtggcgcctgataagcctatagattctgctgttctgtcaagactgaagcatttttctgcaatgaacaagctcaagaagatggcattgagggttattgctgaaagcctgtctgaggaagagattggaggtctaagggagctgttcaaaatgattgatgccgacaatagtggaactataacatttgatgagctgaaagatggcttgaaaagggtgggctcagagctaaccgaacatgaaatccaggctttaatggatgcggcggacatcgacaacagcggaacgattgattatggtgaattcatcgcagctacattgcacatgaataaactagagagggaggagaacttggtgtcagcattctcgttttttgacaaggatggaagtggatttatcaccatcgatgagctatcacatgcatgccgtcaatttggcctggatgatgttcaccttgaggatatgatcaaagatgtcgatcagaacaatgatgggcaaatcgattacagtgagttcacagcgatgatgagaaagggcaatgcgggtgcaacagggaggcgaaccatgaggaacagcttgaatctgaatctcggtgacatcttgaatcccagcaacagctaa

SEQ ID NO: 4527 - protein, 514 aa, Triticum aestivum
MQPDASGNAGGGGANPRPKLPPVAVAPAPSGRPASVLPHKTANVRDHYRIGKKLGQGQFGTTYLCVAKEDGGEFACKSIPKRKLLCREDYEDVWREIQIMHHLSEHPNVVRIRGAYEDALFVHIVMELCAGGELFDRIVAKGHYTERAAAQLIRTIVGVVEACHSLGVMHRDLKPENFLFASTAEDAPLKTTDFGLSMFYKPGDKFSDVVGSPYYVAPEVLQKCYGPEADVWSAGVILYILLCGVPPFWAETEAGIFRQILRGKLDFESEPWPSISDSAKDLVRTMLCRDPTKRLSAHEVLCHPWIVDDAVAPDKPIDSAVLSRLKHFSAMNKLKKMALRVIAESLSEEEIGGLRELFKMIDADNSGTITFDELKDGLKRVGSELTEHEIQALMDAADIDNSGTIDYGEFIAATLHMNKLEREENLVSAFSFFDKDGSGFITIDELSHACRQFGLDDVHLEDMIKDVDQNNDGQIDYSEFTAMMRKGNAGATGRRTMRNSLNLNLGDILNPSNS

SEQ ID NO: 4528 - DNA, 1542 bp, Triticum aestivum
  CDS (1)..(1542)
atgcagccggacgcgagcggcaacgctggcggcggcgcgaatccgaggccgaagctgccgccggtggccgccgcgccggcgccgtccgggcggccggcgtccgtgctgccgcacaagacggccaacgtgcgggaccactaccgcatcgggaagaagctggggcaggggcagttcggcaccacctacctgtgcgtggccaaggaggacggcggcgagttcgcgtgcaagtccatccccaagcgcaagctgctgtgccgcgaggactacgaggacgtctggcgcgagatccagatcatgcaccacctctccgagcaccccaacgtcgtccgcatccgtggcgcctacgaggacgcgctcttcgtgcacattgtcatggagctctgcgccggcggggagctcttcgaccgcatcgtggccaaggggcactacaccgagcgtgctgcagcgcagctcatcaggacgatcgttggggtcgtagaggcatgccactcgctcggcgtcatgcaccgggatctcaagccggagaacttcctgtttgccagcactgccgaggacgccccgctcaagaccaccgattttgggctatccatgttctacaagcccggtgacaaattctctgatgttgttgggagcccctactatgttgcacctgaggtgcttcagaaatgctatggtccagaagctgatgtctggagtgctggggtgattctgtacattttgctatgtggtgtcccccctttctgggcagaaactgaagcaggaatcttcagacagatccttcgaggcaaacttgattttgagtctgagccctggcctagtatctctgacagcgctaaagatctagtccgtactatgctttgcagggatcctacaaagcgactctctgctcatgaggttctttgtcacccatggattgttgatgatgctgtggcgcctgataagcctatagattctgctgttttgtcaagactgaagcatttttctgcaatgaacaagctcaagaagatggcattgagggttattgctgaaagcctatctgaggaagagattggaggtctaagggagctgttcaaaatgattgatgccgacaatagtggaactataacatttgatgagctgaaagatggcttgaaaagggtgggctcagagctaaccgaacatgaaatccaggctttaatggatgcggcggacatcgacaacagcggaacgattgattatggtgaattcatcgcagctacattgcacatgaataaactagagagggaggagaacttggtgtcagcattctcgttttttgacaaggatggaagtggattcatcaccatcgatgagctatcacatgcatgccgcaaatttggtctggatgatgttcaccttgaggatatgatcaaagatgtcgatcagaacaatgacgggcaaatcgattacagtgagttcacagcgatgatgagaaagggtaatgccagcgcaacagggaggcgaaccatgaggaacagcttgaatctgaatctcggcgacatcttgaatcccagcaacagctaa

SEQ ID NO: 4529 - protein, 513 aa, Triticum aestivum
MQPDASGNAGGGANPRPKLPPVAAAPAPSGRPASVLPHKTANVRDHYRIGKKLGQGQFGTTYLCVAKEDGGEFACKSIPKRKLLCREDYEDVWREIQIMHHLSEHPNVVRIRGAYEDALFVHIVMELCAGGELFDRIVAKGHYTERAAAQLIRTIVGVVEACHSLGVMHRDLKPENFLFASTAEDAPLKTTDFGLSMFYKPGDKFSDVVGSPYYVAPEVLQKCYGPEADVWSAGVILYILLCGVPPFWAETEAGIFRQILRGKLDFESEPWPSISDSAKDLVRTMLCRDPTKRLSAHEVLCHPWIVDDAVAPDKPIDSAVLSRLKHFSAMNKLKKMALRVIAESLSEEEIGGLRELFKMIDADNSGTITFDELKDGLKRVGSELTEHEIQALMDAADIDNSGTIDYGEFIAATLHMNKLEREENLVSAFSFFDKDGSGFITIDELSHACRKFGLDDVHLEDMIKDVDQNNDGQIDYSEFTAMMRKGNASATGRRTMRNSLNLNLGDILNPSNS

SEQ ID NO: 4530 - DNA, 1599 bp, Triticum aestivum
  CDS (1)..(1599)
atgggccagtgttgcagcagagctacgtccccggattctgtccaaggaggagccaatggctatggctattctcaccagcccaaacaagcacaaacacctcctagttacaacaatgctcagccaccaccacaagctgaggtgtggtacacaccgccagcgatgaaccctcctgtagtcccacctgtggttgccccctcaaagcccatgccggacacgattctcggcaagcagtaccaggatgtgcgctctgtctactcgcttggcaaggaacttggtagggggcagttcggggtgacgtacctttgcactgagattagcactggcaggcagtatgcttgcaagtccatatccaagcgcaagctcgtgagtaaggccgataaggaggatatccgcagggagatccagatcatgcagcacctatctgggcagccaaacatagtggagttctgtggagcatacgaggacaagggcagcgtgcatgttgtaatggagctctgtgcaggcggggagctgtttgatcggattattgccaaggggcactactcagagcgcgcagctgctacaatctgcagaggagttgtgaatgttgtgaatgtttgccatttcatgggagtgatgcaccgcgatctggagccggaaaacttcttgctcgcgaccaaggatgagaatgcagtgctcaaggccactgatttcgggctttcggtcttcattgaagaaggaaaaatgtatagggacatcgttggaagtgcttattatgttgctcctgaagtccttaggagaaactatggtaaagagatagatgtttggagtgcaggtgttattctgtacattcttctcagcggtgttcctccattctgggctgaaactgaaaagggaatatttgatgctattcttcaaggggagattgactttgaaagtcagccatggccatcaatttctgagagcgctaaagaccttgtgaggaagatgttggcgcaggatccaaagaaaagaattagttcagcccaagttcttcaacatccatggctcagggaaggagaagcatcagataaacctattgacagtgctgttctttctaggatgaagcaattcagagcaatgaataaactgaaaaagatggctctaaaggttatagcttcaaatcttaacgaggaagagatcaagggcctgaagcaaatgtttatgaacatggacacagacaacagtgggacaatcacatatgaggaactcaaagcaggactagccaaacttggatcgaagctctcagaagctgaagtaaagcagttgatggatgcggctgatgtggatggcaatggatcaattgactacgttgagttcataacagcaaccatgcatagacacaagctcgaaagagacgagcatttgttcaaggcgttccagtactttgacaaagacaacagtggcttcattacaagagatgaactggagactgctttgattgagcatgaaatgggcgacgcggataccataaaggacatcatatcagaagtcgacacagataatgatgggaggattaactacgaggaattctgcgctatgatgagaggagggatgcagcagccaataaggctcaagtag

SEQ ID NO: 4531 - protein, 532 aa, Triticum aestivum
MGQCCSRATSPDSVQGGANGYGYSHQPKQAQTPPSYNNAQPPPQAEVWYTPPAMNPPVVPPVVAPSKPMPDTILGKQYQDVRSVYSLGKELGRGQFGVTYLCTEISTGRQYACKSISKRKLVSKADKEDIRREIQIMQHLSGQPNIVEFCGAYEDKGSVHVVMELCAGGELFDRIIAKGHYSERAAATICRGVVNVVNVCHFMGVMHRDLEPENFLLATKDENAVLKATDFGLSVFIEEGKMYRDIVGSAYYVAPEVLRRNYGKEIDVWSAGVILYILLSGVPPFWAETEKGIFDAILQGEIDFESQPWPSISESAKDLVRKMLAQDPKKRISSAQVLQHPWLREGEASDKPIDSAVLSRMKQFRAMNKLKKMALKVIASNLNEEEIKGLKQMFMNMDTDNSGTITYEELKAGLAKLGSKLSEAEVKQLMDAADVDGNGSIDYVEFITATMHRHKLERDEHLFKAFQYFDKDNSGFITRDELETALIEHEMGDADTIKDIISEVDTDNDGRINYEEFCAMMRGGMQQPIRLK

SEQ ID NO: 4532 - DNA, 1599 bp, Triticum aestivum
  CDS (1)..(1599)
atgggccagtgttgcagcagagctacgtccccggattctgtccaaggaggagccaatggctatggctattctcaccagccaaaacaagcacaagcacctcctagttacaacaatgctcagccaccaccacaagctgaggtgaggtacacaccgccagcgatgaaccctcctgtagtcccacctgtggttgccccctcaaagcccatgccggacacgattctcggcaagcagtacgaggatgtgcgctctgtctactcccttggcaaggaacttggtagggggcagttcggggtgacgtacctttgcactgagattagcactggcaggcagtatgcttgcaagtccatatccaagcgcaagctcgtgagtaaggctgacaaggaggatatccgcagggagatccagatcatgcagcacctatctgggcagccaaacatagtggagttctgtggagcatatgaggacaagggcagcgtgcatgtcgtgatggagctctgtgcaggcggggagctgtttgatcggattattgccaaggggcactactcagagcgtgcagctgctacaatctgcagaggagttgtgaatgttgtcaatgtttgccatttcatgggagtgatgcaccgcgatctgaagccggagaacttcttgcttgcgaccaaggatgagaatgcagtgctcaaggccactgatttcgggctttcggtcttcattgaagaaggaaaaatgtatagggacatcgttggaagtgcttattatgttgctcctgaagtccttaggagaaactatggtaaagagatagatgtttggagtgcaggtgttattctgtacattcttctcagcggtgttcctccattctgggctgaaactgagaagggaatatttgatgctattcttcaaggggagattgactttgaaagtcagccatggccttcaatttctgagagcgctaaagaccttgtgaggaagatgttggcacaggatccaaagaaaagaattagttcagcccaagttcttcaacatccatggctcagggaaggagaagcatcagataaacctattgacagtgctgttctttctaggatgaagcaattcagagcaatgaataaactgaaaaagatggctctaaaggttatagcttcaaatcttaatgaggaagagatcaagggcctgaagcaaatgtttatgaacatggacacagacaacagtgggacaatcacatatgaggaactcaaagcaggactagccaaacttggatcgaagctctcagaagctgaagtaaagcagttgatggatgcggctgatgtggatggcaatggatcaattgactacgttgagttcataacagcaaccatgcatagacacaagctcgaaagagacgagcatttgttcaaggcgttccagtactttgacaaagacaacagtggcttcatcacaagagatgaactggagactgctttgattgagcatgaaatgggcgatgcggataccataaaggacatcatatcagaagtcgacacagataatgatgggaggattaactacgaggaattctgcgctatgatgagaggagggatgcagcagccaataaggctcaagtag

SEQ ID NO: 4533 - protein, 532 aa, Triticum aestivum
MGQCCSRATSPDSVQGGANGYGYSHQPKQAQAPPSYNNAQPPPQAEVRYTPPAMNPPVVPPVVAPSKPMPDTILGKQYEDVRSVYSLGKELGRGQFGVTYLCTEISTGRQYACKSISKRKLVSKADKEDIRREIQIMQHLSGQPNIVEFCGAYEDKGSVHVVMELCAGGELFDRIIAKGHYSERAAATICRGVVNVVNVCHFMGVMHRDLKPENFLLATKDENAVLKATDFGLSVFIEEGKMYRDIVGSAYYVAPEVLRRNYGKEIDVWSAGVILYILLSGVPPFWAETEKGIFDAILQGEIDFESQPWPSISESAKDLVRKMLAQDPKKRISSAQVLQHPWLREGEASDKPIDSAVLSRMKQFRAMNKLKKMALKVIASNLNEEEIKGLKQMFMNMDTDNSGTITYEELKAGLAKLGSKLSEAEVKQLMDAADVDGNGSIDYVEFITATMHRHKLERDEHLFKAFQYFDKDNSGFITRDELETALIEHEMGDADTIKDIISEVDTDNDGRINYEEFCAMMRGGMQQPIRLK

SEQ ID NO: 4534 - DNA, 1677 bp, Trifolium pratense
  CDS (1)..(1677)
atgggttgtcacggtagtaaggaagcgaaaaaatccgccgcagaacatagccgccaccgccaccaatcatccgccgcagctggtggtgctgctaccggcggtactaatttccagtatcaaattgttcaaccttcttcctctcacgttcaaacttcaccaccaccaaaaccaaaaccagaatcacattcacactcacattcacatgcttcaacagtgactacaacaacaacatcaaatccaaaaccctctgcttctgagaatgtgagaacagtgcagaaaccagacacaacaatattaggaaaaccctttgaagatattaaaaagttctatactttaggtaaagaattgggtagaggtcaatttgggattacttatttttgtactgagaattcaactggtttaaattatgcttgtaaatctatattaaagaggaaacttgtttctaaagctgatagagaagatattaagagagagattcagattttgcagcatttatctggtcaacctaacattgttgaatttaaaggtgcttatgaggataggttttctgttcatcttgttatggaactttgtgctggtggagagttgtttgatagaattattgctcaaggtcattattcagagagagctgctgcatctatttgtagggctgttgttaatgttgtgcacatttgtcattttatgggtgtattgcatcgcgatttgaagccggaaaatttcttgctttctagtaaagatgaaggagcagcacttaaagctactgattttggactttctgttttcattgaagaaggaaaggtttaccgtgatatggtaggaagtgcttactatgttgctcctgaggtattgcgtcgtaattatggaaaggaaatagacatttggagtgcaggcatcatattgtatattctccttagtggtgtaccacctttttgggctgaaactgaaaagggaatatttaatgccatattggaaggtgaacttgactttgttagtgaaccatggccatcaatatcagacagtgctaaagatctagtcagaaagatgctgacacaggatccaaagaagagaattacttctacccaagtccttgaacacccgtggatgagagaaggtggagaggcctctgataaaccgattgatagtgctgttctatctagaatgaaacaattcagggcaatgaataagttcaagaaacttgcattgaaggttatggctgaaaatctatcagaagaagagattaaaggtctcaaggcaatgtttgcaaatatggacactgatggtagtggcaccatcacctatgaagaactgaagtcaggcctagcacgaattggatcacgattgtctgagcctgaagtgaagcaacttatggaagctgctgatgttgatggaaatggctcaatcgactatcttgaattcatatcagctacaatgcatagacacagacttgaacgagatgaacatctttacaaagcattccagtattttgataaagacaatagtgggcatattactagagaagaattggagactgccatgacaaagcatggaatgggtgatgaagcaacaataaaggaaattatttctgaggtggatacagataatgatgggagaataaactatgaggaattctgtgcaatgatgagaagtggaatgccacaccaggcacaactattttaa

SEQ ID NO: 4535 - protein, 558 aa, Trifolium pratense
MGCHGSKEAKKSAAEHSRHRHQSSAAAGGAATGGTNFQYQIVQPSSSHVQTSPPPKPKPESHSHSHSHASTVTTTTTSNPKPSASENVRTVQKPDTTILGKPFEDIKKFYTLGKELGRGQFGITYFCTENSTGLNYACKSILKRKLVSKADREDIKREIQILQHLSGQPNIVEFKGAYEDRFSVHLVMELCAGGELFDRIIAQGHYSERAAASICRAVVNVVHICHFMGVLHRDLKPENFLLSSKDEGAALKATDFGLSVFIEEGKVYRDMVGSAYYVAPEVLRRNYGKEIDIWSAGIILYILLSGVPPFWAETEKGIFNAILEGELDFVSEPWPSISDSAKDLVRKMLTQDPKKRITSTQVLEHPWMREGGEASDKPIDSAVLSRMKQFRAMNKFKKLALKVMAENLSEEEIKGLKAMFANMDTDGSGTITYEELKSGLARIGSRLSEPEVKQLMEAADVDGNGSIDYLEFISATMHRHRLERDEHLYKAFQYFDKDNSGHITREELETAMTKHGMGDEATIKEIISEVDTDNDGRINYEEFCAMMRSGMPHQAQLF

SEQ ID NO: 4536 - DNA, 1545 bp, Ipomoea nil
  CDS (1)..(1545)
atggggagttgtaacagcataccttcgtcgccctttgccgccacttcagccggcggagaaagcgatccaccgccgccgaaaaatgacatcaccgtccttccgccctcccagcctccccctccacgtcccttcctctccggcgtcggccgcgtccttgggcgccccatggaggacgtccactccacctacatttttgggggggagctaggtcggggacagttcggggtcacctacctagtcacccaccgcaagacgcgcgagcgcctcgcctgcaagtcaatcgccacgcgcaagcttctctccaaggacgacgttgacgatgtccggcgtgaggtccagattatgcaccacctcaccggccaccgcaacatcgtcgagctcaagggaacctatgaggaccgcaaccacgtccacctagtcatggagctctgcgctggcggcgagctcttcgaccgtatcatcgccaagggccactactccgaacgcgccgccgccggcctctgccgtcagatggttaccgttcttcactactgtcactctatgggggttatgcaccgggatttgaagcctgagaatttcttgttcttgagctccgatgagaattcgccattgaaggctactgattttggcttgtcagtcttctttaaaccaggagatacattcaaggacctggtaggtagtgcatattatgtggctcctgaagttttgcgccgaaattatggacctgaagccgatatttggagtgctggagtgatactgtacattttactcagtggcgttcccccattttggggagagaatgagcagagcatctttgatgctgttcttcggggacatctagatttttcttctgatccttggccatcaatatctagtagtgctaaagatcttgttaagaagatgctacgttcggatcccaaagaaagactttctgctactgatgtcctgaatcatccttggatgagagaagatggtgatgcatctgacaagcctattgacattgctgccttaagtagaatgaaacagttccgtgctatgaacaagctcaagaaagtagctcttaaggtaattgccgaaaatctttctgaagaagaaattattggtttgaaggaaatgttcaaatcaatagacacagatgacagtggcacaattacttatgaagaactgaaagctggtcttacaaaaatgggcaccaagctctcagagtcagaagttaggcaattgatggaagcggctgatgttgatggaaatggaactattgattatcttgagttcatcacagctacgatgcatatgaaccgtgtggaaagagaagaccacttgtacaaggcttttgagtattttgacaaggacaagagcgggtatattactatggaagaattggagcattccctgaagaaatacaacattaccgatgaaaagacaataaaggagatcattgtagaagttgacacagataacgatgggaaaatcaattatgatgaatttgtggcgatgatgaggaaaggcacccctgacttggtcattaataggcgtcgtagatga

SEQ ID NO: 4537 - protein, 514 aa, Ipomoea nil
MGSCNSIPSSPFAATSAGGESDPPPPKNDITVLPPSQPPPPRPFLSGVGRVLGRPMEDVHSTYIFGGELGRGQFGVTYLVTHRKTRERLACKSIATRKLLSKDDVDDVRREVQIMHHLTGHRNIVELKGTYEDRNHVHLVMELCAGGELFDRIIAKGHYSERAAAGLCRQMVTVLHYCHSMGVMHRDLKPENFLFLSSDENSPLKATDFGLSVFFKPGDTFKDLVGSAYYVAPEVLRRNYGPEADIWSAGVILYILLSGVPPFWGENEQSIFDAVLRGHLDFSSDPWPSISSSAKDLVKKMLRSDPKERLSATDVLNHPWMREDGDASDKPIDIAALSRMKQFRAMNKLKKVALKVIAENLSEEEIIGLKEMFKSIDTDDSGTITYEELKAGLTKMGTKLSESEVRQLMEAADVDGNGTIDYLEFITATMHMNRVEREDHLYKAFEYFDKDKSGYITMEELEHSLKKYNITDEKTIKEIIVEVDTDNDGKINYDEFVAMMRKGTPDLVINRRRR

SEQ ID NO: 4538 - DNA, 1854 bp, Gossypium hirsutum
  CDS (1)..(1854)
atgggtctttgcacctccaaaccctccccaaacccttctgattctacaaatgcctctatcaatacccggaataacgatatctaccgcaagcctaactctgtttcggcttctcctttacctgatggagtaaactccaaggaagatcaaggtaaacaaggagaagaagaaaaagaaagctccaatcccaacaatgaaggcaagaaatcgccgtttttcccgttttatagtcccagtccagctcactacttgttttccaaaaagtctcctgcgagatcttcaaccaattccactccaaaacggtttttcaggaggccattccctccgccgtctccggcgaagcatattagggcagtgcttgcgcggaggcacgggtctgtgaagccgaatgaggccgcgatcccggaaggaagcgacgcagaggcagcgggagctaccggtaccggactggataagagcttcggcttctcgaagcacttcgggagcaaatatgagctcggagacgaagtaggaagaggccatttcggttatacttgtacggcgaagtttaagaaaggagagcttaaaggacaacaagttgccgttaaagttatacctaaagcgaagatgactactgcaattgccattgaggatgttagaagggaggtaaaaatattaagagctctatctggacatagcaatttagtacaattctatgatgcctacgaggaccatgataatgtctacatagtgatggaattatgtgaaggaggggagctcttggacagaattctttctaggggcggaaaatacactgaggatgatgcaaaagctgtgatgattcagatacttaacgttgttgctttttgccatctccagggtgttgtgcaccgggatcttaaacctgagaatttcttgtttacatcaaaggatgaaaattcacaattgaaggctatagactttggcttgtctgattttgtgaaaccggatgaaaggcttaatgacattgttggtagtgcatactatgtagcaccagaagttctacataggtcttacagtacagaagcagatgtctggagtataggtgtgattgcttatattcttttgtgtggtagtcgtccattttgggctcgaacagagtctgggatttttcgagctgttctaaaagctgatccaagttttgatgaagcaccttggccatctctatcttctgaggctagggattttgtgaagcgtttactgaataaggacccaaggaaaagattgactgcagcccaagctctgagtcatccctggataaaaaagtataacgatgtaaaagtgcccttggatatactgatattcaaactcatgaaggcttatctgcgttcttcatctcttcggaaggctgctttaagggccctgtctaaaactttgactgtggatgagctgttttacttgaaggagcagtttgcattattggaaccaaataaaaatggcactataagcttagaaaatatcaaagcggttctgatgaaaaatgcaacagatgctatgaaggatgctcgcatccctgagtttcttgcatcgctaaatgcacttcaatacagacggatggactttgatgagttctgtgcggctgcattaactgttcatcagctggaggctcttgatcggtgggaacagcatgcacgttgtgcttacgaaatctttgagaaggaaggaaacagacctattgtcattgaagagctagcttcggagctcggactgagcccatctgtgcctgttcatgctgttcttcatgactggattaggcacactgatgggaagctaagttttctcggatttgtcaaattattgcacggtgtatctagccgaaccatcgcaaaagctcaatag

SEQ ID NO: 4539 - protein, 617 aa, Gossypium hirsutum
MGLCTSKPSPNPSDSTNASINTRNNDIYRKPNSVSASPLPDGVNSKEDQGKQGEEEKESSNPNNEGKKSPFFPFYSPSPAHYLFSKKSPARSSTNSTPKRFFRRPFPPPSPAKHIRAVLARRHGSVKPNEAAIPEGSDAEAAGATGTGLDKSFGFSKHFGSKYELGDEVGRGHFGYTCTAKFKKGELKGQQVAVKVIPKAKMTTAIAIEDVRREVKILRALSGHSNLVQFYDAYEDHDNVYIVMELCEGGELLDRILSRGGKYTEDDAKAVMIQILNVVAFCHLQGVVHRDLKPENFLFTSKDENSQLKAIDFGLSDFVKPDERLNDIVGSAYYVAPEVLHRSYSTEADVWSIGVIAYILLCGSRPFWARTESGIFRAVLKADPSFDEAPWPSLSSEARDFVKRLLNKDPRKRLTAAQALSHPWIKKYNDVKVPLDILIFKLMKAYLRSSSLRKAALRALSKTLTVDELFYLKEQFALLEPNKNGTISLENIKAVLMKNATDAMKDARIPEFLASLNALQYRRMDFDEFCAAALTVHQLEALDRWEQHARCAYEIFEKEGNRPIVIEELASELGLSPSVPVHAVLHDWIRHTDGKLSFLGFVKLLHGVSSRTIAKAQ

SEQ ID NO: 4540 - DNA, 1599 bp, Hordeum brevisubulatum
  CDS (1)..(1599)
atgggccagtgttgcagcagagctacgtccccagattctgtccaaggaggagccaatggctatggctattctcaccagccaaaacaagcacaagcacctcctagttacaacaatgctcagccaccaccacgagctgaggtgaggtacacaccgccagcgatgaaccctcctgtagtcccacctgtggttgccccctcaaagcccatgccggacacgattctcggaaagcagtacgaggacgtgcgctctgtctactcccttggcaaggaacttggtagggggcagttcggggtgacgtacctttgcactgagattagcactggcaggcagtatgcttgcaagtccatatccaagcgcaagctcgtgagtaaggccgacaaggaggatatccgcagggagatccagatcatgcagcacctatctggacagccaaacatagtggagttctgtggagcgtacgaggacaagggcagcgtgcatgttgtgatggagctctgtgcaggcggggagctgtttgatcggattattgccaagggacactactcagagcgtgcagctgctacaatctgcagaggagttgtgaatgttgtcaatgtttgccatttcatgggagtgatgcaccgtgatctgaagccggagaacttcttgctcgcaaccaaggatgagaatgcagttctcaaggccactgattttgggctttcggtcttcattgaagaaggaaaaatgtatagggacatcgttggaagtggcttattatgttgctccgaagtccttaggagaaattatggtaaagagatagatgtttggagtgcaggtgttattctgtatattcttctcagcggcgttcccccattctgggctgaaactgagaaggggatatttgatgctattcttcaaggggagattgactttgagagtcagccatggccatcaatttctgagagtgctaaagaccttgtgaggaagatgttggcacaggatccaaagaaaagaattagttcagcccaagttctccgacatccatggctcagggaaggagaagcatcagacaaacctattgacagtgctgttctttctaggatgaagcaattcagagcaatgaataaactgaaaaagatggccctaaaggttatagcttcaaatcttaatgaggaagagatcaagggcctgaagcaaatgtttatgaacatggacacagacaacagtgggacattcacatatgaggaactcaaagcaggactagccaaacttggatcgaagctgtcagaagctgaagtaaagcagttgatggatgcggctgatgtggatggcaatggatcaattgactacgttgagttcataacagcaacaatgcatcgacacaagctcgaaagagacgagcatttgttcaaggcgttccagtactttgacaaagacaacagtggcttcatcacaagagatgaactggagactgctttgattgagcatgaaatgggcgatgcggataccataaaggacatcatatcggaagttgacactgataatgatgggaggattaactacgaggaattctgcgctatgatgagaggagggatacagcagccaataaagctcaagtag

SEQ ID NO: 4541 - protein, 532 aa, Hordeum brevisubulatum
MGQCCSRATSPDSVQGGANGYGYSHQPKQAQAPPSYNNAQPPPRAEVRYTPPAMNPPVVPPVVAPSKPMPDTILGKQYEDVRSVYSLGKELGRGQFGVTYLCTEISTGRQYACKSISKRKLVSKADKEDIRREIQIMQHLSGQPNIVEFCGAYEDKGSVHVVMELCAGGELFDRIIAKGHYSERAAATICRGVVNVVNVCHFMGVMHRDLKPENFLLATKDENAVLKATDFGLSVFIEEGKMYRDIVGSGLLCCSEVLRRNYGKEIDVWSAGVILYILLSGVPPFWAETEKGIFDAILQGEIDFESQPWPSISESAKDLVRKMLAQDPKKRISSAQVLRHPWLREGEASDKPIDSAVLSRMKQFRAMNKLKKMALKVIASNLNEEEIKGLKQMFMNMDTDNSGTFTYEELKAGLAKLGSKLSEAEVKQLMDAADVDGNGSIDYVEFITATMHRHKLERDEHLFKAFQYFDKDNSGFITRDELETALIEHEMGDADTIKDIISEVDTDNDGRINYEEFCAMMRGGIQQPIKLK

SEQ ID NO: 4542 - DNA, 1692 bp, Oryza sativa
  CDS (1)..(1692)
atgggcaactgctgcgtgtcccggccgtccggcgccgacaagcggcggcgctgcggcagctccaccgccccgcacacccgcggcggcaggcgggtgatcggcgccgccaacatgcggtgcctctccacggtctcctccgtgtcggacgcggcgcgcgccgtgatgtcgaacgagccggcgaccgtgctgggcaacagcggcagcagcggcaacggcggcgtgatggcggcggaggagatgctgcggcggtacgagatcggggaggagctgggtcggggggagttcggggtgacgcggcggtgccgggacgcggtgacgggggagcggctggcgtgcaagtcgatcagcaagcggaagctccggagcagcgtggacgtggaggacgtgcggcgggaggtggccatcatgcggtcgctgccggcgcacgccaacgtggtgaggctccgggaggcgttcgaggacgccgacgccgtccacctcgtcatggaggtctgcgagggcggcgagctcttcgaccgcatcgtcgcccgcggccattacaccgagcgcgccgccgccgccgtcatgcgcaccatcatggacgtcgtccagcactgtcacaagaacggcgtcatgcatcgggacctcaaacctgagaactttctgtatgccaatgcatctgagaactcccctctcaaggtcatcgacttcggcctctcagtatgcttcaaacctggtgcaagattcaatgagattgttggatctccctactacatggcaccagaagtcctgaagagaaactatggacaagaaatagacatatggagtgcaggagtcatactgtacatcttgctatgtggtgttcctcctttctgggccgagaccgacgaagggatcgcacaggccatcatccggtcacatatcgacttccaaagagagccttggccaaaggtgtcagataatgccaaggatcttgtaaggaggatgcttgatccaaacccatatactcggttgacggctcaacaggttctagagcatccttggatacagaatgcaagtgcagctcccaacattcctttgggagaagcagtcaggtccaggctgaagcaattcactgttatgaacaagttcaagaagaaggccttacttgtggtggcggagtacttaccaaccgaagagctggatgcaatcagggagctgttcaatatgttggacaccaaaaagaaggggcacttgacactagaagagctcagaaagggactgcaagtgatagggcacaacatccatgacacagatgtcgatatgctcatggaagctgcagacatagatggaaatggcatactggactgcaaggagtttgtgacagtatccattcacctgaagaaaatccgtagcgaggagcaccttccgaaggtgttcagcttcttcgacaagaacggcagcgggtacatagagattgaagagttgaaagaagccctctccccaagaggtgaccagaagtcgatcgacgacatatttctggatgttgacatagacaaggatgggaagataagctacgaggagtttgagttaatgatgtcagccggaatggactggaggaatgcatcccggcaatactcgagagcagtttacaacactctcagccgcaagatattcaaggaagtgtccctgaagcttgatcacagtggtccacttgttgcagcaggaaaatag

SEQ ID NO: 4543 - protein, 563 aa, Oryza sativa
MGNCCVSRPSGADKRRRCGSSTAPHTRGGRRVIGAANMRCLSTVSSVSDAARAVMSNEPATVLGNSGSSGNGGVMAAEEMLRRYEIGEELGRGEFGVTRRCRDAVTGERLACKSISKRKLRSSVDVEDVRREVAIMRSLPAHANVVRLREAFEDADAVHLVMEVCEGGELFDRIVARGHYTERAAAAVMRTIMDVVQHCHKNGVMHRDLKPENFLYANASENSPLKVIDFGLSVCFKPGARFNEIVGSPYYMAPEVLKRNYGQEIDIWSAGVILYILLCGVPPFWAETDEGIAQAIIRSHIDFQREPWPKVSDNAKDLVRRMLDPNPYTRLTAQQVLEHPWIQNASAAPNIPLGEAVRSRLKQFTVMNKFKKKALLVVAEYLPTEELDAIRELFNMLDTKKKGHLTLEELRKGLQVIGHNIHDTDVDMLMEAADIDGNGILDCKEFVTVSIHLKKIRSEEHLPKVFSFFDKNGSGYIEIEELKEALSPRGDQKSIDDIFLDVDIDKDGKISYEEFELMMSAGMDWRNASRQYSRAVYNTLSRKIFKEVSLKLDHSGPLVAAGK

SEQ ID NO: 4544 - DNA, 1452 bp, Arabidopsis thaliana
  CDS (1)..(1452)
atgcggcgtaacgttgacaatcaatcttactatgttcttggtcacaagactcctaacattcgtgatctttacacgttgagtcgtaagttaggacaaggacaattcgggacaacgtatttgtgtactgatattgccacaggtgttgactatgcttgtaagtctatatccaagaggaaattgatatctaaagaagatgttgaggatgttaggagggagattcagattatgcatcatttagctggtcacaagaatattgttactattaaaggagcttatgaggatcctttgtatgttcacattgtgatcgagctttgtgctggtggtgagttgtttgataggattattcatagaggtcattacagcgagaggaaagctgctgagttgaccaagatcattgtcggtgttgttgagccgtgtcattctcttggtgttatgcatagagatttaaagcctgagaatttcttgttggttaataaggatgatgatttctctcttaaggccattgattttggtctctctgttttcttcaaaccaggccaaatattcaaggatgttgttggaagtccatactatgttgctcctgaggttcttctaaaacattatggtccagaagctgatgtgtggactgctggtgttatactctatatcttactaagtggtgtcccgcctttctgggcagaaacacagcaaggaatatttgatgctgtgttgaagggatatattgactttgatacagacccgtggcctgtcatatccgacagtgctaaagatctgatccggaagatgttatgctctagtccttctgaacgtttgactgctcatgaagtcttgcgtcatccatggatctgtgagaatggagttgcaccggctagagcacttgacccggctgttttgtcccgtctaaaacagttttctgcaatgaataaattaaagaagatggctttaaaggtgatagctgagagcctctcagaagaagagattgcgggtttaagagcaatgtttgaggcaatggatactgataacagcggtgcaatcacttttgatgaactcaaagctggcttgagaaaatatggatctacccttgaaagcacagagatccatgatcttatggatgcggctgatgtagacaacagtgggacaatagattacagcgagtttattgcagcgacgatccatctgaataaactagagagagaagagcatcttgtctctgcatttcagtactttgacaaagatggaagtggttacatcaccattgatgagctgcaacaatcttgcattgaacatgggatgaccgatgtttttcttgaagacataatcaaagaagtagatcaagacaacgatggacggattgattacgaagaatttgttgcgatgatgcaaaagggaaatgctggtgtagggagaagaacaatgaaaaatagtctaaacatcagcatgagagatgtgtag

SEQ ID NO: 4545 - protein, 483 aa, Arabidopsis thaliana
MRRNVDNQSYYVLGHKTPNIRDLYTLSRKLGQGQFGTTYLCTDIATGVDYACKSISKRKLISKEDVEDVRREIQIMHHLAGHKNIVTIKGAYEDPLYVHIVIELCAGGELFDRIIHRGHYSERKAAELTKIIVGVVEPCHSLGVMHRDLKPENFLLVNKDDDFSLKAIDFGLSVFFKPGQIFKDVVGSPYYVAPEVLLKHYGPEADVWTAGVILYILLSGVPPFWAETQQGIFDAVLKGYIDFDTDPWPVISDSAKDLIRKMLCSSPSERLTAHEVLRHPWICENGVAPARALDPAVLSRLKQFSAMNKLKKMALKVIAESLSEEEIAGLRAMFEAMDTDNSGAITFDELKAGLRKYGSTLESTEIHDLMDAADVDNSGTIDYSEFIAATIHLNKLEREEHLVSAFQYFDKDGSGYITIDELQQSCIEHGMTDVFLEDIIKEVDQDNDGRIDYEEFVAMMQKGNAGVGRRTMKNSLNISMRDV

SEQ ID NO: 4546 - DNA, 1776 bp, Chlamydomonas eugametos
  CDS (1)..(1776)
atggcagctaagttcgttgagggcacactggatgtcacgctcaagagcgcgagtgatctccgcgaggatatgtctgtcaagctggacgcctactgcgtcgtgtcctgtgctagcacggcacaccgcagcaacaccgtcacagacgctgggaagacaatgaattgggagcagacgtttcacttcgacaaagttgcatcaacatctgtgttgaagctggagtcttcgatgagaagaacgccgtcggaccgtagctcttgcgcttgcaagattcctctcacacgggcttgcacctcggggtcagatgaggtgtgcgtgccagtgctggacaagaagggcaagcccattggcgagacgcatgtcagcatgacctttaaggccacgtccatggcggatgggccaacaaagggcaactggatccttcctacctatgcgaacaaggactgttggaaggactacgagcagggcaaggtggtgggcaagggctcattcggcaccacctaccttgtcaccaagaaggatacccaagagcagtatgcagtcaaggtcatctccaagcgcaagctgaccaccatggaggaggtggaggacatccagcgtgaggtgcgcatcatgcaccacctggctggccaccccaacgtcgtgcagctcaagaacgtgtacgaggataagagctacgtgtacctggtcatggatgcttgcatgggtggagagctgtttgacgcgatcgtggagcgcgggacgtacagcgagaaggacgcacgcgcgcttatgcgcacgattgtgagcgtcgtggctcattgccatgacatgggcgtgatccaccgtgatctcaagcctgaaaacttcctgttgctggacaagtcggcgaacccggtgctcaagtccatcgactttggtctgtcgtcgttctaccaggagggccaagtgtttcacgacattgtcggcagccccttctacgtcgcccccgaggtcgtgcgccgctcttacggcaaggaggcggacatctggagctgcggcgtgatcctctacatcctgttgtgtggctacccccccttccacggtgacaacgagacaaagatctttgaggcaatcatgaacaagtccctagacttccagtcagacccctggcccaaggtctcggaacctgccaaggaatgcattcgccgcatgcttgaccgcaaccccaagacgagagcctctgcgcagcagacgctggagcacgagtggatgcgtgagaacggtgtggccactgagaagcgcctggagatggaggtgctgaccagtatgaagaagttcagtgctggcaacaggctcaagaaggaggcggcaaagatcattgctgcaaacctccccactgacgagatctgcgggctgcgcgagatgttcatcgccattgacgtcgaccacagcggcagcatcacagcggaagagtttgccaacgcgctgcgcatgaagggcaacagcctccccgaggacgaggtgcagaggctcgtgtccaacgcggacgtggatggggacggcacatgcgactacgaggagttcttagctgccaccatcaaccagagcaagctggagcgtgaggacaggctcaagattgcgtttgagcattttgacctggaccacgacggcagcattacccatgacgagctcatgcagagcctggccaacctcggcatcaacgacgcgggcatcaaggagatcattgcggatgtggacagggatggcaacggccagatcgactacaatgagttctgcctgatgatgcgcaacctgtga

SEQ ID NO: 4547 - protein, 591 aa, Chlamydomonas eugametos
MAAKFVEGTLDVTLKSASDLREDMSVKLDAYCVVSCASTAHRSNTVTDAGKTMNWEQTFHFDKVASTSVLKLESSMRRTPSDRSSCACKIPLTRACTSGSDEVCVPVLDKKGKPIGETHVSMTFKATSMADGPTKGNWILPTYANKDCWKDYEQGKVVGKGSFGTTYLVTKKDTQEQYAVKVISKRKLTTMEEVEDIQREVRIMHHLAGHPNVVQLKNVYEDKSYVYLVMDACMGGELFDAIVERGTYSEKDARALMRTIVSVVAHCHDMGVIHRDLKPENFLLLDKSANPVLKSIDFGLSSFYQEGQVFHDIVGSPFYVAPEVVRRSYGKEADIWSCGVILYILLCGYPPFHGDNETKIFEAIMNKSLDFQSDPWPKVSEPAKECIRRMLDRNPKTRASAQQTLEHEWMRENGVATEKRLEMEVLTSMKKFSAGNRLKKEAAKIIAANLPTDEICGLREMFIAIDVDHSGSITAEEFANALRMKGNSLPEDEVQRLVSNADVDGDGTCDYEEFLAATINQSKLEREDRLKIAFEHFDLDHDGSITHDELMQSLANLGINDAGIKEIIADVDRDGNGQIDYNEFCLMMRNL

SEQ ID NO: 4548 - DNA, 1599 bp, Petunia integrifolia subsp
  CDS (1)..(1599)
atggggaactgttgttcaaggggccaacctaatgaatcaaatgatcatacagaatccatcagcactgccaaaaatggtgacggaaaagtcatgcaaggtggttcagttacaccaccaaaaactccacctcctgcatcacctgacccttcttctaaaccatctaaaacttctcctataggcccagttttaggaagaccaatggaagatgttagaaaaacatattctattggtaaagaattaggaaggggtcaatttggtgtaacacatttatgtacacacaaacaaagtggtgaacaatttgcatgtaagactatagcaaaaagaaaattggttaataaagaagatattgaagatgtgaagagggaagtacaaattatgcatcatttaacaggtcaacaaaatattgttgaattaaaaggtgcttatgaagataaacattcagtacatttggttatggaattatgtgcgggtggtgaactttttgataggattattgctaaaggacattatactgaacgtgctgctgcaacattacttagaacaattgtgcaaattggtcatacttgtcattctatgggtgtcattcatagagatctcaagcctgagaatttcctattacttaataaagatgaagattcacctctcaaggctacagattttggtctatccgtgttctataagcaaggggatgtgtttaaggacattgtgggtagtgcctattacattgcacctgaagtcttgaaaagaagatatggtccagaagttgatatatggagtgttggagttatgttatatattcttctttctggtgttcctcctttttgggcagaaactgaacatggaatattcaatgcaatattgcgaggacatattgatttttcatgtgatccatggcctgcaatttctcatggagccaaggaccttgtcaggaagatgttgactatagaccccaagcaaaggttaacagcaatccaagtattaaatcatccttggatcaaggaggatggagacgcaccagatacaccacttgataatgctgttttgagtaggctcaaacaattcagagctatgaacaatttcaagaaagttgctcttcgggtaatcgcagggtgcttatcagaagaagaaattatgggattaaagcaaatgttcaaaagcatggacaccgataacagtggagcaataacattagaggagctaaagacaggactagccaaacaagggactaaactatctgattatgagattcaacaattaatggaagctgctgatgctgatggaaatggaaccatagattatgaagagtttattacagcaacaatgcacatgaacagaatggacaaagaagaacatctttacacagcattccaatattttgataaggataatagtgggtacattacagtagaggagttagagcaagctttaagagaatttggtattactgatggaaaggatataaaggatattgttgctgaagttgactctaataatgatggtcgaattaactatgatgagtttgtagctatgatgaaaaaaggaactccagatacagcagcaaatctaaagaaaaggagggagtcctttgatgcgaaatag

SEQ ID NO: 4549 - protein, 532 aa, Petunia integrifolia subsp
MGNCCSRGQPNESNDHTESISTAKNGDGKVMQGGSVTPPKTPPPASPDPSSKPSKTSPIGPVLGRPMEDVRKTYSIGKELGRGQFGVTHLCTHKQSGEQFACKTIAKRKLVNKEDIEDVKREVQIMHHLTGQQNIVELKGAYEDKHSVHLVMELCAGGELFDRIIAKGHYTERAAATLLRTIVQIGHTCHSMGVIHRDLKPENFLLLNKDEDSPLKATDFGLSVFYKQGDVFKDIVGSAYYIAPEVLKRRYGPEVDIWSVGVMLYILLSGVPPFWAETEHGIFNAILRGHIDFSCDPWPAISHGAKDLVRKMLTIDPKQRLTAIQVLNHPWIKEDGDAPDTPLDNAVLSRLKQFRAMNNFKKVALRVIAGCLSEEEIMGLKQMFKSMDTDNSGAITLEELKTGLAKQGTKLSDYEIQQLMEAADADGNGTIDYEEFITATMHMNRMDKEEHLYTAFQYFDKDNSGYITVEELEQALREFGITDGKDIKDIVAEVDSNNDGRINYDEFVAMMKKGTPDTAANLKKRRESFDAK

SEQ ID NO: 4550 - DNA, 1596 bp, Zea mays
  CDS (1)..(1596)
atggggcagtgttgtagcagagctcccgccccggactctggacggggaggcaccaatggttatggctattctaaccaggcaaagccagcgcaaacaccttcgagttacaaccctcctcagcagccggccgaggtgaggtacacgccgccggcgacgaaccctccggtagtcccacctgtgcctgtgccaccgaagcccacggcggacacgattcttggcaaacagtacgaggacgtgcgctctgtctactccctcggaaaggagcttggccggggccagttcggggtgacatacctctgcacagaggttgcctctggtaagcagtacgcctgcaagtccatctccaagcgcaagcttaccagcaaggcagacagggaggacattcgaagagagatccagatcatgcagcatctgtctggacagccaaacattgttgagttccggggagcatacgaggacaagagcaatgtccatgtggtgatggagctctgcgcaggtggggagctcttcgatcgcatcattgccaaggggcactacacagagcgtgcagctgctacaatctgcagagcagttgtgaatgttgtcaacatttgccacttcatgggtgtgatgcaccgtgacctgaaaccggagaacttcttgcttgcgagcaaggaggagaatgcaatgctcaaggccactgattttgggctttccgtcttcatcgaagaaggaaagatgtacagggacatcgttggaagtgcttattatgttgcgcctgaagtccttaagcggagctatggaaaagagatagatgtttggagcgcaggtgttattttgtacattcttctcagtggtgtgcctccattttgggctgaaactgaaaaggggatatttgatgctattctgcatgaggagattgactttgaaagtcaaccttggccatcaatttctgagagtgctaaagacttggttagaaagatgttgacacgagatccaaagaaaagactgacttcagctcaagttcttcaacattcatggctcagagaaggtggaggtgcatctgataagcctatcgacagtgctgttctttctagaatgaagcagttcagagcaatgaataagctgaaaaagatggccctaaaggttattgcctcaaaccttaacgaggaagagatcaaggggctaaagcaaatgttcatgaacatggacacagacaatagtggcacaatcacgtatgaagaactcaaagcaggactagccaaacttggatcaaagctgtcggaagctgaagtaaagcagttgatggaggctgctgatgttgatgggaatggatccatcgactatgttgagttcatcactgccacaatgcatagacacaagctcgaaagagacgagtatttgtttaaggcattccagtacttcgataaagataacagcggtttcatcacaagagatgagctggagtctgctttgatcgagcatgagatgggtgacacgagtacaataaaggagatcatatcagaagtggacacagacaatgatgggaggattaactatgaggagttctgcgcaatgatgagaggagggatgcagcagccaatgaggctcaagtag

SEQ ID NO: 4551 - protein, 531 aa, Zea mays
MGQCCSRAPAPDSGRGGTNGYGYSNQAKPAQTPSSYNPPQQPAEVRYTPPATNPPVVPPVPVPPKPTADTILGKQYEDVRSVYSLGKELGRGQFGVTYLCTEVASGKQYACKSISKRKLTSKADREDIRREIQIMQHLSGQPNIVEFRGAYEDKSNVHVVMELCAGGELFDRIIAKGHYTERAAATICRAVVNVVNICHFMGVMHRDLKPENFLLASKEENAMLKATDFGLSVFIEEGKMYRDIVGSAYYVAPEVLKRSYGKEIDVWSAGVILYILLSGVPPFWAETEKGIFDAILHEEIDFESQPWPSISESAKDLVRKMLTRDPKKRLTSAQVLQHSWLREGGGASDKPIDSAVLSRMKQFRAMNKLKKMALKVIASNLNEEEIKGLKQMFMNMDTDNSGTITYEELKAGLAKLGSKLSEAEVKQLMEAADVDGNGSIDYVEFITATMHRHKLERDEYLFKAFQYFDKDNSGFITRDELESALIEHEMGDTSTIKEIISEVDTDNDGRINYEEFCAMMRGGMQQPMRLK

SEQ ID NO: 4552 - DNA, 1824 bp, Zea mays
  CDS (1)..(1824)
atggggcagtgctacgggaaggcaggcggcgcgtcgtcgcggcgggcggaccacgacgacgcggtcgcgccgccgtccccgctgccggccaacggcgcgccgacgccgccgcagcagcccgccacgcccgggcgccgcaagtccggatcggccacgccggtgcaccaccaggcggcgacgaccgcctggcccagcccgtaccccgccggcggggccagcccgctccccgcgggcgtgtcgccgtcgcccgccaggtccacgccccgcaggttcttcaagcggcccttcccgccgccctcgcccgccaagcacatcaaggccacgctcgccaagcgcctcggcgggggcaagcccaaggagggcaccataccggaggagggcggcgccggcgtcgccgccgactccgccgaggccgagcgcccgttggacaagacgttcggcttcgccaacaacttcggggccaagtacgacctcgggaaggaggtcgggaggggacactttggccacacctgctccgccctggtcaagaagggcgagtacaagggccatgccgtagccgtcaagatcatctccaaagctaagatgacgacagccatttccattgaagatgttcgtagggaagtcaagattttgaaagctctatcagggcacaataatctcgtcaaattctatgatgcatgtgaggacgccctcaatgtctacattgtcatggaattatgtgaaggtggagagttgctagatagaattttggctagaggcgggagatatacagaagtagatgccaaagctatcgttgtacagattttgagtgtagtgtccttctgtcatcttcagggagtagttcatcgtgatttgaagccagagaattttcttttcgcaacaagagatgaaagtgctcctatgaagttaattgactttggtctgtctgattttattagaccagatgaaaggctcaatgatattgttgggagcgtatattatgtcgctccagaggttctacacagatcgtacagtatggaagcagacatttggagtataggtgtcataacatacattctgctctgtggcagtcggccattttgggcaaggacagaatctgggatctttcggtccgtattaagggctgatcccaactttgacgattcaccatggccttcagtatcggctgaagctaaggattttgtgaagagatttctgaacaaggattaccgtaaaagaatgactgctgtccaagcactgactcacccttggttacgagatgaacaaaggcaaattccattggacatactcgttttcagattagttaagcaatatcttcgtgctactcctcttaaacgtttggcattaaaggcactatctaaggctttaagggaggatgaactgttgtatcttagattgcagtttaagctgctcgagcccagagacgggctcgtatcgctcgacaactttcggacggctctgacgagatacgtaactgatgctatgagagaatcaagggttcttgagtttttgcacgcgttggacccgcttgcgtacagaaagatggacttggaagaattctgtgcggcagcaatcagcccgtaccagctggaggctttggaaagctgggaagaaatcgctggaacggcttttcagcacttcgaacaggagggcaaccgagttatatctgtggaggagttggcgcaggaactaaacctcgccccgactcactactccatcgtgcaagactggatcagaaagtccgacggcaagcttaactttcttgggttcaccaaatttttgcacggtgtcacgatacggggctcaaacacgagacgacactaa

SEQ ID NO: 4553 - protein, 607 aa, Zea mays
MGQCYGKAGGASSRRADHDDAVAPPSPLPANGAPTPPQQPATPGRRKSGSATPVHHQAATTAWPSPYPAGGASPLPAGVSPSPARSTPRRFFKRPFPPPSPAKHIKATLAKRLGGGKPKEGTIPEEGGAGVAADSAEAERPLDKTFGFANNFGAKYDLGKEVGRGHFGHTCSALVKKGEYKGHAVAVKIISKAKMTTAISIEDVRREVKILKALSGHNNLVKFYDACEDALNVYIVMELCEGGELLDRILARGGRYTEVDAKAIVVQILSVVSFCHLQGVVHRDLKPENFLFATRDESAPMKLIDFGLSDFIRPDERLNDIVGSVYYVAPEVLHRSYSMEADIWSIGVITYILLCGSRPFWARTESGIFRSVLRADPNFDDSPWPSVSAEAKDFVKRFLNKDYRKRMTAVQALTHPWLRDEQRQIPLDILVFRLVKQYLRATPLKRLALKALSKALREDELLYLRLQFKLLEPRDGLVSLDNFRTALTRYVTDAMRESRVLEFLHALDPLAYRKMDLEEFCAAAISPYQLEALESWEEIAGTAFQHFEQEGNRVISVEELAQELNLAPTHYSIVQDWIRKSDGKLNFLGFTKFLHGVTIRGSNTRRH

SEQ ID NO: 4554 - DNA, 1464 bp, Phaseolus aureus
  CDS (1)..(1464)
atgcgccgcggcctagacaaccaggcatattatgtcttgggccataagactcccaacattcgtgatctatacactcttggccgcaaattgggacagggacaatttggcaccacttatttatgcaccgagaattctacttccaatgaatatgcctgcaaatctatctccaaaagaaagttgatttccaaggaggatgttgaggatgtcaggagggaaattcagataatgcatcatttagctggtcacaagaacattgtcaccattaagggtgcttacgaggatcctctctatgtgcatatagtcatggagctttgttctgggggtgagttgtttgatcgcatcatccagaggggccactataccgagaggaaggctgcagagttgaccaaaattattgttggggttgttgaggcttgtcattcccttggggtcatgcacagagatctcaagccagaaaactttcttttggtcaataaagatgatgatttctctcttaaagcaattgactttggcctctccgttttcttcaaacccggtcaaattttcactgatgtagtcggcagcccatactatgttgctcctgaggttctcctcaagcactatgggcctgaagcagacgtgtggacagccggtgtcatactgtacatattgcttagtggtgtaccaccattttgggcagagacccaacaaggtatatttgatgcagtattgaagggacatatagattttgactcagatccttggcctctaatatctgacagtggaaaagatctgatcagaaagatgctgtgttctcagccttcagaacggttgactgctcatcaagtgttatgtcatccttggatatgtgaaaatggagttgcacctgacagggcaatagaccctgctgttctttctcgtcttaaacagttttctgcaatgaataagctgaagaagatggcattgcgggtgattgctgaaagtctatctgaagaggagattgctggattgagagaaatgtttcaggctatggataccgataacagtggtgcaatcacttttgatgaactcaaagctggtctaagaagatatggttctacccttaaagatgtagaaatacgtgatctgatggaagcggctgatgtcgacaaaagtggaaccatagattatggggagtttattgctgctacagttcatctcaacaaactagaacgtgaagaacatcttattgcagcattccaatattttgacaaggatggcagtggttatattacggttgatgaacttcaacaagcttgtgcagaacataacatgactgatgcttttcttgaagatattattagggaagttgatcaagataatgatggaaggattgattatggtgaatttgctgcaatgatgcaaaaaggcaatgctggaattggtaggaggactatgcgcaatagtctgaatttaagcatgagggacgcatctagtgctcaatag

SEQ ID NO: 4555 - protein, 487 aa, Phaseolus aureus
MRRGLDNQAYYVLGHKTPNIRDLYTLGRKLGQGQFGTTYLCTENSTSNEYACKSISKRKLISKEDVEDVRREIQIMHHLAGHKNIVTIKGAYEDPLYVHIVMELCSGGELFDRIIQRGHYTERKAAELTKIIVGVVEACHSLGVMHRDLKPENFLLVNKDDDFSLKAIDFGLSVFFKPGQIFTDVVGSPYYVAPEVLLKHYGPEADVWTAGVILYILLSGVPPFWAETQQGIFDAVLKGHIDFDSDPWPLISDSGKDLIRKMLCSQPSERLTAHQVLCHPWICENGVAPDRAIDPAVLSRLKQFSAMNKLKKMALRVIAESLSEEEIAGLREMFQAMDTDNSGAITFDELKAGLRRYGSTLKDVEIRDLMEAADVDKSGTIDYGEFIAATVHLNKLEREEHLIAAFQYFDKDGSGYITVDELQQACAEHNMTDAFLEDIIREVDQDNDGRIDYGEFAAMMQKGNAGIGRRTMRNSLNLSMRDASSAQ

SEQ ID NO: 4556 - DNA, 1704 bp, Nicotiana tabacum
  CDS (1)..(1704)
atgggcagctgtttttctagctccaaagttagtggctcaaatagcaataccccttctacaactactacaaatgtaaatgttcatcacaaccgtccttcaacaacaacaacaacaactgttacatcaagaaaacaagaggggtcaaattataatagagataaaggtaatattaatacaaaaaacagccaccaaaaacaacaacctaggagttctcagcagaatgttgttgttaagccaagttcaagaagacaaagtggaggggttattccttgtgggaaaagaacagattttgggtatgataaagattttgataagaggtatactattggtaaattgttgggtcatggccaatttgggtatacatatgttgctacagatagatcttctggagatcgtgttgctgttaagaaaattgagaaaaacaagatggttcttccaattgcggttgaggacgtgaaacgagaagtcaagatattgaaggccttagctggtcacgagaatgtggttcaattctataattcatttgaggatgataattatgtctacatcgtaatggagttatgtgagggtggagaactattggaccgaatcttgtccaaaaaagatagtcgatatactgagaaagatgcggcgatagttgtacgccagatgctaaaagtggctgctgagtgtcatttacatggtctggtgcatcgagatatgaaacctgagaattttctctttaagctcttcaaaggtggattcgccattaaaagcacagattttggtctttcagacttcataagaccagggaaaaagttccaagacattgttggcagtgcatattatgtagccccagaggtgttaaagcgtagatcaggacctgaatcagatgtatggagtataggtgtaattacatacattttgctatgcggccgtcgccgcttctgggacaaaactgaggatggtatattcaaggaggtcctacgaaacaagcctgattttcgtcgcaagccatggccaaacataagcaacagtgctaaagattttgtaaagaaattactggtgaaggatccgcgcgctagacttactgccgctcaggccctatcgcatccatgggtccgagaaggaggtatcgcatctgagatcccactcgacatttctgttttatccaacatgcggcaatttgtcagatatagtcgcctaaaacagttcgctttacgggcgttagctagcacgcttgatgaggaggagctctctgatctgaaggatcaattttctgcaattgatgtggataagaatggtgtcatcagtctcgaagaaatgagacaggcccttgccaaggatctcccatggaaaatgaaagagtcacgagttcttgagattcttcaagcgattgatagtaacacagacgggcttgttgatttcccggagtttgtggccgccactctacatgtccatcagttggaggagcataattctacaaaatggcagcaaagatcgcaagctgcttttgagaaatttgatgttgatagagatggattcataaccccggaagaacttaaaatgcacacgggtttgaaaggatcgatagacccacttttagaggaagcggacattgacaaagacgggaagataagcctgtcagaattccgtaggcttttaagaactgctagtatgagttcaccaacggtgagagattcacggagaaatgtagctttgtaa

SEQ ID NO: 4557 - protein, 567 aa, Nicotiana tabacum
MGSCFSSSKVSGSNSNTPSTTTTNVNVHHNRPSTTTTTTVTSRKQEGSNYNRDKGNINTKNSHQKQQPRSSQQNVVVKPSSRRQSGGVIPCGKRTDFGYDKDFDKRYTIGKLLGHGQFGYTYVATDRSSGDRVAVKKIEKNKMVLPIAVEDVKREVKILKALAGHENVVQFYNSFEDDNYVYIVMELCEGGELLDRILSKKDSRYTEKDAAIVVRQMLKVAAECHLHGLVHRDMKPENFLFKLFKGGFAIKSTDFGLSDFIRPGKKFQDIVGSAYYVAPEVLKRRSGPESDVWSIGVITYILLCGRRRFWDKTEDGIFKEVLRNKPDFRRKPWPNISNSAKDFVKKLLVKDPRARLTAAQALSHPWVREGGIASEIPLDISVLSNMRQFVRYSRLKQFALRALASTLDEEELSDLKDQFSAIDVDKNGVISLEEMRQALAKDLPWKMKESRVLEILQAIDSNTDGLVDFPEFVAATLHVHQLEEHNSTKWQQRSQAAFEKFDVDRDGFITPEELKMHTGLKGSIDPLLEEADIDKDGKISLSEFRRLLRTASMSSPTVRDSRRNVAL

SEQ ID NO: 4558 - DNA, 1575 bp, Capsicum annuum
  CDS (1)..(1575)
atgggtaattgttgtgcagtaccaaaaacttcagacacagaggagaagaaaagggggaaaaataagccaaatccattttctgttgattatgctcatgggaacggacacaagtcctatgtgttggataatccaaccggctgtgatatcgaggcaacgtatgagctagggcgtgagcttgggagaggtgaatttggggttacgtatttgtctaccgacaaagcaactggagatgtatatgcttgtaaatcgatatccaagaagaaacttaggactcgagtggatatcgaggatgtaaggagagaagttgagatcatgaagcatttgcctaagcatcctaatattgtcaccttaaaggatacttatgaggatgataatgcagtacatatagttatggagctgtgtgagggcggtgagctatttgatcggattgttgcgagggggcattatactgagagggcagcagctgctgtgactcgcacaattgttgaagtgattcagatgtgccataagcacggagtcatgcatcgtgacctcaaacctgaaaacttcttgtttgaaaacaagaaagagacagcaccattgaaggcaattgattttggtctctcagtattctttaagcctggtgaaagatttaacgaaattgtgggaagtccatactacatggcacccgaggtgctgaagagagattatggtccagaagtagatgtatggagtgctggagtaattctctacatcttgctgtgtggtgttccaccattttgggcagaaactgaacaaggagttgctcaagcgatcattcgttctgttgtgaatttcaaaagagacccttggcctaaggtctccgacaatgcaaaagaccttgtgaagaggatgcttaaccctgatcctagcaagaggcttactgctcaagaagttctagatcatccctggatacaaaatgcaaagaagaatccaaatgtttctttgggtgaaacagtgaaagcaaggctcaagcaattttctatgatgaacaagctaaagaaaagagctttaagggtgattgctgagcatttgactgtggacgaagtggctggaataaaggagggattccagttgatggatataggtaacaaagggaagattgacattaacgagttgagagtggggttgcagaaacttggccatcaaattcccgaatctgatgtgcaaattcttatggatgttggtgatgttgataaagatggatttttggactacggggagtttgtagcaatttcagtccacttaagaaagatggcaaatgaggagcacctgaaggcggcgtttgaattttttgataagaaccaaaacggatatatagagattgacgagttaagggaggctttagatgacgagattgaaaccaacagcgaagaagttatcaatgctattatgcaagatgtagacactgacaaggatggacggataagttacgatgagttctctgcaatgatgaaagctggcacagattggaggaaggcgtcaagacagtattcacgagagcgatataatagtctcagcttgaaactaatgaaggatggatccttacaaagctag

SEQ ID NO: 4559 - protein, 524 aa, Capsicum annuum
MGNCCAVPKTSDTEEKKRGKNKPNPFSVDYAHGNGHKSYVLDNPTGCDIEATYELGRELGRGEFGVTYLSTDKATGDVYACKSISKKKLRTRVDIEDVRREVEIMKHLPKHPNIVTLKDTYEDDNAVHIVMELCEGGELFDRIVARGHYTERAAAAVTRTIVEVIQMCHKHGVMHRDLKPENFLFENKKETAPLKAIDFGLSVFFKPGERFNEIVGSPYYMAPEVLKRDYGPEVDVWSAGVILYILLCGVPPFWAETEQGVAQAIIRSVVNFKRDPWPKVSDNAKDLVKRMLNPDPSKRLTAQEVLDHPWIQNAKKNPNVSLGETVKARLKQFSMMNKLKKRALRVIAEHLTVDEVAGIKEGFQLMDIGNKGKIDINELRVGLQKLGHQIPESDVQILMDVGDVDKDGFLDYGEFVAISVHLRKMANEEHLKAAFEFFDKNQNGYIEIDELREALDDEIETNSEEVINAIMQDVDTDKDGRISYDEFSAMMKAGTDWRKASRQYSRERYNSLSLKLMKDGSLQS

SEQ ID NO: 4560 - DNA, 1809 bp, Zea mays
  CDS (1)..(1809)
atgggagggtgtcacgcgaagccgctcacccacgacgcggaccgctcgccgccgcacgcagcgccggcgaccccgcccccgggctccgccacgcccgccacccccggccccgggaagaagcactgggcggtgtccccgttcttcgcgttctccacgccgagcccgagccccgcgcaccacctcttcggcggctccgcggcatcgccgcgcaagtcccccgctccgccgggctccgcgcccaccaccccggccaggcggctcctgaggctgcccttcccgccgccgtcgcccgccaagcacatccgggcggcgctcgccaggcgccacggcccgccgcggccgtctatccccgaggaaggcggcggcgagggggagggcggcggcggcggaggcaggggcctcgacaaggggtttgggttcaacaaggggtttgcggccaagtatgacttgggggatgaggtcggacgggggcacttcggctacacctgcgccgccacggttaagaagggcgcgcgcaagggggagtccgtcgccgtcaaggtcatccccaaagcaaagatgactacatccattgctatagaggatgtccgaagggaggttaaaatcttgaaagctttagcaggaaacaaaaacttggtccaattttatgatgcctacgaggacaacgacaacgtgtatatagtaatggagctgtgcgaaggtggagagctacttgacagaatactttccagaggcgggaagtactccgaggatgatgcaaaagctgtcctggtgcaaatattaaatgtcgtcgctttttgccacattcaaggagtggttcatcgagatctcaaaccagagaattttctttttacatcaaaagatgatgattcccatcttaaggccattgattttggcctatcagactttgtaaaaccagatgagaggctcaatgacatagttggaagtgcttattatgttgctccagaagttctgcatagatgctatagcacagaagctgatgtttggagcataggtgtaattgcatatatccttctttgtggcagtcgtccattttgggcacgcacggaatctggcatattccgttcggttctcaaagccgatcccagttacaatgaggcaccatggccttctctgactccggaagcaatggattttgtcaagcgattgctgtgcaaggatccgcgtagaaggatgactgcagctcaggctttaagtcatccatggatcagaaattataatgacattaagctgccgttggacattcttatattccgacttatcaaagcttatattcgctcctcatctttacggaaagctgctctgagggctctgtcaaagaccttaaccgtagacgagcttttctacctgaaatcacagttttctctattggaaccagacaggaatgggtgcatcactcttgacaatatcagaatggccttaacgagagaagctactgatgcaatgaaggaatcgcgagttcaagatattcttgtttcgttgagcgcccttcagtacagaagaatggaattccaagagttctgtgcagcagcagttagtgtgcatcagcttgaagcattggatagatgggagcaacatgcgagatctgcttatgaacattttgagaaggaaggcaaccgagctattgtaatagatgaattagcttctgaattgggcctcagcccttcagtgccactgcatgtcgttctgcaagattggatcaggcatacggatgggaaattgagctttctcggatttgtcaagttattgcatggcatgtccagcaggtccctgtcaaagatgagatag

SEQ ID NO: 4561 - protein, 602 aa, Zea mays
MGGCHAKPLTHDADRSPPHAAPATPPPGSATPATPGPGKKHWAVSPFFAFSTPSPSPAHHLFGGSAASPRKSPAPPGSAPTTPARRLLRLPFPPPSPAKHIRAALARRHGPPRPSIPEEGGGEGEGGGGGGRGLDKGFGFNKGFAAKYDLGDEVGRGHFGYTCAATVKKGARKGESVAVKVIPKAKMTTSIAIEDVRREVKILKALAGNKNLVQFYDAYEDNDNVYIVMELCEGGELLDRILSRGGKYSEDDAKAVLVQILNVVAFCHIQGVVHRDLKPENFLFTSKDDDSHLKAIDFGLSDFVKPDERLNDIVGSAYYVAPEVLHRCYSTEADVWSIGVIAYILLCGSRPFWARTESGIFRSVLKADPSYNEAPWPSLTPEAMDFVKRLLCKDPRRRMTAAQALSHPWIRNYNDIKLPLDILIFRLIKAYIRSSSLRKAALRALSKTLTVDELFYLKSQFSLLEPDRNGCITLDNIRMALTREATDAMKESRVQDILVSLSALQYRRMEFQEFCAAAVSVHQLEALDRWEQHARSAYEHFEKEGNRAIVIDELASELGLSPSVPLHVVLQDWIRHTDGKLSFLGFVKLLHGMSSRSLSKMR

SEQ ID NO: 4562 - DNA, 1677 bp, Triticum aestivum
  CDS (1)..(1677)
  misc_feature (958)..(958): y is t or c
  misc_feature (1173)..(1173): r is g or a
atgggcaacgcatgcggcggttcccttagatccaagtacctgcacagcttcaagcaccccgcctcccagcgccacgaccccgaccgcgactacgaccacaccgccgccgccgactcgcccaagaagcagccaggctcccagccgaccgccacagccgccgccaagacggacggccacgcggcccccgcgcagcccgccgcggccatgaggcgcggcggggcgggcgcgccggccgacctcggctcggtcctcggccaccccacgcccaacctgcgcgacctctacgcgctgggccggaagctcgggcagggccagttcggcaccacctacctctgcaccgagctggccacgggggccgactacgcctgcaagtccatctccaagcgcaagctcatcaccaaggaggacatcgacgacgtgcgccgcgagatccagatcatgcaccacctctccggccaccgcaacgtcgtcgccatcaagggcgcctacgaggaccagctctacgtgcacatcgtcatggagctctgcgccgggggcgagctcttcgaccgcatcatacagcgcggccactacagcgagcgcaaggccgccgagctcaccaggatcatcgtcggggtcgtcgaggcctgccactcgctcggggtcatgcaccgggacctaaagcccgagaacttcctgctcgccaacaaggacgacgacctctcgcttaaggccatcgatttcggcctctccgtcttcttcaagcctggccaaattttcaccgatgttgttggaagcccatattatgtagccccagaagtgctgtgcaaaaaatatggaccagaagctgatgtatggaccgctggtgtaattctctacattctgctaagtggtgtacccccactttgggcagagacacagcaaggaatatttgatgctgtactgaaaggtgtcatcgattttgactctgaaccctggyctgtgatatctgacagtgcaaaagatctgataacaagaatgctcaatcctcgcccagctggacgcttgacagcacacgaagttctatgccatccatggattcgtgatcagggagttgctcctgatcgtcctcttgacacagctgtcttatctcgcattaagcaattctctgcgatgaataagttgaagaagatggctttgcgggtaatagctgaragcctctcagaggaggaaattgcagggttgaaggaaatgttccagactatggacgctgataacagtggtgcaattacatatgatgagctcaaagaaggcttgagaaaatatggctccacattgaaggatactgagattcgtgatcttatggatgcggcggacgtggacaacagtgggaccattgactatatagagttcatcgctgcaacactgcatctgaataaactggagcgtgaggagcatctggtggcagccttttcgtattttgacaaagatggaagtggttacatcacagtggatgaactgcagcaagcttgccaagagcataacatgccagatgcttttcttgatgatgtcattaaagaagctgaccaggacaatgatggtcgcattgactatggagaatttgttgccatgatgaccaagggcaatatgggggtcgggcgaagaacaatgagaaacagcctgaatatcagcatgagagacgcacctggtgcaatctag

SEQ ID NO: 4563 - protein, 558 aa, Triticum aestivum
  misc_feature (320)..(320): The Xaa at location 320 stands for Pro, or Ser.
MGNACGGSLRSKYLHSFKHPASQRHDPDRDYDHTAAADSPKKQPGSQPTATAAAKTDGHAAPAQPAAAMRRGGAGAPADLGSVLGHPTPNLRDLYALGRKLGQGQFGTTYLCTELATGADYACKSISKRKLITKEDIDDVRREIQIMHHLSGHRNVVAIKGAYEDQLYVHIVMELCAGGELFDRIIQRGHYSERKAAELTRIIVGVVEACHSLGVMHRDLKPENFLLANKDDDLSLKAIDFGLSVFFKPGQIFTDVVGSPYYVAPEVLCKKYGPEADVWTAGVILYILLSGVPPLWAETQQGIFDAVLKGVIDFDSEPWXVISDSAKDLITRMLNPRPAGRLTAHEVLCHPWIRDQGVAPDRPLDTAVLSRIKQFSAMNKLKKMALRVIAESLSEEEIAGLKEMFQTMDADNSGAITYDELKEGLRKYGSTLKDTEIRDLMDAADVDNSGTIDYIEFIAATLHLNKLEREEHLVAAFSYFDKDGSGYITVDELQQACQEHNMPDAFLDDVIKEADQDNDGRIDYGEFVAMMTKGNMGVGRRTMRNSLNISMRDAPGAI

SEQ ID NO: 4564 - DNA, 1482 bp, Vicia faba
  CDS (1)..(1482)
atgtcgaattccaacaacccgccacccccgaaacccacctgggtcctcccatacataacagaaaatatccgtgaactctacaccttaggtagaaaactgggtcaaggccaattcggcaccacctatctctgcacacacaacccaaccggtaaaacctacgcttgcaaatcaatcccaaagaagaaacttttatgcaaagaggattacgatgatgtgtggagagagattcagataatgcaccatttatctgagcatcctaatgttgtcaggatccatgggacttatgaggattcggtttctgttcatttggttatggagctttgtgaaggtggtgagttgtttgataggattgtgaacaaggggcattatagtgagagggaagctgctaagctgattaggactattgtcgaggttgtggaaaattgtcattctcttggtgttatgcatagggaccttaagccggagaattttttgtttgatactgttgaggaagatgctgttcttaaaactactgattttgggctctctgctttttacaagccaggtgaaatctttagtgatgttgttggaagcccatactatgttgcaccagaggttttgcacaagcattatggacccgaggctgatgtgtggagtgccggggttattttgtacattttattaagcggggtgccgccattttgggctgagacagaaatagggatcttcaaacagattttgcagggacgacttgatttccagtctgagccatggcctgggatttcagacagcgccaaggatctaattcgaaaaatgcttgataggaatccgaaaactaggtttacagctcaccaagtgctatgtcatccatggattgtcgatgatagcattgcaccagacaaacctcttgattctgctgttttatctcgcttgaagcagttctctgcaatgaataaacttaaaaagatggctttacgtgttattgcggagaggctgtctgaggaagaaattggtggtttgaaagagttgttcaagatgcttgatgctgacagcagtggaaccataacattagacgagctaaaagaaggcttaaagcgagtaggatctgaacttatggaatctgaaatcaaggatcttatggacgcagcagatatcgataataatggcacgctcgactatggtgaattcattgctgctactgtccacttaaacaagctggagagagaggaaaatctcttgtctgcattctcctactttgacaaagatggaagtggttacataaccattgacgagattcacgtagcttgtaaggagtttggtttggatgatatccatattgatgaaatggtcaaggaaattgatcaagacaacgatggacaaatagattatggagaatttgctgctatgatgagaaaaggcaatggcgggatgggaagacgaaccatgacaagccgactcaatttcagaaatgctctcggaatcataggcaatgaatccaattaa

SEQ ID NO: 4565 - protein, 493 aa, Vicia faba
MSNSNNPPPPKPTWVLPYITENIRELYTLGRKLGQGQFGTTYLCTHNPTGKTYACKSIPKKKLLCKEDYDDVWREIQIMHHLSEHPNVVRIHGTYEDSVSVHLVMELCEGGELFDRIVNKGHYSEREAAKLIRTIVEVVENCHSLGVMHRDLKPENFLFDTVEEDAVLKTTDFGLSAFYKPGEIFSDVVGSPYYVAPEVLHKHYGPEADVWSAGVILYILLSGVPPFWAETEIGIFKQILQGRLDFQSEPWPGISDSAKDLIRKMLDRNPKTRFTAHQVLCHPWIVDDSIAPDKPLDSAVLSRLKQFSAMNKLKKMALRVIAERLSEEEIGGLKELFKMLDADSSGTITLDELKEGLKRVGSELMESEIKDLMDAADIDNNGTLDYGEFIAATVHLNKLEREENLLSAFSYFDKDGSGYITIDEIHVACKEFGLDDIHIDEMVKEIDQDNDGQIDYGEFAAMMRKGNGGMGRRTMTSRLNFRNALGIIGNESN

SEQ ID NO: 4566 - DNA, 1872 bp, Oryza sativa subsp
  CDS (1)..(1872)
atggggcagtgctacggcaagggcgcgtcggggaggacggcggacgatgagggcggggtggtgacggagcaccagtcgccgccgccggcgaacgggctgccgtcgacgccgccgcggcagcaggcgcaggcgcaggcgcagcaggtggggacgccgaggcggcgtgggagtaagtccggatcgacgacgccggggcaccagacgcctggggtggcgtggccgagcccgtacccgtccgggggcgcgagcccgctgccggccggggtgtcgccgtcgccggcgaggtcgacgcccaggaggttcttcaagcggccgttcccgccgccgtcgccggccaagcacataaaggccacgctcgccaagaggctgggtggggggaagcccaaggaagggacgataccggaggagggaggcgtgggcgctggcggcggcggtggaggggccgcggatggggcggagacggagaggccattggacaagacgttcgggttctcgaagaacttcggcgcgaagtacgagctcgggaaggaggtggggaggggccacttcggacacacttgctccgccgtcgtcaagaagggcgagtacaagggacagaccgtcgccgtcaagatcatcgccaaagctaagatgacaacggcaatatccattgaggatgttcgtagagaagtaaaaattttgagagcgttatcagggcacaataatctcgtcaaattctatgatgcatgtgaggatggcctcaatgtctacattgtcatggaattatgtgagggaggagaattgctagacagaatattagccagaggcgggagatacacagaggaagatgccaaagcgattgttgtacagattttgagcgtagtagccttctgtcatcttcagggggtagtgcatcgtgatttgaagccagagaatttccttttcacaaccagggatgaaaatgctcccatgaagttgattgattttggtctctctgatttcattagaccagatgaaaggcttaatgatattgttggaagtgcatattatgttgccccagaggttttacacagatcatatagtatggaagcagacatttggagtataggtgtcataacgtacattctgctctgtggcagtcggccattctgggcacgaacagaatcaggaatattccgatctgtgttgagagctgatcccaactttgatgattcaccgtggcctacagtatcagctgaagctaaggattttgtgaagagatttctgaacaaagattaccgcaaaagaatgaccgctgttcaagcactgactcatccttggttgcgagatgaacaaaggcagatcccgctggacatactcatcttcagattaattaagcaatacctccgcgctacacctcttaaacggttggcattaaaggcactatccaaggctttaagggaagatgaacttttgtatctcaaactgcagtttaaactgctcgaacctagagatgggtttgtatcacttgacaactttcggacggcactaacgcgatatttaactgatgctatgaaggaatcgagggttcttgaatttttgcatgcgttggaaccacttgcatacagaagaatggactttgaagagttctgtgccgcagcaatcagtccttaccagcttgaggcactggaaaggtgggaggagattgctggaacagctttccagcaatttgaacaagagggcaaccgagtcatatcagttgaggaattagcacaggaattaaatcttgctccaactcattactccatcgttcaagactggatcagaaaatccgatggcaagctaaactttctcgggtttaccaaatttttacatggtgtcacaataaggggctcaaatacaagacggcattaa

SEQ ID NO: 4567 - protein, 623 aa, Oryza sativa subsp
MGQCYGKGASGRTADDEGGVVTEHQSPPPANGLPSTPPRQQAQAQAQQVGTPRRRGSKSGSTTPGHQTPGVAWPSPYPSGGASPLPAGVSPSPARSTPRRFFKRPFPPPSPAKHIKATLAKRLGGGKPKEGTIPEEGGVGAGGGGGGAADGAETERPLDKTFGFSKNFGAKYELGKEVGRGHFGHTCSAVVKKGEYKGQTVAVKIIAKAKMTTAISIEDVRREVKILRALSGHNNLVKFYDACEDGLNVYIVMELCEGGELLDRILARGGRYTEEDAKAIVVQILSVVAFCHLQGVVHRDLKPENFLFTTRDENAPMKLIDFGLSDFIRPDERLNDIVGSAYYVAPEVLHRSYSMEADIWSIGVITYILLCGSRPFWARTESGIFRSVLRADPNFDDSPWPTVSAEAKDFVKRFLNKDYRKRMTAVQALTHPWLRDEQRQIPLDILIFRLIKQYLRATPLKRLALKALSKALREDELLYLKLQFKLLEPRDGFVSLDNFRTALTRYLTDAMKESRVLEFLHALEPLAYRRMDFEEFCAAAISPYQLEALERWEEIAGTAFQQFEQEGNRVISVEELAQELNLAPTHYSIVQDWIRKSDGKLNFLGFTKFLHGVTIRGSNTRRH

SEQ ID NO: 4568 - DNA, 1632 bp, Malus domestica
  CDS (1)..(1632)
atgggttgctacagcagcaaagagaatgctccgaaacccggttcaaaggggttcgggtcatcccagccttaccagcagccgcagacggctgctcagcctcagaaagtctcatcccaacaaccccataacccaccaccaccacccagaccacagccccagcagagggcacagccagcgccccaaccaagggcacagtaccagcagccaagccctcctccagcaaaaccggcgccgcagccgaatagcattctggggaagccctttgatgacattaagcagtactacacactcggcaaagaactgggcaggggccaattcggtatcacatacttgtgcactgagaactccaccggccacagctacgcctgcaagtcgatcctgaaacgcaaacttgtgagcaaaaacgacagggacgacatcaagagagagattcagataatgcagcatttgtctgggcagccaaacattgtggagatcaagggggcttatgaggacaggtactctgtgcatttggtgatggagctctgcgccggaggggaacttttcgatcgaattatagcgcagggacagtattcggagagggctgccgctgcgattctgcgtgacattgtgaatgttgtgcacatttgtcacttcatgggcgtgctgcaccgtgatctcaagccggagaatttcttgttgtctagcaaggatgagaaggcaatgctgaaggcaacggatttcggtttgtctgttttcattgaggaaggaaaggtgtaccgtgatatagtcggcagtgcttactatgttgcccctgaagtcttgcggcgtagttatggaaaggaaatagacatttggagtgcaggagtcattctgtatattctactcagcggtgtacctccattttgggctgaaactgagaggggtatattcgatgccatattggaaggagtaatagactttgatagtcaaccatggccatcaatatcagacagtgctaaagatttagttagaaagatgctgacacaggacccaagaaagagaattacttctgcagaagttctcgagcacccgtggctcagagtaggcggagtagcatcagacaagccattagatagtgcagttctctctagaatgaagcagtccagggcaatgaataagctcaagcaacttgctttgaaggtcatagcagagaatctatctgaggaagaaattaaaggccttaaaacaatgttcaccaatatggacactgacaaaagtggtacaataacttacgaagaactgaagacaggtttagcgcgtattgggtcacggctgtcagaagccgaagttaggcaactcatggatgctgctgatgtcgatggaaatggatcaattgactacattgaatttatatctgctactatgcatagacaaagattagaaagagacgagcacctgtacaaagcatttcagtacttcgacaaggatagcagcgggtacattacaagagatgaattagaggctgctatgaaggagcatggaatgggtgatgacaacaccatcagagagataatttctgaggttgatgccgataatgatgggaggatcaactattcggaattctgtgcaatgatgagaagtggggctcaacaaccagcaaagctcttttaa

SEQ ID NO: 4569 - protein, 543 aa, Malus domestica
MGCYSSKENAPKPGSKGFGSSQPYQQPQTAAQPQKVSSQQPHNPPPPPRPQPQQRAQPAPQPRAQYQQPSPPPAKPAPQPNSILGKPFDDIKQYYTLGKELGRGQFGITYLCTENSTGHSYACKSILKRKLVSKNDRDDIKREIQIMQHLSGQPNIVEIKGAYEDRYSVHLVMELCAGGELFDRIIAQGQYSERAAAAILRDIVNVVHICHFMGVLHRDLKPENFLLSSKDEKAMLKATDFGLSVFIEEGKVYRDIVGSAYYVAPEVLRRSYGKEIDIWSAGVILYILLSGVPPFWAETERGIFDAILEGVIDFDSQPWPSISDSAKDLVRKMLTQDPRKRITSAEVLEHPWLRVGGVASDKPLDSAVLSRMKQSRAMNKLKQLALKVIAENLSEEEIKGLKTMFTNMDTDKSGTITYEELKTGLARIGSRLSEAEVRQLMDAADVDGNGSIDYIEFISATMHRQRLERDEHLYKAFQYFDKDSSGYITRDELEAAMKEHGMGDDNTIREIISEVDADNDGRINYSEFCAMMRSGAQQPAKLF

SEQ ID NO: 4570 - DNA, 1587 bp, Oryza sativa subsp
  CDS (1)..(1587)
atgggcaactgctgcccgccggggtcatcctccgagcccgacccgccgccggcgtcctccggctcctcccgccccgccggcagcgccggcgccgcggcctcgccggcgacaatatccccctccgccgcgccggcgcccgccaagccgcccgcgcccatcggccccgtcctcgggcgccccatggaggacgtcaagtcgatctacaccgtgggcaaggagctcgggcgcgggcagttcggcgtcacgtcgctgtgcacccacaaggcgacggggcagcggttcgcgtgcaagacgatcagcaagcggaagctgtcgaccaaggaggacgtcgaggacgtccgccgcgaggtgcagatcatgtaccacctcgccggccagcccggggtggtggagctcaagggcgcgtacgaggacaagcacgccgtccacctcgtcatggagctctgtgccggcggcgagctgttcgaccggatcatcgccaagggccactacaccgagcacgccgcctcctcgctcctccgcaccatcgtcgagatcatccacacctgccactccatgggcgtcatccaccgcgacctcaagcccgagaacttcctcctcctcagcaaggacgagcacgcccctctcaaggccaccgacttcggcctctccgtcttcttcaaagaaggtgaggtgttcagggacatcgtcgggagcgcctactacatcgcgccggaggtgctcaagcggagctacggcccggaggcggacatctggagcatcggcgtcatgctctacatccttctctgcggagttcctcccttctgggcaggcaagctgctgctgttcatcgccatgcacggcatcttcaactccatcttgagagggcatgtcgacttcagcagcgagccatggtcgcgcatctcgcatggcgccaaggaccttgtcaggcggatgctccattctgaccccaagcagaggatttctgcatatgacgtgctcaatcatccatggataaaggaagacggcgaggcgcccgatacgccgctcgacaatgctgttcttggcaggctcaagcagttcagagctatgaaccagttcaagaaggctgctctaagggttatcgccggatgcttgtcggaggaggagatcagggggctcaaggagatgttcaagagcatggattccgacaacagcggcacgatcaccgtcgacgagctgaggaaagggctggccaagaagggtaccaagctcaccgaagctgaagttcagcagctaatggaagctgctgatgcagacggcaacgggacaatcgattacgaggagttcatcactgcgacgatgcacatgaacaggatggacagggaggagcacctctacaccgcgttccagtacttcgacaaggacaacagcgggtacatcacgatcgaagagctcgagcaagcgctgagagagaaagggttgatggacggcagggagatcaaggacatcatatccgaagtcgacgccgacaacgacgggaggatcaactacacggagttcgtggccatgatgaggaaaggcgacccggaggcgaacccgaagaagcggcgcgacgtcgtgctgtag

SEQ ID NO: 4571 - protein, 528 aa, Oryza sativa subsp
MGNCCPPGSSSEPDPPPASSGSSRPAGSAGAAASPATISPSAAPAPAKPPAPIGPVLGRPMEDVKSIYTVGKELGRGQFGVTSLCTHKATGQRFACKTISKRKLSTKEDVEDVRREVQIMYHLAGQPGVVELKGAYEDKHAVHLVMELCAGGELFDRIIAKGHYTEHAASSLLRTIVEIIHTCHSMGVIHRDLKPENFLLLSKDEHAPLKATDFGLSVFFKEGEVFRDIVGSAYYIAPEVLKRSYGPEADIWSIGVMLYILLCGVPPFWAGKLLLFIAMHGIFNSILRGHVDFSSEPWSRISHGAKDLVRRMLHSDPKQRISAYDVLNHPWIKEDGEAPDTPLDNAVLGRLKQFRAMNQFKKAALRVIAGCLSEEEIRGLKEMFKSMDSDNSGTITVDELRKGLAKKGTKLTEAEVQQLMEAADADGNGTIDYEEFITATMHMNRMDREEHLYTAFQYFDKDNSGYITIEELEQALREKGLMDGREIKDIISEVDADNDGRINYTEFVAMMRKGDPEANPKKRRDVVL

SEQ ID NO: 4572 - DNA, 1605 bp, Nicotiana plumbaginifolia
  CDS (1)..(1605)
atggggaactgttgttcaaggggccaacctgatgataatgaacatacaagtaataatgatcaaaaatccaataccaaaaatgatcaatcaatttcaaataattctcaacaacaacaaaataatggttcaattacaccatcaaaatcacctgatccttcatcaaaaccatcaaaaaattccccaattggtccagttttaggcagaccaatggaagatgttagaaaaacatattcaataggtaaagaattagggaggggtcaatttggtattacacatttatgtacacataaacaaagtggtgaacaatttgcatgtaaaactatagcaaaaaggaaattggttaataaagaagatattgaagatgttaagagagaagtacaaattatgcatcatttaacaggtcaacaaaatattgttgaattaaaaggggcttatgaagataaacattcagttcatttggttatggaattatgtgctggtggtgaattatttgatagaattattgctaaaggacattatactgaaagggctgctgcaactttattaagaacaattgtgcaaattgtacatacttgtcattctatgggtgttattcatagagatcttaagcctgagaatttcctcctacttaataaagatgaagattcacctctcaaggctacagattttggtctttctgtgttttacaaacaaggagatgtatttaaggacattgtgggtagtgcatattacattgcacctgaagtgttgaaaagaagatatggtccagaagttgatatatggagtgtgggagttatgttgtatattcttctttctggtgttcctcctttttgggcagaaactgaacatggaatattcaatgcaatattgagaggacatgttgatttttcaagtgatccatggcctgcaatttcccatggtgccaaagacattgtcaagaagatgttgactatagaccctaagcagaggttgacagcaatccaagtcctaaatcatccatggatcaaggaggatggagaagcaccagatacaccacttgataatgctgttttgagtaggctcaaacaattcagagctatgaacaacttcaagaaagttgctctccgggtaattgcagggtgtctatcagaggaagaaattatgggattgaagcaaatgttcaaaagcatggatactgataacagtggagcaataacacttgaagagctaaaacaaggacttgccaaacaaggaacaaaattatctgatcatgagattgaacagttaatggaagctgctgatgctgatggaaatggaaccatagattatgaagagtttattacagcaacaatgcacatgaacagaatggacaaagaagaacatctttacactgcattccaatattttgacaaggataatagcgggttcattacaatagaagagttagagcaagctttaagagaatttggaatgactgatggaaaggatataaaggaaattgttgctgaagttgactctaataatgatggtcgaattaactatgaagagtttgtagctatgatgagaaaaggaactccagaaactgcagcaaatctaaagaaaagaagggagtcatttgttgcataa

SEQ ID NO: 4573 - protein, 534 aa, Nicotiana plumbaginifolia
MGNCCSRGQPDDNEHTSNNDQKSNTKNDQSISNNSQQQQNNGSITPSKSPDPSSKPSKNSPIGPVLGRPMEDVRKTYSIGKELGRGQFGITHLCTHKQSGEQFACKTIAKRKLVNKEDIEDVKREVQIMHHLTGQQNIVELKGAYEDKHSVHLVMELCAGGELFDRIIAKGHYTERAAATLLRTIVQIVHTCHSMGVIHRDLKPENFLLLNKDEDSPLKATDFGLSVFYKQGDVFKDIVGSAYYIAPEVLKRRYGPEVDIWSVGVMLYILLSGVPPFWAETEHGIFNAILRGHVDFSSDPWPAISHGAKDIVKKMLTIDPKQRLTAIQVLNHPWIKEDGEAPDTPLDNAVLSRLKQFRAMNNFKKVALRVIAGCLSEEEIMGLKQMFKSMDTDNSGAITLEELKQGLAKQGTKLSDHEIEQLMEAADADGNGTIDYEEFITATMHMNRMDKEEHLYTAFQYFDKDNSGFITIEELEQALREFGMTDGKDIKEIVAEVDSNNDGRINYEEFVAMMRKGTPETAANLKKRRESFVA

SEQ ID NO: 4574 - DNA, 1587 bp, Nicotiana plumbaginifolia
  CDS (1)..(1587)
atgggtaattgctgtgtgaaacccggcaaatctgctgaaaaaaagaagaacaaaaagaacaaaccaaaccccttttcaattgattatggggcatctgggggtggagttaagcttgttgtattgaaagaaccaacagggcagaacatacacgacaagtatgatttgggtcgtgagctcggaagaggagaatttggggttacttacctatgcactgaagtggacacaggcgataagtatgcctgcaaatcaatatccaaaaagaagttaaggactgcagtcgatatcgatgatgttaggagagaggttgagatcatgaagcatttgcctaagcatcctaatattgtgactttaaaggatacatatgaggatgataatgcagtgcatattgtgatggaactgtgtgagggtggtgagttgtttgaccgtatcgtagctagaggtcactataccgagagggcagctgctggaattttgaggactgtcgttgaagtcgttcagatgtgtcacaggcatggggttatgcatcgtgatctcaaacctgagaactttctttttggtaacaagaaagaaacagctccactgaaagcaattgactttgggttgtcagttttctttaagcctggggaacgctttaatgagatagttggaagtccttattacatggctccagaggttctaaagcgtaattatggaccagaggttgacgtctggagtgctggagttatactctacattcttctttgtggtgttccacccttctgggcagagactgaacaaggagtagcccaagcaattattcgttctgttattgatttcaagagggatccatggcctaaagtttctgataatgcaaaggatcttgtaaagaaaatgcttgatccagatccaagtcgacggctcacagctgagcgagttcttgagcatccctggttacaaaatataaagaaagcaccaaacgtctcattaggcgagactgtaaaagcaaggctcaagcagttttcagtgatgaacaagctcaagaaaaaagctctaacggttatagctgagtttttgtctgcggaggaagtggcgggaatgagggacgcatttgaaatgatggatactggaaagaagggccagataaaccttggagaacttaaagatggtttacagaagcttggccatcagacctctgatgttgatcttcagattctcatggaagctgccgatgttgatggagatggaagtttaaattatgcagagttcgttgctgtatctgttcatcttagaaagatggctaatgatgaacacctgcacaaagcattttcatttttcgacaaaaaccaaagtggttacatagaaatcgaagagctgcgttgtgccttaagcgatgaggacgacaacactagtgaggaagtcatcaatgccattatgcatgatgttgacacggataaggatggtcgcattagttacgaggaatttgctgcgatgatgaaggctggtacggattggagaaaagcatcgcgacagtattctcgtgaacggtttaacagcctcagcttaaaattgatgagggatggctcgttacaactcgaaaacaaagcctag

SEQ ID NO: 4575 - protein, 528 aa, Nicotiana plumbaginifolia
MGNCCVKPGKSAEKKKNKKNKPNPFSIDYGASGGGVKLVVLKEPTGQNIHDKYDLGRELGRGEFGVTYLCTEVDTGDKYACKSISKKKLRTAVDIDDVRREVEIMKHLPKHPNIVTLKDTYEDDNAVHIVMELCEGGELFDRIVARGHYTERAAAGILRTVVEVVQMCHRHGVMHRDLKPENFLFGNKKETAPLKAIDFGLSVFFKPGERFNEIVGSPYYMAPEVLKRNYGPEVDVWSAGVILYILLCGVPPFWAETEQGVAQAIIRSVIDFKRDPWPKVSDNAKDLVKKMLDPDPSRRLTAERVLEHPWLQNIKKAPNVSLGETVKARLKQFSVMNKLKKKALTVIAEFLSAEEVAGMRDAFEMMDTGKKGQINLGELKDGLQKLGHQTSDVDLQILMEAADVDGDGSLNYAEFVAVSVHLRKMANDEHLHKAFSFFDKNQSGYIEIEELRCALSDEDDNTSEEVINAIMHDVDTDKDGRISYEEFAAMMKAGTDWRKASRQYSRERFNSLSLKLMRDGSLQLENKA

SEQ ID NO: 4576 - DNA, 1557 bp, Triticum aestivum
  CDS (1)..(1557)
atgggcaaccgcacctcgcgccaccgccgcgccgccgcggaccagccggccacggcccctccgccgacggcccagcccaaaccccagccgccgccgaagccccagacggcgccggccccggccccgacgccggaagcgggacaggtggccatgggccgcgttctgggacgcccgatggaggacgtgcgcgcgacctacaccttcggccgcgagctcggccgggggcagttcggggtcacctacctcgtcacgcacaaggctacgggccagcgcttcgcctgcaagtccatcgccacgcggaagctcgtccaccgcgatgacatcgaggatgtgcagcgggaggtgcagatcatgcaccacctcacgggtcaccgcaacatcgtcgagctccgcggcgcctacgaggaccgccactcggtcaacctcatcatggagctatgtgagggcggggagctattcgaccgcatcatcgcgcgggggcactactccgagcgagccgccgccctgctctgccgcgagatggtctccgtcgtgcacagctgccactccatgggggttttccaccgggatctcaagcccgagaactttttgtttctcaacaacaaggaggactcgccgctcaaggccactgacttcggtctctccgtcttcttcaaacacggggagcagtttaaggatctcgttggaagtgcgtattatgttgctcctgaggtactgaagcggcactatggagcagaagctgacatatggagtgcggggattattctgtacatccttctgtctggtgttcctcctttttgggcagacaatgaggatggcatatttgaggctgtcttgcttggtcacatagatttctcatctgatccctggccttcaatatctaatggtgcaaaagatttggtgaagaagatgttgcggcaagaccccaaagagcgcttgactgctgcagaaattttgaatcacccatggattagggaagatggagaggctccagataagccacttgacattactgttatcagtagaatgaagcagttccgggcgatgaacaagcttaagaaagttgcattgaagatcgttgcagagaacttgtctgaggaagagataacaggcttgaaagaaatgttcagatccctggacactgataacagtgggacaattactcttgaagagctaagatctggtttaccaaaacttggcaccaaaatttctgaatcagaaattacacagttaatggaggcggctgatgttgatggaaatgggaccattgattattctgagttcgtatcagcgacaatgcacatgaatagattggagaaggaagaccacatacttaaagcatttgaatattttgataaggaccacagcggatacataacagtagatgagctggaagaagctctgaagaagtatgacatgggggatgataaaacaattaaagatattatcgctgaagttgatacagatcatgatggaagaatcaactaccaggagttcgttgccatgatgagaaacaacagcccggagattgttccaaatcggcggcgcatgttctaa

SEQ ID NO: 4577 - protein, 518 aa, Triticum aestivum
MGNRTSRHRRAAADQPATAPPPTAQPKPQPPPKPQTAPAPAPTPEAGQVAMGRVLGRPMEDVRATYTFGRELGRGQFGVTYLVTHKATGQRFACKSIATRKLVHRDDIEDVQREVQIMHHLTGHRNIVELRGAYEDRHSVNLIMELCEGGELFDRIIARGHYSERAAALLCREMVSVVHSCHSMGVFHRDLKPENFLFLNNKEDSPLKATDFGLSVFFKHGEQFKDLVGSAYYVAPEVLKRHYGAEADIWSAGIILYILLSGVPPFWADNEDGIFEAVLLGHIDFSSDPWPSISNGAKDLVKKMLRQDPKERLTAAEILNHPWIREDGEAPDKPLDITVISRMKQFRAMNKLKKVALKIVAENLSEEEITGLKEMFRSLDTDNSGTITLEELRSGLPKLGTKISESEITQLMEAADVDGNGTIDYSEFVSATMHMNRLEKEDHILKAFEYFDKDHSGYITVDELEEALKKYDMGDDKTIKDIIAEVDTDHDGRINYQEFVAMMRNNSPEIVPNRRRMF

SEQ ID NO: 4578 - DNA, 1542 bp, Oryza sativa subsp
  CDS (1)..(1542)
atgcagccggacccgagcgggagcggcggcgacggcaacgccaatgcgaaggcgaagctggcgccgccgccggtgacggcggcgggaggtcggccggtgtcggtgctgccgcacaagacggcgaacgtgcgcgaccactaccgcatcgggaaggagctcgggcaggggcagttcgggacgacgtacctgtgcgtggacaaggcgagcggcggcgagttcgcgtgcaagtccatccccaagcggaagctgctgtgccgggaggactacgaggacgtgtggcgcgagatccagatcatgcaccacctctccgagcaccccaacgtcgtccgtatccgcggcgcctacgaggacgcgctgttcgtccacatcgtcatggagctctgcgccggcggcgagctcttcgaccgcatcgtcgccaagggccactacaccgagcgcgccgccgcgcagctcatccgcaccatcgtcgccgtcgtcgagggatgccactcgctcggcgtcatgcaccgggacctcaagcccgagaacttcctcttcgccagcgccgccgaggacgcccccctcaaggccactgatttcggcctctccatgttctacaagcctggtgataagttctctgatgttgttgggagcccctattatgttgcacctgaggtacttcagaaatgctatggtccagaatctgatgtctggagtgctggtgtaattctttacattttgctatgtggtgttccaccattttgggcagaaactgaagctggaattttcaggcagattctacgaggcaaacttgattttgaatctgaaccctggcctagcatctctgacagtgctaaagatctagtccgtaatatgctttgccgggatcctacaaagagacttacagcccatgaggttctctgtcatccatggattgttgatgatgctgtggcacctgacaagcctattgattctgctgttttgtcaagactgaagcacttttcggcaatgaacaagctcaagaagatggcattgagggttattgctgaaagcctgtctgaggaagagattggaggactaaaggagctattcaaaatgattgatactgacgatagtggaactataacttttgatgagctgaaagagggcttgaaaagggtgggttcagaattaacagaacatgaaatccaggctttaatggaagcggctgatatcgacaacagtggaaccatcgactatggtgaattcattgctgctactctccacatgaataagctagagagggaggaaaacttagtatcagcattctcatttttcgacaaagatggaagtggtttcataactattgatgagctgtcacaagcatgccgcgaatttggccttgatgatcttcaccttgaggatatgattaaagatgttgatcaaaacaatgacggacaaattgactacagcgagttcacggcgatgatgagaaagggcaatgctggtggagctggaaggagaaccatgaggaacagcttgcagttgaatcttggtgagatcttgaaccccagcaacagctaa

SEQ ID NO: 4579 - protein, 513 aa, Oryza sativa subsp
MQPDPSGSGGDGNANAKAKLAPPPVTAAGGRPVSVLPHKTANVRDHYRIGKELGQGQFGTTYLCVDKASGGEFACKSIPKRKLLCREDYEDVWREIQIMHHLSEHPNVVRIRGAYEDALFVHIVMELCAGGELFDRIVAKGHYTERAAAQLIRTIVAVVEGCHSLGVMHRDLKPENFLFASAAEDAPLKATDFGLSMFYKPGDKFSDVVGSPYYVAPEVLQKCYGPESDVWSAGVILYILLCGVPPFWAETEAGIFRQILRGKLDFESEPWPSISDSAKDLVRNMLCRDPTKRLTAHEVLCHPWIVDDAVAPDKPIDSAVLSRLKHFSAMNKLKKMALRVIAESLSEEEIGGLKELFKMIDTDDSGTITFDELKEGLKRVGSELTEHEIQALMEAADIDNSGTIDYGEFIAATLHMNKLEREENLVSAFSFFDKDGSGFITIDELSQACREFGLDDLHLEDMIKDVDQNNDGQIDYSEFTAMMRKGNAGGAGRRTMRNSLQLNLGEILNPSNS

SEQ ID NO: 4580 - DNA, 1563 bp, Oryza sativa subsp
  CDS (1)..(1563)
atgggcgcgtgcttctcatcccacactgcgaccgccgccgccgatggcgggagcgggaagcggcagcagcggaagggggatcacaaggggaagctccccgatggcggcggcggcgagaaggagaaggaggcggcgcgggtggagttcgggtacgagagggacttcgaggggaggtaccaggtcgggaggctgctcggccacggccagttcggctacaccttcgccgccaccgaccgggcctccggtgaccgcgtcgccgtcaagcgcatcgacaaggccaagatggttcgccctgttgctgtggaggatgtaaagagagaagtgaagattcttaaagaacttaaaggccatgagaatattgttcacttctacaatgcgtttgaagatgactcatatgtatatattgtgatggaactatgtgagggtggtgaactattggaccggattttggcaaaaaagaacagccgttatagtgagaaagatgctgcagtggtggtgcggcagatgctcaaagtggcagctgagtgccatctgcatgggctagttcaccgagatatgaagcccgagaacttccttttcaaatcaaccaaggaggactcacctttaaaggcaacagattttggtctgtcagacttcataaaaccagggaaaaagtttcacgatatagttggcagtgcctattatgtagcaccagaagttttaaaacgacggtctggccctgagtcagatgtttggagcataggagtcataacttatattttgctctgtgggagacgccctttttggaataagacagaggatggcatattcagagaggtactaagaaacaagcctgattttcgtaagaagccttggccaggcatcagttcaggtgctaaagatttcgttaaaaagttacttgtaaagaacccaagggcaagattaaccgctgctcaagctctctcgcatccatgggtaagagaaggaggagaagcatctgagatccctgttgatatatctgtattgtccaacatgcgtcagtttgtcaagtacagccgttttaagcaatttgctctgagggctttagcaagtacactaaaagaggaagaactagcagatctgaaggaccagttcgatgcaattgatgttgataaaagtggatcaattagtattgaggaaatgcggcatgcccttgcaaaggatcttccttggagattgaagggcccccgtgttctcgagattatccaagcaatcgacagcaacactgatggtcttgtggactttgaagagtttgtagcagcaaccctccatatacatcaaatggctgagcttgactctgaaaggtggggcctacgctgccaggctgctttcagcaaatttgatctggatggtgacggatacatcactccagatgaactcagaatgcacactggcttgaagggttccatcgagccattgctggaggaggccgacatcgacaaagacgggagaataagcttgtcggagttccgcaagctcctgcggacagcgagcatgagcaaccttcccagtccaagaggacctccaaatccacaacccctgtga

SEQ ID NO: 4581 - protein, 520 aa, Oryza sativa subsp
MGACFSSHTATAAADGGSGKRQQRKGDHKGKLPDGGGGEKEKEAARVEFGYERDFEGRYQVGRLLGHGQFGYTFAATDRASGDRVAVKRIDKAKMVRPVAVEDVKREVKILKELKGHENIVHFYNAFEDDSYVYIVMELCEGGELLDRILAKKNSRYSEKDAAVVVRQMLKVAAECHLHGLVHRDMKPENFLFKSTKEDSPLKATDFGLSDFIKPGKKFHDIVGSAYYVAPEVLKRRSGPESDVWSIGVITYILLCGRRPFWNKTEDGIFREVLRNKPDFRKKPWPGISSGAKDFVKKLLVKNPRARLTAAQALSHPWVREGGEASEIPVDISVLSNMRQFVKYSRFKQFALRALASTLKEEELADLKDQFDAIDVDKSGSISIEEMRHALAKDLPWRLKGPRVLEIIQAIDSNTDGLVDFEEFVAATLHIHQMAELDSERWGLRCQAAFSKFDLDGDGYITPDELRMHTGLKGSIEPLLEEADIDKDGRISLSEFRKLLRTASMSNLPSPRGPPNPQPL

SEQ ID NO: 4582 - DNA, 1800 bp, Oryza sativa subsp
  CDS (1)..(1800)
atggggggatgccacgcgaagccgctgacgcacgaggaggccgacggcgcctgctcgcccccgcgcgagcggccgcagccgccggccacgccgccgcgggggtccggcgcggccacccccgcgtggaagacgaagccgtgggcgtcgcccttcttcgggttctccacgcccagcccgagccctgcgcaccacctcttctcggcctcctccccgcggaggtcccccgccccgtccgcgcccaccacgcccgcgaggcggttgctgcggctgccgttcccgccgccgtcgcccgccaagcacatccggcaggcgctcgcgcggcgccacgggcccccgcggccgccgatccccgaggagggcggcgacgtggaaggggagggcggccgcgggctcgacaaggggttcgggttcaacaaggggttcgcggcgaagtacgacatgggggacgaggtggggagaggccacttcggctacacctgcgccgcgaagatcaagaagggggcgcgcaagggggacgcggtcgccgtcaaggtcatccccaaggccaagatgacaacatccattgctatagaggatgtccgaagggaggtgaaaatattgaaagctttggcgggacacaagaacttggttcaattttatgatgcctatgaggacaatgacaatgtgtacatagtaatggagttgtgtgaaggaggagagcttctggatagaatactttccagaggtgggaagtactctgaggatgatgcaaaagcggttctggtgcaaatattaaatgtcgtttcattttgccacattcaaggagtggttcatcgggatctcaagccagagaattttctatttacttcaaaagatgagaactctcaacttaaggctattgattttggcttatcagattttgtaaaaccagatgagaggctaaatgatattgttggaagtgcttattatgttgctcctgaagttctgcacagatgctatagcacagaagctgatgtctggagtataggtgtaattgcatatattctcctttgtggcagtcgtccattttgggcacgcactgaatctggcatattccgttccgttctcaaagctgaccccagttataatgaggcaccttggccttctcttactctggaagcaatggattttgttaagcgcttgctttgcaaggatccacgtagaagaatgactgcagcacaggctttaagtcatccatggatcagaaattacaatgacattaagctgccactggacatccttatattccgacttatcaaagcttatattcgttcctcatcattgcgaaaagctgctctaagggctctatcgaagactttgactgttgatgagcttttctatctgaaaggacagttttctctgttggaaccagacagaaatggatgcatcactctagataatatcagaatggccttaacaagagaagccacttatgctatgaaggaatcacgagttcaggagattcttgtctcgttaagcgctcttcagtacagaagaatggactttcaagagttctgtgcagcagcagttagtgtgcaccagcttgaagcattagatagatgggagcaacatgcccgttccgcttatgatttctttgagaaggatggcaatcgagctatcgtaattgatgaactagcttctgaactgggtctcagcccttcagtgccattgcatgttgttctgcaagattggatcaggcacaccgacgggaaattgagtttccttggatttgtcaagttattgcatggcatgtccagcaggtccttgtcaaagatgagatag

SEQ ID NO: 4583 - protein, 599 aa, Oryza sativa subsp
MGGCHAKPLTHEEADGACSPPRERPQPPATPPRGSGAATPAWKTKPWASPFFGFSTPSPSPAHHLFSASSPRRSPAPSAPTTPARRLLRLPFPPPSPAKHIRQALARRHGPPRPPIPEEGGDVEGEGGRGLDKGFGFNKGFAAKYDMGDEVGRGHFGYTCAAKIKKGARKGDAVAVKVIPKAKMTTSIAIEDVRREVKILKALAGHKNLVQFYDAYEDNDNVYIVMELCEGGELLDRILSRGGKYSEDDAKAVLVQILNVVSFCHIQGVVHRDLKPENFLFTSKDENSQLKAIDFGLSDFVKPDERLNDIVGSAYYVAPEVLHRCYSTEADVWSIGVIAYILLCGSRPFWARTESGIFRSVLKADPSYNEAPWPSLTLEAMDFVKRLLCKDPRRRMTAAQALSHPWIRNYNDIKLPLDILIFRLIKAYIRSSSLRKAALRALSKTLTVDELFYLKGQFSLLEPDRNGCITLDNIRMALTREATYAMKESRVQEILVSLSALQYRRMDFQEFCAAAVSVHQLEALDRWEQHARSAYDFFEKDGNRAIVIDELASELGLSPSVPLHVVLQDWIRHTDGKLSFLGFVKLLHGMSSRSLSKMR

SEQ ID NO: 4584 - DNA, 1623 bp, Cicer arietinum
  CDS (1)..(1623)
atgggtaattgttgcgctacccctccggtaaccggagaagaaacaaacaacaacaaaaagaaaaacaacaaaaaacctaaaaaggaaaatcccttcgcaatcgattacaatttcaacgcgaacaacacgaactcaaaactcaccgttttgaaggatccaacgggacgcgaaatcgaggttcgatacgagctaggtcgtgaactaggtcgaggcgagttcggaataacgtacctctgtacggacaaagaaaacggagaagaactagcgtgtaagtcgatatcgaagaagaagctaagaacattggtggatattgaagatgttaggagagaagttgaaataatgaaacacatgcccaaacatcctaatattgttacgttgaaagatacttatgaagatgataatgctgttcaccttgttatggagctttgtgaaggtggtgaactttttgatcggattgttgcgcgtggtcattatactgaacgcgccgccgccgctgttaccaaaaccatcgttgaagttgttcagatgtgccacaaacacggagtgatgcatagggatctcaagcctgagaactttttgtttgcaaataagaaggagacagcagcattgaaagctatagattttggattgtcagtgttttttacaccaggggaaaaatttaatgagatagttggaagtccatattacatggctcctgaggtattgaagcgaaattacggcccagaggttgatatctggagtgctggagtaattctatacatcttactttgtggtgtccctccattttgggcagaaactgagcaaggagttgcacaagcaatcatacgatctgttgttgatttcaaaagggatccatggcctaaagtttccgataatgcaaaagaccttgtgaagaggatgctaaatcccgaccctaagcggcgacttactgcacaggaagtattagatcatccatggttacaaaatgcaaagaaagctcccaatgtttcattaggagaaacagttagagcaaggcttaagcaattttccgtaatgaacaagcttaagaaaagagctttgagggtcattgcagagcatttgtcagtagaagaagctgctggactaaaagagggattcaagctcatggatacaagcaacaaaggcaagattaacattgatgagctgcgaataggattgcataaactaggccatcaaattcctgatgcagatgtccagattcttatggaagctggcgatgtagacagggatggacacttggattatggagagtatgttgccatttcagttcatttgagaaagatgggaaatgatgagcatcttcacaaagccttcgattttttcgatcagaaccaaactgggtatattgagattgaggagctgcgcaatgccttatctgatgaaattgaaacaaatagtgaagaagtgattagtgcaattatgcatgacgtggatacagataaggatggaaagataagttacgaggaatttgcttcaatgatgaagctgggaacagattggagaaaggcgtccaggcagtattcgcgagagaggttcaacagtctcagcctgaaattgatgagggatggttcattgcaattaaccaatgaaaaccaatgccagtag

SEQ ID NO: 4585 - protein, 540 aa, Cicer arietinum
MGNCCATPPVTGEETNNNKKKNNKKPKKENPFAIDYNFNANNTNSKLTVLKDPTGREIEVRYELGRELGRGEFGITYLCTDKENGEELACKSISKKKLRTLVDIEDVRREVEIMKHMPKHPNIVTLKDTYEDDNAVHLVMELCEGGELFDRIVARGHYTERAAAAVTKTIVEVVQMCHKHGVMHRDLKPENFLFANKKETAALKAIDFGLSVFFTPGEKFNEIVGSPYYMAPEVLKRNYGPEVDIWSAGVILYILLCGVPPFWAETEQGVAQAIIRSVVDFKRDPWPKVSDNAKDLVKRMLNPDPKRRLTAQEVLDHPWLQNAKKAPNVSLGETVRARLKQFSVMNKLKKRALRVIAEHLSVEEAAGLKEGFKLMDTSNKGKINIDELRIGLHKLGHQIPDADVQILMEAGDVDRDGHLDYGEYVAISVHLRKMGNDEHLHKAFDFFDQNQTGYIEIEELRNALSDEIETNSEEVISAIMHDVDTDKDGKISYEEFASMMKLGTDWRKASRQYSRERFNSLSLKLMRDGSLQLTNENQCQ

SEQ ID NO: 4586 - DNA, 1671 bp, Cicer arietinum
  CDS (1)..(1671)
atgggttgtcaaggtagcaaggagaagaacaaacctacgcctgattttactgcccgccaccatggatcatccgctactgctgcttccgccagtggtgttgccactaataatcaccagtaccactctgttcaaccatcttcaactcatgttcaaacaccacctccaaaaccagactcaaatccaaaacccactgtcactacccagaatgtcaaaacagttcacaaaacagacacaaccatattaggtaaaccctttgatgatataaagaaacattacactttaggtcaagaattaggtagagggcaatttgggattacttatttttgcactgagaattcaactggcaacacttatgcttgcaaatcaatattaaagaggaaacttgtgtctaaatctgatagagaagatattaagagagagattcagattcttcagcatttgtctggtcaaccaaacattgttgaattcaaaggtgcttatgaggatagattctctgtgcatcttgtcatggaactttgtgctggtggagagttatttgatagaatcattgctcaaggtcactattcagagagagctgctgcatccatttgtagggctgttgttaatgttgtgcatatttgtcatttcatgggtgttttgcatcgcgatttgaagcccgagaatttcttgctctctagtaaggatgaaggagcaacacttaaagctactgattttggactttctgttttcattgaagaaggaaaggtttatcgcgatatggtaggcagtgcttactacgttgctcctgaggtactgcgtcgtagttatggaaaggaaattgacatttggagtgcaggcatcatcttgtatattctccttagtggtgtaccacctttttgggctgaaactgaaaagggaatatttaatgccatactggaaggagaacttgactttgctagtgaaccatggccatcaatatcagacagtgctaaagatctagtcaggaagatgcttaatcacgatccaaagaagaggattacttctgcacaagtccttgaacacccgtggatgagagaaggtggagaggcctctgataaaccgattgatagtgcagttctttctagaatgaaacaattcagggcaatgaataagctcaagaagcttgcattgaagattattgctgaaaatctatcagaagaggagattaaaggtctcaaggcaatgtttgcaaatatggacactgacaatagtggtaccatcacctatgaagaattgaagactggcttggctcgaatcggatcacggttgtctgagaccgaagtgaagcaacttatggagctggctgatgttgatggaaatgggtcgattgactatcttgaattcatatcggctacaatgcataggcacagacttgaacgggatgaacacctttacaaagcattccagtattttgataaggacaacagtgggcatattactagagaagaattggagactgccatgacacagcatggaatgggtgatgaagcaacaataaaggacataatttctgaggtggatacagatcatgatgggagaataaactatgaggaattttgtgcaatgatgagaagcggaatgccaccaccagggaccactattataaatctacagagtgaattcgatttcatatgttcatgcaattcattatga

SEQ ID NO: 4587 - protein, 556 aa, Cicer arietinum
MGCQGSKEKNKPTPDFTARHHGSSATAASASGVATNNHQYHSVQPSSTHVQTPPPKPDSNPKPTVTTQNVKTVHKTDTTILGKPFDDIKKHYTLGQELGRGQFGITYFCTENSTGNTYACKSILKRKLVSKSDREDIKREIQILQHLSGQPNIVEFKGAYEDRFSVHLVMELCAGGELFDRIIAQGHYSERAAASICRAVVNVVHICHFMGVLHRDLKPENFLLSSKDEGATLKATDFGLSVFIEEGKVYRDMVGSAYYVAPEVLRRSYGKEIDIWSAGIILYILLSGVPPFWAETEKGIFNAILEGELDFASEPWPSISDSAKDLVRKMLNHDPKKRITSAQVLEHPWMREGGEASDKPIDSAVLSRMKQFRAMNKLKKLALKIIAENLSEEEIKGLKAMFANMDTDNSGTITYEELKTGLARIGSRLSETEVKQLMELADVDGNGSIDYLEFISATMHRHRLERDEHLYKAFQYFDKDNSGHITREELETAMTQHGMGDEATIKDIISEVDTDHDGRINYEEFCAMMRSGMPPPGTTIINLQSEFDFICSCNSL

SEQ ID NO: 4588 - DNA, 1533 bp, Zea mays
  CDS (1)..(1533)
atgcagccggacccgagcgggaacgccaatgcgaagacgaaactgccgcagctggtgacggcgccggctccgtcgtcggggcgtccggcgtccgtgcttccgtacaagacggcgaacgtgcgggaccactaccgcatcggcaagaaactggggcaggggcagttcggcaccacgtaccagtgcgtgggcaaggcggacggcgctgagtacgcatgcaagtccatccccaagcgcaagctgctgtgccgggaggactacgaggacgtctaccgcgagatccagatcatgcaccacctctccgagcaccccaacgtcgtccgcatccgcggcgcctacgaggacgcgctcttcgtgcacatcgtcatggagctctgcgccggcggcgagctcttcgaccgcatcgtcgccaagggccactacagtgagcgcgcggctgcgaagctcatcaagaccattgtcggggtcgtggagggatgtcactcgctcggcgtcatgcaccgggacctcaagccggagaattttctctttgccagcaccgccgaggaagccccactcaaggccactgactttgggctttccatgttctacaagcccggtgataaattctctgatgtcgttggaagtccatactatgttgcaccagaggtgcttcagaaatgctatggtccagaagctgatgtgtggagcgcaggagtaattctgtacattttgctttgtggtgtgcccccgttttgggcagaaactgaggctggaatcttcaggcagattctgcgaggcaaacttgattttgaatctgaaccctggcctagtatttctgatagtgctaaggatctggtctgcaatatgcttacacgggatcctaaaaagagatttagtgctcatgaggttctctgtcacgcatggattgttgacgatgccgtggcacctgataagcctattgattctgctgttctctcaaggctgaagcatttttcggcaatgaacaagctcaagaagatggcattaagggttattgctgaaagcctgtctgaggaagagattggaggtctcaaggagttgttcaagatgattgatactgacagtagtgggactataacatttgatgagctgaaagatggcttgaaaagggtaggctctgaattaacagagaacgaaatccaggctctaatggaagcagctgatattgataacagcggaaccatcgactacggcgaattcattgcagctacgttgcacatgaacaaactggagagggaggaaaacttggtttcagcattctcgttttttgacaaagatggaagtggctttataaccatcgatgagctgtcacaagcatgtcgcgaatttggtctcgatgacctccacctcgaggatatgattaaagatgttgaccagaacaatgatggccaaatcgactacagcgagttcacggcgatgatgaggaagggcaatgctggtgcaacaggaaggagaaccatgaggaacagcttgcacttgaatctcggcgaactcttgaatcccagcaaaacctag

SEQ ID NO: 4589 - protein, 510 aa, Zea mays
MQPDPSGNANAKTKLPQLVTAPAPSSGRPASVLPYKTANVRDHYRIGKKLGQGQFGTTYQCVGKADGAEYACKSIPKRKLLCREDYEDVYREIQIMHHLSEHPNVVRIRGAYEDALFVHIVMELCAGGELFDRIVAKGHYSERAAAKLIKTIVGVVEGCHSLGVMHRDLKPENFLFASTAEEAPLKATDFGLSMFYKPGDKFSDVVGSPYYVAPEVLQKCYGPEADVWSAGVILYILLCGVPPFWAETEAGIFRQILRGKLDFESEPWPSISDSAKDLVCNMLTRDPKKRFSAHEVLCHAWIVDDAVAPDKPIDSAVLSRLKHFSAMNKLKKMALRVIAESLSEEEIGGLKELFKMIDTDSSGTITFDELKDGLKRVGSELTENEIQALMEAADIDNSGTIDYGEFIAATLHMNKLEREENLVSAFSFFDKDGSGFITIDELSQACREFGLDDLHLEDMIKDVDQNNDGQIDYSEFTAMMRKGNAGATGRRTMRNSLHLNLGELLNPSKT

SEQ ID NO: 4590 - DNA, 1614 bp, Capsicum annuum
  CDS (1)..(1614)
atgggcaacgcatgccgtggatctttccgagccaaaacttttcagggcagctaccctcagaaccattccacttccaagcatagtaaagtagaagaagaacaacaaccagacccagcccccctcgtcgtcaaagatcatagcaccagcaccaagaatatgaaccatcgcagcagcgctaaccagtcgtgttgcgttctgggtcataagacccctaacattcgggatctctacgctctcggtcgtaaacttggacaaggccagtttgggaccacttatttatgcaccgaattgtccacctgtatcgactacgcctgtaaatctattgccaagagaaaactcatctccaaagaagacgttgaagatgtccgcagggaaattcagataatgcaccatttggctggtcacaagaacatcgtttccatcaagggtgcttatgaggatcccttgtatgttcatattgtcatggagctttgtggcggcggtgagttgttcgaccgcatcattcaaagaggacactataccgagagaaaggctgctgatttgactaaaattattgttggtgttgttgaggcatgccattttatgcatagagatctcaaacctgagaatttcttgttggttaacaaggacgatgatttctctctcaaggccattgactttggactctctgtattctttaagccaggccaaattttcacagatgttgttgggagtccatattacgttgctcctgaggtgcttctgaagaattacggtccagaagcagatgtttggacagcaggagtcatactctatatcctgctaagtggtgttccaccattctgggctgaaacacagcaggggatatttgatgcagttctgaaagggcacattgattttgactcagatccttggcctttaatatctgagagtgcaaaagatctcatccggaagatgttatgcatgcgaccctcagagcggttaactgctcatgaagtactatgtcatccttggatttgtgaaaacggtgttgctccagatagagcacttgatcctgcagtactttctcgcctcaaacacttttctgcaatgaacaagttaaaaaagatggctctgcgggtgattgctgaaagcttgtcggaggaagagattgccggtcttaaggagatgtttaaggccatggatactgataatagtggtgcaattacattcgatgaactaaaagctggtttgagaaaatacggctctactctaaaggatatagagatacgggaacttatggatgcggctgacgtggacaatagtggaactattgactatggagaattcattgcagcaactattcaccttaacaaactggaccgcgaggaacatctcatggcagcatttcagtattttgacaaggatggaagtggttatattacagttgatgagctccagcaggcatgtgcagatcataacattacggatgtattatttgaggatattatcagagaagttgatcaagataccgatggacgcattgattatggagaatttgttgctatgatgcaaaaaggaaatccatgcataggaagacgaactatgcgaaatagtttgaatttcagcatgagagatgcgcccggagctcattag

SEQ ID NO: 4591 - protein, 537 aa, Capsicum annuum
MGNACRGSFRAKTFQGSYPQNHSTSKHSKVEEEQQPDPAPLVVKDHSTSTKNMNHRSSANQSCCVLGHKTPNIRDLYALGRKLGQGQFGTTYLCTELSTCIDYACKSIAKRKLISKEDVEDVRREIQIMHHLAGHKNIVSIKGAYEDPLYVHIVMELCGGGELFDRIIQRGHYTERKAADLTKIIVGVVEACHFMHRDLKPENFLLVNKDDDFSLKAIDFGLSVFFKPGQIFTDVVGSPYYVAPEVLLKNYGPEADVWTAGVILYILLSGVPPFWAETQQGIFDAVLKGHIDFDSDPWPLISESAKDLIRKMLCMRPSERLTAHEVLCHPWICENGVAPDRALDPAVLSRLKHFSAMNKLKKMALRVIAESLSEEEIAGLKEMFKAMDTDNSGAITFDELKAGLRKYGSTLKDIEIRELMDAADVDNSGTIDYGEFIAATIHLNKLDREEHLMAAFQYFDKDGSGYITVDELQQACADHNITDVLFEDIIREVDQDTDGRIDYGEFVAMMQKGNPCIGRRTMRNSLNFSMRDAPGAH

SEQ ID NO: 4592 - DNA, 1614 bp, Glycine max
  CDS (1)..(1614)
atggttacagacatgctgggactggtggtgtgcacaaccaagaagactcatgaacctttggtcaaccaatcaagagcacctgcaaatcaaccttatcatttacatgaaaagcatgctgcatccactgctcagacagtgcctcaaaatatgccatggaagcctcctggtccagcccttagtcctaaacctgttgttggtgttaggcaagacacaattcttgggaagcagtttgaggatgtgaagcagttctacacacttgggaaggagttgggtagagggcaatttggtgtgacatatctttgcactgagaattcgaccggattgcagtatgcctgcaagtccatttccaagaggaaacttgcgagcaaatctgataaggaggacataaagagggagattcagattatgcagcatttgagtggtcaacccaacattgttgagttcaaaggggcttatgaggataggagctcagttcatgttgtgatggagctgtgtgcaggtggggaactttttgataggattattgccaaggggcattacagtgagaaggctgctgcttcattttgcagacaaattgtaaatgttgttcatatctgtcttttgggtgtgatgcatagggatctgaaaccagagaattttttgctatctagtagggacgaaaatgcacttctcaaggcaaccgattttggcttgtcagttttcattgaagaaggaaaggtatatcgggatatagttggtagtgcttactatgttgctcctgaagttctgcggcgcagatgtgggaaggaaatagatatatggagtgcaggagtcatattgtatatcttacttagtggagtccctccattttgggctgagactgagaagggaatatttgatgccatattggaaggtcacattgattttgaaagtcaaccatggcctaacatctcagacagtgccaaggatcttgttcgtaagatgcttatacaggatccaaagaaacgcattacctctgctcaagttcttgagcacccatggattaaagatggaaatgcttcagacaagccgatagacagtgcagtcctttccagaatgaagcaatttagagcaatgaataagctaaagaaacttgccttgaaggtcattgctgagaatatgtctgcagaagagatccaaggtttgaaggcaatgtttacaaatatggacactgacaagagtggtacaatcacctatgaagaacttaagtcaggattgcatagacttggctcaaagcttacagaggctgaagtgaagcaacttatggaagctgctgatgtagatggaaatggctcaattgactacatagaattcatcactgctacaatgcatagacacaaattagaaagagatgaccaacttttcaaggccttccaatattttgataaagacaacagtgggtttattacaagagatgaattggaatcagccatgaaagaatatggtatgggtgatgatgcaacaatcaaggaaatcatatctgaagttgatacaattatatctgaagtggatacagatcatgatggtagaatcaactatgaagaattctctgcgatgatgaagagtgggaaccaacaacaaggcaagctattctaa

SEQ ID NO: 4593 - protein, 537 aa, Glycine max
MVTDMLGLVVCTTKKTHEPLVNQSRAPANQPYHLHEKHAASTAQTVPQNMPWKPPGPALSPKPVVGVRQDTILGKQFEDVKQFYTLGKELGRGQFGVTYLCTENSTGLQYACKSISKRKLASKSDKEDIKREIQIMQHLSGQPNIVEFKGAYEDRSSVHVVMELCAGGELFDRIIAKGHYSEKAAASFCRQIVNVVHICLLGVMHRDLKPENFLLSSRDENALLKATDFGLSVFIEEGKVYRDIVGSAYYVAPEVLRRRCGKEIDIWSAGVILYILLSGVPPFWAETEKGIFDAILEGHIDFESQPWPNISDSAKDLVRKMLIQDPKKRITSAQVLEHPWIKDGNASDKPIDSAVLSRMKQFRAMNKLKKLALKVIAENMSAEEIQGLKAMFTNMDTDKSGTITYEELKSGLHRLGSKLTEAEVKQLMEAADVDGNGSIDYIEFITATMHRHKLERDDQLFKAFQYFDKDNSGFITRDELESAMKEYGMGDDATIKEIISEVDTIISEVDTDHDGRINYEEFSAMMKSGNQQQGKLF

SEQ ID NO: 4594 - DNA, 1473 bp, Glycine max
  CDS (1)..(1473)
atgcagaagcatggttttgcatcaaagcgcaacgtgttgccgtatcaaacggcgaggctaagggaccactacgttctggggaagaagctggggcaagggcaattcgggacgacgtacctgtgcacccacaaggtgacggggaagctctacgcgtgcaaatcgatcccgaagaggaagcttatgtgccaggaggattacgatgatgtgtggagggagattcagatcatgcaccatttgtcggagcatccaaacgttgtccagatacaaggcacgtacgaggattccgtgttcgtgcaccttgtcatggaactatgtgccggcggggagcttttcgacaggatcattcagaaggggcattacagcgagagagaggctgccaagttgataaagaccattgttggggtggtggaggcgtgccactctcttggggtcatgcatagggatctcaagcctgagaatttcttgtttgatacccctggcgaagatgcccagatgaaggccaccgattttggcctctctgtcttctacaagccaggacaagcctttcatgatgtagtaggaagtccctactatgttgccccagaggtgttgtgcaagcaatatggacctgaagtggacgtatggagtgctggtgttatcctatacatcttactgagtggggtgccacctttctgggctgaaaccgaagcaggaattttcagacagattttaaatggagatcttgatttcgtttctgaaccgtggccaagtatctcagaaaatgctaaagaattggtaaaacagatgttggatagggaccctaagaaaagaatttctgctcatgaagttttatgtaacccttgggttgttgatgacattgcacctgacaaacctctggactctgctgttttgacacgcctaaagcatttctcagcaatgaataaacttaagaagatggcattacgggtcatagcagagaggctttcagaggaagaaataggtggattgaaagagttgtttaaaatgattgacacagacaatagtgggacaataacttttgaggaactgaaggaggggttgaaaagtgtgggctctaatctcatggaatctgaaattaaatcacttatggaagcggctgatatagacaacaatggatcaatagactatggtgaatttcttgctgctacactgcacttgaataagatggaaagagaggagaatttggttgctgctttcgcctattttgataaagatggtagtggttacatcaccattgacgagcttcaacaggcttgtaaggacttcagcctaggtgatgtgcatctggatgagatgatcaaagagattgatcaagataatgatgggaggattgattatgcggagtttgcagcaatgatgaaaaagggtgatccaaatatgggtagaagcagaaccatgaaaggcaatttgaacttcaatattgcagatgcatttggaatgaaagactcttcttga

SEQ ID NO: 4595 - protein, 490 aa, Glycine max
MQKHGFASKRNVLPYQTARLRDHYVLGKKLGQGQFGTTYLCTHKVTGKLYACKSIPKRKLMCQEDYDDVWREIQIMHHLSEHPNVVQIQGTYEDSVFVHLVMELCAGGELFDRIIQKGHYSEREAAKLIKTIVGVVEACHSLGVMHRDLKPENFLFDTPGEDAQMKATDFGLSVFYKPGQAFHDVVGSPYYVAPEVLCKQYGPEVDVWSAGVILYILLSGVPPFWAETEAGIFRQILNGDLDFVSEPWPSISENAKELVKQMLDRDPKKRISAHEVLCNPWVVDDIAPDKPLDSAVLTRLKHFSAMNKLKKMALRVIAERLSEEEIGGLKELFKMIDTDNSGTITFEELKEGLKSVGSNLMESEIKSLMEAADIDNNGSIDYGEFLAATLHLNKMEREENLVAAFAYFDKDGSGYITIDELQQACKDFSLGDVHLDEMIKEIDQDNDGRIDYAEFAAMMKKGDPNMGRSRTMKGNLNFNIADAFGMKDSS

SEQ ID NO: 4596 - DNA, 1524 bp, Glycine max
  CDS (1)..(1524)
  misc_feature (1179)..(1179): n is a, g, c or t
atggctgcgaaatctagttcgagttcgacaacaaacgtggtgactctgaaggcggcgtgggttctcccgcagcgcacgcagaacatccgtgaggtgtacgaggtggggcggaagttggggcagggtcaattcgggactaccttcgagtgcacgcgccgcgcgtccggggggaaattcgcgtgcaagtcaattcccaagcggaagctgctgtgcaaggaggactacgaggacgtgtggcgggagattcagataatgcaccacttgtcggagcacgcgcacgttgtccgcatcgaagggacgtacgaggattcctcggcggtgcacctcgtcatggagttgtgtgagggtggggagttgtttgacaggatcgtgcagaagggacactacagcgagagacaggcggcgaggttgataaagacgattgttgaggttgttgaagcgtgtcactcgcttggggtcatgcatagggacctcaagcctgagaacttcctctttgatactgttgatgaggatgctaagcttaaggccactgatttcggcttgtctgttttttacaagcctggtgaatccttttgtgatgttgtcgggagcccatactatgttgcaccagaggtcttgcgcaagcactatggacctgaatcagacgtgtggagtgctggggttattctgtacatcttattaagtggggtgccaccattttgggccgaatctgaaccggggatcttccgacagattttactaggaaaacttgattttcattctgagccttggcctagcatttcagacagtgccaaggatctaattcggaaaatgcttgatcaaaatccaaaaacaaggcttacagcacatgaagtactccgccacccatggattgttgatgacaacattgcacctgataaacctcttgattctgcagttttatcacgtctgaaacaattctctgccatgaataaattgaaaaagatggcattgcgtgttattgctgagaggctatctgaagaagaaattggtggactgaaagagttattcaagatgattgacacagacaacagtggaaccataacgtttgatgagttaaaagatggtttgaagcgagtaggatctgaacttatggagtctgaaatcaaggatcttatggatgctgcggatattgataaaagtgggacaattgattatggngaattcattgctgccactgtccatttaaataagctggagagagaggaaaacctagtgtcggccttctcctattttgacaaagatggcagtggttacataacccttgatgagatacaacaagcttgtaaggactttggtttagatgatgtccatattgatgacatgatcaaggaaattgatcaagataacgatgggcaaatagattatggggaatttgctgccatgatgagaaagggcaatggaggaattggaaggcgaactatgagaaaaacactaaatttaagagatgctcttggattagtagacaatgggtccaatcaagttattgagggctactttaagtaa

SEQ ID NO: 4597 - protein, 507 aa, Glycine max
MAAKSSSSSTTNVVTLKAAWVLPQRTQNIREVYEVGRKLGQGQFGTTFECTRRASGGKFACKSIPKRKLLCKEDYEDVWREIQIMHHLSEHAHVVRIEGTYEDSSAVHLVMELCEGGELFDRIVQKGHYSERQAARLIKTIVEVVEACHSLGVMHRDLKPENFLFDTVDEDAKLKATDFGLSVFYKPGESFCDVVGSPYYVAPEVLRKHYGPESDVWSAGVILYILLSGVPPFWAESEPGIFRQILLGKLDFHSEPWPSISDSAKDLIRKMLDQNPKTRLTAHEVLRHPWIVDDNIAPDKPLDSAVLSRLKQFSAMNKLKKMALRVIAERLSEEEIGGLKELFKMIDTDNSGTITFDELKDGLKRVGSELMESEIKDLMDAADIDKSGTIDYGEFIAATVHLNKLEREENLVSAFSYFDKDGSGYITLDEIQQACKDFGLDDVHIDDMIKEIDQDNDGQIDYGEFAAMMRKGNGGIGRRTMRKTLNLRDALGLVDNGSNQVIEGYFK

SEQ ID NO: 4598 - DNA, 1647 bp, Spirodela oligorhiza
  CDS (1)..(1647)
atgggtgtctgcttcagcaaggcctctaagccttctggtaatggctaccagcctccgccgccgcagccgtacaagcccccgccgccgccggctgctcgcccagcgcagccgtcggtccaaatcccgcagacccaccatacccagcagaggcagcagagcgaccatcaatccgcgtctcaggcagcgccgtctcccgcgaagcagcatctcccttctccccgcaacagtcctgccgcggccgtctcggcggcgacgccggcgaccgtgctgggcaagccctttgaagacgttaaggctaagtacacgatcggtaaggtgctggggagaggccagttcggcgtcacctacctctgcacctgcaactccacgggagcgaagtacgcctgcaagtcgatctcgaagaggaagctggtgaaccggaacgacagggaggacgtgaagagggagatccagataatgcagcacctgagcgggcaggagaacatcgtggagtttaagggggcgtacgaggacaggcattcggtgcatgtggtgatggagctctgcgcaggaggggagctttttgataggataatcgccaaggggcactattcagagagggcggcggcggcgatgtgcaggtcgatcgtgaatgtggtgaacatctgccatttcatgggggtcatgcaccgagatctcaagccggagaacttcctgctctccaccaaggacccgggtgcggcactcaaggccacagatttcgggctctccgtcttcatcgaggaaggcaaagtgtacagaagcatagtgggcagcgcatactatgtcgctcctgaagtgctaatgcgctcttacggcaaggagatcgacgtctggagcgccggaatcatcgtctacatccttctctccggcgtgccgcctttctggggcgagacagagaagaagatctttgactccatcatgaaggacgacatcgacttccagtctgatccctggccgtcgatctctgccagtgcaaaagatctcgtctcaaagatgctgacaagggatcctaagaagaggatcactgcggcccaagttctcgatcacccatggatcagagtggacggcgaggcgtcggataagccaatcgacagtgcagtgttgtctaggatgaaacagttcagggctatgaataagctcaagaagatggctctcaaggtcatcgcagagagcctatcggaagaggagattaaggggctgaggcagatgtttcagaacatggacaccgatcaaagcgggacgatcacctatgaagagctcaagaccgggcttgctcgacttgggtcgagactttcagaggccgaagtcaaacagctcatggatgctgctgatgtggatgggaatggatccattgactacattgagttcatcacggccacgatgcaccggcacaagctagagagagaggagcacctttactcggcgttcagttactttgacaaggataatagcgggtacatcactagggatgagttaaagcaggcactggaggagcatgggatgggtgatgccgacagcattagagagataatatctgaagtggacacggacaacgatgggaggattaattacgatgagttttgcgccatgatgaggagtgggacgcatcctccgggtagaccttaa

SEQ ID NO: 4599 - protein, 548 aa, Spirodela oligorhiza
MGVCFSKASKPSGNGYQPPPPQPYKPPPPPAARPAQPSVQIPQTHHTQQRQQSDHQSASQAAPSPAKQHLPSPRNSPAAAVSAATPATVLGKPFEDVKAKYTIGKVLGRGQFGVTYLCTCNSTGAKYACKSISKRKLVNRNDREDVKREIQIMQHLSGQENIVEFKGAYEDRHSVHVVMELCAGGELFDRIIAKGHYSERAAAAMCRSIVNVVNICHFMGVMHRDLKPENFLLSTKDPGAALKATDFGLSVFIEEGKVYRSIVGSAYYVAPEVLMRSYGKEIDVWSAGIIVYILLSGVPPFWGETEKKIFDSIMKDDIDFQSDPWPSISASAKDLVSKMLTRDPKKRITAAQVLDHPWIRVDGEASDKPIDSAVLSRMKQFRAMNKLKKMALKVIAESLSEEEIKGLRQMFQNMDTDQSGTITYEELKTGLARLGSRLSEAEVKQLMDAADVDGNGSIDYIEFITATMHRHKLEREEHLYSAFSYFDKDNSGYITRDELKQALEEHGMGDADSIREIISEVDTDNDGRINYDEFCAMMRSGTHPPGRP

SEQ ID NO: 4600 - DNA, 1638 bp, Arabidopsis thaliana
  CDS (1)..(1638)
atgggtaactgtaacgcctgtgtaaggccagactcaaaagaatcaaaaccatcttcaaagccgaaaaaacccaatcgagatcggaaattaaacccattcgccggagatttcaccagatccccagctccaatacgtgttctcaaagatgtaatccctatgagcaatcaaactcagatcagcgacaaatacatcttaggtcgtgaattaggtcgaggcgaattcggaatcacttacctctgtactgatcgtgaaacccacgaagctttagcttgcaaatcgatttcaaagcgaaagcttcgaacagctgtcgatatcgaagacgttcgtcgtgaggtagcgattatgtctactttacctgagcatccaaacgtagttaagcttaaggctagttatgaggataacgagaacgtgcatctggttatggagctttgtgaaggaggtgagctttttgatcggattgttgctagaggacattacacggagcgtgctgctgcagctgttgtgagaacgattgctgaggttgtgatgatgtgtcactctaatggagttatgcatcgagatttgaaacctgagaatttcttgtttgctaataaaaaggagaattctccactaaaggctattgattttggcttgtctgtgttcttcaaacctggagataagtttacagagattgtaggaagtccgtattatatggctccagaagtgttgaagagagattatggaccaggggttgatgtgtggagtgccggagttattatctatatcttgctctgtggtgttcctccgttttgggctgagactgaacaaggtgttgctcttgcgatcttgcggggagttcttgattttaagagagacccttggcctcagatatcagagagtgccaagagccttgtgaagcagatgttggatcctgatccgactaagcggttaactgctcagcaagtgttagctcacccatggatacagaatgcaaagaaagctcccaatgttcctttaggagatatagtcagatctaggttgaagcagttctctatgatgaacagattcaaaaagaaagttcttcgtgtaattgcggagcacttgtctattcaagaggttgaagtgataaagaacatgttctcactgatggatgatgacaaggatggtaaaataacttacccggaactcaaagctgggcttcagaaggtcggttcacaacttggtgaaccagagatcaaaatgttgatggaagtggcggatgtcgatggaaatgggtttctggattatggagagtttgtagctgtgataattcacttgcagaagatagagaatgatgaacttttcaaactagcttttatgtttttcgacaaagatggaagtacatacattgaacttgatgagctacgggaagctttagcggatgagttaggcgagccagacgccagtgttctaagcgacatcatgcgtgaagttgacactgacaaggacggacgtataaactatgatgagtttgtgacgatgatgaaagctggaactgactggagaaaggcatcgagacaatattcaagagagaggttcaaaagcttaagcattaacttgatgaaagatgggtcattgcatctccatgacgctctcactggacaaactgttcctgtttaa

SEQ ID NO: 4601 - protein, 545 aa, Arabidopsis thaliana
MGNCNACVRPDSKESKPSSKPKKPNRDRKLNPFAGDFTRSPAPIRVLKDVIPMSNQTQISDKYILGRELGRGEFGITYLCTDRETHEALACKSISKRKLRTAVDIEDVRREVAIMSTLPEHPNVVKLKASYEDNENVHLVMELCEGGELFDRIVARGHYTERAAAAVVRTIAEVVMMCHSNGVMHRDLKPENFLFANKKENSPLKAIDFGLSVFFKPGDKFTEIVGSPYYMAPEVLKRDYGPGVDVWSAGVIIYILLCGVPPFWAETEQGVALAILRGVLDFKRDPWPQISESAKSLVKQMLDPDPTKRLTAQQVLAHPWIQNAKKAPNVPLGDIVRSRLKQFSMMNRFKKKVLRVIAEHLSIQEVEVIKNMFSLMDDDKDGKITYPELKAGLQKVGSQLGEPEIKMLMEVADVDGNGFLDYGEFVAVIIHLQKIENDELFKLAFMFFDKDGSTYIELDELREALADELGEPDASVLSDIMREVDTDKDGRINYDEFVTMMKAGTDWRKASRQYSRERFKSLSINLMKDGSLHLHDALTGQTVPV

SEQ ID NO: 4602 - DNA, 1785 bp, Oryza sativa subsp
  CDS (1)..(1785)
atgggtctctgtcatggcaagccgagccaaatcccggagcccgaggcggaggaggcggcggcggcggccggtgtagccgtcgccggcgccgcctcgccgggtccggctgcggcggcggcggcggcggcggcggcgaagccgggcacgccgaagcagccgaagttcccgttctacctgccgagcccgctgccggcgtcgagctacaagagctcgccggcgaactcgagcgtggcgtcgacgccggcgcgcggcgggttgaagcggccgttccccccgccgtcgccggcgaagcacatccgcgcgctcctggcgcggcggcacgggtcggtgaagcccaacgaggcgcccatcccggagggcggcgagaccgaggtcggcctcgacaagggcttcggcttctccaagcacttcttcgccaagtacgagctcggcgacgaggtcggccgcggccacttcggctacacctgctccgccaaggccaagaagggcgaccacaagggccacgacgtcgccgtcaaggtcatccccaaagccaagatgacgactgctattgccattgaagatgtcagaagagaagtcagaatattgagttcgctgacaggacacagtaacctagtgcagttctatgatgctttcgaggatgaagataatgtgtatatagttatggagctatgtaaaggaggtgaactactggataggattttggcaagaggtggaaaatactctgaggaagatgcaaaggttgttatggtgcaaattttgagtgttgtgtcattttgccatctccaaggtgttgtccatcgtgatctgaaaccagagaattttcttttcacctcaaaggatgaaaactctgccttgaaggtcatagactttggcttgtctgactttgtgaagccagatgaaagacttaatgacattgtcggaagtgcatattatgttgctcctgaggtgcttcatcgatcttatggcactgaggcagatatgtggagcattggagtgattgcctacattttgctttgtgggagccgtcctttctgggcacgcaccgaatcaggaatatttcgagctgtgctgaaggcagaaccaagttttgatgaggctccatggcctactctcactgccgaagcaaaagactttgtaaaacgactgcttaataaggattaccgcaagaggatgactgctgcacaagctctcagtcatccgtggatccgaaattctcaacaagtgaaaatacctttagatatgataatctacaagcttatgcgagcttatatcagttcgtcttccttgcggaagtccgctttgagggccctagctaagacattgacggcaaatcaactgttctatctaagagagcaatttgaattgttgggtccaaacaagaatggttatatctccttgcaaaatttgaaaacggccttggtaaagaattctacagatgcaatgaaggattctagggttattgactttgttaacacggtgtgcactcttcagtacagaaaattggattttgaagagttcgctgcttctgccgtcagcgtttatcagatggaagctttggaaacatgggagcagcacgcacggcgtgcatacgagctattcgataaggagggcaaccgacctattgtaattgaggagcttgcatcggaacttggacttggtccatcagtccctcttcatgttgtactccaagattggatcagacacgccgatgggaagcttagtttccttggattcattaaacttttgcacggagtttcttcgcgatcgatcccgaaagcctaa

SEQ ID NO: 4603 - protein, 594 aa, Oryza sativa subsp
MGLCHGKPSQIPEPEAEEAAAAAGVAVAGAASPGPAAAAAAAAAAKPGTPKQPKFPFYLPSPLPASSYKSSPANSSVASTPARGGLKRPFPPPSPAKHIRALLARRHGSVKPNEAPIPEGGETEVGLDKGFGFSKHFFAKYELGDEVGRGHFGYTCSAKAKKGDHKGHDVAVKVIPKAKMTTAIAIEDVRREVRILSSLTGHSNLVQFYDAFEDEDNVYIVMELCKGGELLDRILARGGKYSEEDAKVVMVQILSVVSFCHLQGVVHRDLKPENFLFTSKDENSALKVIDFGLSDFVKPDERLNDIVGSAYYVAPEVLHRSYGTEADMWSIGVIAYILLCGSRPFWARTESGIFRAVLKAEPSFDEAPWPTLTAEAKDFVKRLLNKDYRKRMTAAQALSHPWIRNSQQVKIPLDMIIYKLMRAYISSSSLRKSALRALAKTLTANQLFYLREQFELLGPNKNGYISLQNLKTALVKNSTDAMKDSRVIDFVNTVCTLQYRKLDFEEFAASAVSVYQMEALETWEQHARRAYELFDKEGNRPIVIEELASELGLGPSVPLHVVLQDWIRHADGKLSFLGFIKLLHGVSSRSIPKA

SEQ ID NO: 4604 - DNA, 1749 bp, Arabidopsis thaliana
  CDS (1)..(1749)
atgggaagttgtgtttcgtcgccattgaaaggctctccttttggaaagagaccggtaagaaggcgacacagtagtaatagcagaacatcctctgttcctcgtttcgattcttcaactaatctttcccggagattgattttccagccaccaagccgcgttctccccgagcctatcggtgatggaattcacctcaagtatgatttgggaaaagaactaggccgtggtgaatttggtgtcactcatgaatgtatcgagatcagtacccgagaaagatttgcgtgtaagaggatatcgaaggagaagctaaggacggagatagatgtggaggatgtgagaagagaggttgagatcatgagatgtttaccaaaacatcctaatattgttagctttaaggaagcttttgaggacaaagacgctgtctatcttgtcatggagatttgtgaaggaggtgaactttttgaccgcattgtctctagagggcattacactgaacgcgccgctgcatctgttgctaaaaccattcttgaagttgtcaaggtgtgtcatgaacatggagtgattcatcgtgatcttaaaccagagaacttcctcttttcgaatggaactgagactgcacaactcaaagccattgattttggtctctccattttcttcaaaccggcccagcggttcaatgagattgtgggaagtccttactacatggctccagaggttttgagacgaaattacggtcctgagatcgatgtttggagtgctggtgttatactctatatcttgctttgtggtgttcctcccttttgggcagaaaccgaggaaggaatcgcgcacgctattgtgagagggaacatcgatttcgagagagatccatggccaaaagtctcacatgaagccaaggaactcgttaagaacatgcttgatgcaaatccttatagcagactcacagtccaagaagtgcttgaacatccatggatccggaacgcagagagagcaccaaatgtgaatcttggagataacgtcaggaccaagattcaacaattcttgttgatgaacaggttcaagaagaaagtcctcaggattgtagcggacaatctaccaaacgaggagatagcagcgatagtacagatgtttcaaacaatggacgctgataagaatggtcacttgacttttgaggagctaagagatggactgaagaagattggacaagttgttcccgatggcgatgtgaagatgctaatggatgcagcggatacagatggaaatgggatgttgagctgtgatgagtttgtgacactctcaatacatttgaagagaatgggatgtgatgagcatttgcaggaagcattcaagtattttgacaagaacgggaacggatttatcgagctagatgagctcaaggtagctctttgcgatgataagctaggccacgctaacggtaacgaccagtggatcaaagatatcttctttgacgtcgacctcaacaaggatggacggataagctttgatgagtttaaggcaatgatgaaatcagggacggattggaaaatggcgtcgaggcagtactcgagggcgttgttgaatgctctaagcatcaagatgttcaaagaagattttggggacaatggtcctaagtcacattccatggagttccctatagcaaggaagagggctaagctgcttgatgctcccaagaacaaatcaatggagcttcagatctccaaaacctataaaccctcaggtctaagaaactaa

SEQ ID NO: 4605 - protein, 582 aa, Arabidopsis thaliana
MGSCVSSPLKGSPFGKRPVRRRHSSNSRTSSVPRFDSSTNLSRRLIFQPPSRVLPEPIGDGIHLKYDLGKELGRGEFGVTHECIEISTRERFACKRISKEKLRTEIDVEDVRREVEIMRCLPKHPNIVSFKEAFEDKDAVYLVMEICEGGELFDRIVSRGHYTERAAASVAKTILEVVKVCHEHGVIHRDLKPENFLFSNGTETAQLKAIDFGLSIFFKPAQRFNEIVGSPYYMAPEVLRRNYGPEIDVWSAGVILYILLCGVPPFWAETEEGIAHAIVRGNIDFERDPWPKVSHEAKELVKNMLDANPYSRLTVQEVLEHPWIRNAERAPNVNLGDNVRTKIQQFLLMNRFKKKVLRIVADNLPNEEIAAIVQMFQTMDADKNGHLTFEELRDGLKKIGQVVPDGDVKMLMDAADTDGNGMLSCDEFVTLSIHLKRMGCDEHLQEAFKYFDKNGNGFIELDELKVALCDDKLGHANGNDQWIKDIFFDVDLNKDGRISFDEFKAMMKSGTDWKMASRQYSRALLNALSIKMFKEDFGDNGPKSHSMEFPIARKRAKLLDAPKNKSMELQISKTYKPSGLRN

SEQ ID NO: 4606 - DNA, 1569 bp, Ceratopteris richardii
  CDS (1)..(1569)
atggggaactgttgcggaacagatggattcaaacatgaaaggcctcttcctgcccacccaaatcgtcaaggagaagacaaaaccggtgcgccgaaggtaatttcgcacacaaagctctcgtcatgtggtgagcagagcgtcaatgagaagtatcaccttggaagagagcttggtcgtggtgaatttggcatcacttacttatgcacagatcgggagactgacgaagtgctagcatgtaaatctatttctaaagggaagcttaggacacccatagacattgaagatgttcgaagagaggtggatattatgagacatcttcctaaacatccaaacattgtgactttggaaggggtgtatgaggatgagaatgcagtgcatcttgtcatggaactatgtgaaggtggtgaattgttcgatcgcattgtagcaagaggtcactacagcgagagagctgcagctgcggtcatgcgtaccattcttgaagttgtacaggtttgccataggcatggtgtcatgcaccgcgaccttaagccagaaaattttctgtttgcaaacaagaaagaaaattcgcccttaaaggctattgattttggattatccatcttcttcaaacctggggagaagtttaccgaaatagtaggaagtccatactatatggcacctgaggtactgaaaagaagttatgggccagaagttgatatatggagtgcaggagttatactttacattcttttatgcgggagtccccccttttgggctgagaccgaacaattagtagcccaggccatcttacgtggtaatgtggacttcaacagagatccttggccaaatgtttcagaaaatgctaaggcgctagtgcggcaaatgcttgaaccagatccaagcaaaagattgacagctcaacaagtccttgatcattcgtggcttgtgaatgcaagaaaagctccagatgtccctcttggtgatgctgtttgtgctcgactcaaacagttctctgctatgaacaaactgaagaaaagggctttaagagtgattgcagagctcttgacaggtgaagaagttgagggcatcagagctatgtttaacatgatggatgtagagaggactggttctcttacgtttgggcaattgaaagcagggctttataagcttggttcgcagctccctgaatctgaaatccaacaattaatggaagctgctgatgtgaatgggaatggaactctcgactatggtgaatttgttgctatcactgtacatcttcaaaggatggacaatgatgagtgcctaaggaaagcttttaattttttcgatctaaatggtgatggattcatagaccgtagtgaactgcatgaaatgctggaagctgatcttggggaagtaggcactgacataattgatgacataatccaagaggttgacattgataaggatggaaggataagttatgatgagtttgcaagcatgatgagaactggcacagactggagaaaagtatctagaaatttctcgagggagagatatgcgagcttgagcattaagctgatgcaggaagggtcattaaaactgtag

SEQ ID NO: 4607 - protein, 522 aa, Ceratopteris richardii
MGNCCGTDGFKHERPLPAHPNRQGEDKTGAPKVISHTKLSSCGEQSVNEKYHLGRELGRGEFGITYLCTDRETDEVLACKSISKGKLRTPIDIEDVRREVDIMRHLPKHPNIVTLEGVYEDENAVHLVMELCEGGELFDRIVARGHYSERAAAAVMRTILEVVQVCHRHGVMHRDLKPENFLFANKKENSPLKAIDFGLSIFFKPGEKFTEIVGSPYYMAPEVLKRSYGPEVDIWSAGVILYILLCGSPPFWAETEQLVAQAILRGNVDFNRDPWPNVSENAKALVRQMLEPDPSKRLTAQQVLDHSWLVNARKAPDVPLGDAVCARLKQFSAMNKLKKRALRVIAELLTGEEVEGIRAMFNMMDVERTGSLTFGQLKAGLYKLGSQLPESEIQQLMEAADVNGNGTLDYGEFVAITVHLQRMDNDECLRKAFNFFDLNGDGFIDRSELHEMLEADLGEVGTDIIDDIIQEVDIDKDGRISYDEFASMMRTGTDWRKVSRNFSRERYASLSIKLMQEGSLKL

SEQ ID NO: 4608 - DNA, 1629 bp, Oryza sativa
  CDS (1)..(1629)
atggggaatcagtgccagaacgggactcttgggagtgattaccacaatcggttcccaagggagcatgccgttgggtacgttcagggggatagctacttggacttgaagaagttcgatgatacttggcctgaggtgaacaacttcaagcctactgctgctagtattctcaggcgggggttggatcctacatctatcaatgtccttgggcggaagacagcggacctaagggagcattatatcattggtcggaagcttggtcagggccagtttggcacaacttacctctgtaccgagatcaatacagggtgtgagtatgcttgcaagaccatcccaaagcgcaagctcatcaccaaggaggatgtagaagatgtgcgccgtgagattcagataatgcaccatttgtcgggccacaagaatgttgttgcaatcaaggatgtctatgaggatgggcaagcggtgcacattgtgatggagccctgcgctggtggggagctctttgacaggattcaggagaaggggcattacagcgagcggaaggctgcagagcttataagaataattgtcagcattgtggctatgtgccattcgctcggggtgatgcaccgtgatcttaagccagaaaatttcctccttttggataaagatgatgatctgtcaataaaggcaatagattttggtctatccgtgttcttcaaaccaggtcaggttttcactgagctggttgggagtccatattatgttgctcctgaggtatggcacaaacgttatggaccagaatctgatgtgtggtcagctggagtgatactttacgttttgctgagtggagtgccaccattttgggcagagacacaacaaggaatatttgatgcagttctgaagggtcacattgattttcaatctgatccatggccaaagatatctgacagtgcaaaggatcttataagaaaaatgctctctcattgcccttcggagcgtttgaaggcccatgaagtgctaaggcatccttggatctgtgaaaatggagttgccactgatcaagctctggatcccagtgttatctctcggctcaaacaattctctgcaatgaacaagttaaagaagttggctctgagagtgatagctgagcgtctttcagaggaggagattgctgggttaagagaaatgttcaaggcagtggacacaaaaaatagaggtgtaatcactttcggtgagcttagagaaggtttaagaagatttggcgctgaatttaaggatacagagattggtgatataatggaagcggcacacaacgacaataatgtaacaatccattatgaagaatttattgctgcaactctacctcttaacaagatagaacgtgaggagcacctgctggcagcttttacatattttgacaaagatgggagtggttatatcacagttgacaagcttcaacgagcttgtggagaacataacatggaggattcactccttgaagagattatttcagaggttgatcaaaacaatgacggccaaattgactacgccgaatttgtagccatgatgcaaggcagcaacgttggactagggtggcaaacaatggaaagcagtttgaatgtagcattaagagacgcacctcaagtacattga

SEQ ID NO: 4609 - protein, 542 aa, Oryza sativa
MGNQCQNGTLGSDYHNRFPREHAVGYVQGDSYLDLKKFDDTWPEVNNFKPTAASILRRGLDPTSINVLGRKTADLREHYIIGRKLGQGQFGTTYLCTEINTGCEYACKTIPKRKLITKEDVEDVRREIQIMHHLSGHKNVVAIKDVYEDGQAVHIVMEPCAGGELFDRIQEKGHYSERKAAELIRIIVSIVAMCHSLGVMHRDLKPENFLLLDKDDDLSIKAIDFGLSVFFKPGQVFTELVGSPYYVAPEVWHKRYGPESDVWSAGVILYVLLSGVPPFWAETQQGIFDAVLKGHIDFQSDPWPKISDSAKDLIRKMLSHCPSERLKAHEVLRHPWICENGVATDQALDPSVISRLKQFSAMNKLKKLALRVIAERLSEEEIAGLREMFKAVDTKNRGVITFGELREGLRRFGAEFKDTEIGDIMEAAHNDNNVTIHYEEFIAATLPLNKIEREEHLLAAFTYFDKDGSGYITVDKLQRACGEHNMEDSLLEEIISEVDQNNDGQIDYAEFVAMMQGSNVGLGWQTMESSLNVALRDAPQVH

SEQ ID NO: 4610 - DNA, 1572 bp, Arabidopsis thaliana
  CDS (1)..(1572)
atgggtgtctgtttctccgccattagagtcactggtgctagcagcagtagacgaagcagtcagaccaaatccaaggctgctcctactcccatcgataccaaggcctctaccaaacgccgaaccggctccatcccctgcggcaagcgtaccgattttggctactccaaagacttccacgatcactacaccatcggcaagttgctcggccatggtcaattcggctacacctacgtcgccatccacagacccaatggagatcgcgtcgccgtcaaaagactcgataagtctaagatggttcttcctattgctgttgaggatgtcaagcgtgaggttcagattcttattgctctctctggccacgagaatgttgttcagtttcacaatgcctttgaggatgacgattacgtctatattgttatggagttgtgcgaaggaggcgaattgctggataggatattatccaagaaaggtaatcggtactccgagaaagatgcagccgttgtcgttaggcagatgctcaaagttgcaggagaatgtcatctacacgatcttgtacatagagatatgaaaccagagaactttttgttcaaatcagctcaactagattcgcctctaaaggctacggattttggtttatcggattttatcaaaccagggaaaaggttccatgacattgttggtagcgcctattatgtggctcctgaggtattaaagcgcagatcagggcctgaatcagatgtatggagcattggtgtgattacgtatatattactttgtgggaggcggcctttttgggatagaactgaagatggtatatttaaagaggttttaagaaataaacctgacttcagccgtaaaccttgggcaactataagtgacagcgccaaagattttgtgaaaaagttacttgtaaaagacccacgagcacggctaactgctgcacaagcactatcacatgcgtgggttagagaaggcgggaatgctactgatatccctgtcgacatttcagttctgaacaacttaagacaatttgtgagatacagccgtctaaagcaatttgctttaagggcgcttgctagcacacttgacgaggcagagatctctgacctcagagatcaatttgatgcgattgatgtggataaaaatggcgtcattagtcttgaagagatgagacaggcacttgccaaagatcttccttggaaactgaaagactcacgagttgctgagatccttgaagcgattgatagcaacactgatgggttagtggacttcacagagtttgtagcagcagctctacatgttcatcaactagaagaacatgattcagagaaatggcagctaaggtcaagagcagcttttgagaaattcgacctagacaaagacgggtacataacgcctgaggaacttcgaatgcacacggggttaagaggatcaatagatccactgctggatgaagcagacatagacagagatgggaaaataagcctgcatgagttcaggagacttctaagaacagcgagcataagttcacagagagcaccaagccctgcaggtcacaggaatcttcgatag

SEQ ID NO: 4611 - protein, 523 aa, Arabidopsis thaliana
MGVCFSAIRVTGASSSRRSSQTKSKAAPTPIDTKASTKRRTGSIPCGKRTDFGYSKDFHDHYTIGKLLGHGQFGYTYVAIHRPNGDRVAVKRLDKSKMVLPIAVEDVKREVQILIALSGHENVVQFHNAFEDDDYVYIVMELCEGGELLDRILSKKGNRYSEKDAAVVVRQMLKVAGECHLHDLVHRDMKPENFLFKSAQLDSPLKATDFGLSDFIKPGKRFHDIVGSAYYVAPEVLKRRSGPESDVWSIGVITYILLCGRRPFWDRTEDGIFKEVLRNKPDFSRKPWATISDSAKDFVKKLLVKDPRARLTAAQALSHAWVREGGNATDIPVDISVLNNLRQFVRYSRLKQFALRALASTLDEAEISDLRDQFDAIDVDKNGVISLEEMRQALAKDLPWKLKDSRVAEILEAIDSNTDGLVDFTEFVAAALHVHQLEEHDSEKWQLRSRAAFEKFDLDKDGYITPEELRMHTGLRGSIDPLLDEADIDRDGKISLHEFRRLLRTASISSQRAPSPAGHRNLR

SEQ ID NO: 4612 - DNA, 1677 bp, Cucurbita maxima
  CDS (1)..(1677)
atgggcaatacctgccgtggatctttcaaagggaatatatttcagggatacagccagcccgaggagagctcaaccccaaattttaagcgcaacatcaacggttcctctgaccattccccttccagcatcaacactaacaatctaatttcccaagcctttgctgaagagaacaaaaccaaatcaaaggacaacgattgcaagaaagactacacaatgaggaaaagcgccgagaatcaagcctattatgttttgggtcataagactgccaatattcgtgatctgtatacactcggtcgcaagttaggacaaggacagtttggaactacttatttatgcactgagattatgactggcatcgagtatgcttgtaagtctatctccaagaggaagttgattgcgaaggaggatgtggaggacgttcggcgggagattcagatcatgcaccatttggcaggtcataagaatattgttaccatcaagggtgcttatgaagattctttgtatgttcatattgttatggagctttgtagtggcggtgagttgttcgataggatcatccaaagggggcattacagtgagagaaaagctgctgaattgaccaggattattgttggtgttgttgagacttgccattcgcttggagttatgcatagagatttgaagccagaaaatttcttgttggttaataaggatgatgacttctctcttaaagctattgattttggcctctctgttttcttcaaaccaggtcaaatcttcactgatgttgttggaagcccatactatgttgctccagaggtactgctcaagcattatgggccagcagcggacgtgtggactgcaggagttatactgtatatattgctaagtggcgtgccaccgttttgggcagaaactcaacaaggaatatttgatgctgtgcttaagggacatatcgacttcgactctgacccttggcccctaatatctgacagtgcaaaggatctaataaggaagatgctatgttctcgaccatcagatcggttgactgcacatgaagtattatgccacccttggatttgcgaaaatggagttgctcctgatagggctctcgatccagctgtactttctcgactcaaacaattctctgcaatgaacaagttaaagaagatggcattacgagtgattgctgaaagcctttccgaagaggagattgctggcctaagagaaatgtttacagctatggacactgataacagtggtgcaattacgtttgatgaacttaaagctggtttgagaagatatggttcaaccttgaaagataccgaaatacgtgacctcatggaagcggctgatattgacaatagtgggactatagattatggggagtttattgctgcaaccattcatctcaacaaactagagcgtgaagaacaccttgttgcagcgtttagatactttgacaaagatggaagtggttacatcacagtagatgaactgcagcaagcttgtgcagaacataatatgactgacgcgtaccttgaggatataatcagagaagttgatcaagataatgatggaaggattgattatagcgagtttgttgccatgatgcagaaaggcaatgcaggaattggaagacgaactatgagaaacagtttgaatttgagcatgagagacggacctggtgctctttag

SEQ ID NO: 4613 - protein, 558 aa, Cucurbita maxima
MGNTCRGSFKGNIFQGYSQPEESSTPNFKRNINGSSDHSPSSINTNNLISQAFAEENKTKSKDNDCKKDYTMRKSAENQAYYVLGHKTANIRDLYTLGRKLGQGQFGTTYLCTEIMTGIEYACKSISKRKLIAKEDVEDVRREIQIMHHLAGHKNIVTIKGAYEDSLYVHIVMELCSGGELFDRIIQRGHYSERKAAELTRIIVGVVETCHSLGVMHRDLKPENFLLVNKDDDFSLKAIDFGLSVFFKPGQIFTDVVGSPYYVAPEVLLKHYGPAADVWTAGVILYILLSGVPPFWAETQQGIFDAVLKGHIDFDSDPWPLISDSAKDLIRKMLCSRPSDRLTAHEVLCHPWICENGVAPDRALDPAVLSRLKQFSAMNKLKKMALRVIAESLSEEEIAGLREMFTAMDTDNSGAITFDELKAGLRRYGSTLKDTEIRDLMEAADIDNSGTIDYGEFIAATIHLNKLEREEHLVAAFRYFDKDGSGYITVDELQQACAEHNMTDAYLEDIIREVDQDNDGRIDYSEFVAMMQKGNAGIGRRTMRNSLNLSMRDGPGAL

SEQ ID NO: 4614 - DNA, 1716 bp, Cucurbita maxima
  CDS (1)..(1716)
atgggcaatacctgccgtggatctttcaaagggaatatatttcagggctacagccagcccgaggacagctcaacactctattctaagcgcaataacagcagttcttcagcccgatcgaattctgatatttcccctaccagtataaacactcacaatttaattgcacaagagttttccaaagagaacaagacgaaatccaaggataacgattacaatcaagccttcttaagccccaccaagaaagacttcacaatgaggaaaagcgctgagaatcaagcctattatgttttgggtcataagactgcaaacattcgagatctctatacgctcggtcggaaattaggacagggacagtttggaactacttatttgtgcactgagattaccactggcattgagtatgcttgtaagtctatctcgaagaggaagttgattgcgaaggaggatgtcgaggacgttcgacgggagattcagatcatgcaccatttggcaggtcataagaatattgtaaccatcaagggtgcttatgaagattctttgtatgttcatattgtaatggagctttgtagcggcggggagttgttcgacaggatcatccataggggacattacagtgagaggaaagctgctgagttaaccaggattattgtcggggttgtcgagacttgccattcgcttggagttatgcatagagatttgaagccagagaatttcttgttggttaacaaggatgatgacttctctcttaaagctattgattttggcctctctgttttcttcaaaccaggtcaaattttcactgatgttgttggaaggccatactatgttgctccagaggtacttcttaagcactatggaccggcagcggacgtgtggactgcaggagttatcttgtatatattgctgagtggtgtgccaccattttgggcagaaactcaacaaggaatatttgatgctgtgctgaagggacatatcgacttcgactcagacccttggcccctaatatctgacagtgcaaaggatattatcagaaagatgctatgttctcgaccatcagatcgtttgactgctcatgaagtattatgtcatccttggatttgcgaaaatggggttgctcctgatagggctctcgatcctgccgtactttctcgactcaaacaattctctgcaatgaataagttaaagaagatggcattacgagtgattgctgaaagcctctctgaagaggagattgctggccttagagaaatgtttacagctatggacactgataacagtggcgcaattacctttgatgaactcaaagctggtttgagaagatatggttcgaccttgaaagatattgaaatacgcgaccttatggatgcggctgacattgacaatagtgggactatcgactatggagaatttattgctgcaaccattcatctcaacaaactagagcgtgaagaacaccttgttgctgcatttcgatactttgacaaagatggaagtggttacatcacagttgatgagctgcagcaagcttgtgcagaacataatatgaccgacgcatacctcgaggacgtaatcagagaagttgaccaagataatgatggaaggatcgattatggtgagtttgttgccatgatgcagaaaggcaatgcaggagttggaagacgaactatgagaaacagtttgaatttgagcatgagagacggacccggtgctctttag

SEQ ID NO: 4615 - protein, 571 aa, Cucurbita maxima
MGNTCRGSFKGNIFQGYSQPEDSSTLYSKRNNSSSSARSNSDISPTSINTHNLIAQEFSKENKTKSKDNDYNQAFLSPTKKDFTMRKSAENQAYYVLGHKTANIRDLYTLGRKLGQGQFGTTYLCTEITTGIEYACKSISKRKLIAKEDVEDVRREIQIMHHLAGHKNIVTIKGAYEDSLYVHIVMELCSGGELFDRIIHRGHYSERKAAELTRIIVGVVETCHSLGVMHRDLKPENFLLVNKDDDFSLKAIDFGLSVFFKPGQIFTDVVGRPYYVAPEVLLKHYGPAADVWTAGVILYILLSGVPPFWAETQQGIFDAVLKGHIDFDSDPWPLISDSAKDIIRKMLCSRPSDRLTAHEVLCHPWICENGVAPDRALDPAVLSRLKQFSAMNKLKKMALRVIAESLSEEEIAGLREMFTAMDTDNSGAITFDELKAGLRRYGSTLKDIEIRDLMDAADIDNSGTIDYGEFIAATIHLNKLEREEHLVAAFRYFDKDGSGYITVDELQQACAEHNMTDAYLEDVIREVDQDNDGRIDYGEFVAMMQKGNAGVGRRTMRNSLNLSMRDGPGAL

SEQ ID NO: 4616 - DNA, 1656 bp, Oryza sativa subsp
  CDS (1)..(1656)
atggggaactgctgccgctcgccggccgccgcggcgcgggaggacgtcaagtcgtctcacttccccgcatcggccgggaagaagaagccccaccaggcgcggaacggcggcgtggggggaggcggcggcgggggcggcggcggcggaggaggaggaggagcggggcagaagcggctccccgtgctcggggaggaagggtgcgagctgatcggagggatcgacgacaagtacgcgctggaccgggagctcgggcggggggagttcggggtgacgtacctgtgcatggatcgggacaccaaggagctgctcgcctgcaagtccatctccaagcggaagctgaggacggcggtcgacgtggaggacgtgcgccgggaggtcgccatcatgcgccacctccccaagagcgccagcatcgtgtcgctgcgggaggcgtgcgaggacgagggcgccgtgcacctcgtcatggagctctgcgaaggcggggagctcttcgaccgcatcgtcgcgcggggccactacacggagcgcgccgccgccaatgtcacccgcaccatcgtggaggtcgtccagctctgccaccgccacggcgttatccaccgggacctcaagcccgagaacttcctcttcgccaacaagaaggagaactcgccgctcaaggccatcgatttcggcctctccatcttcttcaagcccggtgagaagttttctgaaattgtgggaagcccatattacatggctccagaggtattgaagagaaactatggtccggaaatagatatttggagtgcaggagttatcttgtatattttgttatgtggagttcctccattttgggctgagactgagcaaggggtggcacaagccattcttcgtggaaatatcgatttcaaacgcgaaccctggccaaatgtttcagaaaatgctaaagatttggttcgacgcatgttggagcctgatccaaaactcaggttaactgcaaagcaagttcttgaacatccatggcttcaaaatgctaagaaagctccaaatgttcctcttggagatattgtgaagtcaaggctcaaacaattttctagaatgaatagattcaaaagaagagcactaagggtcattgccgatcatttatctgctgaggaagttgaggacataaaggagatgttcaaggctatggacactgataacgatggcattgtatcttatgaagaattaaagagcgggatagcaaaatttggttctcatctggcagaatcggaagtgcagatgcttatcgaagctgtggatacaaatggtaaggatgctctagattatggtgaatttttggctgtctctcttcatttgcaaaggatggcaaatgatgagcacctccggcgagccttcctattttttgacaaggatggcaatggctacatagagcctgaagagcttcgagaggctctagtggacgatggagcaggtgacagcatggaagtggtgaacgacatattgcaagaagttgacactgataaggatggcaagattagctatgacgaatttgtagcaatgatgaagacgggcacagattggagaaaggcgtcccggcattactctagaggaagattcaacagccttagcatgaagcttataaaggatgggtccgtaaaactggtcaatgagtga

SEQ ID NO: 4617 - protein, 551 aa, Oryza sativa subsp
MGNCCRSPAAAAREDVKSSHFPASAGKKKPHQARNGGVGGGGGGGGGGGGGGGAGQKRLPVLGEEGCELIGGIDDKYALDRELGRGEFGVTYLCMDRDTKELLACKSISKRKLRTAVDVEDVRREVAIMRHLPKSASIVSLREACEDEGAVHLVMELCEGGELFDRIVARGHYTERAAANVTRTIVEVVQLCHRHGVIHRDLKPENFLFANKKENSPLKAIDFGLSIFFKPGEKFSEIVGSPYYMAPEVLKRNYGPEIDIWSAGVILYILLCGVPPFWAETEQGVAQAILRGNIDFKREPWPNVSENAKDLVRRMLEPDPKLRLTAKQVLEHPWLQNAKKAPNVPLGDIVKSRLKQFSRMNRFKRRALRVIADHLSAEEVEDIKEMFKAMDTDNDGIVSYEELKSGIAKFGSHLAESEVQMLIEAVDTNGKDALDYGEFLAVSLHLQRMANDEHLRRAFLFFDKDGNGYIEPEELREALVDDGAGDSMEVVNDILQEVDTDKDGKISYDEFVAMMKTGTDWRKASRHYSRGRFNSLSMKLIKDGSVKLVNE

SEQ ID NO: 4618 - DNA, 1662 bp, Solanum lycopersicum
  CDS (1)..(1662)
atgggtggttgttttagcaagaagtatacccaacaagatgctaatgggcatagggcaggaagaagagttaatcaagcatatcaaaaaccaccacaaccccagccagaaaggccatatcagcctcagccccagcaggaaaggccatatcagccaccgccacagccagcatatcagccaccgccacagccaaagccacaacctcagccccaccctgttcctgttactgtgcagtctggacagccccaagaccaaatgcaaggaccccatatgaataacatattgggaaagccttttgaggaaattagaaagctctatacacttgggaaagaattgggtaggggtcagtttggagtgacttactattgtactgagaactcaactgggaacccttatgcttgcaagtccatacttaagaggaagcttgtaagcaagaatgatagggaggatatgaagagggaaattcagattatgcagcatttgagtgggcagccaaacattgtggaattcaagggtgcttatgaagataggcagtcagtacaccttgtgatggaactttgtgctggaggagagttgtttgacaggattatcgcccgtggatattactcagagaaggatgctgctgagattattagacagattgtaaatgttgttaacatttgccatttcatgggtgtcatgcatagggatctcaagccagagaatttcttactgactagtaaggatgaaaatgctatgttgaaggcaactgattttggactttctgtcttcattgaagaagggaaggtgtaccgtgatatagttggtagtgcatattatgttgcccctgaagtgttgcggcgtagttatgggaaggaagcagatgtatggagtgcaggtgttattttgtatattctgctcagtggtgtacctccattttgggctgaaactgaaaagggaatatttaataccatactaaaaggagaaattgacttccaaagtgatccatggccatcaatatcaaatagtgccaaggaccttattcggaaaatgctaacgcaggagccaaggaagagaattacttccgcgcaagttcttgaacatccatggcttcgacttggagaagcatcagataagccaatagacagtgcagtcctgtccagaatgaagcagttcagagcaatgaacaagctcaaaaaactcgcattgaaggtcattgcggaaaatttatctgaagaagaaatcaagggtctgaaagctatgtttcacaacattgatacggacaatagtggcacaatcacttatgaagaactgaagtcgggattggctcggcttggatcaaagctaacggagactgaagtcaagcaactcatggaagctgctgatgtggatggaaatggatcaattgattacattgagtttattactgcaacgatgcatagacatcggctagaaagggatgagcatctttttaaagcttttcagcattttgacaaggaccatagtggattcatcacgcgagatgaattggaaaacgctatgaaggaatatggtatgggtgatgaggccaccatcaaggagataatcgcagaggtggacactgacaatgacggtaggatcaattacgaggagttctgtgctatgatgagaagtggaacaacacaaccacaacaaaagcttttctag

SEQ ID NO: 4619 - protein, 553 aa, Solanum lycopersicum
MGGCFSKKYTQQDANGHRAGRRVNQAYQKPPQPQPERPYQPQPQQERPYQPPPQPAYQPPPQPKPQPQPHPVPVTVQSGQPQDQMQGPHMNNILGKPFEEIRKLYTLGKELGRGQFGVTYYCTENSTGNPYACKSILKRKLVSKNDREDMKREIQIMQHLSGQPNIVEFKGAYEDRQSVHLVMELCAGGELFDRIIARGYYSEKDAAEIIRQIVNVVNICHFMGVMHRDLKPENFLLTSKDENAMLKATDFGLSVFIEEGKVYRDIVGSAYYVAPEVLRRSYGKEADVWSAGVILYILLSGVPPFWAETEKGIFNTILKGEIDFQSDPWPSISNSAKDLIRKMLTQEPRKRITSAQVLEHPWLRLGEASDKPIDSAVLSRMKQFRAMNKLKKLALKVIAENLSEEEIKGLKAMFHNIDTDNSGTITYEELKSGLARLGSKLTETEVKQLMEAADVDGNGSIDYIEFITATMHRHRLERDEHLFKAFQHFDKDHSGFITRDELENAMKEYGMGDEATIKEIIAEVDTDNDGRINYEEFCAMMRSGTTQPQQKLF

SEQ ID NO: 4620 - DNA, 1797 bp, Solanum lycopersicum
  CDS (1)..(1797)
atggggcagtgttgcagtaagggtgtttctggtgaaaatggtggtagcgttgttgctatcggagatggaaactctgcggtatctaccaacaatcgccctaaaccaccaccttcaccggtacgtcaatcagtcgggaatgggatgagttacaccaacaacagtacgccagctcactcatttacagccagtccgtttcagagcccgtatcctgctggaatagctccatcgccatctccggttggaacgccgagaaggaaattcaagtggccatttccaccgccgtcgccggcgaaacctatactatcagcgatctttaagcgtcagggagggacgtcggtaaagccgaaagaagggccaataccggaagatgaaggtggtgaaggcgagagacagcttgataaaagcttcggctatccaaaaaatttgacatcaaagtatgaattgggaaaggaggtgggtcgagggcatttcggccatacttgttgggcaaaaggtaaaaaaggcgaactcaaaaatcagccagtggctgtgaagatcatttccaaagctaagatgacaaccgctatttctatcgaagatgttcgaagggaggtgaagatattgaaagccttatctggacatcagaatcttgtcaagttttatgatgcatttgaggatgccaataatgtctacatagtaatggagttatgtgaaggcggggaactattggacagaattctatcaagaggtgggagatacacagaggaggatgccaaaagtattgtggttcaaatactaaatgttgtcgccttttgtcatcttcaaggtgtggtgcaccgcgatctgaagcctgagaactttctttttgcaaagaaagatgaagattcaccaatgaaggtgattgattttggtctatcagatttcattaaaccagatcagcgtcttaacgatattgttggcagtgcatattatgttgcacctgaagtacttcataggtcatatagcattgaagcagatatgtggagtattggtgtgataacttatatcttgttatgtggaagtagacctttctgggcacgtacagagtctggcattttccgttctgtgttacgagctgatcctaattttgaggactcgccttggcctgcagtgtcagcagaggccagagattttgtgaaaaggcttttgaataaagaccataggaagagaatgactgcttctcaagcactgactcatccatggttaaggactgaaaatccttttgtacccttagacatattgatctttaaattagtcaagtcttatattcgaacatcacccttgaaacgtgcagcactgaaggctctttcaaaagcattgacagaagaagaattaatatacctcaaggctcaattcaatttattggaaccgaaagctggttttgtgtcactcgataattttaggatggcacttatgaaacaaacgactgatgccatgagggaggccagagttcttgacatcataaatttgctggaaccattatcttataagcaaatggattttgaagagttctgtgctgctgcaattagtacatatcagcttgaggctcttgaaaactgggaacatattgctagtgccgctttcaattattttgagcaagaaggaaaccgtgtcatttctgttgaggaattagcacaggaaatgaatttgggccctacggcttatgcttttctcaaggattggatcagaccatccgataggaaattgagtttccttgggtataccaagtttttgcatggtgtgacgatgcgaagttcaagcacaagacatcatcgataa

SEQ ID NO: 4621 - protein, 598 aa, Solanum lycopersicum
MGQCCSKGVSGENGGSVVAIGDGNSAVSTNNRPKPPPSPVRQSVGNGMSYTNNSTPAHSFTASPFQSPYPAGIAPSPSPVGTPRRKFKWPFPPPSPAKPILSAIFKRQGGTSVKPKEGPIPEDEGGEGERQLDKSFGYPKNLTSKYELGKEVGRGHFGHTCWAKGKKGELKNQPVAVKIISKAKMTTAISIEDVRREVKILKALSGHQNLVKFYDAFEDANNVYIVMELCEGGELLDRILSRGGRYTEEDAKSIVVQILNVVAFCHLQGVVHRDLKPENFLFAKKDEDSPMKVIDFGLSDFIKPDQRLNDIVGSAYYVAPEVLHRSYSIEADMWSIGVITYILLCGSRPFWARTESGIFRSVLRADPNFEDSPWPAVSAEARDFVKRLLNKDHRKRMTASQALTHPWLRTENPFVPLDILIFKLVKSYIRTSPLKRAALKALSKALTEEELIYLKAQFNLLEPKAGFVSLDNFRMALMKQTTDAMREARVLDIINLLEPLSYKQMDFEEFCAAAISTYQLEALENWEHIASAAFNYFEQEGNRVISVEELAQEMNLGPTAYAFLKDWIRPSDRKLSFLGYTKFLHGVTMRSSSTRHHR

SEQ ID NO: 4622 - DNA, 1587 bp, Arabidopsis thaliana
  CDS (1)..(1587)
atgggaaattgttgctctcacggacgggactcagccgataacggagacgcattggaaaacggagcttccgcttcaaatgctgccaattcgactggtccaaccgcggaagcttctgtaccacaatcaaaacatgcacctccttctcctcctcctgcaaccaaacaaggccctataggccctgtcttaggtcgacccatggaagatgtaaaagcttcatattctttagggaaagagctcgggcgaggccaatttggtgtcacacacctctgcacacagaagtcaacaggtcatcaatttgcttgcaagacgattgcaaaaagaaagcttgtaaacaaggaagacattgaggatgtaagaagagaagtgcagataatgcatcacttgactggtcaaccaaacattgtggagcttaaaggggcttatgaggataagcattccgtgcatttggttatggagctttgcgcaggtggagagttgttcgataggattattgctaaaggacattactcggagagagcagctgcttcgttgctaagaacgattgttcagattgtgcatacttgccattccatgggggtgattcacagggatttgaagccagagaactttctcttgctcaacaaagatgagaattctcctctcaaagctactgactttgggttgtcggttttctacaagccaggagaggtattcaaggatattgtggggagtgcttattacatcgcacctgaggttttgaaaagaaagtatggaccagaggcagatatttggagtattggtgtcatgttgtatatcctcttatgtggtgtcccgccattctgggctgagtcggagaacgggatattcaacgcaatccttaggggacatgttgatttctcaagtgatccatggccatccatctcgcctcaggcaaaggatcttgttaagaagatgctcaactctgatccaaagcaaagactaactgctgctcaagttctcaaccatccatggatcaaggaggatggagaggcaccagatgttcctcttgataatgcggtgatgtccaggctcaaacaattcaaagcaatgaacaatttcaagaaagttgcattacgggtgatagcaggctgcttatcagaggaagagatcatggggttgaaggagatgtttaaaggtatggatactgatagtagtggaacaattacactcgaggagttaagacaaggacttgctaagcaaggtacaaggttgtcagaatatgaagttcagcagttaatggaagctgctgatgctgatggtaatggaacaatagactatggcgagtttatcgcagccacaatgcatatcaacagacttgacagagaagaacatctttactcagccttccaacactttgacaaagacaacagtggatatatcacaatggaagagctagagcaagccctacgggagtttggcatgaatgatggcagagacattaaggagatcatttccgaggttgatggagacaatgatggtcggataaactatgatgaatttgtggcaatgatgagaaaaggaaacccggatccaatcccaaagaagcggcgtgaactttcattcaaatga

SEQ ID NO: 4623 - protein, 528 aa, Arabidopsis thaliana
MGNCCSHGRDSADNGDALENGASASNAANSTGPTAEASVPQSKHAPPSPPPATKQGPIGPVLGRPMEDVKASYSLGKELGRGQFGVTHLCTQKSTGHQFACKTIAKRKLVNKEDIEDVRREVQIMHHLTGQPNIVELKGAYEDKHSVHLVMELCAGGELFDRIIAKGHYSERAAASLLRTIVQIVHTCHSMGVIHRDLKPENFLLLNKDENSPLKATDFGLSVFYKPGEVFKDIVGSAYYIAPEVLKRKYGPEADIWSIGVMLYILLCGVPPFWAESENGIFNAILRGHVDFSSDPWPSISPQAKDLVKKMLNSDPKQRLTAAQVLNHPWIKEDGEAPDVPLDNAVMSRLKQFKAMNNFKKVALRVIAGCLSEEEIMGLKEMFKGMDTDSSGTITLEELRQGLAKQGTRLSEYEVQQLMEAADADGNGTIDYGEFIAATMHINRLDREEHLYSAFQHFDKDNSGYITMEELEQALREFGMNDGRDIKEIISEVDGDNDGRINYDEFVAMMRKGNPDPIPKKRRELSFK

SEQ ID NO: 4624 - DNA, 1788 bp, Arabidopsis thaliana
  CDS (1)..(1788)
atggggcaatgttacgggaaggttaatcagagtaagcaaaatggtgaagaagaagctaacacggctacttatgttgtttccggcgacgggaatcagattcagcctctaactccggttaattacggtcgagctaagaacactccagctaggtcatcgaatccgagtccttggcctagtcctttccctcacggatcagcgagccctcttccttctggtgtttctccttctccggccagaacttccactccgaggaggtttttccgacggcctttcccgccgccttctccagccaaacacattaaggcttctttgatcaaacgtcttggagtgaagcctaaggaaggtccgatccctgaggagagaggaactgagccggagcagtcgcttgataagagctttggttatggcaagaattttggtgctaagtacgaattggggaaagaagtgggtcgagggcattttggtcatacttgttctggccgtggtaagaagggagatattaaggatcatcctattgctgtcaagatcatctccaaggctaagatgacaacagcaattgcaattgaagatgttcgcagggaggtgaagttactgaaatcattatctggacacaaatatttaatcaaatattatgatgcatgtgaggacgccaataacgtatacatagtcatggagttgtgtgatggtggagaacttttggacagaattttagcaaggggtggtaaatacccggaggatgatgcaaaggcgattgtcgtacaaattctaactgttgtttcattttgtcatctccaaggagttgtgcaccgtgacttaaagccagagaattttctatttacatcaagccgcgaagactcagacttgaaacttattgattttggtctctcagactttattagacctgatgaaagactgaatgatatagttggaagtgcctactatgtcgcgcctgaagttttacacaggtcatatagccttgaggctgatatatggagtattggagttattacatatatactcttatgtggaagccgacctttttgggcacggacagaatctggaatctttcgcactgtactaagaactgaaccaaactatgatgacgtaccttggccttcttgttcatcagaaggtaaagattttgtgaaacgacttctcaacaaagactataggaagcgaatgtctgcagttcaagctttgactcatccgtggttacgggatgatagtcgtgtgattcctttagacattttgatctataagttggtcaaagcctacttgcacgcgacacctcttagacgagctgctttaaaggcgctagcaaaagcattgaccgagaacgagctagtctatcttagagcacagttcatgctgttgggaccaaacaaagatggtagcgtctctctcgaaaacttcaagacggcgcttatgcaaaacgcaacagacgcaatgagagaatcaagagttcctgaaatacttcacactatggaatctctagcgtataggaagatgtatttcgaagagttctgtgcagcagcaattagcatccatcaactagaagctgttgacgcgtgggaagagatagcaacggcaggtttccagcattttgaaaccgagggaaaccgagtgatcacaatcgaagaactagcaagggaactgaatgtgggtgcgtctgcgtatggacacttgagagattgggtaagaagcagtgacgggaagctgagttacttagggttcactaagttcttgcacggagttactcttcgtgctgctcacgcaagacctcgctag

SEQ ID NO: 4625 - protein, 595 aa, Arabidopsis thaliana
MGQCYGKVNQSKQNGEEEANTATYVVSGDGNQIQPLTPVNYGRAKNTPARSSNPSPWPSPFPHGSASPLPSGVSPSPARTSTPRRFFRRPFPPPSPAKHIKASLIKRLGVKPKEGPIPEERGTEPEQSLDKSFGYGKNFGAKYELGKEVGRGHFGHTCSGRGKKGDIKDHPIAVKIISKAKMTTAIAIEDVRREVKLLKSLSGHKYLIKYYDACEDANNVYIVMELCDGGELLDRILARGGKYPEDDAKAIVVQILTVVSFCHLQGVVHRDLKPENFLFTSSREDSDLKLIDFGLSDFIRPDERLNDIVGSAYYVAPEVLHRSYSLEADIWSIGVITYILLCGSRPFWARTESGIFRTVLRTEPNYDDVPWPSCSSEGKDFVKRLLNKDYRKRMSAVQALTHPWLRDDSRVIPLDILIYKLVKAYLHATPLRRAALKALAKALTENELVYLRAQFMLLGPNKDGSVSLENFKTALMQNATDAMRESRVPEILHTMESLAYRKMYFEEFCAAAISIHQLEAVDAWEEIATAGFQHFETEGNRVITIEELARELNVGASAYGHLRDWVRSSDGKLSYLGFTKFLHGVTLRAAHARPR

SEQ ID NO: 4626 - DNA, 1587 bp, Arabidopsis thaliana
  CDS (1)..(1587)
atgggaaactgttgcagatctcccgcagcagttgctagagaagacgtgaaatccaactattccggccacgatcacgcccgcaaagacgccgccggcggtaaaaaatcggcgccgattcgagttctaagcgatgttcccaaggaaaacatcgaggaccgttacttactcgacagagaactcggccgcggcgagtttggtgtcacttacctctgtatcgagaggtcctcgcgtgacctactcgcttgcaaatcgatctccaagaggaagcttagaactgctgtggatattgaagatgttaaaagagaagtagcgattatgaagcatttgcctaagagttcgagtattgttactttgaaagaagcttgtgaggatgataatgctgtgcatttggttatggagctttgtgaaggtggcgagcttttcgatcggattgttgcgagaggtcattatacggagcgtgctgctgctggtgttactaagactattgttgaggttgtgcagctttgtcataagcatggtgtgattcatagagatttgaagcccgagaactttttgtttgctaataagaaggagaactcgcctttgaaagctattgattttggattgtcgattttcttcaagccaggtgagaaattctctgagattgttgggagtccatattacatggcacctgaggtgcttaagcggaattatggacccgaaatagatatttggagtgctggagtgattctttatattctcttgtgtggagttcctccgttctgggcagagtcagaacagggagttgctcaggctattctgcgtggagtaattgattttaagagggaaccgtggccaaacatttctgagaccgctaagaatctagtcagacaaatgttagagcctgatccaaagcgtcggctgactgcaaagcaagtgcttgagcacccatggattcagaacgcaaagaaagctcccaatgttcctcttggagatgttgtgaagtcgaggttgaagcaattttcagtgatgaaccgattcaagagaaaagctttaagggttattgccaaatttttatctacggaagaagtagaagacatcaaagtaatgttcaacaagatggatactgataatgatggtatagtttccattgaggagttgaaagccggacttcgtgattttagtacacagctagcggaatcagaagttcagatgcttattgaagcggtggatactaaaggaaaaggaactctagactatggagaatttgtagcagtgtctctccacctgcaaaaggtagcaaacgatgagcatctccgcaaagccttctcttactttgacaaggatggaaatgggtacattttgccccaggagctttgtgacgccttaaaggaagatggaggagatgactgtgtggatgtcgccaatgatatattccaagaagttgacacagacaaggatgggagaataagctacgaagagtttgcggcaatgatgaaaacaggaacggattggagaaaggcgtctcgtcattactcaagagggagattcaatagcctaagcatcaagctaatgaaggacgggtctttgaacctaggcaacgaatag

SEQ ID NO: 4627 - protein, 528 aa, Arabidopsis thaliana
MGNCCRSPAAVAREDVKSNYSGHDHARKDAAGGKKSAPIRVLSDVPKENIEDRYLLDRELGRGEFGVTYLCIERSSRDLLACKSISKRKLRTAVDIEDVKREVAIMKHLPKSSSIVTLKEACEDDNAVHLVMELCEGGELFDRIVARGHYTERAAAGVTKTIVEVVQLCHKHGVIHRDLKPENFLFANKKENSPLKAIDFGLSIFFKPGEKFSEIVGSPYYMAPEVLKRNYGPEIDIWSAGVILYILLCGVPPFWAESEQGVAQAILRGVIDFKREPWPNISETAKNLVRQMLEPDPKRRLTAKQVLEHPWIQNAKKAPNVPLGDVVKSRLKQFSVMNRFKRKALRVIAKFLSTEEVEDIKVMFNKMDTDNDGIVSIEELKAGLRDFSTQLAESEVQMLIEAVDTKGKGTLDYGEFVAVSLHLQKVANDEHLRKAFSYFDKDGNGYILPQELCDALKEDGGDDCVDVANDIFQEVDTDKDGRISYEEFAAMMKTGTDWRKASRHYSRGRFNSLSIKLMKDGSLNLGNE

SEQ ID NO: 4628 - DNA, 1809 bp, Nicotiana tabacum
  CDS (1)..(1809)
atgggtgcttgcacttcaaaaccctcaaatttttccgtcgatgacattaccgtcgccggcgacggcgctatatttccggtgaaatctggaccgagcaatgacgacgatgttaacagccatcagacgaagaatgacgaacctagtgtgggtaaaaagtcaccctttttccccttctacagtccaagtccggcgcattatttgttctcaaagaaatctccggctacgaatgccagctctaattctactcccatgaggttcttcaaacggccgttccctccgccttctccggcgaagcacatccgttctctgttggccaggcgacatggcaccgtaaaaccgaacgagtctgcaatacccgaagggaatgaatctgaggtcggagatggaggaggcgcggggctagataagagctttggattttcgaagaattttgtgaacaagtatgagatgggagaggaagtaggaagagggcattttgggtatacttgtaaagctaagtttaagaaaggtgaagtcaagggacaagaggttgctgttaaagtcatccccaaatcaaagatgactactgcaatagccattgaggatgtgagaagggaggtgaagatattaagagctttgacgggacataataatttagtaaagttttatgatgcatatgaagaccccaacaatgtgtacatagtcatggagctatgtgaaggaggcgagcttttggatagaatactctcgagaggtgggaagtacacagaagatgatgcaaagtctgtaatgatacaaatactgaaagttgttgcattttgccatcttcaaggtgtggtgcaccgggatctcaaaccagagaacttcttattcacatctaaggatgaaaacgcacaacttaaagcaatagactttggattgtctgattttgtgaagccagatgaaagacttaatgatattgtcggtagtgcatattatgtagcgccggaggttctacacagatcttacagtacagaggctgatgtgtggagtataggtgtcatagcatatatcctgttgtgtggaagccgtcctttttgggctcgaacagaatctgggatatttagagctgtcctaaaagctgatccaagttttgacgaacagccttggcctacattatcttctgaggcaaaagactttgtgaaacgtctgttgaataaagatccccggaaaagaatgaccgcagctcaggctttgggtcacccatggataaagaatagtcacaacatggaggagcctttggatattttgatattcaaactaatgaaagcttacatgaggtcctctgctcttagaaaagctgcactacgggctttatcaaagacattgactgtagatgagctattttatctgaaggagcagtttgcgttgctggaaccaaacaaaaatggcaccataagcttcaataacattaaaacggccctgatgaaacatgcaacagatgctatgaaggaagctcgcatgcatgattttcttgcatcgcttaatgcactgcaatacaggaggatggattttgaggaattctgtgctgctgcattaagtgttcatcagcttgaggctcttgaccgatgggaacaacatgcacgttgtgcctatgaaatttttgagaaggaaggcaatagggctattatgatagaagaattagcttcggaacttggtcttagcccttctgttccagtccatgctgttctacatgactggcttaggcatactgatggaaagctcagttttcttggttttgcaaagttgttgcatggagtgtccagccgctcaattacaaaagttcaatga

SEQ ID NO: 4629 - protein, 602 aa, Nicotiana tabacum
MGACTSKPSNFSVDDITVAGDGAIFPVKSGPSNDDDVNSHQTKNDEPSVGKKSPFFPFYSPSPAHYLFSKKSPATNASSNSTPMRFFKRPFPPPSPAKHIRSLLARRHGTVKPNESAIPEGNESEVGDGGGAGLDKSFGFSKNFVNKYEMGEEVGRGHFGYTCKAKFKKGEVKGQEVAVKVIPKSKMTTAIAIEDVRREVKILRALTGHNNLVKFYDAYEDPNNVYIVMELCEGGELLDRILSRGGKYTEDDAKSVMIQILKVVAFCHLQGVVHRDLKPENFLFTSKDENAQLKAIDFGLSDFVKPDERLNDIVGSAYYVAPEVLHRSYSTEADVWSIGVIAYILLCGSRPFWARTESGIFRAVLKADPSFDEQPWPTLSSEAKDFVKRLLNKDPRKRMTAAQALGHPWIKNSHNMEEPLDILIFKLMKAYMRSSALRKAALRALSKTLTVDELFYLKEQFALLEPNKNGTISFNNIKTALMKHATDAMKEARMHDFLASLNALQYRRMDFEEFCAAALSVHQLEALDRWEQHARCAYEIFEKEGNRAIMIEELASELGLSPSVPVHAVLHDWLRHTDGKLSFLGFAKLLHGVSSRSITKVQ

SEQ ID NO: 4630 - DNA, 1719 bp, Nicotiana tabacum
  CDS (1)..(1719)
atgggtaataactgtttttctagctcaaaagttagtggttctaacagcaacaccccctccaccaccgccacagccaccaccgtgaatgtccggaggaacaaagcaaatccaccttctacatccacaattacatcaacaaaacaagaagggtctcattgcaataaacagaaagttaaagataaccacaaaagccaacaccaaaaacaacaacctagaaattctcagcaaaatgttaagaagcataataatgggaggagacagaagagtggggttattgcttgtgggaaaagaactgattttgggtatgataaagattttgataagaggtttaccattgggaagttgttgggtcatggccaatttggttatacctacgttgccacccacaagtctaatggagatcgcgtcgctgtcaagagaattgagaagaacaagatggttcttccgattgcagttgaggatgtaaaacgagaagtcaagatattgaaggccttatccggtcatgagaatgtggttcaattcaataatgcatttgaggatgataactacgtctacatagtaatggagttatgtgagggtggagaactcttggaccgcattttggccaaaaaggacagccgttatgccgagaaagatgcagcaatagttgtacgtcagatgctaaaagaagccgctcaatgtcatttacatggtttggtgcatcgtgatatgaaacctgagaattttctctttaaatcttcaaaggaggattcaccattgaaggccacagattttggtctttcagacttcataagaccagggaagaagttccaagatattgttggtagtgcatattacgtagcgccagaggtattaaagcgtagatcaggacccgaatcagatgagtggagtattggtgttattacatacattttgctctgtggccgtcgccgcttctgggataaaacagaggatggcatattcaaggaggtactaagaaacaagcctgattttcgtcgcaagccgtggccaactatcagcaacagtgctaaagattttgttaagaaattattggtgaaggatcctcgtgctagacttactgctgcccaggccctatcgcatccatgggtccgcgaaggaggtgatgcatctgagattccactggacatttctgtcttatcaaacatgcgacaatttgtcaagtacagtcgattaaaacagtttgctttacgggcattggctagcacagttgatgaggaggagctggcagatgtgcgggatcagttttctgcaattgatgtggataaaaatggtgtcattagccttgaagaaatgagacaggcccttgctaaggatcttccctggaagatgaaagagtcacgggttcttgagattcttcaagcgattgatagtaactctgatgggctacttgatttcccagagtttgtcgcagccactctacatgtccatcagttggaggagcataattctataaaatggcaggaaagatcgcaagctgcttttgaggaatttgatgttgatagagatggattcataactccagaagaacttagaatgcatactggattaaagggctccatagacccacttctagaagaagcagatatcgacaaagatgggaagataagcttgtcggaatttcgtaggcttctaagaactgcaagtataagctcgcggatggtgactagtccaactgttagaggctctcggaaaagttag

SEQ ID NO: 4631 - protein, 572 aa, Nicotiana tabacum
MGNNCFSSSKVSGSNSNTPSTTATATTVNVRRNKANPPSTSTITSTKQEGSHCNKQKVKDNHKSQHQKQQPRNSQQNVKKHNNGRRQKSGVIACGKRTDFGYDKDFDKRFTIGKLLGHGQFGYTYVATHKSNGDRVAVKRIEKNKMVLPIAVEDVKREVKILKALSGHENVVQFNNAFEDDNYVYIVMELCEGGELLDRILAKKDSRYAEKDAAIVVRQMLKEAAQCHLHGLVHRDMKPENFLFKSSKEDSPLKATDFGLSDFIRPGKKFQDIVGSAYYVAPEVLKRRSGPESDEWSIGVITYILLCGRRRFWDKTEDGIFKEVLRNKPDFRRKPWPTISNSAKDFVKKLLVKDPRARLTAAQALSHPWVREGGDASEIPLDISVLSNMRQFVKYSRLKQFALRALASTVDEEELADVRDQFSAIDVDKNGVISLEEMRQALAKDLPWKMKESRVLEILQAIDSNSDGLLDFPEFVAATLHVHQLEEHNSIKWQERSQAAFEEFDVDRDGFITPEELRMHTGLKGSIDPLLEEADIDKDGKISLSEFRRLLRTASISSRMVTSPTVRGSRKS

SEQ ID NO: 4632 - DNA, 1800 bp, Nicotiana tabacum
  CDS (1)..(1800)
atggggcactgctgcagtaagggtgttaccgccgataatgacggtcacgtcgtctccgttgttgacggaaactcatccgtctccacaaacaaccgccccaaaccatcaccgtcaccggcacgtccacagtccgtcgggaacgggacgagttacactaacaacaacacgccagctcactcatttacaaccagtccttttcagagcccataccctgccggaatacctccctccccgtctccggtcggaacggcgagaaggaaattcaagtggccatttccaccgccgtcgccggcgaagcctatattatcggcgatccttaagcggcagggaacgacgtcagcaaagccaaaagaagggccaataccggaagatgaaggtggtgaaggtgagagacagctggataaaagctttggttatccaaagaacttgacggcaaagatagagcttggaaaggaagtaggtcgagggcattttggacatacttgttgggctaaaggtaaaaaaggcgaacttaaaaatcaaccggtcgctgtgaagatcatttcaaaagctaagatgacaacagctatatctattgaagatgttcgcagggaggtgaagatattgaaggccttgtctggacatcagaatcttgtcaagttttatgatgcctttgaggatgccaacaatgtctacatagtaatggagttatgtgaaggaggggttctattggacaggattctatcaagaggcgggagatacacagaggaggatgccaaaagtatactggttcaaatactaaatgttgtcgccttttgtcatcttcaaggtgtggtccaccgtgatctgaagccagagaacttcctttttacgaagaaagaagaggatgcaccaatgaaggttattgattttggtctatcagacttcatcagaccagatcaacgtcttaatgatattgttggcagtgcatactatgttgcacctgaagtacttcataggtcatacagtattgaagcagatatgtggagtattggtgtgataacgtatatcttattgtgtggaagtagacctttctgggcacgtacagagtcaggcatttttcgatccgtgttacgagctgatcctaattttgaggactcaccttggccttcagtgtctgcagaggccagagattttgtgaaaaggcttttgaataaagaccataggaagagaatgaccgcttctcaagcattggctcatccatggttaaggacggaaaatcctgttttacctttagacatattgatctttaaattagtcaagtcttatactcgagcctcacccttgaaacgtgcagcattgaaggctctttcaaaagcattgacagaagaagagttaatctacctcagggctcaattcaatttattggaaccgaaagatggtcgtgtgtcactcaacaattttaagatggcacttactaaacaaatgactgatgccatgagggagtcaagagtttttgacatcttaaatttgatggaaccattatcctataaaccactggattttgaagagttctgtgctgccgcaattagtacatatcagcttgaggctcttgaaaattgggaacaaattgctagtgccgcttttgagcattttgagcaagaaggaaaccgtgtcatttccgttgaggaattagcacaggaaatgaatttgggcccaactgcttatgcttttctcaaggattgtatcagaccatctgatagaaaactaagtttccttgggtataccaaatatttgcatggtgtgactattcgtggttcaagcacaagacatcatcgataa

SEQ ID NO: 4633 - protein, 599 aa, Nicotiana tabacum
MGHCCSKGVTADNDGHVVSVVDGNSSVSTNNRPKPSPSPARPQSVGNGTSYTNNNTPAHSFTTSPFQSPYPAGIPPSPSPVGTARRKFKWPFPPPSPAKPILSAILKRQGTTSAKPKEGPIPEDEGGEGERQLDKSFGYPKNLTAKIELGKEVGRGHFGHTCWAKGKKGELKNQPVAVKIISKAKMTTAISIEDVRREVKILKALSGHQNLVKFYDAFEDANNVYIVMELCEGGVLLDRILSRGGRYTEEDAKSILVQILNVVAFCHLQGVVHRDLKPENFLFTKKEEDAPMKVIDFGLSDFIRPDQRLNDIVGSAYYVAPEVLHRSYSIEADMWSIGVITYILLCGSRPFWARTESGIFRSVLRADPNFEDSPWPSVSAEARDFVKRLLNKDHRKRMTASQALAHPWLRTENPVLPLDILIFKLVKSYTRASPLKRAALKALSKALTEEELIYLRAQFNLLEPKDGRVSLNNFKMALTKQMTDAMRESRVFDILNLMEPLSYKPLDFEEFCAAAISTYQLEALENWEQIASAAFEHFEQEGNRVISVEELAQEMNLGPTAYAFLKDCIRPSDRKLSFLGYTKYLHGVTIRGSSTRHHR

SEQ ID NO: 4634 - DNA, 1788 bp, Arabidopsis thaliana
  CDS (1)..(1788)
atggggcaatgttacgggaaggttaatcagagtaagcaaaatggtgaagaagaagctaacacgactacttatgttgtttccggcgacgggaatcagattcagcctctaactccggttaattacggtcgagctaagaacactccagctaggtcatcgaatccgagtccttggcctagtcctttccctcacggatcagcgagccctcttccttctggtgtttctccttctccggccagaacttccactccgaggaggtttttccgacggcctttcccgccgccttctccagccaaacacattaaggcttctttgatcaaacgtcttggagtgaagcctaaggaaggtccgatccctgaggagagaggaactgagccggagcagtcgcttgataagagctttggttatggcaagaattttggtgctaagtacgaattggggaaagaagtgggtcgagggcattttggtcatacttgttctggccgtggtaagaagggagatattaaggatcatcctattgctgtcaagatcatctccaaggctaagatgacaacagcaattgcaattgaagatgttcgcagggaggtgaagttactgaaatcattatctggacacaaatatttaatcaaatattatgatgcatgtgaggacgccaataacgtatacatagtcatggagttgtgtgatggtggagaacttttggacagaattttagcaaggggtggtaaatacccggaggatgatgcaaaggcgattgtcgtacaaattctaactgttgtttcattttgtcatctccaaggagttgtgcaccgtgacttaaagccagagaattttctatttacatcaagcgcggaagactcagacttgaaacttattgattttggtctctcagactttattagacctgatgaaagactgaatgatatagttggaagtgcctactatgtcgcgcctgaagttttacacaggtcatatagccttgaggctgatatatggagtattggagttattacatatatactcttatgtggaagccgacctttttgggcacggacagaatctggaatctttcgcactgtactaagaactgaaccaaactatgatgacgtaccttggccttcttgttcatcagaaggtaaagattttgtgaaacgacttctcaacaaagactataggaagcgaatgtctgcagttcaagctttgactcatccgtggttacgggatgatagtcgtgtgattcctttagacattttgatctataagttggtcaaagcctacttgcacgcgacacctcttagacgagctgctttaaaggcgctcaagaaagcattgaccgagaacgagctagtctatcttagagcacagttcatgctgttgggaccaaacaaagatggtagcgtctctctcgaaaacttcaagacggcgcttatcgaaaacgcaacagacgcaatgagagaatcaagagttcctgaaatacttcacactatggaatctctagcgtataggaagatgtatttcgaagagttctgtgcagcagcaattagcatccatcaactagaagctgttgacgcgtgggaagagatagcaacggcaggtttccagcattttgaaaccgagggaaaccgagtgatcacaatcgaagaactagcaagggaactgaatgtgggtgcgtctgcgtatggacacttgagagattgggtaagaagcagtgacgggaagctgagttacttagggttcactaagttcttgcacggagttactcttcgtgctgctcacgcaagacctcgctag

SEQ ID NO: 4635 - protein, 595 aa, Arabidopsis thaliana
MGQCYGKVNQSKQNGEEEANTTTYVVSGDGNQIQPLTPVNYGRAKNTPARSSNPSPWPSPFPHGSASPLPSGVSPSPARTSTPRRFFRRPFPPPSPAKHIKASLIKRLGVKPKEGPIPEERGTEPEQSLDKSFGYGKNFGAKYELGKEVGRGHFGHTCSGRGKKGDIKDHPIAVKIISKAKMTTAIAIEDVRREVKLLKSLSGHKYLIKYYDACEDANNVYIVMELCDGGELLDRILARGGKYPEDDAKAIVVQILTVVSFCHLQGVVHRDLKPENFLFTSSAEDSDLKLIDFGLSDFIRPDERLNDIVGSAYYVAPEVLHRSYSLEADIWSIGVITYILLCGSRPFWARTESGIFRTVLRTEPNYDDVPWPSCSSEGKDFVKRLLNKDYRKRMSAVQALTHPWLRDDSRVIPLDILIYKLVKAYLHATPLRRAALKALKKALTENELVYLRAQFMLLGPNKDGSVSLENFKTALIENATDAMRESRVPEILHTMESLAYRKMYFEEFCAAAISIHQLEAVDAWEEIATAGFQHFETEGNRVITIEELARELNVGASAYGHLRDWVRSSDGKLSYLGFTKFLHGVTLRAAHARPR

SEQ ID NO: 4636 - DNA, 1491 bp, Solanum tuberosum
  CDS (1)..(1491)
atggaaccaaaaccagcaactgagcccaagaaatcatctgtttgggttcttccttacaagactcaaagccttcagagtctttacacaataggcaaaaagttaggccaaggtcaatttggaactacacatctttgtatagaaaaatcaagtggcaatctttacgcttgtaagacaatacccaaaaagaaactgatctgtaaagaagattatgaggatgtttggaaagagattcaaataatgcatcatttatctgaacacccaaatgtggtaagaataaagggtacttatgaagatgcattatatgtgcatatagttatggagctttgtgctggtggagagctttttgataggattgttgagaaaggacattatagtgaaagagaagctgctaagttgattaaaacaattgttggtgttgttgaggcttgtcattcattaggtgttatgcatagagatctcaagcccgagaatttcttgtttctcagttctgatgaggatgctgctctcaaggccactgattttggcctctctgttttctacaaaccaggtgaaacattttcagatgttgttggaagtccttattatgttgccccagaggttttatgcaagcactatggacatgaatcagatgtatggagtgcaggagttatcttgtacatattacttagtggtgttccccctttttgggcagaaactgatatgggaatatttcgtcagatactgcgaggcaaactagatcttgaatctgaaccttggcctggaatttcagatagtgccaaggatttgatacgtaaaattcttgataggaatccaaagaggaggttaactgcccatgaagttttgtgccatccatggattgtggatgacacagtggctcctgataaacctcttgactctgcagttctttcacgcctcaagcagttctcagcaatgaacaaactaaagaaaatggctttacgtgtgattgccgagaggctttcagaagaagaaatcggtggtctcaaggagctattcaaaatgttagacacagacaatagtggaacaataaccttcgaggaattaaaagagggtttgaggcgagtaggttctgaactgatggagtctgagatcaaggatcttatggatgcggcagacattgacaacaatggaacaatagactatggggaatttattgctgctactgttcatttgaacaaattggaaagggaagagaatctgttatcagccttctcttattttgacaaagatggtagtggatacataactatcgaagaacttcagcaagcctgcaaagaatttggtcttagcgagctcaatcttgatgaaattattaaagatattgatcaagataatgatggacagatagactataaggaattttctgcaatgatgaggaaaggcacaggtggagccgttggaaggaggaccataagaaacaatttgaatttaggagaagcactaggactcgtacagagtgaagaaatcttatga

SEQ ID NO: 4637 - protein, 496 aa, Solanum tuberosum
MEPKPATEPKKSSVWVLPYKTQSLQSLYTIGKKLGQGQFGTTHLCIEKSSGNLYACKTIPKKKLICKEDYEDVWKEIQIMHHLSEHPNVVRIKGTYEDALYVHIVMELCAGGELFDRIVEKGHYSEREAAKLIKTIVGVVEACHSLGVMHRDLKPENFLFLSSDEDAALKATDFGLSVFYKPGETFSDVVGSPYYVAPEVLCKHYGHESDVWSAGVILYILLSGVPPFWAETDMGIFRQILRGKLDLESEPWPGISDSAKDLIRKILDRNPKRRLTAHEVLCHPWIVDDTVAPDKPLDSAVLSRLKQFSAMNKLKKMALRVIAERLSEEEIGGLKELFKMLDTDNSGTITFEELKEGLRRVGSELMESEIKDLMDAADIDNNGTIDYGEFIAATVHLNKLEREENLLSAFSYFDKDGSGYITIEELQQACKEFGLSELNLDEIIKDIDQDNDGQIDYKEFSAMMRKGTGGAVGRRTIRNNLNLGEALGLVQSEEIL

SEQ ID NO: 4638 - DNA, 1737 bp, Solanum tuberosum
  CDS (1)..(1737)
atggggaacacttgtgtaggaccaagcatttctaaaaatgggatctttcaatcagtttcagcagcaatgtggcgatcccggtcgcccgatgacactgcttccaccactaatggtgaaagtgctagaattgaaacaccaatttctgttaaagaacctgattcacctttgccagttcaagagccaccagaacaaatgacaatgcctaagtcagaaaagaaagaagaagaaaaagaacaaccaaaaaagcccaaaaagcctgctgaaatgaagagggtgtcaagtgctggccttaggacagattctgtgttacaaaagaaaactggaaacttaaaggagtttttcagtataggaaagaaattaggacaaggtcaatttggaactacatttaaatgtgtcgaaaaggcaacagggaaggaatatgcttgcaaatcgattgctaagaggaagttgttaacagatgatgatgtggaagatgttagaagggaagtacagataatgcaccatttggcaggacatcctcatgttatatcgataaaaggtgcttatgaggatgctgtagctgttcatgtagttatggagttttgtgctgggggtgagcttttcgataggattattcaacgggggcactatacggaaagaaaagcagctgagcttactaggactattgttggggttgtagaagcttgtcattctcttggtgtcatgcatcgtgatcttaagcctgaaaattttctctttgttgatcagaaggaggattcacttctcaaagcaattgactttgggttatcgatattcttcaaaccaggcgacagatttactgatgttgttggcagcccatactatgtcgcaccagaagttctccgaaaacgttatggtcctgaagctgatgtttggagtgctggtgttattctctacatcttattaagtggagtacctcctttctgggctgaaaatgagcaaggaatatttgaacaagtcctgcacggtgatcttgacttcaagtcagacccatggccaagtatttcagaagatgcaaaagacttgatgaggagaatgctcgttcgagatccgagaagacgtttaactgcacatgaagttttatgccatccttgggtacaagttgatggtgtggctcccgataagcctctggattctgcagttctgagtagaatgaagcaattttctgcaatgaacaagctcaagaaaatggctttgagagtcattgctgaaagcctatccgaagaagaaattgctggtcttaaagaaatgttcaagatgatagacacagacaatagcggtcaaataacttttgaggagctcaaagaagggttaaaacgatttggctctaatctgaaggagaccgagatctatgatcttatgcaggcagctgacgttgataacagtggaacaattgattatggtgaatttatagctgcaacattacatatgaacaaaattgaaagacaagatcatctttttgctgctttctgttacttcgataaagatggaagtggctacatcactgcggatgagcttcaacaagcttgtgaagaatttggcattggggatgtccgcatggaagaaatgatcagagaagctgaccaagacaatgacgggcgcattgactacaatgagtttgttgctatgatgcaaaagggaaatccagtgctaggtggtggcaagaaaggtctagagcatagtttcagcattggattcagagaagcagtaaaactatag

SEQ ID NO: 4639 - protein, 578 aa, Solanum tuberosum
MGNTCVGPSISKNGIFQSVSAAMWRSRSPDDTASTTNGESARIETPISVKEPDSPLPVQEPPEQMTMPKSEKKEEEKEQPKKPKKPAEMKRVSSAGLRTDSVLQKKTGNLKEFFSIGKKLGQGQFGTTFKCVEKATGKEYACKSIAKRKLLTDDDVEDVRREVQIMHHLAGHPHVISIKGAYEDAVAVHVVMEFCAGGELFDRIIQRGHYTERKAAELTRTIVGVVEACHSLGVMHRDLKPENFLFVDQKEDSLLKAIDFGLSIFFKPGDRFTDVVGSPYYVAPEVLRKRYGPEADVWSAGVILYILLSGVPPFWAENEQGIFEQVLHGDLDFKSDPWPSISEDAKDLMRRMLVRDPRRRLTAHEVLCHPWVQVDGVAPDKPLDSAVLSRMKQFSAMNKLKKMALRVIAESLSEEEIAGLKEMFKMIDTDNSGQITFEELKEGLKRFGSNLKETEIYDLMQAADVDNSGTIDYGEFIAATLHMNKIERQDHLFAAFCYFDKDGSGYITADELQQACEEFGIGDVRMEEMIREADQDNDGRIDYNEFVAMMQKGNPVLGGGKKGLEHSFSIGFREAVKL

SEQ ID NO: 4640 - DNA, 1737 bp, Nicotiana tabacum
  CDS (1)..(1737)
atggggaacacttgtgtaggaccaagcatttctaaaaatgggatctttcaatcagtttcagcagcaatgtggcgatcccggtcgcccgatgacactgcttccaccactaatggtgaaagtgctagaattgaaacaccaatttctgttaaagaacctgattcacctttgccagttcaagagccaccagaacaaatgacaatgcctaagtcagaaaagaaagaagaagaaaaagaacaaccaaaaaagcccaaaaagcctgctgaaatgaagagggtgtcaagtgctggccttaggacagattctgtgttacaaaagaaaactggaaacttaaaggagtttttcagtataggaaagaaattaggacaaggtcaatttggaactacatttaaatgtgtcgaaaaggcaacagggaaggaatatgcttgcaaatcgattgctaagaggaagttgttaacagatgatgatgtggaagatgttagaagggaagtacagataatgcaccatttggcaggacatcctcatgttatatcgataaaaggtgcttatgaggatgctgtagctgttcatgtagttatggagttttgtgctgggggtgagcttttcgataggattattcaacgggggcactatacagaaagaaaagcagctgagcttactaggactattgttggagttgtagaagcttgtcattctcttggtgtcatgcatcgtgatcttaagcctgaaaattttctctttgttgatcagaaggaggattcacttctcaaagcaattgactttgggttatcgatattcttcaaaccaggcgacagatttactgatgttgttggcagtccatattatgttgcaccagaagttctccgaaaacgttatggtcctgaagctgatgtttggagtgctggtgtaattatctacatcttattaagtggagtacctcctttctgggctgaaaatgagcaaggaatatttgaacaagtcctgcacggtgatcttgacttcacgtcagacccatggccaagtatttcagaagatgcaaaagacttgatgaggagaatgctcgttcgagatccgagaagacgtttaactgcacatgaagttttatgccatccttgggtacaagttgatggtgtggctcccgataagcctctggattctgcagttctgagtagaatgaagcaattttctgcaatgaacaagctcaagaaaatggctttgagagtcattgctgaaagcctatccgaagaagaaattgctggtcttaaagaaatgttcaagatgatagacacagacaatagcggtcaaataacttttgaggagctcaaagatgggttaaaacgatttggctctaatctgaaggagtccgagatctatgatcttatgcaggcagctgacgttgataacagtggaacaattgattatggtgaatttatagctgcaacattacatatgaacaaaattgaaagacaagatcatctttttgctgctttctgttacttcgataaagatggaagtggctacatcactgcggatgagcttcaacaagcttgtgaagaatttggcattggggatgtccgcatggaagaaatgatcagagaagctgaccaagacaatgacgggcgcattgactacaatgagtttgttgctatgatgcaaaagggaaatccagtgctaggtggtggcaagaaaggtctagagcatagtttcagcattggattcagagaagcagtaaaactatag

SEQ ID NO: 4641 - protein, 578 aa, Nicotiana tabacum
MGNTCVGPSISKNGIFQSVSAAMWRSRSPDDTASTTNGESARIETPISVKEPDSPLPVQEPPEQMTMPKSEKKEEEKEQPKKPKKPAEMKRVSSAGLRTDSVLQKKTGNLKEFFSIGKKLGQGQFGTTFKCVEKATGKEYACKSIAKRKLLTDDDVEDVRREVQIMHHLAGHPHVISIKGAYEDAVAVHVVMEFCAGGELFDRIIQRGHYTERKAAELTRTIVGVVEACHSLGVMHRDLKPENFLFVDQKEDSLLKAIDFGLSIFFKPGDRFTDVVGSPYYVAPEVLRKRYGPEADVWSAGVIIYILLSGVPPFWAENEQGIFEQVLHGDLDFTSDPWPSISEDAKDLMRRMLVRDPRRRLTAHEVLCHPWVQVDGVAPDKPLDSAVLSRMKQFSAMNKLKKMALRVIAESLSEEEIAGLKEMFKMIDTDNSGQITFEELKDGLKRFGSNLKESEIYDLMQAADVDNSGTIDYGEFIAATLHMNKIERQDHLFAAFCYFDKDGSGYITADELQQACEEFGIGDVRMEEMIREADQDNDGRIDYNEFVAMMQKGNPVLGGGKKGLEHSFSIGFREAVKL

SEQ ID NO: 4642 - DNA, 1746 bp, Nicotiana tabacum
  CDS (1)..(1746)
atggggaacacttgtgttggaccaagtatttctaaaaatggtctttttcagtcagtttcagctgcaatgtggcgaactcgggcgccagatgattctggttccaccactaatggtgatagtgccagaggtgaaacaacagaatccggaaaagaccctgatttggttgtccaaaataagccaccagaacagataacaatgcctaagtctgagcaaaaggaagaggagccggcgaaaaaggaagagggaccggtaaagcctaagaagccggtagagatgaagagggtaggtagtgcaggccttaggactgattctgtattacagaagaaaactggcaacttaaaggagtttttcagtataggaaagaaattaggacaaggacaattcggaactacgtttaaatgtgtcgaaaaggcaacagggaaggagtacgcttgcaaatcgattgctaagaggaagttgttgacagatgatgatgtggaagatgttagaagggaagttcagataatgcaccacttggcggggcatccaaatgttatatcgataaaaggggcttatgaggatgctgtagctgttcatgtcgttatggaatattgtgctggaggtgagcttttcgataggattattcagcgggggcactatactgaaagaaaagcggctgagctcaccaggactattgttggagttctagaaacttgtcattctctgggcgtcatgcatcgtgatcttaagcctgaaaattttctttttgttaatcagaaggaggattcactactcaaaacaattgactttggattgtcaattttcttcaaaccaggtgacagatttaatgatgttgttggtagtccttactatgttgcaccagaagttctcaaaaaacgctatggtcccgaagctgatgtttggagtgctggtgtgattgtgtacattttattaagtggagtacctcctttctgggctgaaaatgagcaaggaatattcgaagaagtcctacatggtgatctcgacttctcatcagatccatggcctagtatttcagaagatgcaaaagacttagtcaggagaatgcttgttcgagatcccaaaaaacgtttaactgctcatgaagtcttgtgccatcgttgggttcaagttgatggtgtggcaccagataagcctctggattctgcagttctgagtcgaatgaaacaattttctgcaatgaacaagctcaagaaaatggctttgagagtcatcgccgaaagcctatctgaagaagaaattgctggtctgaaagaaatgttcaggatgatagatacagacaatagtggtcaaataacctttgaggagctcaaagttggattaaaaagagttggcgctaatctcaaggagtccgagatctatgatcttatgcaggcagcagatgttgataacagcggcacaattgattatggggaatttatagctgcaacattacattttaacaaaattgaaagagaagatcatctatttgctgctttctcttactttgataaagatggcagtggctacattaccgcagacgagcttcaacaagcttgtgaggaatttggtattggggatgtccatctagaagatatgataagagacgctgatcaggacaatgatggacgaattgattacaatgagttcgttgctatgatgcaaaagggaaacccggtgattggtgggggcaagaaaggtctagaacacagtttcagcaccggatttagagaggctctaagactttag

SEQ ID NO: 4643 - protein, 581 aa, Nicotiana tabacum
MGNTCVGPSISKNGLFQSVSAAMWRTRAPDDSGSTTNGDSARGETTESGKDPDLVVQNKPPEQITMPKSEQKEEEPAKKEEGPVKPKKPVEMKRVGSAGLRTDSVLQKKTGNLKEFFSIGKKLGQGQFGTTFKCVEKATGKEYACKSIAKRKLLTDDDVEDVRREVQIMHHLAGHPNVISIKGAYEDAVAVHVVMEYCAGGELFDRIIQRGHYTERKAAELTRTIVGVLETCHSLGVMHRDLKPENFLFVNQKEDSLLKTIDFGLSIFFKPGDRFNDVVGSPYYVAPEVLKKRYGPEADVWSAGVIVYILLSGVPPFWAENEQGIFEEVLHGDLDFSSDPWPSISEDAKDLVRRMLVRDPKKRLTAHEVLCHRWVQVDGVAPDKPLDSAVLSRMKQFSAMNKLKKMALRVIAESLSEEEIAGLKEMFRMIDTDNSGQITFEELKVGLKRVGANLKESEIYDLMQAADVDNSGTIDYGEFIAATLHFNKIEREDHLFAAFSYFDKDGSGYITADELQQACEEFGIGDVHLEDMIRDADQDNDGRIDYNEFVAMMQKGNPVIGGGKKGLEHSFSTGFREALRL

SEQ ID NO: 4644 - DNA, 1746 bp, Nicotiana benthamiana
  CDS (1)..(1746)
atggggaacacttgtgttgggccaagtatttctaaaattggtctttttcagtcagtttcagctgcaatgtggcgaactcggatgccggacgattctggttccaccactaatggtgatagtgccagaggtgaaacagcagaatctagtaaagatcctaatttggttgtcccaagtaagccaccagaacagataacaatgcctaagtctgatcaaaaggaagaggaaccagcgaaaaaggaagagggaccggaaaagccgaagaaaccagtacagatgaagagggtaggtagtgcaggccttaggactgattctgtattacagaagaaaactggtaacttaaaggagtttttcagtataggaaagaaattaggacaaggacaatttggaacaacatttaaatgtgtcgaaaaggcaacagggaaggagtacgcttgcaaatcgattgctaagaggaagttgttaacagatgatgatgtggaagatgttagaagggaaattcagataatgcaccacttggcggggcatccgaatgttatatcgataaaaggggcttacgaggatgctgtagccgttcatgtcgttatggaatattgtgctggaggtgagcttttcgataggattattcagcgcgggcactatacagaaagaaaagcagctgagctcaccaggactattgttggagttctagaagcttgtcattctctgggcgtaatgcatcgtgatcttaagcctgaaaattttctttttgtcaatcagaaggaggattcattactcaaaacaattgactttggattgtcaattttcttcaaaccaggtgacagatttaatgatgttgttggcagtccttactatgttgcaccagaagttctcaaaaaacgctatggtcccgaagctgatgtttggagtgctggtgtgattgtgtacattttattaagtggagtacctcctctctgggctgaaaatgagcaaggaatattcgaagaagtcctacatggtgatcttgacttctcatcagatccatggccaagtatttcagaagatgcaaaagacttggtcaggagaatgcttgttcgagatcccaaaaaacgtttaactgctcatgaagtcttgtgccatcgttgggttcaagttgatggtgtggcaccagataagcctctggattctgcagttccgagtcgaatggaacaattttctgcaatgaacaagctcaagaaaatggctttgagagtcatcgctgaaagcctatctgaagaagaaattgctggtctgaaagaaatgttcaggatgatagatactgacaatagtggtcaaataacctttgaggagcttaaagttggattaaaaagagttggcgctaatctcaaggaatctgagatctatgatcttatgcaggcagcagatgttgataacagcggcacaattgattatggggaatttatagctgcaacattacattttaacaaaattgaaagagaagatcatctatttgctgctttctcttactttgataaagattgcagtggctacattactgcagacgagcttcaacaagcttgtgaggaatttggcattggggacgtccacctggaagatatgataagagacgccgatcaggacaatgatggacgaattgattacaatgagttcgtcgctatgatgcaaaaggggaatccggtgatcggtggtggcaagaaaggtctagaacacagtttcagcaccggatttagagaggctctaagactttag

SEQ ID NO: 4645 - protein, 581 aa, Nicotiana benthamiana
MGNTCVGPSISKIGLFQSVSAAMWRTRMPDDSGSTTNGDSARGETAESSKDPNLVVPSKPPEQITMPKSDQKEEEPAKKEEGPEKPKKPVQMKRVGSAGLRTDSVLQKKTGNLKEFFSIGKKLGQGQFGTTFKCVEKATGKEYACKSIAKRKLLTDDDVEDVRREIQIMHHLAGHPNVISIKGAYEDAVAVHVVMEYCAGGELFDRIIQRGHYTERKAAELTRTIVGVLEACHSLGVMHRDLKPENFLFVNQKEDSLLKTIDFGLSIFFKPGDRFNDVVGSPYYVAPEVLKKRYGPEADVWSAGVIVYILLSGVPPLWAENEQGIFEEVLHGDLDFSSDPWPSISEDAKDLVRRMLVRDPKKRLTAHEVLCHRWVQVDGVAPDKPLDSAVPSRMEQFSAMNKLKKMALRVIAESLSEEEIAGLKEMFRMIDTDNSGQITFEELKVGLKRVGANLKESEIYDLMQAADVDNSGTIDYGEFIAATLHFNKIEREDHLFAAFSYFDKDCSGYITADELQQACEEFGIGDVHLEDMIRDADQDNDGRIDYNEFVAMMQKGNPVIGGGKKGLEHSFSTGFREALRL

SEQ ID NO: 4646 - DNA, 1590 bp, Arabidopsis thaliana
  CDS (1)..(1590)
atgggccacagacacagcaagtccaaatcctccgatccgccaccgtcctcctcctcctcttcctccggcaacgtagtccaccatgttaaacctgccggagaacgccgcggatcatccggttccggaaccgtcggatcgtcaggctccggaacaggcggatctcgttccaccacatctactcagcagaatggtcggatcttaggtcggccgatggaggaagtacggagaacctatgagtttggtcgtgagcttggtcgtggccagtttggtgtcacgtacctcgtaactcacaaagagacgaaacaacaggtcgcttgcaagtcaatccctacgcgccgccttgttcacaaagacgacattgaagatgttcgccgtgaagtccagattatgcaccatctcagcggtcaccggaacatagtggacttgaagggagcctacgaggacagacactctgtgaatctgataatggagttgtgtgaaggaggggaattgttcgataggatcatttctaaaggtctttactcagagagagctgctgcggatttgtgtaggcagatggtgatggttgtgcatagttgtcattctatgggtgtaatgcaccgagacttgaagcccgaaaactttctctttcttagtaaagatgagaactcaccattgaaagctacagactttggtctctctgtcttcttcaagccaggtgataagtttaaggatcttgttggaagtgcatactatgttgccccagaagttctaaaacggaactatggaccagaggctgatatctggagtgctggtgtgattctatacatccttctcagtggtgttccgcctttctggggagaaaatgaaacggggatctttgatgccattcttcaagggcaacttgatttttcagctgatccatggccagcactatcagatggtgccaaagatcttgtgagggaaatgttaaaatatgaccctaaagatcggcttacagctgcggaagtgctaaatcatccgtggattagagaagatggggaggcatcagacaaaccgcttgacaatgcggtgttatccaggatgaaacaattccgggcgatgaacaaactaaaaaaaatggccctgaaggttatcgctgagaacctttctgaagaagaaatcattggtcttaaagagatgttcaaatctctagacactgataacaatggaatagtcaccttggaggaattgagaaccggtctcccaaaacttggttcaaagatctctgaagctgaaataaggcagttaatggaagcagctgatatggatggagatggatcaattgattacttggagtttatatcagccacaatgcatatgaacagaatcgaacgtgaggatcacttgtacaccgcattccagttctttgacaatgacaacagcggctacataacaatggaagagctagagctagccatgaagaaatacaacatgggtgatgataaatccatcaaagagatcattgctgaagtagacaccgatcgtgacggaaaaatcaactacgaagaatttgtagcgatgatgaagaagggaaatccagaattggtgccaaaccgacgcagaatgtga

SEQ ID NO: 4647 - protein, 529 aa, Arabidopsis thaliana
MGHRHSKSKSSDPPPSSSSSSSGNVVHHVKPAGERRGSSGSGTVGSSGSGTGGSRSTTSTQQNGRILGRPMEEVRRTYEFGRELGRGQFGVTYLVTHKETKQQVACKSIPTRRLVHKDDIEDVRREVQIMHHLSGHRNIVDLKGAYEDRHSVNLIMELCEGGELFDRIISKGLYSERAAADLCRQMVMVVHSCHSMGVMHRDLKPENFLFLSKDENSPLKATDFGLSVFFKPGDKFKDLVGSAYYVAPEVLKRNYGPEADIWSAGVILYILLSGVPPFWGENETGIFDAILQGQLDFSADPWPALSDGAKDLVREMLKYDPKDRLTAAEVLNHPWIREDGEASDKPLDNAVLSRMKQFRAMNKLKKMALKVIAENLSEEEIIGLKEMFKSLDTDNNGIVTLEELRTGLPKLGSKISEAEIRQLMEAADMDGDGSIDYLEFISATMHMNRIEREDHLYTAFQFFDNDNSGYITMEELELAMKKYNMGDDKSIKEIIAEVDTDRDGKINYEEFVAMMKKGNPELVPNRRRM

SEQ ID NO: 4648 - DNA, 1548 bp, Solanum tuberosum
  CDS (1)..(1548)
atgggtatttgtgctagtaaaggtaaacccaataatgctaataatgggcaccatggatcaggatcaggaggagttccaactcatagaaatgaaattcagtatacaaaatctccagggcctgaagctcaattgcatgtgagacctccaccaagcccaaaaccagctgtaaggtatgatacaattcttggtaagccatatgaagatgttaagttgcactatactcttggtaaagaattgggtaggggtcaatttggtgttacatatctttgtactgaaattgtaactggtcaacaatatgcttgtaaatcgatatcgaaaaagaagcttgttactaaggctgataaggatgatatgaggagggagattaagattatgcagcatttgagtggacaacctaatattgttgaatttaaaggtgcttatgaggataaaggttcagtgtatcttgtgatggagttgtgtggagggggagagctattcgatcgaattatagcaaaagggcattacagtgaaagagctgctgcaacaatgtgtagggctattgtcaatgttgtgcacgtttgcaattttatgggcgtgttgcatcgtgatctcaagcctgaaaactttttgttgtctgataagagtgaaaatgctgcactaaagattactgattttgggctgtcagtattcattcaagaaggtaagtcgtacaaggatatagttgggagtgcttactatgttgcccctgaggttttaaggaggtgttatggcaaggagatagatatttggagtgcaggtgttatgctttatatactactcagtggtgtgcctccgttttgggcagaaaccgaaaagggtatatttgatgccatacttaaagggaccattgactttgaaagcaagccttggccgtctgtatcaagtagtgccaaggacctagtacagaagatgctgactaaagatccaaagaaacggattacagctgcacaagttcttgagcatccttggctgaaagaaggtggtgttgcatcagacaaaccattagagggtgctgtcctgtcaagaatgaagcaattcagagctatgaacaaactcaagaaactcgctttgaaggtcattgccgagaatctctctgccgaagaaattcacgggctcaaagcaatgttccacaatattgatactgataatagtggcactatcacttacgaagaactgaagagtggattggctaaacttgggtcaaagctcactgaggctgaagtcaagcaattgatggaagctgctgatgtagatggaaatggctcaatcgactacactgaattcatcaccgccaccatgcataagcacaggctagaaagagacgaaaatctatatactgcatttcagtatttcgataaagatggcagtgggttcattacaagagatgaactcgaggcagctatgcaagaacatggaataggcgatccatcctgtataagggaaatcatatctgaagtggacacagacaatgatggaagaatcaattatgaggaattctgtacaatgatgagaagtggagccaaataa

SEQ ID NO: 4649 - protein, 515 aa, Solanum tuberosum
MGICASKGKPNNANNGHHGSGSGGVPTHRNEIQYTKSPGPEAQLHVRPPPSPKPAVRYDTILGKPYEDVKLHYTLGKELGRGQFGVTYLCTEIVTGQQYACKSISKKKLVTKADKDDMRREIKIMQHLSGQPNIVEFKGAYEDKGSVYLVMELCGGGELFDRIIAKGHYSERAAATMCRAIVNVVHVCNFMGVLHRDLKPENFLLSDKSENAALKITDFGLSVFIQEGKSYKDIVGSAYYVAPEVLRRCYGKEIDIWSAGVMLYILLSGVPPFWAETEKGIFDAILKGTIDFESKPWPSVSSSAKDLVQKMLTKDPKKRITAAQVLEHPWLKEGGVASDKPLEGAVLSRMKQFRAMNKLKKLALKVIAENLSAEEIHGLKAMFHNIDTDNSGTITYEELKSGLAKLGSKLTEAEVKQLMEAADVDGNGSIDYTEFITATMHKHRLERDENLYTAFQYFDKDGSGFITRDELEAAMQEHGIGDPSCIREIISEVDTDNDGRINYEEFCTMMRSGAK

SEQ ID NO: 4650 - DNA, 1596 bp, Arabidopsis thaliana
  CDS (1)..(1596)
atgggttgcttcagcagtaaacaccggaaaactcaaaacgacggcggagaaaaatcaatcccgatcaatccagttcaaacccatgtagtccccgagcatcgtaaacctcaaaccccaacaccaaaacccatgactcaaccaatccatcagcagatttcaacaccgtcttcaaatccagtctcagttcgagatccagatacgattttaggtaaaccattcgaagacatcaggaaattttacagcttggggaaagaattaggtcgaggtcaatttgggattacgtatatgtgtaaagagattggtactggtaacacttatgcttgcaaatcgattcttaagaggaagctaattagtaagcaagataaagaagatgtgaagagagagattcagataatgcagtatttgtctggacaacctaacattgttgagatcaaaggtgcttatgaagatagacaatctatacatttggttatggagttgtgtgctggtggtgagttgtttgataggattatagctcaaggtcattactctgagagagctgctgctggtatcattaggtctattgtcaatgttgttcagatttgtcattttatgggtgtggttcatcgagatctcaagcctgagaatttcttgctttcgagtaaagaggagaatgctatgcttaaagctactgatttcggtttgtccgtcttcatcgaagaaggaaaagtttaccgggatatagttgggagtgcttactacgttgctccagaagtattaaggcgaagttacggaaaagaaatcgacatttggagtgcaggtgtcattttatacatcctactcagcggtgtacctcctttttgggccgaaaatgagaaaggaatattcgatgaggtcataaaaggcgaaattgattttgtaagtgagccatggccttctatatctgaaagcgcgaaagatcttgttaggaagatgctaaccaaagacccgaagagacgaatcacggctgcacaggttcttgaacatccttggatcaaagggggagaagcaccagacaagcctattgatagcgctgtgttatcccgcatgaagcaattccgagcaatgaacaagcttaagaagctagctctaaaggttatcgcggagagtctatcagaagaggagattaaaggtcttaaaaccatgtttgcgaatatagataccgacaaaagcgggacaatcacttatgaagaactcaaaactgggctaactagacttgggtctagactctcggaaactgaagttaagcaactcatggaagccgctgacgtcgatggtaatggaacaatcgactactacgagtttatctctgcgacaatgcatagatacaaattagatcgagatgagcatgtatacaaagcattccaacactttgataaagacagcagcgggcacataactagagatgagttggaaagtgccatgaaggaatatggaatgggagatgaagctagcatcaaagaagttatatccgaagttgataccgacaatgatggaagaataaactttgaagaattttgcgcgatgatgagaagtggcagcacgcagccacaggggaaactgcttccattccattga

SEQ ID NO: 4651 - protein, 531 aa, Arabidopsis thaliana
MGCFSSKHRKTQNDGGEKSIPINPVQTHVVPEHRKPQTPTPKPMTQPIHQQISTPSSNPVSVRDPDTILGKPFEDIRKFYSLGKELGRGQFGITYMCKEIGTGNTYACKSILKRKLISKQDKEDVKREIQIMQYLSGQPNIVEIKGAYEDRQSIHLVMELCAGGELFDRIIAQGHYSERAAAGIIRSIVNVVQICHFMGVVHRDLKPENFLLSSKEENAMLKATDFGLSVFIEEGKVYRDIVGSAYYVAPEVLRRSYGKEIDIWSAGVILYILLSGVPPFWAENEKGIFDEVIKGEIDFVSEPWPSISESAKDLVRKMLTKDPKRRITAAQVLEHPWIKGGEAPDKPIDSAVLSRMKQFRAMNKLKKLALKVIAESLSEEEIKGLKTMFANIDTDKSGTITYEELKTGLTRLGSRLSETEVKQLMEAADVDGNGTIDYYEFISATMHRYKLDRDEHVYKAFQHFDKDSSGHITRDELESAMKEYGMGDEASIKEVISEVDTDNDGRINFEEFCAMMRSGSTQPQGKLLPFH

SEQ ID NO: 4652 - DNA, 1794 bp, Oryza sativa
  CDS (1)..(1794)
atgggtctctgccatggcaagtcggcggcggtgctggagccaacggtggaggaggaggaggagggggcgacgcgcgtagccgaggccgcggcggcgccggcgaagccagcgtcgcctgcgccttcggcggcggcggcggcggcgaagcccgggacgccgaagcagcacaagttcccgttctacctgccgagcccgctcccggcgtcgagctacaagggctcgccggcgaactcgagcgtggcgtcgacgcccgcgcgcggcgggttcaagcggccgttcccgccgccgtcgccggcgaagcacatccgcgcgctcctggcgcggcgccacggctcggtgaagccgaacgaggcgtccatcccggagtccggcgagcccggcgtggcgctggacaagggcttcggcttctccaggcacttcgccgccaagtacgagctcggccgcgaggttggccgcggccacttcggctacacctgcgccgccacctgcaagaagggcgagctcaagggcgacgacgtcgcggtcaaggtcatccccaaggccaagatgactactgctattgccattgaagatgtcaggagagaagtcagaatattgagttctttggcagggcacagcaacttagtgcagttttatgatgcttatgaggatgaagaaaatgtatatatagttatggagttatgcaaaggaggtgaactgctggacaggattttggctagaggtggaaaatattctgaggaagatgcaaaggttgttatgcgccaaatcctaagtgttgcttcattttgtcatcttcagggtgttgttcatcgggatctgaaaccagagaatttccttttctcgtcaaaggatgagaactctgccatgaaggtcatagacttcggtttgtctgactttgtaaagccagatgagaggcttaatgacattgtcggaagtgcatattatgttgctcctgaagtgctccatcgatcttatggcactgaggcagatatgtggagcattggagtaatagtgtatattttgctttgtggcagccgtcctttctgggcacgtactgagtcaggaatattccgagctgtgctgaaagcagaccctagttttgaggaagccccatggccaaccctctctgctgaagcaaaagactttgtaaggaggctgctcaataaagattaccgcaagaggatgactgctgcacaagccctctgtcatccatggattcgtggtactgaagaagtgaagcttcctttggacatgataatttataggcttatgagggcttacataagttcatcttctttacggagagctgcattgagggcccttgccaagacattgacaacagatcaaatctattacctaagagaacagtttgaattgataggcccaaacaagagcgatcttattactttgcaaaatttgaagacggccttgatgaagaactccacaaatgcaatgaaggattctagggtggttgactttgttaacacaatatccaatattcagtacagaaagttggattttgaggagttttctgctgctgccatcagtgtttaccagatggaaggtttggaaacctgggaacaacatgcccggcaagcgtacgagttctttgataaggagggtaaccgaccaattgtgatcgacgagctcgcatcgggacttggattgggtccttcggttcccctacatgttgttctccaagattggatcagacatcctgatggaaaactcagcttccttgggttcatgaaactattgcatggagtttcttcgcgtaccatcccaaaaacctga

SEQ ID NO: 4653 - protein, 597 aa, Oryza sativa
MGLCHGKSAAVLEPTVEEEEEGATRVAEAAAAPAKPASPAPSAAAAAAKPGTPKQHKFPFYLPSPLPASSYKGSPANSSVASTPARGGFKRPFPPPSPAKHIRALLARRHGSVKPNEASIPESGEPGVALDKGFGFSRHFAAKYELGREVGRGHFGYTCAATCKKGELKGDDVAVKVIPKAKMTTAIAIEDVRREVRILSSLAGHSNLVQFYDAYEDEENVYIVMELCKGGELLDRILARGGKYSEEDAKVVMRQILSVASFCHLQGVVHRDLKPENFLFSSKDENSAMKVIDFGLSDFVKPDERLNDIVGSAYYVAPEVLHRSYGTEADMWSIGVIVYILLCGSRPFWARTESGIFRAVLKADPSFEEAPWPTLSAEAKDFVRRLLNKDYRKRMTAAQALCHPWIRGTEEVKLPLDMIIYRLMRAYISSSSLRRAALRALAKTLTTDQIYYLREQFELIGPNKSDLITLQNLKTALMKNSTNAMKDSRVVDFVNTISNIQYRKLDFEEFSAAAISVYQMEGLETWEQHARQAYEFFDKEGNRPIVIDELASGLGLGPSVPLHVVLQDWIRHPDGKLSFLGFMKLLHGVSSRTIPKT

SEQ ID NO: 4654 - DNA, 1566 bp, Solanum lycopersicum
  CDS (1)..(1566)
atgggtatttgtgctagtaaaggtaaacctaataatgctaataatgggcaccatggatcaggatcaggaggagttccaattcatagaaatgagattcagtataccaaatctccagggcctgaagctcaattacatgtgagacctccaccaagcccaaaaccagctgtgaggtatgatactattcttggtaagccatatgaagatgttaagttgcactatactcttggtaaagaattgggtaggggtcaatttggtgttacatatctttgtactgaaattgcaactggtcaacaatatgcttgtaaatcgatatcgaaaaagaagcttgttactaaggctgataaggatgatatgaggagggagattaagattatgcagcatttgagtggacaacctaatattgttgaatttaaaggtgcttatgaggataaaggttcagtgtatcttgtgatggagttgtgtggagggggagagctattcgataggattatagcaaaggggcattacagtgaaagagctgctgcaacaatgtgtagggctattgtcaatgttgtgcacgtttgccattttatgggcgtgttgcatcgtgatctcaagcctgaaaactttttgttgtctgataagagtgaaaatgctgctctaaagattactgattttgggctgtcggtattcattcaagaaggtaagtcgtacaaagatatagttgggagtgcttactatgttgcccctgaggttctaaggaggtgttatggcaaggaaatagacatttggagtgcaggtgttatgctttatatactactcagtggtgtgcctccattttgggcagaaaccgagaagggtatatttgatgccatacttaaagggaccattgactttgaaagcaagccttggccatctgtatcaagtagtgccaaggaccttgtacagaagatgctgactaaagatccaaagaaacggattacagctgcacaggttcttgagcatccttggctgaaggaaggtggtgttgcatcagacaaaccattagatggtgctgtcctatcaagaatgaagcaattcagagctatgaacaaactcaagaaactcgctttgaaggtcattgccgagaatctctctgcggaagaaattcacgggctcaaagcaatgttccacaatattgacactgataatagtggcactataacttatgaagaactgaagagtggattggctaaacttgggtcaaagctcaccgaggctgaagtcaagcaattgatggaagctgctgatgtagatggaaatggctcaatcgactacactgaattcatcaccgccaccatgcataagcacaggctagaaagagacgaaaatctatatactgcatttcagtatttcgataaagatagcagtgggttcattacaagagatgaactcgaggctgctatggaagaacatggaataggtgatccatcctgtattagggaaatcatatctgaagtggacacagacaatgatggaagaatcaattatgaggaattctgtacaatgatgagaagtggagccaaacaaccaggcaaggtcttctag

SEQ ID NO: 4655 - protein, 521 aa, Solanum lycopersicum
MGICASKGKPNNANNGHHGSGSGGVPIHRNEIQYTKSPGPEAQLHVRPPPSPKPAVRYDTILGKPYEDVKLHYTLGKELGRGQFGVTYLCTEIATGQQYACKSISKKKLVTKADKDDMRREIKIMQHLSGQPNIVEFKGAYEDKGSVYLVMELCGGGELFDRIIAKGHYSERAAATMCRAIVNVVHVCHFMGVLHRDLKPENFLLSDKSENAALKITDFGLSVFIQEGKSYKDIVGSAYYVAPEVLRRCYGKEIDIWSAGVMLYILLSGVPPFWAETEKGIFDAILKGTIDFESKPWPSVSSSAKDLVQKMLTKDPKKRITAAQVLEHPWLKEGGVASDKPLDGAVLSRMKQFRAMNKLKKLALKVIAENLSAEEIHGLKAMFHNIDTDNSGTITYEELKSGLAKLGSKLTEAEVKQLMEAADVDGNGSIDYTEFITATMHKHRLERDENLYTAFQYFDKDSSGFITRDELEAAMEEHGIGDPSCIREIISEVDTDNDGRINYEEFCTMMRSGAKQPGKVF

SEQ ID NO: 4656 - DNA, 1512 bp, Arabidopsis thaliana
  CDS (1)..(1512)
atgggaaactgttgcagatctcccgcagcagttgctagagaagacgtgaaatccaactattccggccacgatcacgcccgcaaagacgccgccggcggtaaaaaatcggcgccgattcgagttctaagcgatgttcccaaggaaaacatcgaggaccgttacttactcgacagagaactcggccgcggcgagtttggtgtcacttacctctgtatcgagaggtcctcgcgtgacctactcgcttgcaaatcgatctccaagaggaagcttagaactgctgtggatattgaagatgttaaaagagaagtagcgattatgaagcatttgcctaagagttcgagtattgttactttgaaagaagcttgtgaggatgataatgctgtgcatttggttatggagctttgtgaaggtggcgagcttttcgatcggattgttgcgagaggtcattatacggagcgtgctgctgctggtgttactaagactattgttgaggttgtgcagctttgtcataagcatggtgtgattcatagagatttgaagcccgagaactttttgtttgctaataagaaggagaactcgcctttgaaagctattgattttggattgtcgattttcttcaagccaggtgagaaattctctgagattgttgggagtccatattacatggcacctgaggtgcttaagcggaattatggacccgaaatagatatttggagtgctggagtgattctttatattctcttgtgtggagttcctccgttctgggcagagtcagaacagggagttgctcaggctattctgcgtggagtaattgattttaagagggaaccgtggccaaacatttctgagaccgctaagaatctagtcagacaaatgttagagcctgatccaaagcgtcggctgactgcaaagcaagtgcttgagcacccatggattcagaacgcaaagaaagctcccaatgttcctcttggagatgttgtgaagtcgaggttgaagcaattttcagtgatgaaccgattcaagagaaaagctttaagggttattgccgaatttttatctacggaagaagtagaagacatcaaagtaatgttcaacaagatggatactgataatgatggtatagtttccattgaggagttgaaagccggacttcgtgattttagtacacagctagcggaatcagaagttcagatgcttattgaagcggtggatactaaaggaaaaggaactctagactatggagaatttgtagcagtgtctctccacctgcaaaaggagctttgtgacgccttaaaggaagatggaggagatgactgtgtggatgtcgccaatgatatattccaagaagttgacacagacaaggatgggagaataagctacgaagagtttgcggcaatgatgaaaacaggaacggattggagaaaggcgtctcgtcattactcaagagggagattcaatagcctaagcatcaagctaatgaaggacgggtctttgaacctaggcaacgaatag

SEQ ID NO: 4657 - protein, 503 aa, Arabidopsis thaliana
MGNCCRSPAAVAREDVKSNYSGHDHARKDAAGGKKSAPIRVLSDVPKENIEDRYLLDRELGRGEFGVTYLCIERSSRDLLACKSISKRKLRTAVDIEDVKREVAIMKHLPKSSSIVTLKEACEDDNAVHLVMELCEGGELFDRIVARGHYTERAAAGVTKTIVEVVQLCHKHGVIHRDLKPENFLFANKKENSPLKAIDFGLSIFFKPGEKFSEIVGSPYYMAPEVLKRNYGPEIDIWSAGVILYILLCGVPPFWAESEQGVAQAILRGVIDFKREPWPNISETAKNLVRQMLEPDPKRRLTAKQVLEHPWIQNAKKAPNVPLGDVVKSRLKQFSVMNRFKRKALRVIAEFLSTEEVEDIKVMFNKMDTDNDGIVSIEELKAGLRDFSTQLAESEVQMLIEAVDTKGKGTLDYGEFVAVSLHLQKELCDALKEDGGDDCVDVANDIFQEVDTDKDGRISYEEFAAMMKTGTDWRKASRHYSRGRFNSLSIKLMKDGSLNLGNE

SEQ ID NO: 4658 - DNA, 1545 bp, Ipomoea batatas
  CDS (1)..(1545)
atgggtaaccgtacaagcagacataagcatggtgaaaagcacagatcagaagctggaagccatcagactcacattgagtacacaaagtcacctgggcagggagctggactgcctgtacggccaccatcaatcccaaaatcagtttcaaagtcagatgcaattctgggtaaggcatatgaggatgttagggcacattacagtctggggaaagaactgggtaggggtcaatttggggttacctatttgtgtactgagattagaactggaaagcagtatgcctgcaagtcaatttccaagaaaaagcttgtgactaagggggataaggatgatatgaggagggaggttcagattatgcagcacttgagtgggcagcctaatattgttgagttcaagggggcttatgaggatgctaattctgtgtatcttgtgatggagttgtgtgctggtggagagcttttcgatcggattattgctaaggggcactatagcgaaagggctgctgcctctctttgcaggtctatagtgaatgttgttcatacttgccattttatgggcgtgatgcaccgcgatttgaagcccgagaatttcttgttgtctgataaaactgaaaatgctgccttgaaggctactgattttggcttatcagtgttcattgaagaaggaagggtgtataaggatttagtcgggagtgcttactatgttgctcccgaggtcttggggagaaagtatgggaaggaagcggatgtttggagtgcaggtgttatgttgtatattttactcagtggtgtgcctcccttctgggctgaaactgagcgggggatctttaatgctatacttaaaggagaactcgacttccaaacgaaaccttggccttctatatcgagcattgccaaggacctagtacgagggatgctagccccagacccgaagagacgccttactgctgcccaggttcttgagcatccatggatgcgagaagatggagaagcatctgacagaccactagatagcgctgttctctcaagaatgaagcaattcagagcaatgaacaaactcaagaaacttgccctgaagtttattgcagaaaatctctcagaagaagaaattcatggactgaaagcaatgttcacgaatatcgacactgacaacagtggtacaattacatacgaagaactgaagaagggattggcccaactcggggcaaatctcacagaggctgaagttaagcagttgatggaagctgctgatgtagatggaaatggctcgatagactacatcgaattcatcactgctacaatgcacaagcacaggctagaaagagaagaaaatctatacaaagcatttcagtattttgataaagatagcagtggatttatcacgagagatgaactagagactgctatgaaggaacacggaatagctgatgcagcaactataaaggaaataatatctgaagtcgatgcagatcatgatggaagaatcaactatgaagagttttgcacaatgatgagatcaggaaccaaacagcaagccaagctgttctaa

SEQ ID NO: 4659 - protein, 514 aa, Ipomoea batatas
MGNRTSRHKHGEKHRSEAGSHQTHIEYTKSPGQGAGLPVRPPSIPKSVSKSDAILGKAYEDVRAHYSLGKELGRGQFGVTYLCTEIRTGKQYACKSISKKKLVTKGDKDDMRREVQIMQHLSGQPNIVEFKGAYEDANSVYLVMELCAGGELFDRIIAKGHYSERAAASLCRSIVNVVHTCHFMGVMHRDLKPENFLLSDKTENAALKATDFGLSVFIEEGRVYKDLVGSAYYVAPEVLGRKYGKEADVWSAGVMLYILLSGVPPFWAETERGIFNAILKGELDFQTKPWPSISSIAKDLVRGMLAPDPKRRLTAAQVLEHPWMREDGEASDRPLDSAVLSRMKQFRAMNKLKKLALKFIAENLSEEEIHGLKAMFTNIDTDNSGTITYEELKKGLAQLGANLTEAEVKQLMEAADVDGNGSIDYIEFITATMHKHRLEREENLYKAFQYFDKDSSGFITRDELETAMKEHGIADAATIKEIISEVDADHDGRINYEEFCTMMRSGTKQQAKLF

SEQ ID NO: 4660 - DNA, 1629 bp, Medicago sativa
  CDS (1)..(1629)
atggggtgtttgttaagtaaagacaaagattcagaacaagaacacaacaatggtggttatagatatgctgaatcttctggtatgcacaatcataggaacaatcatgaacaagtcaacacatcaagaacagcaccaacaagttcttatcaacctcaaataccaaccaagccttcatcaatttctgctccaagtccaaaacctcttatcaagcaagacacaaacacaatcctaggaaaaggtttggaagatgtgaaacaattctacacactaggtaaagaattaggtagaggccaattcggagtaacgtttctatgcaccgagaattcaactggattgctttatgcttgcaagtcaatttccaagaggaaacttgtgagtaaatctgatagggaagatataaagagagagattcagatcatgcaacatttgagtggtcaaccaaatattgttgaatttaaaggagcttatgaagataggaattcagttcatgttgttatggaactttgtgctggtggtgaactttttgataggatcattgctaaaggacattatagtgaaaaagctgctgcttctatttgtagacagattgttaatgttgtgaatatttgtcattttatgggagttatgcatagggatctcaagccagagaatttcttgttggctagtaaagatgaaaatgcacttcttaaggccactgattttggtttgtctgttttcattgaagaaggaagggtgtatcgcgatatagttggaagtgcttattatgtggctccagaagttcttcgtccgagatgcggaaaggaaatagatatatggagtgcaggagttatactatatatcttacttagcggtgtacctccattttgggctgagactgaaaagggaatatttgatgcaatattggaaggtcatattgattttgaaagtgaaccatggcctaaaatttcagacagcgccaaggatcttgttcgtaaaatgcttatacaggaaccgaagaaacgcattactgctgcacaggttctagagcacccttggattaaaggtggaaatgcttctgataagcctatagacagtgcagttctttctagaatgaagcaattcagagctatgaataaactaaagaaacttgcattgaaggtcattgctgagaatatgtctgaagaagaaatccgaggtttgaaggcgatgtttacaaatatggacacagacaatagtggtacaatcacctatgaagaactaaaagcaggattgcaaagacttggctcaaagctttcagaagctgaggttaagcaactcatggaagctgctgatgtagatggaaatggcacaattgattgcattgaattcatcactgctacaatgcatagacacaagttagaaagagatgaccatctttataaggcatttcaatattttgataaagacagcagtgggtttattacaagagatgaactggaaactgcaatgaaagaatatggtatgggagatgatgccacaatcaaggaaattatatctgaagttgatacaattatatctgaagtcgacacagatcatgatggtagaatcaactatgaagaattctgtgcaatgatgagaagtggaaaccaacagcaagttaagctattctaa

SEQ ID NO: 4661 - protein, 542 aa, Medicago sativa
MGCLLSKDKDSEQEHNNGGYRYAESSGMHNHRNNHEQVNTSRTAPTSSYQPQIPTKPSSISAPSPKPLIKQDTNTILGKGLEDVKQFYTLGKELGRGQFGVTFLCTENSTGLLYACKSISKRKLVSKSDREDIKREIQIMQHLSGQPNIVEFKGAYEDRNSVHVVMELCAGGELFDRIIAKGHYSEKAAASICRQIVNVVNICHFMGVMHRDLKPENFLLASKDENALLKATDFGLSVFIEEGRVYRDIVGSAYYVAPEVLRPRCGKEIDIWSAGVILYILLSGVPPFWAETEKGIFDAILEGHIDFESEPWPKISDSAKDLVRKMLIQEPKKRITAAQVLEHPWIKGGNASDKPIDSAVLSRMKQFRAMNKLKKLALKVIAENMSEEEIRGLKAMFTNMDTDNSGTITYEELKAGLQRLGSKLSEAEVKQLMEAADVDGNGTIDCIEFITATMHRHKLERDDHLYKAFQYFDKDSSGFITRDELETAMKEYGMGDDATIKEIISEVDTIISEVDTDHDGRINYEEFCAMMRSGNQQQVKLF

SEQ ID NO: 4662 - DNA, 1545 bp, Cucumis sativus
  CDS (1)..(1545)
atgggccaccccctcgaccactccgacgcccaccaccgacctccctctaacggcgtcatcaaagttctcccacccgattccgacccttctcttccaccgcccctgcccaaacaacttcccacctcctccgccccgcccgcccttggccgcgttctggctcgtcccttttccgacgtccgctccttttactccttccgtggcgaactgggtcgtggccaatttggtgttacttacttagtaacacacaaggaaacgaaacaggattttgcttgtaaatcaatcgctactagaaaattgattgatcaggacgatgttgaagatgttcgtcgtgaggttcagattatgcatcatcttactggccaccctcacattgttgagcttaaagaagtttatgaagaccggcattatgtcaatttgattatggagctttgcgccggcggtgagttgttcgatcggattattgctaaaggccactattctgaatgcaccgcagcctccctttgccgccagattgtgacggtagttcataattgtcactccatgggagttatgcacagagacttgaagcccgagaacttcttgtttctcagtgctgatgagaattcacctctcaaggctacggattttgggctttccgtcttcttcaaaccaggtgatgtttttaaagatctagttggaagtgcatactacgtagctccagaagttcttcgacgaagatatggtcctgaggcggctgtttggagtgctggtgtcatactatacatcctactcagtggagttcctcctttctgggcagagaatgatcaaggtatttttgatgctgttcttcggggacatattgacttctcatcagatccttggccttccatatcaagtggtgccaaagatctgataagaaaactcttgcattctgatcctaaagagcgattatccgccattgaagccctaaatcatccatggatgaaagaagatggggaagcttctgacaagcctcttgatattgctgttttgactagaatgaaacagtttagagcaatgaacaaactcaagaaagtcgctcttaaggtaattgctgaaaatctttctgaagaagagattgtgggactaaaggagatgttcaagtcgatggatactgataatagtggaactatcacttttgaggagttaaaggccggtcttcctaagctgggtacaaagctttctgagtctgaagtgaggcagctgatggaagcggcagatgtggatggaaatgggtcgatcgactacatcgagttcattactgctgctatgcacatgaacagagtagaaagagaggatcacttatttaaagcttttgagtactttgacaaagacaagagcggatatatcacaatggaggagttggagactgcccttaagaagtacaatatgggtgatgaaacaacaataaaggagatcattgcagaagttgacactgataatgacggacgcataaactacgatgaagtcgttgcaatgatgaggaaaggcaatcaggaattgacgacaaccagtcggcaaaaatga

SEQ ID NO: 4663 - protein, 514 aa, Cucumis sativus
MGHPLDHSDAHHRPPSNGVIKVLPPDSDPSLPPPLPKQLPTSSAPPALGRVLARPFSDVRSFYSFRGELGRGQFGVTYLVTHKETKQDFACKSIATRKLIDQDDVEDVRREVQIMHHLTGHPHIVELKEVYEDRHYVNLIMELCAGGELFDRIIAKGHYSECTAASLCRQIVTVVHNCHSMGVMHRDLKPENFLFLSADENSPLKATDFGLSVFFKPGDVFKDLVGSAYYVAPEVLRRRYGPEAAVWSAGVILYILLSGVPPFWAENDQGIFDAVLRGHIDFSSDPWPSISSGAKDLIRKLLHSDPKERLSAIEALNHPWMKEDGEASDKPLDIAVLTRMKQFRAMNKLKKVALKVIAENLSEEEIVGLKEMFKSMDTDNSGTITFEELKAGLPKLGTKLSESEVRQLMEAADVDGNGSIDYIEFITAAMHMNRVEREDHLFKAFEYFDKDKSGYITMEELETALKKYNMGDETTIKEIIAEVDTDNDGRINYDEVVAMMRKGNQELTTTSRQK

SEQ ID NO: 4664 - DNA, 1824 bp, Zea mays
  CDS (1)..(1824)
atggggcagtgctacgggaaggcaggcggcgcgtcgtcgcggcgggcggaccacgacgacgcggtcgcgccgccgtccccgctgccggccaacggcgcgccgacgccgccgcagcagcccgccacgcccgggcgccgcaagtccggatcggccacgccggtgcaccaccaggcggcgacgaccgcctggcccagcccgtaccccgccggcggggccagcccgctccccgccggcgtgtcgccgtcgcccgccaggtccacgccccgcaggttcttcaagcggcccttcccgccgccctcgcccgccaagcacatcaaggccacgctcgccaagcgcctcggcgggggcaagcccaaggagggcaccataccggaggagggcggcgccggcgtggccgccgactccgccgaggccgagcgcccgttggacaagacgttcggcttcgccaacaacttcggggccaagtacgacctcgggaaggaggtcgggaggggacactttggccacacctgctccgccctggtcaagaagggcgagtacaagggccatgccgtagccgtcaagatcatctccaaagctaagatgacgacagccatttccattgaagatgttcgtagggaagtcaggattttgaaagctctatcagggcacaataatctcgtcaaattctatgatgcatgtgaggacgccctcaatgtctacattgtcatggagttatgtgaaggtggagagttgctagatagaattttggctagaggcgggagatatacagaagaagatgccaaagctatcgttgtacagattttgagtgtagtgtccttctgtcatcttcagggagtagttcatcgtgatttgaagccagagaattttcttttcgcaacaagagatgaaagcgctcctatgaagttaattgactttggtctgtcagattttattagaccagatgaaaggctcaatgatattgttgggagcgcatattatgtcgctccagaggttctacacagatcgtacagtatggaagcagacatttggagtataggtgttataacatacattctgctctgtggctgtcggccattttgggcaaggacagaatctgggatctttcggttcgtattaagggctgatcccaactttgacgattcaccatggccttcagtatcggctgaagctaaggattttgtgaagagatttgtgaacaaggattaccgtaaaagaatgactgctgtccaagcactgactcacccttggttacgagatgaacaaaggcaaattcaattggacatactcgttttcagattagttaagcaatatcttcgtgctactcctcttaaacgtttggcattaaaggcactatctaaggctttaagggaggatgaactgttgtatcttagattgcagtttaagctgctcgagcccagagacgggctcgtgtcgctcgacaactttcggacggctctgacgagatacgtaactgacgccatgagagaatcaagggttcttgagtttttgcacgcgttggacccgcttgcgtacagaaagatggacttggaagaattctgtgcggcagcaatcagcccgtaccagctggaggctttggaaagctgggaagaaatcgctggaacagcttttcagcacttcgaacaggagggcaaccgagttatatctgtggaggagttggcgcaggaactaaacctcgccccgactcactactccatcgtgcaagactggatcagaaagtccgacggcaagcttaactttcttgggttcaccaaatttttgcacggtgtcacgatacggggctcaaacacgagacgacactaa

SEQ ID NO: 4665 - protein, 607 aa, Zea mays
MGQCYGKAGGASSRRADHDDAVAPPSPLPANGAPTPPQQPATPGRRKSGSATPVHHQAATTAWPSPYPAGGASPLPAGVSPSPARSTPRRFFKRPFPPPSPAKHIKATLAKRLGGGKPKEGTIPEEGGAGVAADSAEAERPLDKTFGFANNFGAKYDLGKEVGRGHFGHTCSALVKKGEYKGHAVAVKIISKAKMTTAISIEDVRREVRILKALSGHNNLVKFYDACEDALNVYIVMELCEGGELLDRILARGGRYTEEDAKAIVVQILSVVSFCHLQGVVHRDLKPENFLFATRDESAPMKLIDFGLSDFIRPDERLNDIVGSAYYVAPEVLHRSYSMEADIWSIGVITYILLCGCRPFWARTESGIFRFVLRADPNFDDSPWPSVSAEAKDFVKRFVNKDYRKRMTAVQALTHPWLRDEQRQIQLDILVFRLVKQYLRATPLKRLALKALSKALREDELLYLRLQFKLLEPRDGLVSLDNFRTALTRYVTDAMRESRVLEFLHALDPLAYRKMDLEEFCAAAISPYQLEALESWEEIAGTAFQHFEQEGNRVISVEELAQELNLAPTHYSIVQDWIRKSDGKLNFLGFTKFLHGVTIRGSNTRRH

SEQ ID NO: 4666 - DNA, 1647 bp, Marchantia polymorpha
  CDS (1)..(1647)
atgggcaactgcgtgggaggccatagtgatcgtaagaatgcgctcaatcccaacgagcctgcggcgacgaatgtgcaacgcggaacgggtgctcctcaaggttcccacggaggttcaggtgccgctggtgtatccgctcaagcatctcatccagctccgctgggcggcatctctgccaaacaaaagcccacgttgactggcaatgtgctcggcaggccactggaagatgtgcgatccatttacaccctcggacgggaactgggtcgtggtcagtttggtgtcacgcatttgtgtacgcacaaggttacaggtgagcttttagcctgcaagtcaattgcgaagaggaagttgaccaataaggatgacgtagaggatgttcggagggaagtgcagatcatgcaccacttagaggggcagaagaacattgtcgaattgaagggggcctatgaggataaacacaacgtgcatctcgtcatggagctttgtgctggcggagaactcttcgaccgcattattcagcggggccactacagtgagagggctgctgcagctctatgtagaactatagtgcaagtggttcagacgtgccattctctgggagttatgcaccgggatctgaagcccgagaattttctgcttgctaacaagaaggaggatgcacccctgaaggcgacggattttggtctttctgtcttcttcaagcctggagaagtgtttacagatatcgttggaagtgcttactacgtggcaccagaggttttgcgtcgtaactatgggccagaggctgatgtttggagtgccggagtcattctttacattcttttgtgcggagtccctcctttctgggcagaaaccgaacaaggtatttttgatgccgtaatgcacggtcatattgatttcactagtgatccttggccttcaatttctcaaaaggcgaaagatctggtaaagaggatgctcaaacagaacccaaaggagcgattgacggcccatgaagttttaagtcacccatggattagtgttgacggagaggcaccagacaaaccacttgacaacgccgtgttgtctagattgaagcaattcaccgctatgaacaagctcaagaaacttgctctgaaggttatcgcagagagtctctctgaagaagagatcatgggattgaaggagatgtttaagagtatggacacagacaacagtggtacaatcacgttcgaggagttgaaggatggtcttcaaaagcagggatcaaacctggcagagtcagaagtgcggcagctaatggcagctgctgatgttgatggtgatggtactattgattatttggagtttatcacggcaaccatgcatctgaataagatagacaaagaggatcatctgtatgctgccttccaacactttgatggggacaacagtgggttcatcaccatggaagagcttgaacaggctttaattaagcacgggatgggagatcctgatactctgaaagaaattattagggaggttgacactgatcatgatggacgaatcaactacgacgagttcgttgccatgatgcgtaaaggtacccctggacaccaagagggccacaggaggagtataagtaatatggcacctgtaggggccccgaggcaacaccatcacaaatga

SEQ ID NO: 4667 - protein, 548 aa, Marchantia polymorpha
MGNCVGGHSDRKNALNPNEPAATNVQRGTGAPQGSHGGSGAAGVSAQASHPAPLGGISAKQKPTLTGNVLGRPLEDVRSIYTLGRELGRGQFGVTHLCTHKVTGELLACKSIAKRKLTNKDDVEDVRREVQIMHHLEGQKNIVELKGAYEDKHNVHLVMELCAGGELFDRIIQRGHYSERAAAALCRTIVQVVQTCHSLGVMHRDLKPENFLLANKKEDAPLKATDFGLSVFFKPGEVFTDIVGSAYYVAPEVLRRNYGPEADVWSAGVILYILLCGVPPFWAETEQGIFDAVMHGHIDFTSDPWPSISQKAKDLVKRMLKQNPKERLTAHEVLSHPWISVDGEAPDKPLDNAVLSRLKQFTAMNKLKKLALKVIAESLSEEEIMGLKEMFKSMDTDNSGTITFEELKDGLQKQGSNLAESEVRQLMAAADVDGDGTIDYLEFITATMHLNKIDKEDHLYAAFQHFDGDNSGFITMEELEQALIKHGMGDPDTLKEIIREVDTDHDGRINYDEFVAMMRKGTPGHQEGHRRSISNMAPVGAPRQHHHK

SEQ ID NO: 4668 - DNA, 1647 bp, Marchantia polymorpha
  CDS (1)..(1647)
atgggcaactgcgtgggaggccatagtgatcgtaagaatgcgctcaatcccaacgagcctgcggcgacgaatgtgcaacgcggaacgggtgctcctcaaggttcccacggaggttcaggtgccgctggtgtatccgctcaagcatctcatccagctccgctgggcggcatctctgccaaacaaaagcccacgttgactggcaatgtgctcggcaggccactggaagatgtgcgatccatttacaccctcggacgggaactgggtcgtggtcagtttggtgtcacgcatttgtgtacgcacaaggttacaggtgagcttttagcctgcaagtcaattgcgaagaggaagttgaccaataaggatgacgtagaggatgttcggagggaagtgcagatcatgcaccacttagaggggcagaagaacattgtcgaattgaagggggcctatgaggataaacacaacgtgcatctcgtcatggagctttgtgctggcggagaactcttcgaccgcattattcagcggggccactacagtgagagggctgctgcagctctatgtagaactatagtgcaagtggttcagacgtgccattctctgggagttatgcaccgggatctgaagcccgagaattttctgcttgctaacaagaaggaggatgcacccctgaaggcgacggattttggtctttctgtcttcttcaagcctggagaagtgtttacagatatcgttggaagtgcttactacgtggcaccagaggttttgcgtcgtaactatgggccagaggctgatgtttggagtgccggagtcattctttacattcttttgtgcggagtccctcctttctgggcagaaaccgaacaaggtatttttgatgccgtaatgcacggtcatattgatttcactagtgatccttggccttcaatttctcaaaaggcgaaagatctggtaaagaggatgctcaaacagaacccaaaggagcgattgacggcccatgaagttttaagtcacccatggattagtgttgacggagaggcaccagacaaaccacttgacaacgccgtgttgtctagattgaagcaattcaccgctatgaacaagctcaagaaacttgctctgaaggttatcgcagagagtctctctgaagaagagatcatgggattgaaggagatgtttaagagtatggacacagacaacagtggtacaatcacgttcgaggagttgaaggatggtcttcaaaagcagggatcaaacctggcagagtcagaagtgcggcagctaatggcagctgctgatgtggatggaaatggcactattgactacttggagttcataacggcaaccatgcacttgaataagatagagaaggaagatcatctttacgctgcctttcagcattttgatgaggacagcagtgggttcatcaccatggaagagcttgaacaggctttaattaagcacgggatgggagatcctgatactctgaaagaaattattagggaggttgacactgatcatgatggacgaatcaactacgacgagttcgttgccatgatgcgtaaaggtacccctggacaccaagagggccacaggaggagtataagtaatatggcacctgtaggggccccgaggcaacaccatcacaaatga

SEQ ID NO: 4669 - protein, 548 aa, Marchantia polymorpha
MGNCVGGHSDRKNALNPNEPAATNVQRGTGAPQGSHGGSGAAGVSAQASHPAPLGGISAKQKPTLTGNVLGRPLEDVRSIYTLGRELGRGQFGVTHLCTHKVTGELLACKSIAKRKLTNKDDVEDVRREVQIMHHLEGQKNIVELKGAYEDKHNVHLVMELCAGGELFDRIIQRGHYSERAAAALCRTIVQVVQTCHSLGVMHRDLKPENFLLANKKEDAPLKATDFGLSVFFKPGEVFTDIVGSAYYVAPEVLRRNYGPEADVWSAGVILYILLCGVPPFWAETEQGIFDAVMHGHIDFTSDPWPSISQKAKDLVKRMLKQNPKERLTAHEVLSHPWISVDGEAPDKPLDNAVLSRLKQFTAMNKLKKLALKVIAESLSEEEIMGLKEMFKSMDTDNSGTITFEELKDGLQKQGSNLAESEVRQLMAAADVDGNGTIDYLEFITATMHLNKIEKEDHLYAAFQHFDEDSSGFITMEELEQALIKHGMGDPDTLKEIIREVDTDHDGRINYDEFVAMMRKGTPGHQEGHRRSISNMAPVGAPRQHHHK
